(19) United States
(12) Patent Application Publication
(10) Pub. No.: US 2023/0330215 A1
(43) Pub. Date: Oct. 19, 2023

(54) SARS-COV-2 VACCINES

(71) Applicant: Gritstone bio, Inc., Emeryville, CA (US)

(72) Inventors: Roman Yelensky, Newton, MA (US); Minh Duc Cao, Belmont, MA (US); Mike Zhong, Melrose, MA (US); Justin Helbert, Boston, MA (US); Karin Jooss, San Diego, CA (US); Ciaran Daniel Scallan, San Francisco, CA (US); Leonid Gitlin, Foster City, CA (US); Amy Rachel Rappaport, Daly City, CA (US)

(21) Appl. No.: 18/057,171

(22) Filed: Nov. 18, 2022

Related U.S. Application Data
(63) Continuation of application No. PCT/US2021/033275, filed on May 19, 2021.
(60) Provisional application No. 63/139,292, filed on Jan. 19, 2021.
(60) Provisional application No. 63/047,789, filed on Jul. 2, 2020.
(60) Provisional application No. 63/027,283, filed on May 19, 2020.

(51) Int. Cl. A61K 39/215; A61P 37/04

(52) U.S. Cl. CPC A61K 39/215; A61P 37/04; A61K 2039/605

(57) ABSTRACT

Disclosed herein are vaccine compositions that include SARS-CoV-2 MHC epitope-encoding cassettes and/or full-length SARS-CoV-2 proteins. Also disclosed are nucleotides, cells, and methods associated with the compositions including their use as vaccines.

### CROSS REFERENCE TO RELATED APPLICATIONS

[0001] This application is a continuation of International Application No. PCT/US2021/033275, filed May 19, 2021, which claims the benefit of U.S. Provisional Application Nos. 63/027,283 filed May 19, 2020, 63/047,789 filed Jul. 2, 2020, and 63/139,292 filed Jan. 19, 2021, each of which is hereby incorporated in its entirety by reference for all purposes.

### SEQUENCE LISTING

[0002] The instant application contains a Sequence Listing which has been submitted electronically in XML format and is hereby incorporated by reference in its entirety. The accompanying sequence listing .xml file is named GSO-091WOC1 was created on Mar. 28, 2023, and is 40,177,659 bytes in size.

### BACKGROUND

[0003] Severe acute respiratory syndrome corona virus 2 (SARS-CoV-2) is the virus strain responsible for the Coronavirus Disease 2019 (Covid-19) pandemic. As of Apr. 15, 2020, the virus has infected over 2 million people and caused about 140,000 deaths worldwide. A CD8+ T cell response may be important for COVID-19 for two reasons in a coronavirus context. First is the recurrent observation in pre-clinical models that SARS vaccines that only stimulate antibody responses are often associated with pulmonary inflammation, independent of viral clearance. This has been observed in both rodents and non-human primates (NHP), and the current consensus is that it is caused by an imbalanced immune response, and is likely to be solved by using vaccines that drive a balanced antibody and CD8+ T cell (Th1) response (Consensus considerations on the assessment of the risk of disease enhancement with COVID-19 vaccines: Outcome of a Coalition for Epidemic Preparedness Innovations (CEPI)/Brighton Collaboration (BC) scientific working meeting, Mar. 12-13, 2020). Secondly, coronaviruses are evidently mutating frequently and crossing from animal reservoirs into humans, with three epidemics/pandemics over the last 18 years (SARS in 2002, MERS in 2012, now COVID-19). Antibody responses are often against highly mutable proteins (such as the Spike protein of SARS-CoV-2) which change significantly between strains and isolates, whereas T cell epitopes often derive from more evolutionarily conserved proteins. T cell memory is also generally more durable than B cell memory and thus CD8+ T memory against SARS-CoV-2 may provide longer, and better protection against future SARS variants. Many vaccines have demonstrated an ability to drive antibody responses in NHP and humans, but commonly used modalities such as protein/peptide and mRNA vaccines have not stimulated meaningful CD8+ T cell responses in these species.

[0004] An additional question for antigen vaccine design in infectious disease settings is which of the many proteins present generate the “best” therapeutic antigens, e.g., antigens that can stimulate immunity.

[0005] In addition to the challenges of current antigen prediction methods certain challenges also exist with the available vector systems that can be used for antigen delivery in humans, many of which are derived from humans. For example, many humans have pre-existing immunity to human viruses as a result of previous natural exposure, and this immunity can be a major obstacle to the use of recombinant human viruses for antigen delivery in vaccination strategies, such as in cancer treatment or vaccinations against infectious diseases. While some progress has been made in vaccinations strategies addressing the above problems, improvements are still needed, particularly for clinical applications, such as improved vaccine potency and efficacy, such as the need for a SARS-CoV-2 vaccine that stimulates balanced B and T cell immunity in humans, including the elderly.

### SUMMARY

[0006] Provided for herein is a composition for delivery of an antigen expression system, comprising: the antigen expression system, wherein the antigen expression system comprises: (a) optionally, one or more vectors, the one or more vectors comprising: a vector backbone, wherein the backbone comprises: (i) at least one promoter nucleotide sequence, and (ii) at least one polyadenylation (poly(A)) sequence; and (b) an antigen cassette, optionally wherein the antigen cassette is inserted into the vector backbone when present, and wherein the antigen cassette comprises: (i) at least one SARS-CoV-2 derived nucleic acid sequence encoding an immunogenic polypeptide, wherein the immunogenic polypeptide comprises:
[0007] at least one MHC class I epitope comprising a polypeptide sequence as set forth in Table A,
[0008] at least one MHC class II epitope comprising a polypeptide sequence as set forth in Table B,
[0009] at least one MHC class I epitope comprising a polypeptide sequence as set forth in Table C, optionally wherein the at least one MHC I epitope is present in a concatenated polypeptide sequence as set forth in SEQ ID NO:57 or SEQ ID NO:58,
[0010] at least one polypeptide sequence as set forth in Table 10, or an epitope-containing fragment thereof, optionally wherein the at least one polypeptide sequence is present in a concatenated polypeptide sequence as set forth in SEQ ID NO:92,
[0011] at least one polypeptide sequence as set forth in Table 12A, Table 12B, or Table 12C, or an epitope-containing fragment thereof, optionally wherein the at least one polypeptide sequence is present in a concatenated polypeptide comprising each of the sequences set forth in Table 12A, Table 12B, or Table 12C, optionally wherein the concatenated polypeptide comprises the order of sequences set forth in Table 12A, Table 12B, or Table 12C,
[0012] at least one MHC class I epitope comprising a polypeptide sequence as set forth in Table A and/or Table C or MHC class II epitope comprising a polypeptide sequence as set forth in Table B, wherein the encoded SARS-CoV-2 immunogenic polypeptide is conserved between SARS-CoV-2 and a Coronavirus species and/or sub-species other than SARS-CoV-2, optionally wherein the Coronavirus species and/or sub-species other than SARS-CoV-2 is Severe acute respiratory syndrome (SARS) and/or Middle East respiratory syndrome (MERS),
[0013] one or more validated epitopes and/or at least 4, 5, 6, or 7 predicted epitopes, wherein at least 85%, 90%, or 95% of a population carries at least one HLA validated to present at least one of the one or more validated epitopes and/or at least one HLA predicted to present each of the at least 4, 5, 6, or 7 predicted epitopes,
[0014] a SARS-CoV-2 Spike protein comprising a Spike polypeptide sequence as set forth in SEQ ID NO:59 or an epitope-containing fragment thereof, optionally wherein the Spike polypeptide comprises a D614G mutation with reference to SEQ ID NO:59, and optionally wherein the Spike polypeptide is encoded by the nucleotide sequence shown in SEQ ID NO:79, SEQ ID NO:83, SEQ ID NO:85, or SEQ ID NO:87,
[0015] a SARS-CoV-2 modified Spike protein comprising a mutation selected from the group consisting of: a Spike R682 mutation, a Spike R815 mutation, a Spike K986P mutation, a Spike V987P mutation, and combinations thereof with reference to the Spike polypeptide sequence as set forth in SEQ ID NO:59, and optionally wherein the modified Spike protein comprises a polypeptide sequence as set forth in SEQ ID NO:60 or SEQ ID NO:90 or an epitope-containing fragment thereof,
[0016] a SARS-CoV-2 Membrane protein comprising a Membrane polypeptide sequence as set forth in SEQ ID NO:61 or an epitope-containing fragment thereof,
[0017] a SARS-CoV-2 Nucleocapsid protein comprising a Nucleocapsid polypeptide sequence as set forth in SEQ ID NO:62 or an epitope-containing fragment thereof,
[0018] a SARS-CoV-2 Envelope protein comprising an Envelope polypeptide sequence as set forth in SEQ ID NO:63 or an epitope-containing fragment thereof,
[0019] a variant of any of the above comprising a mutation found in 1% or greater of SARS-CoV-2 subtypes, optionally wherein the variant comprises a SARS-CoV-2 variant shown in Table 1, and/or optionally wherein the variant comprises a SARS-CoV-2 variant Spike protein comprising a Spike D614G mutation with reference to the Spike polypeptide sequence as set forth in SEQ ID NO:59, a SARS-CoV-2 variant Spike protein corresponding to a B.1.351 SARS-CoV-2 isolate optionally comprising the Spike polypeptide sequence as set forth in SEQ ID NO:112, or a SARS-CoV-2 variant Spike protein corresponding to a B.1.1.7 SARS-CoV-2 isolate optionally comprising the Spike polypeptide sequence as set forth in SEQ ID NO:110, and optionally wherein the Spike polypeptide is encoded by the nucleotide sequence shown in SEQ ID NO:79, SEQ ID NO:83, SEQ ID NO:85, or SEQ ID NO:87,
[0020] or combinations thereof; and wherein the immunogenic polypeptide optionally comprises a N-terminal linker and/or a C-terminal linker; (ii) optionally, a second promoter nucleotide sequence operably linked to the SARS-CoV-2 derived nucleic acid sequence; and (iii) optionally, at least one MHC class II epitope-encoding nucleic acid sequence; (iv) optionally, at least one nucleic acid sequence encoding a GPGPG amino acid linker sequence (SEQ ID NO:56); and (v) optionally, at least one second poly(A) sequence, wherein the second poly(A) sequence is a native poly(A) sequence or an exogenous poly(A) sequence to the vector backbone, optionally wherein the exogenous poly(A) sequence comprises an SV40 poly(A) signal sequence or a Bovine Growth Hormone (BGH) poly(A) signal sequence.

[0021] Also provided for herein is an antigen-based vaccine comprising: (i) at least one SARS-CoV-2 derived immunogenic polypeptide, wherein the immunogenic polypeptide comprises:
[0022] at least one MHC class I epitope comprising a polypeptide sequence as set forth in Table A,
[0023] at least one MHC class II epitope comprising a polypeptide sequence as set forth in Table B,
[0024] at least one MHC class I epitope comprising a polypeptide sequence as set forth in Table C, optionally wherein the at least one MHC I epitope is present in a concatenated polypeptide sequence as set forth in SEQ ID NO:57 or SEQ ID NO:58,
[0025] at least one polypeptide sequence as set forth in Table 10, or an epitope-containing fragment thereof, optionally wherein the at least one polypeptide sequence is present in a concatenated polypeptide sequence as set forth in SEQ ID NO:92,
[0026] at least one polypeptide sequence as set forth in Table 12A, Table 12B, or Table 12C, or an epitope-containing fragment thereof, optionally wherein the at least one polypeptide sequence is present in a concatenated polypeptide comprising each of the sequences set forth in Table 12A, Table 12B, or Table 12C, optionally wherein the concatenated polypeptide comprises the order of sequences set forth in Table 12A, Table 12B, or Table 12C,
[0027] at least one MHC class I epitope comprising a polypeptide sequence as set forth in Table A and/or Table C or MHC class II epitope comprising a polypeptide sequence as set forth in Table B, wherein the encoded SARS-CoV-2 immunogenic polypeptide is conserved between SARS-CoV-2 and a Coronavirus species and/or sub-species other than SARS-CoV-2, optionally wherein the Coronavirus species and/or sub-species other than SARS-CoV-2 is Severe acute respiratory syndrome (SARS) and/or Middle East respiratory syndrome (MERS),
[0028] one or more validated epitopes and/or at least 4, 5, 6, or 7 predicted epitopes, wherein at least 85%, 90%, or 95% of a population carries at least one HLA validated to present at least one of the one or more validated epitopes and/or at least one HLA predicted to present each of the at least 4, 5, 6, or 7 predicted epitopes,
[0029] a SARS-CoV-2 Spike protein comprising a Spike polypeptide sequence as set forth in SEQ ID NO:59 or an epitope-containing fragment thereof, optionally wherein the Spike polypeptide comprises a D614G mutation with reference to SEQ ID NO:59, and optionally wherein the Spike polypeptide is encoded by the nucleotide sequence shown in SEQ ID NO:79, SEQ ID NO:83, SEQ ID NO:85, or SEQ ID NO:87,
[0030] a SARS-CoV-2 modified Spike protein comprising a mutation selected from the group consisting of: a Spike R682 mutation, a Spike R815 mutation, a Spike K986P mutation, a Spike V987P mutation, and combinations thereof with reference to the Spike polypeptide sequence as set forth in SEQ ID NO:59, and optionally wherein the modified Spike protein comprises a polypeptide sequence as set forth in SEQ ID NO:60 or SEQ ID NO:90 or an epitope-containing fragment thereof,
[0031] a SARS-CoV-2 Membrane protein comprising a Membrane polypeptide sequence as set forth in SEQ ID NO:61 or an epitope-containing fragment thereof,
[0032] a SARS-CoV-2 Nucleocapsid protein comprising a Nucleocapsid polypeptide sequence as set forth in SEQ ID NO:62 or an epitope-containing fragment thereof,
[0033] a SARS-CoV-2 Envelope protein comprising an Envelope polypeptide sequence as set forth in SEQ ID NO:63 or an epitope-containing fragment thereof,
[0034] a variant of any of the above comprising a mutation found in 1% or greater of SARS-CoV-2 subtypes, optionally wherein the variant comprises a SARS-CoV-2 variant shown in Table 1, and/or optionally wherein the variant comprises a SARS-CoV-2 variant Spike protein comprising a Spike D614G mutation with reference to the Spike polypeptide sequence as set forth in SEQ ID NO:59, a SARS-CoV-2 variant Spike protein corresponding to a B.1.351 SARS-CoV-2 isolate optionally comprising the Spike polypeptide sequence as set forth in SEQ ID NO:112, or a SARS-CoV-2 variant Spike protein corresponding to a B.1.1.7 SARS-CoV-2 isolate optionally comprising the Spike polypeptide sequence as set forth in SEQ ID NO:110, and optionally wherein the Spike polypeptide is encoded by the nucleotide sequence shown in SEQ ID NO:79, SEQ ID NO:83, SEQ ID NO:85, or SEQ ID NO:87,
[0035] or combinations thereof; and wherein the immunogenic peptide optionally comprises a N-terminal linker and/or a C-terminal linker (ii) optionally, at least one MHC class II antigen; and (iii) optionally, at least one GPGPG amino acid linker sequence (SEQ ID NO:56).

[0036] Also provided for herein is a composition for delivery of an antigen expression system, comprising: the antigen expression system, wherein the antigen expression system comprises: (a) optionally, one or more vectors, the one or more vectors comprising: a vector backbone, wherein the backbone comprises: (i) at least one promoter nucleotide sequence, and (ii) at least one polyadenylation (poly(A)) sequence; and (b) an antigen cassette, optionally wherein the antigen cassette is inserted into the vector backbone when present, and wherein the antigen cassette comprises: (i) at least 1, 2, 3, 4, 5, 6, 7, 8, 9, 10, 11, 12, 13, 14, 15, 16, 17, 18, 19, or 20 or more SARS-CoV-2 derived nucleic acid sequences encoding an immunogenic polypeptide, wherein the immunogenic polypeptide comprises: (A) a SARS-CoV-2 Spike protein comprising a Spike polypeptide sequence as set forth in SEQ ID NO:59 or an epitope-containing fragment thereof and a SARS-CoV-2 Membrane protein comprising a Membrane polypeptide sequence as set forth in SEQ ID NO:61 or an epitope-containing fragment thereof, optionally wherein the SARS-CoV-2 derived nucleic acid sequence comprises the sequence as set forth in SEQ ID NO:66 or SEQ ID NO:67, (B) a SARS-CoV-2 Spike protein comprising a Spike polypeptide sequence as set forth in SEQ ID NO:59 or an epitope-containing fragment thereof and at least one MHC I epitope comprising a polypeptide sequence as set forth in Table C, optionally wherein the at least one MHC I epitope is present in a concatenated polypeptide sequence as set forth in SEQ ID NO:57 or SEQ ID NO:58, optionally wherein the SARS-CoV-2 derived nucleic acid sequence comprises the sequence as set forth in SEQ ID NO:68, (C) a SARS-CoV-2 Spike protein comprising a Spike polypeptide sequence as set forth in SEQ ID NO:59 or an epitope-containing fragment thereof, optionally wherein the Spike polypeptide comprises a D614G mutation with reference to SEQ ID NO:59, and optionally wherein the SARS-CoV-2 derived nucleic acid sequence comprises the sequence as set forth in SEQ ID NO:69, SEQ ID NO:79, SEQ ID NO:83, SEQ ID NO:85, or SEQ ID NO:87, (D) at least one MHC class I epitope comprising a polypeptide sequence as set forth in Table C, optionally wherein the at least one MHC I epitope is present in a concatenated polypeptide sequence as set forth in SEQ ID NO:57 or SEQ ID NO:58, optionally wherein the SARS-CoV-2 derived nucleic acid sequence comprises the sequence as set forth in SEQ ID NO:64 or SEQ ID NO:65, (E) a SARS-CoV-2 modified Spike protein comprising a mutation selected from the group consisting of: a Spike D614G mutation, a Spike R682V mutation, a Spike R815N mutation, a Spike K986P mutation, a Spike V987P mutation, and combinations thereof with reference to the Spike polypeptide sequence as set forth in SEQ ID NO:59, and optionally wherein the modified Spike protein comprises a polypeptide sequence as set forth in SEQ ID NO:60 or SEQ ID NO:90 or an epitope-containing fragment thereof, optionally wherein the SARS-CoV-2 derived nucleic acid sequence comprises the sequence as set forth in SEQ ID NO:70 or SEQ ID NO:89, (F) a SARS-CoV-2 Spike protein comprising a Spike polypeptide sequence as set forth in SEQ ID NO:59 or an epitope-containing fragment thereof, a SARS-CoV-2 Membrane protein comprising a Membrane polypeptide sequence as set forth in SEQ ID NO:61 or an epitope-containing fragment thereof, a SARS-CoV-2 Nucleocapsid protein comprising a Nucleocapsid polypeptide sequence as set forth in SEQ ID NO:62 or an epitope-containing fragment thereof, and a SARS-CoV-2 Envelope protein comprising an Envelope polypeptide sequence as set forth in SEQ ID NO:63 or an epitope-containing fragment thereof, optionally wherein the SARS-CoV-2 derived nucleic acid sequence comprises the sequence as set forth in SEQ ID NO:71, (G) a SARS-CoV-2 Spike protein comprising a Spike polypeptide sequence as set forth in SEQ ID NO:59 or an epitope-containing fragment thereof, a SARS-CoV-2 Membrane protein comprising a Membrane polypeptide sequence as set forth in SEQ ID NO:61 or an epitope-containing fragment thereof, and a SARS-CoV-2 Nucleocapsid protein comprising a Nucleocapsid polypeptide sequence as set forth in SEQ ID NO:62 or an epitope-containing fragment thereof, optionally wherein the SARS-CoV-2 derived nucleic acid sequence comprises the sequence as set forth in SEQ ID NO:72, (H) a SARS-CoV-2 Spike protein comprising a Spike polypeptide sequence as set forth in SEQ ID NO:59 or an epitope-containing fragment thereof, a SARS-CoV-2 Membrane protein comprising a Membrane polypeptide sequence as set forth in SEQ ID NO:61 or an epitope-containing fragment thereof, and a SARS-CoV-2 Envelope protein comprising an Envelope polypeptide sequence as set forth in SEQ ID NO:63 or an epitope-containing fragment thereof, optionally wherein the SARS-CoV-2 derived nucleic acid sequence comprises the sequence as set forth in SEQ ID NO:73, (I) at least one MHC class I epitope comprising a polypeptide sequence as set forth in Table C, optionally wherein the at least one MHC I epitope is present in a concatenated polypeptide sequence as set forth in SEQ ID NO:57 or SEQ ID NO:58, a SARS-CoV-2 Spike protein comprising a Spike polypeptide sequence as set forth in SEQ ID NO:59 or an epitope-containing fragment thereof, a SARS-CoV-2 Membrane protein comprising a Membrane polypeptide sequence as set forth in SEQ ID NO:61 or an epitope-containing fragment thereof, and a SARS-CoV-2 Envelope protein comprising an Envelope polypeptide sequence as set forth in SEQ ID NO:63 or an epitope-containing fragment thereof, optionally wherein the SARS-CoV-2 derived nucleic acid sequence comprises the sequence as set forth in SEQ ID NO:74, (J) a SARS-CoV-2 Spike protein comprising a Spike polypeptide sequence as set forth in SEQ ID NO:59 or an epitope-containing fragment thereof and a SARS-CoV-2 modified Spike protein comprising a mutation selected from the group consisting of: a Spike D614G mutation, a Spike R682V mutation, a Spike R815N mutation, a Spike K986P mutation, a Spike V987P mutation, and combinations thereof with reference to the Spike polypeptide sequence as set forth in SEQ ID NO:59, (K) a SARS-CoV-2 Spike protein comprising a modified Spike polypeptide sequence as set forth in SEQ ID NO:90 or an epitope-containing fragment thereof and at least one polypeptide sequence as set forth in Table 10, or an epitope-containing fragment thereof, optionally wherein the at least one polypeptide sequence is present in a concatenated polypeptide sequence as set forth in SEQ ID NO:92, (L) at least one polypeptide sequence as set forth in Table 12A, Table 12B, or Table 12C, or an epitope-containing fragment thereof, optionally wherein the at least one polypeptide sequence is present in a concatenated polypeptide comprising each of the sequences set forth in Table 12A, Table 12B, or Table 12C, optionally wherein the concatenated polypeptide comprises the order of sequences set forth in Table 12A, Table 12B, or Table 12C, (M) at least one MHC class I epitope comprising a polypeptide sequence as set forth in Table A and/or Table C or MHC class II epitope comprising a polypeptide sequence as set forth in Table B, wherein the encoded SARS-CoV-2 immunogenic polypeptide is conserved between SARS-CoV-2 and a Coronavirus species and/or sub-species other than SARS-CoV-2, optionally wherein the Coronavirus species and/or sub-species other than SARS-CoV-2 is Severe acute respiratory syndrome (SARS) and/or Middle East respiratory syndrome (MERS), or (N) one or more validated epitopes and/or at least 4, 5, 6, or 7 predicted epitopes, wherein at least 85%, 90%, or 95% of a population carries at least one HLA validated to present at least one of the one or more validated epitopes and/or at least one HLA predicted to present each of the at least 4, 5, 6, or 7 predicted epitopes, and optionally wherein the modified Spike protein comprises a polypeptide sequence as set forth in SEQ ID NO:60 or SEQ ID NO:90 or an epitope-containing fragment thereof, and wherein each of the SAR-CoV-2 SARS-CoV-2 derived nucleic acid sequences comprises; (A) optionally, a 5′ linker sequence, and (B) optionally, a 3′ linker sequence; (ii) optionally, a second promoter nucleotide sequence operably linked to the SARS-CoV-2 derived nucleic acid sequence; and (iii) optionally, at least one MHC class II epitope-encoding nucleic acid sequence; (iv) optionally, at least one nucleic acid sequence encoding a GPGPG amino acid linker sequence (SEQ ID NO:56); and (v) optionally, at least one second poly(A) sequence, wherein the second poly(A) sequence is a native poly(A) sequence or an exogenous poly(A) sequence to the vector backbone optionally wherein the exogenous poly(A) sequence comprises an SV40 poly(A) signal sequence or a Bovine Growth Hormone (BGH) poly(A) signal sequence.

[0037] Also provided for herein is composition for delivery of an antigen expression system, comprising: the antigen expression system, wherein the antigen expression system comprises: (a) optionally, one or more vectors, the one or more vectors comprising: a vector backbone, wherein the backbone comprises: (i) at least one promoter nucleotide sequence, and (ii) at least one polyadenylation (poly(A)) sequence; and (b) an antigen cassette, optionally wherein the antigen cassette is inserted into the vector backbone when present, and wherein the antigen cassette comprises: (i) at least 18 SARS-CoV-2 derived nucleic acid sequences each encoding an immunogenic polypeptide sequence as set forth in Table C, optionally wherein the immunogenic polypeptide sequences are linked in a concatenated polypeptide sequence as set forth in SEQ ID NO:57 or SEQ ID NO:58: (ii) optionally, a second promoter nucleotide sequence operably linked to the SARS-CoV-2 derived nucleic acid sequence; and (iii) optionally, at least one MHC class II epitope-encoding nucleic acid sequence; (iv) optionally, at least one nucleic acid sequence encoding a GPGPG amino acid linker sequence (SEQ ID NO:56); and (v) optionally, at least one second poly(A) sequence, wherein the second poly(A) sequence is a native poly(A) sequence or an exogenous poly(A) sequence to the vector backbone optionally wherein the exogenous poly(A) sequence comprises an SV40 poly(A) signal sequence or a Bovine Growth Hormone (BGH) poly(A) signal sequence.

[0038] Also provided for herein is composition for delivery of an antigen expression system, comprising: the antigen expression system, wherein the antigen expression system comprises: (a) optionally, one or more vectors, the one or more vectors comprising: a vector backbone, wherein the backbone comprises: (i) at least one promoter nucleotide sequence, and (ii) at least one polyadenylation (poly(A)) sequence; and (b) an antigen cassette, optionally wherein the antigen cassette is inserted into the vector backbone when present, and wherein the antigen cassette comprises: (i) at least 15 SARS-CoV-2 derived nucleic acid sequences each encoding an immunogenic polypeptide sequence as set forth in Table 10, optionally wherein the immunogenic polypeptide sequences are linked in a concatenated polypeptide sequence as set forth in SEQ ID NO:92: (ii) optionally, a second promoter nucleotide sequence operably linked to the SARS-CoV-2 derived nucleic acid sequence; and (iii) optionally, at least one MHC class II epitope-encoding nucleic acid sequence; (iv) optionally, at least one nucleic acid sequence encoding a GPGPG amino acid linker sequence (SEQ ID NO:56); and (v) optionally, at least one second poly(A) sequence, wherein the second poly(A) sequence is a native poly(A) sequence or an exogenous poly(A) sequence to the vector backbone optionally wherein the exogenous poly(A) sequence comprises an SV40 poly(A) signal sequence or a Bovine Growth Hormone (BGH) poly(A) signal sequence.

[0039] Also provided for herein is a composition for delivery of an antigen expression system, comprising: the antigen expression system, wherein the antigen expression system comprises: (a) one or more vectors, the one or more vectors comprising: a vector backbone, wherein the vector backbone comprises a chimpanzee adenovirus vector, optionally wherein the chimpanzee adenovirus vector is a ChAdV68 vector, or an alphavirus vector, optionally wherein the alphavirus vector is a Venezuelan equine encephalitis virus vector, and wherein the backbone comprises: (i) at least one promoter nucleotide sequence, and (ii) at least one polyadenylation (poly(A)) sequence; and (b) an antigen cassette, wherein the antigen cassette is inserted into the vector backbone such that the antigen cassette is operably linked to the at least one promoter nucleotide sequence, and wherein the antigen cassette comprises: (i) at least one SARS-CoV-2 derived nucleic acid sequence encoding an immunogenic polypeptide, wherein the immunogenic polypeptide comprises:
[0040] at least one MHC class I epitope comprising a polypeptide sequence as set forth in Table A,
[0041] at least one MHC class II epitope comprising a polypeptide sequence as set forth in Table B,
[0042] at least one MHC class I epitope comprising a polypeptide sequence as set forth in Table C, optionally wherein the at least one MHC I epitope is present in a concatenated polypeptide sequence as set forth in SEQ ID NO:57 or SEQ ID NO:58,
[0043] a SARS-CoV-2 Spike protein comprising a Spike polypeptide sequence as set forth in SEQ ID NO:59 or an epitope-containing fragment thereof, optionally wherein the Spike polypeptide comprises a D614G mutation with reference to SEQ ID NO:59, and optionally wherein the Spike polypeptide is encoded by the nucleotide sequence shown in SEQ ID NO:79, SEQ ID NO:83, SEQ ID NO:85, or SEQ ID NO:87,
[0044] a SARS-CoV-2 modified Spike protein comprising a mutation selected from the group consisting of: a Spike R682 mutation, a Spike R815 mutation, a Spike K986P mutation, a Spike V987P mutation, and combinations thereof with reference to the Spike polypeptide sequence as set forth in SEQ ID NO:59, and optionally wherein the modified Spike protein comprises a polypeptide sequence as set forth in SEQ ID NO:60 or SEQ ID NO:90 or an epitope-containing fragment thereof,
[0045] a SARS-CoV-2 Membrane protein comprising a Membrane polypeptide sequence as set forth in SEQ ID NO:61 or an epitope-containing fragment thereof,
[0046] a SARS-CoV-2 Nucleocapsid protein comprising a Nucleocapsid polypeptide sequence as set forth in SEQ ID NO:62 or an epitope-containing fragment thereof,
[0047] a SARS-CoV-2 Envelope protein comprising an Envelope polypeptide sequence as set forth in SEQ ID NO:63 or an epitope-containing fragment thereof,
[0048] a variant of any of the above comprising a mutation found in 1% or greater of SARS-CoV-2 subtypes, optionally wherein the variant comprises a SARS-CoV-2 variant shown in Table 1, and/or optionally wherein the variant comprises a SARS-CoV-2 variant Spike protein comprising a Spike D614G mutation with reference to the Spike polypeptide sequence as set forth in SEQ ID NO:59, a SARS-CoV-2 variant Spike protein corresponding to a B.1.351 SARS-CoV-2 isolate optionally comprising the Spike polypeptide sequence as set forth in SEQ ID NO:112, or a SARS-CoV-2 variant Spike protein corresponding to a B.1.1.7 SARS-CoV-2 isolate optionally comprising the Spike polypeptide sequence as set forth in SEQ ID NO:110, and optionally wherein the Spike polypeptide is encoded by the nucleotide sequence shown in SEQ ID NO:79, SEQ ID NO:83, SEQ ID NO:85, or SEQ ID NO:87,
[0049] or combinations thereof; and wherein the immunogenic polypeptide optionally comprises a N-terminal linker and/or a C-terminal linker; (ii) optionally, a second promoter nucleotide sequence operably linked to the SARS-CoV-2 derived nucleic acid sequence; and (iii) optionally, at least one MHC class II epitope-encoding nucleic acid sequence; (iv) optionally, at least one nucleic acid sequence encoding a GPGPG amino acid linker sequence (SEQ ID NO:56); and (v) optionally, at least one second poly(A) sequence, wherein the second poly(A) sequence is a native poly(A) sequence or an exogenous poly(A) sequence to the vector backbone, optionally wherein the exogenous poly(A) sequence comprises an SV40 poly(A) signal sequence or a Bovine Growth Hormone (BGH) poly(A) signal sequence.

[0050] Also provided for herein is a composition for delivery of an antigen expression system, wherein the antigen expression system comprises the nucleotide sequence as set forth in SEQ ID NO:114.

[0051] Also provided for herein is a composition for delivery of an antigen expression system, wherein the antigen expression system comprises the nucleotide sequence as set forth in SEQ ID NO:93.

[0052] Also provided for herein is a method of assessing a subject at risk for a SARS-CoV-2 infection or having a SARS-CoV-2 infection, comprising the steps of: a) determining or having determined: 1) if the subject has an HLA allele predicted or known to present an antigen included in an antigen-based vaccine, b) determining or having determined from the results of (a) that the subject is a candidate for therapy with the antigen-based vaccine when the subject expresses the HLA allele, and c) optionally, administering of having administered the antigen-based vaccine to the subject, wherein the antigen-based vaccine comprises: 1) at least one SARS-CoV-2 derived immunogenic polypeptide, or 2) a SARS-CoV-2 derived nucleic acid sequence encoding the at least one SARS-CoV-2 derived immunogenic polypeptide, and optionally wherein the immunogenic polypeptide comprises:
[0053] at least one MHC class I epitope comprising a polypeptide sequence as set forth in Table A,
[0054] at least one MHC class II epitope comprising a polypeptide sequence as set forth in Table B,
[0055] at least one MHC class I epitope comprising a polypeptide sequence as set forth in Table C, optionally wherein the at least one MHC I epitope is present in a concatenated polypeptide sequence as set forth in SEQ ID NO:57 or SEQ ID NO:58,
[0056] at least one polypeptide sequence as set forth in Table 10, or an epitope-containing fragment thereof, optionally wherein the at least one polypeptide sequence is present in a concatenated polypeptide sequence as set forth in SEQ ID NO:92,
[0057] at least one polypeptide sequence as set forth in Table 12A, Table 12B, or Table 12C, or an epitope-containing fragment thereof, optionally wherein the at least one polypeptide sequence is present in a concatenated polypeptide comprising each of the sequences set forth in Table 12A, Table 12B, or Table 12C, optionally wherein the concatenated polypeptide comprises the order of sequences set forth in Table 12A, Table 12B, or Table 12C,
[0058] at least one MHC class I epitope comprising a polypeptide sequence as set forth in Table A and/or Table C or MHC class II epitope comprising a polypeptide sequence as set forth in Table B, wherein the encoded SARS-CoV-2 immunogenic polypeptide is conserved between SARS-CoV-2 and a Coronavirus species and/or sub-species other than SARS-CoV-2, optionally wherein the Coronavirus species and/or sub-species other than SARS-CoV-2 is Severe acute respiratory syndrome (SARS) and/or Middle East respiratory syndrome (MERS),
[0059] one or more validated epitopes and/or at least 4, 5, 6, or 7 predicted epitopes, wherein at least 85%, 90%, or 95% of a population carries at least one HLA validated to present at least one of the one or more validated epitopes and/or at least one HLA predicted to present each of the at least 4, 5, 6, or 7 predicted epitopes,
[0060] a SARS-CoV-2 Spike protein comprising a Spike polypeptide sequence as set forth in SEQ ID NO:59 or an epitope-containing fragment thereof, optionally wherein the Spike polypeptide comprises a D614G mutation with reference to SEQ ID NO:59, and optionally wherein the Spike polypeptide is encoded by the nucleotide sequence shown in SEQ ID NO:79, SEQ ID NO:83, SEQ ID NO:85, or SEQ ID NO:87,
[0061] a SARS-CoV-2 modified Spike protein comprising a mutation selected from the group consisting of: a Spike R682 mutation, a Spike R815 mutation, a Spike K986P mutation, a Spike V987P mutation, and combinations thereof with reference to the Spike polypeptide sequence as set forth in SEQ ID NO:59, and optionally wherein the modified Spike protein comprises a polypeptide sequence as set forth in SEQ ID NO:60 or SEQ ID NO:90 or an epitope-containing fragment thereof,
[0062] a SARS-CoV-2 Membrane protein comprising a Membrane polypeptide sequence as set forth in SEQ ID NO:61 or an epitope-containing fragment thereof,
[0063] a SARS-CoV-2 Nucleocapsid protein comprising a Nucleocapsid polypeptide sequence as set forth in SEQ ID NO:62 or an epitope-containing fragment thereof,
[0064] a SARS-CoV-2 Envelope protein comprising an Envelope polypeptide sequence as set forth in SEQ ID NO:63 or an epitope-containing fragment thereof,
[0065] a variant of any of the above comprising a mutation found in 1% or greater of SARS-CoV-2 subtypes, optionally wherein the variant comprises a SARS-CoV-2 variant shown in Table 1, and/or optionally wherein the variant comprises a SARS-CoV-2 variant Spike protein comprising a Spike D614G mutation with reference to the Spike polypeptide sequence as set forth in SEQ ID NO:59, a SARS-CoV-2 variant Spike protein corresponding to a B.1.351 SARS-CoV-2 isolate optionally comprising the Spike polypeptide sequence as set forth in SEQ ID NO:112, or a SARS-CoV-2 variant Spike protein corresponding to a B.1.1.7 SARS-CoV-2 isolate optionally comprising the Spike polypeptide sequence as set forth in SEQ ID NO:110, and optionally wherein the Spike polypeptide is encoded by the nucleotide sequence shown in SEQ ID NO:79, SEQ ID NO:83, SEQ ID NO:85, or SEQ ID NO:87,
[0066] or combinations thereof; and wherein the immunogenic peptide optionally comprises a N-terminal linker and/or a C-terminal linker.

[0067] In some aspects, step (a) and/or (b) comprises obtaining a dataset from a third party that has processed a sample from the subject. In some aspects, step (a) comprises obtaining a sample from the subject and assaying the sample using a method selected from the group consisting of: exome sequencing, targeted exome sequencing, transcriptome sequencing, Sanger sequencing, PCR-based genotyping assays, mass-spectrometry based methods, microarray, Nanostring, ISH, and IHC. In some aspects, the sample comprises an infected sample, a normal tissue sample, or the infected sample and the normal tissue sample. In some aspects, the sample is selected from tissue, bodily fluid, blood, spinal fluid, and needle aspirate. In some aspects, the HLA allele has an HLA frequency of at least 5%. In some aspects, the at least one SARS-CoV-2 derived immunogenic polypeptide or the at least one SARS-CoV-2 derived immunogenic polypeptide encoded by the SARS-CoV-2 derived nucleic acid sequence comprises a MHC class I or MHC class II epitope presented by the HLA allele on the subject's cell. In some aspects, the antigen-based vaccine comprises an antigen expression system. In some aspects, the antigen expression system comprises any one of the antigen expression systems provided herein. In some aspects, the antigen-based vaccine comprises any one of the pharmaceutical compositions provided herein.

[0068] Also provided for herein is a method for treating a SARS-CoV-2 infection, preventing a SARS-CoV-2 infection, and/or or inducing an immune response in a subject, the method comprising administering to the subject an antigen-based vaccine to the subject, wherein the antigen-based vaccine comprises: 1) at least one SARS-CoV-2 derived immunogenic polypeptide, or 2) a SARS-CoV-2 derived nucleic acid sequence encoding the at least one SARS-CoV-2 derived immunogenic polypeptide, and wherein the immunogenic polypeptide comprises:
[0069] at least one MHC class I epitope comprising a polypeptide sequence as set forth in Table A,
[0070] at least one MHC class II epitope comprising a polypeptide sequence as set forth in Table B,
[0071] at least one MHC class I epitope comprising a polypeptide sequence as set forth in Table C, optionally wherein the at least one MHC I epitope is present in a concatenated polypeptide sequence as set forth in SEQ ID NO:57 or SEQ ID NO:58,
[0072] a SARS-CoV-2 Spike protein comprising a Spike polypeptide sequence as set forth in SEQ ID NO:59 or an epitope-containing fragment thereof, optionally wherein the Spike polypeptide comprises a D614G mutation with reference to SEQ ID NO:59, and optionally wherein the Spike polypeptide is encoded by the nucleotide sequence shown in SEQ ID NO:79, SEQ ID NO:83, SEQ ID NO:85, or SEQ ID NO:87,
[0073] a SARS-CoV-2 modified Spike protein comprising a mutation selected from the group consisting of: a Spike R682 mutation, a Spike R815 mutation, a Spike K986P mutation, a Spike V987P mutation, and combinations thereof with reference to the Spike polypeptide sequence as set forth in SEQ ID NO:59, and optionally wherein the modified Spike protein comprises a polypeptide sequence as set forth in SEQ ID NO:60 or SEQ ID NO:90 or an epitope-containing fragment thereof,
[0074] a SARS-CoV-2 Membrane protein comprising a Membrane polypeptide sequence as set forth in SEQ ID NO:61 or an epitope-containing fragment thereof,
[0075] a SARS-CoV-2 Nucleocapsid protein comprising a Nucleocapsid polypeptide sequence as set forth in SEQ ID NO:62 or an epitope-containing fragment thereof,
[0076] a SARS-CoV-2 Envelope protein comprising an Envelope polypeptide sequence as set forth in SEQ ID NO:63 or an epitope-containing fragment thereof,
[0077] a variant of any of the above comprising a mutation found in 1% or greater of SARS-CoV-2 subtypes, optionally wherein the variant comprises a SARS-CoV-2 variant shown in Table 1, and/or optionally wherein the variant comprises a SARS-CoV-2 variant Spike protein comprising a Spike D614G mutation with reference to the Spike polypeptide sequence as set forth in SEQ ID NO:59, a SARS-CoV-2 variant Spike protein corresponding to a B.1.351 SARS-CoV-2 isolate optionally comprising the Spike polypeptide sequence as set forth in SEQ ID NO:112, or a SARS-CoV-2 variant Spike protein corresponding to a B.1.1.7 SARS-CoV-2 isolate optionally comprising the Spike polypeptide sequence as set forth in SEQ ID NO:110, and optionally wherein the Spike polypeptide is encoded by the nucleotide sequence shown in SEQ ID NO:79, SEQ ID NO:83, SEQ ID NO:85, or SEQ ID NO:87,
[0078] or combinations thereof; and wherein the immunogenic peptide optionally comprises a N-terminal linker and/or a C-terminal linker.

[0079] Also provided for herein is a method for treating a SARS-CoV-2 infection, preventing a SARS-CoV-2 infection, and/or or inducing an immune response in a subject, the method comprising administering to the subject an antigen-based vaccine to the subject, wherein the antigen-based vaccine comprises: 1) at least 1, 2, 3, 4, 5, 6, 7, 8, 9, 10, 11, 12, 13, 14, 15, 16, 17, 18, 19, or 20 or more SARS-CoV-2 derived immunogenic polypeptides, or 2) at least 1, 2, 3, 4, 5, 6, 7, 8, 9, 10, 11, 12, 13, 14, 15, 16, 17, 18, 19, or 20 or more SARS-CoV-2 derived nucleic acid sequences encoding an immunogenic polypeptide, and wherein the immunogenic polypeptide comprises: (A) a SARS-CoV-2 Spike protein comprising a Spike polypeptide sequence as set forth in SEQ ID NO:59 or an epitope-containing fragment thereof and a SARS-CoV-2 Membrane protein comprising a Membrane polypeptide sequence as set forth in SEQ ID NO:61 or an epitope-containing fragment thereof, optionally wherein the SARS-CoV-2 derived nucleic acid sequence comprises the sequence as set forth in SEQ ID NO:66 or SEQ ID NO:67, (B) a SARS-CoV-2 Spike protein comprising a Spike polypeptide sequence as set forth in SEQ ID NO:59 or an epitope-containing fragment thereof and at least one MHC I epitope comprising a polypeptide sequence as set forth in Table C, optionally wherein the at least one MHC I epitope is present in a concatenated polypeptide sequence as set forth in SEQ ID NO:57 or SEQ ID NO:58, optionally wherein the SARS-CoV-2 derived nucleic acid sequence comprises the sequence as set forth in SEQ ID NO:68, (C) a SARS-CoV-2 Spike protein comprising a Spike polypeptide sequence as set forth in SEQ ID NO:59 or an epitope-containing fragment thereof, optionally wherein the Spike polypeptide comprises a D614G mutation with reference to SEQ ID NO:59, and optionally wherein the SARS-CoV-2 derived nucleic acid sequence comprises the sequence as set forth in SEQ ID NO:69, SEQ ID NO:79, SEQ ID NO:83, SEQ ID NO:85, or SEQ ID NO:87, (D) at least one MHC class I epitope comprising a polypeptide sequence as set forth in Table C, optionally wherein the at least one MHC I epitope is present in a concatenated polypeptide sequence as set forth in SEQ ID NO:57 or SEQ ID NO:58, optionally wherein the SARS-CoV-2 derived nucleic acid sequence comprises the sequence as set forth in SEQ ID NO:64 or SEQ ID NO:65, (E) a SARS-CoV-2 modified Spike protein comprising a mutation selected from the group consisting of: a Spike D614G mutation, a Spike R682V mutation, a Spike R815N mutation, a Spike K986P mutation, a Spike V987P mutation, and combinations thereof with reference to the Spike polypeptide sequence as set forth in SEQ ID NO:59, and optionally wherein the modified Spike protein comprises a polypeptide sequence as set forth in SEQ ID NO:60 or SEQ ID NO:90 or an epitope-containing fragment thereof, optionally wherein the SARS-CoV-2 derived nucleic acid sequence comprises the sequence as set forth in SEQ ID NO:70, (F) a SARS-CoV-2 Spike protein comprising a Spike polypeptide sequence as set forth in SEQ ID NO:59 or an epitope-containing fragment thereof, a SARS-CoV-2 Membrane protein comprising a Membrane polypeptide sequence as set forth in SEQ ID NO:61 or an epitope-containing fragment thereof, a SARS-CoV-2 Nucleocapsid protein comprising a Nucleocapsid polypeptide sequence as set forth in SEQ ID NO:62 or an epitope-containing fragment thereof, and a SARS-CoV-2 Envelope protein comprising an Envelope polypeptide sequence as set forth in SEQ ID NO:63 or an epitope-containing fragment thereof, optionally wherein the SARS-CoV-2 derived nucleic acid sequence comprises the sequence as set forth in SEQ ID NO:71, (G) a SARS-CoV-2 Spike protein comprising a Spike polypeptide sequence as set forth in SEQ ID NO:59 or an epitope-containing fragment thereof, a SARS-CoV-2 Membrane protein comprising a Membrane polypeptide sequence as set forth in SEQ ID NO:61 or an epitope-containing fragment thereof, and a SARS-CoV-2 Nucleocapsid protein comprising a Nucleocapsid polypeptide sequence as set forth in SEQ ID NO:62 or an epitope-containing fragment thereof, optionally wherein the SARS-CoV-2 derived nucleic acid sequence comprises the sequence as set forth in SEQ ID NO:72, (H) a SARS-CoV-2 Spike protein comprising a Spike polypeptide sequence as set forth in SEQ ID NO:59 or an epitope-containing fragment thereof, a SARS-CoV-2 Membrane protein comprising a Membrane polypeptide sequence as set forth in SEQ ID NO:61 or an epitope-containing fragment thereof, and a SARS-CoV-2 Envelope protein comprising an Envelope polypeptide sequence as set forth in SEQ ID NO:63 or an epitope-containing fragment thereof, optionally wherein the SARS-CoV-2 derived nucleic acid sequence comprises the sequence as set forth in SEQ ID NO:73, (I) at least one MHC class I epitope comprising a polypeptide sequence as set forth in Table C, optionally wherein the at least one MHC I epitope is present in a concatenated polypeptide sequence as set forth in SEQ ID NO:57 or SEQ ID NO:58, a SARS-CoV-2 Spike protein comprising a Spike polypeptide sequence as set forth in SEQ ID NO:59 or an epitope-containing fragment thereof, a SARS-CoV-2 Membrane protein comprising a Membrane polypeptide sequence as set forth in SEQ ID NO:61 or an epitope-containing fragment thereof, and a SARS-CoV-2 Envelope protein comprising an Envelope polypeptide sequence as set forth in SEQ ID NO:63 or an epitope-containing fragment thereof, optionally wherein the SARS-CoV-2 derived nucleic acid sequence comprises the sequence as set forth in SEQ ID NO:74, or (J) a SARS-CoV-2 Spike protein comprising a Spike polypeptide sequence as set forth in SEQ ID NO:59 or an epitope-containing fragment thereof and a SARS-CoV-2 modified Spike protein comprising a mutation selected from the group consisting of: a Spike D614G mutation, a Spike R682V mutation, a Spike R815N mutation, a Spike K986P mutation, a Spike V987P mutation, and combinations thereof with reference to the Spike polypeptide sequence as set forth in SEQ ID NO:59, and optionally wherein the modified Spike protein comprises a polypeptide sequence as set forth in SEQ ID NO:60 or SEQ ID NO:90 or an epitope-containing fragment thereof.

[0080] Also provided for herein is a method for treating a SARS-CoV-2 infection, preventing a SARS-CoV-2 infection, and/or or inducing an immune response in a subject, the method comprising administering to the subject an antigen-based vaccine to the subject, wherein the antigen-based vaccine comprises: (a) one or more vectors, the one or more vectors comprising: a vector backbone, wherein the vector backbone comprises a chimpanzee adenovirus vector, optionally wherein the chimpanzee adenovirus vector is a ChAdV68 vector, or an alphavirus vector, optionally wherein the alphavirus vector is a Venezuelan equine encephalitis virus vector, and wherein the backbone comprises: (i) at least one promoter nucleotide sequence, and (ii) at least one polyadenylation (poly(A)) sequence; and (b) an antigen cassette, wherein the antigen cassette is inserted into the vector backbone such that the antigen cassette is operably linked to the at least one promoter nucleotide sequence, and wherein the antigen cassette comprises: (i) at least one SARS-CoV-2 derived nucleic acid sequence encoding an immunogenic polypeptide, wherein the immunogenic polypeptide comprises:
[0081] at least one MHC class I epitope comprising a polypeptide sequence as set forth in Table A,
[0082] at least one MHC class II epitope comprising a polypeptide sequence as set forth in Table B,
[0083] at least one MHC class I epitope comprising a polypeptide sequence as set forth in Table C, optionally wherein the at least one MHC I epitope is present in a concatenated polypeptide sequence as set forth in SEQ ID NO:57 or SEQ ID NO:58,
[0084] a SARS-CoV-2 Spike protein comprising a Spike polypeptide sequence as set forth in SEQ ID NO:59 or an epitope-containing fragment thereof, optionally wherein the Spike polypeptide comprises a D614G mutation with reference to SEQ ID NO:59, and optionally wherein the Spike polypeptide is encoded by the nucleotide sequence shown in SEQ ID NO:79, SEQ ID NO:83, SEQ ID NO:85, or SEQ ID NO:87,
[0085] a SARS-CoV-2 modified Spike protein comprising a mutation selected from the group consisting of: a Spike R682 mutation, a Spike R815 mutation, a Spike K986P mutation, a Spike V987P mutation, and combinations thereof with reference to the Spike polypeptide sequence as set forth in SEQ ID NO:59, and optionally wherein the modified Spike protein comprises a polypeptide sequence as set forth in SEQ ID NO:60 or SEQ ID NO:90 or an epitope-containing fragment thereof,
[0086] a SARS-CoV-2 Membrane protein comprising a Membrane polypeptide sequence as set forth in SEQ ID NO:61 or an epitope-containing fragment thereof,
[0087] a SARS-CoV-2 Nucleocapsid protein comprising a Nucleocapsid polypeptide sequence as set forth in SEQ ID NO:62 or an epitope-containing fragment thereof,
[0088] a SARS-CoV-2 Envelope protein comprising an Envelope polypeptide sequence as set forth in SEQ ID NO:63 or an epitope-containing fragment thereof,
[0089] a variant of any of the above comprising a mutation found in 1% or greater of SARS-CoV-2 subtypes, optionally wherein the variant comprises a SARS-CoV-2 variant shown in Table 1, and/or optionally wherein the variant comprises a SARS-CoV-2 variant Spike protein comprising a Spike D614G mutation with reference to the Spike polypeptide sequence as set forth in SEQ ID NO:59, a SARS-CoV-2 variant Spike protein corresponding to a B.1.351 SARS-CoV-2 isolate optionally comprising the Spike polypeptide sequence as set forth in SEQ ID NO:112, or a SARS-CoV-2 variant Spike protein corresponding to a B.1.1.7 SARS-CoV-2 isolate optionally comprising the Spike polypeptide sequence as set forth in SEQ ID NO:110, and optionally wherein the Spike polypeptide is encoded by the nucleotide sequence shown in SEQ ID NO:79, SEQ ID NO:83, SEQ ID NO:85, or SEQ ID NO:87,
[0090] or combinations thereof; and wherein the immunogenic polypeptide optionally comprises a N-terminal linker and/or a C-terminal linker; (ii) optionally, a second promoter nucleotide sequence operably linked to the SARS-CoV-2 derived nucleic acid sequence; and (iii) optionally, at least one MHC class II epitope-encoding nucleic acid sequence; (iv) optionally, at least one nucleic acid sequence encoding a GPGPG amino acid linker sequence (SEQ ID NO:56); and (v) optionally, at least one second poly(A) sequence, wherein the second poly(A) sequence is a native poly(A) sequence or an exogenous poly(A) sequence to the vector backbone, optionally wherein the exogenous poly(A) sequence comprises an SV40 poly(A) signal sequence or a Bovine Growth Hormone (BGH) poly(A) signal sequence.

[0091] Also provided for herein is a method for treating a SARS-CoV-2 infection, preventing a SARS-CoV-2 infection, and/or or inducing an immune response in a subject, the method comprising administering to the subject an antigen-based vaccine to the subject, wherein the antigen-based vaccine comprises: 1) at least one SARS-CoV-2 derived immunogenic polypeptide, or 2) a SARS-CoV-2 derived nucleic acid sequence encoding the at least one SARS-CoV-2 derived immunogenic polypeptide, and wherein the immunogenic polypeptide comprises at least 18 SARS-CoV-2 derived nucleic acid sequences each encoding an immunogenic polypeptide sequence as set forth in Table C, optionally wherein the immunogenic polypeptide sequences are linked in a concatenated polypeptide sequence as set forth in SEQ ID NO:57 or SEQ ID NO:58.

[0092] In some aspects, the antigen-based vaccine comprises an antigen expression system. In some aspects, the antigen expression system comprises any one of the antigen expression systems provided herein. In some aspects, the antigen-based vaccine comprises any one of the pharmaceutical compositions provided herein. In some aspects, the subject expresses at least one HLA allele predicted or known to present a MHC class I or MHC class II epitope encoded by the at least one SARS-CoV-2 derived nucleic acid sequence. In some aspects, the subject expresses at least one HLA allele predicted or known to present a MHC class I epitope encoded by the at least one SARS-CoV-2 derived nucleic acid sequence, and wherein the MHC class I epitope comprises at least one MHC class I epitope comprising a polypeptide sequence as set forth in Table A. In some aspects, the subject expresses at least one HLA allele predicted or known to present a MHC class II epitope encoded by the at least one SARS-CoV-2 derived nucleic acid sequence, and wherein the MHC class II epitope comprises at least one MHC class II epitope comprising a polypeptide sequence as set forth in Table B. In some aspects, the SARS-CoV-2 derived nucleic acid sequence encodes at least one immunogenic polypeptide corresponding to a polypeptide encoded by a SARS-CoV-2 subtype the subject is infected with or at risk for infection by.

[0093] In some aspects, an ordered sequence of one or more of the SARS-CoV-2 derived nucleic acid sequences encoding the immunogenic polypeptide is described in the formula, from 5′ to 3′, comprising:

Pa-(L5b-Nc-L3d)X-(G5e-Uf)Y-G3g

wherein P comprises the second promoter nucleotide sequence, where a=0 or 1, N comprises one of the SARS-CoV-2 derived nucleic acid sequences, where c=1, optionally wherein each N encodes a polypeptide sequence as set forth in Table A, Table B, and/or Table C, L5 comprises the 5′ linker sequence, where b=0 or 1, L3 comprises the 3′ linker sequence, where d=0 or 1, G5 comprises one of the at least one nucleic acid sequences encoding a GPGPG amino acid linker (SEQ ID NO: 56), where e=0 or 1, G3 comprises one of the at least one nucleic acid sequences encoding a GPGPG amino acid linker (SEQ ID NO: 56), where g=0 or 1, U comprises one of the at least one MHC class II epitope-encoding nucleic acid sequence, where f=1, X=1 to 400, where for each X the corresponding Nc is a SARS-CoV-2 derived nucleic acid sequence, and Y=0, 1, or 2, where for each Y the corresponding Uf is a universal MHC class II epitope-encoding nucleic acid sequence, optionally wherein the at least one universal sequence comprises at least one of Tetanus toxoid and PADRE, or a MHC class II SARS-CoV-2 derived epitope-encoding nucleic acid sequence.

[0094] In some aspects, for each X the corresponding Nc is a distinct SARS-CoV-2 derived nucleic acid sequence. In some aspects, for each Y the corresponding Uf is a distinct MHC class II SARS-CoV-2 derived nucleic acid sequence. In some aspects, b=1, d=1, e=1, g=1, h=1, X=18, Y=2, (i) the vector backbone comprises a ChAdV68 vector, a=1, P is a CMV promoter, the at least one second poly(A) sequence is present, wherein the second poly(A) sequence is an exogenous poly(A) sequence to the vector backbone, and optionally wherein the exogenous poly(A) sequence comprises an SV40 poly(A) signal sequence or a BGH poly(A) signal sequence, or (ii) the vector backbone comprises a Venezuelan equine encephalitis virus vector, a=0, and the antigen cassette is operably linked to an endogenous 26S promoter, and the at least one polyadenylation poly(A) sequence is a poly(A) sequence of at least 80 consecutive A nucleotides (SEQ ID NO: 27940) provided by the backbone, each N encodes a MHC class I epitope 7-15 amino acids in length, a MHC class II epitope, an epitope capable of stimulating a B cell response, or combinations thereof, L5 is a native 5′ linker sequence that encodes a native N-terminal amino acid sequence of the epitope, and wherein the 5′ linker sequence encodes a peptide that is at least 3 amino acids in length, L3 is a native 3′ linker sequence that encodes a native C-terminal amino acid sequence of the epitope, and wherein the 3′ linker sequence encodes a peptide that is at least 3 amino acids in length, and U is each of a PADRE class II sequence and a Tetanus toxoid MHC class II sequence.

[0095] In some aspects, the composition further comprises a nanoparticulate delivery vehicle. In some aspects, the nanoparticulate delivery vehicle is a lipid nanoparticle (LNP). In some aspects, the LNP comprises ionizable amino lipids. In some aspects, the ionizable amino lipids comprise MC3-like (dilinoleylmethyl-4-dimethylaminobutyrate) molecules. In some aspects, the nanoparticulate delivery vehicle encapsulates the antigen expression system.

[0096] In some aspects, the antigen cassette is integrated between the at least one promoter nucleotide sequence and the at least one poly(A) sequence. In some aspects, the at least one promoter nucleotide sequence is operably linked to the SARS-CoV-2 derived nucleic acid sequence.

[0097] In some aspects, the one or more vectors comprise one or more +-stranded RNA In some aspects, the one or more +-stranded RNA vectors comprise a 5′ 7-methylguanosine (m7g) cap. In some aspects, the one or more +-stranded RNA vectors are produced by in vitro transcription. In some aspects, the one or more vectors are self-replicating within a mammalian cell.

[0098] In some aspects, the backbone comprises at least one nucleotide sequence of an Aura virus, a Fort Morgan virus, a Venezuelan equine encephalitis virus, a Ross River virus, a Semliki Forest virus, a Sindbis virus, or a Mayaro virus. In some aspects, the backbone comprises at least one nucleotide sequence of a Venezuelan equine encephalitis virus. In some aspects, the backbone comprises at least sequences for nonstructural protein-mediated amplification, a 26S promoter sequence, a poly(A) sequence, a nonstructural protein 1 (nsP1) gene, a nsP2 gene, a nsP3 gene, and a nsP4 gene encoded by the nucleotide sequence of the Aura virus, the Fort Morgan virus, the Venezuelan equine encephalitis virus, the Ross River virus, the Semliki Forest virus, the Sindbis virus, or the Mayaro virus. In some aspects, the backbone comprises at least sequences for nonstructural protein-mediated amplification, a 26S promoter sequence, and a poly(A) sequence encoded by the nucleotide sequence of the Aura virus, the Fort Morgan virus, the Venezuelan equine encephalitis virus, the Ross River virus, the Semliki Forest virus, the Sindbis virus, or the Mayaro virus. In some aspects, sequences for nonstructural protein-mediated amplification are selected from the group consisting of: an alphavirus 5′ UTR, a 51-nt CSE, a 24-nt CSE, a 26S subgenomic promoter sequence, a 19-nt CSE, an alphavirus 3′ UTR, or combinations thereof. In some aspects, the backbone does not encode structural virion proteins capsid, E2 and E1. In some aspects, the antigen cassette is inserted in place of structural virion proteins within the nucleotide sequence of the Aura virus, the Fort Morgan virus, the Venezuelan equine encephalitis virus, the Ross River virus, the Semliki Forest virus, the Sindbis virus, or the Mayaro virus. In some aspects, the Venezuelan equine encephalitis virus comprises the sequence of SEQ ID NO:3 or SEQ ID NO:5. In some aspects, the Venezuelan equine encephalitis virus comprises the sequence of SEQ ID NO:3 or SEQ ID NO:5 further comprising a deletion between base pair 7544 and 11175. In some aspects, the backbone comprises the sequence set forth in SEQ ID NO:6 or SEQ ID NO:7. In some aspects, the antigen cassette is inserted at position 7544 to replace the deletion between base pairs 7544 and 11175 as set forth in the sequence of SEQ ID NO:3 or SEQ ID NO:5. In some aspects, the insertion of the antigen cassette provides for transcription of a polycistronic RNA comprising the nsP1-4 genes and the at least one SARS-CoV-2 derived nucleic acid sequence, wherein the nsP1-4 genes and the at least one SARS-CoV-2 derived nucleic acid sequence are in separate open reading frames. In some aspects, the at least one promoter nucleotide sequence is the native 26S promoter nucleotide sequence encoded by the backbone.

[0099] In some aspects, the backbone comprises at least one nucleotide sequence of a chimpanzee adenovirus vector, optionally wherein the chimpanzee adenovirus vector is a ChAdV68 vector. In some aspects, the ChAdV68 vector backbone comprises the sequence set forth in SEQ ID NO:1. In some aspects, the ChAdV68 vector backbone comprises the sequence set forth in SEQ ID NO:1, except that the sequence is fully deleted or functionally deleted in at least one gene selected from the group consisting of the chimpanzee adenovirus E1A, E1B, E2A, E2B, E3, E4, L1, L2, L3, L4, and L5 genes of the sequence set forth in SEQ ID NO:1, optionally wherein the sequence is fully deleted or functionally deleted in: (1) E1A and E1B; (2) E1A, E1B, and E3; or (3) E1A, E1B, E3, and E4 of the sequence set forth in SEQ ID NO:1. In some aspects, the ChAdV68 vector backbone comprises a gene or regulatory sequence obtained from the sequence of SEQ ID NO:1, optionally wherein the gene is selected from the group consisting of the chimpanzee adenovirus inverted terminal repeat (ITR), E1A, E1B, E2A, E2B, E3, E4, L1, L2, L3, L4, and L5 genes of the sequence set forth in SEQ ID NO:1. In some aspects, the ChAdV68 vector backbone comprises a partially deleted E4 gene comprising a deleted or partially-deleted E4orf2 region and a deleted or partially-deleted E4orf3 region, and optionally a deleted or partially-deleted E4orf4 region. In some aspects, the ChAdV68 vector backbone comprises at least nucleotides 2 to 36,518 of the sequence set forth in SEQ ID NO:1 and further comprising: (1) an E1 deletion of at least nucleotides 577 to 3403 of the sequence shown in SEQ ID NO:1, (2) an E3 deletion of at least nucleotides 27,125 to 31,825 of the sequence shown in SEQ ID NO:1, and (3) an E4 deletion of at least nucleotides 34,916 to 35,642 of the sequence shown in SEQ ID NO:1; optionally wherein the antigen cassette is inserted within the E1 deletion. In some aspects, the ChAdV68 vector backbone comprises the sequence set forth in SEQ ID NO:75, optionally wherein the antigen cassette is inserted within the E1 deletion. In some aspects, the ChAdV68 vector backbone comprises one or more deletions between base pair number 577 and 3403 or between base pair 456 and 3014, and optionally wherein the vector further comprises one or more deletions between base pair 27,125 and 31,825 or between base pair 27,816 and 31,333 of the sequence set forth in SEQ ID NO:1. In some aspects, the ChAdV68 vector backbone comprises one or more deletions between base pair number 3957 and 10346, base pair number 21787 and 23370, and base pair number 33486 and 36193 of the sequence set forth in SEQ ID NO:1. In some aspects, the wherein the cassette is inserted in the ChAdV backbone at the E1 region, E3 region, and/or any deleted AdV region that allows incorporation of the cassette. In some aspects, the ChAdV backbone is generated from one of a first generation, a second generation, or a helper-dependent adenoviral vector

[0100] In some aspects, the at least one promoter nucleotide sequence is selected from the group consisting of: a CMV, a SV40, an EF-1, a RSV, a PGK, a HSA, a MCK, and a EBV promoter sequence. In some aspects, the at least one promoter nucleotide sequence is a CMV promoter sequence. In some aspects, the at least one promoter nucleotide sequence is an exogenous RNA promoter. In some aspects, the second promoter nucleotide sequence is a 26S promoter nucleotide sequence or a CMV promoter nucleotide sequence. In some aspects, the second promoter nucleotide sequence comprises multiple 26S promoter nucleotide sequences or multiple CMV promoter nucleotide sequences, wherein each 26S promoter nucleotide sequence or CMV promoter nucleotide sequence provides for transcription of one or more of the separate open reading frames.

[0101] In some aspects, the one or more vectors are each at least 300 nt in size. In some aspects, the one or more vectors are each at least 1 kb in size. In some aspects, the one or more vectors are each 2 kb in size. In some aspects, the one or more vectors are each less than 5 kb in size.

[0102] In some aspects, at least one of the at least one SARS-CoV-2 derived nucleic acid sequences encodes a polypeptide sequence or portion thereof that is presented by MHC class I. In some aspects, at least one of the at least one SARS-CoV-2 derived nucleic acid sequences encodes a polypeptide sequence or portion thereof that is presented by MHC class II. In some aspects, at least one of the at least one SARS-CoV-2 derived nucleic acid sequences encodes a polypeptide sequence or portion thereof capable of stimulating a B cell response, optionally wherein the polypeptide sequence or portion thereof capable of stimulating a B cell response comprises a full-length protein, a protein domain, a protein subunit, or an antigenic fragment predicted or known to be capable of being bound by an antibody.

[0103] In some aspects, each SARS-CoV-2 derived nucleic acid sequence is linked directly to one another. In some aspects, at least one of the at least one SARS-CoV-2 derived nucleic acid sequences is linked to a distinct SARS-CoV-2 derived nucleic acid sequence with a nucleic acid sequence encoding a linker. In some aspects, the linker links In some aspects, the linker is selected from the group consisting of: (1) consecutive glycine residues, at least 2, 3, 4, 5, 6, 7, 8, 9, or 10 residues in length (SEQ ID NO: 27941); (2) consecutive alanine residues, at least 2, 3, 4, 5, 6, 7, 8, 9, or 10 residues in length (SEQ ID NO: 27942); (3) two arginine residues (RR); (4) alanine, alanine, tyrosine (AAY); (5) a consensus sequence at least 2, 3, 4, 5, 6, 7, 8, 9, or 10 amino acid residues in length that is processed efficiently by a mammalian proteasome; (6) one or more native sequences flanking the antigen derived from the cognate protein of origin and that is at least 2, 3, 4, 5, 6, 7, 8, 9, 10, 11, 12, 13, 14, 15, 16, 17, 18, 19, 20, or 2-20 amino acid residues in length; and (7) a furin or TEV cleavage sequence. In some aspects, the linker links two MHC class II sequences or an MHC class II sequence to an MHC class I sequence. In some aspects, the linker comprises the sequence GPGPG (SEQ ID NO: 56).

[0104] In some aspects, at least one sequence of the at least one SARS-CoV-2 derived nucleic acid sequences is linked, operably or directly, to a separate or contiguous sequence that enhances the expression, stability, cell trafficking, processing and presentation, and/or immunogenicity of the at least one SARS-CoV-2 derived nucleic acid sequences. In some aspects, the separate or contiguous sequence comprises at least one of: a ubiquitin sequence, a ubiquitin sequence modified to increase proteasome targeting (e.g., the ubiquitin sequence contains a Gly to Ala substitution at position 76), an immunoglobulin signal sequence (e.g., IgK), a major histocompatibility class I sequence, lysosomal-associated membrane protein (LAMP)-1, human dendritic cell lysosomal-associated membrane protein, and a major histocompatibility class II sequence; optionally wherein the ubiquitin sequence modified to increase proteasome targeting is A76.

[0105] In some aspects, at least one of the at least one SARS-CoV-2 derived nucleic acid sequences encodes two or more distinct polypeptides predicted or validated to be capable of presentation by at least one HLA allele.

[0106] In some aspects, each of the at least one SARS-CoV-2 derived nucleic acid sequences encodes a polypeptide sequence or portion thereof that is less than 50%, less than 49%, less than 48%, less than 47%, less than 46%, less than 45%, less than 45%, less than 43%, less than 42%, less than 41%, less than 40%, less than 39%, less than 38%, less than 37%, less than 36%, less than 35%, less than 34%, or less than 33% of the translated, corresponding full-length SARS-CoV-2 protein.

[0107] In some aspects, each of the at least one SARS-CoV-2 derived nucleic acid sequences encodes a polypeptide sequence or portion thereof that does not encode a functional protein, functional protein domain, functional protein subunit, or functional protein fragment of the translated, corresponding SARS-CoV-2 protein.

[0108] In some aspects, two or more of the at least one SARS-CoV-2 derived nucleic acid sequences are derived from the same SARS-CoV-2 gene. In some aspects, the two or more SARS-CoV-2 derived nucleic acid sequences derived from the same SARS-CoV-2 gene are ordered such that a first nucleic acid sequence cannot be immediately followed by or linked to a second nucleic acid sequence if the second nucleic acid sequence follows first nucleic acid sequence in the corresponding SARS-CoV-2 gene.

[0109] In some aspects, the at least one SARS-CoV-2 derived nucleic acid sequence comprises at least 2-10, 2, 3, 4, 5, 6, 7, 8, 9, or 10 nucleic acid sequences. In some aspects, the at least one SARS-CoV-2 derived nucleic acid sequence comprises at least 11-20, 15-20, 11-100, 11-200, 11-300, 11-400, 11, 12, 13, 14, 15, 16, 17, 18, 19, 20 or up to 400 nucleic acid sequences. In some aspects, the at least one SARS-CoV-2 derived nucleic acid sequence comprises at least 2-400 nucleic acid sequences and wherein at least two of the SARS-CoV-2 derived nucleic acid sequences encode polypeptide sequences or portions thereof that are (1) presented by MHC class I, (2) presented by MHC class II, and/or (3) capable of stimulating a B cell response. In some aspects, at least two of the SARS-CoV-2 derived nucleic acid sequences encode polypeptide sequences or portions thereof that are (1) presented by MHC class I, (2) presented by MHC class II, and/or (3) capable of stimulating a B cell response class.

[0110] In some aspects, when administered to the subject and translated, at least one of the antigens encoded by the at least one SARS-CoV-2 derived nucleic acid sequence are presented on antigen presenting cells resulting in an immune response targeting at least one of the antigens on a SARS-CoV-2 infected cell surface. In some aspects, when administered to the subject and translated, at least one of the antigens encoded by the at least one SARS-CoV-2 derived nucleic acid sequence results in an antibody response targeting at least one of the antigens on a SARS-CoV-2 virus. In some aspects, the at least one SARS-CoV-2 derived nucleic acid sequences when administered to the subject and translated, at least one of the MHC class I or class II antigens are presented on antigen presenting cells resulting in an immune response targeting at least one of the antigens on a SARS-CoV-2 infected cell surface, and optionally wherein the expression of each of the at least one SARS-CoV-2 derived nucleic acid sequences is driven by the at least one promoter nucleotide sequence.

[0111] In some aspects, each MHC class I epitope-encoding SARS-CoV-2 derived nucleic acid sequence encodes a polypeptide sequence between 8 and 35 amino acids in length, optionally 9-17, 9-25, 8, 9, 10, 11, 12, 13, 14, 15, 16, 17, 18, 19, 20, 21, 22, 23, 24, 25, 26, 27, 28, 29, 30, 31, 32, 33, 34 or 35 amino acids in length. In some aspects, the at least one MHC class II epitope-encoding nucleic acid sequence is present. In some aspects, the at least one MHC class II epitope-encoding nucleic acid sequence is present and comprises at least one MHC class II SARS-CoV-2 derived nucleic acid sequence. In some aspects, the at least one MHC class II epitope-encoding nucleic acid sequence is 12-20, 12, 13, 14, 15, 16, 17, 18, 19, 20, or 20-40 amino acids in length. In some aspects, the at least one MHC class II epitope-encoding nucleic acid sequence is present and comprises at least one universal MHC class II epitope-encoding nucleic acid sequence, optionally wherein the at least one universal sequence comprises at least one of Tetanus toxoid and PADRE, and/or at least one MHC class II SARS-CoV-2 derived epitope-encoding nucleic acid sequence.

[0112] In some aspects, the at least one promoter nucleotide sequence or the second promoter nucleotide sequence is inducible. In some aspects, the at least one promoter nucleotide sequence or the second promoter nucleotide sequence is non-inducible. In some aspects, the at least one poly(A) sequence comprises a poly(A) sequence native to the backbone. In some aspects, the at least one poly(A) sequence comprises a poly(A) sequence exogenous to the backbone.

[0113] In some aspects, the at least one poly(A) sequence is operably linked to at least one of the at least one SARS-CoV-2 derived nucleic acid sequences. In some aspects, the at least one poly(A) sequence is at least 20, at least 30, at least 40, at least 50, at least 60, at least 70, at least 80, or at least 90 consecutive A nucleotides (SEQ ID NO: 27943). In some aspects, the at least one poly(A) sequence is at least 80 consecutive A nucleotides (SEQ ID NO: 27940). In some aspects, the at least one second poly(A) sequence is present. In some aspects, the at least one second poly(A) sequence comprises an SV40 poly(A) signal sequence or a Bovine Growth Hormone (BGH) poly(A) signal sequence, or a combination of two more SV40 poly(A) signal sequences or BGH poly(A) signal sequence. In some aspects, the at least one second poly(A) sequence comprises two or more second poly(A) sequences, optionally wherein the two or more second poly(A) sequences comprises two or more SV40 poly(A) signal sequences two or more BGH poly(A) signal sequences, or a combination of SV40 poly(A) signal sequences and BGH poly(A) signal sequences.

[0114] In some aspects, the antigen cassette further comprises at least one of: an intron sequence, an exogenous intron sequence, a Constitutive Transport Element (CTE), a RNA Transport Element (RTE), a woodchuck hepatitis virus posttranscriptional regulatory element (WPRE) sequence, an internal ribosome entry sequence (IRES) sequence, a nucleotide sequence encoding a 2A self cleaving peptide sequence, a nucleotide sequence encoding a Furin cleavage site, or a sequence in the 5′ or 3′ non-coding region known to enhance the nuclear export, stability, or translation efficiency of mRNA that is operably linked to at least one of the at least one SARS-CoV-2 derived nucleic acid sequences.

[0115] In some aspects, the antigen cassette further comprises a reporter gene, including but not limited to, green fluorescent protein (GFP), a GFP variant, secreted alkaline phosphatase, luciferase, a luciferase variant, or a detectable peptide or epitope. In some aspects, the detectable peptide or epitope is selected from the group consisting of an HA tag, a Flag tag, a His-tag, or a V5 tag.

[0116] In some aspects, the one or more vectors further comprises one or more nucleic acid sequences encoding at least one immune modulator. In some aspects, the immune modulator is an anti-CTLA4 antibody or an antigen-binding fragment thereof, an anti-PD-1 antibody or an antigen-binding fragment thereof, an anti-PD-L1 antibody or an antigen-binding fragment thereof, an anti-4-1BB antibody or an antigen-binding fragment thereof, or an anti-OX-40 antibody or an antigen-binding fragment thereof. In some aspects, the antibody or antigen-binding fragment thereof is a Fab fragment, a Fab′ fragment, a single chain Fv (scFv), a single domain antibody (sdAb) either as single specific or multiple specificities linked together (e.g., camelid antibody domains), or full-length single-chain antibody (e.g., full-length IgG with heavy and light chains linked by a flexible linker). In some aspects, the heavy and light chain sequences of the antibody are a contiguous sequence separated by either a self-cleaving sequence such as 2A or IRES; or the heavy and light chain sequences of the antibody are linked by a flexible linker such as consecutive glycine residues. In some aspects, the immune modulator is a cytokine. In some aspects, the cytokine is at least one of IL-2, IL-7, IL-12, IL-15, or IL-21 or variants thereof of each.

[0117] In some aspects, a MHC class I or MHC class II epitope-encoding SARS-CoV-2 derived nucleic acid sequence is selected by performing the steps of: (a) obtaining at least one of exome, transcriptome, or whole genome SARS-CoV-2 nucleotide sequencing data from a SARS-CoV-2 virus or SARS-CoV-2 infected cell, wherein the SARS-CoV-2 nucleotide sequencing data is used to obtain data representing peptide sequences of each of a set of antigens; (b) inputting the peptide sequence of each antigen into a presentation model to generate a set of numerical likelihoods that each of the antigens is presented by one or more of the MHC alleles on a SARS-CoV-2 infected cell surface, the set of numerical likelihoods having been identified at least based on received mass spectrometry data; and (c) selecting a subset of the set of antigens based on the set of numerical likelihoods to generate a set of selected antigens which are used to generate the MHC class I or MHC class II epitope-encoding SARS-CoV-2 derived nucleic acid sequence.

[0118] In some aspects, each MHC class I or MHC class II epitope-encoding SARS-CoV-2 derived nucleic acid sequences is selected by performing the steps of: (a) obtaining at least one of exome, transcriptome, or whole genome SARS-CoV-2 nucleotide sequencing data from a SARS-CoV-2 virus or SARS-CoV-2 infected cell, wherein the SARS-CoV-2 nucleotide sequencing data is used to obtain data representing peptide sequences of each of a set of antigens; (b) inputting the peptide sequence of each antigen into a presentation model to generate a set of numerical likelihoods that each of the antigens is presented by one or more of the MHC alleles on a SARS-CoV-2 infected cell surface, the set of numerical likelihoods having been identified at least based on received mass spectrometry data; and (c) selecting a subset of the set of antigens based on the set of numerical likelihoods to generate a set of selected antigens which are used to generate the at least 18 SARS-CoV-2 derived nucleic acid sequences. In some aspects, a number of the set of selected antigens is 2-20. In some aspects, the presentation model represents dependence between: (a) presence of a pair of a particular one of the MHC alleles and a particular amino acid at a particular position of a peptide sequence; and (b) likelihood of presentation on a SARS-CoV-2 infected cell surface, by the particular one of the MHC alleles of the pair, of such a peptide sequence comprising the particular amino acid at the particular position. In some aspects, selecting the set of selected antigens comprises selecting antigens that have an increased likelihood of being presented on a SARS-CoV-2 infected cell surface relative to unselected antigens based on the presentation model, optionally wherein the selected antigens have been validated as being presented by one or more specific HLA alleles. In some aspects, selecting the set of selected antigens comprises selecting antigens that have an increased likelihood of being capable of inducing a SARS-CoV-2 specific immune response in the subject relative to unselected antigens based on the presentation model. In some aspects, selecting the set of selected antigens comprises selecting antigens that have an increased likelihood of being capable of being presented to naïve T cells by professional antigen presenting cells (APCs) relative to unselected antigens based on the presentation model, optionally wherein the APC is a dendritic cell (DC). In some aspects, selecting the set of selected antigens comprises selecting antigens that have a decreased likelihood of being subject to inhibition via central or peripheral tolerance relative to unselected antigens based on the presentation model. In some aspects, selecting the set of selected antigens comprises selecting antigens that have a decreased likelihood of being capable of inducing an autoimmune response to normal tissue in the subject relative to unselected antigens based on the presentation model. In some aspects, exome or transcriptome SARS-CoV-2 nucleotide sequencing data is obtained by performing sequencing on a SARS-CoV-2 virus or SARS-CoV-2 infected tissue or cell. In some aspects, the sequencing is next generation sequencing (NGS) or any massively parallel sequencing approach.

[0119] In some aspects, the antigen cassette comprises junctional epitope sequences formed by adjacent sequences in the antigen cassette. In some aspects, at least one or each junctional epitope sequence has an affinity of greater than 500 nM for MHC. In some aspects, each junctional epitope sequence is non-self.

[0120] In some aspects, each of the MHC class I and/or MHC class II epitopes is predicted or validated to be capable of presentation by at least one HLA allele present in at least 5% of a population. In some aspects, each of the MHC class I and/or MHC class II epitopes is predicted or validated to be capable of presentation by at least one HLA allele, wherein each antigen/HLA pair has an antigen/HLA prevalence of at least 0.01% in a population. In some aspects, each of the MHC class I and/or MHC class II epitopes is predicted or validated to be capable of presentation by at least one HLA allele, wherein each antigen/HLA pair has an antigen/HLA prevalence of at least 0.1% in a population.

[0121] In some aspects, the antigen cassette does not encode a non-therapeutic MHC class I or class II epitope nucleic acid sequence comprising a translated, wild-type nucleic acid sequence, wherein the non-therapeutic epitope is predicted to be displayed on an MHC allele of the subject. In some aspects, the non-therapeutic predicted MHC class I or class II epitope sequence is a junctional epitope sequence formed by adjacent sequences in the antigen cassette.

[0122] In some aspects, the prediction is based on presentation likelihoods generated by inputting sequences of the non-therapeutic epitopes into a presentation model. In some aspects, an order of the at least one SARS-CoV-2 derived nucleic acid sequences in the antigen cassette is determined by a series of steps comprising: (a) generating a set of candidate antigen cassette sequences corresponding to different orders of the at least one SARS-CoV-2 derived nucleic acid sequences; (b) determining, for each candidate antigen cassette sequence, a presentation score based on presentation of non-therapeutic epitopes in the candidate antigen cassette sequence; and (c) selecting a candidate cassette sequence associated with a presentation score below a predetermined threshold as the antigen cassette sequence for an antigen vaccine.

[0123] Also provided for herein is a pharmaceutical composition any of the compositions provided herein and a pharmaceutically acceptable carrier. In some aspects, the composition further comprises an adjuvant. In some aspects, the composition further comprises an immune modulator. In some aspects, the immune modulator is an anti-CTLA4 antibody or an antigen-binding fragment thereof, an anti-PD-1 antibody or an antigen-binding fragment thereof, an anti-PD-L1 antibody or an antigen-binding fragment thereof, an anti-4-1BB antibody or an antigen-binding fragment thereof, or an anti-OX-40 antibody or an antigen-binding fragment thereof.

[0124] Also provided herein is an isolated nucleotide sequence or set of isolated nucleotide sequences comprising the antigen cassette of any of the compositions described herein and one or more elements obtained from the sequence of SEQ ID NO:3 or SEQ ID NO:5, optionally wherein the one or more elements are selected from the group consisting of the sequences necessary for nonstructural protein-mediated amplification, the 26S promoter nucleotide sequence, the poly(A) sequence, and the nsP1-4 genes of the sequence set forth in SEQ ID NO:3 or SEQ ID NO:5, and optionally wherein the nucleotide sequence is cDNA. In some aspects, the sequence or set of isolated nucleotide sequences comprises the antigen cassette of any of the above composition claims inserted at position 7544 of the sequence set forth in SEQ ID NO:6 or SEQ ID NO:7. In some aspects, the isolated sequence further comprises: a T7 or SP6 RNA polymerase promoter nucleotide sequence 5′ of the one or more elements obtained from the sequence of SEQ ID NO:3 or SEQ ID NO:5; and optionally, one or more restriction sites 3′ of the poly(A) sequence. In some aspects, the antigen cassette of any of the compositions provided herein is inserted at position 7563 of SEQ ID NO:8 or SEQ ID NO:9.

[0125] Also provided herein is an isolated nucleotide sequence or set of isolated nucleotide sequences comprising the antigen cassette of any of the compositions provided herein and one or more elements obtained from the sequence of SEQ ID NO:1 or SEQ ID NO:75, optionally wherein the one or more elements are selected from the group consisting of the chimpanzee adenovirus inverted terminal repeat (ITR), E1A, E1B, E2A, E2B, E3, E4, L1, L2, L3, L4, and L5 genes of the sequence set forth in SEQ ID NO:1, and optionally wherein the nucleotide sequence is cDNA. In some aspects, the sequence or set of isolated nucleotide sequences comprises the antigen cassette of any of the compositions provided herein inserted within the E1 deletion of the sequence set forth in SEQ ID NO:75. In some aspects, the isolated sequence further comprises: a T7 or SP6 RNA polymerase promoter nucleotide sequence 5′ of the one or more elements obtained from the sequence of SEQ ID NO:1 or SEQ ID NO:75; and optionally, one or more restriction sites 3′ of the poly(A) sequence.

[0126] Also provided herein is a vector or set of vectors comprising any of the isolated nucleotide sequences or set of isolated nucleotide sequences provided herein.

[0127] Also provided herein is an isolated cell comprising any of the isolated nucleotide sequences or set of isolated nucleotide sequences provided herein, optionally wherein the cell is a BHK-21, CHO, HEK293 or variants thereof, 911, HeLa, A549, LP-293, PER.C6, or AE1-2a cell.

[0128] Also provided herein is a kit comprising any of the compositions provided herein and instructions for use.

[0129] Also provided herein is a method for treating a SARS-CoV-2 infection or preventing a SARS-CoV-2 infection in a subject, the method comprising administering to the subject any of the compositions or pharmaceutical compositions provided herein. In some aspects, the SARS-CoV-2 derived nucleic acid sequence encodes at least one immunogenic polypeptide corresponding to a polypeptide encoded by a SARS-CoV-2 subtype the subject is infected with or at risk for infection by.

[0130] In some aspects, any of the methods described herein comprises a homologous prime/boost strategy. In some aspects, any of the methods described herein comprises a heterologous prime/boost strategy. In some aspects, the heterologous prime/boost strategy comprises an identical antigen cassette encoded by different vaccine platforms. In some aspects, the heterologous prime/boost strategy comprises different antigen cassettes encoded by the same vaccine platform. In some aspects, the heterologous prime/boost strategy comprises different antigen cassettes encoded by different vaccine platforms. In some aspects, the different antigen cassettes comprise a Spike-encoding cassette and a separate T cell epitope encoding cassette. In some aspects, the different antigen cassettes comprise cassettes encoding distinct epitopes and/or antigens derived from different isolates of SARS-CoV-2.

[0131] Also provided herein is a method for inducing an immune response in a subject, the method comprising administering to the subject any of the compositions or pharmaceutical compositions provided herein. In some aspects, the subject expresses at least one HLA allele predicted or known to present a MHC class I or MHC class II epitope encoded by the at least one SARS-CoV-2 derived nucleic acid sequence. In some aspects, the subject expresses at least one HLA allele predicted or known to present a MHC class I epitope encoded by the at least one SARS-CoV-2 derived nucleic acid sequence, and wherein the MHC class I epitope comprises at least one MHC class I epitope comprising a polypeptide sequence as set forth in Table A. In some aspects, the subject express at least one HLA allele predicted or known to present a MHC class II epitope encoded by the at least one SARS-CoV-2 derived nucleic acid sequence, and wherein the MHC class II epitope comprises at least one MHC class II epitope comprising a polypeptide sequence as set forth in Table B. In some aspects, the composition is administered intramuscularly (IM), intradermally (ID), subcutaneously (SC), or intravenously (IV). In some aspects, the composition is administered intramuscularly

[0132] In some aspects, the method further comprises administration of one or more immune modulators, optionally wherein the immune modulator is administered before, concurrently with, or after administration of the composition or pharmaceutical composition. In some aspects, the one or more immune modulators are selected from the group consisting of: an anti-CTLA4 antibody or an antigen-binding fragment thereof, an anti-PD-1 antibody or an antigen-binding fragment thereof, an anti-PD-L1 antibody or an antigen-binding fragment thereof, an anti-4-1BB antibody or an antigen-binding fragment thereof, or an anti-OX-40 antibody or an antigen-binding fragment thereof. In some aspects, the immune modulator is administered intravenously (IV), intramuscularly (IM), intradermally (ID), or subcutaneously (SC). In some aspects, the subcutaneous administration is near the site of the composition or pharmaceutical composition administration or in close proximity to one or more vector or composition draining lymph nodes.

[0133] In some aspects, the method further comprises administering to the subject a second vaccine composition. In some aspects, the second vaccine composition is administered prior to the administration of the first composition or pharmaceutical composition. In some aspects, the second vaccine composition is administered subsequent to the administration of any of the compositions or pharmaceutical compositions provided herein. In some aspects, the second vaccine composition is the same as the first composition or pharmaceutical composition administered. In some aspects, the second vaccine composition is different from the first composition or pharmaceutical composition administered. In some aspects, the second vaccine composition comprises a chimpanzee adenovirus vector encoding at least one SARS-CoV-2 derived nucleic acid sequence. In some aspects, the at least one SARS-CoV-2 derived nucleic acid sequence encoded by the chimpanzee adenovirus vector is the same as the at least one SARS-CoV-2 derived nucleic acid sequence of any of the compositions provided herein.

[0134] Also provided herein is a method of manufacturing the one or more vectors of any of the above composition claims, the method comprising: (a) obtaining a linearized DNA sequence comprising the backbone and the antigen cassette; (b) in vitro transcribing the linearized DNA sequence by addition of the linearized DNA sequence to an in vitro transcription reaction containing all the necessary components to transcribe the linearized DNA sequence into RNA, optionally further comprising in vitro addition of the m7g cap to the resulting RNA; and (c) isolating the one or more vectors from the in vitro transcription reaction. In some aspects, the linearized DNA sequence is generated by linearizing a DNA plasmid sequence or by amplification using PCR. In some aspects, the DNA plasmid sequence is generated using one of bacterial recombination or full genome DNA synthesis or full genome DNA synthesis with amplification of synthesized DNA in bacterial cells. In some aspects, isolating the one or more vectors from the in vitro transcription reaction involves one or more of phenol chloroform extraction, silica column based purification, or similar RNA purification methods.

[0135] Also provided herein is a method of manufacturing the composition of any of the above composition claims for delivery of the antigen expression system, the method comprising: (a) providing components for the nanoparticulate delivery vehicle; (b) providing the antigen expression system; and (c) providing conditions sufficient for the nanoparticulate delivery vehicle and the antigen expression system to produce the composition for delivery of the antigen expression system. In some aspects, the conditions are provided by microfluidic mixing.

[0136] Also provided herein is a method of manufacturing an adenovirus vector disclosed herein, the method comprising: obtaining a plasmid sequence comprising the at least one promoter sequence and the antigen cassette; transfecting the plasmid sequence into one or more host cells; and isolating the adenovirus vector from the one or more host cells.

[0137] In some aspects, isolating comprises: lysing the host cell to obtain a cell lysate comprising the adenovirus vector; and purifying the adenovirus vector from the cell lysate.

[0138] In some aspects, the plasmid sequence is generated using one of bacterial recombination or full genome DNA synthesis or full genome DNA synthesis with amplification of synthesized DNA in bacterial cells. In some aspects, the one or more host cells are at least one of CHO, HEK293 or variants thereof, 911, HeLa, A549, LP-293, PER.C6, and AE1-2a cells. In some aspects, purifying the adenovirus vector from the cell lysate involves one or more of chromatographic separation, centrifugation, virus precipitation, and filtration.

[0139] In some aspects, any of the above compositions further comprise a nanoparticulate delivery vehicle. The nanoparticulate delivery vehicle, in some aspects, may be a lipid nanoparticle (LNP). In some aspects, the LNP comprises ionizable amino lipids. In some aspects, the ionizable amino lipids comprise MC3-like (dilinoleylmethyl-4-dimethylaminobutyrate) molecules. In some aspects, the nanoparticulate delivery vehicle encapsulates the antigen expression system.

[0140] In some aspects, any of the above compositions further comprise a plurality of LNPs, wherein the LNPs comprise: the antigen expression system; a cationic lipid; a non-cationic lipid; and a conjugated lipid that inhibits aggregation of the LNPs, wherein at least about 95% of the LNPs in the plurality of LNPs either: have a non-lamellar morphology; or are electron-dense.

[0141] In some aspects, the non-cationic lipid is a mixture of (1) a phospholipid and (2) cholesterol or a cholesterol derivative.

[0142] In some aspects, the conjugated lipid that inhibits aggregation of the LNPs is a polyethyleneglycol (PEG)-lipid conjugate. In some aspects, the PEG-lipid conjugate is selected from the group consisting of: a PEG-diacylglycerol (PEG-DAG) conjugate, a PEG dialkyloxypropyl (PEG-DAA) conjugate, a PEG-phospholipid conjugate, a PEG-ceramide (PEG-Cer) conjugate, and a mixture thereof. In some aspects the PEG-DAA conjugate is a member selected from the group consisting of: a PEG-didecyloxypropyl (C₁₀) conjugate, a PEG-dilauryloxypropyl (C₁₂) conjugate, a PEG-dimyristyloxypropyl (C₁₄) conjugate, a PEG-dipalmityloxypropyl (C₁₆) conjugate, a PEG-distearyloxypropyl (C₁₈) conjugate, and a mixture thereof.

[0143] In some aspects, the antigen expression system is fully encapsulated in the LNPs.

[0144] In some aspects, the non-lamellar morphology of the LNPs comprises an inverse hexagonal (H_{II}) or cubic phase structure.

[0145] In some aspects, the cationic lipid comprises from about 10 mol % to about 50 mol % of the total lipid present in the LNPs. In some aspects, the cationic lipid comprises from about 20 mol % to about 50 mol % of the total lipid present in the LNPs. In some aspects, the cationic lipid comprises from about 20 mol % to about 40 mol % of the total lipid present in the LNPs.

[0146] In some aspects, the non-cationic lipid comprises from about 10 mol % to about 60 mol % of the total lipid present in the LNPs. In some aspects, the non-cationic lipid comprises from about 20 mol % to about 55 mol % of the total lipid present in the LNPs. In some aspects, the non-cationic lipid comprises from about 25 mol % to about 50 mol % of the total lipid present in the LNPs.

[0147] In some aspects, the conjugated lipid comprises from about 0.5 mol % to about 20 mol % of the total lipid present in the LNPs. In some aspects, the conjugated lipid comprises from about 2 mol % to about 20 mol % of the total lipid present in the LNPs. In some aspects, the conjugated lipid comprises from about 1.5 mol % to about 18 mol % of the total lipid present in the LNPs.

[0148] In some aspects, greater than 95% of the LNPs have a non-lamellar morphology. In some aspects, greater than 95% of the LNPs are electron dense.

[0149] In some aspects, any of the above compositions further comprise a plurality of LNPs, wherein the LNPs comprise: a cationic lipid comprising from 50 mol % to 65 mol % of the total lipid present in the LNPs; a conjugated lipid that inhibits aggregation of LNPs comprising from 0.5 mol % to 2 mol % of the total lipid present in the LNPs; and a non-cationic lipid comprising either: a mixture of a phospholipid and cholesterol or a derivative thereof, wherein the phospholipid comprises from 4 mol % to 10 mol % of the total lipid present in the LNPs and the cholesterol or derivative thereof comprises from 30 mol % to 40 mol % of the total lipid present in the LNPs; a mixture of a phospholipid and cholesterol or a derivative thereof, wherein the phospholipid comprises from 3 mol % to 15 mol % of the total lipid present in the LNPs and the cholesterol or derivative thereof comprises from 30 mol % to 40 mol % of the total lipid present in the LNPs; or up to 49.5 mol % of the total lipid present in the LNPs and comprising a mixture of a phospholipid and cholesterol or a derivative thereof, wherein the cholesterol or derivative thereof comprises from 30 mol % to 40 mol % of the total lipid present in the LNPs.

[0150] In some aspects, any of the above compositions further comprise a plurality of LNPs, wherein the LNPs comprise: a cationic lipid comprising from 50 mol % to 85 mol % of the total lipid present in the LNPs; a conjugated lipid that inhibits aggregation of LNPs comprising from 0.5 mol % to 2 mol % of the total lipid present in the LNPs; and a non-cationic lipid comprising from 13 mol % to 49.5 mol % of the total lipid present in the LNPs.

[0151] In some aspects, the phospholipid comprises dipalmitoylphosphatidylcholine (DPPC), distearoylphosphatidylcholine (DSPC), or a mixture thereof.

[0152] In some aspects, the conjugated lipid comprises a polyethyleneglycol (PEG)-lipid conjugate. In some aspects, the PEG-lipid conjugate comprises a PEG-diacylglycerol (PEG-DAG) conjugate, a PEG-dialkyloxypropyl (PEG-DAA) conjugate, or a mixture thereof. In some aspects, the PEG-DAA conjugate comprises a PEG-dimyristyloxypropyl (PEG-DMA) conjugate, a PEG-distearyloxypropyl (PEG-DSA) conjugate, or a mixture thereof. In some aspects, the PEG portion of the conjugate has an average molecular weight of about 2,000 daltons.

[0153] In some aspects, the conjugated lipid comprises from 1 mol % to 2 mol % of the total lipid present in the LNPs.

[0154] In some aspects, the LNP comprises a compound having a structure of Formula I:

[chemical structure]

or a pharmaceutically acceptable salt, tautomer, prodrug or stereoisomer thereof, wherein: L¹ and L2 are each independently -0(C=0)-, —(C=0)0-, —C(=0)-, -0-, —S(0)ₓ-, —S—S—, —C(=0)S—, —SC(=0)-, —R^{a}C(=0)-, —C(=0) R^{a}—, —R^{a}C(=0) R^{a}—, —OC(=0) R^{a}—, —R^{a}C(=0)0- or a direct bond; G¹ is Ci-C₂ alkylene, —(C=0)-, -0(C=0)-, —SC(=0)-, —R^{a}C(=0)- or a direct bond: —C(=0)-, —(C=0)0-, —C(=0)S—, —C(=0) R^{a}— or a direct bond; G is C₁-C₆ alkylene; R^{a} is H or C1-C12 alkyl; R^{1a} and R^{1b} are, at each occurrence, independently either: (a) H or C₁-C₁₂ alkyl; or (b) R^{1a} is H or C₁-C₁₂ alkyl, and R^{1b} together with the carbon atom to which it is bound is taken together with an adjacent R^{1b} and the carbon atom to which it is bound to form a carbon-carbon double bond; R^{2a} and R^{2b} are, at each occurrence, independently either: (a) H or C₁-C₁₂ alkyl; or (b) R^{2a} is H or C₁-C₁₂ alkyl, and R^{2b} together with the carbon atom to which it is bound is taken together with an adjacent R^{2b} and the carbon atom to which it is bound to form a carbon-carbon double bond; R^{3a} and R^{3b} are, at each occurrence, independently either (a): H or C₁-C₁₂ alkyl; or (b) R^{3a} is H or C₁-C₁₂ alkyl, and R^{3b} together with the carbon atom to which it is bound is taken together with an adjacent R and the carbon atom to which it is bound to form a carbon-carbon double bond; R^{4a} and R^{4b} are, at each occurrence, independently either: (a) H or C1-C12 alkyl; or (b) R^{4a} is H or C1-C12 alkyl, and R^{4b} together with the carbon atom to which it is bound is taken together with an adjacent R^{4b} and the carbon atom to which it is bound to form a carbon-carbon double bond; R⁵ and R⁶ are each independently H or methyl; R⁷ is C4-C20 alkyl; R⁸ and R⁹ are each independently C1-C12 alkyl; or R⁸ and R⁹, together with the nitrogen atom to which they are attached, form a 5, 6 or 7-membered heterocyclic ring; a, b, c and d are each independently an integer from 1 to 24; and x is 0, 1 or 2.

[0155] In some aspects, the LNP comprises a compound having a structure of Formula II:

[chemical structure]

or a pharmaceutically acceptable salt, tautomer, prodrug or stereoisomer thereof, wherein: L¹ and L2 are each independently -0(C=0)-, —(C=0)0- or a carbon-carbon double bond; R^{1a} and R^{1b} are, at each occurrence, independently either (a) H or C1-C₁₂ alkyl, or (b) R^{1a} is H or C1-C₁₂ alkyl, and R^{1b} together with the carbon atom to which it is bound is taken together with an adjacent R^{1b} and the carbon atom to which it is bound to form a carbon-carbon double bond; R^{2a} and R^{2b} are, at each occurrence, independently either (a) H or C₁-C₁₂ alkyl, or (b) R^{2a} is H or C₁-C₁₂ alkyl, and R^{2b} together with the carbon atom to which it is bound is taken together with an adjacent R^{2b} and the carbon atom to which it is bound to form a carbon-carbon double bond; R^{3a} and R^{3b} are, at each occurrence, independently either (a) H or C₁-C₁₂ alkyl, or (b) R^{3a} is H or C₁-C₁₂ alkyl, and R^{3b} together with the carbon atom to which it is bound is taken together with an adjacent R^{3b} and the carbon atom to which it is bound to form a carbon-carbon double bond; R^{4a} and R^{4b} are, at each occurrence, independently either (a) H or C1-C₁₂ alkyl, or (b) R^{4a} is H or C1-C₁₂ alkyl, and R^{4b} together with the carbon atom to which it is bound is taken together with an adjacent R^{4b} and the carbon atom to which it is bound to form a carbon-carbon double bond; R⁵ and R⁶ are each independently methyl or cycloalkyl; R⁷ is, at each occurrence, independently H or C₁-C₁₂ alkyl; R⁸ and R⁹ are each independently unsubstituted C1-C12 alkyl; or R⁸ and R⁹, together with the nitrogen atom to which they are attached, form a 5, 6 or 7-membered heterocyclic ring comprising one nitrogen atom; a and d are each independently an integer from 0 to 24; b and c are each independently an integer from 1 to 24; and e is 1 or 2, provided that: at least one of R^{1a}, R^{2a}, R^{3a} or R^{4a} is C1-C12 alkyl, or at least one of L¹ or L² is -0(C=0)- or —(C=0)0-; and R^{1a} and R^{1b} are not isopropyl when a is 6 or n-butyl when a is 8.

[0156] In some aspects, any of the above compositions further comprise one or more excipients comprising a neutral lipid, a steroid, and a polymer conjugated lipid. In some aspects, the neutral lipid comprises at least one of 1,2-Distearoyl-sn-glycero-3-phosphocholine (DSPC), 1,2-Dipalmitoyl-sn-glycero-3-phosphocholine (DPPC), 1,2-Dimyristoyl-sn-glycero-3-phosphocholine (DMPC), 1-Palmitoyl-2-oleoyl-sn-glycero-3-phosphocholine (POPC), 1,2-dioleoyl-sn-glycero-3-phosphocholine (DOPC), and 1,2-Dioleoyl-sn-glycero-3-phosphoethanolamine (DOPE). In some aspects, the neutral lipid is DSPC.

[0157] In some aspects, the molar ratio of the compound to the neutral lipid ranges from about 2:1 to about 8:1.

[0158] In some aspects, the steroid is cholesterol. In some aspects, the molar ratio of the compound to cholesterol ranges from about 2:1 to 1:1.

[0159] In some aspects, the polymer conjugated lipid is a pegylated lipid. In some aspects, the molar ratio of the compound to the pegylated lipid ranges from about 100:1 to about 25:1. In some aspects, the pegylated lipid is PEG-DAG, a PEG polyethylene (PEG-PE), a PEG-succinoyl-diacylglycerol (PEG-S-DAG), PEG-cer or a PEG dialkyoxypropylcarbamate. In some aspects, the pegylated lipid has the following structure III:

[chemical structure]

or a pharmaceutically acceptable salt, tautomer or stereoisomer thereof, wherein: R¹⁰ and R¹¹ are each independently a straight or branched, saturated or unsaturated alkyl chain containing from 10 to 30 carbon atoms, wherein the alkyl chain is optionally interrupted by one or more ester bonds; and z has a mean value ranging from 30 to 60. In some aspects, R¹⁰ and R¹¹ are each independently straight, saturated alkyl chains having 12 to 16 carbon atoms. In some aspects, the average z is about 45.

### Start Here

[0160] In some aspects, the LNP self-assembles into non-bilayer structures when mixed with polyanionic nucleic acid. In some aspects, the non-bilayer structures have a diameter between 60 nm and 120 nm. In some aspects, the non-bilayer structures have a diameter of about 70 nm, about 80 nm, about 90 nm, or about 100 nm. In some aspects, wherein the nanoparticulate delivery vehicle has a diameter of about 100 nm.

[0161] Also provided for herein is a vector or set of vectors comprising any of the nucleotide sequence described herein. Also disclosed herein is a vector comprising an isolated nucleotide sequence disclosed herein.

[0162] Also provided for herein is an isolated cell comprising any of the nucleotide sequences or set of isolated nucleotide sequences described herein, optionally wherein the cell is a BHK-21, CHO, HEK293 or variants thereof, 911, HeLa, A549, LP-293, PER.C6, or AE1-2a cell.

[0163] Also provided for herein is a kit comprising any of the compositions described herein and instructions for use. Also disclosed herein is a kit comprising a vector or a composition disclosed herein and instructions for use.

[0164] Also provided for herein is a method for treating a subject suffering from Covid-19, the method comprising administering to the subject any of the compositions or any of the pharmaceutical compositions described herein.

[0165] Also provided for herein is a method for treating a subject infected with or at risk for infection by SARS-CoV-2, the method comprising administering to the subject any of the compositions or any of the pharmaceutical compositions described herein.

[0166] Also provided for herein is a method for stimulating an immune response in a subject, the method comprising administering to the subject any of the compositions or any of the pharmaceutical compositions described herein.

[0167] Also disclosed herein is a method for treating a subject, the method comprising administering to the subject a vector disclosed herein or a pharmaceutical composition disclosed herein.

[0168] Also disclosed herein is a method of manufacturing the one or more vectors of any of the above compositions.

[0169] Also disclosed herein is a method of manufacturing any of the compositions disclosed herein.

### BRIEF DESCRIPTION OF THE SEVERAL VIEWS OF THE DRAWINGS

[0170] These and other features, aspects, and advantages of the present invention will become better understood with regard to the following description, and accompanying drawings, where:

[0171] FIG. 1 presents a schematic of the SARS-CoV-2 genome structure depicting the at least 14 open reading frames (ORF) identified in. Figure adapted from Zhou et al. (2020) [A pneumonia outbreak associated with a new coronavirus of probable bat origin. Nature, 579(January)].

[0172] FIG. 2 depicts the 16 cleavage products of the replicase ORF1ab and related information. Figure adapted from Wu et al. (2020). [A new coronavirus associated with human respiratory disease in China. Nature, 579(January)]

[0173] FIG. 3 depicts the general vaccination approach of producing a balanced immune response inducing both neutralizing antibodies (from B cells) as well as effector and memory CD8+ T cell responses for maximum efficacy. SARS-CoV-2 genome structure adapted from Zhou et al. (2020) [A pneumonia outbreak associated with a new coronavirus of probable bat origin. Nature, 579(January)].

[0174] FIG. 4 demonstrates the known prevalence of the wildtype and D614G variant SARS-Cov-2 Spike protein over time across various geographic locations.

[0175] FIG. 5 demonstrates coverage of cassettes encoding only Spike or encoding Spike and the additional predicted concatenated T cell epitopes over the four populations shown. The first column demonstrates the number of SARS-CoV-2 epitopes predicted to be presented and the second column demonstrates the expected number of presented epitopes, based on a 0.2 PPV. Each row shows the protection coverage of each population if a certain number of epitopes is used.

[0176] FIG. 6A illustrates the number of predicted epitopes presented by each MHC class II allele separately for the Spike protein or the additional predicted concatenated T cell epitopes.

[0177] FIG. 6B illustrates the number of the number of SARS-CoV-2 epitopes predicted to be presented over the four populations shown from cassettes encoding only Spike (top panel) or encoding Spike and the additional predicted concatenated T cell epitopes (bottom panel).

[0178] FIG. 7A presents the number of training samples containing Class I alleles (with at least 10 samples).

[0179] FIG. 7B presents a histogram depicting the number of training samples per Class I allele versus the number of alleles.

[0180] FIG. 8A demonstrates T cell responses for mice immunized with a ChAdV68 vector encoding the SARS-CoV-2 Spike protein. Shown is IFNγ ELISpot following ex vivo stimulation (o/n) with overlapping peptide pools (15 aa long, 11 aa overlap) spanning SPIKE antigen. Left panel presents SFCs per 10⁶ splenocytes for each separate peptide pool tested (Mean+/−SE for each pool, N=6 per group (n=3 for naive)). Right panel presents SFCs per 10⁶ splenocytes for summed response across both peptide pools (Mean+/−SD, sum of response to two pools for each animal). Background corrected to DMSO control for each sample and pool.

[0181] FIG. 8B demonstrates T cell responses for mice immunized with a SAM vector encoding the SARS-CoV-2 Spike protein. Shown is IFNγ ELISpot following ex vivo stimulation (o/n) with overlapping peptide pools (15 aa long, 11 aa overlap) spanning SPIKE antigen. as SFCs per 10⁶ splenocytes for each separate peptide pool tested.

[0182] FIG. 8C demonstrates T cell responses for mice immunized with a SAM vector encoding the SARS-CoV-2 Spike protein. Shown is IFNγ ELISpot following ex vivo stimulation (o/n) with overlapping peptide pools (15 aa long, 11 aa overlap) spanning SPIKE antigen as SFCs per 10⁶ splenocytes for combined response across both peptide pools.

[0183] FIG. 9 depicts a schematic of SARS-CoV-2 vaccine efficacy studies in mice.

[0184] FIG. 10A shows a Western blot using an anti-Spike S2 antibody for Spike expression in vectors encoding various Spike variations.

[0185] FIG. 10B shows a Western blot using an anti-Spike S1 antibody for Spike expression in vectors encoding various Spike variations.

[0186] FIG. 10C shows a Western blot using an anti-Spike S1 antibody for Spike expression in vectors encoding full-length Spike, Spike S1 alone, or Spike S2 alone.

[0187] FIG. 10D shows a Western blot using an anti-Spike S2 antibody for Spike expression in vectors encoding full-length Spike, Spike S1 alone, or Spike S2 alone.

[0188] FIG. 11 shows a Western blot using an anti-Spike S2 antibody for Spike expression in vectors encoding various sequence-optimized Spike variations.

[0189] FIG. 12A depicts a schematic of PCR-based assay to assess RNA splicing of SARS-CoV-2 transcripts.

[0190] FIG. 12B shows PCR amplicons for encoded Spike proteins. Left panel depicts amplicons from cDNA templates from infected 293 cells (“ChAd-Spike (IDT) cDNA”) or from the plasmid encoding the SARS-CoV-2 Spike cassette (“Spike Plasmid”). Right panel depicts amplicons from the cDNA of 293 cells infected with a vector encoding Spike S1 alone (“SpikeS1”) or full-length Spike (“Spike”).

[0191] FIG. 13 shows PCR amplicons for encoded Spike proteins from the cDNA of 293 cells infected with vector encoding various Spike variations.

[0192] FIG. 14 presents estimated coverages for the percentage of the indicated ancestry populations having at least one HLA estimated to receive at least one immunogenic epitope encoded by TCE5, where receipt of the immunogenic peptide presentation is considered to occur when an individual's HLA is either (1) known to present an encoded epitope (“validated epitope”), or (2) predicted to present at least 4 (Col. 1), 5 (Col. 2), 6 (Col. 3), or 7 (Col. 4) encoded epitopes (“predicted epitope”; EDGE score>0.01). FA=African American, API=Asian or Pacific Islander, EUR=European, HIS=Hispanic

[0193] FIG. 15A presents T cell responses (left panel), Spike-specific IgG antibodies (middle panel) and neutralizing antibodies (right panel) following administration of ChAdV-platforms with Spike-encoding cassettes featuring different sequence optimizations “IDTSpike_{g}” (shown as “Spike V1” or “v1”) or “CTSpike_{g}” (shown as “Spike V2” or “v2”). Balb/c mice immunized with 1×10¹¹ VP ChAdV-based vaccine platform.

[0194] FIG. 15B presents T cell responses (left panel), Spike-specific IgG antibodies (middle panel) and neutralizing antibodies (right panel) following administration of SAM-platforms with Spike-encoding cassettes featuring different sequence optimizations “IDTSpike_{g}” (shown as “Spike V1” or “v1”) or “CTSpike_{g}” (shown as “Spike V2” or “v2”). Balb/c mice immunized with 10 μg SAM-based vaccine platform.

[0195] FIG. 16 presents Spike-specific IgG antibody production following administration of either ChAdV-platform (left panel) or SAM-platform (right panel) with unmodified or modified (“CTSpikeF2P_{g}” shown as “SpikeF2P”) Spike-encoding cassettes (all vectors utilize Spike sequence v2). Balb/c mice immunized with 1×10¹¹ VP ChAdV-based vaccine platform or 10 μg SAM-based vaccine platform, as indicated.

[0196] FIG. 17A presents T cell responses to Spike (left panel) and T cell responses to the encoded T cell epitopes (right panel) following administration of ChAdV-platforms with a modified Spike-encoding only cassette (“CTSpikeF2P_{g}” shown as “Spike”) and modified Spike together with additional non-Spike T cell epitopes encoded TCE5 (shown as “Spike TCE”). Balb/c mice immunized with 1×10¹¹ VP ChAdV-based vaccine platform. Shown is IFNγ ELISpot, 2 weeks post immunization. T cell response to overlapping peptide pools spanning either Spike, Nucleocapsid, or Orf3a.

[0197] FIG. 17B presents T cell responses to Spike (left panel) and T cell responses to the encoded T cell epitopes (right panel) following administration of SAM-platforms with a modified Spike-encoding only cassette (“CTSpikeF2P_{g}” shown as “Spike”) and modified Spike together with additional non-Spike T cell epitopes encoded TCE5 (shown as “TCE Spike”). Balb/c mice immunized with 10 μg SAM-based vaccine platform. Shown is IFNγ ELISpot, 2 weeks post immunization. T cell response to overlapping peptide pools spanning either Spike, Nucleocapsid, or Orf3a.

[0198] FIG. 18A presents T cell responses to Spike (top panel; IFNg ELISpot. Sum of response to 8 overlapping peptide pools spanning Spike antigen), T cell responses to the encoded T cell epitopes (middle panel; IFNg ELISpot. Sum of response to 3 overlapping peptide pools spanning NCap, Membrane, and Orf3a), and Spike-specific IgG antibodies (bottom panel; S1 IgG binding measured by MSD ELISA. Interpolated endpoint titer. Geomean, geometric SD) following immunization with SAM constructs including “IDTSpike_{g}” alone (left columns), IDTSpike_{g} expressed from a first subgenomic promoter followed by TCE5 expressed from a second subgenomic promoter (middle columns), or TCE5 expressed from a first subgenomic promoter followed by IDTSpike_{g} expressed from a second subgenomic promoter (right columns). For T cell responses, Balb/c mice were immunized with 10 ug of each vaccine, n=6/group. Splenocyte isolation at 2-weeks post immunization. For IgG response, Balb/c mice immunized with 10 ug of each vaccine, n=4/group. Serum collected and analyzed at 4-weeks post immunization.

[0199] FIG. 18B presents T cell responses to Spike (top panel; IFNg ELISpot. Sum of response to 8 overlapping peptide pools spanning Spike antigen), T cell responses to the encoded T cell epitopes (middle panel; IFNg ELISpot. Sum of response to 3 overlapping peptide pools spanning NCap, Membrane, and Orf3a), and Spike-specific IgG antibodies (bottom panel; S1 IgG binding measured by MSD ELISA. Interpolated endpoint titer. Geomean, geometric SD) following immunization with SAM constructs including “IDTSpike_{g}” alone (first column), IDTSpike_{g} expressed from a first subgenomic promoter followed by TCE6 or TCE7 expressed from a second subgenomic promoter (columns 2 and 4, respectively), or TCE6 or TCE7 expressed from a first subgenomic promoter followed by IDTSpike_{g} expressed from a second subgenomic promoter (columns 3 and 5, respectively). For T cell responses, Balb/c mice were immunized with 10 ug of each vaccine, n=6/group. Splenocyte isolation at 2-weeks post immunization. For IgG response, Balb/c mice immunized with 10 ug of each vaccine, n=4/group. Serum collected and analyzed at 4-weeks post immunization.

[0200] FIG. 18C presents T cell responses to Spike (top panel; IFNg ELISpot. Sum of response to 2 overlapping peptide pools spanning Spike antigen), T cell responses to the encoded T cell epitopes (middle panel; IFNg ELISpot. Sum of response to 2 overlapping peptide pools spanning NCap and Orf3a), and Spike-specific IgG antibodies (bottom panel; S1 IgG binding measured by MSD ELISA. Interpolated endpoint titer. Geomean, geometric SD) following immunization with SAM constructs including “CTSpike_{g}” alone (first column), CTSpike_{g} expressed from a first subgenomic promoter followed by TCE5 or TCE8 expressed from a second subgenomic promoter (columns 2 and 4, respectively), or TCE5 or TCE8 expressed from a first subgenomic promoter followed by CTSpike_{g} expressed from a second subgenomic promoter (columns 3 and 5, respectively). For T cell responses, Balb/c mice were immunized with 10 ug of each vaccine, n=6/group. Splenocyte isolation at 2-weeks post immunization. For IgG response, Balb/c mice immunized with 10 ug of each vaccine, n=4/group. Serum collected and analyzed at 4-weeks post immunization.

[0201] FIG. 19A presents T cell responses across multiple Spike T cell epitope pools (left panel), Spike-specific IgG antibody titer over time (right top panel) and neutralizing antibody titer over time (right bottom panel) following administration of ChAdV-platforms with a Spike-encoding cassette featuring “CTSpike_{g}”. Balb/c mice immunized with 1×10¹¹ VP ChAdV-based vaccine platform. T cell response is IFNγ ELISpot, 2 weeks post immunization to 8 overlapping peptide pools spanning Spike antigen.

[0202] FIG. 19B presents T cell responses across multiple Spike T cell epitope pools (left panel), Spike-specific IgG antibody titer over time (right top panel) and neutralizing antibody titer over time (right bottom panel) following administration of with a Spike-encoding cassette featuring “CTSpike_{g}”. Balb/c mice immunized with 10 μg SAM-based vaccine platform. Shown is IFNγ ELISpot, 2 weeks post immunization. T cell response is IFNγ ELISpot, 2 weeks post immunization to 8 overlapping peptide pools spanning Spike antigen.

[0203] FIG. 20A presents a heterologous immunization regimen in mice (top panel) and T cell responses across multiple Spike T cell epitope pools (bottom panel) following administration of a ChAdV-platform priming dose including a Spike-encoding cassette featuring “CTSpike_{g}” then subsequent administration of a SAM platform boosting dose including a Spike-encoding cassette featuring “IDTSpike_{g}”. Mice immunized with 6×10⁹ VP ChAdV-based vaccine platform and 10 μg SAM-based vaccine platform. T cell response is to 8 overlapping peptide pools spanning Spike antigen. IFNg ELISpot. Mean+/−SEM.

[0204] FIG. 20B presents Spike-specific IgG antibody titer at the indicated times (left panel; ELISA. Geomean endpoint titer, geometric SD) and neutralizing antibody titer at the indicated times (right panel; Pseudovirus neutralizing titer. Geomean, geometric SD) following administration of a ChAdV-platform priming dose including a Spike-encoding cassette featuring “CTSpike_{g}” then subsequent administration of a SAM platform boosting dose including a Spike-encoding cassette featuring “IDTSpike_{g}”. Mice immunized with 6×10⁹ VP ChAdV-based vaccine platform and 10 μg SAM-based vaccine platform.

[0205] FIG. 21A presents a heterologous immunization regimen in NHP (top panel) and peak T cell responses across multiple Spike T cell epitope pools (middle and bottom panels) following administration of a ChAdV-platform priming dose including a Spike-encoding cassette featuring “CTSpike_{g}” then subsequent administration of a SAM platform boosting dose including a Spike-encoding cassette featuring “IDTSpike_{g}”. NHPs (n=5) immunized with 1×10¹² VP ChAdV-based vaccine platform and 100 μg SAM-based vaccine platform.

[0206] FIG. 21B presents Spike-specific IgG antibody titers over time (top left panel), neutralizing antibody titers over time (bottom left panel), and neutralizing antibody titers compared to titers found in convalescent human sera (right panel) following administration of a ChAdV-platform priming dose including a Spike-encoding cassette featuring “CTSpike_{g}” then subsequent administration of a SAM platform boosting dose including a Spike-encoding cassette featuring “IDTSpike_{g}”. NHPs (n=5) immunized with 1×10¹² VP ChAdV-based vaccine platform and 100 μg SAM-based vaccine platform.

[0207] FIG. 22A presents a homologous immunization prime/boost regimen in mice (top panel) and T cell responses to Spike (bottom panel) following administration of a SAM platform including a Spike-encoding cassette featuring “IDTSpike_{D}”. Balb/c mice were immunized with 10 μg SAM-based vaccine platform.

[0208] FIG. 22B presents Spike-specific IgG antibody titers (left panel) and neutralizing antibody titers at the indicated times (right panel) following administration of a SAM platform including a Spike-encoding cassette featuring “IDTSpike_{D}”. Balb/c mice were immunized with 10 μg SAM-based vaccine platform.

[0209] FIG. 23 presents a homologous immunization prime/boost regimen in mice (top panel), Spike-specific IgG antibody titers (middle panels), neutralizing antibody titers (bottom panels) over time, and neutralizing antibody titers compared to titers found in convalescent human sera (bottom right panel) following administration of a SAM platform including a Spike-encoding cassette featuring “IDTSpike_{G}”. Balb/c mice were immunized with 30 μg SAM-based vaccine platform.

[0210] FIG. 24A presents a map of sequences included in TCE10 for Nucleocapsid, including frames with flanking sequences, validated epitopes, predicted epitopes, mutations, and overlap between frames and mutations.

[0211] FIG. 24B presents a map of sequences included in TCE10 for ORF3a, including frames with flanking sequences, validated epitopes, predicted epitopes, mutations, and overlap between frames and mutations.

[0212] FIG. 24C presents a map of sequences included in TCE10 for nsp3, including frames with flanking sequences, validated epitopes, predicted epitopes, mutations, and overlap between frames and mutations.

[0213] FIG. 24D presents a map of sequences included in TCE10 for Membrane, including frames with flanking sequences, validated epitopes, predicted epitopes, mutations, and overlap between frames and mutations.

[0214] FIG. 24E presents a map of sequences included in TCE10 for nsp4, including frames with flanking sequences, validated epitopes, predicted epitopes, mutations, and overlap between frames and mutations.

[0215] FIG. 24F presents a map of sequences included in TCE10 for nsp12, including frames with flanking sequences, validated epitopes, predicted epitopes, mutations, and overlap between frames and mutations.

[0216] FIG. 25A presents a map of sequences included in TCE9 for nsp12, including frames with flanking sequences, validated epitopes, predicted epitopes, mutations, and overlap between frames and mutations.

[0217] FIG. 25B presents a map of sequences included in TCE9 for nsp4, including frames with flanking sequences, validated epitopes, predicted epitopes, mutations, and overlap between frames and mutations.

[0218] FIG. 25C presents a map of sequences included in TCE9 for Membrane, including frames with flanking sequences, validated epitopes, predicted epitopes, mutations, and overlap between frames and mutations.

[0219] FIG. 25D presents a map of sequences included in TCE9 for nsp3, including frames with flanking sequences, validated epitopes, predicted epitopes, mutations, and overlap between frames and mutations.

[0220] FIG. 25E presents a map of sequences included in TCE9 for ORF3a, including frames with flanking sequences, validated epitopes, predicted epitopes, mutations, and overlap between frames and mutations.

[0221] FIG. 25F presents a map of sequences included in TCE9 for Nucleocapsid, including frames with flanking sequences, validated epitopes, predicted epitopes, mutations, and overlap between frames and mutations.

[0222] FIG. 25G presents a map of sequences included in TCE9 for nsp6, including frames with flanking sequences, validated epitopes, predicted epitopes, mutations, and overlap between frames and mutations.

[0223] FIG. 26A presents a map of sequences included in TCE11 for nsp12, including frames with flanking sequences, validated epitopes, predicted epitopes, mutations, and overlap between frames and mutations.

[0224] FIG. 26B presents a map of sequences included in TCE11 for Membrane, including frames with flanking sequences, validated epitopes, predicted epitopes, mutations, and overlap between frames and mutations.

[0225] FIG. 26C presents a map of sequences included in TCE11 for nsp4, including frames with flanking sequences, validated epitopes, predicted epitopes, mutations, and overlap between frames and mutations.

[0226] FIG. 26D presents a map of sequences included in TCE11 for nsp3, including frames with flanking sequences, validated epitopes, predicted epitopes, mutations, and overlap between frames and mutations.

[0227] FIG. 27 presents the percentages of shared candidate 9-mer epitope distribution between SARS-CoV-2 and SARS-CoV (left panel) and between SARS-CoV-2 and MERS (right panel).

[0228] FIG. 28 presents T cell responses in PBMCs from convalescent SARS-CoV-2 donors (Cohort 1) tested directly ex vivo (i.e., without IVS expansion) to Spike and TCE5-encoded epitopes assessed by IFNγ ELISpot against the indicated peptide pools (see Tables D-F).

[0229] FIG. 29 presents T cell responses in IVS-expanded PBMCs from convalescent SARS-CoV-2 donors (Cohort 1) to Spike and TCE5-encoded epitopes assessed by IFNγ ELISpot against the indicated peptide pools (see Tables D-F).

[0230] FIG. 30 presents T cell responses in IVS-expanded PBMCs from convalescent SARS-CoV-2 donors (Cohort 2) to Spike and TCE5-encoded epitopes assessed by IFNγ ELISpot against the indicated peptide pools (see Tables D-F). ULOQ: Upper Limit of Quantitation

[0231] FIG. 31 presents T cell responses in a selection of IVS-expanded PBMCs from convalescent SARS-CoV-2 donors (Cohort 1 and Cohort 2) to Spike and TCE5-encoded epitopes assessed by IFNγ ELISpot against the indicated peptide pools (see Tables D-F). ULOQ: Upper Limit of Quantitation

[0232] FIG. 32 presents T cell responses in IVS-expanded PBMCs from convalescent SARS-CoV-2 donors (Cohort 1), including either CD4 or CD8 depleted PBMCs, to Spike and TCE5-encoded epitopes assessed by IFNγ ELISpot against the indicated peptide pools (see Tables D-F).

[0233] FIG. 33A presents T cell-mediated killing of targets as assessed by Incucyte® for (1) DMSO+Target only control [filled circles]; (2) peptides+Target only control [open circles]; (3) DMSO+Target+PBMC effectors control [filled squares]; and (4) Peptides+Target+PBMC effectors [open squares]. Shown is data for A*03:01 targets; Cohort 2 donor 169923; Validated Pool.

[0234] FIG. 33B presents T cell-mediated killing of targets as assessed by Incucyte® for (1) DMSO+Target only control [filled circles]; (2) peptides+Target only control [open circles]; (3) DMSO+Target+PBMC effectors control [filled squares]; and (4) Peptides+Target+PBMC effectors [open squares]. Shown is data for A*02:01 targets; Cohort 2 donor 389341; ORF3a Pool.

[0235] FIG. 33C presents T cell-mediated killing of targets as assessed by Incucyte® for (1) DMSO+Target only control [filled circles]; (2) peptides+Target only control [open circles]; (3) DMSO+Target+PBMC effectors control [filled squares]; and (4) Peptides+Target+PBMC effectors [open squares]. Shown is data for A*02:01 targets; Cohort 2 donor 941176; Validated Pool.

[0236] FIG. 33D presents T cell-mediated killing of targets as assessed by Incucyte® for (1) DMSO+Target only control [filled circles]; (2) peptides+Target only control [open circles]; (3) DMSO+Target+PBMC effectors control [filled squares]; and (4) Peptides+Target+PBMC effectors [open squares]. Shown is data for A*02:01 targets; Cohort 2 donor 941176; ORF3a Pool.

[0237] FIG. 33E presents T cell-mediated killing of targets as assessed by Incucyte® for (1) DMSO+Target only control [filled circles]; (2) peptides+Target only control [open circles]; (3) DMSO+Target+PBMC effectors control [filled squares]; and (4) Peptides+Target+PBMC effectors [open squares]. Shown is data for A*02:01 targets; Cohort 2 donor 941176; Nucleocapsid Pool.

[0238] FIG. 33F presents T cell-mediated killing of targets as assessed by Incucyte® for (1) DMSO+Target only control [filled circles]; (2) peptides+Target only control [open circles]; (3) DMSO+Target+PBMC effectors control [filled squares]; and (4) Peptides+Target+PBMC effectors [open squares]. Shown is data for A*01:01 targets; Cohort 2 donor 941176; Validated Pool.

[0239] FIG. 33G presents T cell-mediated killing of targets as assessed by Incucyte® for (1) DMSO+Target only control [filled circles]; (2) peptides+Target only control [open circles]; (3) DMSO+Target+PBMC effectors control [filled squares]; and (4) Peptides+Target+PBMC effectors [open squares]. Shown is data for A*01:01 targets; Cohort 2 donor 941176; ORF3a Pool.

[0240] FIG. 33H presents T cell-mediated killing of targets as assessed by Incucyte® for (1) DMSO+Target only control [filled circles]; (2) peptides+Target only control [open circles]; (3) DMSO+Target+PBMC effectors control [filled squares]; and (4) Peptides+Target+PBMC effectors [open squares]. Shown is data for A*30:01 targets; Cohort 2 donor 627934; Validated Pool.

[0241] FIG. 33I presents T cell-mediated killing of targets as assessed by Incucyte® for (1) DMSO+Target only control [filled circles]; (2) peptides+Target only control [open circles]; (3) DMSO+Target+PBMC effectors control [filled squares]; and (4) Peptides+Target+PBMC effectors [open squares]. Shown is data for A*30:01 targets; Cohort 2 donor 627934; Nucleocapsid Pool.

[0242] FIG. 33J presents T cell-mediated killing of targets as assessed by Incucyte® for (1) DMSO+Target only control [filled circles]; (2) peptides+Target only control [open circles]; (3) DMSO+Target+PBMC effectors control [filled squares]; and (4) Peptides+Target+PBMC effectors [open squares]. Shown is data for A*03:01 targets; Cohort 2 donor 627934; Validated Pool.

[0243] FIG. 33K presents T cell-mediated killing of targets as assessed by Incucyte® for (1) DMSO+Target only control [filled circles]; (2) peptides+Target only control [open circles]; (3) DMSO+Target+PBMC effectors control [filled squares]; and (4) Peptides+Target+PBMC effectors [open squares]. Shown is data for A*03:01 targets; Cohort 2 donor 627934; Nucleocapsid Pool.

[0244] FIG. 33L presents T cell-mediated killing of targets as assessed by Incucyte® for (1) DMSO+Target only control [filled circles]; (2) peptides+Target only control [open circles]; (3) DMSO+Target+PBMC effectors control [filled squares]; and (4) Peptides+Target+PBMC effectors [open squares]. Shown is data for A*11:01 targets; Cohort 2 donor 602232; Validated Pool.

[0245] FIG. 34 illustrates homologous and heterologous prime/boost regimens in Indian rhesus macaques assessing ChAdV and SAM vaccine platforms encoding different isolates of the SARS-CoV-2 Spike protein.

[0246] FIG. 35A presents T cell responses across multiple Spike T cell epitope pools (top panel; Mean+−SE for each pool), T cell responses for individual NHPs directed to a single large Spike T cell epitope pool over time (middle panel), and Spike-specific IgG antibody titers over time (bottom panel) for Group 1. n=5 NHPs

[0247] FIG. 35B presents T cell responses across multiple Spike T cell epitope pools (top panel; Mean+−SE for each pool), T cell responses for individual NHPs directed to a single large Spike T cell epitope pool over time (middle panel), and Spike-specific IgG antibody titers over time (bottom panel) for Group 2. n=5 NHPs

[0248] FIG. 35C presents T cell responses across multiple Spike T cell epitope pools (top panel; Mean+−SE for each pool), T cell responses for individual NHPs directed to a single large Spike T cell epitope pool over time (middle panel), and Spike-specific IgG antibody titers over time (bottom panel) for Group 5. n=5 NHPs

[0249] FIG. 35D presents T cell responses across multiple Spike T cell epitope pools (top panel; Mean+−SE for each pool), T cell responses for individual NHPs directed to a single large Spike T cell epitope pool over time (middle panel), and Spike-specific IgG antibody titers over time (bottom panel) for Group 6. n=5 NHPs

[0250] FIG. 36 presents summaries of T cell responses for individual NHPs directed to a single large Spike T cell epitope pool over time (top panel), T cell responses to the TCE5-encoded epitopes (middle panel), and Spike-specific IgG antibody titers over time (bottom panel) for Group 1. n=5 NHPs

[0251] FIG. 37 presents neutralizing antibody production to both the D614G pseudovirus (left panels) and B.1.351 pseudovirus (right panels) following Boost 1 (left columns) and Boost 2 (right columns) for each of the NHP Groups.

[0252] FIG. 38 presents neutralizing antibody production comparing the relative Nab titer levels against each of the pseudoviruses following Boost 1 (top panels) and following Boost 2 (bottom panels).

### DETAILED DESCRIPTION

### I. Definitions

[0253] In general, terms used in the claims and the specification are intended to be construed as having the plain meaning understood by a person of ordinary skill in the art. Certain terms are defined below to provide additional clarity. In case of conflict between the plain meaning and the provided definitions, the provided definitions are to be used.

[0254] As used herein the term “antigen” is a substance that stimulates an immune response. An antigen can be a neoantigen. An antigen can be a “shared antigen” that is an antigen found among a specific population, e.g., a specific population of SARS-CoV-2 patients with or at risk of infection for an infectious disease.

[0255] As used herein the term “antigen-based vaccine” is a vaccine composition based on one or more antigens, e.g., a plurality of antigens. The vaccines can be nucleotide-based (e.g., virally based, RNA based, or DNA based), protein-based (e.g., peptide based), or a combination thereof.

[0256] As used herein the term “candidate antigen” is a mutation or other aberration giving rise to a sequence that may represent an antigen.

[0257] As used herein the term “coding region” is the portion(s) of a gene that encode protein.

[0258] As used herein the term “coding mutation” is a mutation occurring in a coding region.

[0259] As used herein the term “ORF” means open reading frame.

[0260] As used herein the term “missense mutation” is a mutation causing a substitution from one amino acid to another.

[0261] As used herein the term “nonsense mutation” is a mutation causing a substitution from an amino acid to a stop codon or causing removal of a canonical start codon.

[0262] As used herein the term “frameshift mutation” is a mutation causing a change in the frame of the protein.

[0263] As used herein the term “indel” is an insertion or deletion of one or more nucleic acids.

[0264] As used herein, the term percent “identity,” in the context of two or more nucleic acid or polypeptide sequences, refer to two or more sequences or subsequences that have a specified percentage of nucleotides or amino acid residues that are the same, when compared and aligned for maximum correspondence, as measured using one of the sequence comparison algorithms described below (e.g., BLASTP and BLASTN or other algorithms available to persons of skill) or by visual inspection. Depending on the application, the percent “identity” can exist over a region of the sequence being compared, e.g., over a functional domain, or, alternatively, exist over the full length of the two sequences to be compared.

[0265] For sequence comparison, typically one sequence acts as a reference sequence to which test sequences are compared. When using a sequence comparison algorithm, test and reference sequences are input into a computer, subsequence coordinates are designated, if necessary, and sequence algorithm program parameters are designated. The sequence comparison algorithm then calculates the percent sequence identity for the test sequence(s) relative to the reference sequence, based on the designated program parameters. Alternatively, sequence similarity or dissimilarity can be established by the combined presence or absence of particular nucleotides, or, for translated sequences, amino acids at selected sequence positions (e.g., sequence motifs).

[0266] Optimal alignment of sequences for comparison can be conducted, e.g., by the local homology algorithm of Smith & Waterman, Adv. Appl. Math. 2:482 (1981), by the homology alignment algorithm of Needleman & Wunsch, J. Mol. Biol. 48:443 (1970), by the search for similarity method of Pearson & Lipman, Proc. Nat'l. Acad. Sci. USA 85:2444 (1988), by computerized implementations of these algorithms (GAP, BESTFIT, FASTA, and TFASTA in the Wisconsin Genetics Software Package, Genetics Computer Group, 575 Science Dr., Madison, Wis.), or by visual inspection (see generally Ausubel et al., infra).

[0267] One example of an algorithm that is suitable for determining percent sequence identity and sequence similarity is the BLAST algorithm, which is described in Altschul et al., J. Mol. Biol. 215:403-410 (1990). Software for performing BLAST analyses is publicly available through the National Center for Biotechnology Information.

[0268] As used herein the term “non-stop or read-through” is a mutation causing the removal of the natural stop codon.

[0269] As used herein the term “epitope” is the specific portion of an antigen typically bound by an antibody or T cell receptor.

[0270] As used herein the term “immunogenic” is the ability to stimulate an immune response, e.g., via T cells, B cells, or both.

[0271] As used herein the term “HLA binding affinity” “MHC binding affinity” means affinity of binding between a specific antigen and a specific MHC allele.

[0272] As used herein the term “bait” is a nucleic acid probe used to enrich a specific sequence of DNA or RNA from a sample.

[0273] As used herein the term “variant” is a difference between a subject's nucleic acids and the reference human genome used as a control.

[0274] As used herein the term “variant call” is an algorithmic determination of the presence of a variant, typically from sequencing.

[0275] As used herein the term “polymorphism” is a germline variant, i.e., a variant found in all DNA-bearing cells of an individual.

[0276] As used herein the term “somatic variant” is a variant arising in non-germline cells of an individual.

[0277] As used herein the term “allele” is a version of a gene or a version of a genetic sequence or a version of a protein.

[0278] As used herein the term “HLA type” is the complement of HLA gene alleles.

[0279] As used herein the term “nonsense-mediated decay” or “NMD” is a degradation of an mRNA by a cell due to a premature stop codon.

[0280] As used herein the term “exome” is a subset of the genome that codes for proteins. An exome can be the collective exons of a genome.

[0281] As used herein the term “logistic regression” is a regression model for binary data from statistics where the logit of the probability that the dependent variable is equal to one is modeled as a linear function of the dependent variables.

[0282] As used herein the term “neural network” is a machine learning model for classification or regression consisting of multiple layers of linear transformations followed by element-wise nonlinearities typically trained via stochastic gradient descent and back-propagation.

[0283] As used herein the term “proteome” is the set of all proteins expressed and/or translated by a cell, group of cells, or individual.

[0284] As used herein the term “peptidome” is the set of all peptides presented by MHC-I or MHC-II on the cell surface. The peptidome may refer to a property of a cell or a collection of cells (e.g., the infectious disease peptidome, meaning the union of the peptidomes of all cells that are infected by the infectious disease).

[0285] As used herein the term “ELISPOT” means Enzyme-linked immunosorbent spot assay—which is a common method for monitoring immune responses in humans and animals.

[0286] As used herein the term “dextramers” is a dextran-based peptide-MHC multimers used for antigen-specific T-cell staining in flow cytometry.

[0287] As used herein the term “tolerance or immune tolerance” is a state of immune non-responsiveness to one or more antigens, e.g. self-antigens.

[0288] As used herein the term “central tolerance” is a tolerance affected in the thymus, either by deleting self-reactive T-cell clones or by promoting self-reactive T-cell clones to differentiate into immunosuppressive regulatory T-cells (Tregs).

[0289] As used herein the term “peripheral tolerance” is a tolerance affected in the periphery by downregulating or anergizing self-reactive T-cells that survive central tolerance or promoting these T cells to differentiate into Tregs.

[0290] The term “sample” can include a single cell or multiple cells or fragments of cells or an aliquot of body fluid, taken from a subject, by means including venipuncture, excretion, ejaculation, massage, biopsy, needle aspirate, lavage sample, scraping, surgical incision, or intervention or other means known in the art.

[0291] The term “subject” encompasses a cell, tissue, or organism, human or non-human, whether in vivo, ex vivo, or in vitro, male or female. The term subject is inclusive of mammals including humans.

[0292] The term “mammal” encompasses both humans and non-humans and includes but is not limited to humans, non-human primates, canines, felines, murines, bovines, equines, and porcines.

[0293] The term “clinical factor” refers to a measure of a condition of a subject, e.g., disease activity or severity. “Clinical factor” encompasses all markers of a subject's health status, including non-sample markers, and/or other characteristics of a subject, such as, without limitation, age and gender. A clinical factor can be a score, a value, or a set of values that can be obtained from evaluation of a sample (or population of samples) from a subject or a subject under a determined condition. A clinical factor can also be predicted by markers and/or other parameters such as gene expression surrogates. Clinical factors can include infection type (e.g., Coronavirus species), infection sub-type (e.g., SARS-CoV-2 variant), and medical history.

[0294] The term “antigen-encoding nucleic acid sequences derived from an infection” refers to nucleic acid sequences obtained from infected cells or an infectious disease organism, e.g. via RT-PCR; or sequence data obtained by sequencing the infected cell or infectious disease organism and then synthesizing the nucleic acid sequences using the sequencing data, e.g., via various synthetic or PCR-based methods known in the art. Derived sequences can include nucleic acid sequence variants, such as sequence-optimized nucleic acid sequence variants (e.g., codon-optimized and/or otherwise optimized for expression), that encode the same polypeptide sequence as the corresponding native infectious disease organism nucleic acid sequence. Derived sequences can include nucleic acid sequence variants that encode a modified infectious disease organism polypeptide sequence having one or more (e.g., 1, 2, 3, 4, or 5) mutations relative to a native infectious disease organism polypeptide sequence. For example, a modified polypeptide sequence can have one or more missense mutations relative to the native polypeptide sequence of an infectious disease organism protein.

[0295] The term “SARS-CoV-2 nucleic acid sequence encoding an immunogenic polypeptide” refers to nucleic acid sequences obtained from a SARS-CoV-2 virus, e.g. via RT-PCR; or sequence data obtained by sequencing a SARS-CoV-2 virus or a SARS-CoV-2 virus infected cell, and then synthesizing the nucleic acid sequences using the sequencing data, e.g., via various synthetic or PCR-based methods known in the art. Derived sequences can include nucleic acid sequence variants, such as sequence-optimized nucleic acid sequence variants (e.g., codon-optimized and/or otherwise optimized for expression), that encode the same polypeptide sequence as the corresponding native SARS-CoV-2 nucleic acid sequence. Derived sequences can include nucleic acid sequence variants that encode a modified SARS-CoV-2 polypeptide sequence having one or more (e.g., 1, 2, 3, 4, or 5) mutations relative to a native SARS-CoV-2 polypeptide sequence. For example, a modified Spike polypeptide sequence can have one or more mutations such as one or more missense mutations of R682, R815, K986P, or V987P relative to the native spike polypeptide sequence of a SARS-CoV-2 protein.

[0296] The term “alphavirus” refers to members of the family Togaviridae, and are positive-sense single-stranded RNA viruses. Alphaviruses are typically classified as either Old World, such as Sindbis, Ross River, Mayaro, Chikungunya, and Semliki Forest viruses, or New World, such as eastern equine encephalitis, Aura, Fort Morgan, or Venezuelan equine encephalitis and its derivative strain TC-83. Alphaviruses are typically self-replicating RNA viruses.

[0297] The term “alphavirus backbone” refers to minimal sequence(s) of an alphavirus that allow for self-replication of the viral genome. Minimal sequences can include conserved sequences for nonstructural protein-mediated amplification, a nonstructural protein 1 (nsP1) gene, a nsP2 gene, a nsP3 gene, a nsP4 gene, and a polyA sequence, as well as sequences for expression of subgenomic viral RNA including a subgenomic promoter (e.g., a 26S promoter element).

[0298] The term “sequences for nonstructural protein-mediated amplification” includes alphavirus conserved sequence elements (CSE) well known to those in the art. CSEs include, but are not limited to, an alphavirus 5′ UTR, a 51-nt CSE, a 24-nt CSE, a subgenomic promoter sequence (e.g., a 26S subgenomic promoter sequence), a 19-nt CSE, and an alphavirus 3′ UTR.

[0299] The term “RNA polymerase” includes polymerases that catalyze the production of RNA polynucleotides from a DNA template. RNA polymerases include, but are not limited to, bacteriophage derived polymerases including T3, T7, and SP6.

[0300] The term “lipid” includes hydrophobic and/or amphiphilic molecules. Lipids can be cationic, anionic, or neutral. Lipids can be synthetic or naturally derived, and in some instances biodegradable. Lipids can include cholesterol, phospholipids, lipid conjugates including, but not limited to, polyethyleneglycol (PEG) conjugates (PEGylated lipids), waxes, oils, glycerides, fats, and fat-soluble vitamins. Lipids can also include dilinoleylmethyl-4-dimethylaminobutyrate (MC3) and MC3-like molecules.

[0301] The term “lipid nanoparticle” or “LNP” includes vesicle like structures formed using a lipid containing membrane surrounding an aqueous interior, also referred to as liposomes. Lipid nanoparticles includes lipid-based compositions with a solid lipid core stabilized by a surfactant. The core lipids can be fatty acids, acylglycerols, waxes, and mixtures of these surfactants. Biological membrane lipids such as phospholipids, sphingomyelins, bile salts (sodium taurocholate), and sterols (cholesterol) can be utilized as stabilizers. Lipid nanoparticles can be formed using defined ratios of different lipid molecules, including, but not limited to, defined ratios of one or more cationic, anionic, or neutral lipids. Lipid nanoparticles can encapsulate molecules within an outer-membrane shell and subsequently can be contacted with target cells to deliver the encapsulated molecules to the host cell cytosol. Lipid nanoparticles can be modified or functionalized with non-lipid molecules, including on their surface. Lipid nanoparticles can be single-layered (unilamellar) or multi-layered (multilamellar). Lipid nanoparticles can be complexed with nucleic acid. Unilamellar lipid nanoparticles can be complexed with nucleic acid, wherein the nucleic acid is in the aqueous interior. Multilamellar lipid nanoparticles can be complexed with nucleic acid, wherein the nucleic acid is in the aqueous interior, or to form or sandwiched between

[0302] Abbreviations: MHC: major histocompatibility complex; HLA: human leukocyte antigen, or the human MHC gene locus; NGS: next-generation sequencing; PPV: positive predictive value; TSNA: tumor-specific neoantigen; FFPE: formalin-fixed, paraffin-embedded; NMD: nonsense-mediated decay; NSCLC: non-small-cell lung cancer; DC: dendritic cell.

[0303] It should be noted that, as used in the specification and the appended claims, the singular forms “a,” “an,” and “the” include plural referents unless the context clearly dictates otherwise.

[0304] Unless specifically stated or otherwise apparent from context, as used herein the term “about” is understood as within a range of normal tolerance in the art, for example within 2 standard deviations of the mean. About can be understood as within 10%, 9%, 8%, 7%, 6%, 5%, 4%, 3%, 2%, 1%, 0.5%, 0.1%, 0.05%, or 0.01% of the stated value. Unless otherwise clear from context, all numerical values provided herein are modified by the term about.

[0305] Any terms not directly defined herein shall be understood to have the meanings commonly associated with them as understood within the art of the invention. Certain terms are discussed herein to provide additional guidance to the practitioner in describing the compositions, devices, methods and the like of aspects of the invention, and how to make or use them. It will be appreciated that the same thing may be said in more than one way. Consequently, alternative language and synonyms may be used for any one or more of the terms discussed herein. No significance is to be placed upon whether or not a term is elaborated or discussed herein. Some synonyms or substitutable methods, materials and the like are provided. Recital of one or a few synonyms or equivalents does not exclude use of other synonyms or equivalents, unless it is explicitly stated. Use of examples, including examples of terms, is for illustrative purposes only and does not limit the scope and meaning of the aspects of the invention herein.

[0306] All references, issued patents and patent applications cited within the body of the specification are hereby incorporated by reference in their entirety, for all purposes.

### II. Antigen Identification

[0307] Research methods for NGS analysis of tumor and normal exome and transcriptomes have been described and applied in the antigen identification space. ^{6,14,15} Certain optimizations for greater sensitivity and specificity for antigen identification in the clinical setting can be considered. These optimizations can be grouped into two areas, those related to laboratory processes and those related to the NGS data analysis. The research methods described can also be applied to identification of antigens in other settings, such as identification of identifying antigens from an infectious disease organism (e.g., SARS-CoV-2), an infection in a subject, or an infected cell of a subject. Examples of optimizations are known to those skilled in the art, for example the methods described in more detail in U.S. Pat. No. 10,055,540, US Application Pub. No. US20200010849A1, international patent application publications WO/2018/195357 and WO/2018/208856, U.S. application Ser. No. 16/606,577, and international patent application PCT/US2020/021508, each herein incorporated by reference, in their entirety, for all purposes.

[0308] Methods for identifying antigens (e.g., antigens derived from an infectious disease organism) include identifying antigens that are likely to be presented on a cell surface (e.g., presented by MHC on an infected cell or an immune cell, including professional antigen presenting cells such as dendritic cells), and/or are likely to be immunogenic. As an example, one such method may comprise the steps of: obtaining at least one of exome, transcriptome or whole genome nucleotide sequencing and/or expression data from an infected cell or an infectious disease organism (e.g., SARS-CoV-2), wherein the nucleotide sequencing data and/or expression data is used to obtain data representing peptide sequences of each of a set of antigens (e.g., antigens derived from the infectious disease organism); inputting the peptide sequence of each antigen into one or more presentation models to generate a set of numerical likelihoods that each of the antigens is presented by one or more MHC alleles on a cell surface, such as an infected cell of the subject, the set of numerical likelihoods having been identified at least based on received mass spectrometry data; and selecting a subset of the set of antigens based on the set of numerical likelihoods to generate a set of selected antigens.

### IV. Antigens

[0309] Antigens can include nucleotides or polypeptides. For example, an antigen can be an RNA sequence that encodes for a polypeptide sequence. Antigens useful in vaccines can therefore include nucleotide sequences or polypeptide sequences.

[0310] Disclosed herein are peptides and nucleic acid sequences encoding peptides derived from any polypeptide associated with SARS-CoV-2, a SARS-CoV-2 infection in a subject, or a SARS-CoV-2 infected cell of a subject. Antigens can be derived from nucleotide sequences or polypeptide sequences of a SARS-CoV-2 virus. Polypeptide sequences of SARS-CoV-2 include, but are not limited to, predicted MHC class I epitopes shown in Table A, predicted MHC class II epitopes shown in Table B, predicted MHC class I epitopes shown in Table C, SARS-CoV-2 Spike peptides (e.g., peptides derived from SEQ ID NO:59), SARS-CoV-2 Membrane peptides (e.g., peptides derived from SEQ ID NO:61), SARS-CoV-2 Nucleocapsid peptides (e.g., peptides derived from SEQ ID NO:62), SARS-CoV-2 Envelope peptides (e.g., peptides derived from SEQ ID NO:63), SARS-CoV-2 replicase orf1a and orf1b peptides [such as one or more of non-structural proteins (nsp) 1-16], or any other peptide sequence encoded by a SARS-CoV-2 virus. Peptides and nucleic acid sequences encoding peptides can be derived from the Wuhan-Hu-1 SARS-CoV-2 isolate, sometimes referred to as the SARS-CoV-2 reference sequence (SEQ ID NO:76; NC_045512.2, herein incorporated by reference for all purposes). Peptides and nucleic acid sequences encoding peptides can be derived from an isolate distinct from the Wuhan-Hu-1 SARS-CoV-2 isolate, such as isolates having one or more mutations in proteins (also referred to as protein variants) with reference to the Wuhan-Hu-1 isolate. Vaccination strategies can include multiple vaccines with peptides and nucleic acid sequences encoding peptides derived from distinct isolates. For example, as an illustrative non-limiting example, a vaccine encoding a Spike protein from the Wuhan-Hu-1 SARS-CoV-2 isolate can be administered, followed by subsequent administration of a vaccine encoding a Spike protein from the B.1.351 (“South African”) SARS-CoV-2 isolate (e.g., SEQ ID NO:112) or from the B.1.1.7 (“South African”) SARS-CoV-2 isolate (e.g., SEQ ID NO:110). The one or more variants can include, but are not limited to, mutations in the SARS-CoV-2 Spike protein, SARS-CoV-2 Membrane protein, SARS-CoV-2 Nucleocapsid protein, SARS-CoV-2 Envelope protein, SARS-CoV-2 replicase orf1a and orf1b protein [such as one or more of non-structural proteins (nsp) 1-16], or any other protein sequences encoded by a SARS-CoV-2 virus. Variants can be selected based on prevalence of the mutation among SARS-CoV-2 subtypes/isolates, such as mutations/variants that are present in 1% or greater, 2% or greater, 3% or greater, 4% or greater, 5% or greater, 6% or greater, 7% or greater, 8% or greater, 9% or greater, 10% or greater, 20% or greater, 30% or greater, 40% or greater, 50% or greater, 60% or greater, 70% or greater, 80% or greater, 90% or greater of SARS-CoV-2 subtypes/isolates. Examples of mutations in greater than 1% of isolates are shown in Table 1. Variants can be selected based on prevalence of the mutation among SARS-CoV-2 subtypes/isolates present in a specific population, such as a specific demographic or geographic population. An illustrative non-limiting example of a prevalent variant/mutation is the Spike D614G missense mutation found in 60.05% of genomes sequenced worldwide, and 70.46% and 58.49% of the sequences in Europe and North America, respectively. Accordingly, vaccines can be designed to encode at least one immunogenic polypeptide corresponding to a polypeptide encoded by a SARS-CoV-2 subtype the subject is infected with or at risk for infection by, such as for use in prophylactic vaccines for a specific demographic or geographic population at risk for infection by the specific SARS-CoV-2 subtype/isolate. Vaccines can be designed to encode at least one immunogenic polypeptide corresponding to a polypeptide encoded by SARS-CoV-2 and at least one immunogenic polypeptide corresponding to a polypeptide encoded by a Coronavirus species and/or sub-species other than SARS-CoV-2, e.g., the Severe acute respiratory syndrome (SARS) 2002-associated species (NC_004718.3, herein incorporated by reference for all purposes) and/or Middle East respiratory syndrome (MERS) 2012-associated species (NC_019843.3, herein incorporated by reference for all purposes). Vaccines can be designed to encode at least one immunogenic polypeptide corresponding to a polypeptide encoded by SARS-CoV-2 that is conserved (e.g., 100% amino acid sequence conservation between epitopes) between SARS-CoV-2 and a Coronavirus species and/or sub-species other than SARS-CoV-2, e.g., Severe acute respiratory syndrome (SARS) and/or Middle East respiratory syndrome (MERS) species. SARS-CoV-2 epitopes that are conserved between SARS-CoV-2 and a Coronavirus species and/or sub-species other than SARS-CoV-2 can include epitopes derived from a Coronavirus Spike protein, a Coronavirus Membrane protein, a Coronavirus Nucleocapsid protein, a Coronavirus Envelope protein, a Coronavirus replicase orf1a and orf1b protein [such as one or more of non-structural proteins (nsp) 1-16], or any other protein sequences encoded by a Coronavirus, e.g., as illustrated in FIG. 27.

[0311] Antigens can be selected that are predicted to be presented on the cell surface of a cell, such as an infected cell or an immune cell, including professional antigen presenting cells such as dendritic cells. Antigens can be selected that are predicted to be immunogenic. Exemplary antigens predicted using the methods described herein to be presented on the cell surface by an MHC include predicted MHC class I epitopes shown in Table A, predicted MHC class II epitopes shown in Table B, and predicted MHC class I epitopes shown in Table C.

[0312] Antigens can be selected that have been validated to be presented by a specific HLA and/or stimulate an immune response, such as previously reported/validated in the literature (for example, as in Nelde et al. [Nature Immunology volume 22, pages 74-85 2021], Tarke et al. 2021, or Schelien et al. [bioRxiv 2020.08.13.249433]). The magnitude of stimulation of an immune response can be used to guide epitope/antigen selection, such as to select epitopes that stimulate as robust an immune response as possible, including when cassettes have a size constraint. As an illustrative non-limiting example of magnitude based-selection, the following can be used (1) An individual's magnitude is the sum of all epitope magnitudes across their respective diplotype alleles; (2) Each epitopes magnitude=(magnitude of response)×(Frequency of positive response/100), [e.g., using values found in Tarke et al. (Comprehensive analysis of T cell immunodominance and immunoprevalence of SARS-CoV-2 epitopes in COVID-19 cases. Cell Rep Med. 2021 Feb. 16; 2(2):100204. doi: 10.1016/j.xcrm.2021.100204. Epub 2021 Jan. 26.), herein incorporated by reference for all purposes]; (3) exclusion of epitopes other than those from starting proteins that span mutations with >5% frequency, optionally with mutations allowed in flanking regions; and/or (4) cassette order determined to minimize unintended junction epitopes across adjacent frames, as well as minimize consecutive frames in the same protein to reduce chance of functional protein fragments, as described herein.

[0313] A cassette can be constructed to encode one or more validated epitopes and/or at least 4, 5, 6, or 7 predicted epitopes, wherein at least 85%, 90%, or 95% of a population carries at least one HLA validated to present at least one of the one or more validated epitopes and/or at least one HLA predicted to present each of the at least 4, 5, 6, or 7 predicted epitopes. A cassette can be constructed to encode one or more validated epitopes and at least 4, 5, 6, or 7 predicted epitopes, wherein at least 85%, 90%, or 95% of a population carries at least one HLA validated to present at least one of the one or more validated epitopes or at least one HLA predicted to present each of the at least 4, 5, 6, or 7 predicted epitopes.

[0314] One or more polypeptides encoded by an antigen nucleotide sequence can comprise at least one of: a binding affinity with MHC with an IC50 value of less than 1000 nM, for MHC Class I peptides a length of 8-15, 8, 9, 10, 11, 12, 13, 14, or 15 amino acids, presence of sequence motifs within or near the peptide promoting proteasome cleavage, and presence or sequence motifs promoting TAP transport. For MHC Class II peptides a length 6-30, 6, 7, 8, 9, 10, 11, 12, 13, 14, 15, 16, 17, 18, 19, 20, 21, 22, 23, 24, 25, 26, 27, 28, 29, or 30 amino acids, presence of sequence motifs within or near the peptide promoting cleavage by extracellular or lysosomal proteases (e.g., cathepsins) or HLA-DM catalyzed HLA binding.

[0315] One or more antigens can be presented on the surface of an infected cell (e.g., a SARS-CoV-2 infected cell).

[0316] One or more antigens can be immunogenic in a subject having or suspected to have an infection (e.g., a SARS-CoV-2 infection), e.g., capable of stimulating a T cell response and/or a B cell response in the subject. One or more antigens can be immunogenic in a subject at risk of an infection (e.g., a SARS-CoV-2 infection), e.g., capable of stimulating a T cell response and/or a B cell response in the subject that provides immunological protection (i.e., immunity) against the infection, e.g., such as stimulating the production of memory T cells, memory B cells, or antibodies specific to the infection.

[0317] One or more antigens can be capable of stimulating a B cell response, such as the production of antibodies that recognize the one or more antigens (e.g., antibodies that recognize a SARS-CoV-2 antigen and/or virus). Antibodies can recognize linear polypeptide sequences or recognize secondary and tertiary structures. Accordingly, B cell antigens can include linear polypeptide sequences or polypeptides having secondary and tertiary structures, including, but not limited to, full-length proteins, protein subunits, protein domains, or any polypeptide sequence known or predicted to have secondary and tertiary structures. Antigens capable of stimulating a B cell response to an infection can be antigens found on the surface of an infectious disease organism (e.g., SARS-CoV-2). Antigens capable of stimulating a B cell response to an infection can be an intracellular antigen expressed in an infectious disease organism. SARS-CoV-2 antigens capable of stimulating a B cell response include, but are not limited to, SARS-CoV-2 Spike peptides, SARS-CoV-2 Membrane peptides, SARS-CoV-2 Nucleocapsid peptides, and SARS-CoV-2 Envelope peptides.

[0318] One or more antigens can include a combination of antigens capable of stimulating a T cell response (e.g., peptides including predicted T cell epitope sequences) and distinct antigens capable of stimulating a B cell response (e.g., full-length proteins, protein subunits, protein domains).

[0319] One or more antigens that stimulate an autoimmune response in a subject can be excluded from consideration in the context of vaccine generation for a subject.

[0320] The size of at least one antigenic peptide molecule (e.g., an epitope sequence) can comprise, but is not limited to, about 5, about 6, about 7, about 8, about 9, about 10, about 11, about 12, about 13, about 14, about 15, about 16, about 17, about 18, about 19, about 20, about 21, about 22, about 23, about 24, about 25, about 26, about 27, about 28, about 29, about 30, about 31, about 32, about 33, about 34, about 35, about 36, about 37, about 38, about 39, about 40, about 41, about 42, about 43, about 44, about 45, about 46, about 47, about 48, about 49, about 50, about 60, about 70, about 80, about 90, about 100, about 110, about 120 or greater amino molecule residues, and any range derivable therein. In specific embodiments the antigenic peptide molecules are equal to or less than 50 amino acids.

[0321] Antigenic peptides and polypeptides can be: for MHC Class 115 residues or less in length and usually consist of between about 8 and about 11 residues, particularly 9 or 10 residues; for MHC Class II, 6-30 residues, inclusive.

[0322] If desirable, a longer peptide can be designed in several ways. In one case, when presentation likelihoods of peptides on HLA alleles are predicted or known, a longer peptide could consist of either: (1) individual presented peptides with an extensions of 2-5 amino acids toward the N- and C-terminus of each corresponding gene product; (2) a concatenation of some or all of the presented peptides with extended sequences for each. In another case, when sequencing reveals a long (>10 residues) epitope sequence present, a longer peptide would consist of: (3) the entire stretch of novel infectious disease-specific amino acids—thus bypassing the need for computational or in vitro test-based selection of the strongest HLA-presented shorter peptide. In both cases, use of a longer peptide allows endogenous processing by patient cells and may lead to more effective antigen presentation leading to increased T cell responses. Longer peptides can also include a full-length protein, a protein subunit, a protein domain, and combinations thereof of a peptide, such as those expressed in an infectious disease organism. Longer peptides (e.g., full-length protein, protein subunit, or protein domain) and combinations thereof can be included to stimulate a B cell response.

[0323] Antigenic peptides and polypeptides can be presented on an HLA protein. In some aspects antigenic peptides and polypeptides are presented on an HLA protein with greater affinity than a wild-type peptide. In some aspects, an antigenic peptide or polypeptide can have an IC50 of at least less than 5000 nM, at least less than 1000 nM, at least less than 500 nM, at least less than 250 nM, at least less than 200 nM, at least less than 150 nM, at least less than 100 nM, at least less than 50 nM or less.

[0324] In some aspects, antigenic peptides and polypeptides do not stimulate an autoimmune response and/or invoke immunological tolerance when administered to a subject.

[0325] Also provided are compositions comprising at least two or more antigenic peptides. In some embodiments the composition contains at least two distinct peptides. At least two distinct peptides can be derived from the same polypeptide. By distinct polypeptides is meant that the peptide vary by length, amino acid sequence, or both. The peptides can be derived from any polypeptide known to or suspected to be associated with an infectious disease organism, or peptides derived from any polypeptide known to or have been found to have altered expression in an infected cell in comparison to a normal cell or tissue (e.g., an infectious disease polynucleotide or polypeptide, including infectious disease polynucleotides or polypeptides with expression restricted to a host cell).

[0326] Antigenic peptides and polypeptides having a desired activity or property can be modified to provide certain desired attributes, e.g., improved pharmacological characteristics, while increasing or at least retaining substantially all of the biological activity of the unmodified peptide to bind the desired MHC molecule and activate the appropriate T cell. For instance, antigenic peptide and polypeptides can be subject to various changes, such as substitutions, either conservative or non-conservative, where such changes might provide for certain advantages in their use, such as improved MHC binding, stability or presentation. By conservative substitutions is meant replacing an amino acid residue with another which is biologically and/or chemically similar, e.g., one hydrophobic residue for another, or one polar residue for another. The substitutions include combinations such as Gly, Ala; Val, Ile, Leu, Met; Asp, Glu; Asn, Gln; Ser, Thr; Lys, Arg; and Phe, Tyr. The effect of single amino acid substitutions may also be probed using D-amino acids. Such modifications can be made using well known peptide synthesis procedures, as described in e.g., Merrifield, Science 232:341-347 (1986), Barany & Merrifield, The Peptides, Gross & Meienhofer, eds. (N.Y., Academic Press), pp. 1-284 (1979); and Stewart & Young, Solid Phase Peptide Synthesis, (Rockford, Ill., Pierce), 2d Ed. (1984).

[0327] Modifications of peptides and polypeptides with various amino acid mimetics or unnatural amino acids can be particularly useful in increasing the stability of the peptide and polypeptide in vivo. Stability can be assayed in a number of ways. For instance, peptidases and various biological media, such as human plasma and serum, have been used to test stability. See, e.g., Verhoef et al., Eur. J. Drug Metab Pharmacokin. 11:291-302 (1986). Half-life of the peptides can be conveniently determined using a 25% human serum (v/v) assay. The protocol is generally as follows. Pooled human serum (Type AB, non-heat inactivated) is delipidated by centrifugation before use. The serum is then diluted to 25% with RPMI tissue culture media and used to test peptide stability. At predetermined time intervals a small amount of reaction solution is removed and added to either 6% aqueous trichloracetic acid or ethanol. The cloudy reaction sample is cooled (4 degrees C.) for 15 minutes and then spun to pellet the precipitated serum proteins. The presence of the peptides is then determined by reversed-phase HPLC using stability-specific chromatography conditions.

[0328] The peptides and polypeptides can be modified to provide desired attributes other than improved serum half-life. For instance, the ability of the peptides to stimulate CTL activity can be enhanced by linkage to a sequence which contains at least one epitope that is capable of inducing a T helper cell response. Immunogenic peptides/T helper conjugates can be linked by a spacer molecule. The spacer is typically comprised of relatively small, neutral molecules, such as amino acids or amino acid mimetics, which are substantially uncharged under physiological conditions. The spacers are typically selected from, e.g., Ala, Gly, or other neutral spacers of nonpolar amino acids or neutral polar amino acids. It will be understood that the optionally present spacer need not be comprised of the same residues and thus can be a hetero- or homo-oligomer. When present, the spacer will usually be at least one or two residues, more usually three to six residues. Alternatively, the peptide can be linked to the T helper peptide without a spacer.

[0329] Polypeptides encoding antigens can be modified to alter processing of the polypeptides, such as protease cleavage and/or other post-translation processing. Polypeptides encoding antigens can be modified such that the antigen favors a specific conformation. Polypeptides encoding antigens can be modified such that the mutations (e.g., one or more missense mutations) disrupt a specific conformation in the antigen, such as through the introduction of prolines that disrupt secondary and tertiary structures (e.g., alpha-helix or beta-sheet formation). Altering, reducing, or eliminating processing or conformation changes may, in some instances, bias the antigen to favor states favorable to neutralizing antibody production. In a series of illustrative examples, SARS-CoV-2 Spike mutations at amino acids 682, 815, 987, and 988 are engineered to bias the Spike protein to remain in a predominantly prefusion state, a potentially preferable state for antibody-mediated neutralization. Specifically, without wishing to be bound by theory, mutations at R682 (e.g., R682V) disrupt the Furin cleavage site involved in processing Spike into S1 and S2; mutations at R815 (e.g., R815N) disrupt the cleavage site within S2; and mutations at K986 and V987, such as K986P and V987P introducing two prolines, that interfere with the secondary structure of Spike making it less likely to be processed from the pre to post fusion state. Accordingly, an antigen cassette can encode a modified Spike protein having at least one mutation selected from: a Spike R682V mutation, a Spike R815N mutation, a Spike K986P mutation, a Spike V987P mutation, and combinations thereof with reference the Wuhan-Hu-1 isolate (see SEQ ID NO:59 reference and SEQ ID NO:60/SEQ ID NO:90 containing mutations). Modified polypeptide sequences can be at least 60%, 70%, 80%, or 90% identical to a native SARS-CoV-2 polypeptide sequence. Modified polypeptide sequences can be at least 91%, 92%, 93%, or 94% identical to a native SARS-CoV-2 polypeptide sequence. Modified polypeptide sequences can be at least 95%, 96%, 97%, 98%, or 99% identical to a native SARS-CoV-2 polypeptide sequence. Modified polypeptide sequences can be at least 99.1%, 99.2%, 99.3%, 99.4%, 99.5%, 99.6%, 99.7%, 99.8%, or 99.9% identical to a native SARS-CoV-2 polypeptide sequence.

[0330] An antigenic peptide can be linked to the T helper peptide either directly or via a spacer either at the amino or carboxy terminus of the peptide. The amino terminus of either the antigenic peptide or the T helper peptide can be acylated. Exemplary T helper peptides include tetanus toxoid 830-843, influenza 307-319, malaria circumsporozoite 382-398 and 378-389.

[0331] Proteins or peptides can be made by any technique known to those of skill in the art, including the expression of proteins, polypeptides or peptides through standard molecular biological techniques, the isolation of proteins or peptides from natural sources, or the chemical synthesis of proteins or peptides. The nucleotide and protein, polypeptide and peptide sequences corresponding to various genes have been previously disclosed, and can be found at computerized databases known to those of ordinary skill in the art. One such database is the National Center for Biotechnology Information's Genbank and GenPept databases located at the National Institutes of Health website. The coding regions for known genes can be amplified and/or expressed using the techniques disclosed herein or as would be known to those of ordinary skill in the art. Alternatively, various commercial preparations of proteins, polypeptides and peptides are known to those of skill in the art.

[0332] In a further aspect, an antigen includes a nucleic acid (e.g. polynucleotide) that encodes an antigenic peptide or portion thereof. The polynucleotide can be, e.g., DNA, cDNA, PNA, CNA, RNA (e.g., mRNA), either single- and/or double-stranded, or native or stabilized forms of polynucleotides, such as, e.g., polynucleotides with a phosphorothioate backbone, or combinations thereof and it may or may not contain introns. A polynucleotide sequence encoding an antigen can be sequence-optimized to improve expression, such as through improving transcription, translation, post-transcriptional processing, and/or RNA stability. For example, polynucleotide sequence encoding an antigen can be codon-optimized. “Codon-optimization” herein refers to replacing infrequently used codons, with respect to codon bias of a given organism, with frequently used synonymous codons. Polynucleotide sequences can be optimized to improve post-transcriptional processing, for example optimized to reduce unintended splicing, such as through removal of splicing motifs (e.g., canonical and/or cryptic/non-canonical splice donor, branch, and/or acceptor sequences) and/or introduction of exogenous splicing motifs (e.g., splice donor, branch, and/or acceptor sequences) to bias favored splicing events. Exogenous intron sequences include, but are not limited to, those derived from SV40 (e.g., an SV40 mini-intron [SEQ ID NO:88]) and derived from immunoglobulins (e.g., human β-globin gene). Exogenous intron sequences can be incorporated between a promoter/enhancer sequence and the antigen(s) sequence. Exogenous intron sequences for use in expression vectors are described in more detail in Callendret et al. (Virology. 2007 Jul. 5; 363(2): 288-302), herein incorporated by reference for all purposes. Polynucleotide sequences can be optimized to improve transcript stability, for example through removal of RNA instability motifs (e.g., AU-rich elements and 3′ UTR motifs) and/or repetitive nucleotide sequences. Polynucleotide sequences can be optimized to improve accurate transcription, for example through removal of cryptic transcriptional initiators and/or terminators. Polynucleotide sequences can be optimized to improve translation and translational accuracy, for example through removal of cryptic AUG start codons, premature polyA sequences, and/or secondary structure motifs. Polynucleotide sequences can be optimized to improve nuclear export of transcripts, such as through addition of a Constitutive Transport Element (CTE), RNA Transport Element (RTE), or Woodchuck Posttranscriptional Regulatory Element (WPRE). Nuclear export signals for use in expression vectors are described in more detail in Callendret et al. (Virology. 2007 Jul. 5; 363(2): 288-302), herein incorporated by reference for all purposes. Polynucleotide sequences can be optimized with respect to GC content, for example to reflect the average GC content of a given organism. Sequence optimization can balance one or more sequence properties, such as transcription, translation, post-transcriptional processing, and/or RNA stability. Sequence optimization can generate an optimal sequence balancing each of transcription, translation, post-transcriptional processing, and RNA stability. Sequence optimization algorithms are known to those of skill in the art, such as GeneArt (Thermo Fisher), Codon Optimization Tool (IDT), Cool Tool, SGI-DNA (La Jolla California). One or more regions of an antigen-encoding protein can be sequence-optimized separately. As a non-limiting illustrative example, SARS-CoV-2 Spike protein can be sequence-optimized (or unoptimized) in the S1 region of the protein and the S2 region is separately optimized (e.g., optimized using a different algorithm and/or optimized for one or more sequence properties specific for the S2 region).

[0333] A method disclosed herein can also include identifying one or more T cells that are antigen-specific for at least one of the antigens in the subset. In some embodiments, the identification comprises co-culturing the one or more T cells with one or more of the antigens in the subset under conditions that expand the one or more antigen-specific T cells. In further embodiments, the identification comprises contacting the one or more T cells with a tetramer comprising one or more of the antigens in the subset under conditions that allow binding between the T cell and the tetramer. In even further embodiments, the method disclosed herein can also include identifying one or more T cell receptors (TCR) of the one or more identified T cells. In certain embodiments, identifying the one or more T cell receptors comprises sequencing the T cell receptor sequences of the one or more identified T cells. The method disclosed herein can further comprise genetically engineering a plurality of T cells to express at least one of the one or more identified T cell receptors; culturing the plurality of T cells under conditions that expand the plurality of T cells; and infusing the expanded T cells into the subject. In some embodiments, genetically engineering the plurality of T cells to express at least one of the one or more identified T cell receptors comprises cloning the T cell receptor sequences of the one or more identified T cells into an expression vector; and transfecting each of the plurality of T cells with the expression vector. In some embodiments, the method disclosed herein further comprises culturing the one or more identified T cells under conditions that expand the one or more identified T cells; and infusing the expanded T cells into the subject.

[0334] Also disclosed herein is an isolated T cell that is antigen-specific for at least one selected antigen in the subset.

[0335] A still further aspect provides an expression vector capable of expressing a polypeptide or portion thereof. Expression vectors for different cell types are well known in the art and can be selected without undue experimentation. Generally, DNA is inserted into an expression vector, such as a plasmid, in proper orientation and correct reading frame for expression. If necessary, DNA can be linked to the appropriate transcriptional and translational regulatory control nucleotide sequences recognized by the desired host, although such controls are generally available in the expression vector. The vector is then introduced into the host through standard techniques. Guidance can be found e.g. in Sambrook et al. (1989) Molecular Cloning, A Laboratory Manual, Cold Spring Harbor Laboratory, Cold Spring Harbor, N.Y.

### V. Vaccine Compositions

[0336] Also disclosed herein is an immunogenic composition, e.g., a vaccine composition, capable of raising a specific immune response, e.g., an infectious disease organism-specific immune response. Vaccine compositions typically comprise one or a plurality of antigens, e.g., selected using a method described herein. Vaccine compositions can also be referred to as vaccines.

[0337] A vaccine can contain between 1 and 30 peptides, 2, 3, 4, 5, 6, 7, 8, 9, 10, 11, 12, 13, 14, 15, 16, 17, 18, 19, 20, 21, 22, 23, 24, 25, 26, 27, 28, 29, or 30 different peptides, 6, 7, 8, 9, 10 11, 12, 13, or 14 different peptides, or 12, 13 or 14 different peptides. Peptides can include post-translational modifications. A vaccine can contain between 1 and 100 or more nucleotide sequences, 2, 3, 4, 5, 6, 7, 8, 9, 10, 11, 12, 13, 14, 15, 16, 17, 18, 19, 20, 21, 22, 23, 24, 25, 26, 27, 28, 29, 30, 31, 32, 33, 34, 35, 36, 37, 38, 39, 40, 41, 42, 43, 44, 45, 46, 47, 48, 49, 50, 51, 52, 53, 54, 55, 56, 57, 58, 59, 60, 61, 62, 63, 64, 65, 66, 67, 68, 69, 70, 71, 72, 73, 74, 75, 76, 77, 78, 79, 80, 81, 82, 83, 84, 85, 86, 87, 88, 89, 90, 91, 92, 93, 94, 95, 96, 97, 98, 99, 100 or more different nucleotide sequences, 6, 7, 8, 9, 10 11, 12, 13, or 14 different nucleotide sequences, or 12, 13 or 14 different nucleotide sequences. A vaccine can contain between 1 and 30 antigen sequences, 2, 3, 4, 5, 6, 7, 8, 9, 10, 11, 12, 13, 14, 15, 16, 17, 18, 19, 20, 21, 22, 23, 24, 25, 26, 27, 28, 29, 30, 31, 32, 33, 34, 35, 36, 37, 38, 39, 40, 41, 42, 43, 44, 45, 46, 47, 48, 49, 50, 51, 52, 53, 54, 55, 56, 57, 58, 59, 60, 61, 62, 63, 64, 65, 66, 67, 68, 69, 70, 71, 72, 73, 74, 75, 76, 77, 78, 79, 80, 81, 82, 83, 84, 85, 86, 87, 88, 89, 90, 91, 92, 93, 94, 95, 96, 97, 98, 99, 100 or more different antigen sequences, 6, 7, 8, 9, 10 11, 12, 13, or 14 different antigen sequences, or 12, 13 or 14 different antigen sequences.

[0338] A vaccine can contain between 1 and 30 antigen-encoding nucleic acid sequences, 2, 3, 4, 5, 6, 7, 8, 9, 10, 11, 12, 13, 14, 15, 16, 17, 18, 19, 20, 21, 22, 23, 24, 25, 26, 27, 28, 29, 30, 31, 32, 33, 34, 35, 36, 37, 38, 39, 40, 41, 42, 43, 44, 45, 46, 47, 48, 49, 50, 51, 52, 53, 54, 55, 56, 57, 58, 59, 60, 61, 62, 63, 64, 65, 66, 67, 68, 69, 70, 71, 72, 73, 74, 75, 76, 77, 78, 79, 80, 81, 82, 83, 84, 85, 86, 87, 88, 89, 90, 91, 92, 93, 94, 95, 96, 97, 98, 99, 100 or more different antigen-encoding nucleic acid sequences, 6, 7, 8, 9, 10 11, 12, 13, or 14 different antigen-encoding nucleic acid sequences, or 12, 13 or 14 different antigen-encoding nucleic acid sequences. Antigen-encoding nucleic acid sequences can refer to the antigen encoding portion of an “antigen cassette.” Features of an antigen cassette are described in greater detail herein. An antigen-encoding nucleic acid sequence can contain one or more epitope-encoding nucleic acid sequences (e.g., an antigen-encoding nucleic acid sequence encoding concatenated T cell epitopes).

[0339] A vaccine can contain between 1 and 30 distinct epitope-encoding nucleic acid sequences, 2, 3, 4, 5, 6, 7, 8, 9, 10, 11, 12, 13, 14, 15, 16, 17, 18, 19, 20, 21, 22, 23, 24, 25, 26, 27, 28, 29, 30, 31, 32, 33, 34, 35, 36, 37, 38, 39, 40, 41, 42, 43, 44, 45, 46, 47, 48, 49, 50, 51, 52, 53, 54, 55, 56, 57, 58, 59, 60, 61, 62, 63, 64, 65, 66, 67, 68, 69, 70, 71, 72, 73, 74, 75, 76, 77, 78, 79, 80, 81, 82, 83, 84, 85, 86, 87, 88, 89, 90, 91, 92, 93, 94, 95, 96, 97, 98, 99, 100 or more distinct epitope-encoding nucleic acid sequences, 6, 7, 8, 9, 10 11, 12, 13, or 14 distinct epitope-encoding nucleic acid sequences, or 12, 13 or 14 distinct epitope-encoding nucleic acid sequences. Epitope-encoding nucleic acid sequences can refer to sequences for individual epitope sequences, such as each of the T cell epitopes in an antigen-encoding nucleic acid sequence encoding concatenated T cell epitopes.

[0340] A vaccine can contain at least two repeats of an epitope-encoding nucleic acid sequence. A used herein, a “repeat” refers to two or more iterations of an identical nucleic acid epitope-encoding nucleic acid sequence (inclusive of the optional 5′ linker sequence and/or the optional 3′ linker sequences described herein) within an antigen-encoding nucleic acid sequence. In one example, the antigen-encoding nucleic acid sequence portion of a cassette encodes at least two repeats of an epitope-encoding nucleic acid sequence. In further non-limiting examples, the antigen-encoding nucleic acid sequence portion of a cassette encodes more than one distinct epitope, and at least one of the distinct epitopes is encoded by at least two repeats of the nucleic acid sequence encoding the distinct epitope (i.e., at least two distinct epitope-encoding nucleic acid sequences). In illustrative non-limiting examples, an antigen-encoding nucleic acid sequence encodes epitopes A, B, and C encoded by epitope-encoding nucleic acid sequences epitope-encoding sequence A (E_{A}), epitope-encoding sequence B (E_{B}), and epitope-encoding sequence C (E_{C}), and exemplary antigen-encoding nucleic acid sequences having repeats of at least one of the distinct epitopes are illustrated by, but is not limited to, the formulas below:
[0341] Repeat of one distinct epitope (repeat of epitope A):
[0342] E_{A}-E_{B}-E_{C}-E_{A}; or
[0343] E_{A}-E_{A}-E_{B}-E_{C}
[0344] Repeat of multiple distinct epitopes (repeats of epitopes A, B, and C):
[0345] E_{A}-E_{B}-E_{C}-E_{A}-E_{B}-E_{C}; or
[0346] E_{A}-E_{A}-E_{B}-E_{B}-E_{C}-E_{C}
[0347] Multiple repeats of multiple distinct epitopes (repeats of epitopes A, B, and C):
[0348] E_{A}-E_{B}-E_{C}-E_{A}-E_{B}-E_{C}-E_{A}-E_{B}-E_{C}; or
[0349] E_{A}-E_{A}-E_{A}-E_{B}-E_{B}-E_{B}-E_{C}-E_{C}-E_{C}

[0350] The above examples are not limiting and the antigen-encoding nucleic acid sequences having repeats of at least one of the distinct epitopes can encode each of the distinct epitopes in any order or frequency. For example, the order and frequency can be a random arrangement of the distinct epitopes, e.g., in an example with epitopes A, B, and C, by the formula E_{A}-E_{B}-E_{C}-E_{C}-E_{A}-E_{B}-E_{A}-E_{C}-E_{A}-E_{C}-E_{C}-E_{B}.

[0351] Also provided for herein is an antigen-encoding cassette, the antigen-encoding cassette having at least one antigen-encoding nucleic acid sequence described, from 5′ to 3′, by the formula:

(Eₓ-(E^{N}ₙ)_{y})_{z}

where E represents a nucleotide sequence comprising at least one of the at least one distinct epitope-encoding nucleic acid sequences,
[0352] n represents the number of separate distinct epitope-encoding nucleic acid sequences and is any integer including 0,
[0353] E^{N} represents a nucleotide sequence comprising the separate distinct epitope-encoding nucleic acid sequence for each corresponding n,
[0354] for each iteration of z: x=0 or 1, y=0 or 1 for each n, and at least one of x or y=1, and z=2 or greater, wherein the antigen-encoding nucleic acid sequence comprises at least two iterations of E, a given E^{N}, or a combination thereof.

[0355] Each E or E^{N} can independently comprise any epitope-encoding nucleic acid sequence described herein (e.g., a nucleotide sequence encoding a polypeptide sequence as set forth in Table A, Table B, and/or Table C). For example, Each E or E^{N} can independently comprises a nucleotide sequence described, from 5′ to 3′, by the formula (L5_{b}-N_{c}-L3_{d}), where N comprises the distinct epitope-encoding nucleic acid sequence associated with each E or E^{N}, where c=1, L5 comprises a 5′ linker sequence, where b=0 or 1, and L3 comprises a 3′ linker sequence, where d=0 or 1. Epitopes and linkers that can be used are further described herein.

[0356] Repeats of an epitope-encoding nucleic acid sequences (inclusive of optional 5′ linker sequence and/or the optional 3′ linker sequences) can be linearly linked directly to one another (e.g., E_{A}-E_{A}- . . . as illustrated above). Repeats of an epitope-encoding nucleic acid sequences can be separated by one or more additional nucleotides sequences. In general, repeats of an epitope-encoding nucleic acid sequences can be separated by any size nucleotide sequence applicable for the compositions described herein. In one example, repeats of an epitope-encoding nucleic acid sequences can be separated by a separate distinct epitope-encoding nucleic acid sequence (e.g., E_{A}-E_{B}-E_{C}-E_{A} . . . , as illustrated above). In examples where repeats are separated by a single separate distinct epitope-encoding nucleic acid sequence, and each epitope-encoding nucleic acid sequences (inclusive of optional 5′ linker sequence and/or the optional 3′ linker sequences) encodes a peptide 25 amino acids in length, the repeats can be separated by 75 nucleotides, such as in antigen-encoding nucleic acid represented by E_{A}-E_{B}-E_{A} . . . , E_{A} is separated by 75 nucleotides. In an illustrative example, an antigen-encoding nucleic acid having the sequence VTNTEMFVTAPDNLGYMYEVQWPGQTQPQIANCSVYDFFVWLHYYSVRDTVTNTEMF VTAPDNLGYMYEVQWPGQTQPQIANCSVYDFFVWLHYYSVRDT (SEQ ID NO: 115) encoding repeats of 25mer antigens Trp1 (VTNTEMFVTAPDNLGYMYEVQWPGQ; SEQ ID NO: 116) and Trp2 (TQPQIANCSVYDFFVWLHYYSVRDT; SEQ ID NO: 117), the repeats of Trp1 are separated by the 25mer Trp2 and thus the repeats of the Trp1 epitope-encoding nucleic acid sequences are separated the 75 nucleotide Trp2 epitope-encoding nucleic acid sequence. In examples where repeats are separated by 2, 3, 4, 5, 6, 7, 8, or 9 separate distinct epitope-encoding nucleic acid sequence, and each epitope-encoding nucleic acid sequences (inclusive of optional 5′ linker sequence and/or the optional 3′ linker sequences) encodes a peptide 25 amino acids in length, the repeats can be separated by 150, 225, 300, 375, 450, 525, 600, or 675 nucleotides, respectively.

[0357] In one embodiment, different peptides and/or polypeptides or nucleotide sequences encoding them are selected so that the peptides and/or polypeptides capable of associating with different MHC molecules, such as different MHC class I molecules and/or different MHC class II molecules. In some aspects, one vaccine composition comprises coding sequence for peptides and/or polypeptides capable of associating with the most frequently occurring MHC class I molecules and/or different MHC class II molecules. Hence, vaccine compositions can comprise different fragments capable of associating with at least 2 preferred, at least 3 preferred, or at least 4 preferred MHC class I molecules and/or different MHC class II molecules.

[0358] The vaccine composition can stimulate a specific cytotoxic T-cell response and a specific helper T-cell response.

[0359] The vaccine composition can stimulate a specific B-cell response (e.g., an antibody response).

[0360] The vaccine composition can stimulate a specific cytotoxic T-cell response, a specific helper T-cell response, and/or a specific B-cell response. The vaccine composition can stimulate a specific cytotoxic T-cell response and a specific B-cell response. The vaccine composition can stimulate a specific helper T-cell response and a specific B-cell response. The vaccine composition can stimulate a specific cytotoxic T-cell response, a specific helper T-cell response, and a specific B-cell response.

[0361] A combination of vaccine compositions can stimulate a specific cytotoxic T-cell response, a specific helper T-cell response, and/or a specific B-cell response. Vaccine compositions can be homologous and stimulate a specific cytotoxic T-cell response, a specific helper T-cell response, and/or a specific B-cell response in combination. Vaccine compositions can be homologous and stimulate a specific cytotoxic T-cell response, a specific helper T-cell response, and a specific B-cell response in combination. Vaccine compositions can be heterologous and stimulate a specific cytotoxic T-cell response, a specific helper T-cell response, and/or a specific B-cell response in combination. Vaccine compositions can be heterologous and stimulate a specific cytotoxic T-cell response, a specific helper T-cell response, and a specific B-cell response in combination. Heterologous vaccines include an identical antigen cassette encoded by different vaccine platforms, e.g., a viral vaccine (e.g., a ChAdV-based platform) and a mRNA vaccine (e.g., a SAM-based platform). Heterologous vaccines include different antigen cassettes (e.g., a Spike cassette and a separate T cell epitope encoding cassette, or epitopes/antigens derived from different isolates of SARS-CoV-2, such as Spike protein variants from a Wuhan-Hu-1 isolate and a B.1.351 isolate) encoded by the same vaccine platform, e.g., either a viral vaccine (e.g., a ChAdV-based platform) or a mRNA vaccine (e.g., a SAM-based platform). Heterologous vaccines include different antigen cassettes (e.g., a Spike cassette and a separate T cell epitope encoding cassette or epitopes/antigens derived from different isolates of SARS-CoV-2, such as Spike protein variants from a Wuhan-Hu-1 isolate and a B.1.351 isolate) encoded by different vaccine platforms, e.g., a viral vaccine (e.g., a ChAdV-based platform) and a mRNA vaccine (e.g., a SAM-based platform). For example, as an illustrative non-limiting example, a viral vaccine (e.g., a ChAdV-based platform) can in particular stimulate a robust cytotoxic T-cell response and a mRNA vaccine (e.g., a SAM-based platform) can in particular stimulate a robust B-cell response.

[0362] A vaccine composition can further comprise an adjuvant and/or a carrier. Examples of useful adjuvants and carriers are given herein below. A composition can be associated with a carrier such as e.g. a protein or an antigen-presenting cell such as, e.g., a dendritic cell (DC) capable of presenting the peptide to a T-cell.

[0363] Adjuvants are any substance whose admixture into a vaccine composition increases or otherwise modifies the immune response to an antigen. Carriers can be scaffold structures, for example a polypeptide or a polysaccharide, to which an antigen, is capable of being associated. Optionally, adjuvants are conjugated covalently or non-covalently.

[0364] The ability of an adjuvant to increase an immune response to an antigen is typically manifested by a significant or substantial increase in an immune-mediated reaction, or reduction in disease symptoms. For example, an increase in humoral immunity is typically manifested by a significant increase in the titer of antibodies raised to the antigen, and an increase in T-cell activity is typically manifested in increased cell proliferation, or cellular cytotoxicity, or cytokine secretion. An adjuvant may also alter an immune response, for example, by changing a primarily humoral or Th response into a primarily cellular, or Th response.

[0365] Suitable adjuvants include, but are not limited to 1018 ISS, alum, aluminium salts, Amplivax, AS15, BCG, CP-870,893, CpG7909, CyaA, dSLIM, GM-CSF, IC30, IC31, Imiquimod, ImuFact IMP321, IS Patch, ISS, ISCOMATRIX, JuvImmune, LipoVac, MF59, monophosphoryl lipid A, Montanide IMS 1312, Montanide ISA 206, Montanide ISA 50V, Montanide ISA-51, OK-432, OM-174, OM-197-MP-EC, ONTAK, PepTel vector system, PLG microparticles, resiquimod, SRL172, Virosomes and other Virus-like particles, YF-17D, VEGF trap, R848, beta-glucan, Pam3Cys, Aquila's QS21 stimulon (Aquila Biotech, Worcester, Mass., USA) which is derived from saponin, mycobacterial extracts and synthetic bacterial cell wall mimics, and other proprietary adjuvants such as Ribi's Detox. Quil or Superfos. Adjuvants such as incomplete Freund's or GM-CSF are useful. Several immunological adjuvants (e.g., MF59) specific for dendritic cells and their preparation have been described previously (Dupuis M, et al., Cell Immunol. 1998; 186(1):18-27; Allison A C; Dev Biol Stand. 1998; 92:3-11). Also cytokines can be used. Several cytokines have been directly linked to influencing dendritic cell migration to lymphoid tissues (e.g., TNF-alpha), accelerating the maturation of dendritic cells into efficient antigen-presenting cells for T-lymphocytes (e.g., GM-CSF, IL-1 and IL-4) (U.S. Pat. No. 5,849,589, specifically incorporated herein by reference in its entirety) and acting as immunoadjuvants (e.g., IL-12) (Gabrilovich D I, et al., J Immunother Emphasis Tumor Immunol. 1996 (6):414-418).

[0366] CpG immunostimulatory oligonucleotides have also been reported to enhance the effects of adjuvants in a vaccine setting. Other TLR binding molecules such as RNA binding TLR 7, TLR 8 and/or TLR 9 may also be used.

[0367] Other examples of useful adjuvants include, but are not limited to, chemically modified CpGs (e.g. CpR, Idera), Poly(I:C)(e.g. polyi:CI2U), non-CpG bacterial DNA or RNA as well as immunoactive small molecules and antibodies such as cyclophosphamide, sunitinib, bevacizumab, celebrex, NCX-4016, sildenafil, tadalafil, vardenafil, sorafinib, XL-999, CP-547632, pazopanib, ZD2171, AZD2171, ipilimumab, tremelimumab, and SC58175, which may act therapeutically and/or as an adjuvant. The amounts and concentrations of adjuvants and additives can readily be determined by the skilled artisan without undue experimentation. Additional adjuvants include colony-stimulating factors, such as Granulocyte Macrophage Colony Stimulating Factor (GM-CSF, sargramostim).

[0368] A vaccine composition can comprise more than one different adjuvant. Furthermore, a therapeutic composition can comprise any adjuvant substance including any of the above or combinations thereof. It is also contemplated that a vaccine and an adjuvant can be administered together or separately in any appropriate sequence.

[0369] A carrier (or excipient) can be present independently of an adjuvant. The function of a carrier can for example be to increase the molecular weight of in particular mutant to increase activity or immunogenicity, to confer stability, to increase the biological activity, or to increase serum half-life. Furthermore, a carrier can aid presenting peptides to T-cells. A carrier can be any suitable carrier known to the person skilled in the art, for example a protein or an antigen presenting cell. A carrier protein could be but is not limited to keyhole limpet hemocyanin, serum proteins such as transferrin, bovine serum albumin, human serum albumin, thyroglobulin or ovalbumin, immunoglobulins, or hormones, such as insulin or palmitic acid. For immunization of humans, the carrier is generally a physiologically acceptable carrier acceptable to humans and safe. However, tetanus toxoid and/or diphtheria toxoid are suitable carriers. Alternatively, the carrier can be dextrans for example Sepharose.

[0370] Cytotoxic T-cells (CTLs) recognize an antigen in the form of a peptide bound to an MHC molecule rather than the intact foreign antigen itself. The MHC molecule itself is located at the cell surface of an antigen presenting cell. Thus, an activation of CTLs is possible if a trimeric complex of peptide antigen, MHC molecule, and APC is present. Correspondingly, it may enhance the immune response if not only the peptide is used for activation of CTLs, but if additionally APCs with the respective MHC molecule are added. Therefore, in some embodiments a vaccine composition additionally contains at least one antigen presenting cell.

[0371] Antigens can also be included in viral vector-based vaccine platforms, such as vaccinia, fowlpox, self-replicating alphavirus, marabavirus, adenovirus (See, e.g., Tatsis et al., Adenoviruses, Molecular Therapy (2004) 10, 616-629), or lentivirus, including but not limited to second, third or hybrid second/third generation lentivirus and recombinant lentivirus of any generation designed to target specific cell types or receptors (See, e.g., Hu et al., Immunization Delivered by Lentiviral Vectors for Cancer and Infectious Diseases, Immunol Rev. (2011) 239(1): 45-61, Sakuma et al., Lentiviral vectors: basic to translational, Biochem J. (2012) 443(3):603-18, Cooper et al., Rescue of splicing-mediated intron loss maximizes expression in lentiviral vectors containing the human ubiquitin C promoter, Nucl. Acids Res. (2015) 43 (1): 682-690, Zufferey et al., Self-Inactivating Lentivirus Vector for Safe and Efficient In Vivo Gene Delivery, J. Virol. (1998) 72 (12): 9873-9880). Dependent on the packaging capacity of the above mentioned viral vector-based vaccine platforms, this approach can deliver one or more nucleotide sequences that encode one or more antigen peptides. The sequences may be flanked by non-mutated sequences, may be separated by linkers or may be preceded with one or more sequences targeting a subcellular compartment (See, e.g., Gros et al., Prospective identification of neoantigen-specific lymphocytes in the peripheral blood of melanoma patients, Nat Med. (2016) 22 (4):433-8, Stronen et al., Targeting of cancer neoantigens with donor-derived T cell receptor repertoires, Science. (2016) 352 (6291):1337-41, Lu et al., Efficient identification of mutated cancer antigens recognized by T cells associated with durable tumor regressions, Clin Cancer Res. (2014) 20(13):3401-10). Upon introduction into a host, infected cells express the antigens, and thereby stimulate a host immune (e.g., CTL) response against the peptide(s). Vaccinia vectors and methods useful in immunization protocols are described in, e.g., U.S. Pat. No. 4,722,848. Another vector is BCG (Bacille Calmette Guerin). BCG vectors are described in Stover et al. (Nature 351:456-460 (1991)). A wide variety of other vaccine vectors useful for therapeutic administration or immunization of antigens, e.g., Salmonella typhi vectors, and the like will be apparent to those skilled in the art from the description herein.

[0372] V.A. Antigen Cassette

[0373] The methods employed for the selection of one or more antigens, the cloning and construction of a “cassette” and its insertion into a viral vector are within the skill in the art given the teachings provided herein. By “antigen cassette” or “cassette” is meant the combination of a selected antigen or plurality of antigens (e.g., antigen-encoding nucleic acid sequences) and the other regulatory elements necessary to transcribe the antigen(s) and express the transcribed product. The selected antigen or plurality of antigens can refer to distinct epitope sequences, e.g., an antigen-encoding nucleic acid sequence in the cassette can encode an epitope-encoding nucleic acid sequence (or plurality of epitope-encoding nucleic acid sequences) such that the epitopes are transcribed and expressed. An antigen or plurality of antigens can be operatively linked to regulatory components in a manner which permits transcription. Such components include conventional regulatory elements that can drive expression of the antigen(s) in a cell transfected with the viral vector. Thus the antigen cassette can also contain a selected promoter which is linked to the antigen(s) and located, with other, optional regulatory elements, within the selected viral sequences of the recombinant vector. A cassette can have one or more antigen-encoding nucleic acid sequences, such as a cassette containing multiple antigen-encoding nucleic acid sequences each independently operably linked to separate promoters and/or linked together using other multicistonic systems, such as 2A ribosome skipping sequence elements (e.g., E2A, P2A, F2A, or T2A sequences) or Internal Ribosome Entry Site (IRES) sequence elements. A linker can also have a cleavage site, such as a TEV or furin cleavage site. Linkers with cleavage sites can be used in combination with other elements, such as those in a multicistronic system. In a non-limiting illustrative example, a furin protease cleavage site can be used in conjuction with a 2A ribosome skipping sequence element such that the furin protease cleavage site is configured to facilitate removal of the 2A sequence following translation. In a cassette containing more than one antigen-encoding nucleic acid sequences, each antigen-encoding nucleic acid sequence can contain one or more epitope-encoding nucleic acid sequences (e.g., an antigen-encoding nucleic acid sequence encoding concatenated T cell epitopes). In illustrative examples of multicistronic formats, cassettes encoding SARS-CoV-2 antigens are configured as follows: (1) endogenous 26S promoter—Spike protein—T2A—Membrane protein, or (2) endogenous 26S promoter—Spike protein—26S promoter—concatenated T cell epitopes.

[0374] Useful promoters can be constitutive promoters or regulated (inducible) promoters, which will enable control of the amount of antigen(s) to be expressed. For example, a desirable promoter is that of the cytomegalovirus immediate early promoter/enhancer [see, e.g., Boshart et al, Cell, 41:521-530 (1985)]. Another desirable promoter includes the Rous sarcoma virus LTR promoter/enhancer. Still another promoter/enhancer sequence is the chicken cytoplasmic beta-actin promoter [T. A. Kost et al, Nucl. Acids Res., 11(23):8287 (1983)]. Other suitable or desirable promoters can be selected by one of skill in the art.

[0375] The antigen cassette can also include nucleic acid sequences heterologous to the viral vector sequences including sequences providing signals for efficient polyadenylation of the transcript (poly(A), poly-A or pA) and introns with functional splice donor and acceptor sites. A common poly-A sequence which is employed in the exemplary vectors of this invention is that derived from the papovavirus SV-40. The poly-A sequence generally can be inserted in the cassette following the antigen-based sequences and before the viral vector sequences. A common intron sequence can also be derived from SV-40, and is referred to as the SV-40 T intron sequence. An antigen cassette can also contain such an intron, located between the promoter/enhancer sequence and the antigen(s). Selection of these and other common vector elements are conventional [see, e.g., Sambrook et al, “Molecular Cloning. A Laboratory Manual.”, 2d edit., Cold Spring Harbor Laboratory, New York (1989) and references cited therein] and many such sequences are available from commercial and industrial sources as well as from Genbank.

[0376] An antigen cassette can have one or more antigens. For example, a given cassette can include 1-10, 1-20, 1-30, 10-20, 15-25, 15-20, 1, 2, 3, 4, 5, 6, 7, 8, 9, 10, 11, 12, 13, 14, 15, 16, 17, 18, 19, 20, or more antigens. Antigens can be linked directly to one another. Antigens can also be linked to one another with linkers. Antigens can be in any orientation relative to one another including N to C or C to N.

[0377] As described elsewhere, the antigen cassette can be located in the site of any selected deletion in the viral vector backbone, such as the site of the E1 gene region deletion or E3 gene region deletion of a ChAd-based vector or the deleted structural proteins of a VEE backbone, among others which may be selected.

[0378] The antigen encoding sequence (e.g., cassette or one or more of the nucleic acid sequences encoding an immunogenic polypeptide in the cassette) can be described using the following formula to describe the ordered sequence of each element, from 5′ to 3′:

Pₐ-(L5_{b}-N_{c}-L3_{d})_{X}-(G5ₑ-U_{f})_{Y}-G3_{g}

wherein P comprises the second promoter nucleotide sequence, where a=0 or 1, where c=1, N comprises one of the SARS-CoV-2 derived nucleic acid sequences described herein, optionally wherein each N encodes a polypeptide sequence as set forth in Table A, Table B, and/or Table C, L5 comprises the 5′ linker sequence, where b=0 or 1, L3 comprises the 3′ linker sequence, where d=0 or 1, G5 comprises one of the at least one nucleic acid sequences encoding a GPGPG amino acid linker (SEQ ID NO: 56), where e=0 or 1, G3 comprises one of the at least one nucleic acid sequences encoding a GPGPG amino acid linker (SEQ ID NO: 56), where g=0 or 1, U comprises one of the at least one MHC class II epitope-encoding nucleic acid sequence, where f=1, X=1 to 400, where for each X the corresponding N_{c} is a SARS-CoV-2 derived nucleic acid sequence, and Y=0, 1, or 2, where for each Y the corresponding U_{f} is a (1) universal MHC class II epitope-encoding nucleic acid sequence, optionally wherein the at least one universal sequence comprises at least one of Tetanus toxoid and PADRE, or (2) a MHC class II SARS-CoV-2 derived epitope-encoding nucleic acid sequence. In some aspects, for each X the corresponding N_{c} is a distinct SARS-CoV-2 derived nucleic acid sequence. In some aspects, for each Y the corresponding U_{f} is a distinct universal MHC class II epitope-encoding nucleic acid sequence or a distinct MHC class II SARS-CoV-2 derived epitope-encoding nucleic acid sequence. The above antigen encoding sequence formula in some instances only describes the portion of an antigen cassette encoding concatenated epitope sequences, such as concatenated T cell epitopes. For example, in cassettes encoding concatenated T cell epitopes and one or more full-length SARS-CoV-2 proteins, the above antigen encoding sequence formula describes the concatenated T cell epitopes and separately the cassette encodes one or more full-length SARS-CoV-2 proteins that are linked optionally using a multicistonic system, such as 2A ribosome skipping sequence elements (e.g., E2A, P2A, F2A, or T2A sequences), a Internal Ribosome Entry Site (IRES) sequence elements, and/or independently operably linked to a separate promoter.

[0379] In one example, elements present include where b=1, d=1, e=1, g=1, h=1, X=18, Y=2, and the vector backbone comprises a ChAdV68 vector, a=1, P is a CMV promoter, the at least one second poly(A) sequence is present, wherein the second poly(A) sequence is an exogenous poly(A) sequence to the vector backbone, and optionally wherein the exogenous poly(A) sequence comprises an SV40 poly(A) signal sequence or a BGH poly(A) signal sequence, and each N encodes a MHC class I epitope 7-15 amino acids in length, a MHC class II epitope, an epitope capable of stimulating a B cell response, or combinations thereof, L5 is a native 5′ linker sequence that encodes a native N-terminal amino acid sequence of the epitope, and wherein the 5′ linker sequence encodes a peptide that is at least 3 amino acids in length, L3 is a native 3′ linker sequence that encodes a native C-terminal amino acid sequence of the epitope, and wherein the 3′ linker sequence encodes a peptide that is at least 3 amino acids in length, and U is each of a PADRE class II sequence and a Tetanus toxoid MHC class II sequence. The above antigen encoding sequence formula in some instances only describes the portion of an antigen cassette encoding concatenated epitope sequences, such as concatenated T cell epitopes.

[0380] In one example, elements present include where b=1, d=1, e=1, g=1, h=1, X=18, Y=2, and the vector backbone comprises a Venezuelan equine encephalitis virus vector, a=0, and the antigen cassette is operably linked to an endogenous 26S promoter, and the at least one polyadenylation poly(A) sequence is a poly(A) sequence of at least 80 consecutive A nucleotides (SEQ ID NO: 27940) provided by the backbone, and each N encodes a MHC class I epitope 7-15 amino acids in length, a MHC class II epitope, an epitope capable of stimulating a B cell response, or combinations thereof, L5 is a native 5′ linker sequence that encodes a native N-terminal amino acid sequence of the epitope, and wherein the 5′ linker sequence encodes a peptide that is at least 3 amino acids in length, L3 is a native 3′ linker sequence that encodes a native C-terminal amino acid sequence of the epitope, and wherein the 3′ linker sequence encodes a peptide that is at least 3 amino acids in length, and U is each of a PADRE class II sequence and a Tetanus toxoid MHC class II sequence.

[0381] The antigen encoding sequence can be described using the following formula to describe the ordered sequence of each element, from 5′ to 3′:

(Pₐ-(L5_{b}-N_{c}-L3_{d})_{X})_{Z}-(P2ₕ-(G5ₑ-U_{f})_{Y})_{W}-G3_{g}

wherein P and P2 comprise promoter nucleotide sequences, N comprises one of the SARS-CoV-2 derived nucleic acid sequences described herein (e.g., N encodes a polypeptide sequence as set forth in Table A, Table B, Table C, and/or Table 10), L5 comprises a 5′ linker sequence, L3 comprises a 3′ linker sequence, G5 comprises a nucleic acid sequences encoding an amino acid linker, G3 comprises one of the at least one nucleic acid sequences encoding an amino acid linker, U comprises an MHC class II epitope-encoding nucleic acid sequence, where for each X the corresponding N_{c} is a SARS-CoV-2 derived nucleic acid sequence, where for each Y the corresponding U_{f} is a (1) universal MHC class II epitope-encoding nucleic acid sequence, optionally wherein the at least one universal sequence comprises at least one of Tetanus toxoid and PADRE, or (2) a MHC class II SARS-CoV-2 derived epitope-encoding nucleic acid sequence. The composition and ordered sequence can be further defined by selecting the number of elements present, for example where a=0 or 1, where b=0 or 1, where c=1, where d=0 or 1, where e=0 or 1, where f=1, where g=0 or 1, where h=0 or 1, X=1 to 400, Y=0, 1, 2, 3, 4 or 5, Z=1 to 400, and W=0, 1, 2, 3, 4 or 5.

[0382] In one example, elements present include where a=0, b=1, d=1, e=1, g=1, h=0, X=10, Y=2, Z=1, and W=1, describing where no additional promoter is present (e.g. only the promoter nucleotide sequence provided by the vector backbone, such as an RNA alphavirus backbone, is present), 10 epitopes are present, a 5′ linker is present for each N, a 3′ linker is present for each N, 2 MHC class II epitopes are present, a linker is present linking the two MHC class II epitopes, a linker is present linking the 5′ end of the two MHC class II epitopes to the 3′ linker of the final MHC class I epitope, and a linker is present linking the 3′ end of the two MHC class II epitopes to the to the vector backbone. Examples of linking the 3′ end of the antigen cassette to the vector backbone include linking directly to the 3′ UTR elements provided by the vector backbone, such as a 3′ 19-nt CSE. Examples of linking the 5′ end of the antigen cassette to the vector backbone include linking directly to a promoter or 5′ UTR element of the vector backbone, such as a 26S promoter sequence, an alphavirus 5′ UTR, a 51-nt CSE, or a 24-nt CSE of an alphavirus vector backbone.

[0383] Other examples include: where a=1 describing where a promoter other than the promoter nucleotide sequence provided by the vector backbone is present; where a=1 and Z is greater than 1 where multiple promoters other than the promoter nucleotide sequence provided by the vector backbone are present each driving expression of 1 or more distinct MHC class I epitope encoding nucleic acid sequences; where h=1 describing where a separate promoter is present to drive expression of the MHC class II epitope-encoding nucleic acid sequences; and where g=0 describing the MHC class II epitope-encoding nucleic acid sequence, if present, is directly linked to the vector backbone.

[0384] Other examples include where each MHC class I epitope that is present can have a 5′ linker, a 3′ linker, neither, or both. In examples where more than one MHC class I epitope is present in the same antigen cassette, some MHC class I epitopes may have both a 5′ linker and a 3′ linker, while other MHC class I epitopes may have either a 5′ linker, a 3′ linker, or neither. In other examples where more than one MHC class I epitope is present in the same antigen cassette, some MHC class I epitopes may have either a 5′ linker or a 3′ linker, while other MHC class I epitopes may have either a 5′ linker, a 3′ linker, or neither.

[0385] In examples where more than one MHC class II epitope is present in the same antigen cassette, some MHC class II epitopes may have both a 5′ linker and a 3′ linker, while other MHC class II epitopes may have either a 5′ linker, a 3′ linker, or neither. In other examples where more than one MHC class II epitope is present in the same antigen cassette, some MHC class II epitopes may have either a 5′ linker or a 3′ linker, while other MHC class II epitopes may have either a 5′ linker, a 3′ linker, or neither.

[0386] Other examples include where each antigen that is present can have a 5′ linker, a 3′ linker, neither, or both. In examples where more than one antigen is present in the same antigen cassette, some antigens may have both a 5′ linker and a 3′ linker, while other antigens may have either a 5′ linker, a 3′ linker, or neither. In other examples where more than one antigen is present in the same antigen cassette, some antigens may have either a 5′ linker or a 3′ linker, while other antigens may have either a 5′ linker, a 3′ linker, or neither.

[0387] The promoter nucleotide sequences P and/or P2 can be the same as a promoter nucleotide sequence provided by the vector backbone, such as a RNA alphavirus backbone. For example, the promoter sequence provided by the vector backbone, Pn and P2, can each comprise a 26S subgenomic promoter or a CMV promoter. The promoter nucleotide sequences P and/or P2 can be different from the promoter nucleotide sequence provided by the vector backbone, as well as can be different from each other.

[0388] The 5′ linker L5 can be a native sequence or a non-natural sequence. Non-natural sequence include, but are not limited to, AAY, RR, and DPP. The 3′ linker L3 can also be a native sequence or a non-natural sequence. Additionally, L5 and L3 can both be native sequences, both be non-natural sequences, or one can be native and the other non-natural. For each X, the amino acid linkers can be 2, 3, 4, 5, 6, 7, 8, 9, 10, 11, 12, 13, 14, 15, 16, 17, 18, 19, 20, 21, 22, 23, 24, 25, 26, 27, 28, 29, 30, 31, 32, 33, 34, 35, 36, 37, 38, 39, 40, 41, 42, 43, 44, 45, 46, 47, 48, 49, 50, 51, 52, 53, 54, 55, 56, 57, 58, 59, 60, 61, 62, 63, 64, 65, 66, 67, 68, 69, 70, 71, 72, 73, 74, 75, 76, 77, 78, 79, 80, 81, 82, 83, 84, 85, 86, 87, 88, 89, 90, 91, 92, 93, 94, 95, 96, 97, 98, 99, 100 or more amino acids in length. For each X, the amino acid linkers can be also be at least 3, at least 4, at least 5, at least 6, at least 7, at least 8, at least 9, at least 10, at least 11, at least 12, at least 13, at least 14, at least 15, at least 16, at least 17, at least 18, at least 19, at least 20, at least 21, at least 22, at least 23, at least 24, at least 25, at least 26, at least 27, at least 28, at least 29, or at least 30 amino acids in length.

[0389] The amino acid linker G5, for each Y, can be 2, 3, 4, 5, 6, 7, 8, 9, 10, 11, 12, 13, 14, 15, 16, 17, 18, 19, 20, 21, 22, 23, 24, 25, 26, 27, 28, 29, 30, 31, 32, 33, 34, 35, 36, 37, 38, 39, 40, 41, 42, 43, 44, 45, 46, 47, 48, 49, 50, 51, 52, 53, 54, 55, 56, 57, 58, 59, 60, 61, 62, 63, 64, 65, 66, 67, 68, 69, 70, 71, 72, 73, 74, 75, 76, 77, 78, 79, 80, 81, 82, 83, 84, 85, 86, 87, 88, 89, 90, 91, 92, 93, 94, 95, 96, 97, 98, 99, 100 or more amino acids in length. For each Y, the amino acid linkers can be also be at least 3, at least 4, at least 5, at least 6, at least 7, at least 8, at least 9, at least 10, at least 11, at least 12, at least 13, at least 14, at least 15, at least 16, at least 17, at least 18, at least 19, at least 20, at least 21, at least 22, at least 23, at least 24, at least 25, at least 26, at least 27, at least 28, at least 29, or at least 30 amino acids in length.

[0390] The amino acid linker G3 can be 2, 3, 4, 5, 6, 7, 8, 9, 10, 11, 12, 13, 14, 15, 16, 17, 18, 19, 20, 21, 22, 23, 24, 25, 26, 27, 28, 29, 30, 31, 32, 33, 34, 35, 36, 37, 38, 39, 40, 41, 42, 43, 44, 45, 46, 47, 48, 49, 50, 51, 52, 53, 54, 55, 56, 57, 58, 59, 60, 61, 62, 63, 64, 65, 66, 67, 68, 69, 70, 71, 72, 73, 74, 75, 76, 77, 78, 79, 80, 81, 82, 83, 84, 85, 86, 87, 88, 89, 90, 91, 92, 93, 94, 95, 96, 97, 98, 99, 100 or more amino acids in length. G3 can be also be at least 3, at least 4, at least 5, at least 6, at least 7, at least 8, at least 9, at least 10, at least 11, at least 12, at least 13, at least 14, at least 15, at least 16, at least 17, at least 18, at least 19, at least 20, at least 21, at least 22, at least 23, at least 24, at least 25, at least 26, at least 27, at least 28, at least 29, or at least 30 amino acids in length.

[0391] For each X, each N can encode a MHC class I epitope, a MHC class II epitope, an epitope capable of stimulating a B cell response, or a combination thereof. For each X, N can encode a combination of a MHC class I epitope, a MHC class II epitope, and an epitope capable of stimulating a B cell response. For each X, N can encode a combination of a MHC class I epitope and a MHC class II epitope. For each X, N can encode a combination of a MHC class I epitope and an epitope capable of stimulating a B cell response. For each X, N can encode a combination of a MHC class II epitope and an epitope capable of stimulating a B cell response. For each X, each N can encode a MHC class I epitope 7-15 amino acids in length. For each X, each N can also encodes a MHC class I epitope 5, 6, 7, 8, 9, 10, 11, 12, 13, 14, 15, 16, 17, 18, 19, 20, 21, 22, 23, 24, 25, 26, 27, 28, 29, or 30 amino acids in length. For each X, each N can also encodes a MHC class I epitope at least 5, at least 6, at least 7, at least 8, at least 9, at least 10, at least 11, at least 12, at least 13, at least 14, at least 15, at least 16, at least 17, at least 18, at least 19, at least 20, at least 21, at least 22, at least 23, at least 24, at least 25, at least 26, at least 27, at least 28, at least 29, or at least 30 amino acids in length. For each X, each N can encode a MHC class II epitope. For each X, each N can encode an epitope capable of stimulating a B cell response.

[0392] The cassette encoding the one or more antigens can be 700 nucleotides or less. The cassette encoding the one or more antigens can be 700 nucleotides or less and encode 2 distinct epitope-encoding nucleic acid sequences (e.g., encode 2 distinct SARS-CoV-2 derived nucleic acid sequence encoding an immunogenic polypeptide). The cassette encoding the one or more antigens can be 700 nucleotides or less and encode at least 2 distinct epitope-encoding nucleic acid sequences. The cassette encoding the one or more antigens can be 700 nucleotides or less and encode 3 distinct epitope-encoding nucleic acid sequences. The cassette encoding the one or more antigens can be 700 nucleotides or less and encode at least 3 distinct epitope-encoding nucleic acid sequences. The cassette encoding the one or more antigens can be 700 nucleotides or less and include 1-10, 1-5, 1, 2, 3, 4, 5, 6, 7, 8, 9, 10, or more antigens.

[0393] The cassette encoding the one or more antigens can be between 375-700 nucleotides in length. The cassette encoding the one or more antigens can be between 375-700 nucleotides in length and encode 2 distinct epitope-encoding nucleic acid sequences. The cassette encoding the one or more antigens can be between 375-700 nucleotides in length and encode at least 2 distinct epitope-encoding nucleic acid sequences. The cassette encoding the one or more antigens can be between 375-700 nucleotides in length and encode 3 distinct epitope-encoding nucleic acid sequences. The cassette encoding the one or more antigens be between 375-700 nucleotides in length and encode at least 3 distinct epitope-encoding nucleic acid sequences. The cassette encoding the one or more antigens can be between 375-700 nucleotides in length and include 1-10, 1-5, 1, 2, 3, 4, 5, 6, 7, 8, 9, 10, or more antigens.

[0394] The cassette encoding the one or more antigens can be 600, 500, 400, 300, 200, or 100 nucleotides in length or less. The cassette encoding the one or more antigens can be 600, 500, 400, 300, 200, or 100 nucleotides in length or less and encode 2 distinct epitope-encoding nucleic acid sequences. The cassette encoding the one or more antigens can be 600, 500, 400, 300, 200, or 100 nucleotides in length or less and encode at least 2 distinct epitope-encoding nucleic acid sequences. The cassette encoding the one or more antigens can be 600, 500, 400, 300, 200, or 100 nucleotides in length or less and encode 3 distinct epitope-encoding nucleic acid sequences. The cassette encoding the one or more antigens can be 600, 500, 400, 300, 200, or 100 nucleotides in length or less and encode at least 3 distinct epitope-encoding nucleic acid sequences. The cassette encoding the one or more antigens can be 600, 500, 400, 300, 200, or 100 nucleotides in length or less and include 1-10, 1-5, 1, 2, 3, 4, 5, 6, 7, 8, 9, 10, or more antigens.

[0395] The cassette encoding the one or more antigens can be between 375-600, between 375-500, or between 375-400 nucleotides in length. The cassette encoding the one or more antigens can be between 375-600, between 375-500, or between 375-400 nucleotides in length and encode 2 distinct epitope-encoding nucleic acid sequences. The cassette encoding the one or more antigens can be between 375-600, between 375-500, or between 375-400 nucleotides in length and encode at least 2 distinct epitope-encoding nucleic acid sequences. The cassette encoding the one or more antigens can be between 375-600, between 375-500, or between 375-400 nucleotides in length and encode 3 distinct epitope-encoding nucleic acid sequences. The cassette encoding the one or more antigens can be between 375-600, between 375-500, or between 375-400 nucleotides in length and encode at least 3 distinct epitope-encoding nucleic acid sequences. The cassette encoding the one or more antigens can be between 375-600, between 375-500, or between 375-400 nucleotides in length and include 1-10, 1-5, 1, 2, 3, 4, 5, 6, 7, 8, 9, 10, or more antigens.

[0396] V.B. Additional Considerations for Vaccine Design and Manufacture

[0397] After all of the above antigen filters are applied, more candidate antigens may still be available for vaccine inclusion than the vaccine technology can support. Additionally, uncertainty about various aspects of the antigen analysis may remain and tradeoffs may exist between different properties of candidate vaccine antigens. Thus, in place of predetermined filters at each step of the selection process, an integrated multi-dimensional model can be considered that places candidate antigens in a space with at least the following axes and optimizes selection using an integrative approach.
[0398] 1. Risk of auto-immunity or tolerance (risk of germline) (lower risk of auto-immunity is typically preferred)
[0399] 2. Probability of sequencing artifact (lower probability of artifact is typically preferred)
[0400] 3. Probability of immunogenicity (higher probability of immunogenicity is typically preferred)
[0401] 4. Probability of presentation (higher probability of presentation is typically preferred)
[0402] 5. Gene expression (higher expression is typically preferred)
[0403] 6. Coverage of HLA genes (larger number of HLA molecules involved in the presentation of a set of antigens may lower the probability that an infected cell will escape immune attack via downregulation or mutation of HLA molecules)
[0404] 7. Coverage of HLA classes (covering both HLA-I and HLA-II may increase the probability of therapeutic response and decrease the probability of infectious disease escape)

[0405] Additionally, optionally, antigens can be deprioritized (e.g., excluded) from the vaccination if they are predicted to be presented by HLA alleles lost or inactivated in either all or part of the patient's infected cell. HLA allele loss can occur by either somatic mutation, loss of heterozygosity, or homozygous deletion of the locus. Methods for detection of HLA allele somatic mutation are well known in the art, e.g. (Shukla et al., 2015). Methods for detection of somatic LOH and homozygous deletion (including for HLA locus) are likewise well described. (Carter et al., 2012; McGranahan et al., 2017; Van Loo et al., 2010). Antigens can also be deprioritized if mass-spectrometry data indicates a predicted antigen is not presented by a predicted HLA allele.

[0406] V.C. Self-Amplifying RNA Vectors

[0407] In general, all self-amplifying RNA (SAM) vectors contain a self-amplifying backbone derived from a self-replicating virus. The term “self-amplifying backbone” refers to minimal sequence(s) of a self-replicating virus that allows for self-replication of the viral genome. For example, minimal sequences that allow for self-replication of an alphavirus can include conserved sequences for nonstructural protein-mediated amplification (e.g., a nonstructural protein 1 (nsP1) gene, a nsP2 gene, a nsP3 gene, a nsP4 gene, and/or a polyA sequence). A self-amplifying backbone can also include sequences for expression of subgenomic viral RNA (e.g., a 26S promoter element for an alphavirus). SAM vectors can be positive-sense RNA polynucleotides or negative-sense RNA polynucleotides, such as vectors with backbones derived from positive-sense or negative-sense self-replicating viruses. Self-replicating viruses include, but are not limited to, alphaviruses, flaviviruses (e.g., Kunjin virus), measles viruses, and rhabdoviruses (e.g., rabies virus and vesicular stomatitis virus). Examples of SAM vector systems derived from self-replicating viruses are described in greater detail in Lundstrom (Molecules. 2018 Dec. 13; 23(12). pii: E3310. doi: 10.3390/molecules23123310), herein incorporated by reference for all purposes.

[0408] V.C.1. Alphavirus Biology

[0409] Alphaviruses are members of the family Togaviridae, and are positive-sense single stranded RNA viruses. Members are typically classified as either Old World, such as Sindbis, Ross River, Mayaro, Chikungunya, and Semliki Forest viruses, or New World, such as eastern equine encephalitis, Aura, Fort Morgan, or Venezuelan equine encephalitis virus and its derivative strain TC-83 (Strauss Microbrial Review 1994). A natural alphavirus genome is typically around 12 kb in length, the first two-thirds of which contain genes encoding non-structural proteins (nsPs) that form RNA replication complexes for self-replication of the viral genome, and the last third of which contains a subgenomic expression cassette encoding structural proteins for virion production (Frolov RNA 2001).

[0410] A model lifecycle of an alphavirus involves several distinct steps (Strauss Microbrial Review 1994, Jose Future Microbiol 2009). Following virus attachment to a host cell, the virion fuses with membranes within endocytic compartments resulting in the eventual release of genomic RNA into the cytosol. The genomic RNA, which is in a plus-strand orientation and comprises a 5′ methylguanylate cap and 3′ polyA tail, is translated to produce non-structural proteins nsP1-4 that form the replication complex. Early in infection, the plus-strand is then replicated by the complex into a minus-stand template. In the current model, the replication complex is further processed as infection progresses, with the resulting processed complex switching to transcription of the minus-strand into both full-length positive-strand genomic RNA, as well as the 26S subgenomic positive-strand RNA containing the structural genes. Several conserved sequence elements (CSEs) of alphavirus have been identified to potentially play a role in the various RNA replication steps including; a complement of the 5′ UTR in the replication of plus-strand RNAs from a minus-strand template, a 51-nt CSE in the replication of minus-strand synthesis from the genomic template, a 24-nt CSE in the junction region between the nsPs and the 26S RNA in the transcription of the subgenomic RNA from the minus-strand, and a 3′ 19-nt CSE in minus-strand synthesis from the plus-strand template.

[0411] Following the replication of the various RNA species, virus particles are then typically assembled in the natural lifecycle of the virus. The 26S RNA is translated and the resulting proteins further processed to produce the structural proteins including capsid protein, glycoproteins E1 and E2, and two small polypeptides E3 and 6K (Strauss 1994). Encapsidation of viral RNA occurs, with capsid proteins normally specific for only genomic RNA being packaged, followed by virion assembly and budding at the membrane surface.

[0412] V.C.2. Alphavirus as a Delivery Vector

[0413] Alphaviruses (including alphavirus sequences, features, and other elements) can be used to generate alphavirus-based delivery vectors (also be referred to as alphavirus vectors, alphavirus viral vectors, alphavirus vaccine vectors, self-replicating RNA (srRNA) vectors, or self-amplifying RNA (samRNA) vectors). Alphaviruses have previously been engineered for use as expression vector systems (Pushko 1997, Rheme 2004). Alphaviruses offer several advantages, particularly in a vaccine setting where heterologous antigen expression can be desired. Due to its ability to self-replicate in the host cytosol, alphavirus vectors are generally able to produce high copy numbers of the expression cassette within a cell resulting in a high level of heterologous antigen production. Additionally, the vectors are generally transient, resulting in improved biosafety as well as reduced induction of immunological tolerance to the vector. The public, in general, also lacks pre-existing immunity to alphavirus vectors as compared to other standard viral vectors, such as human adenovirus. Alphavirus based vectors also generally result in cytotoxic responses to infected cells. Cytotoxicity, to a certain degree, can be important in a vaccine setting to properly illicit an immune response to the heterologous antigen expressed. However, the degree of desired cytotoxicity can be a balancing act, and thus several attenuated alphaviruses have been developed, including the TC-83 strain of VEE. Thus, an example of an antigen expression vector described herein can utilize an alphavirus backbone that allows for a high level of antigen expression, stimulates a robust immune response to antigen, does not stimulate an immune response to the vector itself, and can be used in a safe manner. Furthermore, the antigen expression cassette can be designed to stimulate different levels of an immune response through optimization of which alphavirus sequences the vector uses, including, but not limited to, sequences derived from VEE or its attenuated derivative TC-83.

[0414] Several expression vector design strategies have been engineered using alphavirus sequences (Pushko 1997). In one strategy, a alphavirus vector design includes inserting a second copy of the 26S promoter sequence elements downstream of the structural protein genes, followed by a heterologous gene (Frolov 1993). Thus, in addition to the natural non-structural and structural proteins, an additional subgenomic RNA is produced that expresses the heterologous protein. In this system, all the elements for production of infectious virions are present and, therefore, repeated rounds of infection of the expression vector in non-infected cells can occur.

[0415] Another expression vector design makes use of helper virus systems (Pushko 1997). In this strategy, the structural proteins are replaced by a heterologous gene. Thus, following self-replication of viral RNA mediated by still intact non-structural genes, the 26S subgenomic RNA provides for expression of the heterologous protein. Traditionally, additional vectors that expresses the structural proteins are then supplied in trans, such as by co-transfection of a cell line, to produce infectious virus. A system is described in detail in U.S. Pat. No. 8,093,021, which is herein incorporated by reference in its entirety, for all purposes. The helper vector system provides the benefit of limiting the possibility of forming infectious particles and, therefore, improves biosafety. In addition, the helper vector system reduces the total vector length, potentially improving the replication and expression efficiency. Thus, an example of an antigen expression vector described herein can utilize an alphavirus backbone wherein the structural proteins are replaced by an antigen cassette, the resulting vector both reducing biosafety concerns, while at the same time promoting efficient expression due to the reduction in overall expression vector size.

[0416] V.C.3. Self-Amplifying Virus Production In Vitro

[0417] A convenient technique well-known in the art for RNA production is in vitro transcription (IVT). In this technique, a DNA template of the desired vector is first produced by techniques well-known to those in the art, including standard molecular biology techniques such as cloning, restriction digestion, ligation, gene synthesis, and polymerase chain reaction (PCR).

[0418] The DNA template contains a RNA polymerase promoter at the 5′ end of the sequence desired to be transcribed into RNA (e.g., SAM). Promoters include, but are not limited to, bacteriophage polymerase promoters such as T3, T7, KI1, or SP6. Depending on the specific RNA polymerase promoter sequence chosen, additional 5′ nucleotides can transcribed in addition to the desired sequence. For example, the canonical T7 promoter can be referred to by the sequence TAATACGACTCACTATAGG (SEQ ID NO: 118), in which an IVT reaction using the DNA template TAATACGACTCACTATAGGN (SEQ ID NO: 119) for the production of desired sequence N will result in the mRNA sequence GG-N. In general, and without wishing to be bound by theory, T7 polymerase more efficiently transcribes RNA transcripts beginning with guanosine. In instances where additional 5′ nucleotides are not desired (e.g., no additional GG), the RNA polymerase promoter contained in the DNA template can be a sequence the results in transcripts containing only the 5′ nucleotides of the desired sequence, e.g., a SAM having the native 5′ sequence of the self-replicating virus from which the SAM vector is derived. For example, a minimal T7 promoter can be referred to by the sequence TAATACGACTCACTATA (SEQ ID NO: 120), in which an IVT reaction using the DNA template TAATACGACTCACTATAN (SEQ ID NO: 121) for the production of desired sequence N will result in the mRNA sequence N. Likewise, a minimal SP6 promoter referred to by the sequence ATTTAGGTGACACTATA (SEQ ID NO: 122) can be used to generate transcripts without additional 5′ nucleotides. In a typical IVT reaction, the DNA template is incubated with the appropriate RNA polymerase enzyme, buffer agents, and nucleotides (NTPs).

[0419] The resulting RNA polynucleotide can optionally be further modified including, but limited to, addition of a 5′ cap structure such as 7-methylguanosine or a related structure, and optionally modifying the 3′ end to include a polyadenylate (polyA) tail. In a modified IVT reaction, RNA is capped with a 5′ cap structure co-transcriptionally through the addition of cap analogues during IVT. Cap analogues can include dinucleotide (m⁷G-ppp-N) cap analogues or trinucleotide (m⁷G-ppp-N-N) cap analogues, where N represents a nucleotide or modified nucleotide (e.g., ribonucleosides including, but not limited to, adenosine, guanosine, cytidine, and uradine). Exemplary cap analogues and their use in IVT reactions are also described in greater detail in U.S. Pat. No. 10,519,189, herein incorporated by reference for all purposes. As discussed, T7 polymerase more efficiently transcribes RNA transcripts beginning with guanosine. To improve transcription efficiency in templates that do not begin with guanosine, a trinucleotide cap analogue (m⁷G-ppp-N-N) can be used. The trinucleotide cap analogue can increase transcription efficiency 2, 3, 4, 5, 6, 7, 8, 9, 10, 11, 12, 13, 14, 15, 16, 17, 18, 19, 20-fold or more relative to an IVT reaction using a dinucleotide cap analogue (m⁷G-ppp-N).

[0420] A 5′ cap structure can also be added following transcription, such as using a vaccinia capping system (e.g., NEB Cat. No. M2080) containing mRNA 2′-O-methyltransferase and S-Adenosyl methionine.

[0421] The resulting RNA polynucleotide can optionally be further modified separately from or in addition to the capping techniques described including, but limited to, modifying the 3′ end to include a polyadenylate (polyA) tail.

[0422] The RNA can then be purified using techniques well-known in the field, such as phenol-chloroform extraction.

[0423] V.C.4. Delivery Via Lipid Nanoparticle

[0424] An important aspect to consider in vaccine vector design is immunity against the vector itself (Riley 2017). This may be in the form of preexisting immunity to the vector itself, such as with certain human adenovirus systems, or in the form of developing immunity to the vector following administration of the vaccine. The latter is an important consideration if multiple administrations of the same vaccine are performed, such as separate priming and boosting doses, or if the same vaccine vector system is to be used to deliver different antigen cassettes.

[0425] In the case of alphavirus vectors, the standard delivery method is the previously discussed helper virus system that provides capsid, E1, and E2 proteins in trans to produce infectious viral particles. However, it is important to note that the E1 and E2 proteins are often major targets of neutralizing antibodies (Strauss 1994). Thus, the efficacy of using alphavirus vectors to deliver antigens of interest to target cells may be reduced if infectious particles are targeted by neutralizing antibodies.

[0426] An alternative to viral particle mediated gene delivery is the use of nanomaterials to deliver expression vectors (Riley 2017). Nanomaterial vehicles, importantly, can be made of non-immunogenic materials and generally avoid stimulating immunity to the delivery vector itself. These materials can include, but are not limited to, lipids, inorganic nanomaterials, and other polymeric materials. Lipids can be cationic, anionic, or neutral. The materials can be synthetic or naturally derived, and in some instances biodegradable. Lipids can include fats, cholesterol, phospholipids, lipid conjugates including, but not limited to, polyethyleneglycol (PEG) conjugates (PEGylated lipids), waxes, oils, glycerides, and fat soluble vitamins.

[0427] Lipid nanoparticles (LNPs) are an attractive delivery system due to the amphiphilic nature of lipids enabling formation of membranes and vesicle like structures (Riley 2017). In general, these vesicles deliver the expression vector by absorbing into the membrane of target cells and releasing nucleic acid into the cytosol. In addition, LNPs can be further modified or functionalized to facilitate targeting of specific cell types. Another consideration in LNP design is the balance between targeting efficiency and cytotoxicity. Lipid compositions generally include defined mixtures of cationic, neutral, anionic, and amphipathic lipids. In some instances, specific lipids are included to prevent LNP aggregation, prevent lipid oxidation, or provide functional chemical groups that facilitate attachment of additional moieties. Lipid composition can influence overall LNP size and stability. In an example, the lipid composition comprises dilinoleylmethyl-4-dimethylaminobutyrate (MC3) or MC3-like molecules. MC3 and MC3-like lipid compositions can be formulated to include one or more other lipids, such as a PEG or PEG-conjugated lipid, a sterol, or neutral lipids.

[0428] Nucleic-acid vectors, such as expression vectors, exposed directly to serum can have several undesirable consequences, including degradation of the nucleic acid by serum nucleases or off-target stimulation of the immune system by the free nucleic acids. Therefore, encapsulation of the alphavirus vector can be used to avoid degradation, while also avoiding potential off-target effects. In certain examples, an alphavirus vector is fully encapsulated within the delivery vehicle, such as within the aqueous interior of an LNP. Encapsulation of the alphavirus vector within an LNP can be carried out by techniques well-known to those skilled in the art, such as microfluidic mixing and droplet generation carried out on a microfluidic droplet generating device. Such devices include, but are not limited to, standard T-junction devices or flow-focusing devices. In an example, the desired lipid formulation, such as MC3 or MC3-like containing compositions, is provided to the droplet generating device in parallel with the alphavirus delivery vector and other desired agents, such that the delivery vector and desired agents are fully encapsulated within the interior of the MC3 or MC3-like based LNP. In an example, the droplet generating device can control the size range and size distribution of the LNPs produced. For example, the LNP can have a size ranging from 1 to 1000 nanometers in diameter, e.g., 1, 10, 50, 100, 500, or 1000 nanometers. Following droplet generation, the delivery vehicles encapsulating the expression vectors can be further treated or modified to prepare them for administration.

[0429] V.D. Chimpanzee Adenovirus (ChAd)

[0430] V.D.1. Viral Delivery with Chimpanzee Adenovirus

[0431] Vaccine compositions for delivery of one or more antigens (e.g., via an antigen cassette) can be created by providing adenovirus nucleotide sequences of chimpanzee origin, a variety of novel vectors, and cell lines expressing chimpanzee adenovirus genes. A nucleotide sequence of a chimpanzee C68 adenovirus (also referred to herein as ChAdV68) can be used in a vaccine composition for antigen delivery (See SEQ ID NO: 1). Use of C68 adenovirus derived vectors is described in further detail in U.S. Pat. No. 6,083,716, which is herein incorporated by reference in its entirety, for all purposes.

[0432] In a further aspect, provided herein is a recombinant adenovirus comprising the DNA sequence of a chimpanzee adenovirus such as C68 and an antigen cassette operatively linked to regulatory sequences directing its expression. The recombinant virus is capable of infecting a mammalian, preferably a human, cell and capable of expressing the antigen cassette product in the cell. In this vector, the native chimpanzee E1 gene, and/or E3 gene, and/or E4 gene can be deleted. An antigen cassette can be inserted into any of these sites of gene deletion. The antigen cassette can include an antigen against which a primed immune response is desired.

[0433] In another aspect, provided herein is a mammalian cell infected with a chimpanzee adenovirus such as C68.

[0434] In still a further aspect, a novel mammalian cell line is provided which expresses a chimpanzee adenovirus gene (e.g., from C68) or functional fragment thereof.

[0435] In still a further aspect, provided herein is a method for delivering an antigen cassette into a mammalian cell comprising the step of introducing into the cell an effective amount of a chimpanzee adenovirus, such as C68, that has been engineered to express the antigen cassette.

[0436] Still another aspect provides a method for stimulating an immune response in a mammalian host. The method can comprise the step of administering to the host an effective amount of a recombinant chimpanzee adenovirus, such as C68, comprising an antigen cassette that encodes one or more antigens from the infection against which the immune response is targeted.

[0437] Still another aspect provides a method for stimulating an immune response in a mammalian host to treat or prevent a disease in a subject, such as an infectious disease. The method can comprise the step of administering to the host an effective amount of a recombinant chimpanzee adenovirus, such as C68, comprising an antigen cassette that encodes one or more antigens, such as from the infectious disease against which the immune response is targeted.

[0438] Also disclosed is a non-simian mammalian cell that expresses a chimpanzee adenovirus gene obtained from the sequence of SEQ ID NO: 1. The gene can be selected from the group consisting of the adenovirus E1A, E1B, E2A, E2B, E3, E4, L1, L2, L3, L4 and L5 of SEQ ID NO: 1.

[0439] Also disclosed is a nucleic acid molecule comprising a chimpanzee adenovirus DNA sequence comprising a gene obtained from the sequence of SEQ ID NO: 1. The gene can be selected from the group consisting of said chimpanzee adenovirus E1A, E1B, E2A, E2B, E3, E4, L1, L2, L3, L4 and L5 genes of SEQ ID NO: 1. In some aspects the nucleic acid molecule comprises SEQ ID NO: 1. In some aspects the nucleic acid molecule comprises the sequence of SEQ ID NO: 1, lacking at least one gene selected from the group consisting of E1A, E1B, E2A, E2B, E3, E4, L1, L2, L3, L4 and L5 genes of SEQ ID NO: 1.

[0440] Also disclosed is a vector comprising a chimpanzee adenovirus DNA sequence obtained from SEQ ID NO: 1 and an antigen cassette operatively linked to one or more regulatory sequences which direct expression of the cassette in a heterologous host cell, optionally wherein the chimpanzee adenovirus DNA sequence comprises at least the cis-elements necessary for replication and virion encapsidation, the cis-elements flanking the antigen cassette and regulatory sequences. In some aspects, the chimpanzee adenovirus DNA sequence comprises a gene selected from the group consisting of E1A, E1B, E2A, E2B, E3, E4, L1, L2, L3, L4 and L5 gene sequences of SEQ ID NO: 1. In some aspects the vector can lack the E1A and/or E1B gene.

[0441] Also disclosed herein is a adenovirus vector comprising: a partially deleted E4 gene comprising a deleted or partially-deleted E4orf2 region and a deleted or partially-deleted E4orf3 region, and optionally a deleted or partially-deleted E4orf4 region. The partially deleted E4 can comprise an E4 deletion of at least nucleotides 34,916 to 35,642 of the sequence shown in SEQ ID NO:1, and wherein the vector comprises at least nucleotides 2 to 36,518 of the sequence set forth in SEQ ID NO:1. The partially deleted E4 can comprise an E4 deletion of at least a partial deletion of nucleotides 34,916 to 34,942 of the sequence shown in SEQ ID NO:1, at least a partial deletion of nucleotides 34,952 to 35,305 of the sequence shown in SEQ ID NO:1, and at least a partial deletion of nucleotides 35,302 to 35,642 of the sequence shown in SEQ ID NO:1, and wherein the vector comprises at least nucleotides 2 to 36,518 of the sequence set forth in SEQ ID NO:1 The partially deleted E4 can comprise an E4 deletion of at least nucleotides 34,980 to 36,516 of the sequence shown in SEQ ID NO:1, and wherein the vector comprises at least nucleotides 2 to 36,518 of the sequence set forth in SEQ ID NO:1. The partially deleted E4 can comprise an E4 deletion of at least nucleotides 34,979 to 35,642 of the sequence shown in SEQ ID NO:1, and wherein the vector comprises at least nucleotides 2 to 36,518 of the sequence set forth in SEQ ID NO:1. The partially deleted E4 can comprise an E4 deletion of at least a partial deletion of E4Orf2, a fully deleted E4Orf3, and at least a partial deletion of E4Orf4. The partially deleted E4 can comprise an E4 deletion of at least a partial deletion of E4Orf2, at least a partial deletion of E4Orf3, and at least a partial deletion of E4Orf4. The partially deleted E4 can comprise an E4 deletion of at least a partial deletion of E4Orf1, a fully deleted E4Orf2, and at least a partial deletion of E4Orf3. The partially deleted E4 can comprise an E4 deletion of at least a partial deletion of E4Orf2 and at least a partial deletion of E4Orf3. The partially deleted E4 can comprise an E4 deletion between the start site of E4Orf1 to the start site of E4Orf5. The partially deleted E4 can be an E4 deletion adjacent to the start site of E4Orf1. The partially deleted E4 can be an E4 deletion adjacent to the start site of E4Orf2. The partially deleted E4 can be an E4 deletion adjacent to the start site of E4Orf3. The partially deleted E4 can be an E4 deletion adjacent to the start site of E4Orf4. The E4 deletion can be at least 50, at least 100, at least 200, at least 300, at least 400, at least 500, at least 600, at least 700, at least 800, at least 900, at least 1000, at least 1100, at least 1200, at least 1300, at least 1400, at least 1500, at least 1600, at least 1700, at least 1800, at least 1900, or at least 2000 nucleotides. The E4 deletion can be at least 700 nucleotides. The E4 deletion can be at least 1500 nucleotides. The E4 deletion can be 50 or less, 100 or less, 200 or less, 300 or less, 400 or less, 500 or less, 600 or less, 700 or less, 800 or less, 900 or less, 1000 or less, 1100 or less, 1200 or less, 1300 or less, 1400 or less, 1500 or less, 1600 or less, 1700 or less, 1800 or less, 1900 or less, or 2000 or less nucleotides. The E4 deletion can be 750 nucleotides or less. The E4 deletion can be at least 1550 nucleotides or less.

[0442] Also disclosed herein is a host cell transfected with a vector disclosed herein such as a C68 vector engineered to expression an antigen cassette. Also disclosed herein is a human cell that expresses a selected gene introduced therein through introduction of a vector disclosed herein into the cell.

[0443] Also disclosed herein is a method for delivering an antigen cassette to a mammalian cell comprising introducing into said cell an effective amount of a vector disclosed herein such as a C68 vector engineered to expression the antigen cassette.

[0444] Also disclosed herein is a method for producing an antigen comprising introducing a vector disclosed herein into a mammalian cell, culturing the cell under suitable conditions and producing the antigen.

[0445] V.D.2. E1-Expressing Complementation Cell Lines

[0446] To generate recombinant chimpanzee adenoviruses (Ad) deleted in any of the genes described herein, the function of the deleted gene region, if essential to the replication and infectivity of the virus, can be supplied to the recombinant virus by a helper virus or cell line, i.e., a complementation or packaging cell line. For example, to generate a replication-defective chimpanzee adenovirus vector, a cell line can be used which expresses the E1 gene products of the human or chimpanzee adenovirus; such a cell line can include HEK293 or variants thereof. The protocol for the generation of the cell lines expressing the chimpanzee E1 gene products (Examples 3 and 4 of U.S. Pat. No. 6,083,716) can be followed to generate a cell line which expresses any selected chimpanzee adenovirus gene.

[0447] An AAV augmentation assay can be used to identify a chimpanzee adenovirus E1-expressing cell line. This assay is useful to identify E1 function in cell lines made by using the E1 genes of other uncharacterized adenoviruses, e.g., from other species. That assay is described in Example 4B of U.S. Pat. No. 6,083,716.

[0448] A selected chimpanzee adenovirus gene, e.g., E1, can be under the transcriptional control of a promoter for expression in a selected parent cell line. Inducible or constitutive promoters can be employed for this purpose. Among inducible promoters are included the sheep metallothionine promoter, inducible by zinc, or the mouse mammary tumor virus (MMTV) promoter, inducible by a glucocorticoid, particularly, dexamethasone. Other inducible promoters, such as those identified in International patent application WO95/13392, incorporated by reference herein can also be used in the production of packaging cell lines. Constitutive promoters in control of the expression of the chimpanzee adenovirus gene can be employed also.

[0449] A parent cell can be selected for the generation of a novel cell line expressing any desired C68 gene. Without limitation, such a parent cell line can be HeLa [ATCC Accession No. CCL 2], A549 [ATCC Accession No. CCL 185], KB [CCL 17], Detroit [e.g., Detroit 510, CCL 72] and WI-38 [CCL 75] cells. Other suitable parent cell lines can be obtained from other sources. Parent cell lines can include CHO, HEK293 or variants thereof, 911, HeLa, A549, LP-293, PER.C6, or AE1-2a.

[0450] An E1-expressing cell line can be useful in the generation of recombinant chimpanzee adenovirus E1 deleted vectors. Cell lines constructed using essentially the same procedures that express one or more other chimpanzee adenoviral gene products are useful in the generation of recombinant chimpanzee adenovirus vectors deleted in the genes that encode those products. Further, cell lines which express other human Ad E1 gene products are also useful in generating chimpanzee recombinant Ads.

[0451] V.D.3. Recombinant Viral Particles as Vectors

[0452] The compositions disclosed herein can comprise viral vectors, that deliver at least one antigen to cells. Such vectors comprise a chimpanzee adenovirus DNA sequence such as C68 and an antigen cassette operatively linked to regulatory sequences which direct expression of the cassette. The C68 vector is capable of expressing the cassette in an infected mammalian cell. The C68 vector can be functionally deleted in one or more viral genes. An antigen cassette comprises at least one antigen under the control of one or more regulatory sequences such as a promoter. Optional helper viruses and/or packaging cell lines can supply to the chimpanzee viral vector any necessary products of deleted adenoviral genes.

[0453] The term “functionally deleted” means that a sufficient amount of the gene region is removed or otherwise altered, e.g., by mutation or modification, so that the gene region is no longer capable of producing one or more functional products of gene expression. Mutations or modifications that can result in functional deletions include, but are not limited to, nonsense mutations such as introduction of premature stop codons and removal of canonical and non-canonical start codons, mutations that alter mRNA splicing or other transcriptional processing, or combinations thereof. If desired, the entire gene region can be removed.

[0454] Modifications of the nucleic acid sequences forming the vectors disclosed herein, including sequence deletions, insertions, and other mutations may be generated using standard molecular biological techniques and are within the scope of this invention.

[0455] V.D.4. Construction of the Viral Plasmid Vector

[0456] The chimpanzee adenovirus C68 vectors useful in this invention include recombinant, defective adenoviruses, that is, chimpanzee adenovirus sequences functionally deleted in the Ela or E1b genes, and optionally bearing other mutations, e.g., temperature-sensitive mutations or deletions in other genes. It is anticipated that these chimpanzee sequences are also useful in forming hybrid vectors from other adenovirus and/or adeno-associated virus sequences. Homologous adenovirus vectors prepared from human adenoviruses are described in the published literature [see, for example, Kozarsky I and II, cited above, and references cited therein, U.S. Pat. No. 5,240,846].

[0457] In the construction of useful chimpanzee adenovirus C68 vectors for delivery of an antigen cassette to a human (or other mammalian) cell, a range of adenovirus nucleic acid sequences can be employed in the vectors. A vector comprising minimal chimpanzee C68 adenovirus sequences can be used in conjunction with a helper virus to produce an infectious recombinant virus particle. The helper virus provides essential gene products required for viral infectivity and propagation of the minimal chimpanzee adenoviral vector. When only one or more selected deletions of chimpanzee adenovirus genes are made in an otherwise functional viral vector, the deleted gene products can be supplied in the viral vector production process by propagating the virus in a selected packaging cell line that provides the deleted gene functions in trans.

[0458] V.D.5. Recombinant Minimal Adenovirus

[0459] A minimal chimpanzee Ad C68 virus is a viral particle containing just the adenovirus cis-elements necessary for replication and virion encapsidation. That is, the vector contains the cis-acting 5′ and 3′ inverted terminal repeat (ITR) sequences of the adenoviruses (which function as origins of replication) and the native 5′ packaging/enhancer domains (that contain sequences necessary for packaging linear Ad genomes and enhancer elements for the E1 promoter). See, for example, the techniques described for preparation of a “minimal” human Ad vector in International Patent Application WO96/13597 and incorporated herein by reference.

[0460] V.D.6. Other Defective Adenoviruses

[0461] Recombinant, replication-deficient adenoviruses can also contain more than the minimal chimpanzee adenovirus sequences. These other Ad vectors can be characterized by deletions of various portions of gene regions of the virus, and infectious virus particles formed by the optional use of helper viruses and/or packaging cell lines.

[0462] As one example, suitable vectors may be formed by deleting all or a sufficient portion of the C68 adenoviral immediate early gene Ela and delayed early gene E1b, so as to eliminate their normal biological functions. Replication-defective E1-deleted viruses are capable of replicating and producing infectious virus when grown on a chimpanzee adenovirus-transformed, complementation cell line containing functional adenovirus E1a and E1b genes which provide the corresponding gene products in trans. Based on the homologies to known adenovirus sequences, it is anticipated that, as is true for the human recombinant E1-deleted adenoviruses of the art, the resulting recombinant chimpanzee adenovirus is capable of infecting many cell types and can express antigen(s), but cannot replicate in most cells that do not carry the chimpanzee E1 region DNA unless the cell is infected at a very high multiplicity of infection.

[0463] As another example, all or a portion of the C68 adenovirus delayed early gene E3 can be eliminated from the chimpanzee adenovirus sequence which forms a part of the recombinant virus.

[0464] Chimpanzee adenovirus C68 vectors can also be constructed having a deletion of the E4 gene. Still another vector can contain a deletion in the delayed early gene E2a.

[0465] Deletions can also be made in any of the late genes L1 through L5 of the chimpanzee C68 adenovirus genome. Similarly, deletions in the intermediate genes IX and IVa2 can be useful for some purposes. Other deletions may be made in the other structural or non-structural adenovirus genes.

[0466] The above discussed deletions can be used individually, i.e., an adenovirus sequence can contain deletions of E1 only. Alternatively, deletions of entire genes or portions thereof effective to destroy or reduce their biological activity can be used in any combination. For example, in one exemplary vector, the adenovirus C68 sequence can have deletions of the E1 genes and the E4 gene, or of the E1, E2a and E3 genes, or of the E1 and E3 genes, or of E1, E2a and E4 genes, with or without deletion of E3, and so on. As discussed above, such deletions can be used in combination with other mutations, such as temperature-sensitive mutations, to achieve a desired result.

[0467] The cassette comprising antigen(s) be inserted optionally into any deleted region of the chimpanzee C68 Ad virus. Alternatively, the cassette can be inserted into an existing gene region to disrupt the function of that region, if desired.

[0468] V.D.7. Helper Viruses

[0469] Depending upon the chimpanzee adenovirus gene content of the viral vectors employed to carry the antigen cassette, a helper adenovirus or non-replicating virus fragment can be used to provide sufficient chimpanzee adenovirus gene sequences to produce an infective recombinant viral particle containing the cassette.

[0470] Useful helper viruses contain selected adenovirus gene sequences not present in the adenovirus vector construct and/or not expressed by the packaging cell line in which the vector is transfected. A helper virus can be replication-defective and contain a variety of adenovirus genes in addition to the sequences described above. The helper virus can be used in combination with the E1-expressing cell lines described herein.

[0471] For C68, the “helper” virus can be a fragment formed by clipping the C terminal end of the C68 genome with SspI, which removes about 1300 bp from the left end of the virus. This clipped virus is then co-transfected into an E1-expressing cell line with the plasmid DNA, thereby forming the recombinant virus by homologous recombination with the C68 sequences in the plasmid.

[0472] Helper viruses can also be formed into poly-cation conjugates as described in Wu et al, J. Biol. Chem., 264:16985-16987 (1989); K. J. Fisher and J. M. Wilson, Biochem. J., 299:49 (Apr. 1, 1994). Helper virus can optionally contain a reporter gene. A number of such reporter genes are known to the art. The presence of a reporter gene on the helper virus which is different from the antigen cassette on the adenovirus vector allows both the Ad vector and the helper virus to be independently monitored. This second reporter is used to enable separation between the resulting recombinant virus and the helper virus upon purification.

[0473] V.D.8. Assembly of Viral Particle and Infection of a Cell Line

[0474] Assembly of the selected DNA sequences of the adenovirus, the antigen cassette, and other vector elements into various intermediate plasmids and shuttle vectors, and the use of the plasmids and vectors to produce a recombinant viral particle can all be achieved using conventional techniques. Such techniques include conventional cloning techniques of cDNA, in vitro recombination techniques (e.g., Gibson assembly), use of overlapping oligonucleotide sequences of the adenovirus genomes, polymerase chain reaction, and any suitable method which provides the desired nucleotide sequence. Standard transfection and co-transfection techniques are employed, e.g., CaPO4 precipitation techniques or liposome-mediated transfection methods such as lipofectamine. Other conventional methods employed include homologous recombination of the viral genomes, plaquing of viruses in agar overlay, methods of measuring signal generation, and the like.

[0475] For example, following the construction and assembly of the desired antigen cassette-containing viral vector, the vector can be transfected in vitro in the presence of a helper virus into the packaging cell line. Homologous recombination occurs between the helper and the vector sequences, which permits the adenovirus-antigen sequences in the vector to be replicated and packaged into virion capsids, resulting in the recombinant viral vector particles.

[0476] The resulting recombinant chimpanzee C68 adenoviruses are useful in transferring an antigen cassette to a selected cell. In in vivo experiments with the recombinant virus grown in the packaging cell lines, the E1-deleted recombinant chimpanzee adenovirus demonstrates utility in transferring a cassette to a non-chimpanzee, preferably a human, cell.

[0477] V.D.9. Use of the Recombinant Virus Vectors

[0478] The resulting recombinant chimpanzee C68 adenovirus containing the antigen cassette (produced by cooperation of the adenovirus vector and helper virus or adenoviral vector and packaging cell line, as described above) thus provides an efficient gene transfer vehicle which can deliver antigen(s) to a subject in vivo or ex vivo.

[0479] The above-described recombinant vectors are administered to humans according to published methods for gene therapy. A chimpanzee viral vector bearing an antigen cassette can be administered to a patient, preferably suspended in a biologically compatible solution or pharmaceutically acceptable delivery vehicle. A suitable vehicle includes sterile saline. Other aqueous and non-aqueous isotonic sterile injection solutions and aqueous and non-aqueous sterile suspensions known to be pharmaceutically acceptable carriers and well known to those of skill in the art may be employed for this purpose.

[0480] The chimpanzee adenoviral vectors are administered in sufficient amounts to transduce the human cells and to provide sufficient levels of antigen transfer and expression to provide a therapeutic benefit without undue adverse or with medically acceptable physiological effects, which can be determined by those skilled in the medical arts. Conventional and pharmaceutically acceptable routes of administration include, but are not limited to, direct delivery to the liver, intranasal, intravenous, intramuscular, subcutaneous, intradermal, oral and other parental routes of administration. Routes of administration may be combined, if desired.

[0481] Dosages of the viral vector will depend primarily on factors such as the condition being treated, the age, weight and health of the patient, and may thus vary among patients. The dosage will be adjusted to balance the therapeutic benefit against any side effects and such dosages may vary depending upon the therapeutic application for which the recombinant vector is employed. The levels of expression of antigen(s) can be monitored to determine the frequency of dosage administration.

[0482] Recombinant, replication defective adenoviruses can be administered in a “pharmaceutically effective amount”, that is, an amount of recombinant adenovirus that is effective in a route of administration to transfect the desired cells and provide sufficient levels of expression of the selected gene to provide a vaccinal benefit, i.e., some measurable level of protective immunity. C68 vectors comprising an antigen cassette can be co-administered with adjuvant. Adjuvant can be separate from the vector (e.g., alum) or encoded within the vector, in particular if the adjuvant is a protein. Adjuvants are well known in the art.

[0483] Conventional and pharmaceutically acceptable routes of administration include, but are not limited to, intranasal, intramuscular, intratracheal, subcutaneous, intradermal, rectal, oral and other parental routes of administration. Routes of administration may be combined, if desired, or adjusted depending upon the immunogen or the disease. For example, in prophylaxis of rabies, the subcutaneous, intratracheal and intranasal routes are preferred. The route of administration primarily will depend on the nature of the disease being treated.

[0484] The levels of immunity to antigen(s) can be monitored to determine the need, if any, for boosters. Following an assessment of antibody titers in the serum, for example, optional booster immunizations may be desired

### VI. Therapeutic and Manufacturing Methods

[0485] Also provided is a method of inducing an infectious disease organism-specific (e.g. a SARS-CoV-2 specific) immune response in a subject, vaccinating against an infectious disease organism, treating and/or alleviating a symptom of an infection associated with an infectious disease organism in a subject by administering to the subject one or more antigens such as a plurality of antigens identified using methods disclosed herein.

[0486] In some aspects, a subject has been diagnosed with an infection or is at risk of an infection (e.g. Covid-19 due to a SARS-CoV-2 infection), such as age, geographical/travel, and/or work-related increased risk of or predisposition to an infection, or at risk to a seasonal and/or novel disease infection.

[0487] An antigen can be administered in an amount sufficient to stimulate a CTL response. An antigen can be administered in an amount sufficient to stimulate a T cell response. An antigen can be administered in an amount sufficient to stimulate a B cell response.

[0488] An antigen can be administered alone or in combination with other therapeutic agents. Therapeutic agents can include those that target an infectious disease organism, such as an anti-viral or antibiotic agent.

[0489] The optimum amount of each antigen to be included in a vaccine composition and the optimum dosing regimen can be determined. For example, an antigen or its variant can be prepared for intravenous (i.v.) injection, sub-cutaneous (s.c.) injection, intradermal (i.d.) injection, intraperitoneal (i.p.) injection, intramuscular (i.m.) injection. Methods of injection include s.c., i.d., i.p., i.m., and i.v. Methods of DNA or RNA injection include i.d., i.m., s.c., i.p. and i.v. Other methods of administration of the vaccine composition are known to those skilled in the art.

[0490] A vaccine can be compiled so that the selection, number and/or amount of antigens present in the composition is/are tissue, infectious disease, and/or patient-specific. For instance, the exact selection of peptides can be guided by expression patterns of the parent proteins in a given tissue or guided by mutation or disease status of a patient. The selection can be dependent on the specific infectious disease (e.g. the specific SARS-CoV-2 isolate the subject is infected with or at risk for infection by), the status of the disease, the goal of the vaccination (e.g., preventative or targeting an ongoing disease), earlier treatment regimens, the immune status of the patient, and, of course, the HLA-haplotype of the patient. Furthermore, a vaccine can contain individualized components, according to personal needs of the particular patient. Examples include varying the selection of antigens according to the expression of the antigen in the particular patient or adjustments for secondary treatments following a first round or scheme of treatment.

[0491] A patient can be identified for administration of an antigen vaccine through the use of various diagnostic methods, e.g., patient selection methods described further below. Patient selection can involve identifying mutations in, or expression patterns of, one or more genes. Patient selection can involve identifying the infectious disease of an ongoing infection (e.g. the presence of a SARS-CoV-2 infection and/or the specific SARS-CoV-2 isolate). Patient selection can involve identifying risk of an infection by an infectious disease. In some cases, patient selection involves identifying the haplotype of the patient. The various patient selection methods can be performed in parallel, e.g., a sequencing diagnostic can identify both the mutations and the haplotype of a patient. The various patient selection methods can be performed sequentially, e.g., one diagnostic test identifies the mutations and separate diagnostic test identifies the haplotype of a patient, and where each test can be the same (e.g., both high-throughput sequencing) or different (e.g., one high-throughput sequencing and the other Sanger sequencing) diagnostic methods.

[0492] For a composition to be used as a vaccine for an infectious disease, antigens with similar normal self-peptides that are expressed in high amounts in normal tissues can be avoided or be present in low amounts in a composition described herein. On the other hand, if it is known that the infected cell of a patient expresses high amounts of a certain antigen, the respective pharmaceutical composition for treatment of this infection can be present in high amounts and/or more than one antigen specific for this particularly antigen or pathway of this antigen can be included.

[0493] Compositions comprising an antigen can be administered to an individual already suffering from an infection. In therapeutic applications, compositions are administered to a patient in an amount sufficient to stimulate an effective CTL response to the infectious disease organism antigen and to cure or at least partially arrest symptoms and/or complications. An amount adequate to accomplish this is defined as “therapeutically effective dose.” Amounts effective for this use will depend on, e.g., the composition, the manner of administration, the stage and severity of the disease being treated, the weight and general state of health of the patient, and the judgment of the prescribing physician. It should be kept in mind that compositions can generally be employed in serious disease states, that is, life-threatening or potentially life threatening situations, especially when the infectious disease organism has induced organ damage and/or other immune pathology. In such cases, in view of the minimization of extraneous substances and the relative nontoxic nature of an antigen, it is possible and can be felt desirable by the treating physician to administer substantial excesses of these compositions.

[0494] For therapeutic use, administration can begin at the detection or treatment of an infection. This can be followed by boosting doses until at least symptoms are substantially abated and for a period thereafter.

[0495] The pharmaceutical compositions (e.g., vaccine compositions) for therapeutic treatment are intended for parenteral, topical, nasal, oral or local administration. A pharmaceutical compositions can be administered parenterally, e.g., intravenously, subcutaneously, intradermally, or intramuscularly. The compositions can be administered to target specific infected tissues and/or cells of a subject. Disclosed herein are compositions for parenteral administration which comprise a solution of the antigen and vaccine compositions are dissolved or suspended in an acceptable carrier, e.g., an aqueous carrier. A variety of aqueous carriers can be used, e.g., water, buffered water, 0.9% saline, 0.3% glycine, hyaluronic acid and the like. These compositions can be sterilized by conventional, well known sterilization techniques, or can be sterile filtered. The resulting aqueous solutions can be packaged for use as is, or lyophilized, the lyophilized preparation being combined with a sterile solution prior to administration. The compositions may contain pharmaceutically acceptable auxiliary substances as required to approximate physiological conditions, such as pH adjusting and buffering agents, tonicity adjusting agents, wetting agents and the like, for example, sodium acetate, sodium lactate, sodium chloride, potassium chloride, calcium chloride, sorbitan monolaurate, triethanolamine oleate, etc.

[0496] Antigens can also be administered via liposomes, which target them to a particular cells tissue, such as lymphoid tissue. Liposomes are also useful in increasing half-life. Liposomes include emulsions, foams, micelles, insoluble monolayers, liquid crystals, phospholipid dispersions, lamellar layers and the like. In these preparations the antigen to be delivered is incorporated as part of a liposome, alone or in conjunction with a molecule which binds to, e.g., a receptor prevalent among lymphoid cells, such as monoclonal antibodies which bind to the CD45 antigen, or with other therapeutic or immunogenic compositions. Thus, liposomes filled with a desired antigen can be directed to the site of lymphoid cells, where the liposomes then deliver the selected therapeutic/immunogenic compositions. Liposomes can be formed from standard vesicle-forming lipids, which generally include neutral and negatively charged phospholipids and a sterol, such as cholesterol. The selection of lipids is generally guided by consideration of, e.g., liposome size, acid lability and stability of the liposomes in the blood stream. A variety of methods are available for preparing liposomes, as described in, e.g., Szoka et al., Ann. Rev. Biophys. Bioeng. 9; 467 (1980), U.S. Pat. Nos. 4,235,871, 4,501,728, 4,501,728, 4,837,028, and 5,019,369.

[0497] For targeting to the immune cells, a ligand to be incorporated into the liposome can include, e.g., antibodies or fragments thereof specific for cell surface determinants of the desired immune system cells. A liposome suspension can be administered intravenously, locally, topically, etc. in a dose which varies according to, inter alia, the manner of administration, the peptide being delivered, and the stage of the disease being treated.

[0498] For therapeutic or immunization purposes, nucleic acids encoding a peptide and optionally one or more of the peptides described herein can also be administered to the patient. A number of methods are conveniently used to deliver the nucleic acids to the patient. For instance, the nucleic acid can be delivered directly, as “naked DNA”. This approach is described, for instance, in Wolff et al., Science 247: 1465-1468 (1990) as well as U.S. Pat. Nos. 5,580,859 and 5,589,466. The nucleic acids can also be administered using ballistic delivery as described, for instance, in U.S. Pat. No. 5,204,253. Particles comprised solely of DNA can be administered. Alternatively, DNA can be adhered to particles, such as gold particles. Approaches for delivering nucleic acid sequences can include viral vectors, mRNA vectors, and DNA vectors with or without electroporation.

[0499] The nucleic acids can also be delivered complexed to cationic compounds, such as cationic lipids. Lipid-mediated gene delivery methods are described, for instance, in 9618372WOAWO 96/18372; 9324640WOAWO 93/24640; Mannino & Gould-Fogerite, BioTechniques 6(7): 682-691 (1988); U.S. Pat. No. 5,279,833 Rose U.S. Pat. No. 5,279,833; 9106309WOAWO 91/06309; and Felgner et al., Proc. Natl. Acad. Sci. USA 84: 7413-7414 (1987).

[0500] Antigens can also be included in viral vector-based vaccine platforms, such as vaccinia, fowlpox, self-replicating alphavirus, marabavirus, adenovirus (See, e.g., Tatsis et al., Adenoviruses, Molecular Therapy (2004) 10, 616-629), or lentivirus, including but not limited to second, third or hybrid second/third generation lentivirus and recombinant lentivirus of any generation designed to target specific cell types or receptors (See, e.g., Hu et al., Immunization Delivered by Lentiviral Vectors for Cancer and Infectious Diseases, Immunol Rev. (2011) 239(1): 45-61, Sakuma et al., Lentiviral vectors: basic to translational, Biochem J. (2012) 443(3):603-18, Cooper et al., Rescue of splicing-mediated intron loss maximizes expression in lentiviral vectors containing the human ubiquitin C promoter, Nucl. Acids Res. (2015) 43 (1): 682-690, Zufferey et al., Self-Inactivating Lentivirus Vector for Safe and Efficient In Vivo Gene Delivery, J. Virol. (1998) 72 (12): 9873-9880). Dependent on the packaging capacity of the above mentioned viral vector-based vaccine platforms, this approach can deliver one or more nucleotide sequences that encode one or more antigen peptides. The sequences may be flanked by non-mutated sequences, may be separated by linkers or may be preceded with one or more sequences targeting a subcellular compartment (See, e.g., Gros et al., Prospective identification of neoantigen-specific lymphocytes in the peripheral blood of melanoma patients, Nat Med. (2016) 22 (4):433-8, Stronen et al., Targeting of cancer neoantigens with donor-derived T cell receptor repertoires, Science. (2016) 352 (6291):1337-41, Lu et al., Efficient identification of mutated cancer antigens recognized by T cells associated with durable tumor regressions, Clin Cancer Res. (2014) 20(13):3401-10). Upon introduction into a host, infected cells express the antigens, and thereby stimulate a host immune (e.g., CTL) response against the peptide(s). Vaccinia vectors and methods useful in immunization protocols are described in, e.g., U.S. Pat. No. 4,722,848. Another vector is BCG (Bacille Calmette Guerin). BCG vectors are described in Stover et al. (Nature 351:456-460 (1991)). A wide variety of other vaccine vectors useful for therapeutic administration or immunization of antigens, e.g., Salmonella typhi vectors, and the like will be apparent to those skilled in the art from the description herein.

[0501] A means of administering nucleic acids uses minigene constructs encoding one or multiple epitopes. To create a DNA sequence encoding the selected CTL epitopes (minigene) for expression in human cells, the amino acid sequences of the epitopes are reverse translated. A human codon usage table is used to guide the codon choice for each amino acid. These epitope-encoding DNA sequences are directly adjoined, creating a continuous polypeptide sequence. To optimize expression and/or immunogenicity, additional elements can be incorporated into the minigene design. Examples of amino acid sequence that could be reverse translated and included in the minigene sequence include: helper T lymphocyte, epitopes, a leader (signal) sequence, and an endoplasmic reticulum retention signal. In addition, MHC presentation of CTL epitopes can be improved by including synthetic (e.g. poly-alanine) or naturally-occurring flanking sequences adjacent to the CTL epitopes. The minigene sequence is converted to DNA by assembling oligonucleotides that encode the plus and minus strands of the minigene. Overlapping oligonucleotides (30-100 bases long) are synthesized, phosphorylated, purified and annealed under appropriate conditions using well known techniques. The ends of the oligonucleotides are joined using T4 DNA ligase. This synthetic minigene, encoding the CTL epitope polypeptide, can then cloned into a desired expression vector.

[0502] Purified plasmid DNA can be prepared for injection using a variety of formulations. The simplest of these is reconstitution of lyophilized DNA in sterile phosphate-buffer saline (PBS). A variety of methods have been described, and new techniques can become available. As noted above, nucleic acids are conveniently formulated with cationic lipids. In addition, glycolipids, fusogenic liposomes, peptides and compounds referred to collectively as protective, interactive, non-condensing (PINC) could also be complexed to purified plasmid DNA to influence variables such as stability, intramuscular dispersion, or trafficking to specific organs or cell types.

[0503] Also disclosed is a method of manufacturing a vaccine, comprising performing the steps of a method disclosed herein; and producing a vaccine comprising a plurality of antigens or a subset of the plurality of antigens.

[0504] Antigens disclosed herein can be manufactured using methods known in the art. For example, a method of producing an antigen or a vector (e.g., a vector including at least one sequence encoding one or more antigens) disclosed herein can include culturing a host cell under conditions suitable for expressing the antigen or vector wherein the host cell comprises at least one polynucleotide encoding the antigen or vector, and purifying the antigen or vector. Standard purification methods include chromatographic techniques, electrophoretic, immunological, precipitation, dialysis, filtration, concentration, and chromatofocusing techniques.

[0505] Host cells can include a Chinese Hamster Ovary (CHO) cell, NSO cell, yeast, or a HEK293 cell. Host cells can be transformed with one or more polynucleotides comprising at least one nucleic acid sequence that encodes an antigen or vector disclosed herein, optionally wherein the isolated polynucleotide further comprises a promoter sequence operably linked to the at least one nucleic acid sequence that encodes the antigen or vector. In certain embodiments the isolated polynucleotide can be cDNA.

### VII. Antigen Use and Administration

[0506] A vaccination protocol can be used to dose a subject with one or more antigens. A priming vaccine and a boosting vaccine can be used to dose the subject.

[0507] Immune monitoring can be performed before, during, and/or after vaccine administration. Such monitoring can inform safety and efficacy, among other parameters.

[0508] To perform immune monitoring, PBMCs are commonly used. PBMCs can be isolated before prime vaccination, and after prime vaccination (e.g. 4 weeks and 8 weeks). PBMCs can be harvested just prior to boost vaccinations and after each boost vaccination (e.g. 4 weeks and 8 weeks).

[0509] T cell responses can be assessed as part of an immune monitoring protocol. For example, the ability of a vaccine composition described herein to stimulate an immune response can be monitored and/or assessed. As used herein, “stimulate an immune response” refers to any increase in a immune response, such as initiating an immune response (e.g., a priming vaccine stimulating the initiation of an immune response in a naïve subject) or enhancement of an immune response (e.g., a boosting vaccine stimulating the enhancement of an immune response in a subject having a pre-existing immune response to an antigen, such as a pre-existing immune response initiated by a priming vaccine). T cell responses can be measured using one or more methods known in the art such as ELISpot, intracellular cytokine staining, cytokine secretion and cell surface capture, T cell proliferation, MHC multimer staining, or by cytotoxicity assay. T cell responses to epitopes encoded in vaccines can be monitored from PBMCs by measuring induction of cytokines, such as IFN-gamma, using an ELISpot assay. Specific CD4 or CD8 T cell responses to epitopes encoded in vaccines can be monitored from PBMCs by measuring induction of cytokines captured intracellularly or extracellularly, such as IFN-gamma, using flow cytometry. Specific CD4 or CD8 T cell responses to epitopes encoded in the vaccines can be monitored from PBMCs by measuring T cell populations expressing T cell receptors specific for epitope/MHC class I complexes using MHC multimer staining. Specific CD4 or CD8 T cell responses to epitopes encoded in the vaccines can be monitored from PBMCs by measuring the ex vivo expansion of T cell populations following 3H-thymidine, bromodeoxyuridine and carboxyfluoresceine-diacetate-succinimidylester (CFSE) incorporation. The antigen recognition capacity and lytic activity of PBMC-derived T cells that are specific for epitopes encoded in vaccines can be assessed functionally by chromium release assay or alternative colorimetric cytotoxicity assays.

[0510] B cell responses can be measured using one or more methods known in the art such as assays used to determine B cell differentiation (e.g., differentiation into plasma cells), B cell or plasma cell proliferation, B cell or plasma cell activation (e.g., upregulation of costimulatory markers such as CD80 or CD86), antibody class switching, and/or antibody production (e.g., an ELISA).

### VIII. Isolation and Detection of HLA Peptides

[0511] Isolation of HLA-peptide molecules was performed using classic immunoprecipitation (IP) methods after lysis and solubilization of the tissue sample (55-58). Examples and methods are described in more detail in international patent application publication WO/2018/208856, herein incorporated by reference, in its entirety, for all purposes.

### IX. Presentation Model

[0512] Presentation models can be used to identify likelihoods of peptide presentation in patients. Various presentation models are known to those skilled in the art, for example the presentation models described in more detail in U.S. Pat. No. 10,055,540, US Application Pub. No. US20200010849A1 and US20110293637, and international patent application publications WO/2018/195357, WO/2018/208856, and WO2016187508, each herein incorporated by reference, in their entirety, for all purposes.

### X. Training Module

[0513] Training modules can be used to construct one or more presentation models based on training data sets that generate likelihoods of whether peptide sequences will be presented by MHC alleles associated with the peptide sequences. Various training modules are known to those skilled in the art, for example the presentation models described in more detail in U.S. Pat. No. 10,055,540, US Application Pub. No. US20200010849A1, and international patent application publications WO/2018/195357 and WO/2018/208856, each herein incorporated by reference, in their entirety, for all purposes. A training module can construct a presentation model to predict presentation likelihoods of peptides on a per-allele basis. A training module can also construct a presentation model to predict presentation likelihoods of peptides in a multiple-allele setting where two or more MHC alleles are present.

### XI. Prediction Module

[0514] A prediction module can be used to receive sequence data and select candidate antigens in the sequence data using a presentation model. Specifically, the sequence data may be DNA sequences, RNA sequences, and/or protein sequences extracted from infected cells patients or infectious disease organisms themselves (e.g., SARS-CoV-2). A prediction module may identify candidate antigens that are pathogen-derived peptides (e.g., SARS-CoV-2 derived), such as by comparing sequence data extracted from normal tissue cells of a patient with the sequence data extracted from infected cells of the patient to identify portions containing one or more infectious disease organism associated antigens. A prediction module may identify candidate antigens that are expressed in an infected cell or infected tissue in comparison to a normal cell or tissue by comparing sequence data extracted from normal tissue cells of a patient with the sequence data extracted from infected tissue cells of the patient to identify expressed candidate antigens (e.g., identifying expressed polynucleotides and/or polypeptides specific to an infectious disease).

[0515] A presentation module can apply one or more presentation model to processed peptide sequences to estimate presentation likelihoods of the peptide sequences. Specifically, the prediction module may select one or more candidate antigen peptide sequences that are likely to be presented on infected cell HLA molecules by applying presentation models to the candidate antigens. In one implementation, the presentation module selects candidate antigen sequences that have estimated presentation likelihoods above a predetermined threshold. In another implementation, the presentation model selects the N candidate antigen sequences that have the highest estimated presentation likelihoods (where N is generally the maximum number of epitopes that can be delivered in a vaccine). A vaccine including the selected candidate antigens for a given patient can be injected into the patient to stimulate immune responses.

[0516] XI.B. Cassette Design Module

[0517] XI.B.1 Overview

[0518] A cassette design module can be used to generate a vaccine cassette sequence based on selected candidate peptides for injection into a patient. For example, a cassette design module can be used to generate a sequence encoding concatenated epitope sequences, such as concatenated T cell epitopes. Various cassette design modules are known to those skilled in the art, for example the cassette design modules described in more detail in U.S. Pat. No. 10,055,540, US Application Pub. No. US20200010849A1, and international patent application publications WO/2018/195357 and WO/2018/208856, each herein incorporated by reference, in their entirety, for all purposes.

[0519] A set of therapeutic epitopes may be generated based on the selected peptides determined by a prediction module associated with presentation likelihoods above a predetermined threshold, where the presentation likelihoods are determined by the presentation models. However it is appreciated that in other embodiments, the set of therapeutic epitopes may be generated based on any one or more of a number of methods (alone or in combination), for example, based on binding affinity or predicted binding affinity to HLA class I or class II alleles of the patient, binding stability or predicted binding stability to HLA class I or class II alleles of the patient, random sampling, and the like.

[0520] Therapeutic epitopes may correspond to selected peptides themselves. Therapeutic epitopes may also include C- and/or N-terminal flanking sequences in addition to the selected peptides. N- and C-terminal flanking sequences can be the native N- and C-terminal flanking sequences of the therapeutic vaccine epitope in the context of its source protein. Therapeutic epitopes can represent a fixed-length epitope Therapeutic epitopes can represent a variable-length epitope, in which the length of the epitope can be varied depending on, for example, the length of the C- or N-flanking sequence. For example, the C-terminal flanking sequence and the N-terminal flanking sequence can each have varying lengths of 2-5 residues, resulting in 16 possible choices for the epitope.

[0521] A cassette design module can also generate cassette sequences by taking into account presentation of junction epitopes that span the junction between a pair of therapeutic epitopes in the cassette. Junction epitopes are novel non-self but irrelevant epitope sequences that arise in the cassette due to the process of concatenating therapeutic epitopes and linker sequences in the cassette. The novel sequences of junction epitopes are different from the therapeutic epitopes of the cassette themselves.

[0522] A cassette design module can generate a cassette sequence that reduces the likelihood that junction epitopes are presented in the patient. Specifically, when the cassette is injected into the patient, junction epitopes have the potential to be presented by HLA class I or HLA class II alleles of the patient, and stimulate a CD8 or CD4 T-cell response, respectively. Such reactions are often times undesirable because T-cells reactive to the junction epitopes have no therapeutic benefit, and may diminish the immune response to the selected therapeutic epitopes in the cassette by antigenic competition.⁷⁶

[0523] A cassette design module can iterate through one or more candidate cassettes, and determine a cassette sequence for which a presentation score of junction epitopes associated with that cassette sequence is below a numerical threshold. The junction epitope presentation score is a quantity associated with presentation likelihoods of the junction epitopes in the cassette, and a higher value of the junction epitope presentation score indicates a higher likelihood that junction epitopes of the cassette will be presented by HLA class I or HLA class II or both.

[0524] In one embodiment, a cassette design module may determine a cassette sequence associated with the lowest junction epitope presentation score among the candidate cassette sequences.

[0525] A cassette design module may iterate through one or more candidate cassette sequences, determine the junction epitope presentation score for the candidate cassettes, and identify an optimal cassette sequence associated with a junction epitope presentation score below the threshold.

[0526] A cassette design module may further check the one or more candidate cassette sequences to identify if any of the junction epitopes in the candidate cassette sequences are self-epitopes for a given patient for whom the vaccine is being designed. To accomplish this, the cassette design module checks the junction epitopes against a known database such as BLAST. In one embodiment, the cassette design module may be configured to design cassettes that avoid junction self-epitopes.

[0527] A cassette design module can perform a brute force approach and iterate through all or most possible candidate cassette sequences to select the sequence with the smallest junction epitope presentation score. However, the number of such candidate cassettes can be prohibitively large as the capacity of the vaccine increases. For example, for a vaccine capacity of 20 epitopes, the cassette design module has to iterate through ˜10¹⁸ possible candidate cassettes to determine the cassette with the lowest junction epitope presentation score. This determination may be computationally burdensome (in terms of computational processing resources required), and sometimes intractable, for the cassette design module to complete within a reasonable amount of time to generate the vaccine for the patient. Moreover, accounting for the possible junction epitopes for each candidate cassette can be even more burdensome. Thus, a cassette design module may select a cassette sequence based on ways of iterating through a number of candidate cassette sequences that are significantly smaller than the number of candidate cassette sequences for the brute force approach.

[0528] A cassette design module can generate a subset of randomly or at least pseudo-randomly generated candidate cassettes, and selects the candidate cassette associated with a junction epitope presentation score below a predetermined threshold as the cassette sequence. Additionally, the cassette design module may select the candidate cassette from the subset with the lowest junction epitope presentation score as the cassette sequence. For example, the cassette design module may generate a subset of ˜1 million candidate cassettes for a set of 20 selected epitopes, and select the candidate cassette with the smallest junction epitope presentation score. Although generating a subset of random cassette sequences and selecting a cassette sequence with a low junction epitope presentation score out of the subset may be sub-optimal relative to the brute force approach, it requires significantly less computational resources thereby making its implementation technically feasible. Further, performing the brute force method as opposed to this more efficient technique may only result in a minor or even negligible improvement in junction epitope presentation score, thus making it not worthwhile from a resource allocation perspective. A cassette design module can determine an improved cassette configuration by formulating the epitope sequence for the cassette as an asymmetric traveling salesman problem (TSP). Given a list of nodes and distances between each pair of nodes, the TSP determines a sequence of nodes associated with the shortest total distance to visit each node exactly once and return to the original node. For example, given cities A, B, and C with known distances between each other, the solution of the TSP generates a closed sequence of cities, for which the total distance traveled to visit each city exactly once is the smallest among possible routes. The asymmetric version of the TSP determines the optimal sequence of nodes when the distance between a pair of nodes are asymmetric. For example, the “distance” for traveling from node A to node B may be different from the “distance” for traveling from node B to node A. By solving for an improved optimal cassette using an asymmetric TSP, the cassette design module can find a cassette sequence that results in a reduced presentation score across the junctions between epitopes of the cassette. The solution of the asymmetric TSP indicates a sequence of therapeutic epitopes that correspond to the order in which the epitopes should be concatenated in a cassette to minimize the junction epitope presentation score across the junctions of the cassette. A cassette sequence determined through this approach can result in a sequence with significantly less presentation of junction epitopes while potentially requiring significantly less computational resources than the random sampling approach, especially when the number of generated candidate cassette sequences is large. Illustrative examples of different computational approaches and comparisons for optimizing cassette design are described in more detail in U.S. Pat. No. 10,055,540, US Application Pub. No. US20200010849A1, and international patent application publications WO/2018/195357 and WO/2018/208856, each herein incorporated by reference, in their entirety, for all purposes.

[0529] A cassette design module can also generate cassette sequences by taking into account additional protein sequences encoded in the vaccine. For example, a cassette design module used to generate a sequence encoding concatenated T cell epitopes can take into account T cell epitopes already encoded by additional protein sequences present in the vaccine (e.g., full-length protein sequences), such as by removing T cell epitopes already encoded by the additional protein sequences from the list of candidate sequences.

[0530] A cassette design module can also generate cassette sequences by taking into account the size of the sequences. Without wishing to be bound by theory, in general, increased cassette size can negatively impact vaccine aspects, such as vaccine production and/or vaccine efficacy. In one example, the cassette design module can take into account overlapping sequences, such as overlapping T cell epitope sequences. In general, a single sequence containing overlapping T cell epitope sequences (also referred to as a “frame”) is more efficient than separately linking individual T cell epitope sequences as it reduces the sequence size needed to encode the multiple peptides. Accordingly, in an illustrative example, a cassette design module used to generate a sequence encoding concatenated T cell epitopes can take into account the cost/benefit of extending a candidate T cell epitope to encode one or more additional T cell epitopes, such as determining the benefit gained in additional population coverage for an MHC presenting the additional T cell epitope versus the cost of increasing the size of the sequence.

[0531] A cassette design module can also generate cassette sequences by taking into account the magnitude of stimulation of an immune response generated by validated epitopes.

[0532] A cassette design module can also generate cassette sequences by taking into account presentation of encoded epitopes across a population, for example that at least one immunogenic epitope is presented by at least one HLA across a proportion of a population, for example by at least 85%, 90%, or 95% of a population (e.g., HLA-A, HLA-B and HLA-C genes over four major ethnic groups, namely European (EUR), African American (AFA), Asian and Pacific Islander (APA) and Hispanic (HIS)). As an illustrative non-limiting example, a cassette design module can also generate cassette sequences such that at least one HLA is present at least across 85%, 90%, or 95% of a population that presents at least one validated epitope or presents at least 4, 5, 6, or 7 predicted epitopes.

[0533] A cassette design module can also generate cassette sequences by taking into account other aspects that improve potential safety, such as limiting encoding or the potential to encode a functional protein, functional protein domain, functional protein subunit, or functional protein fragment potentially presenting a safety risk. In some cases, a cassette design module can limit sequence size of encoded peptides such that are less than 50%, less than 49%, less than 48%, less than 47%, less than 46%, less than 45%, less than 45%, less than 43%, less than 42%, less than 41%, less than 40%, less than 39%, less than 38%, less than 37%, less than 36%, less than 35%, less than 34%, or less than 33% of the translated, corresponding full-length protein. In some cases, a cassette design module can limit sequence size of encoded peptides such that a single contiguous sequence is less than 50% of the translated, corresponding full-length protein, but more than one sequence may be derived from the same translated, corresponding full-length protein and together encode more than 50%. In an illustrative example, if a single sequence containing overlapping T cell epitope sequences (“frame”) is larger than 50% of the translated, corresponding full-length protein, the frame can be split into multiple frames (e.g., f1, f2 etc.) such that each frame is less than 50% of the translated, corresponding full-length protein. A cassette design module can also limit sequence size of encoded peptides such that a single contiguous sequence is less than 49%, less than 48%, less than 47%, less than 46%, less than 45%, less than 45%, less than 43%, less than 42%, less than 41%, less than 40%, less than 39%, less than 38%, less than 37%, less than 36%, less than 35%, less than 34%, or less than 33% of the translated, corresponding full-length protein. Where multiple frames from the same gene are encoded, the multiple frames can have overlapping sequences with each other, in other words each separately encode the same sequence. Where multiple frames from the same gene are encoded, the two or more nucleic acid sequences derived from the same gene can be ordered such that a first nucleic acid sequence cannot be immediately followed by or linked to a second nucleic acid sequence if the second nucleic acid sequence follows, immediately or not, the first nucleic acid sequence in the corresponding gene. For example, if there are 3 frames within the same gene (f1,f2,f3 in increasing order of amino acid position):
[0534] The following cassette orderings are not allowed:
   [0535] f1 immediately followed by f2
   [0536] f2 immediately followed by f3
   [0537] f1 immediately followed by f3
[0538] The following cassette orderings are allowed:
   [0539] f3 immediately followed by f2
   [0540] f2 immediately followed by f1

### XIII. Example Computer

[0541] A computer can be used for any of the computational methods described herein. One skilled in the art will recognize a computer can have different architectures. Examples of computers are known to those skilled in the art, for example the computers described in more detail in U.S. Pat. No. 10,055,540, US Application Pub. No. US20200010849A1, and international patent application publications WO/2018/195357 and WO/2018/208856, each herein incorporated by reference, in their entirety, for all purposes.

### XIV. Examples

[0542] Below are examples of specific embodiments for carrying out the present invention. The examples are offered for illustrative purposes only, and are not intended to limit the scope of the present invention in any way. Efforts have been made to ensure accuracy with respect to numbers used (e.g., amounts, temperatures, etc.), but some experimental error and deviation should, of course, be allowed for.

[0543] The practice of the present invention will employ, unless otherwise indicated, conventional methods of protein chemistry, biochemistry, recombinant DNA techniques and pharmacology, within the skill of the art. Such techniques are explained fully in the literature. See, e.g., T. E. Creighton, Proteins: Structures and Molecular Properties (W.H. Freeman and Company, 1993); A. L. Lehninger, Biochemistry (Worth Publishers, Inc., current addition); Sambrook, et al., Molecular Cloning: A Laboratory Manual (2nd Edition, 1989); Methods In Enzymology (S. Colowick and N. Kaplan eds., Academic Press, Inc.); Remington's Pharmaceutical Sciences, 18th Edition (Easton, Pennsylvania: Mack Publishing Company, 1990); Carey and Sundberg Advanced Organic Chemistry 3^{rd} Ed. (Plenum Press) Vols A and B(1992).

[0544] XIV.A. SARS-CoV-2 MHC Epitope Prediction and Vaccine Cassette Construction

[0545] The SARS-CoV-2 belongs to the coronavirus family and its reference genome is a single-stranded RNA sequence of 29,903 base pairs. The genome contains at least 14 open reading frames (ORF) as shown in FIG. 1. Among the encoded genes, the essential genes are replicase ORF1ab, spike (S), envelope (E), membrane (M) and nucleocapsid (N). The replicase ORF1ab (position 266-21555) encode two proteins namely orf1a and orf1b, the latter is translated by a ribosomal frameshift by −1 at position 13468. The two proteins together contain 16 non-structure proteins (nsp1-nsp16), as depicted in FIG. 2, that is, the ORF1a and ORF1b are cleaved into 16 nsps. The spike protein is thought to bind to the ACE2 receptor of the human cell, allowing the virus to enter the human cell to use its replication machinery to produce and disseminate more copies of the virus.

[0546] Because RNA viruses are known to have high mutation rates, a large number of SARS-CoV-2 genomes were analyzed to identify regions in the proteome that are variable. Over 8000 SARS-CoV-2 complete genomes deposited into the GISAID database [www.gisaid.org] as of Apr. 19, 2020 were obtained. Pairwise global alignment of each of the genomes to the SARS-CoV-2 reference genome (Genbank Accession number NC_045512; SEQ ID NO:76) was performed. Sequences on these genomes that are aligned to coding regions of the reference genome were specifically located the. These sequences were then translated to obtain the protein sequences of these SARS-CoV-2. These protein sequences wee then aligned to the respective reference protein sequences to identify variants.

[0547] The analysis identified 20 sites on the protein sequences that have a variant rate greater than 1%. These sites are shown in Table 1. In selecting T-cell epitopes, candidate epitopes that cross these variable sites were excluded.

[0548] CD8+ epitopes were predicted using our machine learning EDGE platform (see U.S. Pat. No. 10,055,540, herein incorporated by reference for all purposes), which was shown to be best-in-class [Bulik-Sullivan et al. (2018). Deep learning using tumor HLA peptide mass spectrometry datasets improves neoantigen identification. Nature Biotechnology 2018, 37(1), herein incorporated by reference for all purposes]. The model for predicting class I epitopes was recently trained on 507,502 peptides presented in Mass Spectrometry across 398 samples and covers 116 identified alleles, of which 112 alleles (Table 2, FIG. 7) are represented in the haplotype distribution dataset described below.

[0549] In order to generate a list of candidate CD8+ T-cell epitopes, the orf1ab protein was split at the cleavage sites shown in FIG. 2. Studies show that the spike protein harbors a furin-like cleavage motif at position 681-684, where the cleavage event occurs following position 684 [Wrapp et al. (2020). Cryo-EM structure of the 2019-nCoV spike in the prefusion conformation. Science, 367(6483), 1260-1263, Ou et al. (2020). Characterization of spike glycoprotein of SARS-CoV-2 on virus entry and its immune cross-reactivity with SARS-CoV. Nature Communications, 11(1), 1620]. The cleavage of the spike protein into S1 and S2 is thought to facilitate the cell entry contributing to the transmissibility of the virus. Accordingly, the Spike protein was split at the furin cleavage site for generating candidate CD8+ T-cell epitopes. All 8-11mer peptides were then generated from the cleaved proteins and the other proteins, flanked by their native N-terminal and C-terminal 5-mers.

[0550] The EDGE machine learning model was run on these candidate epitopes for each HLA class I allele. That is, the presentation score of a candidate epitope is given an EDGE score for each HLA allele. Generally, the probability of a peptide being presented is influenced by the family of the protein containing the peptide, and the expression level of the protein. The EDGE model was also trained on human peptidome datasets. Given there is no equivalent protein family for SARS-CoV-2, for predicting the presentation of a given Sar-CoV-2 peptide, a random protein family was assigned to all peptides. Assigning the same protein family, albeit random, will have the same effect on all SARS-CoV-2 peptides. A high level of expression was also used (tpm=10). A list of candidate epitopes with the EDGE score of 0.001 and above for an HLA allele are shown in Table A, as well as cognate HLA alleles with a predicted EDGE score greater than 0.001, with each cognate pairing ranked as H (EDGE score>0.1), M (EDGE score between 0.01 and 0.1), and L (EDGE score<0.01).

[0551] In order to account for the different levels of expression of SARS-CoV-2 genes, the ratio of reported T-cell responses among genes from SARS-CoV-2 genome [Li et al. (2008) T Cell Responses to Whole SARS Coronavirus in Humans. The Journal of Immunology, 181(8), 5490-5500] was used as a proxy for the ratio of gene expression levels. The score of all epitopes from a SARS-CoV-2 gene was then scaled so that the ratio between the 99^{th} percentile of the epitopes in the selected gene and the 99^{th} percentile of the epitopes in the Spike gene followed the ratio reported in [Li et al. (2008). T Cell Responses to Whole SARS Coronavirus in Humans. The Journal of Immunology, 181(8), 5490-5500].

[0552] A set of candidate CD8+ epitopes was then selected by choosing those with the scaled EDGE score greater than or equal to a threshold of t=0.01. The threshold was selected from analysis of an HIV LANL dataset (data not shown) so that PPV for T-cell epitopes estimated to be 0.2 and recall is 0.5. The set sequences that are >=90% homologous to known SARs-Cov T-cell epitopes reported in IEDB [Vita et al. (2019). The Immune Epitope Database (IEDB): 2018 update. Nucleic Acids Research, 47(D1), D339-D343.] was also included similar to the approach described in Grifoni et al. [(2020). A Sequence Homology and Bioinformatic Approach Can Predict Candidate Targets for Immune Responses to SARS-CoV-2. Cell Host & Microbe, 27(4), 671-680.e2].

[0553] The set of candidate epitopes excluded those sequences that contained at least one of the sites that have a variable rate greater than 0.01, as mentioned above and shown in Table 1.

[0554] In order to maximize the coverage of the vaccine over the world population, allele frequencies of HLA-A, HLA-B and HLA-C genes over four major ethnic groups, namely European (EUR), African American (AFA), Asian and Pacific Islander (APA) and Hispanic (HIS) were obtained from the publicly available National Marrow Donor Program dataset [www.bioinformatics.bethematchclinical.org/hla-resources/haplotype-frequencies/high-resolution-hla-alleles-and-haplotypes-in-the-us-population]. Simulations were then performed to estimate the frequencies of the haplotypes made up by combination of these HLA alleles.

[0555] Cassette optimization proceeded as follows:

### Epitope Selection Definitions

[0556] Candidate epitope set E: set of candidate CD8+ epitopes with scaled EDGE score greater than or equal to a threshold of t=0.01
[0557] Population coverage criteria P: For each of the four ethnicity groups as described above (EUR/AFA/APA/HIS), 95% of the simulated people in that ethnic group have at least 30 candidate epitopes presented in their diplotype
[0558] Solution frame set F—all amino acid ranges in the current solution encapsulating the added candidate epitopes
   [0559] For each epitope added to the solution, the epitope and 5 flanking native amino acids on each end must be fully contained in a frame of F
   [0560] Each frame spans only protein region (including individual NSPs in orf1ab)

### Epitope Selection Method

[0561] Population coverage criteria P starts as calculated with all epitopes in the whole gene(s) initially added
[0562] If the population coverage criteria P is not satisfied, continually choose the amino acid frame f across SARS-CoV-2 proteome that most efficiently maximizes progress to P
   [0563] Defined as the highest ratio of additional population coverage C/additional amino acid bases added AA. (C/AA).
   [0564] All candidate frames are either a new 25aa frame (AA=25), or can overlap with frames in the existing solution F—in which case it can add any amount less than 25aa (AA<25)
   [0565] Additional population coverage C is the increase in epitope count from E for haplotypes with <20 covered epitopes, weighted(multiplied) by the haplotype's population frequency summed across all four ethnic groups
   [0566] 20 epitopes per haplotype is determined (experimentally chosen) to be an efficient proxy towards reaching the overall coverage criteria of 30 candidate epitopes per diplotype
   [0567] Add f to solution frame set F. Remove from E, candidate epitopes within f.
[0568] After frames are chosen, create the final set F:
   [0569] First merge overlapping frames, yielding contiguous sequences (i.e. epitope “hotspots”)
   [0570] Next ensure all frames are less than 50% of that frame's overall gene size. If frames are larger than this size, divide them into smaller (potentially overlapping) frames that are each smaller than this requirement. Additional more stringent size limitations can be tested
[0571] To illustrates the marginal value of larger cassette sizes, frame selection can continue past when P is satisfied—but does not affect the composition of the chosen cassette for the criteria P.

### Cassette Ordering

[0572] The frames in solution frame set F are ordered to minimize the EDGE score of junction epitopes (unintended epitopes not part of the solution, created by adjacent frames). Successive frames within a gene are also forbidden to immediately follow each other in the cassette (intra-gene restriction). In other words, intra-gene restriction requires that if there are two or more SARS-CoV-2 derived nucleic acid sequences encoding epitopes derived from the same SARS-CoV-2 gene, the two sequences are ordered such that a first nucleic acid sequence cannot be immediately followed by or linked to a second nucleic acid sequence if the second nucleic acid sequence follows first nucleic acid sequence in the corresponding SARS-CoV-2 gene. For example, if there are 3 frames within the same gene (f1,f2,f3 in increasing order of amino acid position)
[0573] The following cassette orderings are impossible:
   [0574] f1 immediately followed by f2
   [0575] f2 immediately followed by f3
   [0576] f1 immediately followed by f3
[0577] The following cassette orderings are possible:
   [0578] f3 immediately followed by f2
   [0579] f2 immediately followed by f1

### Cassette Ordering Method

[0580] Google optimization routing tools [www.developers.google.com/optimization/routing] are used to perform a traveling salesman optimization route, where the distance between each pair of frames in F is:
[0581] Infinite, if the frames are not allowed to follow each other in this order, according to the above intra-gene restriction
[0582] Otherwise the sum of junction epitope EDGE scores across all alleles, weighted by allele frequency in population

[0583] Route finding of the minimal path distance yields the optimal ordering of the frames in the cassette to minimize junctional epitopes and avoid successive frames within a gene.

### Results

[0584] The population coverage criteria P was calculated with all initial epitopes provided by the SARS-CoV-2 Spike protein (SEQ ID NO:59) split into S1 and S2. Applying the optimization algorithms above yielded a 594 amino acid cassette sequence having 18 epitope-encoding frames, as shown in Table 3A. Table C presents each of the additional epitopes contained in the cassette (not including the epitopes derived from the Spike protein). Empirically, the optimal frame set F was produced when the size threshold for all frames was set to less than 42% of that frame's overall gene size. The coverage of the designed cassette over four populations is shown in FIG. 5, with the first column providing the number of SARS-CoV-2 epitopes predicted to be presented and the second column providing the expected number of presented epitopes, based on a 0.2 PPV. Each row shows the protection coverage of each population if a certain number of epitopes is used.

[0585] Potential HLA-DRB, HLA-DQ, and HLA-DP MHC class II epitopes from the SARS-CoV-2 proteome were also predicted. The method described for generating candidate CD8/MHC class I epitopes was used to generate peptides with sizes between 9 and 20 amino acids. EDGE model was run for class II to compute EDGE score of each of these peptides against each identifiable allele (see, e.g., U.S. application Ser. No. 16/606,577 and international patent application PCT/US2020/021508, each herein incorporated by reference in their entirety for all purposes). The list of CD4 epitopes with EDGE score greater than 0.001 are presented in Table B, as well as cognate HLA alleles with a predicted EDGE score greater than 0.001, with each cognate pairing ranked as H (EDGE score>0.1), M (EDGE score between 0.01 and 0.1), and L (EDGE score<0.01). HLA-DQ and HLA-DP are referred to by their alpha and beta chains used in the analysis, while HLA-DR is referred to by its beta chain as the alpha chain is generally invariable in the human population, with HLA-DR peptide contact regions particularly invariant.

[0586] The peptides receiving a score of >0.02 contained in the optimized MHC I cassette frames determined above were then identified. The threshold of 0.02 was chosen because the model prediction has the PPV of 0.2 in predicting Mass Spectrometry data with prevalence ratio positive vs negatives of 1:100. FIG. 6A illustrates the number of predicted epitopes presented by each MHC class II allele examined. FIG. 6B shows the population coverage of MHC class II at the diploid level.

[0587] Additional cassettes are designed using the epitope prediction and frame ordering algorithms described above where the initial population coverage criteria P is calculated with all initial epitopes provided by SARS-CoV-2 Membrane (SEQ ID NO:61), SARS-CoV-2 Nucleocapsid (SEQ ID NO:62), SARS-CoV-2 Envelope (SEQ ID NO:63), or combinations (including combinations with SARS-CoV-2 spike) or sequence variants thereof.

TABLE 1
Identified SARS-CoV-2 Mutations (>1%)

| | | Reference | Alternate | Variable |
|---|---|---|---|---|
| Gene | Position | Amino Acid | Amino Acid | Rate |
| orf1ab | 265 | T | I | 0.12474 |
| orf1ab | 378 | V | I | 0.022349 |
| orf1ab | 392 | G | D | 0.015073 |
| orf1ab | 448 | D | deletion | 0.030146 |
| orf1ab | 739 | I | V | 0.011435 |
| orf1ab | 765 | P | S | 0.012474 |
| orf1ab | 876 | A | T | 0.015073 |
| orf1ab | 3353 | K | R | 0.023909 |
| orf1ab | 3606 | L | F | 0.130977 |
| orf1ab | 4715 | P | L | 0.448025 |
| orf1ab | 5828 | P | L | 0.193867 |
| orf1ab | 5865 | Y | C | 0.199584 |
| S | 614 | D | G | 0.439815 |
| ORF3a | 57 | Q | H | 0.150943 |
| ORF3a | 251 | G | V | 0.086003 |
| M | 3 | D | G | 0.013508 |
| M | 175 | T | M | 0.051416 |
| ORF8 | 84 | L | S | 0.267563 |
| N | 203 | R | K | 0.124507 |
| N | 204 | G | R | 0.124068 |

TABLE 2
List of Identifiable Class I alleles

| | | | | | | |
|---|---|---|---|---|---|---|
| HLA-A*01:01 | HLA-A*25:01 | HLA-A*68:01 | HLA-B*15:13 | HLA-B*40:06 | HLA-B*55:02 | HLA-C*07:02 |
| HLA-A*02:01 | HLA-A*26:01 | HLA-A*68:02 | HLA-B*18:01 | HLA-B*41:02 | HLA-B*56:01 | HLA-C*07:04 |
| HLA-A*02:02 | HLA-A*26:02 | HLA-A*74:01 | HLA-B*27:02 | HLA-B*42:01 | HLA-B*57:01 | HLA-C*07:27 |
| HLA-A*02:03 | HLA-A*26:03 | HLA-B*07:02 | HLA-B*27:05 | HLA-B*44:02 | HLA-B*57:03 | HLA-C*08:01 |
| HLA-A*02:04 | HLA-A*29:01 | HLA-B*07:04 | HLA-B*35:01 | HLA-B*44:03 | HLA-B*58:01 | HLA-C*08:02 |
| HLA-A*02:05 | HLA-A*29:02 | HLA-B*07:05 | HLA-B*35:02 | HLA-B*44:05 | HLA-B*58:02 | HLA-C*08:03 |
| HLA-A*02:06 | HLA-A*30:01 | HLA-B*08:01 | HLA-B*35:03 | HLA-B*45:01 | HLA-C*01:02 | HLA-C*12:02 |
| HLA-A*02:07 | HLA-A*30:02 | HLA-B*13:01 | HLA-B*35:08 | HLA-B*46:01 | HLA-C*02:02 | HLA-C*12:03 |
| HLA-A*02:11 | HLA-A*31:01 | HLA-B*13:02 | HLA-B*35:12 | HLA-B*48:01 | HLA-C*03:02 | HLA-C*12:05 |
| HLA-A*03:01 | HLA-A*32:01 | HLA-B*14:01 | HLA-B*37:01 | HLA-B*49:01 | HLA-C*03:03 | HLA-C*14:02 |
| HLA-A*03:02 | HLA-A*33:01 | HLA-B*14:02 | HLA-B*38:01 | HLA-B*50:01 | HLA-C*03:04 | HLA-C*14:03 |
| HLA-A*11:01 | HLA-A*33:03 | HLA-B*15:01 | HLA-B*38:02 | HLA-B*51:01 | HLA-C*04:01 | HLA-C*15:02 |
| HLA-A*11:02 | HLA-A*34:01 | HLA-B*15:02 | HLA-B*39:01 | HLA-B*52:01 | HLA-C*04:03 | HLA-C*15:05 |
| HLA-A*23:01 | HLA-A*34:02 | HLA-B*15:03 | HLA-B*39:06 | HLA-B*53:01 | HLA-C*05:01 | HLA-C*16:01 |
| HLA-A*24:02 | HLA-A*36:01 | HLA-B*15:10 | HLA-B*40:01 | HLA-B*54:01 | HLA-C*06:02 | HLA-C*16:04 |
| HLA-A*24:07 | HLA-A*66:01 | HLA-B*15:11 | HLA-B*40:02 | HLA-B*55:01 | HLA-C*07:01 | HLA-C*17:01 |

TABLE 3A
Cassette Epitope Frames in Conjunction with Spike Protein

| | | | | Amino Acid |
|---|---|---|---|---|
| Frame | Gene | Gene Start | Gene End | Length |
| 1 | M | 172 | 204 | 33 |
| 2 | orf1ab | 4154 | 4178 | 25 |
| 3 | N | 301 | 345 | 45 |
| 4 | N | 151 | 175 | 25 |
| 5 | N | 71 | 95 | 25 |
| 6 | ORF3a | 106 | 130 | 25 |
| 7 | orf1ab | 4419 | 4443 | 25 |
| 8 | N | 259 | 283 | 25 |
| 9 | orf1ab | 5371 | 5395 | 25 |
| 10 | M | 85 | 140 | 56 |
| 11 | N | 352 | 393 | 42 |
| 12 | orf1ab | 2580 | 2604 | 25 |
| 13 | ORF3a | 1 | 47 | 47 |
| 14 | M | 34 | 60 | 27 |
| 15 | ORF3a | 53 | 86 | 34 |
| 16 | orf1ab | 2794 | 2818 | 25 |
| 17 | ORF3a | 199 | 255 | 57 |
| 18 | E | 44 | 71 | 28 |

[0588] XIV.B. SARS-CoV-2 Vaccine Design

[0589] A series of vaccines against SARS-CoV-2 were designed to produce a balanced immune response inducing both neutralizing antibodies (from B cells) as well as effector and memory CD8+ T cell responses for maximum efficacy. In general, neutralizing antibodies to viral surface proteins can serve to prevent viral entry into cells and virus epitope-specific CD8+ T cells kill virally-infected cells. In addition, vaccines against SARS-CoV-2 were designed to maximize the coverage of the vaccine across the world population, i.e., target most individuals (e.g., >95%) receive a large number (e.g., >=30) of candidate CD8+ epitopes across all major ancestry groups while minimizing our cassette sequence footprint.

### Antigens and Cassettes

[0590] Vaccines are constructed encoding the MHC epitope-encoding cassettes designed using the epitope prediction and frame ordering algorithms described above. An exemplary cassette (herein referred to as the Concatenated EDGE predicted SARS-CoV-2 MHC Class I Epitope Cassette or EDGE Predicted Epitopes (EPE)) was generated where the initial population coverage criteria P was calculated with all initial epitopes provided by SARS-CoV-2 Spike, as described above.

[0591] Vaccines are also designed encoding various full-length proteins, either alone or in combination, generally for the purposes of stimulating a B cell response. Full-length proteins include SARS-CoV-2 Spike (SEQ ID NO:59), SARS-CoV-2 Membrane (SEQ ID NO:61), SARS-CoV-2 Nucleocapsid (SEQ ID NO:62), and SARS-CoV-2 Envelope (SEQ ID NO:63), sequences of which are shown in Table 3B.

[0592] With respect to the Spike protein, initial analysis of prevalent SARS-CoV-2 variants (as described above, see Table 1) identified a Spike protein variant present in almost 44% of genomes. Subsequent analysis of the over 8000 SARS-CoV-2 complete genomes identified a dominant variant at position 614 where the wildtype amino acid aspartic (D) is mutated to glycine (G). The mutation, denotated as D614G, is found on 60.05% of genomes sequenced worldwide, and 70.46% and 58.49% of the sequences in Europe and North America, respectively (FIG. 4). Accordingly, Spike proteins are used that contain the prevalent D614G Spike variant, with reference to the reference Spike protein (SEQ ID NO:59). In addition, a modified Spike protein was engineered to bias the Spike protein to remain in a predominantly prefusion state, as the prefusion Spike state may be a better target for antibody-mediated neutralization of the virus. The following mutations were selected: R682V to disrupt the Furin cleavage site; R815N to disrupt cleavage site within S2, and K986P and V987P to interfere with the secondary structure of Spike. Accordingly, “modified” Spike proteins are used that contain one or more of the following mutations, with reference to the reference Spike protein (SEQ ID NO:59): a D614G mutation, a R682V mutation, a R815N mutation, a K986P mutation, or a V987P mutation. For reference, a modified Spike proving having all of the Spike mutations is shown in SEQ ID NO:60.

[0593] Various vaccine designs and their respective cassette nucleotide sequences are presented in more detail in Table 4. For SAM based vaccines, promoter and/or poly(A) signal sequences can be removed given cassettes are generally operably linked to the endogenous 26S promoter and poly(A) sequence provided by the vector backbone. Depending on the cassette features and configuration, translated proteins (e.g., those in Table 3B) may also include an additional sequence(s) related to the particular expression strategy, such as a 2A ribosome skipping sequence elements (or fragments thereof following translation) and additional 26S promoter sequences.

TABLE 3B
SARS-COV-2 Proteins

| | | SEQ ID |
|---|---|---|
| Peptide | Amino Acid Sequence | NO: |
| Concatenated | TSRTLSYYKLGASQRVAGDSGFAAYSRYRIGNYCAAGTTQTACTDDN | 57 |
| EDGE predicted | ALAYYNTTKGGWPQIAQFAPSASAFFGMSRIGMEVTPSGTWLTYTGA | |
| SARS-COV-2 | IKLDDKDPNPANNAAIVLQLPQGTTLPKGFYAEGGVPINTNSSPDDQI | |
| MHC Class I | GYYRRATRRIRLYLYALVYFLQSINFVRIIMRLWLCSTDVVYRAFDIY | |
| Epitope Cassette | NDKVAGFAKFLKTRQKRTATKAYNVTQAFGRRGPEQTQPYVCNAPG | |
| | CDVTDVTQLYLGGMSYYACLVGLMWLSYFIASFRLFARTRSMWSFN | |
| | PETNILLNVPLHGTILTRPLLESELVILLNKHIDAYKTFPPTEPKKDKKK | |
| | KADETQALPQRQKKQQTVTVGDSAEVAVKMFDAYVNTFSSTFNVM | |
| | DLFMRIFTIGTVTLKQGEIKDATPSDFVRATATIPIQASLPFGWLILLQF | |
| | AYANRNRFLYIIKLIFLWLLWPVLAVFQSASKIITLKKRWQLALSKGV | |
| | HFVCNLLLLHVMSKHTDFSSEIIGYKAIDGGVTRDCVVLHSYFTSDYY | |
| | QLYSTQLSTDTGVEHVTFFIYNKIVDEPEEHVQIHTIDGSSGVCNIVNV | |
| | SLVKPSFYVYSRVKNLNSSRVP | |
| Concatenated | MAGTSRTLSYYKLGASQRVAGDSGFAAYSRYRIGNYCAAGTTQTAC | 58 |
| EDGE predicted | TDDNALAYYNTTKGGWPQIAQFAPSASAFFGMSRIGMEVTPSGTWLT | |
| SARS-COV-2 | YTGAIKLDDKDPNPANNAAIVLQLPQGTTLPKGFYAEGGVPINTNSSP | |
| MHC Class I | DDQIGYYRRATRRIRLYLYALVYFLQSINFVRIIMRLWLCSTDVVYRA | |
| Epitope Cassette | FDIYNDKVAGFAKFLKTRQKRTATKAYNVTQAFGRRGPEQTQPYVC | |
| with N-term | NAPGCDVTDVTQLYLGGMSYYACLVGLMWLSYFIASFRLFARTRSM | |
| leader (bold) and | WSFNPETNILLNVPLHGTILTRPLLESELVILLNKHIDAYKTFPPTEPKK | |
| C-term | DKKKKADETQALPQRQKKQQTVTVGDSAEVAVKMFDAYVNTFSSTF | |
| Universal MHC | NVMDLFMRIFTIGTVTLKQGEIKDATPSDFVRATATIPIQASLPFGWLI | |
| Class II with | LLQFAYANRNRFLYIIKLIFLWLLWPVLAVFQSASKIITLKKRWQLALS | |
| GPGPG linkers | KGVHFVCNLLLLHVMSKHTDFSSEIIGYKAIDGGVTRDCVVLHSYFTS | |
| (SEQ ID NO: | DYYQLYSTQLSTDTGVEHVTFFIYNKIVDEPEEHVQIHTIDGSSGVCNI | |
| 56) (bold italic) | VNVSLVKPSFYVYSRVKNLNSSRVP [symbol] | |
| | [symbol] | |
| SARS-COV-2 | MFVFLVLLPLVSSQCVNLTTRTQLPPAYTNSFTRGVYYPDKVFRSSVL | 59 |
| Spike | HSTQDLFLPFFSNVTWFHAIHVSGTNGTKRFDNPVLPFNDGVYFASTE | |
| | KSNIIRGWIFGTTLDSKTQSLLIVNNATNVVIKVCEFQFCNDPFLGVYY | |
| | HKNNKSWMESEFRVYSSANNCTFEYVSQPFLMDLEGKQGNFKNLRE | |
| | FVFKNIDGYFKIYSKHTPINLVRDLPQGFSALEPLVDLPIGINITRFQTLL | |
| | ALHRSYLTPGDSSSGWTAGAAAYYVGYLQPRTFLLKYNENGTITDAV | |
| | DCALDPLSETKCTLKSFTVEKGIYQTSNFRVQPTESIVRFPNITNLCPFG | |
| | EVFNATRFASVYAWNRKRISNCVADYSVLYNSASFSTFKCYGVSPTK | |
| | LNDLCFTNVYADSFVIRGDEVRQIAPGQTGKIADYNYKLPDDFTGCVI | |
| | AWNSNNLDSKVGGNYNYLYRLFRKSNLKPFERDISTEIYQAGSTPCN | |
| | GVEGFNCYFPLQSYGFQPTNGVGYQPYRVVVLSFELLHAPATVCGPK | |
| | KSTNLVKNKCVNFNFNGLTGTGVLTESNKKFLPFQQFGRDIADTTDA | |
| | VRDPQTLEILDITPCSFGGVSVITPGTNTSNQVAVLYQDVNCTEVPVAI | |
| | HADQLTPTWRVYSTGSNVFQTRAGCLIGAEHVNNSYECDIPIGAGICA | |
| | SYQTQTNSPRRARSVASQSIIAYTMSLGAENSVAYSNNSIAIPTNFTISV | |
| | TTEILPVSMTKTSVDCTMYICGDSTECSNLLLQYGSFCTQLNRALTGIA | |
| | VEQDKNTQEVFAQVKQIYKTPPIKDFGGFNFSQILPDPSKPSKRSFIED | |
| | LLFNKVTLADAGFIKQYGDCLGDIAARDLICAQKFNGLTVLPPLLTDE | |
| | MIAQYTSALLAGTITSGWTFGAGAALQIPFAMQMAYRENGIGVTQNV | |
| | LYENQKLIANQFNSAIGKIQDSLSSTASALGKLQDVVNQNAQALNTL | |
| | VKQLSSNFGAISSVLNDILSRLDKVEAEVQIDRLITGRLQSLQTYVTQQ | |
| | LIRAAEIRASANLAATKMSECVLGQSKRVDFCGKGYHLMSFPQSAPH | |
| | GVVFLHVTYVPAQEKNFTTAPAICHDGKAHFPREGVFVSNGTHWFVT | |
| | QRNFYEPQIITTDNTFVSGNCDVVIGIVNNTVYDPLQPELDSFKEELDK | |
| | YFKNHTSPDVDLGDISGINASVVNIQKEIDRLNEVAKNLNESLIDLQEL | |
| | GKYEQYIKWPWYIWLGFIAGLIAIVMVTIMLCCMTSCCSCLKGCCSC | |
| | GSCCKFDEDDSEPVLKGVKLHYT | |
| SARS-COV-2 | MFLVLLPLVSSQCVNLTTRTQLPPAYTNSFTRGVYYPDKVFRSSVL | 60 |
| Modified Spike | HSTQDLFLPFFSNVTWFHAIHVSGTNGTKRFDNPVLPFNDGVYFASTE | |
| (Potential | KSNIIRGWIFGTTLDSKTQSLLIVNNATNVVIKVCEFQFCNDPFLGVYY | |
| mutations in | HKNNKSWMESEFRVYSSANNCTFEYVSQPFLMDLEGKQGNFKNLRE | |
| Bold italic | FVFKNIDGYFKIYSKHTPINLVRDLPQGFSALEPLVDLPIGINITRFQTLL | |
| lowercase. | ALHRSYLTPGDSSSGWTAGAAAYYVGYLQPRTFLLKYNENGTITDAV | |
| modifications | DCALDPLSETKCTLKSFTVEKGIYQTSNFRVQPTESIVRFPNITNLCPFG | |
| may be in | EVFNATRFASVYAWNRKRISNCVADYSVLYNSASFSTFKCYGVSPTK | |
| separate or | LNDLCFTNVYADSFVIRGDEVRQIAPGQTGKIADYNYKLPDDFTGCVI | |
| combined | AWNSNNLDSKVGGNYNYLYRLFRKSNLKPFERDISTEIYQAGSTPCN | |
| constructs) | GVEGFNCYFPLQSYGFQPTNGVGYQPYRVVVLSFELLHAPATVCGPK | |
| | KSTNLVKNKCVNFNFNGLTGTGVLTESNKKFLPFQQFGRDIADTTDA | |
| | VRDPQTLEILDITPCSFGGVSVITPGTNTSNQVAVLYQ [symbol] VNCTEVPVAI | |
| | HADQLTPTWRVYSTGSNVFQTRAGCLIGAEHVNNSYECDIPIGAGICA | |
| | SYQTQTNSPvRARSVASQSIIAYTMSLGAENSVAYSNNSIAIPTNFTISV | |
| | TTEILPVSMTKTSVDCTMYICGDSTECSNLLLQYGSFCTQLNRALTGIA | |
| | VEQDKNTQEVFAQVKQIYKTPPIKDFGGFNFSQILPDPSKPSK [symbol] SFIEDL | |
| | LFNKVTLADAGFIKQYGDCLGDIAARDLICAQKFNGLTVLPPLLTDEM | |
| | IAQYTSALLAGTITSGWTFGAGAALQIPFAMQMAYRENGIGVTQNVL | |
| | YENQKLIANQFNSAIGKIQDSLSSTASALGKLQDVVNQNAQALNTLV | |
| | KQLSSNFGAISSVLNDILSRLD [symbol] EAEVQIDRLITGRLQSLQTYVTQQLI | |
| | RAAEIRASANLAATKMSECVLGQSKRVDFCGKGYHLMSFPQSAPHG | |
| | VVFLHVTYVPAQEKNFTTAPAICHDGKAHFPREGVFVSNGTHWFVTQ | |
| | RNFYEPQUITTDNTFVSGNCDVVIGIVNNTVYDPLQPELDSFKEELDKY | |
| | FKNHTSPDVDLGDISGINASVVNIQKEIDRLNEVAKNLNESLIDLQELG | |
| | KYEQYIKWPWYIWLGFIAGLIAIVMVTIMLCCMTSCCSCLKGCCSCGS | |
| | CCKFDEDDSEPVLKGVKLHYT | |
| SARS-COV-2 | MADSNGTITVEELKKLLEQWNLVIGFLFLTWICLLQFAYANRNRFLYI | 61 |
| Membrane | IKLIFLWLLWPVTLACFVLAAVYRINWITGGIAIAMACLVGLMWLSYF | |
| | IASFRLFARTRSMWSFNPETNILLNVPLHGTILTRPLLESELVIGAVILR | |
| | GHLRIAGHHLGRCDIKDLPKEITVATSRTLSYYKLGASQRVAGDSGFA | |
| | AYSRYRIGNYKLNTDHSSSSDNIALLVQ | |
| SARS-COV-2 | MSDNGPQNQRNAPRITFGGPSDSTGSNQNGERSGARSKQRRPQGLPN | 62 |
| Nucleocapsid | NTASWFTALTQHGKEDLKFPRGQGVPINTNSSPDDQIGYYRRATRRIR | |
| | GGDGKMKDLSPRWYFYYLGTGPEAGLPYGANKDGIIWVATEGALNT | |
| | PKDHIGTRNPANNAAIVLQLPQGTTLPKGFYAEGSRGGSQASSRSSSR | |
| | SRNSSRNSTPGSSRGTSPARMAGNGGDAALALLLLDRLNQLESKMSG | |
| | KGQQQQGQTVTKKSAAEASKKPRQKRTATKAYNVTQAFGRRGPEQT | |
| | QGNFGDQELIRQGTDYKHWPQIAQFAPSASAFFGMSRIGMEVTPSGT | |
| | WLTYTGAIKLDDKDPNFKDQVILLNKHIDAYKTFPPTEPKKDKKKKA | |
| | DETQALPQRQKKQQTVTLLPAADLDDFSKQLQQSMSSADSTQA | |
| SARS-COV-2 | MYSFVSEETGTLIVNSVLLFLAFVVFLLVTLAILTALRLCAYCCNIVNV | 63 |
| Envelope | SLVKPSFYVYSRVKNLNSSRVPDLLV | |

TABLE 4
SARS-CoV-2 Vaccine Designs

| Vector Insert | SEQ ID NO: |
|---|---|
| EDGE Predicted Epitopes (EPE): Concatenated EDGE | 64 |
| predicted SARS-CoV-2 MHC Class I Epitope Cassette | |
| with 5′ expression leader (bold) and 3′ | |
| Universal MHC Class II with GPGPG linkers (SEQ ID | |
| NO: 56) (bold italic) | |
| CMV-EPE-BGH | 65 |
| CMV-Spike (IDT)-T2A-membrane protein-SV40 | 66 |
| CMV-Spike (IDT)-T2A-membrane protein-BGH | 67 |
| CMV-Spike (IDT)-SV40-CMV-EPE-BGH | 68 |
| CMV-Spike (IDT)-SV40 | 69 |
| CMV-Modified Spike (IDT)-SV40 | 70 |
| CMV-Spike (IDT)-T2A-Envelope-SV40-CMV- | 71 |
| nucleocapsid-T2A-membrane protein-SV40 | |
| CMV-Spike (IDT)-SV40 -CMV-nucleocapsid-T2A- | 72 |
| membrane protein-BGH | |
| CMV-Spike (IDT)-T2A-envelope protein-T2A- | 73 |
| membrane protein-SV40 | |
| CMV-Spike (IDT)-T2A-envelope protein-T2A- | 74 |
| membrane protein-SV40-CMV-EPE-BGH | |

### SAM Vectors

[0594] A RNA alphavirus backbone for the antigen expression system was generated from a self-replicating Venezuelan Equine Encephalitis (VEE) virus (Kinney, 1986, Virology 152: 400-413) by deleting the structural proteins of VEE located 3′ of the 26S sub-genomic promoter (VEE sequences 7544 to 11,175 deleted; numbering based on Kinney et al 1986; SEQ ID NO:6). To generate the self-amplifying mRNA (“SAM”) vector, the deleted sequences are replaced by antigen sequences. A representative SAM vector containing 20 model antigens is “VEE-MAG25mer” (SEQ ID NO:4). The vectors featuring the antigen cassettes described having the MAG25mer cassette can be replaced by the SARS-CoV-2 cassettes and/or full-length proteins described herein.

### In Vitro Transcription to Generate SAM

[0595] For in vivo studies: SAM vectors were generated as “AU-SAM” vectors. A modified T7 RNA polymerase promoter (TAATACGACTCACTATA; SEQ ID NO: 120), which lacks the canonical 3′ dinucleotide GG, was added to the 5′ end of the SAM vector to generate the in vitro transcription template DNA (SEQ ID NO:77; 7544 to 11,175 deleted without an inserted antigen cassette). Reaction conditions are described below:
[0596] 1× transcription buffer (40 mM Tris-HCL [pH7.9], 10 mM dithiothreitol, 2 mM spermidine, 0.002% Triton X-100, and 27 mM magnesium chloride) using final concentrations of 1× T7 RNA polymerase mix (E2040S); 0.025 mg/mL DNA transcription template (linearized by restriction digest); 8 mM CleanCap Reagent AU (Cat. No. N-7114) and 10 mM each of ATP, cytidine triphosphate (CTP), GTP, and uridine triphosphate (UTP)
[0597] Transcription reactions were incubated at 37° C. for 2 hr and treated with final 2 U DNase I (AM2239)/0.001 mg DNA transcription template in DNase I buffer for 1 hr at 37° C.
[0598] SAM was purified by RNeasy Maxi (QIAGEN, 75162)

[0599] Alternatively to co-transcriptional addition of a 5′ cap structure, a 7-methylguanosine or a related 5′ cap structure can be enzymatically added following transcription using a vaccinia capping system (NEB Cat. No. M2080) containing mRNA 2′-O-methyltransferase and S-Adenosyl methionine.

### Adenoviral Vectors

[0600] A modified ChAdV68 vector (“chAd68-Empty-E4deleted” SEQ ID NO:75) for the antigen expression system was generated based on AC_000011.1 with E1 (nt 577 to 3403), E3 (nt 27,125-31,825), and E4 region (nt 34,916 to 35,642) sequences deleted and the corresponding ATCC VR-594 (Independently sequenced Full-Length VR-594 C68 SEQ ID NO:10) nucleotides substituted at five positions. The full-length ChAdV68 AC_000011.1 sequence with corresponding ATCC VR-594 nucleotides substituted at five positions is referred to as “ChAdV68.5WTnt” (SEQ ID NO:1). Antigen cassettes under the control of the CMV promoter/enhancer are inserted in place of deleted E1 sequences.

### Adenoviral Production in 293F Cells

[0601] ChAdV68 virus production are performed in 293F cells grown in 293 FreeStyle™ (ThermoFisher) media in an incubator at 8% CO₂. On the day of infection cells are diluted to 10⁶ cells per mL, with 98% viability and 400 mL are used per production run in 1 L Shake flasks (Corning). 4 mL of the tertiary viral stock with a target MOI of >3.3 is used per infection. The cells are incubated for 48-72 h until the viability was <70% as measured by Trypan blue. The infected cells are then harvested by centrifugation, full speed bench top centrifuge and washed in 1×PBS, re-centrifuged and then re-suspended in 20 mL of 10 mM Tris pH7.4. The cell pellet is lysed by freeze thawing 3× and clarified by centrifugation at 4,300×g for 5 minutes.

### Adenoviral Purification by CsCl Centrifugation

[0602] Viral DNA is purified by CsCl centrifugation. Two discontinuous gradient runs are performed. The first to purify virus from cellular components and the second to further refine separation from cellular components and separate defective from infectious particles.

[0603] 10 mL of 1.2 (26.8g CsCl dissolved in 92 mL of 10 mM Tris pH 8.0) CsCl is added to polyallomer tubes. Then 8 mL of 1.4 CsCl (53g CsCl dissolved in 87 mL of 10 mM Tris pH 8.0) is carefully added using a pipette delivering to the bottom of the tube. The clarified virus is carefully layered on top of the 1.2 layer. If needed more 10 mM Tris is added to balance the tubes. The tubes are then placed in a SW-32Ti rotor and centrifuged for 2h 30 min at 10° C. The tube are then removed to a laminar flow cabinet and the virus band pulled using an 18 gauge needle and a 10 mL syringe. Care is taken not to remove contaminating host cell DNA and protein. The band is then diluted at least 2× with 10 mM Tris pH 8.0 and layered as before on a discontinuous gradient as described above. The run is performed as described before except that this time the run is performed overnight. The next day the band is pulled with care to avoid pulling any of the defective particle band. The virus is then dialyzed using a Slide-a-Lyzer™ Cassette (Pierce) against ARM buffer (20 mM Tris pH 8.0, 25 mM NaCl, 2.5% Glycerol). This is performed 3×, 1 h per buffer exchange. The virus is then aliquoted for storage at −80° C.

### Adenoviral Viral Assays

[0604] VP concentration is performed by using an OD 260 assay based on the extinction coefficient of 1.1×10¹² viral particles (VP) is equivalent to an Absorbance value of 1 at OD260 nm. Two dilutions (1:5 and 1:10) of adenovirus are made in a viral lysis buffer (0.1% SDS, 10 mM Tris pH 7.4, 1 mM EDTA). OD is measured in duplicate at both dilutions and the VP concentration/mL is measured by multiplying the OD260 value X dilution factor X 1.1×10¹²VP.

[0605] An infectious unit (IU) titer is calculated by a limiting dilution assay of the viral stock. The virus is initially diluted 100× in DMEM/5% NS/1×PS and then subsequently diluted using 10-fold dilutions down to 1×10⁻⁷. 100 μL of these dilutions are then added to 293A cells that were seeded at least an hour before at 3e5 cells/well of a 24 well plate. This is performed in duplicate. Plates are incubated for 48h in a CO2 (5%) incubator at 37° C. The cells are then washed with 1×PBS and are then fixed with 100% cold methanol (−20° C.). The plates are then incubated at −20° C. for a minimum of 20 minutes. The wells are washed with 1×PBS then blocked in 1×PBS/0.1% BSA for 1 h at room temperature. A rabbit anti-Ad antibody (Abcam, Cambridge, MA) is added at 1:8,000 dilution in blocking buffer (0.25 ml per well) and incubated for 1 h at room temperature. The wells are washed 4× with 0.5 mL PBS per well. A HRP conjugated Goat anti-Rabbit antibody (Bethyl Labs, Montgomery Texas) diluted 1000× is added per well and incubated for 1h prior to a final round of washing. 5 PBS washes are performed and the plates were developed using DAB (Diaminobenzidine tetrahydrochloride) substrate in Tris buffered saline (0.67 mg/mL DAB in 50 mM Tris pH 7.5, 150 mM NaCl) with 0.01% H₂O₂. Wells are developed for 5 min prior to counting. Cells are counted under a 10× objective using a dilution that gave between 4-40 stained cells per field of view. The field of view that is used was a 0.32 mm² grid of which there are equivalent to 625 per field of view on a 24 well plate. The number of infectious viruses/mL can be determined by the number of stained cells per grid multiplied by the number of grids per field of view multiplied by a dilution factor 10. Similarly, when working with GFP expressing cells florescent can be used rather than capsid staining to determine the number of GFP expressing virions per mL.

[0606] XIV.C. Vaccine Efficacy Evaluation in Mice using ChAdV68 Vectors

[0607] Efficacy of vaccines containing cassettes encoding SARS-CoV-2 Spike was evaluated for a high and low dose. Efficacy was assessed through monitoring T cell responses.

### Immunizations

[0608] For ChAdV68 vaccines in Balb/c mice, 5×10⁸ or 1×10¹⁰ viral particles (VP) in 100 uL volume were administered as a bilateral intramuscular injection (50 uL per leg).

### Splenocyte Dissociation

[0609] Splenocytes were isolated 14 days post-immunization. Spleens for each mouse were pooled in 3 mL of complete RPMI (RPMI, 10% FBS, penicillin/streptomycin). Mechanical dissociation was performed using the gentleMACS Dissociator (Miltenyi Biotec), following manufacturer's protocol. Dissociated cells were filtered through a 40 micron filter and red blood cells were lysed with ACK lysis buffer (150 mM NH₄Cl, 10 mM KHCO₃, 0.1 mM Na₂EDTA). Cells were filtered again through a 30 micron filter and then resuspended in complete RPMI. Cells were counted on the Cytoflex LX (Beckman Coulter) using propidium iodide staining to exclude dead and apoptotic cells. Cell were then adjusted to the appropriate concentration of live cells for subsequent analysis.

### Ex Vivo Enzyme-Linked Immunospot (ELISpot) Analysis

[0610] ELISPOT analysis was performed according to ELISPOT harmonization guidelines {DOI: 10.1038/nprot.2015.068} with the mouse IFNg ELISpotPLUS kit (MABTECH). 5×10⁴ splenocytes were stimulated ex vivo with 10 uM of overlapping peptide pools (15 aa long, 11 aa overlap) spanning the Spike antigen for 16 hours in 96-well IFNg antibody coated plates. Spots were developed using alkaline phosphatase. The reaction was timed for 10 minutes and was terminated by running plate under tap water. Spots were counted using an AID vSpot Reader Spectrum. For ELISPOT analysis, wells with saturation>50% were recorded as “too numerous to count”. Samples with deviation of replicate wells>10% were excluded from analysis. Spot counts were then corrected for well confluency using the formula: spot count+2×(spot count×% confluence/[100%−% confluence]). Negative background was corrected by subtraction of spot counts in the negative peptide stimulation wells from the antigen stimulated wells. Finally, wells labeled too numerous to count were set to the highest observed corrected value, rounded up to the nearest hundred.

### Results

[0611] Mice were immunized with modified ChAdV68 vector (vector backbone based on chAd68-Empty-E4deleted” SEQ ID NO:75) containing a cassette encoding the SARS-CoV-2 Spike protein (“CMV-Spike-SV40” SEQ ID NO:69; Spike protein sequence-optimized using IDT algorithm; nb, the initial experimental cassette contained a single D1153G missense mutation) Efficacy was assessed by IFNγ ELISpot for T cell responses to two peptide pools spanning the Spike protein. As shown in FIG. 8A, compared to splenocytes from naïve mice, immunization with the Spike encoding ChAdV68 vector demonstrated a dose-dependent increased T cell response to Spike peptides (left panel—SFCs per 10⁶ splenocytes for each separate peptide pool; right panel—SFCs per 10⁶ splenocytes for summed response across both peptide pools).

[0612] XIV.D. Vaccine Efficacy Evaluation in Mice using SAM Vectors

[0613] Efficacy of vaccines containing cassettes encoding SARS-CoV-2 MHC epitope-encoding cassettes and/or full-length SARS-CoV-2 proteins (e.g., see Table 4) was evaluated. Efficacy was assessed through monitoring T cell and/or B cell responses.

### Immunizations

[0614] For SAM vaccines, 1 or 10 ug of RNA-LNP complexes in 100 uL volume were administered as a bilateral intramuscular injection (50 uL per leg).

[0615] Study arms are described in Table 5A below.

TABLE 5A
Murine SARS-CoV-2 Study Arms for SAM Evaluation

| | Strain and Number | | Treatment | |
|---|---|---|---|---|
| SAM Vectors | of Animals | Dose | Schedule | Immune Readouts |
| SAM-Spike | BALB/c | 1 ug | Day 0 | Sera at day 0, 14, 28, 41, |
| SAM-Spike-Membrane | N = 10/group | and | | 56, 70: anti-Spike and |
| SAM-Spike-T cell epitopes | 5 male, 5 female | 10 ug | | anti-Membrane IgG |
| | | | | (ELISA) and Spike nAb |
| SAM-Spike | | | | Spleen harvest at day 12- |
| SAM-Spike-Membrane | | | | 14: T-cell response by |
| SAM-Spike-T cell epitopes | | | | ELISpot and ICS with |
| | | | | OLP to Spike and |
| | | | | Membrane |
| SAM-Spike-T cell epitopes | HLA-A2/A11 | 10 ug | Day 0 | Spleen harvest at day 12- |
| SAM- T cell epitopes | transgenic mice | | | 14: T-cell response by |
| | N = 6/group | | | ELISpot and ICS with |
| | | | | OLP to Spike and T cell |
| | | | | epitopes |

### Splenocyte Dissociation

[0616] Splenocytes were isolated 2 weeks and 10 weeks post-immunization. Spleens for each mouse are pooled in 3 mL of complete RPMI (RPMI, 10% FBS, penicillin/streptomycin). Mechanical dissociation was performed using the gentleMACS Dissociator (Miltenyi Biotec), following manufacturer's protocol. Dissociated cells were filtered through a 40 micron filter and red blood cells were lysed with ACK lysis buffer (150 mM NH₄Cl, 10 mM KHCO₃, 0.1 mM Na₂EDTA). Cells were filtered again through a 30 micron filter and then resuspended in complete RPMI. Cells were counted on the Cytoflex LX (Beckman Coulter) using propidium iodide staining to exclude dead and apoptotic cells. Cells were then adjusted to the appropriate concentration of live cells for subsequent analysis.

### Ex Vivo Enzyme-Linked Immunospot (ELISpot) Analysis

[0617] ELISPOT analysis was performed according to ELISPOT harmonization guidelines {DOI: 10.1038/nprot.2015.068} with the mouse IFNg ELISpotPLUS kit (MABTECH). 5×10⁴ splenocytes were incubated with 10 uM of overlapping peptide pools (“OLP”; 15mers, 11aa overlap) spanning the entire antigen of interest for 16 hours in 96-well IFNg antibody coated plates. Spots were developed using alkaline phosphatase. The reaction was timed for 10 minutes and was terminated by running plate under tap water. Spots were counted using an AID vSpot Reader Spectrum. For ELISPOT analysis, wells with saturation>50% are recorded as “too numerous to count”. Samples with deviation of replicate wells>10% were excluded from analysis. Spot counts were then corrected for well confluency using the formula: spot count+2×(spot count×% confluence/[100%−% confluence]). Negative background was corrected by subtraction of spot counts in the negative peptide stimulation wells from the antigen stimulated wells. Finally, wells labeled too numerous to count were set to the highest observed corrected value, rounded up to the nearest hundred.

### Ex Vivo Intracellular Cytokine Staining (ICS) and Flow Cytometry Analysis

[0618] Freshly isolated lymphocytes at a density of 2-5×10⁶ cells/mL were incubated with 10 uM of overlapping peptide pools (15mers, 11aa overlap) spanning the entire antigen of interest for 2 hours. After two hours, brefeldin A was added to a concentration of 5 ug/ml and cells were incubated with stimulant for an additional 4 hours. Following stimulation, viable cells were labeled with fixable viability dye eFluor780 according to manufacturer's protocol and stained with anti-CD8 APC (clone 53-6.7, BioLegend) at 1:400 dilution. Anti-IFNg PE (clone XMG1.2, BioLegend) was used at 1:100 for intracellular staining. Cells were also stained for CD4, TNFα, IL-2, IL-4, IL-10, and Granzyme-B. Samples were collected on an Cytoflex LX (Beckman Coulter). Flow cytometry data was plotted and analyzed using FlowJo. To assess degree of antigen-specific response, the percent of stained cells was calculated in response to each peptide pool.

### Antibody Titers

[0619] For antibody response monitoring, blood was collected every two weeks. Antibody titers in the sera were determined as described in J. Yu et al. (Science 10.1126/science. Abc6284 (2020), herein incorporated by reference for all purposes.

### Results

[0620] Mice were immunized with SAM vectors containing a cassette encoding the SARS-CoV-2 Spike protein (SEQ ID NO:59, IDT optimized sequence), Membrane protein (SEQ ID NO:61), and/or a SARS-CoV-2 MHC epitope-encoding cassette (SEQ ID NO:58). Efficacy was assessed by IFNγ ELISpot for T cell responses to two peptide pools spanning the Spike protein. As shown in FIG. 8B and FIG. 8C (quantified in Table 7), compared to splenocytes from naïve mice, immunization with the Spike encoding SAM vector demonstrated a dose-dependent increased T cell response to Spike peptides (FIG. 8A—SFCs per 10⁶ splenocytes for each separate peptide pool; FIG. 8B—SFCs per 10⁶ splenocytes for combined response across both peptide pools). In addition, as demonstrated in Table 8 below, immunization with SAM-Spike demonstrated an increase in antibody titers, and specifically neutralizing antibody (“Nab”). Notably, Nab titers were comparable in magnitude to Nab titers in a cohort of 27 covalescent humans (median titer 93) who had recovered from SARS-CoV-2 [J. Yu et al. (Science 10.1126/science. Abc6284 (2020)]. Thus, the results indicate vaccination with SAM vectors encoding SARS-CoV-2 derived antigens, and in particular SARS-CoV-2 Spike, demonstrated a T cell and B cell immune response.

TABLE 7
Cellular immune responses in SAM vaccinated mice

| | | | | Mean SFCs | |
|---|---|---|---|---|---|
| SAM-SARS- | Mouse | Dose | | per 1 × 10⁶ | |
| CoV-2 Vaccine | strain | (ug) | OLP | Splenocytes | SD |
| SAM-Spike | BALB/c | 10 | Spike | 8560 | 1195 |
| SAM-Spike | BALB/c | 1 | Spike | 7734 | 2079 |
| SAM-Spike | BALB/c | 10 | Spike | 25033 | 8722 |
| SAM-Spike | BALB/c | 1 | Spike | 8605 | 1861 |
| SAM-Spike- | BALB/c | 10 | Spike | 19741 | 5141 |
| Membrane | | | | | |
| SAM-Spike- | BALB/c | 1 | Spike | 8212 | 2093 |
| Membrane | | | | | |
| SAM-Spike- | BALB/c | 10 | Membrane | 93 | 42 |
| Membrane | | | | | |
| SAM-Spike- | BALB/c | 1 | Membrane | 129 | 56 |
| Membrane | | | | | |
| SAM-Spike | BALB/c | 10 | Spike | 9798 | 5434 |
| SAM-Spike | BALB/c | 1 | Spike | 3578 | 1881 |
| SAM-Spike-T | BALB/c | 10 | Spike | 3484 | 1849 |
| cell epitopes | | | | | |
| SAM-Spike-T | BALB/c | 1 | Spike | 1529 | 466 |
| cell epitopes | | | | | |
| SAM-Spike-T | HLA-A2 | 10 | Spike | 8273 | 2351 |
| cell epitopes | | | | | |
| SAM-Spike-T | HLA-A11 | 10 | Spike | 7175 | 734 |
| cell epitopes | | | | | |
| SAM-Spike-T | HLA-A2 | 10 | T cell | 2717 | 443 |
| cell epitopes | | | epitopes | | |
| SAM-Spike-T | HLA-A11 | 10 | T cell | 2621 | 664 |
| cell epitopes | | | epitopes | | |
| SAM-T cell | HLA-A2 | 10 | T cell | 1474 | 836 |
| epitopes | | | epitopes | | |
| SAM-T cell | HLA-A11 | 10 | T cell | 748 | 371 |
| epitopes | | | epitopes | | |

TABLE 8
Humoral immune responses in SAM vaccinated mice

| SAM-SARS- | | | Sera | | Median |
|---|---|---|---|---|---|
| CoV-2 | Mouse | Dose | collection | Median end | pseudovirus |
| Vaccine | strain | (ug) | time (week) | point titer | Nab titer |
| SAM-Spike | BALB/c | 10 | 4 | 26380 | 96.5 |
| SAM-Spike | BALB/c | 10 | 6 | 22953 | 129 |
| SAM-Spike- | BALB/c | 10 | 4 | 6849 | 43 |
| Membrane | | | | | |
| SAM-T cell | BALB/c | 10 | 4 | 2555 | 26 |
| epitopes | | | | | |

[0621] XIV.E.1 Vaccine Efficacy Evaluation in Mice PP31T

[0622] Efficacy of vaccines containing cassettes encoding SARS-CoV-2 MHC epitope-encoding cassettes and/or full-length SARS-CoV-2 proteins (e.g., see Table 4) is evaluated. Efficacy is assessed through monitoring T cell and/or B cell responses.

### Immunizations

[0623] For SAM vaccines in Balb/c mice, 1 or 10 ug of RNA-LNP complexes in 100 uL volume, bilateral intramuscular injection (50 uL per leg).

[0624] For ChAdV68 vaccines in Balb/c mice, 5×10⁸ or 1×10¹⁰ viral particles (VP) in 100 uL volume is administered as a bilateral intramuscular injection (50 uL per leg).

[0625] Mice receive an initial priming dose and a subsequent boosting dose at week 6. Mice are immunized either with a homologous SAM vaccination strategy, a homologous ChAdV68 vaccination strategy, or a heterologous ChAdV68/SAM vaccination strategy (ChAdV68 prime; SAM boost).

[0626] Representative study arms are described in Table 5B below.

TABLE 5B
Murine SARS-CoV-2 Study Arms

| | Strain and Number | | Treatment | |
|---|---|---|---|---|
| Vector | of Animals | Dose | Schedule | Immune Readouts |
| ChAd-Spike | Balb/C | 1 × 10¹⁰ vp | Day 0 | Sera at day 0, 14, 28: |
| ChAd-Spike-Membrane | N = 10/group | and | | anti-Spike and anti- |
| ChAd-Spike-T cell epitopes | 5 male, 5 female | 5 × 10⁸ vp | | Membrane IgG (ELISA) |
| | | | | and Spike nAb |
| ChAd-Spike | | | | Spleen harvest at day 12: |
| ChAd-Spike-Membrane | | | | T-cell response by |
| ChAd-Spike-T cell epitopes | | | | ELISpot and ICS with |
| | | | | OLP to Spike and |
| | | | | Membrane |
| ChAd-Spike-Membrane | Aged Balb/c | 1 × 10¹⁰ vp | Day 0 | Sera at day 0 and 14: |
| ChAd-Spike-T cell epitopes | (12 to 14 months) | | | anti-Spike and anti- |
| | N = 10/group | | | Membrane IgG (ELISA) |
| | 5 male, 5 female | | | and Spike nAb |
| ChAd-Spike-Membrane | | | | Spleen harvest at day 12: |
| ChAd-Spike-T cell epitopes | | | | T-cell response by |
| | | | | ELISpot and ICS with |
| | | | | OLP to Spike and |
| | | | | Membrane |

### Splenocyte Dissociation

[0627] Splenocytes are isolated 2 weeks and 8 weeks post-immunization. Spleens for each mouse are pooled in 3 mL of complete RPMI (RPMI, 10% FBS, penicillin/streptomycin). Mechanical dissociation is performed using the gentleMACS Dissociator (Miltenyi Biotec), following manufacturer's protocol. Dissociated cells are filtered through a 40 micron filter and red blood cells are lysed with ACK lysis buffer (150 mM NH₄Cl, 10 mM KHCO₃, 0.1 mM Na₂EDTA). Cells are filtered again through a 30 micron filter and then resuspended in complete RPMI. Cells are counted on the Cytoflex LX (Beckman Coulter) using propidium iodide staining to exclude dead and apoptotic cells. Cell are then adjusted to the appropriate concentration of live cells for subsequent analysis.

### Ex Vivo Enzyme-Linked Immunospot (ELISpot) Analysis

[0628] ELISPOT analysis is performed according to ELISPOT harmonization guidelines {DOI: 10.1038/nprot.2015.068} with the mouse IFNg ELISpotPLUS kit (MABTECH). 5×10⁴ splenocytes are incubated with 10 uM of overlapping peptide pools (15mers, 11aa overlap) spanning the entire antigen of interest for 16 hours in 96-well IFNg antibody coated plates. Spots are developed using alkaline phosphatase. The reaction is timed for 10 minutes and is terminated by running plate under tap water. Spots are counted using an AID vSpot Reader Spectrum. For ELISPOT analysis, wells with saturation>50% are recorded as “too numerous to count”. Samples with deviation of replicate wells>10% are excluded from analysis. Spot counts are then corrected for well confluency using the formula: spot count+2×(spot count×% confluence/[100%−% confluence]). Negative background is corrected by subtraction of spot counts in the negative peptide stimulation wells from the antigen stimulated wells. Finally, wells labeled too numerous to count are set to the highest observed corrected value, rounded up to the nearest hundred.

### Ex Vivo Intracellular Cytokine Staining (ICS) and Flow Cytometry Analysis

[0629] Freshly isolated lymphocytes at a density of 2-5×10⁶ cells/mL are incubated with 10 uM of overlapping peptide pools (15mers, 11aa overlap) spanning the entire antigen of interest for 2 hours. After two hours, brefeldin A is added to a concentration of 5 ug/ml and cells are incubated with stimulant for an additional 4 hours. Following stimulation, viable cells are labeled with fixable viability dye eFluor780 according to manufacturer's protocol and stained with anti-CD8 APC (clone 53-6.7, BioLegend) at 1:400 dilution. Anti-IFNg PE (clone XMG1.2, BioLegend) was used at 1:100 for intracellular staining. Cell are also stained for CD4, TNFα, IL-2, IL-4, IL-10, and Granzyme-B. Samples are collected on an Cytoflex LX (Beckman Coulter). Flow cytometry data is plotted and analyzed using FlowJo. To assess degree of antigen-specific response, the percent of stained cells is calculated in response to each peptide pool.

### Antibody Titers

[0630] For antibody response monitoring, blood is collected every two weeks. Antibody titers in the sera (IgG, IgM) are determined for Spike and Membrane proteins. IgG1/IgG2 isotypes are determine to assess Th1 polarization. Antibody-mediated neutralization is also assessed.

### Aged Mouse Model

[0631] An aged mouse model used in SARS-CoV-1 evaluation (Bolles 2011) is used to assess T cell immunogenicity, B cell responses, and antibody-mediated neutralization. For ChAdV68 vaccines in Balb/c mice, 1×10¹⁰ viral particles (VP) in 100 uL volume is administered as a bilateral intramuscular injection (50 uL per leg). For SAM vaccines in aged BALB/c mice, 10 ug of SAM-LNP in 100 uL volume is administrated as a bilateral intramuscular injection (50 uL per leg).

### Results

[0632] Mice are immunized, as described above. The efficacy study in mice is illustrated in FIG. 9. Vaccines containing cassettes encoding SARS-CoV-2 MHC epitope-encoding cassettes and/or full-length SARS-CoV-2 proteins demonstrate both T cell and B cell immune responses according to the vaccine design. CD4, CD8, Th1, and Th2 polarizations are also determined.

[0633] XIV.E.2 Vaccine Efficacy Evaluation in Non-Human Primates

[0634] Efficacy and safety of vaccines containing cassettes encoding SARS-CoV-2 MHC epitope-encoding cassettes and/or full-length SARS-CoV-2 proteins (e.g., see Table 4) is evaluated. Efficacy is assessed through monitoring T cell and/or B cell responses.

### Immunizations

[0635] For SAM vaccines in Mamu-A*01 Indian rhesus macaques, SAM is administered as bilateral intramuscular injections into the quadriceps muscle at a dose of 1 mg total per animal in 1 mL per leg.

[0636] For ChAdV68 vaccines in Mamu-A*01 Indian rhesus macaques, ChAdV68 is administered bilaterally with 1×10¹² viral particles (5×10¹¹ viral particles per injection).

### Immune Monitoring in Rhesus

[0637] For immune monitoring, 10-20 mL of blood is collected into vacutainer tubes containing heparin and maintained at room temperature until isolation. PBMCs are isolated by density gradient centrifugation using lymphocyte separation medium (LSM) and Leucosep separator tubes. PBMCs are stained with propidium iodide and viable cells counted using the Cytoflex LX (Beckman Coulter). Samples are then resuspended at 4×10⁶ cells/mL in RPMI complete (10% FBS).

[0638] IFNγ ELISPOT assays are performed using pre-coated 96-well plates (MAbtech, Monkey IFNγ ELISPOT PLUS, ALP (Kit Lot #36, Plate Lot #19)) following manufacturer's protocol. For each sample and stimuli, 1×10⁵ PBMCs per well are plated in triplicate with 10 ug/mL peptide stimuli (GenScript) and incubated overnight in complete RPMI. Samples are incubated overnight with overlapping peptide pools to Spike, Membrane or T-cell epitopes, or DMSO only. Overlapping pools (GenScript) consist of 15 amino acid long peptides, with 11 amino acid overlap, spanning each protein (Spike, Membrane, Nucleocapsid) or EDGE determined stretch of epitopes. Each pool is divided into minipools of up to 60 peptides each. DMSO only is used as a negative control for each sample. Plates are washed with PBS and incubated with anti-monkey IFNγ MAb biotin (MAbtech) for two hours, followed by an additional wash and incubation with Streptavidin-ALP (MAbtech) for one hour. After final wash, plates are incubated for ten minutes with BCIP/NBT (MAbtech) to develop the immunospots and dried overnight at 37° C. Spots are imaged and enumerated using AID reader (Autoimmun Diagnostika).

[0639] Samples with replicate well variability (Variability=Variance/[median+1]) greater than 10 and median greater than 10 are excluded. Spot values are adjusted based on the well saturation according to the formula: AdjustedSpots=RawSpots+2*(RawSpots*Saturation/[100-Saturation]). Wells with well saturation greater than 33% are considered “too numerous to count” (TNTC) and excluded. Background correction for each sample is performed by subtracting the average value of the negative control peptide wells. Data is normalized to spot forming colonies (SFC) per 1×10⁶ PBMCs by multiplying the corrected spot number by 1×10⁶/Cell number plated. For overall summary analysis calculated values generated by plating cells at 1×10⁵ cells/well are utilized, except when samples are TNTC, in which case values generated from plating cells at 2.5×10⁴ cells are used for that specific sample/stimuli/timepoint. Data processing as performed using the R programming language.

[0640] Intracellular cytokine assays are also performed. PBMCs are distributed at 1×10⁶ cells per well into v-bottom 96-well plates. Cells are pelleted and resuspended in 100 l of complete RPMI containing the overlapping peptide pools described above, to either Spike, Membrane, or the EDGE predicted T-cell epitopes. DMSO is used as a negative control for each sample. Brefeldin A (Biolegend) is added to a final concentration of 5 μg/mL after 1 hour and cells incubated overnight. Following viability stain, extracellular staining is performed in FACS buffer (PBS+2% FBS+2 mM EDTA). Cells are washed, fixed and permeabilized with the eBiosciences Fixation/Permeabilization Solution Kit. Intracellular staining is performed. Samples are assessed for viability, CD3, CD4, CD8, IFNγ, TNFa, IL-2, Perforin, CD107a, CCR7, and CD45RA.

[0641] Serum cytokine markers are also monitored. Serum cytokine and chemokine levels are measured with standard multiplex assays. Serum is collected and marker analysis is performed at 0 hours (baseline), 2 hours, 8 hours, and 48 hours following vaccination. Cytokines assessed are Interleukin-1 beta (IL-1β), Interleukin-1 (IL-10), Interleukin-6 (IL-6), Tumor necrosis factor alpha (TNF-α), Interferon gamma (IFN-γ), Granulocyte-macrophage colony-stimulating factor (GM-CSF), Interferon gamma-induced protein 10 (IP-10), Monocyte chemoattractant protein-1 (MCP-1), Macrophage inflammatory protein 1 beta (MIP-1β), and IFN-alpha (IFN-α2a).

[0642] Serum antibody titers and neutralizing antibody titers are determined.

### Results

[0643] NHPs are immunized, as described above. Vaccines containing cassettes encoding SARS-CoV-2 MHC epitope-encoding cassettes and/or full-length SARS-CoV-2 proteins demonstrate both T cell and B cell immune responses according to the vaccine design. The vaccine strategies also result in neutralizing antibody production.

[0644] XIV.F. Spike Protein Sequence Optimization

[0645] Various sequence-optimized nucleotide sequences encoding the Spike protein were evaluated in ChAdV68 vaccine vectors.

### Sequence-Optimization of Spike Sequence

[0646] The Spike nucleotide sequence from Wuhan Hu/1 (SEQ ID NO:78) was sequence-optimized by substituting synonymous codons such that the amino acid sequence was unaffected. An IDT algorithm was used for enhanced expression in humans and for reduced complexity to aid synthesis (see, e.g., SEQ ID NOs:66-74). The Spike sequence was additionally sequence-optimized using two additional algorithms; (1) a single sequence (SEQ ID NO:87) generated using SGI DNA (La Jolla, CA); (2) 6 sequences designated CT1, CT20, CT56, CT83, CT131, and CT 199 (SEQ ID NOs:79-84) generated using COOL (COOL algorithm generates multiple sequences and 6 were selected). The sequences of each are presented in Table 6.

[0647] Splicing events were identified in cDNA from 293A cells infected with ChAdV68 viruses or transfected with ChAdV68 genomic DNA. Specifically, total RNA from 10e5-10e6 cells was purified using Qiagen's RNeasy columns. Residual DNA was removed by DNAse treatment, and cDNA was produced using SuperScriptIV reverse transcriptase (Thermo). Subsequently, primers specific for the 5′ UTR and 3′ UTR of the Gritstone ChAdV68 cassette were used to generate PCR products, analyzed by agarose gel electrophoresis, gel-purified, and Sanger-sequenced to identify regions deleted by splicing.

[0648] Splice donor sites were removed by site-directed mutagenesis disrupting the nucleotide sequence motif while not disturbing the amino acid sequence. Mutagenesis was accomplished by incorporating above mutations into PCR primers, amplifying several fragments in parallel, and running a Gibson assembly on the fragments (overlapping by 30-60 nt). Optimized clone CT1-2C (SEQ ID NO:85) had Sanger sequence-identified splice donor motifs at NT385 and NT539 mutated, and clone IDT-4C (SEQ ID NO:86) had Sanger sequence-identified splice donor motifs at NT385, NT539, and predicted donor motifs at NT2003, and NT2473 mutated. Additionally, a possible polyadenylation site AATAAA at nt 445 was mutated to AAcAAA in IDT-4C clone.

[0649] The sequences described are presented in Table 6.

TABLE 6
Sequence-optimized Spike Sequences

| | | SEQ |
|---|---|---|
| Spike | | ID |
| Sequence | Nucleic Acid Sequence | NO: |
| Spike Native; | atgtttgtttttcttgttttattgccactagtctctagtcagtgtgttaatcttacaaccagaactcaattaccccctgca | 78 |
| NC_045512.2 | tacactaattctttcacacgtggtgtttattaccctgacaaagttttcagatcctcagttttacattcaactcaggactt | |
| Severe acute | gttcttacctttcttttccaatgttacttggttccatgctatacatgtctctgggaccaatggtactaagaggtttgata | |
| respiratory | accctgtcctaccatttaatgatggtgtttattttgcttccactgagaagtctaacataataagaggctggatttttgg | |
| syndrome | tactactttagattcgaagacccagtccctacttattgttaataacgctactaatgttgttattaaagtctgtgaatttc | |
| coronavirus 2 | aattttgtaatgatccatttttgggtgtttattaccacaaaaacaacaaaagttggatggaaagtgagttcagagttt | |
| isolate | attctagtgcgaataattgcacttttgaatatgtctctcagccttttcttatggaccttgaaggaaaacagggtaattt | |
| Wuhan- | caaaaatcttagggaatttgtgtttaagaatattgatggttattttaaaatatattctaagcacacgcctattaatttagt | |
| Hu-1 | gcgtgatctccctcagggtttttcggctttagaaccattggtagatttgccaataggtattaacatcactaggtttca | |
| | aactttacttgctttacatagaagttatttgactcctggtgattcttcttcaggttggacagctggtgctgcagcttatt | |
| | atgtgggttatcttcaacctaggacttttctattaaaatataatgaaaatggaaccattacagatgctgtagactgtg | |
| | cacttgaccctctctcagaaacaaagtgtacgttgaaatccttcactgtagaaaaaggaatctatcaaacttctaa | |
| | ctttagagtccaaccaacagaatctattgttagatttcctaatattacaaacttgtgcccttttggtgaagtttttaacg | |
| | ccaccagatttgcatctgtttatgcttggaacaggaagagaatcagcaactgtgttgctgattattctgtcctatata | |
| | attccgcatcattttccacttttaagtgttatggagtgtctcctactaaattaaatgatctctgctttactaatgtctatg | |
| | cagattcatttgtaattagaggtgatgaagtcagacaaatcgctccagggcaaactggaaagattgctgattata | |
| | attataaattaccagatgattttacaggctgcgttatagcttggaattctaacaatcttgattctaaggttggtggtaa | |
| | ttataattacctgtatagattgtttaggaagtctaatctcaaaccttttgagagagatatttcaactgaaatctatcag | |
| | gccggtagcacaccttgtaatggtgttgaaggttttaattgttactttcctttacaatcatatggtttccaacccacta | |
| | atggtgttggttaccaaccatacagagtagtagtactttcttttgaacttctacatgcaccagcaactgtttgtggac | |
| | ctaaaaagtctactaatttggttaaaaacaaatgtgtcaatttcaacttcaatggtttaacaggcacaggtgttctta | |
| | ctgagtctaacaaaaagtttctgcctttccaacaatttggcagagacattgctgacactactgatgctgtccgtgat | |
| | ccacagacacttgagattcttgacattacaccatgttcttttggtggtgtcagtgttataacaccaggaacaaatac | |
| | ttctaaccaggttgctgttctttatcaggatgttaactgcacagaagtccctgttgctattcatgcagatcaacttact | |
| | cctacttggcgtgtttattctacaggttctaatgtttttcaaacacgtgcaggctgtttaataggggctgaacatgtc | |
| | aacaactcatatgagtgtgacatacccattggtgcaggtatatgcgctagttatcagactcagactaattctcctc | |
| | ggcgggcacgtagtgtagctagtcaatccatcattgcctacactatgtcacttggtgcagaaaattcagttgctta | |
| | ctctaataactctattgccatacccacaaattttactattagtgttaccacagaaattctaccagtgtctatgaccaa | |
| | gacatcagtagattgtacaatgtacatttgtggtgattcaactgaatgcagcaatcttttgttgcaatatggcagtttt | |
| | tgtacacaattaaaccgtgctttaactggaatagctgttgaacaagacaaaaacacccaagaagtttttgcacaa | |
| | gtcaaacaaatttacaaaacaccaccaattaaagattttggtggttttaatttttcacaaatattaccagatccatcaa | |
| | aaccaagcaagaggtcatttattgaagatctacttttcaacaaagtgacacttgcagatgctggcttcatcaaaca | |
| | atatggtgattgccttggtgatattgctgctagagacctcatttgtgcacaaaagtttaacggccttactgttttgcc | |
| | acctttgctcacagatgaaatgattgctcaatacacttctgcactgttagcgggtacaatcacttctggttggacctt | |
| | tggtgcaggtgctgcattacaaataccatttgctatgcaaatggcttataggtttaatggtattggagttacacaga | |
| | atgttctctatgagaaccaaaaattgattgccaaccaatttaatagtgctattggcaaaattcaagactcactttcttc | |
| | cacagcaagtgcacttggaaaacttcaagatgtggtcaaccaaaatgcacaagctttaaacacgcttgttaaac | |
| | aacttagctccaattttggtgcaatttcaagtgttttaaatgatatcctttcacgtcttgacaaagttgaggctgaagt | |
| | gcaaattgataggttgatcacaggcagacttcaaagtttgcagacatatgtgactcaacaattaattagagctgca | |
| | gaaatcagagcttctgctaatcttgctgctactaaaatgtcagagtgtgtacttggacaatcaaaaagagttgattt | |
| | ttgtggaaagggctatcatcttatgtccttccctcagtcagcacctcatggtgtagtcttcttgcatgtgacttatgtc | |
| | cctgcacaagaaaagaacttcacaactgctcctgccatttgtcatgatggaaaagcacactttcctcgtgaaggt | |
| | gtctttgtttcaaatggcacacactggtttgtaacacaaaggaatttttatgaaccacaaatcattactacagacaa | |
| | cacatttgtgtctggtaactgtgatgttgtaataggaattgtcaacaacacagtttatgatcctttgcaacctgaatta | |
| | gactcattcaaggaggagttagataaatattttaagaatcatacatcaccagatgttgatttaggtgacatctctgg | |
| | cattaatgcttcagttgtaaacattcaaaaagaaattgaccgcctcaatgaggttgccaagaatttaaatgaatctc | |
| | tcatcgatctccaagaacttggaaagtatgagcagtatataaaatggccatggtacatttggctaggttttatagct | |
| | ggcttgattgccatagtaatggtgacaattatgctttgctgtatgaccagttgctgtagttgtctcaagggctgttgtt | |
| | cttgtggatcctgctgcaaatttgatgaagacgactctgagccagtgctcaaaggagtcaaattacattacacata | |
| | a | |
| Spike CT1 | ATGTTTGTCTTCCTGGTCTTGCTGCCGCTGGTGAGCAGCCAGTGCG | 79 |
| Optimized | TGAATCTCACCACCCGCACCCAGCTTCCACCTGCCTACACTAACAG | |
| | CTTCACCCGAGGGGTGTATTACCCTGACAAGGTATTCCGGTCCTCC | |
| | GTCCTCCATAGCACGCAGGACCTTTTTCTGCCCTTCTTCTCAAATGT | |
| | GACATGGTTCCATGCCATTCACGTGAGCGGCACGAATGGAACGAA | |
| | GCGCTTTGATAACCCCGTGCTGCCTTTCAATGACGGCGTCTACTTC | |
| | GCCTCCACTGAAAAGTCAAACATCATCCGGGGCTGGATCTTTGGC | |
| | ACCACTCTTGATTCAAAGACCCAGTCACTGCTGATTGTGAACAATG | |
| | CTACAAACGTGGTTATCAAGGTGTGTGAGTTTCAGTTCTGTAACGA | |
| | TCCATTTTTGGGAGTGTACTACCACAAGAACAACAAGTCCTGGATG | |
| | GAGTCTGAGTTCAGAGTGTATAGCTCTGCTAACAACTGCACCTTCG | |
| | AGTACGTGTCCCAGCCTTTCCTTATGGACCTGGAAGGCAAACAGG | |
| | GCAATTTCAAAAACCTGAGAGAGTTCGTGTTTAAGAACATTGACG | |
| | GATACTTCAAAATTTATTCTAAGCACACACCAATTAACTTAGTGCG | |
| | GGACCTACCCCAAGGCTTTAGCGCCCTAGAGCCCCTGGTTGACCTG | |
| | CCCATTGGGATCAATATAACAAGGTTCCAAACTCTACTGGCTCTGC | |
| | ATAGAAGTTATCTGACCCCAGGAGACAGCTCTAGTGGTTGGACCG | |
| | CCGGCGCAGCAGCCTACTATGTCGGGTACTTACAGCCACGCACGTT | |
| | CCTTCTGAAGTACAATGAGAACGGGACAATCACTGACGCAGTAGA | |
| | CTGTGCACTGGACCCGCTAAGCGAGACTAAGTGCACACTTAAATC | |
| | CTTCACGGTGGAGAAAGGCATTTATCAGACCTCTAACTTCAGGGTG | |
| | CAGCCAACAGAAAGCATTGTGCGATTCCCAAATATTACTAATCTTT | |
| | GCCCTTTCGGGGAGGTCTTTAATGCAACTAGATTCGCATCAGTCTA | |
| | TGCGTGGAACCGCAAACGCATTTCCAATTGTGTCGCAGACTACTCA | |
| | GTGCTGTACAACTCTGCCTCTTTCAGTACGTTCAAGTGTTACGGAG | |
| | TGTCACCCACTAAACTGAACGACCTGTGCTTTACAAATGTCTACGC | |
| | TGACTCCTTCGTGATTAGGGGAGACGAGGTGAGACAAATTGCCCC | |
| | CGGACAGACTGGGAAGATTGCCGACTACAATTATAAGCTTCCTGA | |
| | TGATTTCACTGGCTGTGTTATTGCCTGGAATAGTAACAATCTGGAT | |
| | AGCAAGGTGGGAGGCAACTATAACTACTTATATCGACTGTTTAGG | |
| | AAGAGTAATCTGAAACCATTIGAGCGGGATATTTCCACAGAAATT | |
| | TACCAGGCCGGGAGCACACCATGTAATGGGGTGGAGGGATTTAAT | |
| | TGTTACTTCCCACTCCAGAGCTATGGTTTCCAACCCACCAATGGAG | |
| | TGGGTTACCAGCCCTATAGAGTCGTGGTGCTTAGTTTTGAGCTGCT | |
| | TCACGCCCCAGCAACCGTCTGCGGTCCCAAAAAGTCGACCAATCT | |
| | CGTGAAAAACAAATGCGTAAACTTCAACTTTAACGGCTTAACAGG | |
| | AACCGGCGTGCTCACCGAAAGCAACAAGAAATTCCTTCCATTTCA | |
| | GCAATTCGGAAGGGACATCGCCGACACAACAGACGCGGTGAGGG | |
| | ACCCACAGACTCTGGAGATACTGGACATCACTCCTTGTTCGTTTGG | |
| | GGGCGTCTCGGTCATCACACCCGGGACTAATACTAGTAATCAGGT | |
| | AGCAGTTTTATATCAAGGCGTCAACTGTACCGAAGTACCTGTGGCC | |
| | ATACACGCTGATCAGCTAACGCCAACATGGCGAGTCTATTCCACC | |
| | GGCTCTAACGTTTTTCAGACCAGGGCTGGGTGCCTGATAGGGGCA | |
| | GAGCACGTCAATAATTCCTATGAGTGTGATATCCCCATAGGTGCGG | |
| | GGATCTGTGCCAGCTATCAAACCCAAACCAATTCACCAAGGCGAG | |
| | CACGGTCTGTGGCTTCTCAGAGCATAATTGCATATACAATGTCACT | |
| | GGGCGCTGAGAATAGCGTTGCATACTCTAATAACAGCATAGCCAT | |
| | TCCCACGAACTTTACTATCAGTGTGACAACCGAAATATTGCCAGTT | |
| | TCGATGACCAAAACTAGCGTGGATTGCACGATGTACATCTGTGGA | |
| | GACTCTACCGAATGCAGCAATCTGCTATTACAATATGGCAGCTTCT | |
| | GTACACAGTTAAATCGAGCCTTGACAGGCATCGCAGTGGAACAGG | |
| | ACAAAAATACTCAAGAGGTGTTTGCACAGGTGAAGCAAATCTACA | |
| | AAACGCCCCCCATTAAAGATTTTGGCGGGTTCAATTTTTCACAAAT | |
| | TCTCCCCGACCCGTCTAAGCCGAGTAAGCGGTCCTTCATCGAAGAT | |
| | CTGCTCTTTAACAAAGTAACCCTCGCCGATGCCGGCTTTATTAAGC | |
| | AGTATGGCGACTGCCTGGGGGATATAGCCGCTCGTGACCTGATTTG | |
| | CGCCCAGAAGTTCAATGGTCTGACCGTGTTGCCTCCTTTATTGACC | |
| | GATGAAATGATTGCCCAGTACACTAGTGCCCTGCTGGCCGGCACT | |
| | ATCACGTCTGGGTGGACCTTCGGAGCTGGTGCCGCCTTGCAGATAC | |
| | CTTTTGCAATGCAGATGGCCTATAGGTTTAATGGTATCGGAGTGAC | |
| | TCAGAACGTACTGTACGAGAACCAGAAGCTCATCGCTAATCAATT | |
| | TAACTCCGCTATCGGAAAAATCCAGGACAGCCTCTCTTCTACAGCT | |
| | AGCGCTCTGGGCAAACTGCAGGATGTCGTTAATCAGAATGCCCAG | |
| | GCCCTGAACACCTTGGTTAAACAACTATCTTCCAACTTCGGGGCCA | |
| | TATCCAGTGTGTTGAATGATATTCTCTCCCGCTTGGATAAGGTGGA | |
| | AGCTGAGGTGCAGATCGATCGCTTGATCACCGGCAGACTGCAGTC | |
| | CCTCCAGACATATGTAACTCAGCAGCTGATTAGAGCCGCCGAGAT | |
| | AAGGGCAAGTGCGAATCTGGCTGCCACCAAGATGAGCGAATGTGT | |
| | ATTGGGCCAGAGCAAACGAGTTGATTTTTGCGGTAAGGGGTATCA | |
| | TTTAATGTCTTTCCCTCAATCCGCACCTCATGGCGTAGTTTTCCTGC | |
| | ATGTGACTTATGTCCCGGCTCAGGAGAAGAATTTTACCACAGCCCC | |
| | CGCGATCTGCCATGACGGAAAGGCCCACTTCCCCCGGGAAGGCGT | |
| | GTTTGTATCCAATGGGACTCACTGGTTTGTCACTCAGCGAAATTTT | |
| | TATGAACCACAGATCATCACCACTGACAACACATTTGTTAGTGGA | |
| | AACTGCGATGTGGTCATCGGCATCGTGAATAACACTGTCTATGATC | |
| | CACTGCAACCTGAACTGGATTCTTTTAAAGAGGAACTCGACAAGT | |
| | ATTTTAAAAACCACACTAGCCCTGACGTGGATCTCGGTGACATTTC | |
| | TGGCATCAACGCTAGCGTAGTGAACATTCAGAAAGAGATAGATAG | |
| | ACTTAATGAGGTGGCCAAGAACCTCAACGAAAGTCTGATCGACCT | |
| | CCAGGAACTGGGGAAATACGAGCAGTACATTAAATGGCCTTGGTA | |
| | CATATGGCTGGGGTTCATTGCTGGGCTGATCGCAATAGTGATGGTG | |
| | ACCATAATGCTCTGTTGCATGACTAGCTGCTGCAGCTGCCTGAAGG | |
| | GCTGCTGTAGTTGTGGGTCATGTTGTAAGTTTGACGAAGATGATAG | |
| | CGAGCCTGTCCTTAAAGGAGTGAAGCTCCACTACACCTAG | |
| Spike CT20 | See Sequence Listing | 80 |
| Optimized | | |
| Spike CT56 | See Sequence Listing | 81 |
| Optimized | | |
| Spike CT83 | See Sequence Listing | 82 |
| Optimized | | |
| Spike CT131 | See Sequence Listing | 83 |
| Optimized | | |
| Spike CT199 | See Sequence Listing | 84 |
| Optimized | | |
| Spike CT1-2C | ATGTTTGTCTTCCTGGTCTTGCTGCCGCTcGTGtctAGCCAGTGCGTG | 85 |
| | AATCTCACCACCCGCACCCAGCTTCCACCTGCCTACACTAACAGCT | |
| | TCACCCGAGGGGTGTATTACCCTGACAAGGTATTCCGGTCCTCCGT | |
| | CCTCCATAGCACGCAGGACCTTTTTCTGCCCTTCTTCTCAAATGTG | |
| | ACATGGTTCCATGCCATTCACGTGAGCGGCACGAATGGAACGAAG | |
| | CGCTTTGATAACCCCGTGCTGCCTTTCAATGACGGCGTCTACTTCG | |
| | CCTCCACTGAAAAGTCAAACATCATCCGGGGCTGGATCTTTGGCAC | |
| | CACTCTTGATTCAAAGACCCAGTCACTGCTGATTGTGAACAATGCT | |
| | ACAAACGTGGTTATCAAaGTcTGcGAGTTTCAGTTCTGTAACGATCC | |
| | ATTTTTGGGAGTGTACTACCACAAGAACAACAAGTCCTGGATGGA | |
| | GTCTGAGTTCAGAGTGTATAGCTCTGCTAACAACTGCACCTTCGAG | |
| | TACGTGTCCCAGCCTTTCCTTATGGACCTGGAAGGCAAACAGGGC | |
| | AATTTCAAAAACCTGAGAGAGTTCGTGTTTAAGAACATTGACGGA | |
| | TACTTCAAAATTTATTCTAAGCACACACCAATTAACTTAGTGCGGG | |
| | ACCTACCCCAAGGCTTTAGCGCCCTAGAGCCCCTGGTTGACCTGCC | |
| | CATTGGGATCAATATAACAAGGTTCCAAACTCTACTGGCTCTGCAT | |
| | AGAAGTTATCTGACCCCAGGAGACAGCTCTAGTGGTTGGACCGCC | |
| | GGCGCAGCAGCCTACTATGTCGGGTACTTACAGCCACGCACGTTCC | |
| | TTCTGAAGTACAATGAGAACGGGACAATCACTGACGCAGTAGACT | |
| | GTGCACTGGACCCGCTAAGCGAGACTAAGTGCACACTTAAATCCT | |
| | TCACGGTGGAGAAAGGCATTTATCAGACCTCTAACTTCAGGGTGC | |
| | AGCCAACAGAAAGCATTGTGCGATTCCCAAATATTACTAATCTTTG | |
| | CCCTTTCGGGGAGGTCTTTAATGCAACTAGATTCGCATCAGTCTAT | |
| | GCGTGGAACCGCAAACGCATTTCCAATTGTGTCGCAGACTACTCA | |
| | GTGCTGTACAACTCTGCCTCTTTCAGTACGTTCAAGTGTTACGGAG | |
| | TGTCACCCACTAAACTGAACGACCTGTGCTTTACAAATGTCTACGC | |
| | TGACTCCTTCGTGATTAGGGGAGACGAGGTGAGACAAATTGCCCC | |
| | CGGACAGACTGGGAAGATTGCCGACTACAATTATAAGCTTCCTGA | |
| | TGATTTCACTGGCTGTGTTATTGCCTGGAATAGTAACAATCTGGAT | |
| | AGCAAGGTGGGAGGCAACTATAACTACTTATATCGACTGTTTAGG | |
| | AAGAGTAATCTGAAACCATTIGAGCGGGATATTTCCACAGAAATT | |
| | TACCAGGCCGGGAGCACACCATGTAATGGGGTGGAGGGATTTAAT | |
| | TGTTACTTCCCACTCCAGAGCTATGGTTTCCAACCCACCAATGGAG | |
| | TGGGTTACCAGCCCTATAGAGTCGTGGTGCTTAGTTTTGAGCTGCT | |
| | TCACGCCCCAGCAACCGTCTGCGGTCCCAAAAAGTCGACCAATCT | |
| | CGTGAAAAACAAATGCGTAAACTTCAACTTTAACGGCTTAACAGG | |
| | AACCGGCGTGCTCACCGAAAGCAACAAGAAATTCCTTCCATTTCA | |
| | GCAATTCGGAAGGGACATCGCCGACACAACAGACGCcGTcAGGGA | |
| | CCCACAGACTCTGGAGATACTGGACATCACTCCTTGTTCGTTTGGG | |
| | GGCGTCTCGGTCATCACACCCGGGACTAATACTAGTAATCAGGTA | |
| | GCAGTTTTATATCAAGGCGTCAACTGTACCGAAGTACCTGTGGCCA | |
| | TACACGCTGATCAGCTAACGCCAACATGGCGAGTCTATTCCACCG | |
| | GCTCTAACGTTTTTCAGACCAGGGCTGGGTGCCTGATAGGGGCAG | |
| | AGCACGTCAATAATTCCTATGAGTGTGATATCCCCATAGGTGCGGG | |
| | GATCTGTGCCAGCTATCAAACCCAAACCAATTCACCAAGGCGAGC | |
| | ACGGTCTGTGGCTTCTCAGAGCATAATTGCATATACAATGTCACTG | |
| | GGCGCTGAGAATAGCGTTGCATACTCTAATAACAGCATAGCCATT | |
| | CCCACGAACTTTACTATCAGTGTGACAACCGAAATATTGCCAGTTT | |
| | CGATGACCAAAACTAGCGTGGATTGCACGATGTACATCTGTGGAG | |
| | ACTCTACCGAATGCAGCAATCTGCTATTACAATATGGCAGCTTCTG | |
| | TACACAGTTAAATCGAGCCTTGACAGGCATCGCAGTGGAACAGGA | |
| | CAAAAATACTCAAGAGGTGTTTGCACAGGTGAAGCAAATCTACAA | |
| | AACGCCCCCCATTAAAGATTTTGGCGGGTTCAATTTTTCACAAATT | |
| | CTCCCCGACCCGTCTAAGCCGAGTAAGCGGTCCTTCATCGAAGATC | |
| | TGCTCTTTAACAAAGTAACCCTCGCCGATGCCGGCTTTATTAAGCA | |
| | GTATGGCGACTGCCTGGGGGATATAGCCGCTCGTGACCTGATTTGC | |
| | GCCCAGAAGTTCAATGGTCTGACCGTGTTGCCTCCTTTATTGACCG | |
| | ATGAAATGATTGCCCAGTACACTAGTGCCCTGCTGGCCGGCACTAT | |
| | CACGTCTGGGTGGACCTTCGGAGCTGGTGCCGCCTTGCAGATACCT | |
| | TTTGCAATGCAGATGGCCTATAGGTTTAATGGTATCGGAGTGACTC | |
| | AGAACGTACTGTACGAGAACCAGAAGCTCATCGCTAATCAATTTA | |
| | ACTCCGCTATCGGAAAAATCCAGGACAGCCTCTCTTCTACAGCTAG | |
| | CGCTCTGGGCAAACTGCAGGATGTCGTTAATCAGAATGCCCAGGC | |
| | CCTGAACACCTTGGTTAAACAACTATCTTCCAACTTCGGGGCCATA | |
| | TCCAGTGTGTTGAATGATATTCTCTCCCGCTTGGATAAGGTGGAAG | |
| | CTGAGGTGCAGATCGATCGCTTGATCACCGGCAGACTGCAGTCCCT | |
| | CCAGACATATGTAACTCAGCAGCTGATTAGAGCCGCCGAGATAAG | |
| | GGCAAGTGCGAATCTGGCTGCCACCAAGATGAGCGAATGTGTATT | |
| | GGGCCAGAGCAAACGAGTTGATTTTTGCGGTAAGGGGTATCATTT | |
| | AATGTCTTTCCCTCAATCCGCACCTCATGGCGTAGTTTTCCTGCATG | |
| | TGACTTATGTCCCGGCTCAGGAGAAGAATTTTACCACAGCCCCCGC | |
| | GATCTGCCATGACGGAAAGGCCCACTTCCCCCGGGAAGGCGTGTT | |
| | TGTATCCAATGGGACTCACTGGTTTGTCACTCAGCGAAATTTTTAT | |
| | GAACCACAGATCATCACCACTGACAACACATTTGTTAGTGGAAAC | |
| | TGCGATGTGGTCATCGGCATCGTGAATAACACTGTCTATGATCCAC | |
| | TGCAACCTGAACTGGATTCTTTTAAAGAGGAACTCGACAAGTATTT | |
| | TAAAAACCACACTAGCCCTGACGTGGATCTCGGTGACATTTCTGGC | |
| | ATCAACGCTAGCGTAGTGAACATTCAGAAAGAGATAGATAGACTT | |
| | AATGAGGTGGCCAAGAACCTCAACGAAAGTCTGATCGACCTCCAG | |
| | GAACTGGGGAAATACGAGCAGTACATTAAATGGCCTTGGTACATA | |
| | TGGCTGGGGTTCATTGCTGGGCTGATCGCAATAGTGATGGTGACCA | |
| | TAATGCTCTGTTGCATGACTAGCTGCTGCAGCTGCCTGAAGGGCTG | |
| | CTGTAGTTGTGGGTCATGTTGTAAGTTTGACGAAGATGATAGCGAG | |
| | CCTGTCCTTAAAGGAGTGAAGCTCCACTACACCTAG | |
| Spike IDT-4C | See Sequence Listing | 86 |
| Spike-SGI | See Sequence Listing | 87 |

### Cloning of Sequence-Optimized Spike Sequences

[0650] Each sequence-optimized Spike sequence was ordered as a set of 3 gBlocks from IDT with each gblock between 1300-1500 bp and overlapping with each other by approximately 100 nucleotides. The gBlocks comprising the 5′ and 3′ ends of the Spike sequence overlapped with the plasmid backbone by 100 nucleotides. The gblocks were assembled by a combination of PCR and Gibson assembly into a linearized pA68-E4d AsisIPmeI backbone to generate pA68-E4-sequence-optimized Spike clones. Clones were screened by PCR and clones of the correct size were then grown for plasmid production and sequencing by either NGS or Sanger sequencing. Once a correct clone was sequence confirmed, large scale plasmid production and purification was performed for transfection.

### Vector Production

[0651] pA68-E4-Spike plasmid DNA was digested with PacI and 2 ug DNA was transfected into 293F cells using TransIt Lenti transfection reagent. Five days post transfection, cells and media were harvested and a lysate generated by freeze-thawing at −80C and at 37 C. A fraction of the lysate was used to re-infect 30 mL of 293F cells and incubated for 48-72h before harvesting. Lysate was generated by freeze-thawing at −80C and at 37 C and a fraction of the lysate was used to infect 400 mL of 293F cells seeded at 1e6 cells/mL. Next, 48-72h later cells were harvested, lysed in 10 mM tris pH 8.0/0.1% Triton X-100 and freeze thawed 1× at 37 and −80 C. The lysate was then clarified by centrifugation at 4300×g for 10 min prior to loading on a 1.2/1.4 CsCl gradient. The gradient was run for a minimum of 2h before the bands were harvested diluted 2-4× in Tris and then rerun on a 1.35 CsCl gradient for at least 2h. The viral bands were harvested and then dialyzed 3× in 1× ARM buffer. The virus infectious titer was determined by an immunostaining titer assay and the viral particle measured by Absorbance at A260 nm.

### Western Analysis

[0652] Samples for Spike expression analysis were either harvested at designated times post transfection or in the case of purified virus by setting up a controlled infection experiment with a known virus MOI and harvested at a specific time post infection, typically 24 to 48h. 1e6 cells were typically harvested in 0.5 mL of SDS-PAGE loading buffer with 10% Beta-mercaptoethanol. Samples were boiled and run on 4-20% polyacrylamide gels under denaturing and reducing conditions. The gels were then blotted onto a PVDF membrane using a BioRad Rapid transfer device. The membrane was blocked for 2h at room temperature in 5% Skim milk in TBST. The membrane was then probed with an anti-Spike S1 polyclonal (Sino Biologicals) or anti-Spike monoclonal antibody 1A9 (GeneTex; Cat. No. GTX632604) and incubated for 2h. The membrane was then washed in PBST (5×) and the probed with a HRP-linked anti-mouse antibody (Bethyl labs) for 1h. The membrane was washed as described above and then incubated with a chemiluminescent substrate ECL plus (ThermoFisher). The image was then captured using a Chemidoc (BioRad device).

### Results

[0653] Expression of Spike S2 protein was assessed during viral production in 293F cells with various Spike-encoding vectors. As shown in FIG. 10A, using vectors encoding IDT sequence-optimized Spike cassettes, Spike S2 protein was detected by Western blot using an anti-Spike S2 antibody (GeneTex) when expressed in a SAM vector (FIG. 10A, last lane) but not when expressed in a ChAdV68 vector (“CMV-Spike (IDT)”; SEQ ID NO:69) at two different MOIs and timepoints (FIG. 10A, lanes 1 and 7). Two clones engineered to express Spike variant D614G (“CMV-Spike (IDT)-D614G” SEQ ID NO:70) also did not express detectable levels of Spike protein by Western using the S2 antibody (FIG. 10A, lanes 2 and 3). Clones engineered to co-express the SARS-CoV-2 Membrane protein together with Spike (“CMV-Spike (IDT)-D614G-Mem” SEQ ID NO:66) or including a R682V mutations to disrupt the Furin cleavage site did not rescue the expression phenotype (FIG. 10A, lanes 4 and 5). In contrast, as shown in FIG. 10B, Spike S1 protein was detected for all IDT constructs, albeit at low levels, with the exception of the Furin R682V mutation in which no Spike S1 protein was detected.

[0654] To deconvolute if the expressions issues with the IDT sequence-optimized clones were specific to the S1 or S2 domains, vectors expressing only the S1 or S2 domains were also evaluated. As shown in FIG. 10C, a ChAdV68 vector encoding the IDT sequence-optimized Spike S1 protein alone demonstrated strong protein expression, in contrast to the lower expression observed with the full-length Spike vector (FIG. 10C, lanes 1 vs 2). As expected, no signal was observed for S1 with the vector encoding the S2 domain alone. In contrast, as shown in FIG. 10D, a ChAdV68 vector encoding the IDT sequence-optimized Spike S2 protein alone did not demonstrate observable protein expression, comparable to the absence of signal observed with the full-length Spike vector (FIG. 10D, lanes 1 and 3). Thus, the data indicate the IDT sequence-optimized Spike S2 exhibited poor expression, including impacting expression of the full-length Spike sequence.

[0655] To address protein expression, the SARS-CoV-2 Spike-encoding nucleotide sequence was sequence-optimized using additional sequence-optimization algorithms; (1) a single sequence (SEQ ID NO:87) generated using SGI DNA (La Jolla, CA); (2) 6 sequences designated CT1, CT20, CT56, CT83, CT131, and CT 199 (SEQ ID NOs:79-84) generated using COOL (COOL algorithm generates multiple sequences and 6 were selected). As shown in FIG. 10A and FIG. 10B, sequence-optimization with the COOL algorithm generated a sequence—CT1 (SEQ ID NO:79)—that demonstrated detectable expression using a ChAdV68 vector as assessed by Western using both an anti-S2 and anti-S1 antibody (FIG. 10A and FIG. 10B, each respective lane 6 “ChAd-Spike CT1-D614G”). The additional sequences generated using the COOL algorithm and the SGI algorithm were also assessed by Western. As shown in FIG. 11, the SGI clone and COOL sequence CT131 also demonstrated detectable levels of Spike protein by Western using an anti-S2 antibody (FIG. 11, lanes 3 and 6), while other COOL generated sequences did not generate detectable signals other than the control CT1 derived sequence (lane 2). Thus, the data indicate that specific sequence-optimizations improved expression of full-length SARS-CoV-2 Spike protein in ChAdV68 vectors.

[0656] SARS-CoV-2 is a cytoplasm-replicating positive-sense RNA virus encoding its own replication machinery, and as such SARS-CoV-2 mRNA are not naturally processed by splicing and nuclear-export machineries. As illustrated in FIG. 12A, to assess the role of splicing in SARS-CoV-2 Spike-encoding mRNA expressed from a ChAdV68 vector, primers were designed to amplify the Spike coding region. In the presence of mRNA splicing, amplicon sizes would be smaller than the expected full-length coding region. As shown in FIG. 12B, while PCR of the plasmid encoding the SARS-CoV-2 Spike cassette demonstrated the expected amplicon size (“Spike Plasmid” left panel, right column), PCR amplification of cDNA from infected 293 cells demonstrated two smaller amplicons indicating splicing of the mRNA transcript (“ChAd-Spike (IDT) cDNA” left panel, left column). In addition, the Spike coding sequence was split into S1 and S2 encoding sequences. As also shown in FIG. 12B, PCR amplification of S1 cDNA from infected 293 cells demonstrated the expected amplicon size (“SpikeS1” right panel, left column) indicating S1 was likely not undergoing undesired splicing while sequences in the S2 region may be influencing splicing.

[0657] The smaller amplicon sequences were analyzed and two splice donor sites were identified by Sanger sequencing. Three additional potential donor sites were predicted by further sequence analysis. The position and identity of the splice motif sequences are presented below (the nt triplets correspond to codons, numbering starts with reference to Spike ATG):

NT 385-:
AAG GTG TGT → AAa GTc TGc (identified by sequencing)
NT 539-:
AA GGT AAG C → Ag GGc AAa C (identified by sequencing)
NT 2003-:
CA GGT ATC T → Ct GGa ATC T (predicted)
NT 2473-:
AAG GTG ACC → AAa GTc ACC (predicted)
NT 3417-:
C CCC CTT CAG CCT GAA CTT GAT TCC (SEQ ID NO: 123) → T CCa CTg CAa
CCT GAA CTT GAT agt (SEQ ID NO: 124)

[0658] Selected splice donor sites were removed by site-directed mutagenesis disrupting the nucleotide sequence motif while not disturbing the amino acid sequence. COOL sequence-optimized clone CT1 was used as the reference sequence for clone CT1-2C (SEQ ID NO:85) having the sequence-identified splice donor motifs at NT385 and NT539 mutated. IDT sequence-optimized clone was used as the reference sequence for clone IDT-4C (SEQ ID NO:86) and had both sequence-identified and predicted splice donor motifs at NT385, NT539, NT2003, and NT2473 mutated, as well as a possible polyadenylation site AATAAA at NT445 mutated to AAcAAA. As shown in FIG. 11, Spike protein expression was detected by Western in the clone including the sequence-identified splice donor motifs (“CT1-2C” lane 2). Splicing was further assessed in the constructs by PCR analysis. As shown in FIG. 13, mutating the splice donor motifs and/or a potential polyA site alone did not prevent splicing indicating splicing potentially occurred from sub-dominant splice sites.

[0659] Given the identification of splicing events in the full-length Spike mRNA expressed from ChAdV68 vectors, additional constructs are generated and assessed for improved protein expression. Additional optimizations include constructs featuring exogenous nuclear export signals (e.g., Constitutive Transport Element (CTE), RNA Transport Element (RTE), or Woodchuck Posttranscriptional Regulatory Element (WPRE)) or the addition of an artificial intron through introduction of exogenous splice donor/branch/acceptor motif sequences to bias splicing, such as introducing a SV40 mini-intron (SEQ ID NO:88) between the CMV promoter and the Kozak sequence immediately upstream of the Spike gene. The identified and predicted splice donor motifs are also further evaluated in combination with additional sequence optimizations.

[0660] XIV.G. SARS-CoV-2 Vaccine Efficacy Evaluation

[0661] Various SARS-CoV-2 vaccine designs, constructs, and dosing regimens were evaluated. The vaccines encoded various optimized versions of the Spike protein, selected predicted T cell epitopes (TCE), or a combination of Spike and TCE cassettes.

### Mouse Immunizations

[0662] All mouse studies were conducted at Murigenics under IACUC approved protocols. Balb/c mice (Envigo), 6-8 weeks old were used for all studies. Vaccines were stored at −80° C., thawed at room temperature on the day of immunization, and then diluted to 0.1 μg/mL with PBS and filtered through a 0.2 micron filter. Filtered formulations were stored at 4° C. and injected within 4 hours of preparation. All immunizations were bilateral intramuscular to the tibialis anterior, 2 injections of 50 μL each, 100 μL total.

### Non-Human Primate Immunizations

[0663] For SAM vaccines in Mamu-A*01 Indian rhesus macaques, SAM was administered as bilateral intramuscular injections into the quadriceps muscle at the indicated doses.

[0664] For ChAdV68 vaccines in Mamu-A*01 Indian rhesus macaques, ChAdV68 was administered bilaterally at the indicated doses (5×10¹¹ viral particles per injection).

### Immune Monitoring in Rhesus

[0665] For immune monitoring, 10-20 mL of blood was collected into vacutainer tubes containing heparin and maintained at room temperature until isolation. PBMCs were isolated by density gradient centrifugation using lymphocyte separation medium (LSM) and Leucosep separator tubes. PBMCs were stained with propidium iodide and viable cells counted using the Cytoflex LX (Beckman Coulter). Samples were then resuspended at 4×10⁶ cells/mL in RPMI complete (10% FBS).

### Splenocyte Isolation

[0666] For the evaluation of T-cell response, mouse spleens were extracted at various timepoints following immunization. Note that in some studies immunizations were staggered to enable spleens to be collected at the same time and compared. Spleens were collected and analyzed by IFNγ ELISpot and ICS. Spleens were suspended in RPMI complete (RPMI+10% FBS) and dissociated using the gentleMACS Dissociator (Miltenyi Biotec). Dissociated cells were filtered using a 40 μm strainer and red blood cells were lysed with ACK lysing buffer (150 mM NH₄Cl, 10 mM KHCO₃, 0.1 mM EDTA). Following lysis, cells were filtered with a 30 μm strainer and resuspended in RPMI complete.

### Serum Collection in Mice

[0667] At various timepoints post immunization 200 μL of blood was drawn. Blood was centrifuged at 1000 g for 10 minutes at room temperature. Serum was collected and frozen at −80° C.

### S1 IgG MSD/ELISA

[0668] 96-well QuickPlex plates (Meso Scale Discovery, Rockville, MD) were coated with 50 μL of 1 μg/mL SARS-CoV-2 S1 (ACROBiosystems, Newark, DE), diluted in DPBS (Corning, Corning, NY), and incubated at 4° C. overnight. Wells were washed three times with agitation using 250 μL of PBS+0.05% Tween-20 (Teknova, Hollister, CA) and plates blocked with 150 μL Superblock PBS (Thermo Fisher Scientific, Waltham, MA) for 1 hour at room temperature on an orbital shaker. Test sera was diluted at appropriate series in 10% species-matched serum (Innovative Research, Novi, MI) and tested in single wells on each plate. Starting dilution 1:100, 3-fold dilutions, 11 dilutions per sample. Wells were washed and 50 uL of the diluted samples were added to wells and incubated for 1 hour at room temperature on an orbital shaker. Wells were washed and incubated with 25 μL of 1 μg/mL SULFO-TAG labeled anti-mouse antibody (MSD), diluted in DPBS+1% BSA (Sigma-Aldrich, St. Louis, MO), for 1 hour at room temperature on an orbital shaker. Wells were washed and 150 μL tripropylamine containing read buffer (MSD) added. Plates were run immediately using the QPlex SQ 120 (MSD) ECL plate reader. Endpoint titer is defined as the reciprocal dilution for each sample at which the signal is twice the background value, and is interpolated by fitting a line between the final two values that are greater than twice the background value. The background values is the average value (calculated for each plate) of the control wells containing 10% species-matched serum only.

### Antibody Titers

[0669] For antibody response monitoring, antibody titers, including neutralizing antibody titers, in the sera were determined as described in J. Yu et al. (Science 10.1126/science. Abc6284, 2020), herein incorporated by reference for all purposes.

### IFNγ ELISpot Analysis

[0670] IFNγ ELISpot assays were performed using pre-coated 96-well plates (MAbtech, Mouse IFNγ ELISpot PLUS, ALP) following manufacturer's protocol. Samples were stimulated overnight with various overlapping peptide pools (15 amino acids in length, 11 amino acid overlap), at a final concentration of 1 μg/mL per peptide. For Spike—eight different overlapping peptide pools spanning the SARS-CoV-2 Spike antigen (Genscript, 36-40 peptides per pool). Splenocytes were plated in duplicate at 1×10⁵ cells per well for each Spike pool, and 2.5×10⁴ cells per well (mixed with 7.5×10⁴ naïve cells) for Spike pools 2, 4, and 7. To measure response to the TCE cassette—one pool spanning Nucleocapsid protein (JPT, NCap-1, 102 peptides), one spanning Membrane protein (JPT, VME-1, 53 peptides), and one spanning the Orf3a regions encoded in the cassette (Genscript, 38 peptides). For TCE peptide pools, splenocytes were plated in duplicate at 2×10⁵ cells per well for each pool. Sequences for peptide pools are presented in Table D (SEQ ID NOS. 27180-27495), Table E (SEQ ID NOS. 27496-27603), and Table F (SEQ ID NOS. 27604-27939). A DMSO only control was plated for each sample and cell number. Following overnight incubation at 37° C., plates were washed with PBS and incubated with anti-monkey IFNγ mAb biotin (MAbtech) for two hours, followed by an additional wash and incubation with Streptavidin-ALP (MAbtech) for one hour. After final wash, plates were incubated for ten minutes with BCIP/NBT (MAbtech) to develop the immunospots. Spots were imaged and enumerated using an AID reader (Autoimmun Diagnostika). For data processing and analysis, samples with replicate well variability (Variability=Variance/(median+1)) greater than 10 and median greater than 10 were excluded. Spot values were adjusted based on the well saturation according to the formula:

AdjustedSpots=RawSpots+2*(RawSpots*Saturation/(100−Saturation)

Each sample was background corrected by subtracting the average value of the negative control peptide wells. Data is presented as spot forming colonies (SFC) per 1×10⁶ splenocytes. Wells with well saturation values greater than 35% were labeled as “too numerous to count” (TNTC) and excluded. For samples and peptides that were TNTC, the value measured with 2.5×10⁴ cells/well was used.

### Vaccine Constructs

[0671] The various sequences evaluated are as follows:
[0672] “IDTSpike_{g}”: SARS-CoV-2 Spike protein encoded by IDT optimized sequence (see SEQ ID NO:69) and including a D614G mutation with reference to SEQ ID NO:59 (see corresponding nucleotide mutation in SEQ ID NO:70); also referred to as “Spike VI”
[0673] “CTSpike_{g}”: SARS-CoV-2 Spike protein encoded by Cool Tool optimized sequence version 1 (SEQ ID NO:79) including a D614G mutation with reference to SEQ ID NO:59 (see corresponding nucleotide mutation in SEQ ID NO:70); also referred to as “Spike V2.” In versions referred to as “CTSpike_{D}” D614 is not altered.
[0674] “CTSpikeF2P_{g}”: SARS-CoV-2 Spike protein encoded by Cool Tool optimized sequence version 1 (SEQ ID NO:79) including a R682V to disrupt the Furin cleavage site (682-685 RRAR [SEQ ID NO: 125] to GSAS [SEQ ID NO: 126]); and K986P and V987P to interfere with the secondary structure of Spike with reference to the reference Spike protein (SEQ ID NO:59). The nucleotide sequence is shown in SEQ ID NO:89 and protein sequnce shown in SEQ ID NO:90
[0675] “TCE5”: Selected CD8+ epitopes predicted by the EDGE platform to be presented on MHC molecules for SARS-CoV-2 proteins other than Spike. The 15 selected epitopes are presented along with their order in the cassette in Table 10. The nucleotide sequence is shown in SEQ ID NO:91 and protein sequence shown in SEQ ID NO:92. FIG. 14 shows the estimated protection across the four indicated populations for TCE5. All populations are estimated to have coverage above 95% up to at least the threshold of 7 epitopes (last column).
[0676] The SAM vector SAM-SGP1-TCE5-SGP2-CTSpike_{G}F2P is shown in SEQ ID NO:93
[0677] The ChAd vector ChAd-CMV-CTSpikeGF2P-CMV-TCE5 (EPE) is shown in SEQ ID NO:114
[0678] Additional vectors and Spike variants were designed for evaluation as shown in SEQ ID NOs:109-113

TABLE 9
Encoded Spike Variants

CTSpikeF2Pg nucleotide (SEQ ID NO: 89); Bold Italic Furin Mutation 682-685 RRAR (SEQ ID NO: 125) to
GSAS (SEQ ID NO: 126), Bold Lower Case K986P and V987P
ATGTTTGTCTTCCTGGTCTTGCTGCCGCTGGTGAGCAGCCAGTGCGTGAATCTCACCACCCGCACCCA
GCTTCCACCTGCCTACACTAACAGCTTCACCCGAGGGGTGTATTACCCTGACAAGGTATTCCGGTCCT
CCGTCCTCCATAGCACGCAGGACCTTTTTCTGCCCTTCTTCTCAAATGTGACATGGTTCCATGCCATTC
ACGTGAGCGGCACGAATGGAACGAAGCGCTTTGATAACCCCGTGCTGCCTTTCAATGACGGCGTCTA
CTTCGCCTCCACTGAAAAGTCAAACATCATCCGGGGCTGGATCTTTGGCACCACTCTTGATTCAAAGA
CCCAGTCACTGCTGATTGTGAACAATGCTACAAACGTGGTTATCAAGGTGTGTGAGTTTCAGTTCTGT
AACGATCCATTTTTGGGAGTGTACTACCACAAGAACAACAAGTCCTGGATGGAGTCTGAGTTCAGAG
TGTATAGCTCTGCTAACAACTGCACCTTCGAGTACGTGTCCCAGCCTTTCCTTATGGACCTGGAAGGC
AAACAGGGCAATTTCAAAAACCTGAGAGAGTTCGTGTTTAAGAACATTGACGGATACTTCAAAATTT
ATTCTAAGCACACACCAATTAACTTAGTGCGGGACCTACCCCAAGGCTTTAGCGCCCTAGAGCCCCT
GGTTGACCTGCCCATTGGGATCAATATAACAAGGTTCCAAACTCTACTGGCTCTGCATAGAAGTTATC
TGACCCCAGGAGACAGCTCTAGTGGTTGGACCGCCGGCGCAGCAGCCTACTATGTCGGGTACTTACA
GCCACGCACGTTCCTTCTGAAGTACAATGAGAACGGGACAATCACTGACGCAGTAGACTGTGCACTG
GACCCGCTAAGCGAGACTAAGTGCACACTTAAATCCTTCACGGTGGAGAAAGGCATTTATCAGACCT
CTAACTTCAGGGTGCAGCCAACAGAAAGCATTGTGCGATTCCCAAATATTACTAATCTTTGCCCTTTC
GGGGAGGTCTTTAATGCAACTAGATTCGCATCAGTCTATGCGTGGAACCGCAAACGCATTTCCAATT
GTGTCGCAGACTACTCAGTGCTGTACAACTCTGCCTCTTTCAGTACGTTCAAGTGTTACGGAGTGTCA
CCCACTAAACTGAACGACCTGTGCTTTACAAATGTCTACGCTGACTCCTTCGTGATTAGGGGAGACG
AGGTGAGACAAATTGCCCCCGGACAGACTGGGAAGATTGCCGACTACAATTATAAGCTTCCTGATGA
TTTCACTGGCTGTGTTATTGCCTGGAATAGTAACAATCTGGATAGCAAGGTGGGAGGCAACTATAAC
TACTTATATCGACTGTTTAGGAAGAGTAATCTGAAACCATTTGAGCGGGATATTTCCACAGAAATTTA
CCAGGCCGGGAGCACACCATGTAATGGGGTGGAGGGATTTAATTGTTACTTCCCACTCCAGAGCTAT
GGTTTCCAACCCACCAATGGAGTGGGTTACCAGCCCTATAGAGTCGTGGTGCTTAGTTTTGAGCTGCT
TCACGCCCCAGCAACCGTCTGCGGTCCCAAAAAGTCGACCAATCTCGTGAAAAACAAATGCGTAAAC
TTCAACTTTAACGGCTTAACAGGAACCGGCGTGCTCACCGAAAGCAACAAGAAATTCCTTCCATTTC
AGCAATTCGGAAGGGACATCGCCGACACAACAGACGCGGTGAGGGACCCACAGACTCTGGAGATAC
TGGACATCACTCCTTGTTCGTTTGGGGGCGTCTCGGTCATCACACCCGGGACTAATACTAGTAATCAG
GTAGCAGTTTTATATCAAGGCGTCAACTGTACCGAAGTACCTGTGGCCATACACGCTGATCAGCTAA
CGCCAACATGGCGAGTCTATTCCACCGGCTCTAACGTTTTTCAGACCAGGGCTGGGTGCCTGATAGG
GGCAGAGCACGTCAATAATTCCTATGAGTGTGATATCCCCATAGGTGCGGGGATCTGTGCCAGCTAT
CAAACCCAAACCAATTCACCA [symbol] TCTGTGGCTTCTCAGAGCATAATTGCATATACAATG
TCACTGGGCGCTGAGAATAGCGTTGCATACTCTAATAACAGCATAGCCATTCCCACGAACTTTACTAT
CAGTGTGACAACCGAAATATTGCCAGTTTCGATGACCAAAACTAGCGTGGATTGCACGATGTACATC
TGTGGAGACTCTACCGAATGCAGCAATCTGCTATTACAATATGGCAGCTTCTGTACACAGTTAAATCG
AGCCTTGACAGGCATCGCAGTGGAACAGGACAAAAATACTCAAGAGGTGTTTGCACAGGTGAAGCA
AATCTACAAAACGCCCCCCATTAAAGATTTTGGCGGGTTCAATTTTTCACAAATTCTCCCCGACCCGT
CTAAGCCGAGTAAGCGGTCCTTCATCGAAGATCTGCTCTTTAACAAAGTAACCCTCGCCGATGCCGG
CTTTATTAAGCAGTATGGCGACTGCCTGGGGGATATAGCCGCTCGTGACCTGATTTGCGCCCAGAAG
TTCAATGGTCTGACCGTGTTGCCTCCTTTATTGACCGATGAAATGATTGCCCAGTACACTAGTGCCCT
GCTGGCCGGCACTATCACGTCTGGGTGGACCTTCGGAGCTGGTGCCGCCTTGCAGATACCTTTTGCAA
TGCAGATGGCCTATAGGTTTAATGGTATCGGAGTGACTCAGAACGTACTGTACGAGAACCAGAAGCT
CATCGCTAATCAATTTAACTCCGCTATCGGAAAAATCCAGGACAGCCTCTCTTCTACAGCTAGCGCTC
TGGGCAAACTGCAGGATGTCGTTAATCAGAATGCCCAGGCCCTGAACACCTTGGTTAAACAACTATC
TTCCAACTTCGGGGCCATATCCAGTGTGTTGAATGATATTCTCTCCCGCTTGGATccacctGAAGCTGAG
GTGCAGATCGATCGCTTGATCACCGGCAGACTGCAGTCCCTCCAGACATATGTAACTCAGCAGCTGA
TTAGAGCCGCCGAGATAAGGGCAAGTGCGAATCTGGCTGCCACCAAGATGAGCGAATGTGTATTGG
GCCAGAGCAAACGAGTTGATTTTTGCGGTAAGGGGTATCATTTAATGTCTTTCCCTCAATCCGCACCT
CATGGCGTAGTTTTCCTGCATGTGACTTATGTCCCGGCTCAGGAGAAGAATTTTACCACAGCCCCCGC
GATCTGCCATGACGGAAAGGCCCACTTCCCCCGGGAAGGCGTGTTTGTATCCAATGGGACTCACTGG
TTTGTCACTCAGCGAAATTTTTATGAACCACAGATCATCACCACTGACAACACATTTGTTAGTGGAAA
CTGCGATGTGGTCATCGGCATCGTGAATAACACTGTCTATGATCCACTGCAACCTGAACTGGATTCTT
TTAAAGAGGAACTCGACAAGTATTTTAAAAACCACACTAGCCCTGACGTGGATCTCGGTGACATTTC
TGGCATCAACGCTAGCGTAGTGAACATTCAGAAAGAGATAGATAGACTTAATGAGGTGGCCAAGAA
CCTCAACGAAAGTCTGATCGACCTCCAGGAACTGGGGAAATACGAGCAGTACATTAAATGGCCTTGG
TACATATGGCTGGGGTTCATTGCTGGGCTGATCGCAATAGTGATGGTGACCATAATGCTCTGTTGCAT
GACTAGCTGCTGCAGCTGCCTGAAGGGCTGCTGTAGTTGTGGGTCATGTTGTAAGTTTGACGAAGAT
GATAGCGAGCCTGTCCTTAAAGGAGTGAAGCTCCACTACACCTAG
CTSpikeF2Pg amino acid (SEQ ID NO: 90); Bold Italic Furin Mutation 682-685 RRAR (SEQ ID NO: 125)
to GSAS (SEQ ID NO: 126), Bold Lower Case K986P and V987P
MFVFLVLLPLVSSQCVNLTTRTQLPPAYTNSFTRGVYYPDKVFRSSVLHSTQDLFLPFFSNVTWFHAIHVS
GTNGTKRFDNPVLPFNDGVYFASTEKSNIIRGWIFGTTLDSKTQSLLIVNNATNVVIKVCEFQFCNDPFLGV
YYHKNNKSWMESEFRVYSSANNCTFEYVSQPFLMDLEGKQGNFKNLREFVFKNIDGYFKIYSKHTPINLV
RDLPQGFSALEPLVDLPIGINITRFQTLLALHRSYLTPGDSSSGWTAGAAAYYVGYLQPRTFLLKYNENGTI
TDAVDCALDPLSETKCTLKSFTVEKGIYQTSNFRVQPTESIVRFPNITNLCPFGEVFNATRFASVYAWNRK
RISNCVADYSVLYNSASFSTFKCYGVSPTKLNDLCFTNVYADSFVIRGDEVRQIAPGQTGKIADYNYKLPD
DFTGCVIAWNSNNLDSKVGGNYNYLYRLFRKSNLKPFERDISTEIYQAGSTPCNGVEGFNCYFPLQSYGF
QPTNGVGYQPYRVVVLSFELLHAPATVCGPKKSTNLVKNKCVNFNFNGLTGTGVLTESNKKFLPFQQFG
RDIADTTDAVRDPQTLEILDITPCSFGGVSVITPGTNTSNQVAVLYQGVNCTEVPVAIHADQLTPTWRVYS
TGSNVFQTRAGCLIGAEHVNNSYECDIPIGAGICASYQTQTNSP [symbol] SVASQSIIAYTMSLGAENSVAYSN
NSIAIPTNFTISVTTEILPVSMTKTSVDCTMYICGDSTECSNLLLQYGSFCTQLNRALTGIAVEQDKNTQEVF
AQVKQIYKTPPIKDFGGFNFSQILPDPSKPSKRSFIEDLLFNKVTLADAGFIKQYGDCLGDIAARDLICAQKF
NGLTVLPPLLTDEMIAQYTSALLAGTITSGWTFGAGAALQIPFAMQMAYRENGIGVTQNVLYENQKLIAN
QFNSAIGKIQDSLSSTASALGKLQDVVNQNAQALNTLVKQLSSNFGAISSVLNDILSRLDppEAEVQIDRLI
TGRLQSLQTYVTQQLIRAAEIRASANLAATKMSECVLGQSKRVDFCGKGYHLMSFPQSAPHGVVFLHVT
YVPAQEKNFTTAPAICHDGKAHFPREGVFVSNGTHWFVTQRNFYEPQIITTDNTFVSGNCDVVIGIVNNTV
YDPLQPELDSFKEELDKYFKNHTSPDVDLGDISGINASVVNIQKEIDRLNEVAKNLNESLIDLQELGKYEQ
YIKWPWYIWLGFIAGLIAIVMVTIMLCCMTSCCSCLKGCCSCGSCCKFDEDDSEPVLKGVKLHYT*

TABLE 10
TCE5 Cassette (Order of Frames as Shown)

| | | Start | End | SEQ ID | |
|---|---|---|---|---|---|
| Frame | Gene | aa | aa | NO | Amino Acid Sequence |
| 1 | ORF3a | 102 | 152 | 94 | EAPFLYLYALVYFLQSINFVRIIMRLWLCWKCRSKNPLLYDANYFLCW |
| | | | | | HTN |
| 2 | ORF3a | 53 | 85 | 95 | LAVFQSASKIITLKKRWQLALSKGVHFVCNLLL |
| 3 | ORF3a | 13 | 55 | 96 | VTLKQGEIKDATPSDFVRATATIPIQASLPFGWLIVGVALLAV |
| 4 | N | 40 | 94 | 97 | RRPQGLPNNTASWFTALTQHGKEDLKFPRGQGVPINTNSSPDDQIG |
| | | | | | YYRRATRRI |
| 5 | M | 84 | 102 | 98 | MACLVGLMWLSYFIASFRL |
| 6 | N | 369 | 408 | 99 | KKDKKKKADETQALPQRQKKQQTVTLLPAADLDDFSKQLQ |
| 7 | N | 284 | 338 | 100 | GNFGDQELIRQGTDYKHWPQIAQFAPSASAFFGMSRIGMEVTPSG |
| | | | | | TWLTYTGAIK |
| 8 | ORF3a | 169 | 198 | 101 | ITSGDGTTSPISEHDYQIGGYTEKWESGVK |
| 9 | N | 233 | 282 | 102 | KMSGKGQQQQGQTVTKKSAAEASKKPRQKRTATKAYNVTQAFGR |
| | | | | | RGPEQT |
| 10 | M | 56 | 75 | 103 | LLWPVTLACFVLAAVYRINW |
| 11 | N | 346 | 375 | 104 | FKDQVILLNKHIDAYKTFPPTEPKKDKKKK |
| 12 | N | 205 | 239 | 105 | TSPARMAGNGGDAALALLLLDRLNQLESKMSGKGQ |
| 13 | N | 100 | 118 | 106 | KMKDLSPRWYFYYLGTGPE |
| 14 | ORF3a | 199 | 254 | 107 | DCVVLHSYFTSDYYQLYSTQLSTDTGVEHVTFFIYNKIVDEPEEHVQIH |
| | | | | | TIDGSSG |
| 15 | N | 129 | 174 | 108 | GIIWVATEGALNTPKDHIGTRNPANNAAIVLQLPQGTTLPKGFYAE |

TCE5 Nucleotide Sequence (SEQ ID NO: 91):
ATGGCTGGCGAGGCCCCCTTCCTTTACCTGTACGCCCTTGTGTATTTCC
TGCAGAGCATCAATTTTGTGAGAATCATCATGAGGCTGTGGCTTTGCTG
GAAATGTAGGAGCAAGAACCCCCTGTTGTATGACGCCAACTACTTTCTG
TGTTGGCACACCAATCTCGCCGTGTTCCAGAGTGCCTCTAAGATCATTA
CACTGAAAAAGCGGTGGCAGCTTGCACTTTCTAAGGGAGTGCATTTCGT
TTGCAACCTGCTCCTGGTGACACTCAAGCAGGGGGAAATCAAAGACGCC
ACCCCTAGCGACTTCGTTAGAGCCACTGCCACAATCCCAATCCAGGCTT
CCCTGCCTTTCGGCTGGCTTATCGTGGGTGTGGCACTGTTGGCTGTGCG
GAGACCACAGGGACTGCCTAATAATACAGCTAGCTGGTTTACCGCTCTG
ACACAGCATGGCAAAGAAGACCTCAAGTTCCCTCGCGGTCAGGGGGTGC
CTATTAACACTAATAGCTCTCCAGACGACCAAATTGGGTATTACAGGCG
CGCCACAAGACGGATCATGGCCTGCTTAGTGGGGCTGATGTGGCTATCC
TATTTTATTGCTAGCTTTCGCCTGAAGAAGGACAAGAAGAAGAAAGCTG
ATGAGACCCAGGCACTGCCCCAGCGCCAAAAGAAGCAGCAGACAGTCAC
ACTGCTCCCTGCTGCAGACCTGGATGACTTCAGCAAGCAGCTGCAGGGG
AACTTTGGCGACCAGGAGCTGATTAGACAGGGGACTGACTATAAGCATT
GGCCTCAGATTGCTCAGTTCGCCCCAAGTGCATCCGCCTTCTTCGGGAT
GTCACGAATAGGAATGGAAGTGACCCCTTCTGGGACATGGTTGACATAC
ACCGGAGCAATCAAGATTACCTCCGGGGACGGTACCACGTCTCCTATTA
GCGAACACGATTATCAGATAGGGGGATATACTGAGAAGTGGGAGTCCGG
CGTCAAAAAGATGAGTGGGAAAGGCCAGCAGCAACAAGGCCAAACAGTT
ACTAAAAAGTCTGCCGCAGAAGCTAGTAAAAAGCCTCGCCAGAAGCGGA
CAGCCACCAAAGCTTACAATGTGACTCAGGCCTTCGGCCGCCGGGGGCC
TGAACAGACCCTCTTGTGGCCCGTTACCCTCGCATGTTTCGTGCTTGCA
GCTGTGTACAGGATCAATTGGTTTAAGGATCAGGTTATCCTGTTGAACA
AACATATAGATGCCTATAAGACATTCCCACCCACCGAGCCAAAGAAAGA
TAAGAAAAAGAAAACTAGTCCTGCAAGGATGGCCGGCAATGGAGGAGAC
GCAGCCTTAGCCCTGCTCTTACTCGACAGGCTGAACCAACTTGAGTCTA
AAATGAGCGGTAAAGGGCAGAAGATGAAGGATCTGTCCCCAAGGTGGTA
TTTCTACTATCTGGGCACCGGCCCTGAGGATTGTGTCGTCCTCCACTCA
TACTTCACTAGCGATTATTACCAGCTGTATAGTACACAATTATCTACCG
ACACAGGCGTCGAGCACGTGACCTTCTTTATATACAATAAGATCGTGGA
TGAACCAGAGGAGCATGTGCAGATCCACACTATTGATGGCTCTAGCGGG
GGCATCATCTGGGTGGCAACAGAAGGAGCCCTCAACACCCCAAAGGACC
ATATCGGCACCAGGAATCCAGCCAACAATGCCGCCATTGTTCTGCAGCT
CCCTCAGGGCACTACTCTCCCTAAAGGCTTCTATGCTGAGGGACCCGGA
CCAGGCGCCAAATTTGTTGCTGCTTGGACACTGAAAGCTGCTGCTGGGC
CCGGACCAGGCCAGTACATCAAGGCCAACTCTAAGTTTATCGGCATCAC
CGAATTGGGACCTGGACCCGGCTAG
TCE5 Amino Acid Sequence (SEQ ID NO: 92):
MAGEAPFLYLYALVYFLQSINFVRIIMRLWLCWKCRSKNPLLYDANYFL
CWHTNLAVFQSASKIITLKKRWQLALSKGVHFVCNLLLVTLKQGEIKDA
TPSDFVRATATIPIQASLPFGWLIVGVALLAVRRPQGLPNNTASWFTAL
TQHGKEDLKFPRGQGVPINTNSSPDDQIGYYRRATRRIMACLVGLMWLS
YFIASFRLKKDKKKKADETQALPQRQKKQQTVTLLPAADLDDESKQLQG
NFGDQELIRQGTDYKHWPQIAQFAPSASAFFGMSRIGMEVTPSGTWLTY
TGAIKITSGDGTTSPISEHDYQIGGYTEKWESGVKKMSGKGQQQQGQTV
TKKSAAEASKKPRQKRTATKAYNVTQAFGRRGPEQTLLWPVTLACFVLA
AVYRINWFKDQVILLNKHIDAYKTFPPTEPKKDKKKKTSPARMAGNGGD
AALALLLLDRLNQLESKMSGKGQKMKDLSPRWYFYYLGTGPEDCVVLHS
YFTSDYYQLYSTQLSTDTGVEHVTFFIYNKIVDEPEEHVQIHTIDGSSG
GIIWVATEGALNTPKDHIGTRNPANNAAIVLQLPQGTTLPKGFYAEGPG
PGAKFVAAWTLKAAAGPGPGQYIKANSKFIGITELGPGPG-

[0679] SAM-SGP1-TCE5-SGP2-CTSpike_{G}F2P Nucleotide Sequence (SEQ ID NO:93): (NT 1-17: T7 promoter; NT 62-7543: VEEV non-structural protein coding region; NT 7518-7560: SGP1; NT 7582-7587 and 9541-9546: Kozak sequence; NT 7588-9474: TCE5 cassette; NT 9480-9540: SGP2; NT 9547-13368: CTSpike Furin-2P); See Sequence Listing.

[0680] ChAd-CMV-CTSpikeGF2P-CMV-TCE5 (EPE) Nucleotide Sequence (SEQ ID NO:114); See Sequence Listing.

[0681] XIV.G.I SARS-CoV-2 Vaccine Produces Responses to Various Spike Constructs

[0682] ChAd and SAM vaccine platforms encoding various versions of the SARS-CoV-2 Spike protein were assessed.

[0683] Versions of a Spike-encoding cassette featuring different sequence optimizations were assessed: “IDTSpike_{g}” (SEQ ID NO:69, also referred to as “Spike V1” or “v1”); “CTSpike_{g}”: (SEQ ID NO:79, also referred to as “Spike V2” or “v2”). As shown in FIG. 15, both ChAd (FIG. 15A) and SAM (FIG. 15B) vaccines produced detectable T cell responses (left panel), Spike-specific IgG antibodies (middle panel) and neutralizing antibodies (right panel). Notably, a ChAd vaccine encoding the CTSpike_{g} sequence version produced a 3-fold increased T cell response, 100-fold increased IgG production, and 60-fold increase in neutralizing antibody titer. Similarly, a SAM vaccine encoding the CTSpike_{g} sequence version produced an increased T cell response, 7-fold increase in IgG production, and 4-fold increase in neutralizing antibody titer. Accordingly, the data demonstrate sequence optimization of the Spike cassette produced an increased immune response across the multiple parameters assessed for each vaccine platform examined.

[0684] A version of a Spike-encoding cassette featuring modified Spike that includes removal of a furin site and addition of prolines in S2 domain was assessed: “CTSpikeF2P_{g}” (SEQ ID NO:89 and SEQ ID NO:90). As shown in FIG. 16, both ChAd (left panel) and SAM (right panel) vaccines encoding the F2P-modified Spike produced 5-fold and 20-fold Spike-specific IgG antibodies, respectively, relative to a corresponding “CTSpike_{g}” cassette that does not have the referenced modifications. Accordingly, the data demonstrate modification of the Spike cassette produced an increased antibody response for each vaccine platform examined.

[0685] XIV.G.II SARS-CoV-2 Vaccine Produces Responses to T Cell Epitopes

[0686] ChAd and SAM vaccine platforms encoding various a modified SARS-CoV-2 Spike protein and a T cell epitope (TCE) cassette encoding EDGE predicted epitopes (EPE) were assessed.

[0687] Both a modified Spike-encoding only cassette (“CTSpikeF2P_{g}” (SEQ ID NO:89) and modified Spike together with additional non-Spike T cell epitopes (ChAd SEQ ID NO:114; SAM SEQ ID NO:93; see Table 10 for “TCE5”), and immune responses assessed, as described above. As shown in FIG. 17, both ChAd (FIG. 17A) and SAM (FIG. 17B) each vaccine assessed produced detectable T cell responses to Spike (left panel), while vaccines including the TCE5 cassette also generally produced detectable T cell responses to the encoded T cell epitopes (right panel). Accordingly, the data demonstrate addition of a T cell epitope cassette led to broad T cell responses across the SARS-CoV-2 Genome for each vaccine platform examined.

[0688] XIV.G.III Order of Cassettes in SARS-CoV-2 Vaccine Influences Immune Response

[0689] SAM vaccine platforms encoding various orders of a modified SARS-CoV-2 Spike protein and a T cell epitope (TCE) cassette encoding EDGE predicted epitopes (EPE) were assessed.

[0690] As shown in FIG. 18, T cell responses to Spike (top panel), T cell responses to the encoded T cell epitopes (middle panel), and Spike-specific IgG antibodies (bottom panel) were produced when vaccinated with various constructs. In FIG. 18A, SAM constructs included “IDTSpike_{g}” (SEQ ID NO:69) alone (left columns), IDTSpike_{g} expressed from a first subgenomic promoter followed by TCE5 expressed from a second subgenomic promoter (middle columns), or TCE5 expressed from a first subgenomic promoter followed by IDTSpike_{g} expressed from a second subgenomic promoter (right columns), with immune responses assessed, as described above. In FIG. 18B, SAM constructs included “IDTSpike_{g}” (SEQ ID NO:69) alone (first column), IDTSpike_{g} expressed from a first subgenomic promoter followed by TCE6 or TCE7 expressed from a second subgenomic promoter (columns 2 and 4, respectively), or TCE6 or TCE7 expressed from a first subgenomic promoter followed by IDTSpike_{g} expressed from a second subgenomic promoter (columns 3 and 5, respectively), with immune responses assessed, as described above. In FIG. 18C, SAM constructs included “CTSpike_{g}” (SEQ ID NO:79) alone (first column), CTSpike_{g} expressed from a first subgenomic promoter followed by TCE5 or TCE8 expressed from a second subgenomic promoter (columns 2 and 4, respectively), or TCE5 or TCE8 expressed from a first subgenomic promoter followed by CTSpike_{g} expressed from a second subgenomic promoter (columns 3 and 5, respectively), with immune responses assessed, as described above. Generally, and in particular for Spike, T cell responses were increased when the respective epitopes were expressed from the second subgenomic promoter, including increased Spike-directed T cell responses relative to Spike alone. A similar trend was also observed generally observed with increased Spike-specific IgG titers when the Spike antigen was expressed from the second subgenomic promoter except, for potentially the CTSpike_{g} constructs. Accordingly, the data demonstrate sequence order of antigen cassettes in vaccine platforms influenced immune responses.

[0691] XIV.G.IV SARS-CoV-2 Vaccine Priming Dose Produces Responses to Spike in Mice

[0692] ChAd and SAM vaccine platforms encoding the SARS-CoV-2 Spike protein were assessed in mice as a single/priming vaccine.

[0693] Mice were immunized with a Spike-encoding cassette featuring “CTSpike_{g}” (SEQ ID NO:79) and monitored over time, as described above. As shown in FIG. 19, both ChAd (FIG. 19A) and SAM (FIG. 19B) vaccines produced detectable T cell responses across multiple Spike T cell epitope pools (left panel), Spike-specific IgG antibodies up to at least 16 weeks post prime (right panel) and neutralizing antibodies up to at least 6 weeks post prime (right bottom panel) following a single priming dose. Accordingly, the data demonstrate a priming immunization with a vaccine including a Spike cassette produced broad and potent Spike-specific T cells and durable IgG and neutralizing antibody titers for each vaccine platform examined.

[0694] XIV.G.V SARS-CoV-2 Heterologous Prime-Boost Regimen Produces Responses to Spike in Mice

[0695] ChAd and SAM vaccine platforms encoding the SARS-CoV-2 Spike protein were assessed in mice as part of a heterologous prime/boost regimen, as shown in FIG. 20A (top panel).

[0696] Mice were immunized with a ChAd platform priming dose including a Spike-encoding cassette featuring “CTSpike_{g}” (SEQ ID NO:79) then immunized with a SAM platform boosting dose including a Spike-encoding cassette featuring “IDTSpike_{g}” (SEQ ID NO:69) and monitored over time, as described above. As shown in FIG. 20, ChAd administration produced, and SAM administration subsequently boosted detectable T cell responses across multiple Spike T cell epitope pools (FIG. 20A, bottom panel), Spike-specific IgG antibodies up to at least 14 weeks post prime (FIG. 20B, left panel) and neutralizing antibodies up to at least 10 weeks post prime (FIG. 20B, right panel). Notably, a SAM boosting vaccine produced a 9-fold increased T cell response (including a Th1 bias as assessed by ICS; ICS data not shown), 100-fold increased IgG production, and 40-fold increase in neutralizing antibody titer 2 weeks following boost administration. Accordingly, the data demonstrate immunization with a vaccine including a Spike cassette produced broad and potent Spike-specific T cells and durable IgG and neutralizing antibody titers in mice, including that a heterologous prime/boost vaccine regimen produced an increased response following boosting dose administration.

[0697] XIV.G.VI SARS-CoV-2 Heterologous Prime-Boost Regimen Produces Responses to Spike in Non-Human Primates

[0698] ChAd and SAM vaccine platforms encoding the SARS-CoV-2 Spike protein were assessed in Indian rhesus macaques as part of a heterologous prime/boost regimen, as shown in FIG. 21A (top panel).

[0699] NHPs were immunized with a ChAd platform priming dose including a Spike-encoding cassette featuring “CTSpike_{g}” (SEQ ID NO:79) then immunized with a SAM platform boosting dose including a Spike-encoding cassette featuring “IDTSpike_{g}” (SEQ ID NO:69) and monitored over time, as described above. As shown in FIG. 21, a ChAd/SAM prime/boost vaccine regimen produced detectable peak T cell responses across multiple Spike T cell epitope pools (FIG. 21A, middle and bottom panels), Spike-specific IgG antibodies up to at least 12 weeks post prime (FIG. 21B, top left panel) and neutralizing antibodies up to at least 12 weeks post prime (FIG. 21B, bottom left panel) in all five NHP animals assessed. Notably, peak Spike T cell responses were greater than levels considered protective for SIV and influenza against their respective Spike proteins (FIG. 21A, bottom panel top and bottom dashed lines, respectively). In addition, neutralizing antibody titers were at least 10-fold greater than titers found in convalescent human sera (FIG. 21B, right panel) and greater than levels considered protective against SARS-CoV-2 infection (McMahan et al. Nature 2020). Accordingly, the data demonstrate immunization with a vaccine including a Spike cassette produced broad and potent Spike-specific T cells and durable IgG and neutralizing antibody titers in NHPs as part of a heterologous prime/boost vaccine regimen, including an antibody response generally considered protective.

[0700] XIV.G.VII SARS-CoV-2 Homologous Prime-Boost Regimen Produces Responses to Spike in Mice

[0701] A SAM vaccine platform encoding the SARS-CoV-2 Spike protein was assessed in mice as part of a homologous prime/boost regimen, as shown in FIG. 22A (top panel).

[0702] Mice were immunized with a SAM platform including a Spike-encoding cassette featuring “IDTSpike_{D}” (SEQ ID NO:69 with exception of D614 not being altered) and monitored over time, as described above. As shown in FIG. 22, SAM administration initially both produced, and re-administration subsequently boosted, detectable T cell responses across multiple Spike T cell epitope pools (FIG. 22A, bottom panel), Spike-specific IgG antibodies up to at least 15 weeks post prime (FIG. 22B, left panel) and neutralizing antibodies up to at least 15 weeks post prime (FIG. 22B, right panel). Notably, a SAM boosting vaccine produced at least a 4-fold increased T cell response 2 weeks following boost administration, 80-fold increased IgG production 7 weeks following boost administration, and 25-fold increase in neutralizing antibody titer 7 weeks following boost administration. Accordingly, the data demonstrate immunization with a vaccine including a Spike cassette produced broad and potent Spike-specific T cells and durable IgG and neutralizing antibody titers in mice, including that a homologous prime/boost vaccine regimen produced an increased response following boosting dose administration.

[0703] XIV.G.VIII SARS-CoV-2 Homologous Prime-Boost Regimen Produces Responses to Spike in Non-Human Primates

[0704] A SAM vaccine platform encoding the SARS-CoV-2 Spike protein was assessed in Indian rhesus macaques as part of a homologous prime/boost regimen, as shown in FIG. 23 (top panel).

[0705] NHPs were immunized with a SAM platform including a Spike-encoding cassette featuring “IDTSpike_{g}” (SEQ ID NO:69) and monitored over time, as described above. As shown in FIG. 23, SAM administration initially both produced, and re-administration subsequently boosted, Spike-specific IgG antibodies up to at least 12 weeks post prime (FIG. 23, middle panels) and neutralizing antibodies up to at least 10 weeks post prime (FIG. 23, bottom panels). Notably, neutralizing antibody titers were at least 10-fold greater than titers found in convalescent human sera (FIG. 23, bottom right panel) and greater than levels considered protective against SARS-CoV-2 infection (McMahan et al. Nature 2020). In addition, lose-dose (30 μg) SAM administration produced a more robust response than higher-dose (300 μg) SAM administration. Accordingly, the data demonstrate immunization with a vaccine including a Spike cassette produced high durable IgG and neutralizing antibody titers in NHPs, including that a homologous prime/boost vaccine regimen produced an increased response following boosting dose administration, notably in a “low” dose context, as well as an antibody response generally considered protective.

[0706] XIV.H. Additional SARS-CoV-2 Vaccine Constructions

[0707] Vaccines were constructed to maximize the percentage of people getting predicted to achieve a total magnitude of greater than 1000 from validated epitopes. Briefly, magnitude was calculated across all validated epitopes in the starting proteins (e.g., Spike), as well as any added in the TCE cassettes according to the following with an expected approximate upper size limit of 600 amino acids beyond that of Spike: (1) An individual's magnitude is the sum of all epitope magnitudes across their respective diplotype alleles; (2) Each epitopes magnitude=(magnitude of response)×(Frequency of positive response/100), with values found in Tarke et al. (Comprehensive analysis of T cell immunodominance and immunoprevalence of SARS-CoV-2 epitopes in COVID-19 cases. Cell Rep Med. 2021 Feb. 16; 2(2):100204. doi: 10.1016/j.xcrm.2021.100204. Epub 2021 Jan. 26.), herein incorporated by reference for all purposes; (3) epitopes other than those from starting proteins that span mutations with >5% frequency were excluded (see Table 11 for all mutations>1% frequency either overall or in specific strains), though mutations are allowed in flanking regions; and (4) cassette order was chosen to minimize unintended junction epitopes across adjacent frames, as well as minimize consecutive frames in the same protein to reduce chance of functional protein fragments, as described above.

[0708] The following constructions were produced: (A) “TCE10” starting with full Spike protein as the starting point and adding validated epitopes according to the above for a total size of 378 amino acids in addition to Spike (Table 12A, maps of epitopes covered in FIG. 24A-24F); (B) “TCE9” extended TCE10 and adding validated epitopes according to the above only if fully conserved between SARS and SARS-2 (e.g., as a pan-coronavirus vaccine), with certain frames extended (21 additional amino acids across all frames) to include additional predicted epitopes for alleles (i.e., not validated epitopes), for a total size of 556 amino acids in addition to Spike (Table 12B, maps of epitopes covered in FIG. 25A-25G); (C) “TCE11” starting with full Spike and Nucleocapsid proteins as the starting point and adding validated epitopes according to the above for a total size of 616 amino acids (197aa+full N) in addition to Spike (Table 12C, maps of epitopes covered in FIG. 26A-26D). Table 13A and Table 13B presents the magnitude coverage across various populations for each of TCE5, TCE9, TCE10, and TCE11 for SARS-CoV-2 and SARS/SARS-CoV-2 conserved epitopes, respectively. Notably, each of the vaccine constructs cover greater than 89% of each of the indicated populations with a validated response magnitude greater than 1000 and greater than 95% with a validated response magnitude greater than 100, while TCE9 covers greater than 74% of each of the indicated populations with a validated response magnitude greater than 1000 for epitopes conserved between SARS and SARS-2. FIG. 27 presents the percentages of shared candidate 9-mer epitope distribution between SARS-CoV-2 and SARS-CoV (left panel) and between SARS-CoV-2 and MERS (right panel), highlighting the significant number of conserved sequences outside of the Spike protein demonstrating the value of evaluating and including epitopes beyond those simply encoded by Spike, particularly with a goal of constructing a pan-coronavirus vaccine.

TABLE 11
Mutations > 1% frequency either overall or in specific strains

| Gene | Position | Strain | Frequency |
|---|---|---|---|
| M | 70 | b117 | 0.014 |
| M | 155 | N501Y_early | 0.048 |
| M | 162 | N501Y_early | 0.048 |
| N | 3 | b117 | 0.999 |
| N | 13 | N501Y_early | 0.016 |
| N | 14 | N501Y_early | 0.016 |
| N | 67 | | 0.028 |
| N | 80 | P1 | 1 |
| N | 81 | N501Y_early | 0.033 |
| N | 151 | | 0.011 |
| N | 194 | | 0.056 |
| N | 199 | | 0.041 |
| N | 203 | b117 | 1 |
| N | 204 | b117 | 1 |
| N | 205 | N501Y_early | 1 |
| N | 220 | | 0.218 |
| N | 234 | | 0.033 |
| N | 235 | b117 | 0.999 |
| N | 359 | N501Y_early | 0.016 |
| N | 365 | | 0.021 |
| N | 373 | N501Y_early | 0.016 |
| N | 376 | | 0.029 |
| N | 377 | | 0.018 |
| N | 398 | | 0.015 |
| ORF3a | 15 | b117 | 0.089 |
| ORF3a | 38 | | 0.011 |
| ORF3a | 57 | N501Y_early | 0.982 |
| ORF3a | 90 | b117 | 0.02 |
| ORF3a | 131 | N501Y_early | 0.036 |
| ORF3a | 171 | N501Y_early | 0.589 |
| ORF3a | 172 | | 0.039 |
| ORF3a | 202 | | 0.012 |
| ORF3a | 223 | | 0.016 |
| ORF3a | 251 | | 0.017 |
| ORF3a | 259 | N501Y_early | 0.018 |
| S | 5 | | 0.012 |
| S | 18 | N501Y_early | 0.381 |
| S | 54 | N501Y_early | 0.016 |
| S | 69 | b117 | 1 |
| S | 70 | b117 | 1 |
| S | 80 | N501Y_early | 1 |
| S | 98 | | 0.012 |
| S | 144 | b117 | 1 |
| S | 215 | N501Y_early | 1 |
| S | 222 | | 0.198 |
| S | 241 | N501Y_early | 1 |
| S | 242 | N501Y_early | 1 |
| S | 243 | N501Y_early | 1 |
| S | 246 | N501Y_early | 0.016 |
| S | 262 | | 0.011 |
| S | 316 | N501Y_early | 0.016 |
| S | 384 | N501Y_early | 0.016 |
| S | 417 | N501Y_early | 0.984 |
| S | 439 | | 0.017 |
| S | 477 | | 0.048 |
| S | 484 | N501Y_early | 1 |
| S | 501 | b117 | 1 |
| S | 570 | b117 | 1 |
| S | 614 | b117 | 1 |
| S | 681 | b117 | 1 |
| S | 682 | cleavage | 1 |
| S | 683 | cleavage | 1 |
| S | 685 | cleavage | 1 |
| S | 688 | N501Y_early | 0.016 |
| S | 701 | N501Y_early | 1 |
| S | 706 | b117 | 0.018 |
| S | 716 | b117 | 1 |
| S | 982 | b117 | 1 |
| S | 1078 | N501Y_early | 0.016 |
| S | 1117 | N501Y_early | 0.016 |
| S | 1118 | b117 | 1 |
| S | 1150 | N501Y_early | 0.016 |
| nsp12 | 4577 | | 0.026 |
| nsp12 | 4646 | | 0.01 |
| nsp12 | 4715 | | 0.885 |
| nsp12 | 4815 | | 0.011 |
| nsp12 | 5112 | | 0.016 |
| nsp12 | 5168 | | 0.025 |
| nsp13 | 5542 | | 0.025 |
| nsp13 | 5585 | | 0.026 |
| nsp13 | 5614 | | 0.022 |
| nsp13 | 5784 | | 0.027 |
| nsp13 | 5922 | | 0.017 |
| nsp14 | 6054 | | 0.024 |
| nsp14 | 6426 | | 0.011 |
| nsp15 | 6485 | | 0.015 |
| nsp16 | 7014 | | 0.028 |
| nsp2 | 265 | | 0.132 |
| nsp2 | 300 | | 0.042 |
| nsp3 | 1001 | | 0.059 |
| nsp3 | 1113 | | 0.011 |
| nsp3 | 1246 | | 0.011 |
| nsp3 | 1361 | | 0.01 |
| nsp3 | 1708 | | 0.058 |
| nsp3 | 2230 | | 0.058 |
| nsp3 | 2501 | | 0.02 |
| nsp3 | 2606 | | 0.011 |
| nsp4 | 3087 | | 0.025 |
| nsp5 | 3278 | | 0.016 |
| nsp5 | 3352 | | 0.034 |
| nsp5 | 3353 | | 0.013 |
| nsp5 | 3371 | | 0.013 |
| nsp6 | 3606 | | 0.056 |
| nsp6 | 3675 | | 0.064 |
| nsp6 | 3676 | | 0.064 |
| nsp6 | 3677 | | 0.064 |
| nsp6 | 3711 | | 0.015 |
| nsp7 | 3884 | | 0.01 |
| nsp9 | 4241 | | 0.016 |

TABLE 12A
TCE10 Cassette (Order of Frames as Shown)

| | Frame Start | Frame End | | SEQ |
|---|---|---|---|---|
| Gene | in Gene | in Gene | Frame sequence | ID NO: |
| N | 356 | 378 | HIDAYKTFPPTEPKKDKKKKADE | 27944 |
| ORF3a | 133 | 149 | CRSKNPLLYDANYFLCW | 27945 |
| nsp3 | 1632 | 1660 | FEYYHTTDPSFLGRYMSALNHTKKWKYPQ | 27946 |
| nsp3 | 1360 | 1377 | ISNEKQEILGTVSWNLRE | 27947 |
| M | 160 | 203 | DIKDLPKEITVATSRTLSYYKLGASQRVAGDSGFAA | 27948 |
| | | | YSRYRIGN | |
| ORF3a | 29 | 52 | VRATATIPIQASLPFGWLIVGVAL | 27949 |
| nsp4 | 3111 | 3134 | YLTFYLTNDVSFLAHIQWMVMFTP | 27950 |
| M | 89 | 109 | GLMWLSYFIASFRLFARTRSM | 27951 |
| nsp12 | 4553 | 4571 | DWYDFVENPDILRVYANLG | 27952 |
| nsp3 | 1919 | 1935 | PYPNASFDNFKFVCDNI | 27953 |
| nsp12 | 4806 | 4826 | NFNKDFYDFAVSKGFFKEGSS | 27954 |
| nsp12 | 4728 | 4745 | DGVPFVVSTGYHFRELGV | 27955 |
| nsp4 | 2850 | 2876 | ACPLIAAVITREVGFVVPGLPGTILRT | 27956 |
| nsp3 | 2745 | 2761 | ATTRQVVNVVTTKIALK | 27957 |
| N | 318 | 337 | SRIGMEVTPSGTWLTYTGAI | 27958 |
| M | 61 | 77 | TLACFVLAAVYRINWIT | 27959 |
| N | 96 | 117 | GGDGKMKDLSPRWYFYYLGTGP | 27960 |

TABLE 12B
TCE9 Cassette (Order of Frames as Shown)

| | Frame Start | Frame End | | SEQ |
|---|---|---|---|---|
| Gene | in Gene | in Gene | Frame sequence | ID NO: |
| nsp12 | 4719 | 4745 | GPLVRKIFVDGVPFVVSTGYHFRELGV | 27961 |
| nsp4 | 3096 | 3134 | PVYSFLPGVYSVIYLYLTFYLTNDVSFLAHIQWMVM | 27962 |
| | | | FTP | |
| M | 89 | 109 | GLMWLSYFIASFRLFARTRSM | 27951 |
| nsp12 | 4888 | 4905 | NNLDKSAGFPFNKWGKAR | 27963 |
| nsp3 | 2745 | 2761 | ATTRQVVNVVTTKIALK | 27957 |
| M | 61 | 79 | TLACFVLAAVYRINWITGG | 27964 |
| nsp3 | 1919 | 1935 | PYPNASFDNFKFVCDNI | 27953 |
| nsp3 | 2676 | 2692 | TYNKVENMTPRDLGACI | 27965 |
| ORF3a | 29 | 52 | VRATATIPIQASLPFGWLIVGVAL | 27949 |
| nsp12 | 4806 | 4826 | NFNKDFYDFAVSKGFFKEGSS | 27954 |
| N | 96 | 117 | GGDGKMKDLSPRWYFYYLGTGP | 27960 |
| nsp12 | 5213 | 5234 | KQGDDYVYLPYPDPSRILGAGC | 27966 |
| N | 356 | 378 | HIDAYKTFPPTEPKKDKKKKADE | 27944 |
| ORF3a | 133 | 149 | CRSKNPLLYDANYFLCW | 27945 |
| nsp6 | 3643 | 3668 | SLATVAYFNMVYMPASWVMRIMTWLD | 27967 |
| nsp12 | 4529 | 4545 | GNCDTLKEILVTYNCCD | 27968 |
| nsp3 | 1630 | 1660 | EAFEYYHTTDPSFLGRYMSALNHTKKWKYPQ | 27969 |
| nsp3 | 1360 | 1377 | ISNEKQEILGTVSWNLRE | 27947 |
| M | 160 | 203 | DIKDLPKEITVATSRTLSYYKLGASQRVAGDSGFAA | 27948 |
| | | | YSRYRIGN | |
| N | 301 | 337 | WPQIAQFAPSASAFFGMSRIGMEVTPSGTWLTYTGAI | 27970 |
| nsp12 | 4553 | 4571 | DWYDFVENPDILRVYANLG | 27952 |
| nsp4 | 2850 | 2909 | ACPLIAAVITREVGFVVPGLPGTILRTTNGDFLHFLPR | 27971 |
| | | | VFSAVGNICYTPSKLIEYTDFA | |

TABLE 12C
TCE11 Cassette (Order of Frames as Shown)

| | Frame Start | Frame End | Frame sequence | SEQ |
|---|---|---|---|---|
| Gene | in Gene | in Gene | | ID NO: |
| nsp12 | 4896 | 4826 | NVAFQTVKPGNFNKDFYDFAVSKGFFKEGSS | 27972 |
| M | 182 | 203 | GASQRVAGDSGFAAYSRYRIGN | 27973 |
| nsp12 | 4728 | 4745 | DGVPFVVSTGYHFRELGV | 27955 |
| nsp4 | 3111 | 3134 | YLTFYLTNDVSFLAHIQWMVMFTP | 27950 |
| M | 89 | 109 | GLMWLSYFIASFRLFARTRSM | 27951 |
| nsp3 | 1632 | 1660 | FEYYHTTDPSFLGRYMSALNHTKKWKYPQ | 27946 |
| nsp3 | 1360 | 1377 | ISNEKQEILGTVSWNLRE | 27947 |
| nsp3 | 2745 | 2761 | ATTRQVVNVVTTKIALK | 27957 |
| M | 61 | 77 | TLACFVLAAVYRINWIT | 27959 |

TABLE 13A
Population Coverages for SARS-CoV-2 Validated
Epitopes (Excluding mutations >5%)

| | | Starting | | | | | | |
|---|---|---|---|---|---|---|---|---|
| Cassette | Magnitude | Protein(s) | AFA | API | EUR | HIS | Mean | Min |
| Spike | 1 | S | 0.95 | 0.89 | 1 | 0.98 | 0.95 | 0.89 |
| S + N + TCE11 | 1 | S, N | 0.97 | 0.95 | 1 | 0.99 | 0.98 | 0.95 |
| S + TCE10 | 1 | S | 0.97 | 0.95 | 1 | 0.99 | 0.98 | 0.95 |
| S + TCE9 | 1 | S | 0.97 | 0.95 | 1 | 0.99 | 0.98 | 0.95 |
| S + TCE5 | 1 | S | 0.95 | 0.95 | 1 | 0.98 | 0.97 | 0.95 |
| Spike | 100 | S | 0.92 | 0.86 | 1 | 0.96 | 0.93 | 0.86 |
| S + N + TCE11 | 100 | S, N | 0.95 | 0.95 | 1 | 0.99 | 0.97 | 0.95 |
| S + TCE10 | 100 | S | 0.95 | 0.95 | 1 | 0.99 | 0.97 | 0.95 |
| S + TCE9 | 100 | S | 0.95 | 0.95 | 1 | 0.99 | 0.97 | 0.95 |
| S + TCE5 | 100 | S | 0.92 | 0.94 | 1 | 0.97 | 0.96 | 0.92 |
| Spike | 1000 | S | 0.6 | 0.62 | 0.91 | 0.75 | 0.72 | 0.6 |
| S + N + TCE11 | 1000 | S, N | 0.89 | 0.92 | 1 | 0.96 | 0.94 | 0.89 |
| S + TCE10 | 1000 | S | 0.9 | 0.92 | 1 | 0.97 | 0.95 | 0.9 |
| S + TCE9 | 1000 | S | 0.9 | 0.92 | 1 | 0.97 | 0.95 | 0.9 |
| S + TCE5 | 1000 | S | 0.68 | 0.7 | 0.93 | 0.8 | 0.78 | 0.68 |
| Spike | 2000 | S | 0.39 | 0.49 | 0.73 | 0.56 | 0.54 | 0.39 |
| S + N + TCE11 | 2000 | S, N | 0.66 | 0.72 | 0.96 | 0.82 | 0.79 | 0.66 |
| S + TCE10 | 2000 | S | 0.72 | 0.73 | 0.96 | 0.85 | 0.81 | 0.72 |
| S + TCE9 | 2000 | S | 0.76 | 0.77 | 0.98 | 0.9 | 0.85 | 0.76 |
| S + TCE5 | 2000 | S | 0.49 | 0.54 | 0.81 | 0.66 | 0.62 | 0.49 |

TABLE 13B
Population Coverages for Validated Conserved Epitopes
between SARS and SARS-CoV-2 (Excluding mutations >5%)

| | | Starting | | | | | | |
|---|---|---|---|---|---|---|---|---|
| Cassette | Magnitude | Protein(s) | AFA | API | EUR | HIS | Mean | Min |
| Spike | 1 | S | 0.74 | 0.82 | 0.98 | 0.91 | 0.87 | 0.74 |
| S + N + TCE11 | 1 | S, N | 0.89 | 0.93 | 1 | 0.97 | 0.95 | 0.89 |
| S + TCE10 | 1 | S | 0.94 | 0.93 | 1 | 0.97 | 0.96 | 0.93 |
| S + TCE9 | 1 | S | 0.94 | 0.93 | 0.99 | 0.97 | 0.96 | 0.93 |
| S + TCE5 | 1 | S | 0.87 | 0.91 | 0.99 | 0.95 | 0.93 | 0.87 |
| Spike | 100 | S | 0.74 | 0.78 | 0.98 | 0.89 | 0.85 | 0.74 |
| S + N + TCE11 | 100 | S, N | 0.89 | 0.91 | 0.99 | 0.95 | 0.94 | 0.89 |
| S + TCE10 | 100 | S | 0.94 | 0.93 | 0.99 | 0.97 | 0.96 | 0.93 |
| S + TCE9 | 100 | S | 0.94 | 0.92 | 0.99 | 0.97 | 0.96 | 0.92 |
| S + TCE5 | 100 | S | 0.86 | 0.88 | 0.98 | 0.93 | 0.91 | 0.86 |
| Spike | 1000 | S | 0.18 | 0.2 | 0.46 | 0.27 | 0.28 | 0.18 |
| S + N + TCE11 | 1000 | S, N | 0.49 | 0.67 | 0.76 | 0.62 | 0.63 | 0.49 |
| S + TCE10 | 1000 | S | 0.52 | 0.56 | 0.71 | 0.55 | 0.59 | 0.52 |
| S + TCE9 | 1000 | S | 0.74 | 0.81 | 0.92 | 0.84 | 0.83 | 0.74 |
| S + TCE5 | 1000 | S | 0.33 | 0.42 | 0.62 | 0.49 | 0.47 | 0.33 |
| Spike | 2000 | S | 0.01 | 0.03 | 0.08 | 0.03 | 0.04 | 0.01 |
| S + N + TCE11 | 2000 | S, N | 0.24 | 0.2 | 0.41 | 0.28 | 0.28 | 0.2 |
| S + TCE10 | 2000 | S | 0.2 | 0.15 | 0.34 | 0.17 | 0.21 | 0.15 |
| S + TCE9 | 2000 | S | 0.4 | 0.37 | 0.7 | 0.51 | 0.49 | 0.37 |
| S + TCE5 | 2000 | S | 0.21 | 0.11 | 0.34 | 0.24 | 0.22 | 0.11 |

[0709] XIV.I. SARS-CoV-2 Convalescent Human PBMCs Demonstrate T Cell Responses to T Cell Epitopes Encoded in Vaccine Constructs

[0710] During a natural infection, T cells are primed and expand within 2-3 weeks after initial exposure, and thus need several weeks to effectively start clearing infected cells. In contrast, vaccine-induced T cell responses are able to rapidly expand upon exposure, and are hence likely to prevent (severe) infection in instances where vaccine-induced antibody titers are no longer sufficient to prevent infection. Accordingly, PBMC samples from convalescent SARS-CoV-2 subjects were analyzed for the presence of functional and cytotoxic memory T cell responses to Spike and T cell epitope (TCE5) regions to assess whether SARS-CoV-2 antigenic sections included in vaccine cassette constructs stimulated T cell responses similar to those stimulated by natural infection and hence are likely relevant to inducing protective immunity against SARS-CoV-2 infection.

### IFNγ ELISpot Assay

[0711] Detection of IFNγ-producing T cells was performed by ELISpot assay [S. Janetzki, J. H. Cox, N. Oden, G. Ferrari, Standardization and validation issues of the ELISPOT assay. Methods Mol Biol 302, 51-86 (2005)]. Briefly, cells were harvested, counted and re-suspended in media at 4×10⁶ cells/ml (ex vivo PBMCs) or 2×10⁶ cells/ml (IVS-expanded cells) and cultured in the presence of DMSO (VWR International), Phytohemagglutinin-L (PHA-L; Sigma-Aldrich, Natick, MA, USA), or SARS-CoV-2 Spike overlapping peptide pools (Table D), TCE5-encoded overlapping peptide pools (Table E), or TCE5-encoded minimal epitope peptide pools (Table F) in ELISpot Multiscreen plates (EMD Millipore) coated with anti-human IFNγ capture antibody (Mabtech, Cincinnati, OH, USA). Peptide pools were further subdivided into smaller pools categorized by SARS-CoV-2 protein source, EDGE-predicted, and/or previously reported/validated (“validated”) in the literature (for example, as in Nelde et al. [Nature Immunology volume 22, pages 74-85 2021], Tarke et al. 2021, or Schelien et al. [bioRxiv 2020.08.13.249433]). Following 18h incubation in a 5% CO₂, 37° C., humidified incubator, supernatants were collected, cells were removed from the plate, and membrane-bound IFNγ was detected using anti-human IFNγ detection antibody (Mabtech), Vectastain Avidin peroxidase complex (Vector Labs, Burlingame, CA, USA) and AEC Substrate (BD Biosciences, San Jose, CA, USA). Plates were imaged and enumerated on an AID iSpot reader (Autoimmun Diagnostika). Data are presented as spot forming units (SFU) per million cells. PBMCs were either purchased (Tissue Solutions; “Cohort 1”) or obtained from a second source (“Cohort 2”).

In vitro Stimulation (IVS) Cultures

[0712] SARS-CoV-2-reactive T cells from convalescent patient PBMC samples were expanded in the presence of overlapping peptide pools covering Spike (Table D) and T cell epitope (TCE) regions (Table E) and low-dose IL-2 as described previously [B. Bulik-Sullivan et al., Deep learning using tumor HLA peptide mass spectrometry datasets improves neoantigen identification. Nat Biotechnol, (2018)]. Briefly, thawed PBMCs were rested overnight and stimulated in the presence of combined Spike or total TCE_OLP overlapping peptide pools (4-5 μg/ml/peptide) in ImmunoCult™-XF T Cell Expansion Medium (IC media; STEMCELL Technologies) with 10 IU/ml rhIL-2 (R&D Systems Inc., Minneapolis, MN) for 14 days in 48- or 24-well tissue culture plates. Cells were seeded at 1-2×10⁶ cells/well and fed every 2-3 days by replacing ⅔ of the culture media with rhIL-2. CD4+ and CD8+ T cell depletions after IVS stimulation and prior to ELISpot assay were performed using CD4+ or CD8+ T cell isolation kits from Miltenyi (Miltenyi Biotech Inc., Auburn, CA) according to the manufacturer's instructions.

### IncuCyte Killing Assays

[0713] HLA-expressing A375 cells (A*01:01, A*02:01, A*03:01, A*11:01 and A*30:01) transduced with Red lentivirus were seeded in a 96-well plate at a concentration of 2.5×10⁴ cells per well or in a 48 well plate at a concentration of 3.5×10⁴ cells per well in DMEM with 10% heat inactivated FBS. The plates were placed in the Incucyte® S3 (Essen Biosciences) and 24h after the seeding, the effector cells were plated at a concentration of 2.5×10⁵ cells well in a 96-well plate or 3.5×10⁵ cells per well in a 48 well plate for an effector to target ratio of 10:1. Minimal epitope peptide pools were added to the treated wells for a final concentration of 4 μg/mL and DMSO was used for the control wells. The plates were imaged with the Incucyte® for 2-4 days total after which the data was analyzed using the Incucyte® S3 2018 analysis software. Viability of the A375 was assessed by red cell count and relative target count was calculated from time of effector addition (0h) relative to DMSO co-culture control wells.

### Results

[0714] T cell responses to Spike and TCE5-encoded epitopes were assessed by IFNγ ELISpot. As shown in FIG. 28 and quantified in Table 14, small but detectable epitope-specific responses were observed across the various indicated Spike peptide pools and TCE5-encoded peptide pools for PBMCs tested directly ex vivo (i.e., without IVS expansion). As shown in FIG. 29 and quantified in Table 15, IVS-expanded PBMCs (Cohort 1) demonstrated robust epitope-specific responses across the various indicated Spike peptide pools and TCE5-encoded peptide pools examined. As shown in FIG. 30 and quantified in Table 16, IVS-expanded PBMCs (Cohort 2) demonstrated robust epitope-specific responses across the various indicated Spike peptide pools and TCE5-encoded peptide pools examined, including responses above the upper limit of quantification (ULOQ). Shown in FIG. 31 is a selection of samples from IVS-expanded PBMCs (both Cohort 1 and Cohort 2; see FIG. 29 and FIG. 30) demonstrating robust epitope-specific responses across the various indicated minimal TCE5-encoded peptide pools examined, both validated and EDGE predicted, including responses above the upper limit of quantification (ULOQ). The results demonstrate both Spike and the selected T cell epitopes for inclusion in TCE5 stimulated broad and robust T cell responses similar to those stimulated by natural infection indicating the potential to provide protective immunity against SARS-CoV-2 infection when administered as a vaccine.

[0715] T cell responses to TCE5-encoded epitopes were further examined to characterize the T cell response. As shown in FIG. 32 and quantified in Table 17, IVS-expanded PBMCs (Cohort 1) demonstrated robust epitope-specific responses across the various indicated TCE5-encoded peptide pools examined (column 1). CD8-depletion of PBMCs generally resulted in a reduced but still detectable T cell response (bottom panel, column 3), while CD4-depletion of PBMCs had a variable effect across the various pools and donor sources (column 2). The results demonstrate the selected T cell epitopes for inclusion in TCE5 stimulated a mixed CD4/CD8 T cell response.

[0716] T cell responses to TCE5-encoded epitopes were further examined to assess functional killing of target cells. As shown in FIG. 33A-L and quantified in Tables 18A-L, target cell killing was observed in a peptide and effector T cell-specific manner (open squares) for each of the HLA allele-expressing target cells across the various indicated TCE5-encoded peptide pools examined. The results demonstrate the selected T cell epitopes for inclusion in TCE5 promoted T cell-mediated killing by T cells produced during a natural infection indicating the potential to promote protective immunity against SARS-CoV-2 infection when administered as a vaccine.

TABLE 14
T cell responses to Spike and TCE5-encoded epitopes (IFNγ ELISpot; ex vivo)

| | 20% H2O | | PHA | | | | | | | | | | | | | |
|---|---|---|---|---|---|---|---|---|---|---|---|---|---|---|---|---|
| | 80% DMSO | | (positive | | Min EDGE | | Min EDGE | | Min | | | | | | | |
| PBMC ID | (vehicle) | | control) | | Nuc | | ORF3a | | validated | | OLP Mem | | OLP Nuc | | OLP ORF3a | |
| 111120AT | 15 | 10 | 4355 | 6500 | 30 | 15 | 0 | 0 | 30 | 5 | 0 | 15 | 90 | 115 | 35 | 50 |
| 120820C | 0 | 0 | 5150 | 4865 | 10 | 0 | 0 | 0 | 15 | 10 | 55 | 55 | 35 | 70 | 50 | 15 |
| 111120AR | 10 | 0 | 5410 | 5470 | 45 | 15 | 0 | 0 | 25 | 15 | 20 | 20 | 5 | 10 | 25 | 10 |
| 112020E | 90 | 80 | 4345 | 4410 | 175 | 240 | 80 | 80 | 135 | 110 | 95 | 75 | 215 | 290 | 100 | 45 |
| 120820F | 5 | 20 | 5685 | 5910 | 65 | 200 | 5 | 0 | 45 | 45 | 10 | 10 | 100 | 130 | 30 | 20 |
| 121520C | 90 | 35 | 5460 | 5870 | 90 | 125 | 60 | 130 | 80 | 70 | 65 | 50 | 230 | 150 | 115 | 65 |
| 112020C | 15 | 40 | 4695 | 4670 | 45 | 45 | 30 | 35 | 15 | 0 | 10 | 15 | 30 | 10 | 5 | 5 |
| 112020D | 80 | 45 | 6090 | 6160 | 75 | 130 | 100 | 70 | 90 | 110 | 55 | 60 | 240 | 50 | 20 | 65 |
| 120820A | 0 | 0 | 3515 | 4210 | 60 | 60 | 0 | 0 | 5 | 10 | 20 | 15 | 90 | 70 | | |
| 121520A | 25 | 90 | 5720 | 5605 | 35 | 150 | 65 | 90 | 65 | 60 | 50 | 50 | 415 | 360 | 90 | 145 |
| 120820D | 0 | 0 | 5245 | 5675 | 240 | 290 | 5 | 5 | 10 | 0 | 5 | 5 | 300 | 315 | 35 | 10 |
| 101420B | 10 | 10 | 4845 | 5450 | 25 | 35 | 5 | 15 | 10 | 25 | 10 | 5 | 40 | 45 | 15 | 30 |
| 121120C | 60 | 95 | 5845 | 5755 | 80 | 115 | 105 | 75 | 75 | 130 | 105 | 85 | 165 | 130 | 150 | 125 |
| 121120F | 10 | 10 | 5160 | 5555 | 100 | 30 | 20 | 15 | 45 | 35 | 35 | 10 | 105 | 80 | 0 | 5 |

| | Min EDGE | | Min EDGE | | Min | | Sp-Wu | | Sp-Wu | | Sp-Wu | | Sp-Wu | |
|---|---|---|---|---|---|---|---|---|---|---|---|---|---|---|
| PBMC ID | Nuc Expl. | | ORF3a Expl. | | Sette | | 1_2 | | 3_4 | | 5_6 | | 7_8 | |
| 111120AT | | | | | | | 50 | 35 | 10 | 10 | 60 | 15 | 65 | 70 |
| 120820C | 5 | 0 | 5 | 15 | 10 | 0 | 145 | 80 | 85 | 110 | 90 | 70 | 100 | 110 |
| 111120AR | | | | | | | 25 | 10 | 20 | 5 | 15 | | | |
| 112020E | 155 | 95 | 45 | 95 | 30 | 45 | 175 | 55 | 200 | 170 | 85 | 90 | 100 | 75 |
| 120820F | | | | | | | 25 | 35 | 85 | 130 | 40 | 35 | | |
| 121520C | | | | | | | 110 | 60 | 80 | | | | | |
| 112020C | 20 | 35 | 10 | 15 | | | 0 | 15 | 20 | 40 | 20 | 20 | 5 | 5 |
| 112020D | 75 | 65 | 60 | 30 | 45 | 25 | 30 | 85 | 95 | 132 | 125 | 115 | 45 | 60 |
| 120820A | | | | | | | | | | | | | | |
| 121520A | | | | | | | 170 | 110 | 135 | 195 | 160 | 220 | 110 | 135 |
| 120820D | 275 | 230 | 5 | 20 | 190 | 255 | 225 | 180 | 55 | 70 | 150 | 100 | 45 | 50 |
| 101420B | 15 | 20 | 10 | 30 | 25 | 5 | 35 | 40 | 45 | 30 | 45 | 20 | 50 | 25 |
| 121120C | 125 | 165 | 90 | 80 | 55 | 80 | 300 | 310 | 330 | 340 | 220 | 285 | 135 | 115 |
| 121120F | 25 | 35 | 20 | 15 | 10 | 20 | 30 | 35 | 50 | 75 | 50 | 25 | 25 | 10 |

Spot forming units (SFU) per 1e6 cells (technical replicates)

TABLE 15
T cell responses to TCE5-encoded epitopes - Cohort 1 PBMCs (IFNγ ELISpot; post IVS)

| | 20% H2O 80% | | PHA | | TCE | | OLP | | OLP | | OLP | |
|---|---|---|---|---|---|---|---|---|---|---|---|---|
| PBMC ID | DMSO (vehicle) | | (positive control) | | OLP | | Mem | | Nuc | | ORF3a | |
| 121520C | 360 | 640 | 6960 | 6650 | 5640 | 5840 | 980 | 830 | 5950 | 6280 | 2930 | 2850 |
| 111120AR | 110 | 190 | 6510 | 6330 | 4970 | 4630 | 1010 | 560 | 4630 | 5590 | 1230 | 2250 |
| 120820F | 290 | 300 | 5760 | 6470 | 5020 | 4770 | 380 | 180 | 4840 | 5430 | 1990 | 1690 |
| 121520A | 400 | 100 | 6370 | 6340 | 2040 | 2140 | 80 | 140 | 1940 | 2020 | 510 | 960 |
| 121520A | 10 | 0 | 6550 | 6430 | | | 160 | 120 | | | | |
| 121520A | 200 | 130 | 4600 | 5620 | | | | | 3520 | 4280 | | |
| 121520A | 280 | 110 | 6760 | 6550 | | | | | | | 2210 | 4760 |
| | Min | | Min EDGE | | Min EDGE | | Min EDGE | | Min EDGE | | Min | |
| PBMC ID | validated | | Nuc | | ORF3a | | Nuc Expl. | | ORF3a Expl. | | Sette | |
| 121520C | 5210 | 5510 | 6290 | 6510 | 480 | 690 | | | | | | |
| 111120AR | 5720 | 7010 | 1660 | 1190 | 120 | 320 | | | | | | |
| 120820F | 6310 | 7010 | 4030 | 3760 | 570 | 580 | 4750 | 6480 | 1920 | 2460 | 2740 | 2330 |
| 121520A | 1740 | 1100 | 2690 | 2950 | 110 | 120 | 4940 | 2970 | 340 | 50 | 3780 | 3720 |
| 121520A | | | | | | | | | | | | |
| 121520A | | | 5730 | 3960 | | | 3750 | 3450 | | | | |
| 121520A | | | | | 730 | 920 | | | 140 | 180 | | |

Spot forming units (SFU) per 1e6 cells (technical replicates)

TABLE 16
T cell responses to TCE5-encoded epitopes - Cohort 2 (IFNγ ELISpot; post IVS)

| | 20% H2O 80% | | PHA | | TCE | | OLP | | OLP | |
|---|---|---|---|---|---|---|---|---|---|---|
| PBMC ID | DMSO (vehicle) | | (positive control) | | OLP | | Mem | | Nuc | |
| 169923 | 910 | 870 | 13000 | 13000 | 13000 | 13000 | 2100 | 2070 | 13000 | 13000 |
| 169923 | 0 | | 980 | | 30 | | | | | |
| 251227 | 40 | 30 | 6530 | 6620 | 140 | 180 | 0 | 20 | 180 | 120 |
| 425053 | 1430 | 1390 | 13000 | 13000 | 13000 | 13000 | 3220 | 3380 | 13000 | 13000 |
| 425053 | 30 | 70 | 5450 | 4990 | 5000 | 4330 | | | | |
| 548367 | 120 | 60 | 13000 | 13000 | 13000 | 13000 | 170 | 110 | 13000 | |
| 548367 | 160 | 100 | 10270 | 9750 | 3390 | 3400 | 60 | 70 | 5000 | 5500 |
| 579992 | 1470 | 1510 | 13000 | 13000 | 13000 | 13000 | 4840 | 4670 | 13000 | 13000 |
| 579992 | 430 | 380 | 6590 | 6530 | 7110 | 6840 | 450 | 670 | 5860 | 6360 |
| 592571 | 220 | 210 | 13000 | 13000 | 7030 | 7220 | 1760 | 2010 | 6850 | 6760 |
| 592571 | 1640 | 1710 | 13000 | 13000 | 13000 | 13000 | 4020 | 3670 | 13000 | 13000 |
| 711280 | 70 | 100 | 9930 | 9950 | 1530 | 1470 | 60 | 90 | 1710 | 1810 |
| 711280 | 70 | 80 | 11710 | 11380 | 4750 | 4840 | 60 | 80 | 6210 | 6010 |
| 270554 | 0 | 10 | 3830 | 3540 | 10 | 40 | 20 | 10 | | |
| 270554 | 1060 | 1200 | 7650 | 7120 | 5730 | 5890 | 2610 | 2700 | 4620 | 4580 |
| 277045 | 300 | 40 | 8270 | 10150 | 4180 | 4090 | | | | |
| 277045 | 20 | 30 | 6420 | | 1050 | 1210 | | | | |
| 306916 | 1910 | 2340 | 13000 | 13000 | 13000 | 13000 | 2190 | 1960 | 3190 | 3460 |
| 306916 | 130 | 30 | 13000 | 13000 | 4290 | 4180 | 130 | | | |
| 317737 | 250 | | 13000 | | 6860 | | 5770 | 5790 | 6180 | 6120 |
| 317737 | 650 | 960 | 13000 | 13000 | 7150 | 7130 | 2470 | 2550 | 5850 | 5760 |
| 383468 | 60 | | 30 | | 10 | | | | | |
| 383468 | 1690 | 1780 | 13000 | 13000 | 13000 | 13000 | 5500 | 5360 | 13000 | 13000 |
| 389341 | 490 | 720 | 13000 | 13000 | 5510 | 5570 | 1120 | 1170 | 4940 | 4680 |
| 389341 | 680 | 630 | 13000 | 13000 | 4560 | 4850 | 1340 | 1340 | 3850 | 3980 |
| 849884 | 610 | 830 | 13000 | 13000 | 13000 | 13000 | 3520 | 3520 | 13000 | 13000 |
| 849884 | 390 | | 5700 | | 1260 | | | | | |
| 907902 | 430 | 260 | 5170 | 13000 | 3410 | 3490 | 900 | 1280 | 4500 | 4510 |
| 907902 | 480 | 220 | 13000 | 13000 | 7300 | 7660 | 1400 | 1570 | 7690 | 7500 |
| 627934 | 390 | 310 | 13000 | 13000 | 3490 | 3440 | 1060 | 1070 | 3580 | 3570 |
| 627934 | 480 | 190 | 13000 | 13000 | 4540 | 4610 | 1120 | 1190 | 5000 | 4600 |
| 865452 | 570 | 510 | 6800 | 7040 | 5580 | 5680 | 630 | 570 | 13000 | 13000 |
| 865452 | 410 | 270 | 13000 | 13000 | 4690 | 4860 | 620 | 410 | 4310 | 4750 |
| 602232 | 30 | 0 | 5400 | 5620 | 3740 | 4200 | 20 | 70 | 6160 | 6680 |
| 602232 | 180 | 240 | 5830 | 5870 | 2500 | 2650 | 260 | 320 | 3970 | 4200 |
| 646382 | 20 | 20 | 3650 | 3670 | 640 | 600 | 50 | 40 | 320 | 300 |
| 646382 | 0 | 0 | 6290 | 6680 | 5140 | 5830 | 10 | 30 | 7070 | 7100 |
| 941176 | 670 | 420 | 6780 | 6640 | 5860 | 5990 | 710 | 810 | 4850 | 5230 |

| | OLP | | Min | | Min EDGE | | Min EDGE | |
|---|---|---|---|---|---|---|---|---|
| PBMC ID | ORF3a | | validated | | Nuc | | ORF3a | |
| 169923 | 7280 | 7320 | 13000 | 13000 | 13000 | 13000 | 6280 | 3250 |
| 169923 | | | 10 | | | | | |
| 251227 | 10 | 10 | 2210 | | | | | |
| 425053 | 8240 | 8360 | 13000 | 13000 | 7190 | 7430 | 7850 | 7820 |
| 425053 | | | | | | | | |
| 548367 | 380 | | | | | | | |
| 548367 | 390 | 490 | 5940 | 6020 | 1840 | 2050 | 2890 | 2970 |
| 579992 | 7130 | 7240 | 13000 | 13000 | 13000 | 13000 | 6210 | 3560 |
| 579992 | 6040 | 6050 | 6850 | 6830 | 6650 | 6630 | 7180 | 7460 |
| 592571 | 5520 | 5510 | 4270 | 4560 | 7180 | 7710 | 4650 | 4570 |
| 592571 | 7970 | 7750 | 13000 | 13000 | 7110 | 7140 | 7060 | 7080 |
| 711280 | 330 | 230 | 2470 | 2400 | 520 | 640 | 120 | 210 |
| 711280 | 380 | 390 | 7200 | 7450 | 3550 | 3390 | 1040 | 1350 |
| 270554 | | | | | | | | |
| 270554 | 3790 | 4200 | 5760 | | 1570 | | 1050 | |
| 277045 | | | | | | | | |
| 277045 | | | | | | | | |
| 306916 | 13000 | 13000 | 3570 | 3710 | 13000 | 13000 | 2820 | 2770 |
| 306916 | | | | | | | | |
| 317737 | 2960 | 2990 | 5680 | | 3370 | | 2530 | |
| 317737 | 6780 | 6690 | 2560 | 2410 | 1340 | 1160 | 7360 | 7070 |
| 383468 | | | | | | | | |
| 383468 | 5150 | 5140 | 6850 | 7410 | 4810 | 5040 | 5830 | 6020 |
| 389341 | 4180 | 4510 | 4600 | | | | | |
| 389341 | 4760 | 4180 | 4300 | 4320 | 5430 | 5380 | 1940 | 2410 |
| 849884 | 13000 | 13000 | 13000 | 13000 | 5210 | 4930 | 13000 | 13000 |
| 849884 | | | | | | | | |
| 907902 | 960 | 1620 | 1350 | 1340 | 470 | 780 | 2890 | 3080 |
| 907902 | 7510 | 7210 | 13000 | 13000 | 6610 | 7400 | 7520 | 7670 |
| 627934 | 1670 | 1810 | 3950 | 4040 | 1680 | 1680 | 790 | 660 |
| 627934 | 2950 | 3230 | 5430 | 5090 | 1500 | 1490 | 2680 | 2670 |
| 865452 | 1440 | 1630 | 850 | 730 | 5450 | 5640 | 660 | 830 |
| 865452 | 2100 | 2140 | 1000 | 1150 | 4150 | 3940 | 470 | 450 |
| 602232 | 30 | 30 | 13000 | 13000 | 30 | 30 | 40 | 30 |
| 602232 | 210 | 160 | 5890 | 5910 | 300 | 180 | 190 | 200 |
| 646382 | 550 | 700 | 1440 | 1370 | 250 | 180 | 1130 | 970 |
| 646382 | 500 | 660 | 13000 | 13000 | 240 | 150 | 1050 | 1030 |
| 941176 | 5530 | 5280 | 7250 | 7070 | 6880 | 7040 | 6660 | 6410 |

Spot forming units (SFU) per 1e6 cells (technical replicates)

TABLE 17
T cell responses to TCE5-encoded epitopes CD4/CD8
Depletion - Cohort 1 (IFNγ ELISpot; ex vivo)

| | | 20% H2O 80% | | PHA | | TCE | | OLP | |
|---|---|---|---|---|---|---|---|---|---|
| PBMC ID | Condition | DMSO (vehicle) | | (positive control) | | OLP | | Mem | |
| 121120C | PBMCs | 440 | 350 | 5950 | 6270 | 2590 | 1540 | 310 | 400 |
| 121120C | CD4-depleted | 100 | 140 | 5520 | 5980 | 910 | 910 | 260 | 180 |
| 121120F | PBMCs | 330 | 150 | 6190 | 6090 | 3720 | 3810 | 180 | 230 |
| 121120F | CD4-depleted | 320 | 310 | 4680 | 4730 | 2760 | 2650 | 290 | 360 |
| 121120F | CD8-depleted | 230 | 230 | 5810 | 5250 | 1270 | 1570 | 220 | 210 |

| | OLP | | OLP | | Min | | Min EDGE | | Min EDGE | |
|---|---|---|---|---|---|---|---|---|---|---|
| PBMC ID | Nuc | | ORF3a | | validated | | Nuc | | ORF3a | |
| 121120C | 1010 | 1060 | 650 | 670 | 1250 | 1280 | 1990 | 3440 | 900 | 1200 |
| 121120C | 910 | 880 | 250 | 190 | 1030 | 1050 | 1990 | 1890 | 710 | 680 |
| 121120F | 3870 | 3640 | 510 | 120 | 3450 | 3690 | 1620 | 1420 | 840 | 1180 |
| 121120F | 3780 | 4090 | 520 | 310 | 6130 | 5620 | 1560 | 1870 | 1250 | 1070 |
| 121120F | 2510 | 2490 | 300 | 280 | 1820 | 1920 | 720 | 530 | 410 | 380 |

Spot forming units (SFU) per 1e6 cells (technical replicates)

TABLE 18A
Killing Assay (A*03:01 targets; Cohort 2 donor 169923; Validated Pool)

| | Relative target cell count | | | | | | | |
|---|---|---|---|---|---|---|---|---|
| Elapsed | DMSO + | | Min_validated + | | Min_validated + | | DMSO + | |
| time (h) | Targets | | Targets | | 10:1 E:T | | 10:1 E:T | |
| 0 | 0 | 0 | 0 | 0 | 0 | 0 | 0 | 0 |
| 4 | −0.01324 | −0.06020 | 0.01030 | −0.04000 | 0.00821 | −0.00603 | 0 | 0 |
| 8 | 0.05701 | 0.04465 | 0.12453 | 0.08240 | 0.00841 | −0.01194 | 0 | 0 |
| 12 | 0.13986 | 0.17088 | 0.28847 | 0.26613 | −0.04966 | −0.05472 | 0 | 0 |
| 16 | 0.34307 | 0.38717 | 0.49053 | 0.47554 | −0.03273 | −0.13508 | 0 | 0 |
| 20 | 0.50381 | 0.62799 | 0.67542 | 0.74838 | −0.13429 | −0.18802 | 0 | 0 |
| 24 | 0.72815 | 0.86933 | 0.96280 | 1.05832 | −0.28017 | −0.31067 | 0 | 0 |
| 28 | 0.96880 | 1.15188 | 1.19516 | 1.32867 | −0.37962 | −0.44843 | 0 | 0 |
| 32 | 1.20932 | 1.50413 | 1.47961 | 1.68586 | −0.48409 | −0.51295 | 0 | 0 |
| 36 | 1.47688 | 1.94340 | 1.89230 | 2.19941 | −0.59226 | −0.65697 | 0 | 0 |
| 40 | 1.77778 | 2.33481 | 2.25071 | 2.65348 | −0.77473 | −0.81342 | 0 | 0 |
| 44 | 1.99233 | 2.65702 | 2.57367 | 3.23976 | −0.95032 | −0.99916 | 0 | 0 |
| 48 | 2.12635 | 2.89103 | 2.94382 | 3.81998 | −1.16628 | −1.24008 | 0 | 0 |
| 52 | 2.11070 | 3.01152 | 3.06229 | 4.30811 | −1.46616 | −1.47099 | 0 | 0 |
| 56 | 1.95512 | 3.05273 | 3.15095 | 4.66875 | −1.75737 | −1.70104 | 0 | 0 |
| 60 | 1.70074 | 2.93234 | 2.98756 | 4.82178 | −2.06228 | −2.01444 | 0 | 0 |
| 64 | 1.45363 | 2.72321 | 2.83818 | 4.97395 | −2.27938 | −2.27634 | 0 | 0 |
| 68 | 1.04123 | 2.36000 | 2.56926 | 4.88298 | −2.52690 | −2.57086 | 0 | 0 |

TABLE 18B
Killing Assay (A*02:01 targets; Cohort 2 donor 389341; ORF3a Pool)

| | Relative target cell count | | | | | | | |
|---|---|---|---|---|---|---|---|---|
| Elapsed | DMSO + | | Min_ORF3a + | | Min_ORF3a + | | DMSO + | |
| time (h) | Targets | | Targets | | 10:1 E:T | | 10:1 E:T | |
| 0 | 0 | 0 | 0 | 0 | 0 | 0 | 0 | 0 |
| 4 | 0.01813 | 0.02413 | 0.00988 | −0.01350 | −0.00427 | 0.00992 | 0 | 0 |
| 8 | 0.08048 | 0.06653 | 0.04010 | 0.02566 | −0.00763 | −0.03750 | 0 | 0 |
| 12 | 0.17361 | 0.10990 | 0.11690 | 0.05167 | −0.01070 | −0.10823 | 0 | 0 |
| 16 | 0.31379 | 0.20136 | 0.22194 | 0.13147 | −0.04211 | −0.20612 | 0 | 0 |
| 20 | 0.53036 | 0.37716 | 0.40752 | 0.28054 | −0.09218 | −0.32701 | 0 | 0 |
| 24 | 0.76710 | 0.55804 | 0.58343 | 0.42801 | −0.19155 | −0.47142 | 0 | 0 |
| 28 | 0.95779 | 0.74903 | 0.71718 | 0.56596 | −0.32093 | −0.62224 | 0 | 0 |
| 32 | 1.19255 | 0.98206 | 0.88543 | 0.69975 | −0.43939 | −0.76130 | 0 | 0 |
| 36 | 1.39711 | 1.17513 | 0.99709 | 0.82011 | −0.57471 | −0.88468 | 0 | 0 |
| 40 | 1.52634 | 1.28181 | 1.04170 | 0.87370 | −0.71506 | −1.04042 | 0 | 0 |
| 44 | 1.61547 | 1.38534 | 1.02950 | 0.89848 | −0.86036 | −1.16624 | 0 | 0 |
| 48 | 1.64176 | 1.45046 | 0.97523 | 0.87336 | −0.99708 | −1.27647 | 0 | 0 |
| 52 | 1.59635 | 1.46211 | 0.84139 | 0.83014 | −1.16652 | −1.35229 | 0 | 0 |
| 56 | 1.54683 | 1.48783 | 0.70914 | 0.77852 | −1.26086 | −1.39289 | 0 | 0 |
| 60 | 1.45560 | 1.45470 | 0.57591 | 0.66815 | −1.34735 | −1.45718 | 0 | 0 |
| 64 | 1.33675 | 1.40186 | 0.41942 | 0.58206 | −1.41787 | −1.46087 | 0 | 0 |
| 68 | 1.23903 | 1.40829 | 0.22741 | 0.52066 | −1.48594 | −1.41489 | 0 | 0 |
| 72 | 1.07091 | 1.35932 | 0.02513 | 0.37378 | −1.49870 | −1.42231 | 0 | 0 |

TABLE 18C
Killing Assay (A*02:01 targets; Cohort 2 donor 941176; Validated Pool)

| | Relative target cell count | | | | | | | |
|---|---|---|---|---|---|---|---|---|
| Elapsed | DMSO + | | Min_validated + | | Min_validated + | | DMSO + | |
| time (h) | Targets | | Targets | | 10:1 E:T | | 10:1 E:T | |
| 0 | 0 | 0 | 0 | 0 | 0 | 0 | 0 | 0 |
| 4 | 0.01532 | 0.05102 | 0.01980 | 0.07975 | 0.01998 | −0.00068 | 0 | 0 |
| 8 | 0.05280 | 0.04899 | 0.07623 | 0.06806 | 0.01093 | −0.02192 | 0 | 0 |
| 12 | 0.10320 | 0.10773 | 0.11381 | 0.11013 | −0.03526 | −0.07110 | 0 | 0 |
| 16 | 0.20356 | 0.14613 | 0.22404 | 0.17072 | −0.07934 | −0.14204 | 0 | 0 |
| 20 | 0.26641 | 0.21665 | 0.29396 | 0.19666 | −0.17641 | −0.22310 | 0 | 0 |
| 24 | 0.41793 | 0.26733 | 0.38457 | 0.26444 | −0.28684 | −0.34405 | 0 | 0 |
| 28 | 0.45493 | 0.30914 | 0.50778 | 0.34286 | −0.42130 | −0.44097 | 0 | 0 |
| 32 | 0.53945 | 0.42156 | 0.64327 | 0.42477 | −0.52726 | −0.56755 | 0 | 0 |
| 36 | 0.67100 | 0.48433 | 0.76177 | 0.48536 | −0.69071 | −0.69946 | 0 | 0 |
| 40 | 0.79428 | 0.56346 | 0.89700 | 0.53973 | −0.84661 | −0.83568 | 0 | 0 |
| 44 | 0.92184 | 0.70204 | 1.07137 | 0.62367 | −0.95901 | −0.94594 | 0 | 0 |
| 48 | 1.02424 | 0.79970 | 1.20774 | 0.70555 | −1.06150 | −0.98164 | 0 | 0 |
| 52 | 1.10741 | 0.89832 | 1.25933 | 0.74321 | −1.17078 | −1.04230 | 0 | 0 |
| 56 | 1.19650 | 1.00048 | 1.36889 | 0.80313 | −1.22608 | −1.06541 | 0 | 0 |
| 60 | 1.30822 | 1.07780 | 1.46006 | 0.78342 | −1.26770 | −1.08377 | 0 | 0 |
| 64 | 1.39824 | 1.22429 | 1.56200 | 0.86895 | −1.24641 | −1.05659 | 0 | 0 |
| 68 | 1.50965 | 1.34178 | 1.64143 | 0.95012 | −1.24737 | −1.04084 | 0 | 0 |
| 72 | 1.60292 | 1.43251 | 1.73939 | 1.00085 | −1.23876 | −1.01696 | 0 | 0 |

TABLE 18D
Killing Assay (A*02:01 targets; Cohort 2 donor 941176; ORF3a Pool)

| | Relative target cell count | | | | | | | |
|---|---|---|---|---|---|---|---|---|
| Elapsed | DMSO + | | Min_ORF3a + | | Min_ORF3a + | | DMSO + | |
| time (h) | Targets | | Targets | | 10:1 E:T | | 10:1 E:T | |
| 0 | 0 | 0 | 0 | 0 | 0 | 0 | 0 | 0 |
| 4 | 0.01532 | 0.05102 | 0.01368 | 0.03929 | −0.01362 | 0.02079 | 0 | 0 |
| 8 | 0.05280 | 0.04899 | 0.03835 | 0.05745 | −0.01528 | −0.00445 | 0 | 0 |
| 12 | 0.10320 | 0.10773 | 0.07735 | 0.07435 | −0.04046 | −0.04591 | 0 | 0 |
| 16 | 0.20356 | 0.14613 | 0.13914 | 0.11389 | −0.06285 | −0.06571 | 0 | 0 |
| 20 | 0.26641 | 0.21665 | 0.20388 | 0.18453 | −0.13547 | −0.15319 | 0 | 0 |
| 24 | 0.41793 | 0.26733 | 0.29916 | 0.23321 | −0.19915 | −0.22668 | 0 | 0 |
| 28 | 0.45493 | 0.30914 | 0.36812 | 0.28277 | −0.25720 | −0.30765 | 0 | 0 |
| 32 | 0.53945 | 0.42156 | 0.45725 | 0.37443 | −0.32992 | −0.38155 | 0 | 0 |
| 36 | 0.67100 | 0.48433 | 0.55619 | 0.42135 | −0.44857 | −0.44952 | 0 | 0 |
| 40 | 0.79428 | 0.56346 | 0.64631 | 0.44819 | −0.51089 | −0.51524 | 0 | 0 |
| 44 | 0.92184 | 0.70204 | 0.72227 | 0.51756 | −0.53635 | −0.53062 | 0 | 0 |
| 48 | 1.02424 | 0.79970 | 0.79836 | 0.57155 | −0.56778 | −0.54288 | 0 | 0 |
| 52 | 1.10741 | 0.89832 | 0.83831 | 0.56846 | −0.61847 | −0.52513 | 0 | 0 |
| 56 | 1.19650 | 1.00048 | 0.86442 | 0.56057 | −0.60504 | −0.46411 | 0 | 0 |
| 60 | 1.30822 | 1.07780 | 0.91177 | 0.56276 | −0.63331 | −0.40439 | 0 | 0 |
| 64 | 1.39824 | 1.22429 | 0.96549 | 0.60834 | −0.57249 | −0.30643 | 0 | 0 |
| 68 | 1.50965 | 1.34178 | 1.05166 | 0.64282 | −0.51845 | −0.24072 | 0 | 0 |
| 72 | 1.60292 | 1.43251 | 1.07900 | 0.65671 | −0.51894 | −0.17774 | 0 | 0 |

TABLE 18E
Killing Assay (A*02:01 targets; Cohort 2 donor 941176; Nucleocapsid Pool)

| | Relative target cell count | | | | | | | |
|---|---|---|---|---|---|---|---|---|
| Elapsed | DMSO + | | Min_Nuc + | | Min_Nuc + | | DMSO + | |
| time (h) | Targets | | Targets | | 10:1 E:T | | 10:1 E:T | |
| 0 | 0 | 0 | 0 | 0 | 0 | 0 | 0 | 0 |
| 4 | 0.01532 | 0.05102 | 0.06988 | 0.06566 | 0.04388 | 0.03412 | 0 | 0 |
| 8 | 0.05280 | 0.04899 | 0.10368 | 0.08263 | 0.02480 | 0.01346 | 0 | 0 |
| 12 | 0.10320 | 0.10773 | 0.16203 | 0.14887 | −0.03506 | −0.01521 | 0 | 0 |
| 16 | 0.20356 | 0.14613 | 0.27849 | 0.20725 | −0.06824 | −0.03866 | 0 | 0 |
| 20 | 0.26641 | 0.21665 | 0.35316 | 0.29750 | −0.15670 | −0.09212 | 0 | 0 |
| 24 | 0.41793 | 0.26733 | 0.46095 | 0.37671 | −0.26481 | −0.15582 | 0 | 0 |
| 28 | 0.45493 | 0.30914 | 0.52183 | 0.46726 | −0.37496 | −0.22656 | 0 | 0 |
| 32 | 0.53945 | 0.42156 | 0.65115 | 0.57861 | −0.49673 | 0.29697 | 0 | 0 |
| 36 | 0.67100 | 0.48433 | 0.74409 | 0.66137 | −0.59813 | −0.37287 | 0 | 0 |
| 40 | 0.79428 | 0.56346 | 0.82654 | 0.71687 | −0.74050 | −0.44543 | 0 | 0 |
| 44 | 0.92184 | 0.70204 | 0.93208 | 0.80231 | −0.79674 | −0.46168 | 0 | 0 |
| 48 | 1.02424 | 0.79970 | 0.99082 | 0.89097 | −0.84785 | −0.41341 | 0 | 0 |
| 52 | 1.10741 | 0.89832 | 0.98485 | 0.89494 | −0.91387 | −0.39943 | 0 | 0 |
| 56 | 1.19650 | 1.00048 | 1.03040 | 0.90153 | −0.93826 | −0.34660 | 0 | 0 |
| 60 | 1.30822 | 1.07780 | 1.03495 | 0.92227 | −0.92267 | −0.23926 | 0 | 0 |
| 64 | 1.39824 | 1.22429 | 1.08957 | 0.94305 | −0.86242 | −0.10813 | 0 | 0 |
| 68 | 1.50965 | 1.34178 | 1.15787 | 0.95883 | −0.79271 | −0.00004 | 0 | 0 |
| 72 | 1.60292 | 1.43251 | 1.15891 | 1.00420 | −0.71833 | 0.10316 | 0 | 0 |

TABLE 18F
Killing Assay (A*01:01 targets; Cohort 2 donor 941176; Validated Pool)

| | Relative target cell count | | | | | | | |
|---|---|---|---|---|---|---|---|---|
| Elapsed | DMSO + | | Min_validated + | | Min_validated + | | DMSO + | |
| time (h) | Targets | | Targets | | 10:1 E:T | | 10:1 E:T | |
| 0 | 0 | 0 | 0 | 0 | 0 | 0 | 0 | 0 |
| 4 | −0.00284 | 0.01628 | 0.01164 | 0.02806 | −0.00481 | −0.00230 | 0 | 0 |
| 8 | 0.01606 | 0.04954 | 0.02006 | 0.04011 | −0.03412 | −0.02824 | 0 | 0 |
| 12 | 0.03544 | 0.06344 | 0.03761 | 0.03133 | −0.10772 | −0.10357 | 0 | 0 |
| 16 | 0.03345 | 0.09939 | 0.05219 | 0.03391 | −0.21493 | −0.20084 | 0 | 0 |
| 20 | 0.04076 | 0.15370 | 0.05645 | 0.07571 | −0.33537 | −0.32725 | 0 | 0 |
| 24 | 0.05222 | 0.17418 | 0.04442 | 0.04639 | −0.48362 | −0.49250 | 0 | 0 |
| 28 | 0.04138 | 0.15250 | 0.03472 | 0.01965 | −0.65441 | −0.69972 | 0 | 0 |
| 32 | 0.03916 | 0.20562 | 0.00387 | −0.01295 | −0.80356 | −0.88981 | 0 | 0 |
| 36 | −0.00388 | 0.21695 | −0.05668 | −0.07407 | −0.97688 | −1.08562 | 0 | 0 |
| 40 | 0.00534 | 0.21979 | −0.08429 | −0.14606 | −1.13143 | −1.30116 | 0 | 0 |
| 44 | −0.05556 | 0.19879 | −0.20322 | −0.26276 | −1.33045 | −1.56024 | 0 | 0 |
| 48 | −0.14279 | 0.18486 | −0.33548 | −0.33312 | −1.47928 | −1.74150 | 0 | 0 |

TABLE 18G
Killing Assay (A*01:01 targets; Cohort 2 donor 941176; ORF3a Pool)

| | Relative target cell count | | | | | | | |
|---|---|---|---|---|---|---|---|---|
| Elapsed | DMSO + | | Min_ORF3a + | | Min_ORF3a + | | DMSO + | |
| time (h) | Targets | | Targets | | 10:1 E:T | | 10:1 E:T | |
| 0 | 0 | 0 | 0 | 0 | 0 | 0 | 0 | 0 |
| 4 | −0.00284 | 0.01628 | −0.00216 | 0.00098 | −0.02567 | −0.02000 | 0 | 0 |
| 8 | 0.01606 | 0.04954 | 0.01839 | 0.02279 | −0.06198 | −0.03657 | 0 | 0 |
| 12 | 0.03544 | 0.06344 | 0.01086 | 0.01999 | −0.12803 | −0.08670 | 0 | 0 |
| 16 | 0.03345 | 0.09939 | 0.03392 | 0.02923 | −0.24304 | −0.19017 | 0 | 0 |
| 20 | 0.04076 | 0.15370 | 0.07146 | 0.07884 | −0.37250 | −0.26712 | 0 | 0 |
| 24 | 0.05222 | 0.17418 | 0.05489 | 0.03191 | −0.52066 | −0.42126 | 0 | 0 |
| 28 | 0.04138 | 0.15250 | 0.04243 | −0.00206 | −0.67981 | −0.57430 | 0 | 0 |
| 32 | 0.03916 | 0.20562 | 0.04402 | −0.03128 | −0.85585 | −0.72448 | 0 | 0 |
| 36 | −0.00388 | 0.21695 | −0.02876 | −0.09311 | −1.05716 | −0.93759 | 0 | 0 |
| 40 | 0.00534 | 0.21979 | −0.04476 | −0.16798 | −1.20532 | −1.10825 | 0 | 0 |
| 44 | −0.05556 | 0.19879 | −0.18976 | −0.31475 | −1.40741 | −1.29687 | 0 | 0 |
| 48 | −0.14279 | 0.18486 | −0.30639 | −0.43802 | −1.57375 | −1.45681 | 0 | 0 |

TABLE 18H
Killing Assay (A*30:01 targets; Cohort 2 donor 627934; Validated Pool)

| | Relative target cell count | | | | | | | |
|---|---|---|---|---|---|---|---|---|
| Elapsed | DMSO + | | Min_validated + | | Min_validated + | | DMSO + | |
| time (h) | Targets | | Targets | | 10:1 E:T | | 10:1 E:T | |
| 0 | 0 | 0 | 0 | 0 | 0 | 0 | 0 | 0 |
| 4 | 0.14476 | 0.09327 | 0.16433 | 0.06812 | −0.02616 | −0.11036 | 0 | 0 |
| 8 | 0.26109 | 0.24031 | 0.29409 | 0.21405 | −0.00841 | −0.12349 | 0 | 0 |
| 12 | 0.41641 | 0.38357 | 0.46022 | 0.33232 | −0.04628 | −0.17861 | 0 | 0 |
| 16 | 0.57109 | 0.55916 | 0.64263 | 0.47700 | −0.06324 | −0.19195 | 0 | 0 |
| 20 | 0.71596 | 0.74668 | 0.82375 | 0.65480 | −0.07662 | −0.19019 | 0 | 0 |
| 24 | 0.85929 | 0.90606 | 0.97835 | 0.77732 | −0.10886 | −0.24283 | 0 | 0 |
| 28 | 0.98584 | 1.04005 | 1.13307 | 0.89219 | −0.12589 | −0.29120 | 0 | 0 |
| 32 | 0.98799 | 1.14837 | 1.26068 | 0.95485 | −0.16668 | −0.32411 | 0 | 0 |
| 36 | 1.07778 | 1.22604 | 1.15367 | 1.00185 | −0.19570 | −0.40280 | 0 | 0 |
| 40 | 0.94477 | 1.30988 | 1.28494 | 0.92435 | −0.22909 | −0.45282 | 0 | 0 |
| 44 | 1.16094 | 1.37581 | 1.37739 | 0.94905 | −0.25701 | −0.50637 | 0 | 0 |
| 48 | 1.19754 | 1.42495 | 1.42641 | 0.95483 | −0.28341 | −0.56072 | 0 | 0 |
| 52 | 1.24927 | 1.46355 | 1.46869 | 0.95714 | −0.32908 | −0.60275 | 0 | 0 |
| 56 | 1.26951 | 1.51115 | 1.48650 | 0.98242 | −0.35821 | −0.62717 | 0 | 0 |
| 60 | 1.29201 | 1.52120 | 1.46502 | 0.93525 | −0.40945 | −0.66624 | 0 | 0 |
| 64 | 1.32653 | 1.52998 | 1.49070 | 0.92126 | −0.42804 | −0.66927 | 0 | 0 |
| 68 | 1.30790 | 1.53903 | 1.44162 | 0.89081 | −0.49563 | −0.69120 | 0 | 0 |
| 72 | 1.27679 | 1.54121 | 1.40280 | 0.88028 | −0.53668 | −0.68332 | 0 | 0 |

TABLE 18I
Killing Assay (A*30:01 targets; Cohort 2 donor 627934; Nucleocapsid Pool)

| | Relative target cell count | | | | | | | |
|---|---|---|---|---|---|---|---|---|
| Elapsed | DMSO + | | Min_Nuc + | | Min_Nuc + | | DMSO + | |
| time (h) | Targets | | Targets | | 10:1 E:T | | 10:1 E:T | |
| 0 | 0 | 0 | 0 | 0 | 0 | 0 | 0 | 0 |
| 4 | 0.14476 | 0.09327 | 0.15397 | 0.10632 | −0.06036 | −0.07382 | 0 | 0 |
| 8 | 0.26109 | 0.24031 | 0.30186 | 0.22025 | −0.11788 | −0.05358 | 0 | 0 |
| 12 | 0.41641 | 0.38357 | 0.44388 | 0.34536 | −0.14901 | −0.08479 | 0 | 0 |
| 16 | 0.57109 | 0.55916 | 0.62546 | 0.51887 | −0.19338 | −0.11071 | 0 | 0 |
| 20 | 0.71596 | 0.74668 | 0.80756 | 0.69603 | −0.20924 | −0.06784 | 0 | 0 |
| 24 | 0.85929 | 0.90606 | 0.96860 | 0.83152 | −0.23543 | −0.09405 | 0 | 0 |
| 28 | 0.98584 | 1.04005 | 1.09160 | 0.94415 | −0.27641 | −0.09959 | 0 | 0 |
| 32 | 0.98799 | 1.14837 | 1.18284 | 1.01868 | −0.32138 | −0.13529 | 0 | 0 |
| 36 | 1.07778 | 1.22604 | 1.26497 | 0.93323 | −0.40293 | −0.20220 | 0 | 0 |
| 40 | 0.94477 | 1.30988 | 1.31387 | 0.99957 | −0.45485 | −0.23347 | 0 | 0 |
| 44 | 1.16094 | 1.37581 | 1.33523 | 1.02328 | −0.47735 | −0.25642 | 0 | 0 |
| 48 | 1.19754 | 1.42495 | 1.35208 | 1.01466 | −0.51604 | −0.30221 | 0 | 0 |
| 52 | 1.24927 | 1.46355 | 1.33143 | 1.00554 | −0.55506 | −0.33146 | 0 | 0 |
| 56 | 1.26951 | 1.51115 | 1.29058 | 1.00229 | −0.60007 | −0.33969 | 0 | 0 |
| 60 | 1.29201 | 1.52120 | 1.23831 | 0.97154 | −0.64282 | −0.35910 | 0 | 0 |
| 64 | 1.32653 | 1.52998 | 1.19719 | 0.95325 | −0.66688 | −0.35434 | 0 | 0 |
| 68 | 1.30790 | 1.53903 | 1.08141 | 0.94658 | −0.70861 | −0.33438 | 0 | 0 |
| 72 | 1.27679 | 1.54121 | 0.96905 | 0.91293 | −0.74903 | −0.31328 | 0 | 0 |

TABLE 18J
Killing Assay (A*03:01 targets; Cohort 2 donor 627934; Validated Pool)

| | Relative target cell count | | | | | | | |
|---|---|---|---|---|---|---|---|---|
| Elapsed | DMSO + | | Min_validated + | | Min_validated + | | DMSO + | |
| time (h) | Targets | | Targets | | 10:1 E:T | | 10:1 E:T | |
| 0 | 0 | 0 | 0 | 0 | 0 | 0 | 0 | 0 |
| 4 | 0.08781 | 0.05963 | 0.11622 | 0.08086 | 0.04206 | −0.05415 | 0 | 0 |
| 8 | 0.14332 | 0.10822 | 0.16564 | 0.13178 | 0.00529 | −0.11096 | 0 | 0 |
| 12 | 0.27527 | 0.18187 | 0.27835 | 0.24878 | 0.01055 | −0.15157 | 0 | 0 |
| 16 | 0.40269 | 0.20477 | 0.42135 | 0.35832 | −0.01181 | −0.19062 | 0 | 0 |
| 20 | 0.49504 | 0.35270 | 0.55662 | 0.48411 | −0.01763 | −0.21009 | 0 | 0 |
| 24 | 0.60978 | 0.43822 | 0.67126 | 0.58290 | −0.02953 | −0.26287 | 0 | 0 |
| 28 | 0.72247 | 0.47024 | 0.78706 | 0.68684 | −0.05697 | −0.32551 | 0 | 0 |
| 32 | 0.80966 | 0.53925 | 0.79661 | 0.76714 | −0.05774 | −0.35916 | 0 | 0 |
| 36 | 0.91979 | 0.54476 | 0.87868 | 0.75431 | −0.13110 | −0.47610 | 0 | 0 |
| 40 | 0.82506 | 0.59488 | 0.85789 | 0.81567 | −0.15046 | −0.52954 | 0 | 0 |
| 44 | 0.89624 | 0.61217 | 0.93873 | 0.71403 | −0.18150 | −0.57730 | 0 | 0 |
| 48 | 0.94128 | 0.63571 | 0.99012 | 0.75434 | −0.19083 | −0.62099 | 0 | 0 |
| 52 | 0.95310 | 0.65967 | 1.00391 | 0.77013 | −0.23838 | −0.68264 | 0 | 0 |
| 56 | 0.97468 | 0.68263 | 1.00001 | 0.78528 | −0.26245 | −0.72252 | 0 | 0 |
| 60 | 0.97790 | 0.74183 | 1.00772 | 0.79326 | −0.28918 | −0.69767 | 0 | 0 |
| 64 | 0.99431 | 0.75242 | 1.02235 | 0.79916 | −0.31783 | −0.79814 | 0 | 0 |
| 68 | 1.01182 | 0.73655 | 1.04129 | 0.80057 | −0.30320 | −0.78695 | 0 | 0 |
| 72 | 1.00329 | 0.70559 | 1.07602 | 0.75102 | −0.29658 | −0.81701 | 0 | 0 |

TABLE 18K
Killing Assay (A*03:01 targets; Cohort 2 donor 627934; Nucleocapsid Pool)

| | Relative target cell count | | | | | | | |
|---|---|---|---|---|---|---|---|---|
| Elapsed | DMSO + | | Min_Nuc + | | Min_Nuc + | | DMSO + | |
| time (h) | Targets | | Targets | | 10:1 E:T | | 10:1 E:T | |
| 0 | 0 | 0 | 0 | 0 | 0 | 0 | 0 | 0 |
| 4 | 0.08781 | 0.05963 | 0.13557 | 0.09417 | 0.04270 | 0.00347 | 0 | 0 |
| 8 | 0.14332 | 0.10822 | 0.19202 | 0.18754 | −0.03953 | −0.01646 | 0 | 0 |
| 12 | 0.27527 | 0.18187 | 0.34927 | 0.29990 | −0.04551 | −0.04730 | 0 | 0 |
| 16 | 0.40269 | 0.20477 | 0.51671 | 0.45493 | −0.08229 | −0.07810 | 0 | 0 |
| 20 | 0.49504 | 0.35270 | 0.69613 | 0.60546 | −0.08281 | −0.09829 | 0 | 0 |
| 24 | 0.60978 | 0.43822 | 0.83645 | 0.75879 | −0.13127 | −0.13499 | 0 | 0 |
| 28 | 0.72247 | 0.47024 | 0.98696 | 0.91143 | −0.15017 | −0.16452 | 0 | 0 |
| 32 | 0.80966 | 0.53925 | 1.12928 | 1.00969 | −0.17858 | −0.17565 | 0 | 0 |
| 36 | 0.91979 | 0.54476 | 1.02635 | 1.08915 | −0.23553 | −0.23020 | 0 | 0 |
| 40 | 0.82506 | 0.59488 | 1.19327 | 1.15912 | −0.25960 | −0.25894 | 0 | 0 |
| 44 | 0.89624 | 0.61217 | 1.26278 | 1.23350 | −0.29894 | −0.28136 | 0 | 0 |
| 48 | 0.94128 | 0.63571 | 1.36362 | 1.27188 | −0.30640 | −0.31069 | 0 | 0 |
| 52 | 0.95310 | 0.65967 | 1.39987 | 1.27689 | −0.36619 | −0.36053 | 0 | 0 |
| 56 | 0.97468 | 0.68263 | 1.41729 | 1.29205 | −0.38330 | −0.35798 | 0 | 0 |
| 60 | 0.97790 | 0.74183 | 1.45720 | 1.37160 | −0.41308 | −0.29853 | 0 | 0 |
| 64 | 0.99431 | 0.75242 | 1.48982 | 1.17613 | −0.48758 | −0.30734 | 0 | 0 |
| 68 | 1.01182 | 0.73655 | 1.53320 | 1.20548 | −0.44282 | −0.32877 | 0 | 0 |
| 72 | 1.00329 | 0.70559 | 1.54367 | 1.18132 | −0.44307 | −0.34385 | 0 | 0 |

TABLE 18L
Killing Assay (A*11:01 targets; Cohort 2 donor 602232; Validated Pool)

| | Relative target cell count | | | | | | | |
|---|---|---|---|---|---|---|---|---|
| Elapsed | DMSO + | | Min_validated + | | Min_validated + | | DMSO + | |
| time (h) | Targets | | Targets | | 10:1 E:T | | 10:1 E:T | |
| 0 | 0 | 0 | 0 | 0 | 0 | 0 | 0 | 0 |
| 4 | 0.14476 | 0.09327 | 0.15397 | 0.10632 | −0.06036 | −0.07382 | 0 | 0 |
| 8 | 0.26109 | 0.24031 | 0.30186 | 0.22025 | −0.11788 | −0.05358 | 0 | 0 |
| 12 | 0.41641 | 0.38357 | 0.44388 | 0.34536 | −0.14901 | −0.08479 | 0 | 0 |
| 16 | 0.57109 | 0.55916 | 0.62546 | 0.51887 | −0.19338 | −0.11071 | 0 | 0 |
| 20 | 0.71596 | 0.74668 | 0.80756 | 0.69603 | −0.20924 | −0.06784 | 0 | 0 |
| 24 | 0.85929 | 0.90606 | 0.96860 | 0.83152 | −0.23543 | −0.09405 | 0 | 0 |
| 28 | 0.98584 | 1.04005 | 1.09160 | 0.94415 | −0.27641 | −0.09959 | 0 | 0 |
| 32 | 0.98799 | 1.14837 | 1.18284 | 1.01868 | −0.32138 | −0.13529 | 0 | 0 |
| 36 | 1.07778 | 1.22604 | 1.26497 | 0.93323 | −0.40293 | −0.20220 | 0 | 0 |
| 40 | 0.94477 | 1.30988 | 1.31387 | 0.99957 | −0.45485 | −0.23347 | 0 | 0 |
| 44 | 1.16094 | 1.37581 | 1.33523 | 1.02328 | −0.47735 | −0.25642 | 0 | 0 |
| 48 | 1.19754 | 1.42495 | 1.35208 | 1.01466 | −0.51604 | −0.30221 | 0 | 0 |
| 52 | 1.24927 | 1.46355 | 1.33143 | 1.00554 | −0.55506 | −0.33146 | 0 | 0 |
| 56 | 1.26951 | 1.51115 | 1.29058 | 1.00229 | −0.60007 | −0.33969 | 0 | 0 |
| 60 | 1.29201 | 1.52120 | 1.23831 | 0.97154 | −0.64282 | −0.35910 | 0 | 0 |
| 64 | 1.32653 | 1.52998 | 1.19719 | 0.95325 | −0.66688 | −0.35434 | 0 | 0 |
| 68 | 1.30790 | 1.53903 | 1.08141 | 0.94658 | −0.70861 | −0.33438 | 0 | 0 |
| 72 | 1.27679 | 1.54121 | 0.96905 | 0.91293 | −0.74903 | −0.31328 | 0 | 0 |

[0717] XIV.J. SARS-CoV-2 Prime-Boost Regimens Featuring Spike Proteins from Different Isolates Produces Responses to Spike in Non-Human Primates

[0718] ChAd and SAM vaccine platforms encoding different isolates of the SARS-CoV-2 Spike protein were assessed in Indian rhesus macaques as part of homologous or heterologous prime/boost regimens, as shown in FIG. 34 and presented in Table 19.

TABLE 19
NHP Study Design for SARS-CoV-2 Isolate Vaccine Regimens

| Group # | Prime (week 0) | Boost 1 (week 6 or 8) | Boost 2 (week 30) |
|---|---|---|---|
| 1 | SAM-S_{D614G}; 300 ug | SAM-S_{D614G}; 300 ug | ChAd-S_{B1351}-TCE5; 5e11 vp |
| 2 | SAM-S_{D614G}; 30 ug | SAM-S_{D614G}; 30 ug | SAM-TCE5-S_{B1351}; 30 ug |
| 5 | ChAd-S_{D614G}; 1e12 vp | SAM-S_{D614G}; 100 ug | SAM-TCE5-S_{B1351}; 30 ug |
| 6 | ChAd.S_{D614G}; 5e10 vp | SAM-S_{D614G}; 100 ug | ChAd-S_{B1351}-TCE5; 5e11 vp |

Prime: ChAdV - “CTSpike_{g}” (SEQ ID NO: 79); SAM - “IDTSpike_{g}” (SEQ ID NO: 69)
Boost 1: SAM - “IDTSpike_{g}” (SEQ ID NO: 69)
Boost 2: all CT-F2P versions of Spike variant B.1.351; TCE5 see Table 10

[0719] NHPs were first immunized with a priming dose of either a ChAd platform including a Spike-encoding cassette featuring “ChAd-S_{D614G}; CT” (SEQ ID NO:79) or a SAM platform including a Spike-encoding cassette featuring “SAM-S_{D614G}; IDT” (SEQ ID NO:69) at the indicated doses. NHPs were then administered a first boost at weeks 6 or 8 with the SAM platform including a Spike-encoding cassette featuring “SAM-S_{D614G}; IDT” at the indicated doses. NHPs were then administered a second boost at week 30 with either a ChAd platform including a B.1.351 Spike variant-encoding cassette featuring Cool Tool sequence optimization (“CT”) and the F2P modification described herein (“F2P”) [SEQ ID NO:112] or a SAM platform including the same B.1.351 Spike variant (each platform also included the TCE5 T cell epitope cassette, see Table 10, in the orientation shown). The ChAdV antigen cassette is shown in SEQ ID NO:113. NHPs were monitored over time, as described herein.

[0720] As shown in FIGS. 35A, 35B, 35C, and 35D, the various vaccine regimens (Groups 1, 2, 5, and 6, respectively) produced T cell responses across multiple Spike T cell epitope pools (top panels). T cell responses for individual NHPs directed to a single large Spike T cell epitope pool was heterogenous (middle panels and summarized in FIG. 36 top panel), with each boost generally producing an increased T cell response, including production of a robust response in some (e.g., two NHPs in Group 1 following Boost 2). Spike-specific IgG antibody titers were detected and increased following each boost (bottom panels and summarized in FIG. 36 bottom panel) in all five NHP animals assessed. T cell responses to the TCE5-encoded epitopes, though generally small, trended upwards following Boost 2 (the first administration of a vaccine including TCE5), with generally stronger responses with administration of the ChAdV platform vaccine (FIG. 36 middle panel). Accordingly, the data demonstrate a vaccine regimen including a boost with a Spike variant encoding vaccine produced T cell and antibody responses.

[0721] Antibody responses were further assessed for neutralizing antibody production to both the D614G pseudovirus and B.1.351 pseudovirus. As shown in FIG. 37, neutralizing antibody (Nab) titers against the D614G pseudovirus were detected following Boost 1 across the four groups, with Nab titers generally the same following Boost 2 (left panels). Following Boost 1, cross-neutralizing antibody titers against the B.1.351 pseudovirus, while detected, were distinctly lower than the Nab titer against the D614G pseudovirus (right panel, column 1). However, following administration of Boost 2 encoding the B.1.351 spike variant, Nab titers against the B.1.351 pseudovirus were noticeably increased (right panels, column 2), notably with similar Nab titer levels to that against the D614G pseudovirus following Boost 1. These results are further demonstrated in FIG. 38, comparing the relative Nab titer levels against each of the pseudoviruses illustrating the reduced cross-neutralizing capacity against the B.1.351 pseudovirus following Boost 1 (top panels) and rescuing of the same following Boost 2 (bottom panels) across each of the vaccine regimens assessed.

[0722] The data demonstrate the various vaccine regimens produced both T cell and antibody responses against the encoded antigens in NHPs, notably demonstrating subsequent immunization with Spike variant encoding vaccines noticeably improved Nab titers against the respective variant pseudovirus.

[0723] XIV.K. SARS-CoV-2 Vaccine Clinical Assessment in Human Subjects

[0724] A phase 1, open-label, dose escalation, non-randomized study of homologous and heterologous prime-boost vaccination schedules to examine safety, tolerability, and immunogenicity of investigational Chimpanzee Adenovirus serotype 68 (ChAd) and self-amplifying mRNA (SAM) vectors expressing either Severe Acute Respiratory Syndrome Coronavirus 2 (SARS-CoV-2) spike alone, or spike plus additional SARS-CoV-2 T cell epitopes (TCE), such as epitopes presented in Tables A-F or T cell epitope cassettes described in Tables 10, 12A, 12B, or 12C, in healthy adult subjects is conducted. Stage 1 compares ChAd and SAM vaccines encoding only the spike protein in a 2-group dose escalation trial in subjects 18-60 years old, and a 3-group dose escalation trial in subjects over 60 years old, focusing on heterologous ChAd prime/SAM boost and homologous SAM prime/SAM boost regimens including sentinels, and staggered enrollment for dose escalation. Stage 2 compares optimal doses of ChAd and SAM vaccines (determined in Stage 1) encoding both spike and TCE, in subjects 18 years and older enrolled into up to 6 groups simultaneously to receive homologous SAM prime/SAM boost, homologous ChAd prime/ChAd boost and heterologous ChAd prime/SAM boost combinations. Up to 70 (Stage 1) and up to 70 (Stage 2) males and non-pregnant females>/=18 years of age who are in good health, do not have high risks for SARS-CoV-2 infection or for severe Coronavirus Disease 2019 (COVID-19) disease progression, and meet all eligibility criteria will be enrolled. Subjects will be enrolled at one of at least 4 distinct US-based Infectious Diseases Clinical Research Consortium (IDCRC) sites into different groups based on their age (18-60 and >60 years old). The primary objective of this study is to assess the safety and tolerability of different doses of ChAd-S (or ChAd-S-TCE) and SAM-S (or SAM-S-TCE) when administered as prime and/or boost in healthy adult subjects including older adult subjects.

[0725] ChAdV68-S: Chimpanzee Adenovirus serotype 68—Spike (ChAdV68-S) is a replication-defective, E1, E3 E4Orf2-4 deleted adenoviral vector based on chimpanzee adenovirus 68 (C68, 68/SAdV-25, originally designated as Pan 9), which belongs to the sub-group E adenovirus family. A single 0.5 mL or 1.0 mL intramuscular injection (depending on dose level) is administered in the deltoid muscle. When possible, the prime vaccine and boost vaccine is administered in different arms.

[0726] SAM-LNP-S: Self-Amplifying mRNA—Lipid Nanoparticles—Spike (SAM-LNP-S) is a SAM vector based on Venezuelan Equine Encephalitis Virus (VEEV). A single 0.5 mL intramuscular injection is administered in the deltoid muscle. When possible, the prime vaccine and boost vaccine is administered in different arms.

[0727] ChAdV68-S-TCE: Chimpanzee Adenovirus 68—Spike plus additional SARS-CoV-2 T cell epitopes (ChAdV68-S-TCE) is a replication-defective, E1, E3 E4Orf2-4 deleted adenoviral vector based on chimpanzee adenovirus 68 (C68, 68/SAdV-25, originally designated as Pan 9), which belongs to the sub-group E adenovirus family. A single 0.5- or 1.0-mL intramuscular injection will be administered in the deltoid muscle. When possible, the prime vaccine and boost vaccine should be administered in different arms.

[0728] SAM-LNP-S-TCE: Self-Amplifying mRNA—Lipid Nanoparticles—Spike plus additional SARS-CoV-2 T cell epitopes (SAM-S-TCE) is a SAM vector based on Venezuelan Equine Encephalitis Virus (VEEV). A single 0.5 mL intramuscular injection will be administered in the deltoid muscle. When possible, the prime vaccine and boost vaccine should be administered in different arms.

[0729] The diluent used for this study is 0.9% Sodium Chloride Injection, USP, and is a sterile, nonpyrogenic, isotonic solution of sodium chloride and water for injection. Each milliliter (mL) contains sodium chloride 9 mg. It contains no bacteriostat, antimicrobial agent or added buffer and is supplied only in single-dose containers to dilute or dissolve drugs for injection. 0.308 mOsmol/mL (calc.). 0.9% Sodium Chloride Injection, USP contains no preservatives.

[0730] The following groups are assessed:
[0731] Stage 1 Group 1: 5×10\hat{ }10 viral particles of ChAdV68-S administered through 0.5 mL intramuscular injection in the deltoid muscle on Day 1 and 30 mcg of SAM-LNP-S administered through 0.5 mL intramuscular injection in the deltoid muscle on Day 29 in participants from 18 to 60 years of age. N=10
[0732] Stage 1 Group 2: 1×10\hat{ }11 viral particles of ChAdV68-S administered through 0.5 mL intramuscular injection in the deltoid muscle on Day 1 and 30 mcg of SAM-LNP-S administered through 0.5 mL intramuscular injection in the deltoid muscle on Day 29 in participants from 18 to 60 years of age. N=10
[0733] Stage 1 Group 3: 30 mcg of SAM-LNP-S administered through 0.5 mL intramuscular injection in the deltoid muscle on Day 1 and Day 29 in participants from 18 to 60 years of age. N=10
[0734] Stage 1 Group 4: 100 mcg of SAM-LNP-S administered through 0.5 mL intramuscular injection in the deltoid muscle on Day 1 and Day 29 in participants from 18 to 60 years of age. N=10
[0735] Stage 1 Group 5: 5×10\hat{ }10 viral particles of ChAdV68-S administered through 0.5 mL intramuscular injection in the deltoid muscle on Day 1 and 30 mcg of SAM-LNP-S administered through 0.5 mL intramuscular injection in the deltoid muscle on Day 29 in participants older than 60 years of age. N=10
[0736] Stage 1 Group 6: 1×10\hat{ }11 viral particles of ChAdV68-S administered through 0.5 mL intramuscular injection in the deltoid muscle on Day 1 and 30 mcg of SAM-LNP-S administered through 0.5 mL intramuscular injection in the deltoid muscle on Day 29 in participants older than 60 years of age. N=10
[0737] Stage 1 Group 7: 5×10\hat{ }11 viral particles of ChAdV68-S administered through 1.0 mL intramuscular injection in the deltoid muscle on Day 1 and 30 mcg of SAM-LNP-S administered through 0.5 mL intramuscular injection in the deltoid muscle on Day 29 in participants older than 60 years of age. N=10
[0738] Stage 2 Group 8: 5×10\hat{ }10 viral particles of ChAdV68-S-TCE OR 1×10\hat{ }11 viral particles of ChAdV68-S-TCE administered through 0.5 mL intramuscular injection in the deltoid muscle on Day 1 and 30 mcg of SAM-LNP-S-TCE administered through 0.5 mL intramuscular injection in the deltoid muscle on Day 57 in participants from 18 to 60 years of age. N=10
[0739] Stage 2 Group 9: 5×10\hat{ }10 viral particles of ChAdV68-S-TCE OR 1×10\hat{ }11 viral particles of ChAdV68-S-TCE OR 5×10\hat{ }11 viral particles of ChAdV68-S-TCE administered through 0.5 mL or 1.0 mL (for 5×10\hat{ }11 viral particles) intramuscular injection in the deltoid muscle on Day 1 and 30 mcg of SAM-LNP-S-TCE administered through 0.5 mL intramuscular injection in the deltoid muscle on Day 57 in participants older than 60 years of age. N=10
[0740] Stage 2 Group 10: 1×10\hat{ }11 viral particles of ChAdV68-S-TCE administered through 0.5 mL intramuscular injection in the deltoid muscle on Day 1 and Day 113 in participants from 18 to 60 years of age. N=10
[0741] Stage 2 Group 11: 1×10\hat{ }11 viral particles of ChAdV68-S-TCE administered through 0.5 mL intramuscular injection in the deltoid muscle on Day 1 and Day 113 OR 5×10\hat{ }11 viral particles of ChAdV68-S-TCE administered through 1.0 mL intramuscular injection in the deltoid muscle on Day 1 and Day 113 in participants older than 60 years of age. N=10
[0742] Stage 2 Group 12: 10 mcg of SAM-LNP-S-TCE administered through 0.5 mL intramuscular injection in the deltoid muscle on Day 1 and Day 57 in participants from 18 years of age or older. N=10.
[0743] Stage 2 Group 13: 30 mcg of SAM-LNP-S-TCE administered through 0.5 mL intramuscular injection in the deltoid muscle on Day 1 and Day 57 in participants from 18 years of age and older. N=10
[0744] Stage 2 Group 14: 100 mcg of SAM-LNP-S-TCE administered through 0.5 mL intramuscular injection in the deltoid muscle on Day 1 and Day 57 in participants from 18 years of age and older. N=10

[0745] The following primary outcomes are assessed:
[0746] Frequency by grade of solicited local reactogenicity adverse events (AEs) [Time Frame: Through 7 days post each vaccination]
[0747] Frequency by grade of solicited systemic reactogenicity adverse events (AEs) [Time Frame: Through 7 days post each vaccination]
[0748] Frequency by grade of unsolicited adverse events (AEs) [Time Frame: Through 28 days post each vaccination]
[0749] Frequency of Adverse Events of Special Interest (AESIs) [Time Frame: Day 1 through Day 478]. Including potentially immune-mediated medical conditions (PIMMCs), medically attended adverse events (MAAEs), and new onset chronic medical conditions (NOCMCs)
[0750] Frequency of clinical safety laboratory adverse events by severity grade [Time Frame: Through 7 days post each vaccination]. Parameters to be evaluated include: white blood cell count (WBC), hemoglobin (HgB), platelets (PLT), alanine aminotransferase (ALT), aspartate aminotransferase (AST), alkaline phosphatase (ALP), total bilirubin (T Bili), creatine kinase (CK), and creatinine (Cr)
[0751] Frequency of Serious Adverse Events (SAEs) [Time Frame: Day 1 through Day 478]

[0752] The following secondary outcomes are assessed:
[0753] Geometric mean fold rise from baseline in titer measured by a SARS-CoV-2 neutralization assay, for wild-type virus and emergent viral strains [Time Frame: Day 1 through Day 478]
[0754] Geometric mean fold rise from baseline in titer of receptor-binding domain (RBD) specific Immunoglobulin G (IgG) [Time Frame: Day 1 through Day 478]. Measured by an Enzyme-Linked Immunosorbent Assay (ELISA), for RBD from wild-type virus and emergent viral strains
[0755] Geometric mean fold rise from baseline in titer of Spike-specific Immunoglobulin G (IgG) [Time Frame: Day 1 through Day 478]. Measured by an Enzyme-Linked Immunosorbent Assay (ELISA), for spike protein from wild-type virus and emergent viral strains
[0756] Geometric mean titer measured by a SARS-CoV-2 neutralization assay, for wild-type virus and emergent viral strains [Time Frame: Day 1 through Day 478]
[0757] Geometric mean titer of receptor-binding domain (RBD) specific Immunoglobulin G (IgG) [Time Frame: Day 1 through Day 478]. Measured by an Enzyme-Linked Immunosorbent Assay (ELISA), for RBD from wild-type virus and emergent viral strains
[0758] Geometric mean titer of Spike-specific Immunoglobulin G (IgG) [Time Frame: Day 1 through Day 478]. Measured by an Enzyme-Linked Immunosorbent Assay (ELISA), for spike protein from wild-type virus and emergent viral strains
[0759] Percent of cells expressing a cytokine by cell type (CD4+ or CD8+), cytokine set (Th1 or Th2 cytokine for CD4+ and CD8+ cytokine for CD8+ or other combinations of interest) and peptide pool (covering spike and T cell epitope regions) [Time Frame: Day 1 through Day 478]. As determined by ICS
[0760] Percentage of subjects who seroconverted, for RBD from wild-type virus and emergent viral strains [Time Frame: Day 1 through Day 478]. Seroconversion defined as a 4-fold change in receptor-binding domain (RBD) specific IgG from baseline measured by ELISA. Including against emergent viral strains, e.g., B.1.1.7., as assessed by a range of assays measuring total Spike-specific Immunoglobulin G (IgG) (Enzyme-Linked Immunosorbent Assay (ELISA)-based) and function (neutralization, receptor-binding domain (RBD) binding, or similar) in serum
[0761] Percentage of subjects who seroconverted, for spike protein from wild-type virus and emergent viral strains [Time Frame: Day 1 through Day 478]. Seroconversion defined as a 4-fold change in Spike-specific Immunoglobulin G (IgG) from baseline measured by an Enzyme-Linked Immunosorbent Assay (ELISA). Including against emergent viral strains, e.g., B.1.1.7., as assessed by a range of assays measuring total Spike-specific Immunoglobulin G (IgG) (Enzyme-Linked Immunosorbent Assay (ELISA)-based) and function (neutralization, receptor-binding domain (RBD) binding, or similar) in serum
[0762] Percentage of subjects who seroconverted, for wild-type virus and emergent viral strains [Time Frame: Day 1 through Day 478]. Seroconversion defined as a 4-fold change in titer from baseline measured by a SARS-CoV-2 neutralization assay. Including against emergent viral strains, e.g., B.1.1.7., as assessed by a range of assays measuring total Spike-specific Immunoglobulin G (IgG) (Enzyme-Linked Immunosorbent Assay (ELISA)-based) and function (neutralization, receptor-binding domain (RBD) binding, or similar) in serum
[0763] Rate of spot-forming cell per million cells by peptide pool (covering spike and T cell epitope regions) [Time Frame: Day 1 through Day 478]. As determined by interferon (IFN) gamma Enzyme Linked Immunospot Assay (ELISpot)
[0764] Responder status, derived from the intracellular cytokine staining (ICS) cell counts for each set of applicable cytokines and each peptide pool [Time Frame: Day 1 through Day 478]. Covering spike and T cell epitope regions
[0765] Responder status, determined by interferon (IFN) gamma Enzyme Linked Immunospot Assay (ELISpot) for each peptide pool [Time Frame: Day 1 through Day 478]. Covering spike and T cell epitope regions
[0766] Th1/Th2 cytokine balance of T cell response [Time Frame: Through 28 days post boost vaccination]. By measuring interleukin (IL) 2, tumor necrosis factor (TNF) alpha, IL-4, IL-10, and IL-13 using a multiplexed cytokine assay with Enzyme Linked Immunospot Assay (ELISpot) supernatants in a subset of subjects

### Additional Sequences

[0767] Table A

[0768] Refer to Sequence Listing, SEQ ID NOS. 130-8195. Presented is each candidate MHC Class I epitope encoded by SARS-CoV-2 that was predicted to associate with a given HLA allele with an EDGE score>0.001. Each entry includes the candidate epitope sequence and cognate HLA alleles with a predicted EDGE score greater than 0.001, with each cognate pairing ranked as H (EDGE score>0.1), M (EDGE score between 0.01 and 0.1), and L (EDGE score<0.01). For example, the candidate epitope MESLVPGF (SEQ ID NO: 127) is predicted to pair with HLA-B*18:01, HLA-B*37:01, and HLA-B*07:05 with EDGE scores 0.019, 0.032, and 0.008, respectively. Accordingly, the entry for SEQ ID NO: 130 is “MESLVPGF: B18:01M; B37:01M; B07:05L.”

[0769] Table B

[0770] Refer to Sequence Listing, SEQ ID NOS. 8196-26740. Presented is each candidate MHC Class II epitope encoded by SARS-CoV-2 that was predicted to associate with a given HLA allele with an EDGE score>0.001. Each entry includes the candidate epitope sequence and cognate HLA alleles with a predicted EDGE score greater than 0.001, with each cognate pairing ranked as H (EDGE score>0.1), M (EDGE score between 0.01 and 0.1), and L (EDGE score<0.01). For example, the candidate epitope VELVAELEGI (SEQ ID NO: 128) is predicted to pair with HLA-DQA1*03:02-B1*03:03, HLA-DRB1*11:02, HLA-DQA1*05:05-B1*03:19, and HLA-DPA1*01:03-B1*104:01 with EDGE scores 0.003145, 0.00328, 0.041097, and 0.011613, respectively. Accordingly, the entry for SEQ ID NO: 8219 is “VELVAELEGI: DQA1*03:02-B1*03:03L; DRB1*11:02L; DQA1*05:05-B1*03:19M; DPA1*01:03-B1*104:01M.” Only HLA-DQ and HLA-DP are referred to by their alpha and beta chains. HLA-DR is referred to only by its beta chain as the alpha chain is generally invariable in the human population, with HLA-DR peptide contact regions particularly invariant.

[0771] Table C

[0772] Refer to Sequence Listing, SEQ ID NOS. 26741-27179. Presented are additional MHC Class I epitopes, other than those from the Spike protein, encoded within the optimized cassette that were predicted to associate with a given HLA allele with an EDGE score>0.001. The additional epitopes were determined by calculating population coverage criteria P with all initial epitopes provided by the SARS-CoV-2 Spike protein (SEQ ID NO:59) split into S1 and S2 and applying the optimization algorithms described herein.

[0773] Table D

[0774] Refer to Sequence Listing, SEQ ID NOS. 27180-27495, for SARS-CoV-2 Spike overlapping peptide pools. Each entry includes the stimulatory peptide, SARS-CoV-2 protein source, peptide subpool information, and Table. For example, the stimulatory peptide MFVFLVLLPLVSSQC (SEQ ID NO: 27180) is derived from SARS-CoV-2 Spike protein (Wuhan D614G variant), included in subpool S_Wu_1_2, and found in Table D. Accordingly, the entry for SEQ ID NO. 27180 is “MFVFLVLLPLVSSQC: Spike Wuhan D614G; S_Wu_1_2; Table D”.

[0775] Table E

[0776] Refer to Sequence Listing, SEQ ID NOS. 27496-27603, for TCE5-encoded overlapping peptide pools. Each entry includes the stimulatory peptide, SARS-CoV-2 protein source, peptide subpool information, and Table. For example, the stimulatory peptide LLWPVTLACFVLAAV (SEQ ID NO: 27496) is derived from SARS-CoV-2 Membrane protein, included in subpool OLP_Mem, and found in Table E. Accordingly, the entry for SEQ ID NO. 27496 is “LLWPVTLACFVLAAV: Membrane; OLP_Mem; Table E”.

[0777] Table F

[0778] Refer to Sequence Listing, SEQ ID NOS. 27604-27939, for TCE5-encoded minimal epitope peptide pools. Each entry includes the stimulatory peptide, SARS-CoV-2 protein source, peptide subpool information, and Table. For example, the stimulatory peptide ALSKGVHFV (SEQ ID NO: 27604) is derived from SARS-CoV-2 ORF3a protein (frame 52-85), included in subpool Min_validated, and found in Table F. Accordingly, the entry for SEQ ID NO. 27604 is “ALSKGVHFV: ORF3a 52-85; Min_validated; Table F”.

[0779] Certain additional sequences for vectors, cassettes, and antibodies referred to herein are described below and referred to by SEQ ID NO.

Tremelimumab VL (SEQ ID NO: 16)
Tremelimumab VH (SEQ ID NO: 17)
Tremelimumab VH CDR1 (SEQ ID NO: 18)
Tremelimumab VH CDR2 (SEQ ID NO: 19)
Tremelimumab VH CDR3 (SEQ ID NO: 20)
Tremelimumab VL CDR1 (SEQ ID NO: 21)
Tremelimumab VL CDR2 (SEQ ID NO: 22)
Tremelimumab VL CDR3 (SEQ ID NO: 23)
Durvalumab (MEDI4736) VL (SEQ ID NO: 24)
MEDI4736 VH (SEQ ID NO: 25)
MEDI4736 VH CDR1 (SEQ ID NO: 26)
MEDI4736 VH CDR2
MEDI4736 VH CDR3 (SEQ ID NO: 28)
MEDI4736 VL CDR1 (SEQ ID NO: 29)
MEDI4736 VL CDR2 (SEQ ID NO: 30)
MEDI4736 VL CDR3 (SEQ ID NO: 31)
UbA76-25merPDTT nucleotide (SEQ ID NO: 32)
UbA76-25merPDTT polypeptide (SEQ ID NO: 33)
MAG-25merPDTT nucleotide (SEQ ID NO: 34)
MAG-25merPDTT polypeptide (SEQ ID NO: 35)
Ub7625merPDTT_NOSFL nucleotide (SEQ ID NO: 36)
Ub7625merPDTT_NoSFL polypeptide (SEQ ID NO: 37)
ChAdV68.5WTnt.MAG25mer (SEQ ID NO: 2); AC_000011.1 with E1 (nt 577 to 3403) and E3 (nt 27,125-31,825)
sequences deleted; corresponding ATCC VR-594 nucleotides substituted at five positions; model
neoantigen cassette under the control of the CMV promoter/enhancer inserted in place of deleted E1;
SV40 poly A 3′ of cassette
Venezuelan equine encephalitis virus [VEE (SEQ ID NO: 3) GenBank: L01442.2
VEE-MAG25mer (SEQ ID NO: 4); contains MAG-25merPDTT nucleotide (bases 30-1755)
Venezuelan equine encephalitis virus strain TC-83 [TC-83(SEQ ID NO: 5) GenBank: L01443.1
VEE Delivery Vector (SEQ ID NO: 6); VEE genome with nucleotides 7544-11175 deleted [alphavirus
structural proteins removed
TC-83 Delivery Vector(SEQ ID NO: 7); TC-83 genome with nucleotides 7544-11175 deleted [alphavirus
structural proteins removed
VEE Production Vector (SEQ ID NO: 8); VEE genome with nucleotides 7544-11175 deleted, plus 5′ T7
promoter, plus 3′ restriction sites
TC-83 Production Vector(SEQ ID NO: 9); TC-83 genome with nucleotides 7544-11175 deleted, plus 5′ T7-
promoter, plus 3′ restriction sites
VEE-UbAAY (SEQ ID NO: 14); VEE delivery vector with MHC class I mouse tumor epitopes SIINFEKL (SEQ
ID NO: 129) and AH1-A5 inserted
VEE-Luciferase (SEQ ID NO: 15); VEE delivery vector with luciferase gene inserted at 7545
ubiquitin (SEQ ID NO: 38) > UbG76 0-228
Ubiquitin A76 (SEQ ID NO: 39) > UbA76 0-228
HLA-A2 (MHC class I) signal peptide (SEQ ID NO: 40) > MHC SignalPep 0-78
HLA-A2 (MHC class I) Trans Membrane domain (SEQ ID NO: 41) > HLA A2 TM Domain 0-201
IgK Leader Seq (SEQ ID NO: 42) > IgK Leader Seq 0-60
Human DC-Lamp (SEQ ID NO: 43) > HumanDCLAMP 0-3178
Mouse LAMP1 (SEQ ID NO: 44) > MouseLamp1 0-1858
Human Lamp1 cDNA (SEQ ID NO: 45) > Human Lamp1 0-2339
Tetanus toxoid nulceic acid sequence (SEQ ID NO: 46)
Tetanus toxoid amino acid sequence (SEQ ID NO: 47)
PADRE nulceotide sequence (SEQ ID NO: 48)
PADRE amino acid sequence (SEQ ID NO: 49)
WPRE (SEQ ID NO: 50) > WPRE 0-593
IRES (SEQ ID NO: 51) > eGFP_IRES_SEAP_Insert 1746-2335
GFP (SEQ ID NO: 52)
SEAP (SEQ ID NO: 53)
Firefly Luciferase (SEQ ID NO: 54)
FMDV 2A (SEQ ID NO: 55)
GPGPG linker (SEQ ID NO: 56)
chAd68-Empty-E4deleted (SEQ ID NO: 75): AC_000011.1 with E1 (nt 577 to 3403), E3 (nt 27,125-31,825),
and E4 region (nt 34,916 to 35,642) sequences deleted and the corresponding ATCC VR-594 (Independently
sequenced Full-Length VR-594 C68 SEQ ID NO: 10) nucleotides substituted at five positions
NC_045512.2 Severe acute respiratory syndrome coronavirus 2 isolate Wuhan-Hu-1, complete genome (SEQ ID
NO: 76)
SAM in vitro transcription template DNA (SEQ ID NO: 77); VEE genome with nucleotides 7544-11175
deleted, plus minimal 5′ T7-promoter
SV40 mini-intron (SEQ ID NO: 88)
CMV-CTSpike-FurinMT2P-T2A-E-T2A-M-SV40-CMV-EPE-BGH Nucleotide sequence (SEQ ID
NO: 109)
VOC 202012/01 B.1.1.7 UK Spike variant Amino Acid Sequence (SEQ ID NO: 110)
MFVFLVLLPLVSSQCVNLTTRTQLPPAYTNSFTRGVYYPDKVFRSSVLHSTQDLFLPFFSNVTW
FHAISGTNGTKRFDNPVLPFNDGVYFASTEKSNIIRGWIFGTTLDSKTQSLLIVNNATNVVIKVCE
FQFCNDPFLGVYHKNNKSWMESEFRVYSSANNCTFEYVSQPFLMDLEGKQGNFKNLREFVFK
NIDGYFKIYSKHTPINLVRDLPQGFSALEPLVDLPIGINITRFQTLLALHRSYLTPGDSSSGWTAG
AAAYYVGYLQPRTFLLKYNENGTITDAVDCALDPLSETKCTLKSFTVEKGIYQTSNFRVQPTESI
VRFPNITNLCPFGEVFNATRFASVYAWNRKRISNCVADYSVLYNSASFSTFKCYGVSPTKLNDL
CFTNVYADSFVIRGDEVRQIAPGQTGKIADYNYKLPDDFTGCVIAWNSNNLDSKVGGNYNYLY
RLFRKSNLKPFERDISTEIYQAGSTPCNGVEGFNCYFPLQSYGFQPTYGVGYQPYRVVVLSFELL
HAPATVCGPKKSTNLVKNKCVNFNFNGLTGTGVLTESNKKFLPFQQFGRDIDDTTDAVRDPQT
LEILDITPCSFGGVSVITPGTNTSNQVAVLYQGVNCTEVPVAIHADQLTPTWRVYSTGSNVFQTR
AGCLIGAEHVNNSYECDIPIGAGICASYQTQTNSHGSASSVASQSIIAYTMSLGAENSVAYSNNSI
AIPINFTISVTTEILPVSMTKTSVDCTMYICGDSTECSNLLLQYGSFCTQLNRALTGIAVEQDKNT
QEVFAQVKQIYKTPPIKDFGGFNFSQILPDPSKPSKRSFIEDLLFNKVTLADAGFIKQYGDCLGDI
AARDLICAQKFNGLTVLPPLLTDEMIAQYTSALLAGTITSGWTFGAGAALQIPFAMQMAYRFN
GIGVTQNVLYENQKLIANQFNSAIGKIQDSLSSTASALGKLQDVVNQNAQALNTLVKQLSSNFG
AISSVLNDILARLDPPEAEVQIDRLITGRLQSLQTYVTQQLIRAAEIRASANLAATKMSECVLGQS
KRVDFCGKGYHLMSFPQSAPHGVVFLHVTYVPAQEKNFTTAPAICHDGKAHFPREGVFVSNGT
HWFVTQRNFYEPQUITTHNTFVSGNCDVVIGIVNNTVYDPLQPELDSFKEELDKYFKNHTSPDV
DLGDISGINASVVNIQKEIDRLNEVAKNLNESLIDLQELGKYEQYIKWPWYIWLGFIAGLIAIVM
VTIMLCCMTSCCSCLKGCCSCGSCCKFDEDDSEPVLKGVKLHYT*
CMV-B117Spike-FurinMT2P-SV40-CMV-EPE-BGH (SEQ ID NO: 111)
B.1.351Spike-FurinMt Amino Acid sequence (South African Spike Variant) (SEQ ID NO: 112)
MFVFLVLLPLVSSQCVNFTTRTQLPPAYTNSFTRGVYYPDKVFRSSVLHSTQDLFLPFFSNVTWFHAIHVS
GTNGTKRFANPVLPFNDGVYFASTEKSNIIRGWIFGTTLDSKTQSLLIVNNATNVVIKVCEFQFCNDPFLGV
YYHKNNKSWMESEFRVYSSANNCTFEYVSQPFLMDLEGKQGNFKNLREFVFKNIDGYFKIYSKHTPINLV
RGLPQGFSALEPLVDLPIGINITRFQTLHISYLTPGDSSSGWTAGAAAYYVGYLQPRTFLLKYNENGTITDA
VDCALDPLSETKCTLKSFTVEKGIYQTSNFRVQPTESIVRFPNITNLCPFGEVFNATRFASVYAWNRKRISN
CVADYSVLYNSASFSTFKCYGVSPTKLNDLCFTNVYADSFVIRGDEVRQIAPGQTGNIADYNYKLPDDFT
GCVIAWNSNNLDSKVGGNYNYLYRLFRKSNLKPFERDISTEIYQAGSTPCNGVKGFNCYFPLQSYGFQPT
YGVGYQPYRVVVLSFELLHAPATVCGPKKSTNLVKNKCVNFNFNGLTGTGVLTESNKKFLPFQQFGRDI
ADTTDAVRDPQTLEILDITPCSFGGVSVITPGTNTSNQVAVLYQGVNCTEVPVAIHADQLTPTWRVYSTGS
NVFQTRAGCLIGAEHVNNSYECDIPIGAGICASYQTQTNSPGSASSVASQSIIAYTMSLGVENSVAYSNNSI
AIPTNFTISVTTEILPVSMTKTSVDCTMYICGDSTECSNLLLQYGSFCTQLNRALTGIAVEQDKNTQEVFAQ
VKQIYKTPPIKDFGGFNFSQILPDPSKPSKRSFIEDLLFNKVTLADAGFIKQYGDCLGDIAARDLICAQKFNG
LTVLPPLLTDEMIAQYTSALLAGTITSGWTFGAGAALQIPFAMQMAYRFNGIGVTQNVLYENQKLIANQF
NSAIGKIQDSLSSTASALGKLQDVVNQNAQALNTLVKQLSSNFGAISSVLNDILSRLDPPEAEVQIDRLITG
RLQSLQTYVTQQLIRAAEIRASANLAATKMSECVLGQSKRVDFCGKGYHLMSFPQSAPHGVVFLHVTYV
PAQEKNFTTAPAICHDGKAHFPREGVFVSNGTHWFVTQRNFYEPQUITTDNTFVSGNCDVVIGIVNNTVYD
PLQPELDSFKEELDKYFKNHTSPDVDLGDISGINASVVNIQKEIDRLNEVAKNLNESLIDLQELGKYEQYIK
WPWYIWLGFIAGLIAIVMVTIMLCCMTSCCSCLKGCCSCGSCCKFDEDDSEPVLKGVKLHYT
CMV-B.1351Spike-FurinMt-2P-CMV-TCE5-BGH (SEQ ID NO: 113); B.1.351 Spike sequence based
on CT1 sequence optimization with relevant variant mutations replaced with COOL codons

### REFERENCES

[0780] 1. Desrichard, A., Snyder, A. & Chan, T. A. Cancer Neoantigens and Applications for Immunotherapy. Clin. Cancer Res. Off J. Am. Assoc. Cancer Res. (2015). doi:10.1158/1078-0432.CCR-14-3175
[0781] 2. Schumacher, T. N. & Schreiber, R. D. Neoantigens in cancer immunotherapy. Science 348, 69-74 (2015).
[0782] 3. Gubin, M. M., Artyomov, M. N., Mardis, E. R. & Schreiber, R. D. Tumor neoantigens: building a framework for personalized cancer immunotherapy. J. Clin. Invest. 125, 3413-3421 (2015).
[0783] 4. Rizvi, N. A. et al. Cancer immunology. Mutational landscape determines sensitivity to PD-1 blockade in non-small cell lung cancer. Science 348, 124-128 (2015).
[0784] 5. Snyder, A. et al. Genetic basis for clinical response to CTLA-4 blockade in melanoma. N. Engl. J. Med. 371, 2189-2199 (2014).
[0785] 6. Carreno, B. M. et al. Cancer immunotherapy. A dendritic cell vaccine increases the breadth and diversity of melanoma neoantigen-specific T cells. Science 348, 803-808 (2015).
[0786] 7. Tran, E. et al. Cancer immunotherapy based on mutation-specific CD4+ T cells in a patient with epithelial cancer. Science 344, 641-645 (2014).
[0787] 8. Hacohen, N. & Wu, C. J.-Y. United States Patent Application: 20110293637—COMPOSITIONS AND METHODS OF IDENTIFYING TUMOR SPECIFIC NEOANTIGENS. (A1). at www.appft1.uspto.gov/netacgi/nph-Parser?Sect1=PTO1&Sect2=HITOFF&d=PG01&p=1&u=/netahtml/PTO/srchnum.html&r=1&f=G&l=50&s1=20110293637.PGNR.>
[0788] 9. Lundegaard, C., Hoof, I., Lund, O. & Nielsen, M. State of the art and challenges in sequence based T-cell epitope prediction. Immunome Res. 6 Suppl 2, S3 (2010).
[0789] 10. Yadav, M. et al. Predicting immunogenic tumour mutations by combining mass spectrometry and exome sequencing. Nature 515, 572-576 (2014).
[0790] 11. Bassani-Sternberg, M., Pletscher-Frankild, S., Jensen, L. J. & Mann, M. Mass spectrometry of human leukocyte antigen class I peptidomes reveals strong effects of protein abundance and turnover on antigen presentation. Mol. Cell. Proteomics MCP 14, 658-673 (2015).
[0791] 12. Van Allen, E. M. et al. Genomic correlates of response to CTLA-4 blockade in metastatic melanoma. Science 350, 207-211 (2015).
[0792] 13. Yoshida, K. & Ogawa, S. Splicing factor mutations and cancer. Wiley Interdiscip. Rev. RNA 5, 445-459 (2014).
[0793] 14. Cancer Genome Atlas Research Network. Comprehensive molecular profiling of lung adenocarcinoma. Nature 511, 543-550 (2014).
[0794] 15. Rajasagi, M. et al. Systematic identification of personal tumor-specific neoantigens in chronic lymphocytic leukemia. Blood 124, 453-462 (2014).
[0795] 16. Downing, S. R. et al. United States Patent Application: 0120208706—OPTIMIZATION OF MULTIGENE ANALYSIS OF TUMOR SAMPLES. (A1). at www.appft1.uspto.gov/netacgi/nph-Parser?Sect1=PTO1&Sect2=HITOFF&d=PG01&p=1&u=/netahtml/PTO/srchnum.html&r=1&f=G&l=50&s1=20120208706.PGNR.>
[0796] 17. Target Capture for NextGen Sequencing—IDT. at www.idtdna.com/pages/products/nextgen/target-capture>
[0797] 18. Shukla, S. A. et al. Comprehensive analysis of cancer-associated somatic mutations in class I HLA genes. Nat. Biotechnol. 33, 1152-1158 (2015).
[0798] 19. Cieslik, M. et al. The use of exome capture RNA-seq for highly degraded RNA with application to clinical cancer sequencing. Genome Res. 25, 1372-1381 (2015).
[0799] 20. Bodini, M. et al. The hidden genomic landscape of acute myeloid leukemia: subclonal structure revealed by undetected mutations. Blood 125, 600-605 (2015).
[0800] 21. Saunders, C. T. et al. Strelka: accurate somatic small-variant calling from sequenced tumor-normal sample pairs. Bioinforma. Oxf. Engl. 28, 1811-1817 (2012).
[0801] 22. Cibulskis, K. et al. Sensitive detection of somatic point mutations in impure and heterogeneous cancer samples. Nat. Biotechnol. 31, 213-219 (2013).
[0802] 23. Wilkerson, M. D. et al. Integrated RNA and DNA sequencing improves mutation detection in low purity tumors. Nucleic Acids Res. 42, e107 (2014).
[0803] 24. Mose, L. E., Wilkerson, M. D., Hayes, D. N., Perou, C. M. & Parker, J. S. ABRA: improved coding indel detection via assembly-based realignment. Bioinforma. Oxf. Engl. 30, 2813-2815 (2014).
[0804] 25. Ye, K., Schulz, M. H., Long, Q., Apweiler, R. & Ning, Z. Pindel: a pattern growth approach to detect break points of large deletions and medium sized insertions from paired-end short reads. Bioinforma. Oxf. Engl. 25, 2865-2871 (2009).
[0805] 26. Lam, H. Y. K. et al. Nucleotide-resolution analysis of structural variants using BreakSeq and a breakpoint library. Nat. Biotechnol. 28, 47-55 (2010).
[0806] 27. Frampton, G. M. et al. Development and validation of a clinical cancer genomic profiling test based on massively parallel DNA sequencing. Nat. Biotechnol. 31, 1023-1031 (2013).
[0807] 28. Boegel, S. et al. HLA typing from RNA-Seq sequence reads. Genome Med. 4, 102 (2012).
[0808] 29. Liu, C. et al. ATHLATES: accurate typing of human leukocyte antigen through exome sequencing. Nucleic Acids Res. 41, e142 (2013).
[0809] 30. Mayor, N. P. et al. HLA Typing for the Next Generation. PloS One 10, e0127153 (2015).
[0810] 31. Roy, C. K., Olson, S., Graveley, B. R., Zamore, P. D. & Moore, M. J. Assessing long-distance RNA sequence connectivity via RNA-templated DNA-DNA ligation. eLife 4, (2015).
[0811] 32. Song, L. & Florea, L. CLASS: constrained transcript assembly of RNA-seq reads. BMC Bioinformatics 14 Suppl 5, S14 (2013).
[0812] 33. Maretty, L., Sibbesen, J. A. & Krogh, A. Bayesian transcriptome assembly. Genome Biol. 15, 501 (2014).
[0813] 34. Pertea, M. et al. StringTie enables improved reconstruction of a transcriptome from RNA-seq reads. Nat. Biotechnol. 33, 290-295 (2015).
[0814] 35. Roberts, A., Pimentel, H., Trapnell, C. & Pachter, L. Identification of novel transcripts in annotated genomes using RNA-Seq. Bioinforma. Oxf. Engl. (2011). doi:10.1093/bioinformatics/btr355
[0815] 36. Vitting-Seerup, K., Porse, B. T., Sandelin, A. & Waage, J. spliceR: an R package for classification of alternative splicing and prediction of coding potential from RNA-seq data. BMC Bioinformatics 15, 81 (2014).
[0816] 37. Rivas, M. A. et al. Human genomics. Effect of predicted protein-truncating genetic variants on the human transcriptome. Science 348, 666-669 (2015).
[0817] 38. Skelly, D. A., Johansson, M., Madeoy, J., Wakefield, J. & Akey, J. M. A powerful and flexible statistical framework for testing hypotheses of allele-specific gene expression from RNA-seq data. Genome Res. 21, 1728-1737 (2011).
[0818] 39. Anders, S., Pyl, P. T. & Huber, W. HTSeq—a Python framework to work with high-throughput sequencing data. Bioinforma. Oxf. Engl. 31, 166-169 (2015).
[0819] 40. Furney, S. J. et al. SF3B1 mutations are associated with alternative splicing in uveal melanoma. Cancer Discov. (2013). doi:10.1158/2159-8290.CD-13-0330
[0820] 41. Zhou, Q. et al. A chemical genetics approach for the functional assessment of novel cancer genes. Cancer Res. (2015). doi:10.1158/0008-5472.CAN-14-2930
[0821] 42. Maguire, S. L. et al. SF3B1 mutations constitute a novel therapeutic target in breast cancer. J. Pathol. 235, 571-580 (2015).
[0822] 43. Carithers, L. J. et al. A Novel Approach to High-Quality Postmortem Tissue Procurement: The GTEx Project. Biopreservation Biobanking 13, 311-319 (2015).
[0823] 44. Xu, G. et al. RNA CoMPASS: a dual approach for pathogen and host transcriptome analysis of RNA-seq datasets. PloS One 9, e89445 (2014).
[0824] 45. Andreatta, M. & Nielsen, M. Gapped sequence alignment using artificial neural networks: application to the MHC class I system. Bioinforma. Oxf. Engl. (2015). doi:10.1093/bioinformatics/btv639
[0825] 46. Jørgensen, K. W., Rasmussen, M., Buus, S. & Nielsen, M. NetMHCstab—predicting stability of peptide-MHC-I complexes; impacts for cytotoxic T lymphocyte epitope discovery. Immunology 141, 18-26 (2014).
[0826] 47. Larsen, M. V. et al. An integrative approach to CTL epitope prediction: a combined algorithm integrating MHC class I binding, TAP transport efficiency, and proteasomal cleavage predictions. Eur. J. Immunol. 35, 2295-2303 (2005).
[0827] 48. Nielsen, M., Lundegaard, C., Lund, O. & Keşmir, C. The role of the proteasome in generating cytotoxic T-cell epitopes: insights obtained from improved predictions of proteasomal cleavage. Immunogenetics 57, 33-41 (2005).
[0828] 49. Boisvert, F.-M. et al. A Quantitative Spatial Proteomics Analysis of Proteome Turnover in Human Cells. Mol. Cell. Proteomics 11, M111.011429-M111.011429 (2012).
[0829] 50. Duan, F. et al. Genomic and bioinformatic profiling of mutational neoepitopes reveals new rules to predict anticancer immunogenicity. J. Exp. Med. 211, 2231-2248 (2014).
[0830] 51. Janeway's Immunobiology: 9780815345312: Medicine & Health Science Books @ Amazon.com. at www.amazon.com/Janeways-Immunobiology-Kenneth-Murphy/dp/0815345313>
[0831] 52. Calis, J. J. A. et al. Properties of MHC Class I Presented Peptides That Enhance Immunogenicity. PLoS Comput. Biol. 9, e1003266 (2013).
[0832] 53. Zhang, J. et al. Intratumor heterogeneity in localized lung adenocarcinomas delineated by multiregion sequencing. Science 346, 256-259 (2014)
[0833] 54. Walter, M. J. et al. Clonal architecture of secondary acute myeloid leukemia. N. Engl. J. Med. 366, 1090-1098 (2012).
[0834] 55. Hunt D F, Henderson R A, Shabanowitz J, Sakaguchi K, Michel H, Sevilir N, Cox A L, Appella E, Engelhard V H. Characterization of peptides bound to the class I MHC molecule HLA-A2.1 by mass spectrometry. Science 1992. 255: 1261-1263.
[0835] 56. Zarling A L, Polefrone J M, Evans A M, Mikesh L M, Shabanowitz J, Lewis S T, Engelhard V H, Hunt D F. Identification of class I MHC-associated phosphopeptides as targets for cancer immunotherapy. Proc Natl Acad Sci USA. 2006 Oct. 3; 103(40):14889-94.
[0836] 57. Bassani-Sternberg M, Pletscher-Frankild S, Jensen L J, Mann M. Mass spectrometry of human leukocyte antigen class I peptidomes reveals strong effects of protein abundance and turnover on antigen presentation. Mol Cell Proteomics. 2015 March; 14(3):658-73. doi: 10.1074/mcp.M114.042812.
[0837] 58. Abelin J G, Trantham P D, Penny S A, Patterson A M, Ward S T, Hildebrand W H, Cobbold M, Bai D L, Shabanowitz J, Hunt D F. Complementary IMAC enrichment methods for HLA-associated phosphopeptide identification by mass spectrometry. Nat Protoc. 2015 September; 10(9):1308-18. doi: 10.1038/nprot.2015.086. Epub 2015 Aug. 6
[0838] 59. Barnstable C J, Bodmer W F, Brown G, Galfre G, Milstein C, Williams A F, Ziegler A. Production of monoclonal antibodies to group A erythrocytes, HLA and other human cell surface antigens-new tools for genetic analysis. Cell. 1978 May; 14(1):9-20.
[0839] 60. Goldman J M, Hibbin J, Kearney L, Orchard K, Th'ng K H. HLA-D R monoclonal antibodies inhibit the proliferation of normal and chronic granulocytic leukaemia myeloid progenitor cells. Br J Haematol. 1982 November; 52(3):411-20.
[0840] 61. Eng J K, Jahan T A, Hoopmann M R. Comet: an open-source MS/MS sequence database search tool. Proteomics. 2013 January; 13(1):22-4. doi: 10.1002/pmic.201200439. Epub 2012 Dec. 4.
[0841] 62. Eng J K, Hoopmann M R, Jahan T A, Egertson J D, Noble W S, MacCoss M J. A deeper look into Comet—implementation and features. J Am Soc Mass Spectrom. 2015 November; 26(11):1865-74. doi: 10.1007/s13361-015-1179-x. Epub 2015 Jun. 27.
[0842] 63. Lukas Kall, Jesse Canterbury, Jason Weston, William Stafford Noble and Michael J. MacCoss. Semi-supervised learning for peptide identification from shotgun proteomics datasets. Nature Methods 4:923-925, November 2007
[0843] 64. Lukas Kall, John D. Storey, Michael J. MacCoss and William Stafford Noble. Assigning confidence measures to peptides identified by tandem mass spectrometry. Journal of Proteome Research, 7(1):29-34, January 2008
[0844] 65. Lukas Kall, John D. Storey and William Stafford Noble. Nonparametric estimation of posterior error probabilities associated with peptides identified by tandem mass spectrometry. Bioinformatics, 24(16):i42-i48, August 2008
[0845] 66. Kinney R M, B J Johnson, V L Brown, D W Trent. Nucleotide Sequence of the 26 S mRNA of the Virulent Trinidad Donkey Strain of Venezuelan Equine Encephalitis Virus and Deduced Sequence of the Encoded Structural Proteins. Virology 152 (2), 400-413. 1986 Jul. 30.
[0846] 67. Jill E Slansky, Frédérique M Rattis, Lisa F Boyd, Tarek Fahmy, Elizabeth M Jaffee, Jonathan P Schneck, David H Margulies, Drew M Pardoll. Enhanced Antigen-Specific Antitumor Immunity with Altered Peptide Ligands that Stabilize the MHC-Peptide-TCR Complex. Immunity, Volume 13, Issue 4, 1 Oct. 2000, Pages 529-538.
[0847] 68. A Y Huang, P H Gulden, A S Woods, M C Thomas, C D Tong, W Wang, V H Engelhard, G Pasternack, R Cotter, D Hunt, D M Pardoll, and E M Jaffee. The immunodominant major histocompatibility complex class I-restricted antigen of a murine colon tumor derives from an endogenous retroviral gene product. Proc Natl Acad Sci USA.; 93(18): 9730-9735, 1996 Sep. 3.
[0848] 69. JOHNSON, BARBARA J. B., RICHARD M. KINNEY, CRYSTLE L. KOST AND DENNIS W. TRENT. Molecular Determinants of Alphavirus Neurovirulence: Nucleotide and Deduced Protein Sequence Changes during Attenuation of Venezuelan Equine Encephalitis Virus. J Gen Virol 67:1951-1960, 1986.
[0849] 70. Aarnoudse, C. A., Kruse, M., Konopitzky, R., Brouwenstijn, N., and Schrier, P. I. (2002). TCR reconstitution in Jurkat reporter cells facilitates the identification of novel tumor antigens by cDNA expression cloning. Int J Cancer 99, 7-13.
[0850] 71. Alexander, J., Sidney, J., Southwood, S., Ruppert, J., Oseroff, C., Maewal, A., Snoke, K., Serra, H. M., Kubo, R. T., and Sette, A. (1994). Development of high potency universal D R-restricted helper epitopes by modification of high affinity DR-blocking peptides. Immunity 1, 751-761.
[0851] 72. Banu, N., Chia, A., Ho, Z. Z., Garcia, A. T., Paravasivam, K., Grotenbreg, G. M., Bertoletti, A., and Gehring, A. J. (2014). Building and optimizing a virus-specific T cell receptor library for targeted immunotherapy in viral infections. Scientific Reports 4, 4166.
[0852] 73. Cornet, S., Miconnet, I., Menez, J., Lemonnier, F., and Kosmatopoulos, K. (2006). Optimal organization of a polypeptide-based candidate cancer vaccine composed of cryptic tumor peptides with enhanced immunogenicity. Vaccine 24, 2102-2109.
[0853] 74. Depla, E., van der Aa, A., Livingston, B. D., Crimi, C., Allosery, K., de Brabandere, V., Krakover, J., Murthy, S., Huang, M., Power, S., et al. (2008). Rational design of a multiepitope vaccine encoding T-lymphocyte epitopes for treatment of chronic hepatitis B virus infections. Journal of Virology 82, 435-450.
[0854] 75. Ishioka, G. Y., Fikes, J., Hermanson, G., Livingston, B., Crimi, C., Qin, M., del Guercio, M. F., Oseroff, C., Dahlberg, C., Alexander, J., et al. (1999). Utilization of MHC class I transgenic mice for development of minigene DNA vaccines encoding multiple HLA-restricted CTL epitopes. J Immunol 162, 3915-3925.
[0855] 76. Janetzki, S., Price, L., Schroeder, H., Britten, C. M., Welters, M. J. P., and Hoos, A. (2015). Guidelines for the automated evaluation of Elispot assays. Nat Protoc 10, 1098-1115.
[0856] 77. Lyons, G. E., Moore, T., Brasic, N., Li, M., Roszkowski, J. J., and Nishimura, M. I. (2006). Influence of human CD8 on antigen recognition by T-cell receptor-transduced cells. Cancer Res 66, 11455-11461.
[0857] 78. Nagai, K., Ochi, T., Fujiwara, H., An, J., Shirakata, T., Mineno, J., Kuzushima, K., Shiku, H., Melenhorst, J. J., Gostick, E., et al. (2012). Aurora kinase A-specific T-cell receptor gene transfer redirects T lymphocytes to display effective antileukemia reactivity. Blood 119, 368-376.
[0858] 79. Panina-Bordignon, P., Tan, A., Termijtelen, A., Demotz, S., Corradin, G., and Lanzavecchia, A. (1989). Universally immunogenic T cell epitopes: promiscuous binding to human MHC class I I and promiscuous recognition by T cells. Eur J Immunol 19, 2237-2242.
[0859] 80. Vitiello, A., Marchesini, D., Furze, J., Sherman, L. A., and Chesnut, R. W. (1991). Analysis of the HLA-restricted influenza-specific cytotoxic T lymphocyte response in transgenic mice carrying a chimeric human-mouse class I major histocompatibility complex. J Exp Med 173, 1007-1015.
[0860] 81. Yachi, P. P., Ampudia, J., Zal, T., and Gascoigne, N. R. J. (2006). Altered peptide ligands induce delayed CD8-T cell receptor interaction—a role for CD8 in distinguishing antigen quality. Immunity 25, 203-211.
[0861] 82. Pushko P, Parker M, Ludwig G V, Davis N L, Johnston R E, Smith J F. Replicon-helper systems from attenuated Venezuelan equine encephalitis virus: expression of heterologous genes in vitro and immunization against heterologous pathogens in vivo. Virology. 1997 Dec. 22; 239(2):389-401.
[0862] 83. Strauss, J H and E G Strauss. The alphaviruses: gene expression, replication, and evolution. Microbiol Rev. 1994 September; 58(3): 491-562.
[0863] 84. Rheme C, Ehrengruber M U, Grandgirard D. Alphaviral cytotoxicity and its implication in vector development. Exp Physiol. 2005 January; 90(1):45-52. Epub 2004 Nov. 12.
[0864] 85. Riley, Michael K. I I, and Wilfred Vermerris. Recent Advances in Nanomaterials for Gene Delivery—A Review. Nanomaterials 2017, 7(5), 94.
[0865] 86. Frolov I, Hardy R, Rice C M. Cis-acting RNA elements at the 5′ end of Sindbis virus genome RNA regulate minus- and plus-strand RNA synthesis. RNA. 2001 November; 7(11):1638-51.
[0866] 87. Jose J, Snyder J E, Kuhn R J. A structural and functional perspective of alphavirus replication and assembly. Future Microbiol. 2009 September; 4(7):837-56.
[0867] 88. Bo Li and C. olin N. Dewey. RSEM: accurate transcript quantification from RNA-Seq data with or without a referenfe genome. BMC Bioinformatics, 12:323, August 2011
[0868] 89. Hillary Pearson, Tariq Daouda, Diana Paola Granados, Chantal Durette, Eric Bonneil, Mathieu Courcelles, Anja Rodenbrock, Jean-Philippe Laverdure, Caroline Côté, Sylvie Mader, Sébastien Lemieux, Pierre Thibault, and Claude Perreault. MHC class I-associated peptides derive from selective regions of the human genome. The Journal of Clinical Investigation, 2016,
[0869] 90. Juliane Liepe, Fabio Marino, John Sidney, Anita Jeko, Daniel E. Bunting, Alessandro Sette, Peter M. Kloetzel, Michael P. H. Stumpf, Albert J. R. Heck, Michele Mishto. A large fraction of HLA class I ligands are proteasome-generated spliced peptides. Science, 21, October 2016.
[0870] 91. Mommen G P., Marino, F., Meiring H D., Poelen, M C., van Gaans-van den Brink, J A., Mohammed S., Heck A J., and van Els C A. Sampling From the Proteome to the Human Leukocyte Antigen-DR (HLA-DR) Ligandome Proceeds Via High Specificity. Mol Cell Proteomics 15(4): 1412-1423, April 2016.
[0871] 92. Sebastian Kreiter, Mathias Vormehr, Niels van de Roemer, Mustafa Diken, Martin Löwer, Jan Diekmann, Sebastian Boegel, Barbara Schrörs, Fulvia Vascotto, John C. Castle, Arbel D. Tadmor, Stephen P. Schoenberger, Christoph Huber, Özlem Türeci, and Ugur Sahin. Mutant MHC class II epitopes drive therapeutic immune responses to caner. Nature 520, 692-696, April 2015.
[0872] 93. Tran E., Turcotte S., Gros A., Robbins P. F., Lu Y. C., Dudley M. E., Wunderlich J. R., Somerville R. P., Hogan K., Hinrichs C. S., Parkhurst M. R., Yang J. C., Rosenberg S. A. Cancer immunotherapy based on mutation-specific CD4+ T cells in a patient with epithelial cancer. Science 344(6184) 641-645, May 2014.
[0873] 94. Andreatta M., Karosiene E., Rasmussen M., Stryhn A., Buus S., Nielsen M. Accurate pan-specific prediction of peptide-MHC class II binding affinity with improved binding core identification. Immunogenetics 67(11-12) 641-650, November 2015.
[0874] 95. Nielsen, M., Lund, O. NN-align. An artificial neural network-based alignment algorithm for MHC class II peptide binding prediction. BMC Bioinformatics 10:296, September 2009.
[0875] 96. Nielsen, M., Lundegaard, C., Lund, O. Prediction of MHC class II binding affinity using SMM-align, a novel stabilization matrix alignment method. BMC Bioinformatics 8:238, July 2007.
[0876] 97. Zhang, J., et al. PEAKS D B: de novo sequencing assisted database search for sensitive and accurate peptide identification. Molecular & Cellular Proteomics. 11(4):1-8. Jan. 2, 2012.
[0877] 98. Jensen, Kamilla Kjaergaard, et al. “Improved Methods for Prediting Peptide Binding Affinity to MHC Class II Molecules.” Immunology, 2018, doi:10.1111/imm.12889.
[0878] 99. Carter, S. L., Cibulskis, K., Helman, E., McKenna, A., Shen, H., Zack, T., Laird, P. W., Onofrio, R. C., Winckler, W., Weir, B. A., et al. (2012). Absolute quantification of somatic DNA alterations in human cancer. Nat. Biotechnol. 30, 413-421
[0879] 100. McGranahan, N., Rosenthal, R., Hiley, C. T., Rowan, A. J., Watkins, T. B. K., Wilson, G. A., Birkbak, N. J., Veeriah, S., Van Loo, P., Herrero, J., et al. (2017). Allele-Specific HLA Loss and Immune Escape in Lung Cancer Evolution. Cell 171, 1259-1271.e11.
[0880] 101. Shukla, S. A., Rooney, M. S., Rajasagi, M., Tiao, G., Dixon, P. M., Lawrence, M. S., Stevens, J., Lane, W. J., Dellagatta, J. L., Steelman, S., et al. (2015). Comprehensive analysis of cancer-associated somatic mutations in class I HLA genes. Nat. Biotechnol. 33, 1152-1158.
[0881] 102. Van Loo, P., Nordgard, S. H., Lingjorde, O. C., Russnes, H. G., Rye, I. H., Sun, W., Weigman, V. J., Marynen, P., Zetterberg, A., Naume, B., et al. (2010). Allele-specific copy number analysis of tumors. Proc. Natl. Acad. Sci. U.S.A 107, 16910-16915.
[0882] 103. Van Loo, P., Nordgard, S. H., Lingjorde, O. C., Russnes, H. G., Rye, I. H., Sun, W., Weigman, V. J., Marynen, P., Zetterberg, A., Naume, B., et al. (2010). Allele-specific copy number analysis of tumors. Proc. Natl. Acad. Sci. U.S.A 107, 16910-16915.

1. (canceled)

2. An antigen-based vaccine comprising:
(i) at least one SARS-CoV-2 derived immunogenic polypeptide, or at least one SARS-CoV-2 derived nucleic acid sequence encoding the at least one SARS-CoV-2 derived immunogenic polypeptide, wherein the immunogenic polypeptide comprises:
at least one MHC class I epitope comprising a polypeptide sequence as set forth in Table A,
at least one MHC class II epitope comprising a polypeptide sequence as set forth in Table B,
at least one MHC class I epitope comprising a polypeptide sequence as set forth in Table C, optionally wherein the at least one MHC I epitope is present in a concatenated polypeptide sequence as set forth in SEQ ID NO:57 or SEQ ID NO:58,
at least one polypeptide sequence as set forth in Table 10, or an epitope-containing fragment thereof, optionally wherein the at least one polypeptide sequence is present in a concatenated polypeptide sequence as set forth in SEQ ID NO:92,
at least one polypeptide sequence as set forth in Table 12A, Table 12B, or Table 12C, or an epitope-containing fragment thereof, optionally wherein the at least one polypeptide sequence is present in a concatenated polypeptide comprising each of the sequences set forth in Table 12A, Table 12B, or Table 12C, optionally wherein the concatenated polypeptide comprises the order of sequences set forth in Table 12A, Table 12B, or Table 12C,
at least one MHC class I epitope comprising a polypeptide sequence as set forth in Table A and/or Table C or MHC class II epitope comprising a polypeptide sequence as set forth in Table B, wherein the encoded SARS-CoV-2 immunogenic polypeptide is conserved between SARS-CoV-2 and a Coronavirus species and/or sub-species other than SARS-CoV-2, optionally wherein the Coronavirus species and/or sub-species other than SARS-CoV-2 is Severe acute respiratory syndrome (SARS) and/or Middle East respiratory syndrome (MERS),
one or more validated epitopes and/or at least 4, 5, 6, or 7 predicted epitopes, wherein at least 85%, 90%, or 95% of a population carries at least one HLA validated to present at least one of the one or more validated epitopes and/or at least one HLA predicted to present each of the at least 4, 5, 6, or 7 predicted epitopes,
a SARS-CoV-2 Spike protein comprising a Spike polypeptide sequence as set forth in SEQ ID NO:59 or an epitope-containing fragment thereof, optionally wherein the Spike polypeptide comprises a D614G mutation with reference to SEQ ID NO:59, and optionally wherein the Spike polypeptide is encoded by the nucleotide sequence shown in SEQ ID NO:79, SEQ ID NO:83, SEQ ID NO:85, or SEQ ID NO:87,
a SARS-CoV-2 modified Spike protein comprising a mutation selected from the group consisting of: a Spike R682 mutation, a Spike R815 mutation, a Spike K986P mutation, a Spike V987P mutation, and combinations thereof with reference to the Spike polypeptide sequence as set forth in SEQ ID NO:59, and optionally wherein the modified Spike protein comprises a polypeptide sequence as set forth in SEQ ID NO:60 or SEQ ID NO:90 or an epitope-containing fragment thereof,
a SARS-CoV-2 Membrane protein comprising a Membrane polypeptide sequence as set forth in SEQ ID NO:61 or an epitope-containing fragment thereof,
a SARS-CoV-2 Nucleocapsid protein comprising a Nucleocapsid polypeptide sequence as set forth in SEQ ID NO:62 or an epitope-containing fragment thereof,
a SARS-CoV-2 Envelope protein comprising an Envelope polypeptide sequence as set forth in SEQ ID NO:63 or an epitope-containing fragment thereof,
a variant of any of the above comprising a mutation found in 1% or greater of SARS-CoV-2 subtypes, optionally wherein the variant comprises a SARS-CoV-2 variant shown in Table 1, and/or optionally wherein the variant comprises a SARS-CoV-2 variant Spike protein comprising a Spike D614G mutation with reference to the Spike polypeptide sequence as set forth in SEQ ID NO:59, a SARS-CoV-2 variant Spike protein corresponding to a B.1.351 SARS-CoV-2 isolate optionally comprising the Spike polypeptide sequence as set forth in SEQ ID NO: 112, or a SARS-CoV-2 variant Spike protein corresponding to a B.1.1.7 SARS-CoV-2 isolate optionally comprising the Spike polypeptide sequence as set forth in SEQ ID NO:110,
or combinations thereof; and
wherein the immunogenic peptide optionally comprises a N-terminal linker and/or a C-terminal linker
(ii) optionally, at least one MHC class II antigen; and
(iii) optionally, at least one GPGPG amino acid linker sequence (SEQ ID NO:56).

3. The composition of claim 2, wherein the at least one SARS-CoV-2 derived immunogenic polypeptide comprises:
(A) a SARS-CoV-2 Spike protein comprising a Spike polypeptide sequence as set forth in SEQ ID NO:59 or an epitope-containing fragment thereof and a SARS-CoV-2 Membrane protein comprising a Membrane polypeptide sequence as set forth in SEQ ID NO:61 or an epitope-containing fragment thereof, optionally wherein the SARS-CoV-2 derived nucleic acid sequence comprises the sequence as set forth in SEQ ID NO:66 or SEQ ID NO:67,
(B) a SARS-CoV-2 Spike protein comprising a Spike polypeptide sequence as set forth in SEQ ID NO:59 or an epitope-containing fragment thereof and at least one MHC I epitope comprising a polypeptide sequence as set forth in Table C, optionally wherein the at least one MHC I epitope is present in a concatenated polypeptide sequence as set forth in SEQ ID NO:57 or SEQ ID NO:58, optionally wherein the SARS-CoV-2 derived nucleic acid sequence comprises the sequence as set forth in SEQ ID NO:68,
(C) a SARS-CoV-2 Spike protein comprising a Spike polypeptide sequence as set forth in SEQ ID NO:59 or an epitope-containing fragment thereof, optionally wherein the Spike polypeptide comprises a D614G mutation with reference to SEQ ID NO:59, and optionally wherein the SARS-CoV-2 derived nucleic acid sequence comprises the sequence as set forth in SEQ ID NO:69, SEQ ID NO:79, SEQ ID NO:83, SEQ ID NO:85, or SEQ ID NO:87,
(D) at least one MHC class I epitope comprising a polypeptide sequence as set forth in Table C, optionally wherein the at least one MHC I epitope is present in a concatenated polypeptide sequence as set forth in SEQ ID NO:57 or SEQ ID NO:58, optionally wherein the SARS-CoV-2 derived nucleic acid sequence comprises the sequence as set forth in SEQ ID NO:64 or SEQ ID NO:65,
(E) a SARS-CoV-2 modified Spike protein comprising a mutation selected from the group consisting of: a Spike D614G mutation, a Spike R682V mutation, a Spike R815N mutation, a Spike K986P mutation, a Spike V987P mutation, and combinations thereof with reference to the Spike polypeptide sequence as set forth in SEQ ID NO:59, and optionally wherein the modified Spike protein comprises a polypeptide sequence as set forth in SEQ ID NO:60 or SEQ ID NO:90 or an epitope-containing fragment thereof, optionally wherein the SARS-CoV-2 derived nucleic acid sequence comprises the sequence as set forth in SEQ ID NO:70 or SEQ ID NO:89,
(F) a SARS-CoV-2 Spike protein comprising a Spike polypeptide sequence as set forth in SEQ ID NO:59 or an epitope-containing fragment thereof, a SARS-CoV-2 Membrane protein comprising a Membrane polypeptide sequence as set forth in SEQ ID NO:61 or an epitope-containing fragment thereof, a SARS-CoV-2 Nucleocapsid protein comprising a Nucleocapsid polypeptide sequence as set forth in SEQ ID NO:62 or an epitope-containing fragment thereof, and a SARS-CoV-2 Envelope protein comprising an Envelope polypeptide sequence as set forth in SEQ ID NO:63 or an epitope-containing fragment thereof, optionally wherein the SARS-CoV-2 derived nucleic acid sequence comprises the sequence as set forth in SEQ ID NO:71,
(G) a SARS-CoV-2 Spike protein comprising a Spike polypeptide sequence as set forth in SEQ ID NO:59 or an epitope-containing fragment thereof, a SARS-CoV-2 Membrane protein comprising a Membrane polypeptide sequence as set forth in SEQ ID NO:61 or an epitope-containing fragment thereof, and a SARS-CoV-2 Nucleocapsid protein comprising a Nucleocapsid polypeptide sequence as set forth in SEQ ID NO:62 or an epitope-containing fragment thereof, optionally wherein the SARS-CoV-2 derived nucleic acid sequence comprises the sequence as set forth in SEQ ID NO:72,
(H) a SARS-CoV-2 Spike protein comprising a Spike polypeptide sequence as set forth in SEQ ID NO:59 or an epitope-containing fragment thereof, a SARS-CoV-2 Membrane protein comprising a Membrane polypeptide sequence as set forth in SEQ ID NO:61 or an epitope-containing fragment thereof, and a SARS-CoV-2 Envelope protein comprising an Envelope polypeptide sequence as set forth in SEQ ID NO:63 or an epitope-containing fragment thereof, optionally wherein the SARS-CoV-2 derived nucleic acid sequence comprises the sequence as set forth in SEQ ID NO:73,
(I) at least one MHC class I epitope comprising a polypeptide sequence as set forth in Table C, optionally wherein the at least one MHC I epitope is present in a concatenated polypeptide sequence as set forth in SEQ ID NO:57 or SEQ ID NO:58, a SARS-CoV-2 Spike protein comprising a Spike polypeptide sequence as set forth in SEQ ID NO:59 or an epitope-containing fragment thereof, a SARS-CoV-2 Membrane protein comprising a Membrane polypeptide sequence as set forth in SEQ ID NO:61 or an epitope-containing fragment thereof, and a SARS-CoV-2 Envelope protein comprising an Envelope polypeptide sequence as set forth in SEQ ID NO:63 or an epitope-containing fragment thereof, optionally wherein the SARS-CoV-2 derived nucleic acid sequence comprises the sequence as set forth in SEQ ID NO:74,
(J) a SARS-CoV-2 Spike protein comprising a Spike polypeptide sequence as set forth in SEQ ID NO:59 or an epitope-containing fragment thereof and a SARS-CoV-2 modified Spike protein comprising a mutation selected from the group consisting of: a Spike D614G mutation, a Spike R682V mutation, a Spike R815N mutation, a Spike K986P mutation, a Spike V987P mutation, and combinations thereof with reference to the Spike polypeptide sequence as set forth in SEQ ID NO:59, and optionally wherein the modified Spike protein comprises a polypeptide sequence as set forth in SEQ ID NO:60 or SEQ ID NO:90 or an epitope-containing fragment thereof,
(K) a SARS-CoV-2 Spike protein comprising a modified Spike polypeptide sequence as set forth in SEQ ID NO:90 or an epitope-containing fragment thereof and at least one polypeptide sequence as set forth in Table 10, or an epitope-containing fragment thereof, optionally wherein the at least one polypeptide sequence is present in a concatenated polypeptide sequence as set forth in SEQ ID NO:92,
(L) at least one polypeptide sequence as set forth in Table 12A, Table 12B, or Table 12C, or an epitope-containing fragment thereof, optionally wherein the at least one polypeptide sequence is present in a concatenated polypeptide comprising each of the sequences set forth in Table 12A, Table 12B, or Table 12C, optionally wherein the concatenated polypeptide comprises the order of sequences set forth in Table 12A, Table 12B, or Table 12C,
(M) at least one MHC class I epitope comprising a polypeptide sequence as set forth in Table A and/or Table C or MHC class II epitope comprising a polypeptide sequence as set forth in Table B, wherein the encoded SARS-CoV-2 immunogenic polypeptide is conserved between SARS-CoV-2 and a Coronavirus species and/or sub-species other than SARS-CoV-2, optionally wherein the Coronavirus species and/or sub-species other than SARS-CoV-2 is Severe acute respiratory syndrome (SARS) and/or Middle East respiratory syndrome (MERS), or
(N) one or more validated epitopes and/or at least 4, 5, 6, or 7 predicted epitopes, wherein at least 85%, 90%, or 95% of a population carries at least one HLA validated to present at least one of the one or more validated epitopes and/or at least one HLA predicted to present each of the at least 4, 5, 6, or 7 predicted epitopes.

4. The composition of claim 2, wherein the antigen-based vaccine comprises:
(i) at least 18 SARS-CoV-2 derived immunogenic polypeptides, or SARS-CoV-2 derived nucleic acid sequences encoding the same, as set forth in Table C, optionally wherein the immunogenic polypeptide sequences are linked in a concatenated polypeptide sequence as set forth in SEQ ID NO:57 or SEQ ID NO:58;
(ii) at least 15 SARS-CoV-2 derived immunogenic polypeptides, or SARS-CoV-2 derived nucleic acid sequences encoding the same, as set forth in Table 10, optionally wherein the immunogenic polypeptide sequences are linked in a concatenated polypeptide sequence as set forth in SEQ ID NO:92;
(iii) the nucleotide sequence as set forth in SEQ ID NO:93.

5-7. (canceled)

8. The composition of claim 2, wherein the antigen-based vaccine comprises an antigen expression system, wherein the antigen expression system comprises.
(a) one or more vectors, the one or more vectors comprising:
a vector backbone, optionally wherein the vector backbone comprises an alphavirus vector, optionally wherein the alphavirus vector is a Venezuelan equine encephalitis virus vector, and wherein the backbone comprises:
(i) at least one promoter nucleotide sequence, and
(ii) at least one polyadenylation (poly(A)) sequence; and
(b) an antigen cassette, wherein the antigen cassette is inserted into the vector backbone such that the antigen cassette is operably linked to the at least one promoter nucleotide sequence, and wherein the antigen cassette comprises:
(i) at least one SARS-CoV-2 derived nucleic acid sequence encoding the at least one SARS-CoV-2 derived immunogenic polypeptide;
(ii) optionally, a second promoter nucleotide sequence operably linked to the SARS-CoV-2 derived nucleic acid sequence; and
(iii) optionally, at least one MHC class II epitope-encoding nucleic acid sequence;
(iv) optionally, at least one nucleic acid sequence encoding a GPGPG amino acid linker sequence (SEQ ID NO:56); and
(v) optionally, at least one second poly(A) sequence, wherein the second poly(A) sequence is a native poly(A) sequence or an exogenous poly(A) sequence to the vector backbone, optionally wherein the exogenous poly(A) sequence comprises an SV40 poly(A) signal sequence or a Bovine Growth Hormone (BGH) poly(A) signal sequence.

9-12. (canceled)

13. The composition of claim 2, the composition further comprising a nanoparticulate delivery vehicle.

14-19. (canceled)

20. The composition of claim 8, wherein the one or more vectors comprise:
(i) one or more +-stranded RNA vectors;
(ii) a 5′ 7-methylguanosine (m7g) cap;
(iii) RNA vectors produced by in vitro transcription; and/or
(iv) vectors that are self-replicating within a mammalian cell.

21-26. (canceled)

27. The composition of claim 8, wherein the vector backbone comprises at least sequences for nonstructural protein-mediated amplification, a 26S promoter sequence, and a poly(A) sequence encoded by the nucleotide sequence of a Venezuelan equine encephalitis virus, wherein sequences for nonstructural protein-mediated amplification are selected from the group consisting of: an alphavirus 5′ UTR, a 51-nt CSE, a 24-nt CSE, a 26S subgenomic promoter sequence, a 19-nt CSE, an alphavirus 3′ UTR, or combinations thereof, and/or wherein the backbone does not encode structural virion proteins capsid, E2 and E1.

28-31. (canceled)

32. The composition of claim 8, wherein the alphavirus comprises the sequence of SEQ ID NO:3 or SEQ ID NO:5 further comprising a deletion between base pair 7544 and 11175, wherein the antigen cassette is inserted at position 7544 to replace the deletion between base pairs 7544 and 11175 as set forth in the sequence of SEQ ID NO:3 or SEQ ID NO:5.

33-35. (canceled)

36. The composition of claim 8, wherein the at least one promoter nucleotide sequence is the native 26S promoter nucleotide sequence encoded by the backbone.

37-50. (canceled)

51. The composition of claim 8, wherein the second promoter nucleotide sequence is present and comprises a 26S promoter nucleotide sequence, optionally comprising multiple 26S promoter nucleotide sequences, wherein each 26S promoter nucleotide sequence provides for transcription of one or more of the separate open reading frames.

52-56. (canceled)

57. The composition of claim 2, wherein at least one of the at least one SARS-CoV-2 derived nucleic acid sequences encodes (i) a polypeptide sequence or portion thereof that is presented by MHC class I; (ii) encodes a polypeptide sequence or portion thereof that is presented by MHC class II; and/or (iii) a polypeptide sequence or portion thereof capable of stimulating a B cell response, optionally wherein the polypeptide sequence or portion thereof capable of stimulating a B cell response comprises a full-length protein, a protein domain, a protein subunit, or an antigenic fragment predicted or known to be capable of being bound by an antibody.

58-60. (canceled)

61. The composition of claim 2, wherein at least one of the at least one SARS-CoV-2 derived nucleic acid sequences is linked to a distinct SARS-CoV-2 derived nucleic acid sequence with a nucleic acid sequence encoding a linker, optionally wherein the linker comprises one or more native sequences flanking the antigen derived from the cognate protein of origin and that is at least 2, 3, 4, 5, 6, 7, 8, 9, 10, 11, 12, 13, 14, 15, 16, 17, 18, 19, 20, or 2-20 amino acid residues in length.

62-68. (canceled)

69. The composition of claim 2, wherein each of the at least one SARS-CoV-2 derived immunogenic polypeptide comprises a polypeptide sequence or portion thereof that is less than 50%, less than 49%, less than 48%, less than 47%, less than 46%, less than 45%, less than 45%, less than 43%, less than 42%, less than 41%, less than 40%, less than 39%, less than 38%, less than 37%, less than 36%, less than 35%, less than 34%, or less than 33% of the corresponding full-length SARS-CoV-2 protein.

70. The composition of claim 2, wherein each of the at least one SARS-CoV-2 derived immunogenic polypeptide comprises a polypeptide sequence or portion thereof that does not encode a functional protein, functional protein domain, functional protein subunit, or functional protein fragment of the corresponding SARS-CoV-2 protein.

71. The composition of claim 2, wherein two or more of the at least one SARS-CoV-2 derived immunogenic polypeptide comprises—are derived from the same SARS-CoV-2 gene.

72. The composition of claim 71, wherein nucleic acid sequences encoding the two or more SARS-CoV-2 derived immunogenic polypeptide comprises derived from the same SARS-CoV-2 gene are ordered such that a first nucleic acid sequence cannot be immediately followed by or linked to a second nucleic acid sequence if the second nucleic acid sequence follows first nucleic acid sequence in the corresponding SARS-CoV-2 gene.

73. The composition of claim 2, wherein the at least one SARS-CoV-2 derived immunogenic polypeptide comprises at least 2-10, 2, 3, 4, 5, 6, 7, 8, 9, 10, 11-20, 15-20, 11-100, 11-200, 11-300, 11-400, 11, 12, 13, 14, 15, 16, 17, 18, 19, 20 or up to 400 immunogenic polypeptides or nucleic acid sequences encoding the same.

74-79. (canceled)

80. The composition of claim 2, wherein each MHC class I SARS-CoV-2 derived immunogenic polypeptide is-between 8 and 35 amino acids in length, optionally 9-17, 9-25, 8, 9, 10, 11, 12, 13, 14, 15, 16, 17, 18, 19, 20, 21, 22, 23, 24, 25, 26, 27, 28, 29, 30, 31, 32, 33, 34 or 35 amino acids in length.

81-125. (canceled)

126. A pharmaceutical composition comprising the composition of claim 2 and a pharmaceutically acceptable carrier.

127-139. (canceled)

140. A method for treating a SARS-CoV-2 infection or preventing a SARS-CoV-2 infection in a subject, the method comprising administering to the subject the composition of claim 2.

141-142. (canceled)

143. The method of claim 140, wherein the subject expresses at least one HLA allele predicted or known to present a MHC class I or MHC class II epitope associated with the at least one SARS-CoV-2 derived immunogenic polypeptide.

144-164. (canceled)

165. A method of assessing a subject at risk for a SARS-CoV-2 infection or having a SARS-CoV-2 infection, comprising the steps of:
a) determining or having determined:
1) if the subject has an HLA allele predicted or known to present an antigen included in an antigen-based vaccine,
b) determining or having determined from the results of (a) that the subject is a candidate for therapy with the antigen-based vaccine of claim 2 when the subject expresses the HLA allele, and
c) optionally, administering of having administered the antigen-based vaccine of claim 2 to the subject.

166-189. (canceled)

190. The method of any of claim 140, wherein the method comprises a heterologous prime/boost strategy, wherein the heterologous prime/boost strategy comprises (a) an identical antigen cassette encoded by different vaccine platforms, (b) different antigen cassettes encoded by the same vaccine platform, and/or (c) different antigen cassettes encoded by different vaccine platforms.

191. The method of claim 190, wherein the different antigen cassettes comprise (i) a Spike-encoding cassette and a separate T cell epitope encoding cassette and/or (ii) cassettes encoding distinct epitopes and/or antigens derived from different isolates of SARS-CoV-2.

192. (canceled)

193. The composition of claim 2, wherein the at least one SARS-CoV-2 derived immunogenic polypeptide comprises each of:
(i) a Spike protein comprising:
(a) the SARS-CoV-2 Spike protein comprising a Spike polypeptide sequence as set forth in SEQ ID NO:59 or an epitope-containing fragment thereof, optionally wherein the Spike polypeptide comprises a D614G mutation with reference to SEQ ID NO:59, and optionally wherein the Spike polypeptide is encoded by the sequence shown in SEQ ID NO:79, SEQ ID NO:83, SEQ ID NO:85, or SEQ ID NO:87,
(b) a SARS-CoV-2 variant Spike protein with reference to SARS-CoV-2 isolate NC_045512.2, optionally comprising a mutation found in 1% or greater of SARS-CoV-2 subtypes and/or distinct SARS-CoV-2 isolates, or
(c) the SARS-CoV-2 modified Spike protein comprising a mutation selected from the group consisting of: a Spike D614G mutation, a Spike R682V mutation, a Spike R815N mutation, a Spike K986P mutation, a Spike V987P mutation, and combinations thereof with reference to the Spike polypeptide sequence as set forth in SEQ ID NO:59, optionally wherein the modified Spike protein comprises a polypeptide sequence as set forth in SEQ ID NO:60 or SEQ ID NO:90, and wherein optionally the SARS-CoV-2 modified Spike protein further comprises mutations present in a SARS-CoV-2 variant Spike protein with reference to SARS-CoV-2 isolate NC_045512.2; and
(ii) at least one of the at least one polypeptide sequences as set forth in Table 10, Table 12A, Table 12B, or Table 12C, optionally wherein the at least one polypeptide sequence is present in a concatenated polypeptide comprising each of the sequences set forth in Table 10, Table 12A, Table 12B, or Table 12C, optionally wherein the concatenated polypeptide comprises the order of sequences set forth in Table 10, Table 12A, Table 12B, or Table 12C.

194. The composition of claim 2, wherein the at least one SARS-CoV-2 derived immunogenic polypeptide comprises each of:
(i) a Spike protein comprising:
(a) a SARS-CoV-2 variant Spike protein with reference to SARS-CoV-2 isolate NC_045512.2, optionally comprising a mutation found in 1% or greater of SARS-CoV-2 subtypes and/or distinct isolates, and
(b) a Spike D614G mutation, a Spike R682V mutation, a Spike R815N mutation, a Spike K986P mutation, a Spike V987P mutation with reference to the Spike polypeptide sequence as set forth in SEQ ID NO:59; and
(ii) a concatenated polypeptide comprising each of the sequences set forth in Table 12C, wherein the concatenated polypeptide comprises the order of sequences set forth in Table 12C; and
(iii) a SARS-CoV-2 Nucleocapsid protein.

The application's sequence listing, which the Patent Office published only in electronic form, follows.

SEQUENCE LISTING (27973 sequences)

SEQ ID NO: 1 - DNA, 36519 bp, synthetic construct
  misc_feature 1..36519: note = Description of Artificial Sequence: Synthetic polynucleotide
  source 1..36519: mol_type = other DNA
ccatcttcaataatatacctcaaactttttgtgcgcgttaatatgcaaatgaggcgtttgaatttggggaggaagggcggtgattggtcgagggatgagcgaccgttaggggcggggcgagtgacgttttgatgacgtggttgcgaggaggagccagtttgcaagttctcgtgggaaaagtgacgtcaaacgaggtgtggtttgaacacggaaatactcaattttcccgcgctctctgacaggaaatgaggtgtttctgggcggatgcaagtgaaaacgggccattttcgcgcgaaaactgaatgaggaagtgaaaatctgagtaatttcgcgtttatggcagggaggagtatttgccgagggccgagtagactttgaccgattacgtgggggtttcgattaccgtgtttttcacctaaatttccgcgtacggtgtcaaagtccggtgtttttacgtaggtgtcagctgatcgccagggtatttaaacctgcgctctccagtcaagaggccactcttgagtgccagcgagaagagttttctcctccgcgccgcgagtcagatctacactttgaaagatgaggcacctgagagacctgcccgatgagaaaatcatcatcgcttccgggaacgagattctggaactggtggtaaatgccatgatgggcgacgaccctccggagccccccaccccatttgagacaccttcgctgcacgatttgtatgatctggaggtggatgtgcccgaggacgatcccaatgaggaggcggtaaatgatttttttagcgatgccgcgctgctagctgccgaggaggcttcgagctctagctcagacagcgactcttcactgcatacccctagacccggcagaggtgagaaaaagatccccgagcttaaaggggaagagatggacttgcgctgctatgaggaatgcttgcccccgagcgatgatgaggacgagcaggcgatccagaacgcagcgagccagggagtgcaagccgccagcgagagctttgcgctggactgcccgcctctgcccggacacggctgtaagtcttgtgaatttcatcgcatgaatactggagataaagctgtgttgtgtgcactttgctatatgagagcttacaaccattgtgtttacagtaagtgtgattaagttgaactttagagggaggcagagagcagggtgactgggcgatgactggtttatttatgtatatatgttctttatataggtcccgtctctgacgcagatgatgagacccccactacaaagtccacttcgtcacccccagaaattggcacatctccacctgagaatattgttagaccagttcctgttagagccactgggaggagagcagctgtggaatgtttggatgacttgctacagggtggggttgaacctttggacttgtgtacccggaaacgccccaggcactaagtgccacacatgtgtgtttacttgaggtgatgtcagtatttatagggtgtggagtgcaataaaaaatgtgttgactttaagtgcgtggtttatgactcaggggtggggactgtgagtatataagcaggtgcagacctgtgtggttagctcagagcggcatggagatttggacggtcttggaagactttcacaagactagacagctgctagagaacgcctcgaacggagtctcttacctgtggagattctgcttcggtggcgacctagctaggctagtctacagggccaaacaggattatagtgaacaatttgaggttattttgagagagtgttctggtctttttgacgctcttaacttgggccatcagtctcactttaaccagaggatttcgagagcccttgattttactactcctggcagaaccactgcagcagtagccttttttgcttttattcttgacaaatggagtcaagaaacccatttcagcagggattaccagctggatttcttagcagtagctttgtggagaacatggaagtgccagcgcctgaatgcaatctccggctacttgccggtacagccgctagacactctgaggatcctgaatctccaggagagtcccagggcacgccaacgtcgccagcagcagcagcaggaggaggatcaagaagagaacccgagagccggcctggaccctccggcggaggaggaggagtagctgacctgtttcctgaactgcgccgggtgctgactaggtcttcgagtggtcgggagagggggattaagcgggagaggcatgatgagactaatcacagaactgaactgactgtgggtctgatgagtcgcaagcgcccagaaacagtgtggtggcatgaggtgcagtcgactggcacagatgaggtgtcggtgatgcatgagaggttttctctagaacaagtcaagacttgttggttagagcctgaggatgattgggaggtagccatcaggaattatgccaagctggctctgaggccagacaagaagtacaagattactaagctgataaatatcagaaatgcctgctacatctcagggaatggggctgaagtggagatctgtctccaggaaagggtggctttcagatgctgcatgatgaatatgtacccgggagtggtgggcatggatggggttacctttatgaacatgaggttcaggggagatgggtataatggcacggtctttatggccaataccaagctgacagtccatggctgctccttctttgggtttaataacacctgcatcgaggcctggggtcaggtcggtgtgaggggctgcagtttttcagccaactggatgggggtcgtgggcaggaccaagagtatgctgtccgtgaagaaatgcttgtttgagaggtgccacctgggggtgatgagcgagggcgaagccagaatccgccactgcgcctctaccgagacgggctgctttgtgctgtgcaagggcaatgctaagatcaagcataatatgatctgtggagcctcggacgagcgcggctaccagatgctgacctgcgccggcgggaacagccatatgctggccaccgtacatgtggcttcccatgctcgcaagccctggcccgagttcgagcacaatgtcatgaccaggtgcaatatgcatctggggtcccgccgaggcatgttcatgccctaccagtgcaacctgaattatgtgaaggtgctgctggagcccgatgccatgtccagagtgagcctgacgggggtgtttgacatgaatgtggaggtgtggaagattctgagatatgatgaatccaagaccaggtgccgagcctgcgagtgcggagggaagcatgccaggttccagcccgtgtgtgtggatgtgacggaggacctgcgacccgatcatttggtgttgccctgcaccgggacggagttcggttccagcggggaagaatctgactagagtgagtagtgttctggggcgggggaggacctgcatgagggccagaataactgaaatctgtgcttttctgtgtgttgcagcagcatgagcggaagcggctcctttgagggaggggtattcagcccttatctgacggggcgtctcccctcctgggcgggagtgcgtcagaatgtgatgggatccacggtggacggccggcccgtgcagcccgcgaactcttcaaccctgacctatgcaaccctgagctcttcgtcgttggacgcagctgccgccgcagctgctgcatctgccgccagcgccgtgcgcggaatggccatgggcgccggctactacggcactctggtggccaactcgagttccaccaataatcccgccagcctgaacgaggagaagctgttgctgctgatggcccagctcgaggccttgacccagcgcctgggcgagctgacccagcaggtggctcagctgcaggagcagacgcgggccgcggttgccacggtgaaatccaaataaaaaatgaatcaataaataaacggagacggttgttgattttaacacagagtctgaatctttatttgatttttcgcgcgcggtaggccctggaccaccggtctcgatcattgagcacccggtggatcttttccaggacccggtagaggtgggcttggatgttgaggtacatgggcatgagcccgtcccgggggtggaggtagctccattgcagggcctcgtgctcgggggtggtgttgtaaatcacccagtcatagcaggggcgcagggcatggtgttgcacaatatctttgaggaggagactgatggccacgggcagccctttggtgtaggtgtttacaaatctgttgagctgggagggatgcatgcggggggagatgaggtgcatcttggcctggatcttgagattggcgatgttaccgcccagatcccgcctggggttcatgttgtgcaggaccaccagcacggtgtatccggtgcacttggggaatttatcatgcaacttggaagggaaggcgtgaaagaatttggcgacgcctttgtgcccgcccaggttttccatgcactcatccatgatgatggcgatgggcccgtgggcggcggcctgggcaaagacgtttcgggggtcggacacatcatagttgtggtcctgggtgaggtcatcataggccattttaatgaatttggggcggagggtgccggactgggggacaaaggtaccctcgatcccgggggcgtagttcccctcacagatctgcatctcccaggctttgagctcggagggggggatcatgtccacctgcggggcgataaagaacacggtttccggggcgggggagatgagctgggccgaaagcaagttccggagcagctgggacttgccgcagccggtggggccgtagatgaccccgatgaccggctgcaggtggtagttgagggagagacagctgccgtcctcccggaggaggggggccacctcgttcatcatctcgcgcacgtgcatgttctcgcgcaccagttccgccaggaggcgctctccccccagggataggagctcctggagcgaggcgaagtttttcagcggcttgagtccgtcggccatgggcattttggagagggtttgttgcaagagttccaggcggtcccagagctcggtgatgtgctctacggcatctcgatccagcagacctcctcgtttcgcgggttgggacggctgcgggagtagggcaccagacgatgggcgtccagcgcagccagggtccggtccttccagggtcgcagcgtccgcgtcagggtggtctccgtcacggtgaaggggtgcgcgccgggctgggcgcttgcgagggtgcgcttcaggctcatccggctggtcgaaaaccgctcccgatcggcgccctgcgcgtcggccaggtagcaattgaccatgagttcgtagttgagcgcctcggccgcgtggcctttggcgcggagcttacctttggaagtctgcccgcaggcgggacagaggagggacttgagggcgtagagcttgggggcgaggaagacggactcgggggcgtaggcgtccgcgccgcagtgggcgcagacggtctcgcactccacgagccaggtgaggtcgggctggtcggggtcaaaaaccagtttcccgccgttctttttgatgcgtttcttacctttggtctccatgagctcgtgtccccgctgggtgacaaagaggctgtccgtgtccccgtagaccgactttatgggccggtcctcgagcggtgtgccgcggtcctcctcgtagaggaaccccgcccactccgagacgaaagcccgggtccaggccagcacgaaggaggccacgtgggacgggtagcggtcgttgtccaccagcgggtccaccttttccagggtatgcaaacacatgtccccctcgtccacatccaggaaggtgattggcttgtaagtgtaggccacgtgaccgggggtcccggccgggggggtataaaagggtgcgggtccctgctcgtcctcactgtcttccggatcgctgtccaggagcgccagctgttggggtaggtattccctctcgaaggcgggcatgacctcggcactcaggttgtcagtttctagaaacgaggaggatttgatattgacggtgccggcggagatgcctttcaagagcccctcgtccatctggtcagaaaagacgatctttttgttgtcgagcttggtggcgaaggagccgtagagggcgttggagaggagcttggcgatggagcgcatggtctggtttttttccttgtcggcgcgctccttggcggcgatgttgagctgcacgtactcgcgcgccacgcacttccattcggggaagacggtggtcagctcgtcgggcacgattctgacctgccagccccgattatgcagggtgatgaggtccacactggtggccacctcgccgcgcaggggctcattagtccagcagaggcgtccgcccttgcgcgagcagaaggggggcagggggtccagcatgacctcgtcgggggggtcggcatcgatggtgaagatgccgggcaggaggtcggggtcaaagtagctgatggaagtggccagatcgtccagggcagcttgccattcgcgcacggccagcgcgcgctcgtagggactgaggggcgtgccccagggcatgggatgggtaagcgcggaggcgtacatgccgcagatgtcgtagacgtagaggggctcctcgaggatgccgatgtaggtggggtagcagcgccccccgcggatgctggcgcgcacgtagtcatacagctcgtgcgagggggcgaggagccccgggcccaggttggtgcgactgggcttttcggcgcggtagacgatctggcggaaaatggcatgcgagttggaggagatggtgggcctttggaagatgttgaagtgggcgtggggcagtccgaccgagtcgcggatgaagtgggcgtaggagtcttgcagcttggcgacgagctcggcggtgactaggacgtccagagcgcagtagtcgagggtctcctggatgatgtcatacttgagctgtcccttttgtttccacagctcgcggttgagaaggaactcttcgcggtccttccagtactcttcgagggggaacccgtcctgatctgcacggtaagagcctagcatgtagaactggttgacggccttgtaggcgcagcagcccttctccacggggagggcgtaggcctgggcggccttgcgcagggaggtgtgcgtgagggcgaaagtgtccctgaccatgaccttgaggaactggtgcttgaagtcgatatcgtcgcagcccccctgctcccagagctggaagtccgtgcgcttcttgtaggcggggttgggcaaagcgaaagtaacatcgttgaagaggatcttgcccgcgcggggcataaagttgcgagtgatgcggaaaggttggggcacctcggcccggttgttgatgacctgggcggcgagcacgatctcgtcgaagccgttgatgttgtggcccacgatgtagagttccacgaatcgcggacggcccttgacgtggggcagtttcttgagctcctcgtaggtgagctcgtcggggtcgctgagcccgtgctgctcgagcgcccagtcggcgagatgggggttggcgcggaggaaggaagtccagagatccacggccagggcggtttgcagacggtcccggtactgacggaactgctgcccgacggccattttttcgggggtgacgcagtagaaggtgcgggggtccccgtgccagcgatcccatttgagctggagggcgagatcgagggcgagctcgacgagccggtcgtccccggagagtttcatgaccagcatgaaggggacgagctgcttgccgaaggaccccatccaggtgtaggtttccacatcgtaggtgaggaagagcctttcggtgcgaggatgcgagccgatggggaagaactggatctcctgccaccaattggaggaatggctgttgatgtgatggaagtagaaatgccgacggcgcgccgaacactcgtgcttgtgtttatacaagcggccacagtgctcgcaacgctgcacgggatgcacgtgctgcacgagctgtacctgagttcctttgacgaggaatttcagtgggaagtggagtcgtggcgcctgcatctcgtgctgtactacgtcgtggtggtcggcctggccctcttctgcctcgatggtggtcatgctgacgagcccgcgcgggaggcaggtccagacctcggcgcgagcgggtcggagagcgaggacgagggcgcgcaggccggagctgtccagggtcctgagacgctgcggagtcaggtcagtgggcagcggcggcgcgcggttgacttgcaggagtttttccagggcgcgcgggaggtccagatggtacttgatctccaccgcgccattggtggcgacgtcgatggcttgcagggtcccgtgcccctggggtgtgaccaccgtcccccgtttcttcttgggcggctggggcgacgggggcggtgcctcttccatggttagaagcggcggcgaggacgcgcgccgggcggcaggggcggctcggggcccggaggcaggggcggcaggggcacgtcggcgccgcgcgcgggtaggttctggtactgcgcccggagaagactggcgtgagcgacgacgcgacggttgacgtcctggatctgacgcctctgggtgaaggccacgggacccgtgagtttgaacctgaaagagagttcgacagaatcaatctcggtatcgttgacggcggcctgccgcaggatctcttgcacgtcgcccgagttgtcctggtaggcgatctcggtcatgaactgctcgatctcctcctcttgaaggtctccgcggccggcgcgctccacggtggccgcgaggtcgttggagatgcggcccatgagctgcgagaaggcgttcatgcccgcctcgttccagacgcggctgtagaccacgacgccctcgggatcgcgggcgcgcatgaccacctgggcgaggttgagctccacgtggcgcgtgaagaccgcgtagttgcagaggcgctggtagaggtagttgagcgtggtggcgatgtgctcggtgacgaagaaatacatgatccagcggcggagcggcatctcgctgacgtcgcccagcgcctccaaacgttccatggcctcgtaaaagtccacggcgaagttgaaaaactgggagttgcgcgccgagacggtcaactcctcctccagaagacggatgagctcggcgatggtggcgcgcacctcgcgctcgaaggcccccgggagttcctccacttcctcttcttcctcctccactaacatctcttctacttcctcctcaggcggcagtggtggcgggggagggggcctgcgtcgccggcggcgcacgggcagacggtcgatgaagcgctcgatggtctcgccgcgccggcgtcgcatggtctcggtgacggcgcgcccgtcctcgcggggccgcagcgtgaagacgccgccgcgcatctccaggtggccgggggggtccccgttgggcagggagagggcgctgacgatgcatcttatcaattgccccgtagggactccgcgcaaggacctgagcgtctcgagatccacgggatctgaaaaccgctgaacgaaggcttcgagccagtcgcagtcgcaaggtaggctgagcacggtttcttctggcgggtcatgttggttgggagcggggcgggcgatgctgctggtgatgaagttgaaataggcggttctgagacggcggatggtggcgaggagcaccaggtctttgggcccggcttgctggatgcgcagacggtcggccatgccccaggcgtggtcctgacacctggccaggtccttgtagtagtcctgcatgagccgctccacgggcacctcctcctcgcccgcgcggccgtgcatgcgcgtgagcccgaagccgcgctggggctggacgagcgccaggtcggcgacgacgcgctcggcgaggatggcttgctggatctgggtgagggtggtctggaagtcatcaaagtcgacgaagcggtggtaggctccggtgttgatggtgtaggagcagttggccatgacggaccagttgacggtctggtggcccggacgcacgagctcgtggtacttgaggcgcgagtaggcgcgcgtgtcgaagatgtagtcgttgcaggtgcgcaccaggtactggtagccgatgaggaagtgcggcggcggctggcggtagagcggccatcgctcggtggcgggggcgccgggcgcgaggtcctcgagcatggtgcggtggtagccgtagatgtacctggacatccaggtgatgccggcggcggtggtggaggcgcgcgggaactcgcggacgcggttccagatgttgcgcagcggcaggaagtagttcatggtgggcacggtctggcccgtgaggcgcgcgcagtcgtggatgctctatacgggcaaaaacgaaagcggtcagcggctcgactccgtggcctggaggctaagcgaacgggttgggctgcgcgtgtaccccggttcgaatctcgaatcaggctggagccgcagctaacgtggtattggcactcccgtctcgacccaagcctgcaccaaccctccaggatacggaggcgggtcgttttgcaacttttttttggaggccggatgagactagtaagcgcggaaagcggccgaccgcgatggctcgctgccgtagtctggagaagaatcgccagggttgcgttgcggtgtgccccggttcgaggccggccggattccgcggctaacgagggcgtggctgccccgtcgtttccaagaccccatagccagccgacttctccagttacggagcgagcccctcttttgttttgtttgtttttgccagatgcatcccgtactgcggcagatgcgcccccaccaccctccaccgcaacaacagccccctccacagccggcgcttctgcccccgccccagcagcaacttccagccacgaccgccgcggccgccgtgagcggggctggacagagttatgatcaccagctggccttggaagagggcgaggggctggcgcgcctgggggcgtcgtcgccggagcggcacccgcgcgtgcagatgaaaagggacgctcgcgaggcctacgtgcccaagcagaacctgttcagagacaggagcggcgaggagcccgaggagatgcgcgcggcccggttccacgcggggcgggagctgcggcgcggcctggaccgaaagagggtgctgagggacgaggatttcgaggcggacgagctgacggggatcagccccgcgcgcgcgcacgtggccgcggccaacctggtcacggcgtacgagcagaccgtgaaggaggagagcaacttccaaaaatccttcaacaaccacgtgcgcaccctgatcgcgcgcgaggaggtgaccctgggcctgatgcacctgtgggacctgctggaggccatcgtgcagaaccccaccagcaagccgctgacggcgcagctgttcctggtggtgcagcatagtcgggacaacgaagcgttcagggaggcgctgctgaatatcaccgagcccgagggccgctggctcctggacctggtgaacattctgcagagcatcgtggtgcaggagcgcgggctgccgctgtccgagaagctggcggccatcaacttctcggtgctgagtttgggcaagtactacgctaggaagatctacaagaccccgtacgtgcccatagacaaggaggtgaagatcgacgggttttacatgcgcatgaccctgaaagtgctgaccctgagcgacgatctgggggtgtaccgcaacgacaggatgcaccgtgcggtgagcgccagcaggcggcgcgagctgagcgaccaggagctgatgcatagtctgcagcgggccctgaccggggccgggaccgagggggagagctactttgacatgggcgcggacctgcactggcagcccagccgccgggccttggaggcggcggcaggaccctacgtagaagaggtggacgatgaggtggacgaggagggcgagtacctggaagactgatggcgcgaccgtatttttgctagatgcaacaacaacagccacctcctgatcccgcgatgcgggcggcgctgcagagccagccgtccggcattaactcctcggacgattggacccaggccatgcaacgcatcatggcgctgacgacccgcaaccccgaagcctttagacagcagccccaggccaaccggctctcggccatcctggaggccgtggtgccctcgcgctccaaccccacgcacgagaaggtcctggccatcgtgaacgcgctggtggagaacaaggccatccgcggcgacgaggccggcctggtgtacaacgcgctgctggagcgcgtggcccgctacaacagcaccaacgtgcagaccaacctggaccgcatggtgaccgacgtgcgcgaggccgtggcccagcgcgagcggttccaccgcgagtccaacctgggatccatggtggcgctgaacgccttcctcagcacccagcccgccaacgtgccccggggccaggaggactacaccaacttcatcagcgccctgcgcctgatggtgaccgaggtgccccagagcgaggtgtaccagtccgggccggactacttcttccagaccagtcgccagggcttgcagaccgtgaacctgagccaggctttcaagaacttgcagggcctgtggggcgtgcaggccccggtcggggaccgcgcgacggtgtcgagcctgctgacgccgaactcgcgcctgctgctgctgctggtggcccccttcacggacagcggcagcatcaaccgcaactcgtacctgggctacctgattaacctgtaccgcgaggccatcggccaggcgcacgtggacgagcagacctaccaggagatcacccacgtgagccgcgccctgggccaggacgacccgggcaacctggaagccaccctgaactttttgctgaccaaccggtcgcagaagatcccgccccagtacgcgctcagcaccgaggaggagcgcatcctgcgttacgtgcagcagagcgtgggcctgttcctgatgcaggagggggccacccccagcgccgcgctcgacatgaccgcgcgcaacatggagcccagcatgtacgccagcaaccgcccgttcatcaataaactgatggactacttgcatcgggcggccgccatgaactctgactatttcaccaacgccatcctgaatccccactggctcccgccgccggggttctacacgggcgagtacgacatgcccgaccccaatgacgggttcctgtgggacgatgtggacagcagcgtgttctccccccgaccgggtgctaacgagcgccccttgtggaagaaggaaggcagcgaccgacgcccgtcctcggcgctgtccggccgcgagggtgctgccgcggcggtgcccgaggccgccagtcctttcccgagcttgcccttctcgctgaacagtatccgcagcagcgagctgggcaggatcacgcgcccgcgcttgctgggcgaagaggagtacttgaatgactcgctgttgagacccgagcgggagaagaacttccccaataacgggatagaaagcctggtggacaagatgagccgctggaagacgtatgcgcaggagcacagggacgatccccgggcgtcgcagggggccacgagccggggcagcgccgcccgtaaacgccggtggcacgacaggcagcggggacagatgtgggacgatgaggactccgccgacgacagcagcgtgttggacttgggtgggagtggtaacccgttcgctcacctgcgcccccgtatcgggcgcatgatgtaagagaaaccgaaaataaatgatactcaccaaggccatggcgaccagcgtgcgttcgtttcttctctgttgttgttgtatctagtatgatgaggcgtgcgtacccggagggtcctcctccctcgtacgagagcgtgatgcagcaggcgatggcggcggcggcgatgcagcccccgctggaggctccttacgtgcccccgcggtacctggcgcctacggaggggcggaacagcattcgttactcggagctggcacccttgtacgataccacccggttgtacctggtggacaacaagtcggcggacatcgcctcgctgaactaccagaacgaccacagcaacttcctgaccaccgtggtgcagaacaatgacttcacccccacggaggccagcacccagaccatcaactttgacgagcgctcgcggtggggcggccagctgaaaaccatcatgcacaccaacatgcccaacgtgaacgagttcatgtacagcaacaagttcaaggcgcgggtgatggtctcccgcaagacccccaatggggtgacagtgacagaggattatgatggtagtcaggatgagctgaagtatgaatgggtggaatttgagctgcccgaaggcaacttctcggtgaccatgaccatcgacctgatgaacaacgccatcatcgacaattacttggcggtggggcggcagaacggggtgctggagagcgacatcggcgtgaagttcgacactaggaacttcaggctgggctgggaccccgtgaccgagctggtcatgcccggggtgtacaccaacgaggctttccatcccgatattgtcttgctgcccggctgcggggtggacttcaccgagagccgcctcagcaacctgctgggcattcgcaagaggcagcccttccaggaaggcttccagatcatgtacgaggatctggaggggggcaacatccccgcgctcctggatgtcgacgcctatgagaaaagcaaggaggatgcagcagctgaagcaactgcagccgtagctaccgcctctaccgaggtcaggggcgataattttgcaagcgccgcagcagtggcagcggccgaggcggctgaaaccgaaagtaagatagtcattcagccggtggagaaggatagcaagaacaggagctacaacgtactaccggacaagataaacaccgcctaccgcagctggtacctagcctacaactatggcgaccccgagaagggcgtgcgctcctggacgctgctcaccacctcggacgtcacctgcggcgtggagcaagtctactggtcgctgcccgacatgatgcaagacccggtcaccttccgctccacgcgtcaagttagcaactacccggtggtgggcgccgagctcctgcccgtctactccaagagcttcttcaacgagcaggccgtctactcgcagcagctgcgcgccttcacctcgcttacgcacgtcttcaaccgcttccccgagaaccagatcctcgtccgcccgcccgcgcccaccattaccaccgtcagtgaaaacgttcctgctctcacagatcacgggaccctgccgctgcgcagcagtatccggggagtccagcgcgtgaccgttactgacgccagacgccgcacctgcccctacgtctacaaggccctgggcatagtcgcgccgcgcgtcctctcgagccgcaccttctaaatgtccattctcatctcgcccagtaataacaccggttggggcctgcgcgcgcccagcaagatgtacggaggcgctcgccaacgctccacgcaacaccccgtgcgcgtgcgcgggcacttccgcgctccctggggcgccctcaagggccgcgtgcggtcgcgcaccaccgtcgacgacgtgatcgaccaggtggtggccgacgcgcgcaactacacccccgccgccgcgcccgtctccaccgtggacgccgtcatcgacagcgtggtggccgacgcgcgccggtacgcccgcgccaagagccggcggcggcgcatcgcccggcggcaccggagcacccccgccatgcgcgcggcgcgagccttgctgcgcagggccaggcgcacgggacgcagggccatgctcagggcggccagacgcgcggcttcaggcgccagcgccggcaggacccggagacgcgcggccacggcggcggcagcggccatcgccagcatgtcccgcccgcggcgagggaacgtgtactgggtgcgcgacgccgccaccggtgtgcgcgtgcccgtgcgcacccgcccccctcgcacttgaagatgttcacttcgcgatgttgatgtgtcccagcggcgaggaggatgtccaagcgcaaattcaaggaagagatgctccaggtcatcgcgcctgagatctacggccctgcggtggtgaaggaggaaagaaagccccgcaaaatcaagcgggtcaaaaaggacaaaaaggaagaagaaagtgatgtggacggattggtggagtttgtgcgcgagttcgccccccggcggcgcgtgcagtggcgcgggcggaaggtgcaaccggtgctgagacccggcaccaccgtggtcttcacgcccggcgagcgctccggcaccgcttccaagcgctcctacgacgaggtgtacggggatgatgatattctggagcaggcggccgagcgcctgggcgagtttgcttacggcaagcgcagccgttccgcaccgaaggaagaggcggtgtccatcccgctggaccacggcaaccccacgccgagcctcaagcccgtgaccttgcagcaggtgctgccgaccgcggcgccgcgccgggggttcaagcgcgagggcgaggatctgtaccccaccatgcagctgatggtgcccaagcgccagaagctggaagacgtgctggagaccatgaaggtggacccggacgtgcagcccgaggtcaaggtgcggcccatcaagcaggtggccccgggcctgggcgtgcagaccgtggacatcaagattcccacggagcccatggaaacgcagaccgagcccatgatcaagcccagcaccagcaccatggaggtgcagacggatccctggatgccatcggctcctagtcgaagaccccggcgcaagtacggcgcggccagcctgctgatgcccaactacgcgctgcatccttccatcatccccacgccgggctaccgcggcacgcgcttctaccgcggtcataccagcagccgccgccgcaagaccaccactcgccgccgccgtcgccgcaccgccgctgcaaccacccctgccgccctggtgcggagagtgtaccgccgcggccgcgcacctctgaccctgccgcgcgcgcgctaccacccgagcatcgccatttaaactttcgcctgctttgcagatcaatggccctcacatgccgccttcgcgttcccattacgggctaccgaggaagaaaaccgcgccgtagaaggctggcggggaacgggatgcgtcgccaccaccaccggcggcggcgcgccatcagcaagcggttggggggaggcttcctgcccgcgctgatccccatcatcgccgcggcgatcggggcgatccccggcattgcttccgtggcggtgcaggcctctcagcgccactgagacacacttggaaacatcttgtaataaaccaatggactctgacgctcctggtcctgtgatgtgttttcgtagacagatggaagacatcaatttttcgtccctggctccgcgacacggcacgcggccgttcatgggcacctggagcgacatcggcaccagccaactgaacgggggcgccttcaattggagcagtctctggagcgggcttaagaatttcgggtccacgcttaaaacctatggcagcaaggcgtggaacagcaccacagggcaggcgctgagggataagctgaaagagcagaacttccagcagaaggtggtcgatgggctcgcctcgggcatcaacggggtggtggacctggccaaccaggccgtgcagcggcagatcaacagccgcctggacccggtgccgcccgccggctccgtggagatgccgcaggtggaggaggagctgcctcccctggacaagcggggcgagaagcgaccccgccccgatgcggaggagacgctgctgacgcacacggacgagccgcccccgtacgaggaggcggtgaaactgggtctgcccaccacgcggcccatcgcgcccctggccaccggggtgctgaaacccgaaaagcccgcgaccctggacttgcctcctccccagccttcccgcccctctacagtggctaagcccctgccgccggtggccgtggcccgcgcgcgacccgggggcaccgcccgccctcatgcgaactggcagagcactctgaacagcatcgtgggtctgggagtgcagagtgtgaagcgccgccgctgctattaaacctaccgtagcgcttaacttgcttgtctgtgtgtgtatgtattatgtcgccgccgccgctgtccaccagaaggaggagtgaagaggcgcgtcgccgagttgcaagatggccaccccatcgatgctgccccagtgggcgtacatgcacatcgccggacaggacgcttcggagtacctgagtccgggtctggtgcagtttgcccgcgccacagacacctacttcagtctggggaacaagtttaggaaccccacggtggcgcccacgcacgatgtgaccaccgaccgcagccagcggctgacgctgcgcttcgtgcccgtggaccgcgaggacaacacctactcgtacaaagtgcgctacacgctggccgtgggcgacaaccgcgtgctggacatggccagcacctactttgacatccgcggcgtgctggatcggggccctagcttcaaaccctactccggcaccgcctacaacagtctggcccccaagggagcacccaacacttgtcagtggacatataaagccgatggtgaaactgccacagaaaaaacctatacatatggaaatgcacccgtgcagggcattaacatcacaaaagatggtattcaacttggaactgacaccgatgatcagccaatctacgcagataaaacctatcagcctgaacctcaagtgggtgatgctgaatggcatgacatcactggtactgatgaaaagtatggaggcagagctcttaagcctgataccaaaatgaagccttgttatggttcttttgccaagcctactaataaagaaggaggtcaggcaaatgtgaaaacaggaacaggcactactaaagaatatgacatagacatggctttctttgacaacagaagtgcggctgctgctggcctagctccagaaattgttttgtatactgaaaatgtggatttggaaactccagatacccatattgtatacaaagcaggcacagatgacagcagctcttctattaatttgggtcagcaagccatgcccaacagacctaactacattggtttcagagacaactttatcgggctcatgtactacaacagcactggcaatatgggggtgctggccggtcaggcttctcagctgaatgctgtggttgacttgcaagacagaaacaccgagctgtcctaccagctcttgcttgactctctgggtgacagaacccggtatttcagtatgtggaatcaggcggtggacagctatgatcctgatgtgcgcattattgaaaatcatggtgtggaggatgaacttcccaactattgtttccctctggatgctgttggcagaacagatacttatcagggaattaaggctaatggaactgatcaaaccacatggaccaaagatgacagtgtcaatgatgctaatgagataggcaagggtaatccattcgccatggaaatcaacatccaagccaacctgtggaggaacttcctctacgccaacgtggccctgtacctgcccgactcttacaagtacacgccggccaatgttaccctgcccaccaacaccaacacctacgattacatgaacggccgggtggtggcgccctcgctggtggactcctacatcaacatcggggcgcgctggtcgctggatcccatggacaacgtgaaccccttcaaccaccaccgcaatgcggggctgcgctaccgctccatgctcctgggcaacgggcgctacgtgcccttccacatccaggtgccccagaaatttttcgccatcaagagcctcctgctcctgcccgggtcctacacctacgagtggaacttccgcaaggacgtcaacatgatcctgcagagctccctcggcaacgacctgcgcacggacggggcctccatctccttcaccagcatcaacctctacgccaccttcttccccatggcgcacaacacggcctccacgctcgaggccatgctgcgcaacgacaccaacgaccagtccttcaacgactacctctcggcggccaacatgctctaccccatcccggccaacgccaccaacgtgcccatctccatcccctcgcgcaactgggccgccttccgcggctggtccttcacgcgtctcaagaccaaggagacgccctcgctgggctccgggttcgacccctacttcgtctactcgggctccatcccctacctcgacggcaccttctacctcaaccacaccttcaagaaggtctccatcaccttcgactcctccgtcagctggcccggcaacgaccggctcctgacgcccaacgagttcgaaatcaagcgcaccgtcgacggcgagggctacaacgtggcccagtgcaacatgaccaaggactggttcctggtccagatgctggcccactacaacatcggctaccagggcttctacgtgcccgagggctacaaggaccgcatgtactccttcttccgcaacttccagcccatgagccgccaggtggtggacgaggtcaactacaaggactaccaggccgtcaccctggcctaccagcacaacaactcgggcttcgtcggctacctcgcgcccaccatgcgccagggccagccctaccccgccaactacccctacccgctcatcggcaagagcgccgtcaccagcgtcacccagaaaaagttcctctgcgacagggtcatgtggcgcatccccttctccagcaacttcatgtccatgggcgcgctcaccgacctcggccagaacatgctctatgccaactccgcccacgcgctagacatgaatttcgaagtcgaccccatggatgagtccacccttctctatgttgtcttcgaagtcttcgacgtcgtccgagtgcaccagccccaccgcggcgtcatcgaggccgtctacctgcgcacccccttctcggccggtaacgccaccacctaagctcttgcttcttgcaagccatggccgcgggctccggcgagcaggagctcagggccatcatccgcgacctgggctgcgggccctacttcctgggcaccttcgataagcgcttcccgggattcatggccccgcacaagctggcctgcgccatcgtcaacacggccggccgcgagaccgggggcgagcactggctggccttcgcctggaacccgcgctcgaacacctgctacctcttcgaccccttcgggttctcggacgagcgcctcaagcagatctaccagttcgagtacgagggcctgctgcgccgcagcgccctggccaccgaggaccgctgcgtcaccctggaaaagtccacccagaccgtgcagggtccgcgctcggccgcctgcgggctcttctgctgcatgttcctgcacgccttcgtgcactggcccgaccgccccatggacaagaaccccaccatgaacttgctgacgggggtgcccaacggcatgctccagtcgccccaggtggaacccaccctgcgccgcaaccaggaggcgctctaccgcttcctcaactcccactccgcctactttcgctcccaccgcgcgcgcatcgagaaggccaccgccttcgaccgcatgaatcaagacatgtaaaccgtgtgtgtatgttaaatgtctttaataaacagcactttcatgttacacatgcatctgagatgatttatttagaaatcgaaagggttctgccgggtctcggcatggcccgcgggcagggacacgttgcggaactggtacttggccagccacttgaactcggggatcagcagtttgggcagcggggtgtcggggaaggagtcggtccacagcttccgcgtcagttgcagggcgcccagcaggtcgggcgcggagatcttgaaatcgcagttgggacccgcgttctgcgcgcgggagttgcggtacacggggttgcagcactggaacaccatcagggccgggtgcttcacgctcgccagcaccgtcgcgtcggtgatgctctccacgtcgaggtcctcggcgttggccatcccgaagggggtcatcttgcaggtctgccttcccatggtgggcacgcacccgggcttgtggttgcaatcgcagtgcagggggatcagcatcatctgggcctggtcggcgttcatccccgggtacatggccttcatgaaagcctccaattgcctgaacgcctgctgggccttggctccctcggtgaagaagaccccgcaggacttgctagagaactggttggtggcgcacccggcgtcgtgcacgcagcagcgcgcgtcgttgttggccagctgcaccacgctgcgcccccagcggttctgggtgatcttggcccggtcggggttctccttcagcgcgcgctgcccgttctcgctcgccacatccatctcgatcatgtgctccttctggatcatggtggtcccgtgcaggcaccgcagcttgccctcggcctcggtgcacccgtgcagccacagcgcgcacccggtgcactcccagttcttgtgggcgatctgggaatgcgcgtgcacgaagccctgcaggaagcggcccatcatggtggtcagggtcttgttgctagtgaaggtcagcggaatgccgcggtgctcctcgttgatgtacaggtggcagatgcggcggtacacctcgccctgctcgggcatcagctggaagttggctttcaggtcggtctccacgcggtagcggtccatcagcatagtcatgatttccatacccttctcccaggccgagacgatgggcaggctcatagggttcttcaccatcatcttagcgctagcagccgcggccagggggtcgctctcgtccagggtctcaaagctccgcttgccgtccttctcggtgatccgcaccggggggtagctgaagcccacggccgccagctcctcctcggcctgtctttcgtcctcgctgtcctggctgacgtcctgcaggaccacatgcttggtcttgcggggtttcttcttgggcggcagcggcggcggagatgttggagatggcgagggggagcgcgagttctcgctcaccactactatctcttcctcttcttggtccgaggccacgcggcggtaggtatgtctcttcgggggcagaggcggaggcgacgggctctcgccgccgcgacttggcggatggctggcagagccccttccgcgttcgggggtgcgctcccggcggcgctctgactgacttcctccgcggccggccattgtgttctcctagggaggaacaacaagcatggagactcagccatcgccaacctcgccatctgcccccaccgccgacgagaagcagcagcagcagaatgaaagcttaaccgccccgccgcccagccccgccacctccgacgcggccgtcccagacatgcaagagatggaggaatccatcgagattgacctgggctatgtgacgcccgcggagcacgaggaggagctggcagtgcgcttttcacaagaagagatacaccaagaacagccagagcaggaagcagagaatgagcagagtcaggctgggctcgagcatgacggcgactacctccacctgagcgggggggaggacgcgctcatcaagcatctggcccggcaggccaccatcgtcaaggatgcgctgctcgaccgcaccgaggtgcccctcagcgtggaggagctcagccgcgcctacgagttgaacctcttctcgccgcgcgtgccccccaagcgccagcccaatggcacctgcgagcccaacccgcgcctcaacttctacccggtcttcgcggtgcccgaggccctggccacctaccacatctttttcaagaaccaaaagatccccgtctcctgccgcgccaaccgcacccgcgccgacgcccttttcaacctgggtcccggcgcccgcctacctgatatcgcctccttggaagaggttcccaagatcttcgagggtctgggcagcgacgagactcgggccgcgaacgctctgcaaggagaaggaggagagcatgagcaccacagcgccctggtcgagttggaaggcgacaacgcgcggctggcggtgctcaaacgcacggtcgagctgacccatttcgcctacccggctctgaacctgccccccaaagtcatgagcgcggtcatggaccaggtgctcatcaagcgcgcgtcgcccatctccgaggacgagggcatgcaagactccgaggagggcaagcccgtggtcagcgacgagcagctggcccggtggctgggtcctaatgctagtccccagagtttggaagagcggcgcaaactcatgatggccgtggtcctggtgaccgtggagctggagtgcctgcgccgcttcttcgccgacgcggagaccctgcgcaaggtcgaggagaacctgcactacctcttcaggcacgggttcgtgcgccaggcctgcaagatctccaacgtggagctgaccaacctggtctcctacatgggcatcttgcacgagaaccgcctggggcagaacgtgctgcacaccaccctgcgcggggaggcccggcgcgactacatccgcgactgcgtctacctctacctctgccacacctggcagacgggcatgggcgtgtggcagcagtgtctggaggagcagaacctgaaagagctctgcaagctcctgcagaagaacctcaagggtctgtggaccgggttcgacgagcgcaccaccgcctcggacctggccgacctcattttccccgagcgcctcaggctgacgctgcgcaacggcctgcccgactttatgagccaaagcatgttgcaaaactttcgctctttcatcctcgaacgctccggaatcctgcccgccacctgctccgcgctgccctcggacttcgtgccgctgaccttccgcgagtgccccccgccgctgtggagccactgctacctgctgcgcctggccaactacctggcctaccactcggacgtgatcgaggacgtcagcggcgagggcctgctcgagtgccactgccgctgcaacctctgcacgccgcaccgctccctggcctgcaacccccagctgctgagcgagacccagatcatcggcaccttcgagttgcaagggcccagcgaaggcgagggttcagccgccaaggggggtctgaaactcaccccggggctgtggacctcggcctacttgcgcaagttcgtgcccgaggactaccatcccttcgagatcaggttctacgaggaccaatcccatccgcccaaggccgagctgtcggcctgcgtcatcacccagggggcgatcctggcccaattgcaagccatccagaaatcccgccaagaattcttgctgaaaaagggccgcggggtctacctcgacccccagaccggtgaggagctcaaccccggcttcccccaggatgccccgaggaaacaagaagctgaaagtggagctgccgcccgtggaggatttggaggaagactgggagaacagcagtcaggcagaggaggaggagatggaggaagactgggacagcactcaggcagaggaggacagcctgcaagacagtctggaggaagacgaggaggaggcagaggaggaggtggaagaagcagccgccgccagaccgtcgtcctcggcgggggagaaagcaagcagcacggataccatctccgctccgggtcggggtcccgctcgaccacacagtagatgggacgagaccggacgattcccgaaccccaccacccagaccggtaagaaggagcggcagggatacaagtcctggcgggggcacaaaaacgccatcgtctcctgcttgcaggcctgcgggggcaacatctccttcacccggcgctacctgctcttccaccgcggggtgaactttccccgcaacatcttgcattactaccgtcacctccacagcccctactacttccaagaagaggcagcagcagcagaaaaagaccagcagaaaaccagcagctagaaaatccacagcggcggcagcaggtggactgaggatcgcggcgaacgagccggcgcaaacccgggagctgaggaaccggatctttcccaccctctatgccatcttccagcagagtcgggggcaggagcaggaactgaaagtcaagaaccgttctctgcgctcgctcacccgcagttgtctgtatcacaagagcgaagaccaacttcagcgcactctcgaggacgccgaggctctcttcaacaagtactgcgcgctcactcttaaagagtagcccgcgcccgcccagtcgcagaaaaaggcgggaattacgtcacctgtgcccttcgccctagccgcctccacccatcatcatgagcaaagagattcccacgccttacatgtggagctaccagccccagatgggcctggccgccggtgccgcccaggactactccacccgcatgaattggctcagcgccgggcccgcgatgatctcacgggtgaatgacatccgcgcccaccgaaaccagatactcctagaacagtcagcgctcaccgccacgccccgcaatcacctcaatccgcgtaattggcccgccgccctggtgtaccaggaaattccccagcccacgaccgtactacttccgcgagacgcccaggccgaagtccagctgactaactcaggtgtccagctggcgggcggcgccaccctgtgtcgtcaccgccccgctcagggtataaagcggctggtgatccggggcagaggcacacagctcaacgacgaggtggtgagctcttcgctgggtctgcgacctgacggagtcttccaactcgccggatcggggagatcttccttcacgcctcgtcaggccgtcctgactttggagagttcgtcctcgcagccccgctcgggtggcatcggcactctccagttcgtggaggagttcactccctcggtctacttcaaccccttctccggctcccccggccactacccggacgagttcatcccgaacttcgacgccatcagcgagtcggtggacggctacgattgaatgtcccatggtggcgcagctgacctagctcggcttcgacacctggaccactgccgccgcttccgctgcttcgctcgggatctcgccgagtttgcctactttgagctgcccgaggagcaccctcagggcccggcccacggagtgcggatcgtcgtcgaagggggcctcgactcccacctgcttcggatcttcagccagcgtccgatcctggtcgagcgcgagcaaggacagacccttctgactctgtactgcatctgcaaccaccccggcctgcatgaaagtctttgttgtctgctgtgtactgagtataataaaagctgagatcagcgactactccggacttccgtgtgttcctgaatccatcaaccagtctttgttcttcaccgggaacgagaccgagctccagctccagtgtaagccccacaagaagtacctcacctggctgttccagggctccccgatcgccgttgtcaaccactgcgacaacgacggagtcctgctgagcggccctgccaaccttactttttccacccgcagaagcaagctccagctcttccaacccttcctccccgggacctatcagtgcgtctcgggaccctgccatcacaccttccacctgatcccgaataccacagcgtcgctccccgctactaacaaccaaactaacctccaccaacgccaccgtcgcgacctttctgaatctaatactaccacccacaccggaggtgagctccgaggtcaaccaacctctgggatttactacggcccctgggaggtggttgggttaatagcgctaggcctagttgcgggtgggcttttggttctctgctacctatacctcccttgctgttcgtacttagtggtgctgtgttgctggtttaagaaatggggaagatcaccctagtgagctgcggtgcgctggtggcggtgttgctttcgattgtgggactgggcggtgcggctgtagtgaaggagaaggccgatccctgcttgcatttcaatcccaacaaatgccagctgagttttcagcccgatggcaatcggtgcgcggtactgatcaagtgcggatgggaatgcgagaacgtgagaatcgagtacaataacaagactcggaacaatactctcgcgtccgtgtggcagcccggggaccccgagtggtacaccgtctctgtccccggtgctgacggctccccgcgcaccgtgaataatactttcatttttgcgcacatgtgcgacacggtcatgtggatgagcaagcagtacgatatgtggccccccacgaaggagaacatcgtggtcttctccatcgcttacagcctgtgcacggcgctaatcaccgctatcgtgtgcctgagcattcacatgctcatcgctattcgccccagaaataatgccgaaaaagaaaaacagccataacgttttttttcacacctttttcagaccatggcctctgttaaatttttgcttttatttgccagtctcattgccgtcattcatggaatgagtaatgagaaaattactatttacactggcactaatcacacattgaaaggtccagaaaaagccacagaagtttcatggtattgttattttaatgaatcagatgtatctactgaactctgtggaaacaataacaaaaaaaatgagagcattactctcatcaagtttcaatgtggatctgacttaaccctaattaacatcactagagactatgtaggtatgtattatggaactacagcaggcatttcggacatggaattttatcaagtttctgtgtctgaacccaccacgcctagaatgaccacaaccacaaaaactacacctgttaccactatgcagctcactaccaataacatttttgccatgcgtcaaatggtcaacaatagcactcaacccaccccacccagtgaggaaattcccaaatccatgattggcattattgttgctgtagtggtgtgcatgttgatcatcgccttgtgcatggtgtactatgccttctgctacagaaagcacagactgaacgacaagctggaacacttactaagtgttgaattttaattttttagaaccatgaagatcctaggccttttaattttttctatcattacctctgctctatgcaattctgacaatgaggacgttactgtcgttgtcggatcaaattatacactgaaaggtccagcgaagggtatgctttcgtggtattgctattttggatctgacactacagaaactgaattatgcaatcttaagaatggcaaaattcaaaattctaaaattaacaattatatatgcaatggtactgatctgatactcctcaatatcacgaaatcatatgctggcagttacacctgccctggagatgatgctgacagtatgattttttacaaagtaactgttgttgatcccactactccacctccacccaccacaactactcacaccacacacacagatcaaaccgcagcagaggaggcagcaaagttagccttgcaggtccaagacagttcatttgttggcattacccctacacctgatcagcggtgtccggggctgctagtcagcggcattgtcggtgtgctttcgggattagcagtcataatcatctgcatgttcatttttgcttgctgctatagaaggctttaccgacaaaaatcagacccactgctgaacctctatgtttaattttttccagagtcatgaaggcagttagcgctctagttttttgttctttgattggcattgttttttgcaatcctattcctaaagttagctttattaaagatgtgaatgttactgaggggggcaatgtgacactggtaggtgtagagggtgctgaaaacaccacctggacaaaataccacctcaatgggtggaaagatatttgcaattggagtgtattagtttatacatgtgagggagttaatcttaccattgtcaatgccacctcagctcaaaatggtagaattcaaggacaaagtgtcagtgtatctaatgggtattttacccaacatacttttatctatgacgttaaagtcataccactgcctacgcctagcccacctagcactaccacacagacaacccacactacacagacaaccacatacagtacattaaatcagcctaccaccactacagcagcagaggttgccagctcgtctggggtccgagtggcatttttgatgtgggccccatctagcagtcccactgctagtaccaatgagcagactactgaatttttgtccactgtcgagagccacaccacagctacctccagtgccttctctagcaccgccaatctctcctcgctttcctctacaccaatcagtcccgctactactcctagccccgctcctcttcccactcccctgaagcaaacagacggcggcatgcaatggcagatcaccctgctcattgtgatcgggttggtcatcctggccgtgttgctctactacatcttctgccgccgcattcccaacgcgcaccgcaagccggtctacaagcccatcattgtcgggcagccggagccgcttcaggtggaagggggtctaaggaatcttctcttctcttttacagtatggtgattgaactatgattcctagacaattcttgatcactattcttatctgcctcctccaagtctgtgccaccctcgctctggtggccaacgccagtccagactgtattgggcccttcgcctcctacgtgctctttgccttcaccacctgcatctgctgctgtagcatagtctgcctgcttatcaccttcttccagttcattgactggatctttgtgcgcatcgcctacctgcgccaccacccccagtaccgcgaccagcgagtggcgcggctgctcaggctcctctgataagcatgcgggctctgctacttctcgcgcttctgctgttagtgctcccccgtcccgtcgacccccggtcccccacccagtcccccgaggaggtccgcaaatgcaaattccaagaaccctggaaattcctcaaatgctaccgccaaaaatcagacatgcatcccagctggatcatgatcattgggatcgtgaacattctggcctgcaccctcatctcctttgtgatttacccctgctttgactttggttggaactcgccagaggcgctctatctcccgcctgaacctgacacaccaccacagcaacctcaggcacacgcactaccaccactacagcctaggccacaatacatgcccatattagactatgaggccgagccacagcgacccatgctccccgctattagttacttcaatctaaccggcggagatgactgacccactggccaacaacaacgtcaacgaccttctcctggacatggacggccgcgcctcggagcagcgactcgcccaacttcgcattcgccagcagcaggagagagccgtcaaggagctgcaggatgcggtggccatccaccagtgcaagagaggcatcttctgcctggtgaaacaggccaagatctcctacgaggtcactccaaacgaccatcgcctctcctacgagctcctgcagcagcgccagaagttcacctgcctggtcggagtcaaccccatcgtcatcacccagcagtctggcgataccaaggggtgcatccactgctcctgcgactcccccgactgcgtccacactctgatcaagaccctctgcggcctccgcgacctcctccccatgaactaatcacccccttatccagtgaaataaagatcatattgatgatgattttacagaaataaaaaataatcatttgatttgaaataaagatacaatcatattgatgatttgagtttaacaaaaaaataaagaatcacttacttgaaatctgataccaggtctctgtccatgttttctgccaacaccacttcactcccctcttcccagctctggtactgcaggccccggcgggctgcaaacttcctccacacgctgaaggggatgtcaaattcctcctgtccctcaatcttcattttatcttctatcagatgtccaaaaagcgcgtccgggtggatgatgacttcgaccccgtctacccctacgatgcagacaacgcaccgaccgtgcccttcatcaacccccccttcgtctcttcagatggattccaagagaagcccctgggggtgttgtccctgcgactggccgaccccgtcaccaccaagaacggggaaatcaccctcaagctgggagagggggtggacctcgattcctcgggaaaactcatctccaacacggccaccaaggccgccgcccctctcagtttttccaacaacaccatttcccttaacatggatcaccccttttacactaaagatggaaaattatccttacaagtttctccaccattaaatatactgagaacaagcattctaaacacactagctttaggttttggatcaggtttaggactccgtggctctgccttggcagtacagttagtctctccacttacatttgatactgatggaaacataaagcttaccttagacagaggtttgcatgttacaacaggagatgcaattgaaagcaacataagctgggctaaaggtttaaaatttgaagatggagccatagcaaccaacattggaaatgggttagagtttggaagcagtagtacagaaacaggtgttgatgatgcttacccaatccaagttaaacttggatctggccttagctttgacagtacaggagccataatggctggtaacaaagaagacgataaactcactttgtggacaacacctgatccatcaccaaactgtcaaatactcgcagaaaatgatgcaaaactaacactttgcttgactaaatgtggtagtcaaatactggccactgtgtcagtcttagttgtaggaagtggaaacctaaaccccattactggcaccgtaagcagtgctcaggtgtttctacgttttgatgcaaacggtgttcttttaacagaacattctacactaaaaaaatactgggggtataggcagggagatagcatagatggcactccatataccaatgctgtaggattcatgcccaatttaaaagcttatccaaagtcacaaagttctactactaaaaataatatagtagggcaagtatacatgaatggagatgtttcaaaacctatgcttctcactataaccctcaatggtactgatgacagcaacagtacatattcaatgtcattttcatacacctggactaatggaagctatgttggagcaacatttggggctaactcttataccttctcatacatcgcccaagaatgaacactgtatcccaccctgcatgccaacccttcccaccccactctgtggaacaaactctgaaacacaaaataaaataaagttcaagtgttttattgattcaacagttttacaggattcgagcagttatttttcctccaccctcccaggacatggaatacaccaccctctccccccgcacagccttgaacatctgaatgccattggtgatggacatgcttttggtctccacgttccacacagtttcagagcgagccagtctcgggtcggtcagggagatgaaaccctccgggcactcccgcatctgcacctcacagctcaacagctgaggattgtcctcggtggtcgggatcacggttatctggaagaagcagaagagcggcggtgggaatcatagtccgcgaacgggatcggccggtggtgtcgcatcaggccccgcagcagtcgctgccgccgccgctccgtcaagctgctgctcagggggtccgggtccagggactccctcagcatgatgcccacggccctcagcatcagtcgtctggtgcggcgggcgcagcagcgcatgcggatctcgctcaggtcgctgcagtacgtgcaacacagaaccaccaggttgttcaacagtccatagttcaacacgctccagccgaaactcatcgcgggaaggatgctacccacgtggccgtcgtaccagatcctcaggtaaatcaagtggtgccccctccagaacacgctgcccacgtacatgatctccttgggcatgtggcggttcaccacctcccggtaccacatcaccctctggttgaacatgcagccccggatgatcctgcggaaccacagggccagcaccgccccgcccgccatgcagcgaagagaccccgggtcccggcaatggcaatggaggacccaccgctcgtacccgtggatcatctgggagctgaacaagtctatgttggcacagcacaggcatatgctcatgcatctcttcagcactctcaactcctcgggggtcaaaaccatatcccagggcacggggaactcttgcaggacagcgaaccccgcagaacagggcaatcctcgcacagaacttacattgtgcatggacagggtatcgcaatcaggcagcaccgggtgatcctccaccagagaagcgcgggtctcggtctcctcacagcgtggtaagggggccggccgatacgggtgatggcgggacgcggctgatcgtgttcgcgaccgtgtcatgatgcagttgctttcggacattttcgtacttgctgtagcagaacctggtccgggcgctgcacaccgatcgccggcggcggtctcggcgcttggaacgctcggtgttgaaattgtaaaacagccactctctcagaccgtgcagcagatctagggcctcaggagtgatgaagatcccatcatgcctgatggctctgatcacatcgaccaccgtggaatgggccagacccagccagatgatgcaattttgttgggtttcggtgacggcgggggagggaagaacaggaagaaccatgattaacttttaatccaaacggtctcggagtacttcaaaatgaagatcgcggagatggcacctctcgcccccgctgtgttggtggaaaataacagccaggtcaaaggtgatacggttctcgagatgttccacggtggcttccagcaaagcctccacgcgcacatccagaaacaagacaatagcgaaagcgggagggttctctaattcctcaatcatcatgttacactcctgcaccatccccagataattttcatttttccagccttgaatgattcgaactagttcctgaggtaaatccaagccagccatgataaagagctcgcgcagagcgccctccaccggcattcttaagcacaccctcataattccaagatattctgctcctggttcacctgcagcagattgacaagcggaatatcaaaatctctgccgcgatccctgagctcctccctcagcaataactgtaagtactctttcatatcctctccgaaatttttagccataggaccaccaggaataagattagggcaagccacagtacagataaaccgaagtcctccccagtgagcattgccaaatgcaagactgctataagcatgctggctagacccggtgatatcttccagataactggacagaaaatcgcccaggcaatttttaagaaaatcaacaaaagaaaaatcctccaggtggacgtttagagcctcgggaacaacgatgaagtaaatgcaagcggtgcgttccagcatggttagttagctgatctgtagaaaaaacaaaaatgaacattaaaccatgctagcctggcgaacaggtgggtaaatcgttctctccagcaccaggcaggccacggggtctccggcgcgaccctcgtaaaaattgtcgctatgattgaaaaccatcacagagagacgttcccggtggccggcgtgaatgattcgacaagatgaatacacccccggaacattggcgtccgcgagtgaaaaaaagcgcccgaggaagcaataaggcactacaatgctcagtctcaagtccagcaaagcgatgccatgcggatgaagcacaaaattctcaggtgcgtacaaaatgtaattactcccctcctgcacaggcagcaaagcccccgatccctccaggtacacatacaaagcctcagcgtccatagcttaccgagcagcagcacacaacaggcgcaagagtcagagaaaggctgagctctaacctgtccacccgctctctgctcaatatatagcccagatctacactgacgtaaaggccaaagtctaaaaatacccgccaaataatcacacacgcccagcacacgcccagaaaccggtgacacactcaaaaaaatacgcgcacttcctcaaacgcccaaaactgccgtcatttccgggttcccacgctacgtcatcaaaacacgactttcaaattccgtcgaccgttaaaaacgtcacccgccccgcccctaacggtcgcccgtctctcagccaatcagcgccccgcatccccaaattcaaacacctcatttgcatattaacgcgcacaaaaagtttgaggtatattattgatgatgg

SEQ ID NO: 2 - DNA, 31588 bp, synthetic construct
  misc_feature 1..31588: note = Description of Artificial Sequence: Synthetic polynucleotide
  source 1..31588: mol_type = other DNA
ccatcttcaataatatacctcaaactttttgtgcgcgttaatatgcaaatgaggcgtttgaatttggggaggaagggcggtgattggtcgagggatgagcgaccgttaggggcggggcgagtgacgttttgatgacgtggttgcgaggaggagccagtttgcaagttctcgtgggaaaagtgacgtcaaacgaggtgtggtttgaacacggaaatactcaattttcccgcgctctctgacaggaaatgaggtgtttctgggcggatgcaagtgaaaacgggccattttcgcgcgaaaactgaatgaggaagtgaaaatctgagtaatttcgcgtttatggcagggaggagtatttgccgagggccgagtagactttgaccgattacgtgggggtttcgattaccgtgtttttcacctaaatttccgcgtacggtgtcaaagtccggtgtttttacgtaggtgtcagctgatcgccagggtatttaaacctgcgctctccagtcaagaggccactcttgagtgccagcgagaagagttttctcctccgcgccgcgagtcagatctacactttgaaagtagggataacagggtaatgacattgattattgactagttgttaatagtaatcaattacggggtcattagttcatagcccatatatggagttccgcgttacataacttacggtaaatggcccgcctggctgaccgcccaacgacccccgcccattgacgtcaataatgacgtatgttcccatagtaacgccaatagggactttccattgacgtcaatgggtggagtatttacggtaaactgcccacttggcagtacatcaagtgtatcatatgccaagtccgccccctattgacgtcaatgacggtaaatggcccgcctggcattatgcccagtacatgaccttacgggactttcctacttggcagtacatctacgtattagtcatcgctattaccatggtgatgcggttttggcagtacaccaatgggcgtggatagcggtttgactcacggggatttccaagtctccaccccattgacgtcaatgggagtttgttttggcaccaaaatcaacgggactttccaaaatgtcgtaataaccccgccccgttgacgcaaatgggcggtaggcgtgtacggtgggaggtctatataagcagagctcgtttagtgaaccgtcagatcgcctggaacgccatccacgctgttttgacctccatagaagacagcgatcgcgccaccatggccgggatgttccaggcactgtccgaaggctgcacaccctatgatattaaccagatgctgaatgtcctgggagaccaccaggtctctggcctggagcagctggagagcatcatcaacttcgagaagctgaccgagtggacaagctccaatgtgatgcctatcctgtccccactgaccaagggcatcctgggcttcgtgtttaccctgacagtgccttctgagcggggcctgtcttgcatcagcgaggcagacgcaaccacaccagagtccgccaatctgggcgaggagatcctgtctcagctgtacctgtggccccgggtgacatatcactccccttcttacgcctatcaccagttcgagcggagagccaagtacaagagacacttcccaggctttggccagtctctgctgttcggctaccccgtgtacgtgttcggcgattgcgtgcagggcgactgggatgccatccggtttagatactgcgcaccacctggatatgcactgctgaggtgtaacgacaccaattattccgccctgctggcagtgggcgccctggagggccctcgcaatcaggattggctgggcgtgccaaggcagctggtgacacgcatgcaggccatccagaacgcaggcctgtgcaccctggtggcaatgctggaggagacaatcttctggctgcaggcctttctgatggccctgaccgacagcggccccaagacaaacatcatcgtggattcccagtacgtgatgggcatctccaagccttctttccaggagtttgtggactgggagaacgtgagcccagagctgaattccaccgatcagccattctggcaggcaggaatcctggcaaggaacctggtgcctatggtggccacagtgcagggccagaatctgaagtaccagggccagagcctggtcatcagcgcctccatcatcgtgtttaacctgctggagctggagggcgactatcgggacgatggcaacgtgtgggtgcacaccccactgagccccagaacactgaacgcctgggtgaaggccgtggaggagaagaagggcatcccagtgcacctggagctggcctccatgaccaatatggagctgatgtctagcatcgtgcaccagcaggtgaggacatacggacccgtgttcatgtgcctgggaggcctgctgaccatggtggcaggagccgtgtggctgacagtgcgggtgctggagctgttcagagccgcccagctggccaacgatgtggtgctgcagatcatggagctgtgcggagcagcctttcgccaggtgtgccacaccacagtgccatggcccaatgcctccctgacccccaagtggaacaatgagacaacacagcctcagatcgccaactgtagcgtgtacgacttcttcgtgtggctgcactactatagcgtgagggataccctgtggccccgcgtgacataccacatgaataagtacgcctatcacatgctggagaggcgcgccaagtataagagaggccctggcccaggcgcaaagtttgtggcagcatggaccctgaaggccgccgccggccccggccccggccagtatatcaaggctaacagtaagttcattggaatcacagagctgggacccggacctggataatgagtttaaactcccatttaaatgtgagggttaatgcttcgagcagacatgataagatacattgatgagtttggacaaaccacaactagaatgcagtgaaaaaaatgctttatttgtgaaatttgtgatgctattgctttatttgtaaccattataagctgcaataaacaagttaacaacaacaattgcattcattttatgtttcaggttcagggggagatgtgggaggttttttaaagcaagtaaaacctctacaaatgtggtaaaataactataacggtcctaaggtagcgagtgagtagtgttctggggcgggggaggacctgcatgagggccagaataactgaaatctgtgcttttctgtgtgttgcagcagcatgagcggaagcggctcctttgagggaggggtattcagcccttatctgacggggcgtctcccctcctgggcgggagtgcgtcagaatgtgatgggatccacggtggacggccggcccgtgcagcccgcgaactcttcaaccctgacctatgcaaccctgagctcttcgtcgttggacgcagctgccgccgcagctgctgcatctgccgccagcgccgtgcgcggaatggccatgggcgccggctactacggcactctggtggccaactcgagttccaccaataatcccgccagcctgaacgaggagaagctgttgctgctgatggcccagctcgaggccttgacccagcgcctgggcgagctgacccagcaggtggctcagctgcaggagcagacgcgggccgcggttgccacggtgaaatccaaataaaaaatgaatcaataaataaacggagacggttgttgattttaacacagagtctgaatctttatttgatttttcgcgcgcggtaggccctggaccaccggtctcgatcattgagcacccggtggatcttttccaggacccggtagaggtgggcttggatgttgaggtacatgggcatgagcccgtcccgggggtggaggtagctccattgcagggcctcgtgctcgggggtggtgttgtaaatcacccagtcatagcaggggcgcagggcatggtgttgcacaatatctttgaggaggagactgatggccacgggcagccctttggtgtaggtgtttacaaatctgttgagctgggagggatgcatgcggggggagatgaggtgcatcttggcctggatcttgagattggcgatgttaccgcccagatcccgcctggggttcatgttgtgcaggaccaccagcacggtgtatccggtgcacttggggaatttatcatgcaacttggaagggaaggcgtgaaagaatttggcgacgcctttgtgcccgcccaggttttccatgcactcatccatgatgatggcgatgggcccgtgggcggcggcctgggcaaagacgtttcgggggtcggacacatcatagttgtggtcctgggtgaggtcatcataggccattttaatgaatttggggcggagggtgccggactgggggacaaaggtaccctcgatcccgggggcgtagttcccctcacagatctgcatctcccaggctttgagctcggagggggggatcatgtccacctgcggggcgataaagaacacggtttccggggcgggggagatgagctgggccgaaagcaagttccggagcagctgggacttgccgcagccggtggggccgtagatgaccccgatgaccggctgcaggtggtagttgagggagagacagctgccgtcctcccggaggaggggggccacctcgttcatcatctcgcgcacgtgcatgttctcgcgcaccagttccgccaggaggcgctctccccccagggataggagctcctggagcgaggcgaagtttttcagcggcttgagtccgtcggccatgggcattttggagagggtttgttgcaagagttccaggcggtcccagagctcggtgatgtgctctacggcatctcgatccagcagacctcctcgtttcgcgggttgggacggctgcgggagtagggcaccagacgatgggcgtccagcgcagccagggtccggtccttccagggtcgcagcgtccgcgtcagggtggtctccgtcacggtgaaggggtgcgcgccgggctgggcgcttgcgagggtgcgcttcaggctcatccggctggtcgaaaaccgctcccgatcggcgccctgcgcgtcggccaggtagcaattgaccatgagttcgtagttgagcgcctcggccgcgtggcctttggcgcggagcttacctttggaagtctgcccgcaggcgggacagaggagggacttgagggcgtagagcttgggggcgaggaagacggactcgggggcgtaggcgtccgcgccgcagtgggcgcagacggtctcgcactccacgagccaggtgaggtcgggctggtcggggtcaaaaaccagtttcccgccgttctttttgatgcgtttcttacctttggtctccatgagctcgtgtccccgctgggtgacaaagaggctgtccgtgtccccgtagaccgactttatgggccggtcctcgagcggtgtgccgcggtcctcctcgtagaggaaccccgcccactccgagacgaaagcccgggtccaggccagcacgaaggaggccacgtgggacgggtagcggtcgttgtccaccagcgggtccaccttttccagggtatgcaaacacatgtccccctcgtccacatccaggaaggtgattggcttgtaagtgtaggccacgtgaccgggggtcccggccgggggggtataaaagggtgcgggtccctgctcgtcctcactgtcttccggatcgctgtccaggagcgccagctgttggggtaggtattccctctcgaaggcgggcatgacctcggcactcaggttgtcagtttctagaaacgaggaggatttgatattgacggtgccggcggagatgcctttcaagagcccctcgtccatctggtcagaaaagacgatctttttgttgtcgagcttggtggcgaaggagccgtagagggcgttggagaggagcttggcgatggagcgcatggtctggtttttttccttgtcggcgcgctccttggcggcgatgttgagctgcacgtactcgcgcgccacgcacttccattcggggaagacggtggtcagctcgtcgggcacgattctgacctgccagccccgattatgcagggtgatgaggtccacactggtggccacctcgccgcgcaggggctcattagtccagcagaggcgtccgcccttgcgcgagcagaaggggggcagggggtccagcatgacctcgtcgggggggtcggcatcgatggtgaagatgccgggcaggaggtcggggtcaaagtagctgatggaagtggccagatcgtccagggcagcttgccattcgcgcacggccagcgcgcgctcgtagggactgaggggcgtgccccagggcatgggatgggtaagcgcggaggcgtacatgccgcagatgtcgtagacgtagaggggctcctcgaggatgccgatgtaggtggggtagcagcgccccccgcggatgctggcgcgcacgtagtcatacagctcgtgcgagggggcgaggagccccgggcccaggttggtgcgactgggcttttcggcgcggtagacgatctggcggaaaatggcatgcgagttggaggagatggtgggcctttggaagatgttgaagtgggcgtggggcagtccgaccgagtcgcggatgaagtgggcgtaggagtcttgcagcttggcgacgagctcggcggtgactaggacgtccagagcgcagtagtcgagggtctcctggatgatgtcatacttgagctgtcccttttgtttccacagctcgcggttgagaaggaactcttcgcggtccttccagtactcttcgagggggaacccgtcctgatctgcacggtaagagcctagcatgtagaactggttgacggccttgtaggcgcagcagcccttctccacggggagggcgtaggcctgggcggccttgcgcagggaggtgtgcgtgagggcgaaagtgtccctgaccatgaccttgaggaactggtgcttgaagtcgatatcgtcgcagcccccctgctcccagagctggaagtccgtgcgcttcttgtaggcggggttgggcaaagcgaaagtaacatcgttgaagaggatcttgcccgcgcggggcataaagttgcgagtgatgcggaaaggttggggcacctcggcccggttgttgatgacctgggcggcgagcacgatctcgtcgaagccgttgatgttgtggcccacgatgtagagttccacgaatcgcggacggcccttgacgtggggcagtttcttgagctcctcgtaggtgagctcgtcggggtcgctgagcccgtgctgctcgagcgcccagtcggcgagatgggggttggcgcggaggaaggaagtccagagatccacggccagggcggtttgcagacggtcccggtactgacggaactgctgcccgacggccattttttcgggggtgacgcagtagaaggtgcgggggtccccgtgccagcgatcccatttgagctggagggcgagatcgagggcgagctcgacgagccggtcgtccccggagagtttcatgaccagcatgaaggggacgagctgcttgccgaaggaccccatccaggtgtaggtttccacatcgtaggtgaggaagagcctttcggtgcgaggatgcgagccgatggggaagaactggatctcctgccaccaattggaggaatggctgttgatgtgatggaagtagaaatgccgacggcgcgccgaacactcgtgcttgtgtttatacaagcggccacagtgctcgcaacgctgcacgggatgcacgtgctgcacgagctgtacctgagttcctttgacgaggaatttcagtgggaagtggagtcgtggcgcctgcatctcgtgctgtactacgtcgtggtggtcggcctggccctcttctgcctcgatggtggtcatgctgacgagcccgcgcgggaggcaggtccagacctcggcgcgagcgggtcggagagcgaggacgagggcgcgcaggccggagctgtccagggtcctgagacgctgcggagtcaggtcagtgggcagcggcggcgcgcggttgacttgcaggagtttttccagggcgcgcgggaggtccagatggtacttgatctccaccgcgccattggtggcgacgtcgatggcttgcagggtcccgtgcccctggggtgtgaccaccgtcccccgtttcttcttgggcggctggggcgacgggggcggtgcctcttccatggttagaagcggcggcgaggacgcgcgccgggcggcaggggcggctcggggcccggaggcaggggcggcaggggcacgtcggcgccgcgcgcgggtaggttctggtactgcgcccggagaagactggcgtgagcgacgacgcgacggttgacgtcctggatctgacgcctctgggtgaaggccacgggacccgtgagtttgaacctgaaagagagttcgacagaatcaatctcggtatcgttgacggcggcctgccgcaggatctcttgcacgtcgcccgagttgtcctggtaggcgatctcggtcatgaactgctcgatctcctcctcttgaaggtctccgcggccggcgcgctccacggtggccgcgaggtcgttggagatgcggcccatgagctgcgagaaggcgttcatgcccgcctcgttccagacgcggctgtagaccacgacgccctcgggatcgcgggcgcgcatgaccacctgggcgaggttgagctccacgtggcgcgtgaagaccgcgtagttgcagaggcgctggtagaggtagttgagcgtggtggcgatgtgctcggtgacgaagaaatacatgatccagcggcggagcggcatctcgctgacgtcgcccagcgcctccaaacgttccatggcctcgtaaaagtccacggcgaagttgaaaaactgggagttgcgcgccgagacggtcaactcctcctccagaagacggatgagctcggcgatggtggcgcgcacctcgcgctcgaaggcccccgggagttcctccacttcctcttcttcctcctccactaacatctcttctacttcctcctcaggcggcagtggtggcgggggagggggcctgcgtcgccggcggcgcacgggcagacggtcgatgaagcgctcgatggtctcgccgcgccggcgtcgcatggtctcggtgacggcgcgcccgtcctcgcggggccgcagcgtgaagacgccgccgcgcatctccaggtggccgggggggtccccgttgggcagggagagggcgctgacgatgcatcttatcaattgccccgtagggactccgcgcaaggacctgagcgtctcgagatccacgggatctgaaaaccgctgaacgaaggcttcgagccagtcgcagtcgcaaggtaggctgagcacggtttcttctggcgggtcatgttggttgggagcggggcgggcgatgctgctggtgatgaagttgaaataggcggttctgagacggcggatggtggcgaggagcaccaggtctttgggcccggcttgctggatgcgcagacggtcggccatgccccaggcgtggtcctgacacctggccaggtccttgtagtagtcctgcatgagccgctccacgggcacctcctcctcgcccgcgcggccgtgcatgcgcgtgagcccgaagccgcgctggggctggacgagcgccaggtcggcgacgacgcgctcggcgaggatggcttgctggatctgggtgagggtggtctggaagtcatcaaagtcgacgaagcggtggtaggctccggtgttgatggtgtaggagcagttggccatgacggaccagttgacggtctggtggcccggacgcacgagctcgtggtacttgaggcgcgagtaggcgcgcgtgtcgaagatgtagtcgttgcaggtgcgcaccaggtactggtagccgatgaggaagtgcggcggcggctggcggtagagcggccatcgctcggtggcgggggcgccgggcgcgaggtcctcgagcatggtgcggtggtagccgtagatgtacctggacatccaggtgatgccggcggcggtggtggaggcgcgcgggaactcgcggacgcggttccagatgttgcgcagcggcaggaagtagttcatggtgggcacggtctggcccgtgaggcgcgcgcagtcgtggatgctctatacgggcaaaaacgaaagcggtcagcggctcgactccgtggcctggaggctaagcgaacgggttgggctgcgcgtgtaccccggttcgaatctcgaatcaggctggagccgcagctaacgtggtattggcactcccgtctcgacccaagcctgcaccaaccctccaggatacggaggcgggtcgttttgcaacttttttttggaggccggatgagactagtaagcgcggaaagcggccgaccgcgatggctcgctgccgtagtctggagaagaatcgccagggttgcgttgcggtgtgccccggttcgaggccggccggattccgcggctaacgagggcgtggctgccccgtcgtttccaagaccccatagccagccgacttctccagttacggagcgagcccctcttttgttttgtttgtttttgccagatgcatcccgtactgcggcagatgcgcccccaccaccctccaccgcaacaacagccccctccacagccggcgcttctgcccccgccccagcagcaacttccagccacgaccgccgcggccgccgtgagcggggctggacagagttatgatcaccagctggccttggaagagggcgaggggctggcgcgcctgggggcgtcgtcgccggagcggcacccgcgcgtgcagatgaaaagggacgctcgcgaggcctacgtgcccaagcagaacctgttcagagacaggagcggcgaggagcccgaggagatgcgcgcggcccggttccacgcggggcgggagctgcggcgcggcctggaccgaaagagggtgctgagggacgaggatttcgaggcggacgagctgacggggatcagccccgcgcgcgcgcacgtggccgcggccaacctggtcacggcgtacgagcagaccgtgaaggaggagagcaacttccaaaaatccttcaacaaccacgtgcgcaccctgatcgcgcgcgaggaggtgaccctgggcctgatgcacctgtgggacctgctggaggccatcgtgcagaaccccaccagcaagccgctgacggcgcagctgttcctggtggtgcagcatagtcgggacaacgaagcgttcagggaggcgctgctgaatatcaccgagcccgagggccgctggctcctggacctggtgaacattctgcagagcatcgtggtgcaggagcgcgggctgccgctgtccgagaagctggcggccatcaacttctcggtgctgagtttgggcaagtactacgctaggaagatctacaagaccccgtacgtgcccatagacaaggaggtgaagatcgacgggttttacatgcgcatgaccctgaaagtgctgaccctgagcgacgatctgggggtgtaccgcaacgacaggatgcaccgtgcggtgagcgccagcaggcggcgcgagctgagcgaccaggagctgatgcatagtctgcagcgggccctgaccggggccgggaccgagggggagagctactttgacatgggcgcggacctgcactggcagcccagccgccgggccttggaggcggcggcaggaccctacgtagaagaggtggacgatgaggtggacgaggagggcgagtacctggaagactgatggcgcgaccgtatttttgctagatgcaacaacaacagccacctcctgatcccgcgatgcgggcggcgctgcagagccagccgtccggcattaactcctcggacgattggacccaggccatgcaacgcatcatggcgctgacgacccgcaaccccgaagcctttagacagcagccccaggccaaccggctctcggccatcctggaggccgtggtgccctcgcgctccaaccccacgcacgagaaggtcctggccatcgtgaacgcgctggtggagaacaaggccatccgcggcgacgaggccggcctggtgtacaacgcgctgctggagcgcgtggcccgctacaacagcaccaacgtgcagaccaacctggaccgcatggtgaccgacgtgcgcgaggccgtggcccagcgcgagcggttccaccgcgagtccaacctgggatccatggtggcgctgaacgccttcctcagcacccagcccgccaacgtgccccggggccaggaggactacaccaacttcatcagcgccctgcgcctgatggtgaccgaggtgccccagagcgaggtgtaccagtccgggccggactacttcttccagaccagtcgccagggcttgcagaccgtgaacctgagccaggctttcaagaacttgcagggcctgtggggcgtgcaggccccggtcggggaccgcgcgacggtgtcgagcctgctgacgccgaactcgcgcctgctgctgctgctggtggcccccttcacggacagcggcagcatcaaccgcaactcgtacctgggctacctgattaacctgtaccgcgaggccatcggccaggcgcacgtggacgagcagacctaccaggagatcacccacgtgagccgcgccctgggccaggacgacccgggcaacctggaagccaccctgaactttttgctgaccaaccggtcgcagaagatcccgccccagtacgcgctcagcaccgaggaggagcgcatcctgcgttacgtgcagcagagcgtgggcctgttcctgatgcaggagggggccacccccagcgccgcgctcgacatgaccgcgcgcaacatggagcccagcatgtacgccagcaaccgcccgttcatcaataaactgatggactacttgcatcgggcggccgccatgaactctgactatttcaccaacgccatcctgaatccccactggctcccgccgccggggttctacacgggcgagtacgacatgcccgaccccaatgacgggttcctgtgggacgatgtggacagcagcgtgttctccccccgaccgggtgctaacgagcgccccttgtggaagaaggaaggcagcgaccgacgcccgtcctcggcgctgtccggccgcgagggtgctgccgcggcggtgcccgaggccgccagtcctttcccgagcttgcccttctcgctgaacagtatccgcagcagcgagctgggcaggatcacgcgcccgcgcttgctgggcgaagaggagtacttgaatgactcgctgttgagacccgagcgggagaagaacttccccaataacgggatagaaagcctggtggacaagatgagccgctggaagacgtatgcgcaggagcacagggacgatccccgggcgtcgcagggggccacgagccggggcagcgccgcccgtaaacgccggtggcacgacaggcagcggggacagatgtgggacgatgaggactccgccgacgacagcagcgtgttggacttgggtgggagtggtaacccgttcgctcacctgcgcccccgtatcgggcgcatgatgtaagagaaaccgaaaataaatgatactcaccaaggccatggcgaccagcgtgcgttcgtttcttctctgttgttgttgtatctagtatgatgaggcgtgcgtacccggagggtcctcctccctcgtacgagagcgtgatgcagcaggcgatggcggcggcggcgatgcagcccccgctggaggctccttacgtgcccccgcggtacctggcgcctacggaggggcggaacagcattcgttactcggagctggcacccttgtacgataccacccggttgtacctggtggacaacaagtcggcggacatcgcctcgctgaactaccagaacgaccacagcaacttcctgaccaccgtggtgcagaacaatgacttcacccccacggaggccagcacccagaccatcaactttgacgagcgctcgcggtggggcggccagctgaaaaccatcatgcacaccaacatgcccaacgtgaacgagttcatgtacagcaacaagttcaaggcgcgggtgatggtctcccgcaagacccccaatggggtgacagtgacagaggattatgatggtagtcaggatgagctgaagtatgaatgggtggaatttgagctgcccgaaggcaacttctcggtgaccatgaccatcgacctgatgaacaacgccatcatcgacaattacttggcggtggggcggcagaacggggtgctggagagcgacatcggcgtgaagttcgacactaggaacttcaggctgggctgggaccccgtgaccgagctggtcatgcccggggtgtacaccaacgaggctttccatcccgatattgtcttgctgcccggctgcggggtggacttcaccgagagccgcctcagcaacctgctgggcattcgcaagaggcagcccttccaggaaggcttccagatcatgtacgaggatctggaggggggcaacatccccgcgctcctggatgtcgacgcctatgagaaaagcaaggaggatgcagcagctgaagcaactgcagccgtagctaccgcctctaccgaggtcaggggcgataattttgcaagcgccgcagcagtggcagcggccgaggcggctgaaaccgaaagtaagatagtcattcagccggtggagaaggatagcaagaacaggagctacaacgtactaccggacaagataaacaccgcctaccgcagctggtacctagcctacaactatggcgaccccgagaagggcgtgcgctcctggacgctgctcaccacctcggacgtcacctgcggcgtggagcaagtctactggtcgctgcccgacatgatgcaagacccggtcaccttccgctccacgcgtcaagttagcaactacccggtggtgggcgccgagctcctgcccgtctactccaagagcttcttcaacgagcaggccgtctactcgcagcagctgcgcgccttcacctcgcttacgcacgtcttcaaccgcttccccgagaaccagatcctcgtccgcccgcccgcgcccaccattaccaccgtcagtgaaaacgttcctgctctcacagatcacgggaccctgccgctgcgcagcagtatccggggagtccagcgcgtgaccgttactgacgccagacgccgcacctgcccctacgtctacaaggccctgggcatagtcgcgccgcgcgtcctctcgagccgcaccttctaaatgtccattctcatctcgcccagtaataacaccggttggggcctgcgcgcgcccagcaagatgtacggaggcgctcgccaacgctccacgcaacaccccgtgcgcgtgcgcgggcacttccgcgctccctggggcgccctcaagggccgcgtgcggtcgcgcaccaccgtcgacgacgtgatcgaccaggtggtggccgacgcgcgcaactacacccccgccgccgcgcccgtctccaccgtggacgccgtcatcgacagcgtggtggccgacgcgcgccggtacgcccgcgccaagagccggcggcggcgcatcgcccggcggcaccggagcacccccgccatgcgcgcggcgcgagccttgctgcgcagggccaggcgcacgggacgcagggccatgctcagggcggccagacgcgcggcttcaggcgccagcgccggcaggacccggagacgcgcggccacggcggcggcagcggccatcgccagcatgtcccgcccgcggcgagggaacgtgtactgggtgcgcgacgccgccaccggtgtgcgcgtgcccgtgcgcacccgcccccctcgcacttgaagatgttcacttcgcgatgttgatgtgtcccagcggcgaggaggatgtccaagcgcaaattcaaggaagagatgctccaggtcatcgcgcctgagatctacggccctgcggtggtgaaggaggaaagaaagccccgcaaaatcaagcgggtcaaaaaggacaaaaaggaagaagaaagtgatgtggacggattggtggagtttgtgcgcgagttcgccccccggcggcgcgtgcagtggcgcgggcggaaggtgcaaccggtgctgagacccggcaccaccgtggtcttcacgcccggcgagcgctccggcaccgcttccaagcgctcctacgacgaggtgtacggggatgatgatattctggagcaggcggccgagcgcctgggcgagtttgcttacggcaagcgcagccgttccgcaccgaaggaagaggcggtgtccatcccgctggaccacggcaaccccacgccgagcctcaagcccgtgaccttgcagcaggtgctgccgaccgcggcgccgcgccgggggttcaagcgcgagggcgaggatctgtaccccaccatgcagctgatggtgcccaagcgccagaagctggaagacgtgctggagaccatgaaggtggacccggacgtgcagcccgaggtcaaggtgcggcccatcaagcaggtggccccgggcctgggcgtgcagaccgtggacatcaagattcccacggagcccatggaaacgcagaccgagcccatgatcaagcccagcaccagcaccatggaggtgcagacggatccctggatgccatcggctcctagtcgaagaccccggcgcaagtacggcgcggccagcctgctgatgcccaactacgcgctgcatccttccatcatccccacgccgggctaccgcggcacgcgcttctaccgcggtcataccagcagccgccgccgcaagaccaccactcgccgccgccgtcgccgcaccgccgctgcaaccacccctgccgccctggtgcggagagtgtaccgccgcggccgcgcacctctgaccctgccgcgcgcgcgctaccacccgagcatcgccatttaaactttcgcctgctttgcagatcaatggccctcacatgccgccttcgcgttcccattacgggctaccgaggaagaaaaccgcgccgtagaaggctggcggggaacgggatgcgtcgccaccaccaccggcggcggcgcgccatcagcaagcggttggggggaggcttcctgcccgcgctgatccccatcatcgccgcggcgatcggggcgatccccggcattgcttccgtggcggtgcaggcctctcagcgccactgagacacacttggaaacatcttgtaataaaccaatggactctgacgctcctggtcctgtgatgtgttttcgtagacagatggaagacatcaatttttcgtccctggctccgcgacacggcacgcggccgttcatgggcacctggagcgacatcggcaccagccaactgaacgggggcgccttcaattggagcagtctctggagcgggcttaagaatttcgggtccacgcttaaaacctatggcagcaaggcgtggaacagcaccacagggcaggcgctgagggataagctgaaagagcagaacttccagcagaaggtggtcgatgggctcgcctcgggcatcaacggggtggtggacctggccaaccaggccgtgcagcggcagatcaacagccgcctggacccggtgccgcccgccggctccgtggagatgccgcaggtggaggaggagctgcctcccctggacaagcggggcgagaagcgaccccgccccgatgcggaggagacgctgctgacgcacacggacgagccgcccccgtacgaggaggcggtgaaactgggtctgcccaccacgcggcccatcgcgcccctggccaccggggtgctgaaacccgaaaagcccgcgaccctggacttgcctcctccccagccttcccgcccctctacagtggctaagcccctgccgccggtggccgtggcccgcgcgcgacccgggggcaccgcccgccctcatgcgaactggcagagcactctgaacagcatcgtgggtctgggagtgcagagtgtgaagcgccgccgctgctattaaacctaccgtagcgcttaacttgcttgtctgtgtgtgtatgtattatgtcgccgccgccgctgtccaccagaaggaggagtgaagaggcgcgtcgccgagttgcaagatggccaccccatcgatgctgccccagtgggcgtacatgcacatcgccggacaggacgcttcggagtacctgagtccgggtctggtgcagtttgcccgcgccacagacacctacttcagtctggggaacaagtttaggaaccccacggtggcgcccacgcacgatgtgaccaccgaccgcagccagcggctgacgctgcgcttcgtgcccgtggaccgcgaggacaacacctactcgtacaaagtgcgctacacgctggccgtgggcgacaaccgcgtgctggacatggccagcacctactttgacatccgcggcgtgctggatcggggccctagcttcaaaccctactccggcaccgcctacaacagtctggcccccaagggagcacccaacacttgtcagtggacatataaagccgatggtgaaactgccacagaaaaaacctatacatatggaaatgcacccgtgcagggcattaacatcacaaaagatggtattcaacttggaactgacaccgatgatcagccaatctacgcagataaaacctatcagcctgaacctcaagtgggtgatgctgaatggcatgacatcactggtactgatgaaaagtatggaggcagagctcttaagcctgataccaaaatgaagccttgttatggttcttttgccaagcctactaataaagaaggaggtcaggcaaatgtgaaaacaggaacaggcactactaaagaatatgacatagacatggctttctttgacaacagaagtgcggctgctgctggcctagctccagaaattgttttgtatactgaaaatgtggatttggaaactccagatacccatattgtatacaaagcaggcacagatgacagcagctcttctattaatttgggtcagcaagccatgcccaacagacctaactacattggtttcagagacaactttatcgggctcatgtactacaacagcactggcaatatgggggtgctggccggtcaggcttctcagctgaatgctgtggttgacttgcaagacagaaacaccgagctgtcctaccagctcttgcttgactctctgggtgacagaacccggtatttcagtatgtggaatcaggcggtggacagctatgatcctgatgtgcgcattattgaaaatcatggtgtggaggatgaacttcccaactattgtttccctctggatgctgttggcagaacagatacttatcagggaattaaggctaatggaactgatcaaaccacatggaccaaagatgacagtgtcaatgatgctaatgagataggcaagggtaatccattcgccatggaaatcaacatccaagccaacctgtggaggaacttcctctacgccaacgtggccctgtacctgcccgactcttacaagtacacgccggccaatgttaccctgcccaccaacaccaacacctacgattacatgaacggccgggtggtggcgccctcgctggtggactcctacatcaacatcggggcgcgctggtcgctggatcccatggacaacgtgaaccccttcaaccaccaccgcaatgcggggctgcgctaccgctccatgctcctgggcaacgggcgctacgtgcccttccacatccaggtgccccagaaatttttcgccatcaagagcctcctgctcctgcccgggtcctacacctacgagtggaacttccgcaaggacgtcaacatgatcctgcagagctccctcggcaacgacctgcgcacggacggggcctccatctccttcaccagcatcaacctctacgccaccttcttccccatggcgcacaacacggcctccacgctcgaggccatgctgcgcaacgacaccaacgaccagtccttcaacgactacctctcggcggccaacatgctctaccccatcccggccaacgccaccaacgtgcccatctccatcccctcgcgcaactgggccgccttccgcggctggtccttcacgcgtctcaagaccaaggagacgccctcgctgggctccgggttcgacccctacttcgtctactcgggctccatcccctacctcgacggcaccttctacctcaaccacaccttcaagaaggtctccatcaccttcgactcctccgtcagctggcccggcaacgaccggctcctgacgcccaacgagttcgaaatcaagcgcaccgtcgacggcgagggctacaacgtggcccagtgcaacatgaccaaggactggttcctggtccagatgctggcccactacaacatcggctaccagggcttctacgtgcccgagggctacaaggaccgcatgtactccttcttccgcaacttccagcccatgagccgccaggtggtggacgaggtcaactacaaggactaccaggccgtcaccctggcctaccagcacaacaactcgggcttcgtcggctacctcgcgcccaccatgcgccagggccagccctaccccgccaactacccctacccgctcatcggcaagagcgccgtcaccagcgtcacccagaaaaagttcctctgcgacagggtcatgtggcgcatccccttctccagcaacttcatgtccatgggcgcgctcaccgacctcggccagaacatgctctatgccaactccgcccacgcgctagacatgaatttcgaagtcgaccccatggatgagtccacccttctctatgttgtcttcgaagtcttcgacgtcgtccgagtgcaccagccccaccgcggcgtcatcgaggccgtctacctgcgcacccccttctcggccggtaacgccaccacctaagctcttgcttcttgcaagccatggccgcgggctccggcgagcaggagctcagggccatcatccgcgacctgggctgcgggccctacttcctgggcaccttcgataagcgcttcccgggattcatggccccgcacaagctggcctgcgccatcgtcaacacggccggccgcgagaccgggggcgagcactggctggccttcgcctggaacccgcgctcgaacacctgctacctcttcgaccccttcgggttctcggacgagcgcctcaagcagatctaccagttcgagtacgagggcctgctgcgccgcagcgccctggccaccgaggaccgctgcgtcaccctggaaaagtccacccagaccgtgcagggtccgcgctcggccgcctgcgggctcttctgctgcatgttcctgcacgccttcgtgcactggcccgaccgccccatggacaagaaccccaccatgaacttgctgacgggggtgcccaacggcatgctccagtcgccccaggtggaacccaccctgcgccgcaaccaggaggcgctctaccgcttcctcaactcccactccgcctactttcgctcccaccgcgcgcgcatcgagaaggccaccgccttcgaccgcatgaatcaagacatgtaaaccgtgtgtgtatgttaaatgtctttaataaacagcactttcatgttacacatgcatctgagatgatttatttagaaatcgaaagggttctgccgggtctcggcatggcccgcgggcagggacacgttgcggaactggtacttggccagccacttgaactcggggatcagcagtttgggcagcggggtgtcggggaaggagtcggtccacagcttccgcgtcagttgcagggcgcccagcaggtcgggcgcggagatcttgaaatcgcagttgggacccgcgttctgcgcgcgggagttgcggtacacggggttgcagcactggaacaccatcagggccgggtgcttcacgctcgccagcaccgtcgcgtcggtgatgctctccacgtcgaggtcctcggcgttggccatcccgaagggggtcatcttgcaggtctgccttcccatggtgggcacgcacccgggcttgtggttgcaatcgcagtgcagggggatcagcatcatctgggcctggtcggcgttcatccccgggtacatggccttcatgaaagcctccaattgcctgaacgcctgctgggccttggctccctcggtgaagaagaccccgcaggacttgctagagaactggttggtggcgcacccggcgtcgtgcacgcagcagcgcgcgtcgttgttggccagctgcaccacgctgcgcccccagcggttctgggtgatcttggcccggtcggggttctccttcagcgcgcgctgcccgttctcgctcgccacatccatctcgatcatgtgctccttctggatcatggtggtcccgtgcaggcaccgcagcttgccctcggcctcggtgcacccgtgcagccacagcgcgcacccggtgcactcccagttcttgtgggcgatctgggaatgcgcgtgcacgaagccctgcaggaagcggcccatcatggtggtcagggtcttgttgctagtgaaggtcagcggaatgccgcggtgctcctcgttgatgtacaggtggcagatgcggcggtacacctcgccctgctcgggcatcagctggaagttggctttcaggtcggtctccacgcggtagcggtccatcagcatagtcatgatttccatacccttctcccaggccgagacgatgggcaggctcatagggttcttcaccatcatcttagcgctagcagccgcggccagggggtcgctctcgtccagggtctcaaagctccgcttgccgtccttctcggtgatccgcaccggggggtagctgaagcccacggccgccagctcctcctcggcctgtctttcgtcctcgctgtcctggctgacgtcctgcaggaccacatgcttggtcttgcggggtttcttcttgggcggcagcggcggcggagatgttggagatggcgagggggagcgcgagttctcgctcaccactactatctcttcctcttcttggtccgaggccacgcggcggtaggtatgtctcttcgggggcagaggcggaggcgacgggctctcgccgccgcgacttggcggatggctggcagagccccttccgcgttcgggggtgcgctcccggcggcgctctgactgacttcctccgcggccggccattgtgttctcctagggaggaacaacaagcatggagactcagccatcgccaacctcgccatctgcccccaccgccgacgagaagcagcagcagcagaatgaaagcttaaccgccccgccgcccagccccgccacctccgacgcggccgtcccagacatgcaagagatggaggaatccatcgagattgacctgggctatgtgacgcccgcggagcacgaggaggagctggcagtgcgcttttcacaagaagagatacaccaagaacagccagagcaggaagcagagaatgagcagagtcaggctgggctcgagcatgacggcgactacctccacctgagcgggggggaggacgcgctcatcaagcatctggcccggcaggccaccatcgtcaaggatgcgctgctcgaccgcaccgaggtgcccctcagcgtggaggagctcagccgcgcctacgagttgaacctcttctcgccgcgcgtgccccccaagcgccagcccaatggcacctgcgagcccaacccgcgcctcaacttctacccggtcttcgcggtgcccgaggccctggccacctaccacatctttttcaagaaccaaaagatccccgtctcctgccgcgccaaccgcacccgcgccgacgcccttttcaacctgggtcccggcgcccgcctacctgatatcgcctccttggaagaggttcccaagatcttcgagggtctgggcagcgacgagactcgggccgcgaacgctctgcaaggagaaggaggagagcatgagcaccacagcgccctggtcgagttggaaggcgacaacgcgcggctggcggtgctcaaacgcacggtcgagctgacccatttcgcctacccggctctgaacctgccccccaaagtcatgagcgcggtcatggaccaggtgctcatcaagcgcgcgtcgcccatctccgaggacgagggcatgcaagactccgaggagggcaagcccgtggtcagcgacgagcagctggcccggtggctgggtcctaatgctagtccccagagtttggaagagcggcgcaaactcatgatggccgtggtcctggtgaccgtggagctggagtgcctgcgccgcttcttcgccgacgcggagaccctgcgcaaggtcgaggagaacctgcactacctcttcaggcacgggttcgtgcgccaggcctgcaagatctccaacgtggagctgaccaacctggtctcctacatgggcatcttgcacgagaaccgcctggggcagaacgtgctgcacaccaccctgcgcggggaggcccggcgcgactacatccgcgactgcgtctacctctacctctgccacacctggcagacgggcatgggcgtgtggcagcagtgtctggaggagcagaacctgaaagagctctgcaagctcctgcagaagaacctcaagggtctgtggaccgggttcgacgagcgcaccaccgcctcggacctggccgacctcattttccccgagcgcctcaggctgacgctgcgcaacggcctgcccgactttatgagccaaagcatgttgcaaaactttcgctctttcatcctcgaacgctccggaatcctgcccgccacctgctccgcgctgccctcggacttcgtgccgctgaccttccgcgagtgccccccgccgctgtggagccactgctacctgctgcgcctggccaactacctggcctaccactcggacgtgatcgaggacgtcagcggcgagggcctgctcgagtgccactgccgctgcaacctctgcacgccgcaccgctccctggcctgcaacccccagctgctgagcgagacccagatcatcggcaccttcgagttgcaagggcccagcgaaggcgagggttcagccgccaaggggggtctgaaactcaccccggggctgtggacctcggcctacttgcgcaagttcgtgcccgaggactaccatcccttcgagatcaggttctacgaggaccaatcccatccgcccaaggccgagctgtcggcctgcgtcatcacccagggggcgatcctggcccaattgcaagccatccagaaatcccgccaagaattcttgctgaaaaagggccgcggggtctacctcgacccccagaccggtgaggagctcaaccccggcttcccccaggatgccccgaggaaacaagaagctgaaagtggagctgccgcccgtggaggatttggaggaagactgggagaacagcagtcaggcagaggaggaggagatggaggaagactgggacagcactcaggcagaggaggacagcctgcaagacagtctggaggaagacgaggaggaggcagaggaggaggtggaagaagcagccgccgccagaccgtcgtcctcggcgggggagaaagcaagcagcacggataccatctccgctccgggtcggggtcccgctcgaccacacagtagatgggacgagaccggacgattcccgaaccccaccacccagaccggtaagaaggagcggcagggatacaagtcctggcgggggcacaaaaacgccatcgtctcctgcttgcaggcctgcgggggcaacatctccttcacccggcgctacctgctcttccaccgcggggtgaactttccccgcaacatcttgcattactaccgtcacctccacagcccctactacttccaagaagaggcagcagcagcagaaaaagaccagcagaaaaccagcagctagaaaatccacagcggcggcagcaggtggactgaggatcgcggcgaacgagccggcgcaaacccgggagctgaggaaccggatctttcccaccctctatgccatcttccagcagagtcgggggcaggagcaggaactgaaagtcaagaaccgttctctgcgctcgctcacccgcagttgtctgtatcacaagagcgaagaccaacttcagcgcactctcgaggacgccgaggctctcttcaacaagtactgcgcgctcactcttaaagagtagcccgcgcccgcccagtcgcagaaaaaggcgggaattacgtcacctgtgcccttcgccctagccgcctccacccatcatcatgagcaaagagattcccacgccttacatgtggagctaccagccccagatgggcctggccgccggtgccgcccaggactactccacccgcatgaattggctcagcgccgggcccgcgatgatctcacgggtgaatgacatccgcgcccaccgaaaccagatactcctagaacagtcagcgctcaccgccacgccccgcaatcacctcaatccgcgtaattggcccgccgccctggtgtaccaggaaattccccagcccacgaccgtactacttccgcgagacgcccaggccgaagtccagctgactaactcaggtgtccagctggcgggcggcgccaccctgtgtcgtcaccgccccgctcagggtataaagcggctggtgatccggggcagaggcacacagctcaacgacgaggtggtgagctcttcgctgggtctgcgacctgacggagtcttccaactcgccggatcggggagatcttccttcacgcctcgtcaggccgtcctgactttggagagttcgtcctcgcagccccgctcgggtggcatcggcactctccagttcgtggaggagttcactccctcggtctacttcaaccccttctccggctcccccggccactacccggacgagttcatcccgaacttcgacgccatcagcgagtcggtggacggctacgattgaaactaatcacccccttatccagtgaaataaagatcatattgatgatgattttacagaaataaaaaataatcatttgatttgaaataaagatacaatcatattgatgatttgagtttaacaaaaaaataaagaatcacttacttgaaatctgataccaggtctctgtccatgttttctgccaacaccacttcactcccctcttcccagctctggtactgcaggccccggcgggctgcaaacttcctccacacgctgaaggggatgtcaaattcctcctgtccctcaatcttcattttatcttctatcagatgtccaaaaagcgcgtccgggtggatgatgacttcgaccccgtctacccctacgatgcagacaacgcaccgaccgtgcccttcatcaacccccccttcgtctcttcagatggattccaagagaagcccctgggggtgttgtccctgcgactggccgaccccgtcaccaccaagaacggggaaatcaccctcaagctgggagagggggtggacctcgattcctcgggaaaactcatctccaacacggccaccaaggccgccgcccctctcagtttttccaacaacaccatttcccttaacatggatcaccccttttacactaaagatggaaaattatccttacaagtttctccaccattaaatatactgagaacaagcattctaaacacactagctttaggttttggatcaggtttaggactccgtggctctgccttggcagtacagttagtctctccacttacatttgatactgatggaaacataaagcttaccttagacagaggtttgcatgttacaacaggagatgcaattgaaagcaacataagctgggctaaaggtttaaaatttgaagatggagccatagcaaccaacattggaaatgggttagagtttggaagcagtagtacagaaacaggtgttgatgatgcttacccaatccaagttaaacttggatctggccttagctttgacagtacaggagccataatggctggtaacaaagaagacgataaactcactttgtggacaacacctgatccatcaccaaactgtcaaatactcgcagaaaatgatgcaaaactaacactttgcttgactaaatgtggtagtcaaatactggccactgtgtcagtcttagttgtaggaagtggaaacctaaaccccattactggcaccgtaagcagtgctcaggtgtttctacgttttgatgcaaacggtgttcttttaacagaacattctacactaaaaaaatactgggggtataggcagggagatagcatagatggcactccatataccaatgctgtaggattcatgcccaatttaaaagcttatccaaagtcacaaagttctactactaaaaataatatagtagggcaagtatacatgaatggagatgtttcaaaacctatgcttctcactataaccctcaatggtactgatgacagcaacagtacatattcaatgtcattttcatacacctggactaatggaagctatgttggagcaacatttggggctaactcttataccttctcatacatcgcccaagaatgaacactgtatcccaccctgcatgccaacccttcccaccccactctgtggaacaaactctgaaacacaaaataaaataaagttcaagtgttttattgattcaacagttttacaggattcgagcagttatttttcctccaccctcccaggacatggaatacaccaccctctccccccgcacagccttgaacatctgaatgccattggtgatggacatgcttttggtctccacgttccacacagtttcagagcgagccagtctcgggtcggtcagggagatgaaaccctccgggcactcccgcatctgcacctcacagctcaacagctgaggattgtcctcggtggtcgggatcacggttatctggaagaagcagaagagcggcggtgggaatcatagtccgcgaacgggatcggccggtggtgtcgcatcaggccccgcagcagtcgctgccgccgccgctccgtcaagctgctgctcagggggtccgggtccagggactccctcagcatgatgcccacggccctcagcatcagtcgtctggtgcggcgggcgcagcagcgcatgcggatctcgctcaggtcgctgcagtacgtgcaacacagaaccaccaggttgttcaacagtccatagttcaacacgctccagccgaaactcatcgcgggaaggatgctacccacgtggccgtcgtaccagatcctcaggtaaatcaagtggtgccccctccagaacacgctgcccacgtacatgatctccttgggcatgtggcggttcaccacctcccggtaccacatcaccctctggttgaacatgcagccccggatgatcctgcggaaccacagggccagcaccgccccgcccgccatgcagcgaagagaccccgggtcccggcaatggcaatggaggacccaccgctcgtacccgtggatcatctgggagctgaacaagtctatgttggcacagcacaggcatatgctcatgcatctcttcagcactctcaactcctcgggggtcaaaaccatatcccagggcacggggaactcttgcaggacagcgaaccccgcagaacagggcaatcctcgcacagaacttacattgtgcatggacagggtatcgcaatcaggcagcaccgggtgatcctccaccagagaagcgcgggtctcggtctcctcacagcgtggtaagggggccggccgatacgggtgatggcgggacgcggctgatcgtgttcgcgaccgtgtcatgatgcagttgctttcggacattttcgtacttgctgtagcagaacctggtccgggcgctgcacaccgatcgccggcggcggtctcggcgcttggaacgctcggtgttgaaattgtaaaacagccactctctcagaccgtgcagcagatctagggcctcaggagtgatgaagatcccatcatgcctgatggctctgatcacatcgaccaccgtggaatgggccagacccagccagatgatgcaattttgttgggtttcggtgacggcgggggagggaagaacaggaagaaccatgattaacttttaatccaaacggtctcggagtacttcaaaatgaagatcgcggagatggcacctctcgcccccgctgtgttggtggaaaataacagccaggtcaaaggtgatacggttctcgagatgttccacggtggcttccagcaaagcctccacgcgcacatccagaaacaagacaatagcgaaagcgggagggttctctaattcctcaatcatcatgttacactcctgcaccatccccagataattttcatttttccagccttgaatgattcgaactagttcctgaggtaaatccaagccagccatgataaagagctcgcgcagagcgccctccaccggcattcttaagcacaccctcataattccaagatattctgctcctggttcacctgcagcagattgacaagcggaatatcaaaatctctgccgcgatccctgagctcctccctcagcaataactgtaagtactctttcatatcctctccgaaatttttagccataggaccaccaggaataagattagggcaagccacagtacagataaaccgaagtcctccccagtgagcattgccaaatgcaagactgctataagcatgctggctagacccggtgatatcttccagataactggacagaaaatcgcccaggcaatttttaagaaaatcaacaaaagaaaaatcctccaggtggacgtttagagcctcgggaacaacgatgaagtaaatgcaagcggtgcgttccagcatggttagttagctgatctgtagaaaaaacaaaaatgaacattaaaccatgctagcctggcgaacaggtgggtaaatcgttctctccagcaccaggcaggccacggggtctccggcgcgaccctcgtaaaaattgtcgctatgattgaaaaccatcacagagagacgttcccggtggccggcgtgaatgattcgacaagatgaatacacccccggaacattggcgtccgcgagtgaaaaaaagcgcccgaggaagcaataaggcactacaatgctcagtctcaagtccagcaaagcgatgccatgcggatgaagcacaaaattctcaggtgcgtacaaaatgtaattactcccctcctgcacaggcagcaaagcccccgatccctccaggtacacatacaaagcctcagcgtccatagcttaccgagcagcagcacacaacaggcgcaagagtcagagaaaggctgagctctaacctgtccacccgctctctgctcaatatatagcccagatctacactgacgtaaaggccaaagtctaaaaatacccgccaaataatcacacacgcccagcacacgcccagaaaccggtgacacactcaaaaaaatacgcgcacttcctcaaacgcccaaaactgccgtcatttccgggttcccacgctacgtcatcaaaacacgactttcaaattccgtcgaccgttaaaaacgtcacccgccccgcccctaacggtcgcccgtctctcagccaatcagcgccccgcatccccaaattcaaacacctcatttgcatattaacgcgcacaaaaagtttgagg

SEQ ID NO: 3 - DNA, 11447 bp, Venezuelan equine encephalitis virus
  source 1..11447: mol_type = other DNA
atgggcggcgcatgagagaagcccagaccaattacctacccaaaatggagaaagttcacgttgacatcgaggaagacagcccattcctcagagctttgcagcggagcttcccgcagtttgaggtagaagccaagcaggtcactgataatgaccatgctaatgccagagcgttttcgcatctggcttcaaaactgatcgaaacggaggtggacccatccgacacgatccttgacattggaagtgcgcccgcccgcagaatgtattctaagcacaagtatcattgtatctgtccgatgagatgtgcggaagatccggacagattgtataagtatgcaactaagctgaagaaaaactgtaaggaaataactgataaggaattggacaagaaaatgaaggagctcgccgccgtcatgagcgaccctgacctggaaactgagactatgtgcctccacgacgacgagtcgtgtcgctacgaagggcaagtcgctgtttaccaggatgtatacgcggttgacggaccgacaagtctctatcaccaagccaataagggagttagagtcgcctactggataggctttgacaccaccccttttatgtttaagaacttggctggagcatatccatcatactctaccaactgggccgacgaaaccgtgttaacggctcgtaacataggcctatgcagctctgacgttatggagcggtcacgtagagggatgtccattcttagaaagaagtatttgaaaccatccaacaatgttctattctctgttggctcgaccatctaccacgagaagagggacttactgaggagctggcacctgccgtctgtatttcacttacgtggcaagcaaaattacacatgtcggtgtgagactatagttagttgcgacgggtacgtcgttaaaagaatagctatcagtccaggcctgtatgggaagccttcaggctatgctgctacgatgcaccgcgagggattcttgtgctgcaaagtgacagacacattgaacggggagagggtctcttttcccgtgtgcacgtatgtgccagctacattgtgtgaccaaatgactggcatactggcaacagatgtcagtgcggacgacgcgcaaaaactgctggttgggctcaaccagcgtatagtcgtcaacggtcgcacccagagaaacaccaataccatgaaaaattaccttttgcccgtagtggcccaggcatttgctaggtgggcaaaggaatataaggaagatcaagaagatgaaaggccactaggactacgagatagacagttagtcatggggtgttgttgggcttttagaaggcacaagataacatctatttataagcgcccggatacccaaaccatcatcaaagtgaacagcgatttccactcattcgtgctgcccaggataggcagtaacacattggagatcgggctgagaacaagaatcaggaaaatgttagaggagcacaaggagccgtcacctctcattaccgccgaggacgtacaagaagctaagtgcgcagccgatgaggctaaggaggtgcgtgaagccgaggagttgcgcgcagctctaccacctttggcagctgatgttgaggagcccactctggaagccgatgtcgacttgatgttacaagaggctggggccggctcagtggagacacctcgtggcttgataaaggttaccagctacgctggcgaggacaagatcggctcttacgctgtgctttctccgcaggctgtactcaagagtgaaaaattatcttgcatccaccctctcgctgaacaagtcatagtgataacacactctggccgaaaagggcgttatgccgtggaaccataccatggtaaagtagtggtgccagagggacatgcaatacccgtccaggactttcaagctctgagtgaaagtgccaccattgtgtacaacgaacgtgagttcgtaaacaggtacctgcaccatattgccacacatggaggagcgctgaacactgatgaagaatattacaaaactgtcaagcccagcgagcacgacggcgaatacctgtacgacatcgacaggaaacagtgcgtcaagaaagaactagtcactgggctagggctcacaggcgagctggtggatcctcccttccatgaattcgcctacgagagtctgagaacacgaccagccgctccttaccaagtaccaaccataggggtgtatggcgtgccaggatcaggcaagtctggcatcattaaaagcgcagtcaccaaaaaagatctagtggtgagcgccaagaaagaaaactgtgcagaaattataagggacgtcaagaaaatgaaagggctggacgtcaatgccagaactgtggactcagtgctcttgaatggatgcaaacaccccgtagagaccctgtatattgacgaagcttttgcttgtcatgcaggtactctcagagcgctcatagccattataagacctaaaaaggcagtgctctgcggggatcccaaacagtgcggtttttttaacatgatgtgcctgaaagtgcattttaaccacgagatttgcacacaagtcttccacaaaagcatctctcgccgttgcactaaatctgtgacttcggtcgtctcaaccttgttttacgacaaaaaaatgagaacgacgaatccgaaagagactaagattgtgattgacactaccggcagtaccaaacctaagcaggacgatctcattctcacttgtttcagagggtgggtgaagcagttgcaaatagattacaaaggcaacgaaataatgacggcagctgcctctcaagggctgacccgtaaaggtgtgtatgccgttcggtacaaggtgaatgaaaatcctctgtacgcacccacctcagaacatgtgaacgtcctactgacccgcacggaggaccgcatcgtgtggaaaacactagccggcgacccatggataaaaacactgactgccaagtaccctgggaatttcactgccacgatagaggagtggcaagcagagcatgatgccatcatgaggcacatcttggagagaccggaccctaccgacgtcttccagaataaggcaaacgtgtgttgggccaaggctttagtgccggtgctgaagaccgctggcatagacatgaccactgaacaatggaacactgtggattattttgaaacggacaaagctcactcagcagagatagtattgaaccaactatgcgtgaggttctttggactcgatctggactccggtctattttctgcacccactgttccgttatccattaggaataatcactgggataactccccgtcgcctaacatgtacgggctgaataaagaagtggtccgtcagctctctcgcaggtacccacaactgcctcgggcagttgccactggaagagtctatgacatgaacactggtacactgcgcaattatgatccgcgcataaacctagtacctgtaaacagaagactgcctcatgctttagtcctccaccataatgaacacccacagagtgacttttcttcattcgtcagcaaattgaagggcagaactgtcctggtggtcggggaaaagttgtccgtcccaggcaaaatggttgactggttgtcagaccggcctgaggctaccttcagagctcggctggatttaggcatcccaggtgatgtgcccaaatatgacataatatttgttaatgtgaggaccccatataaataccatcactatcagcagtgtgaagaccatgccattaagcttagcatgttgaccaagaaagcttgtctgcatctgaatcccggcggaacctgtgtcagcataggttatggttacgctgacagggccagcgaaagcatcattggtgctatagcgcggcagttcaagttttcccgggtatgcaaaccgaaatcctcacttgaagagacggaagttctgtttgtattcattgggtacgatcgcaaggcccgtacgcacaatccttacaagctttcatcaaccttgaccaacatttatacaggttccagactccacgaagccggatgtgcaccctcatatcatgtggtgcgaggggatattgccacggccaccgaaggagtgattataaatgctgctaacagcaaaggacaacctggcggaggggtgtgcggagcgctgtataagaaattcccggaaagcttcgatttacagccgatcgaagtaggaaaagcgcgactggtcaaaggtgcagctaaacatatcattcatgccgtaggaccaaacttcaacaaagtttcggaggttgaaggtgacaaacagttggcagaggcttatgagtccatcgctaagattgtcaacgataacaattacaagtcagtagcgattccactgttgtccaccggcatcttttccgggaacaaagatcgactaacccaatcattgaaccatttgctgacagctttagacaccactgatgcagatgtagccatatactgcagggacaagaaatgggaaatgactctcaaggaagcagtggctaggagagaagcagtggaggagatatgcatatccgacgactcttcagtgacagaacctgatgcagagctggtgagggtgcatccgaagagttctttggctggaaggaagggctacagcacaagcgatggcaaaactttctcatatttggaagggaccaagtttcaccaggcggccaaggatatagcagaaattaatgccatgtggcccgttgcaacggaggccaatgagcaggtatgcatgtatatcctcggagaaagcatgagcagtattaggtcgaaatgccccgtcgaagagtcggaagcctccacaccacctagcacgctgccttgcttgtgcatccatgccatgactccagaaagagtacagcgcctaaaagcctcacgtccagaacaaattactgtgtgctcatcctttccattgccgaagtatagaatcactggtgtgcagaagatccaatgctcccagcctatattgttctcaccgaaagtgcctgcgtatattcatccaaggaagtatctcgtggaaacaccaccggtagacgagactccggagccatcggcagagaaccaatccacagaggggacacctgaacaaccaccacttataaccgaggatgagaccaggactagaacgcctgagccgatcatcatcgaagaggaagaagaggatagcataagtttgctgtcagatggcccgacccaccaggtgctgcaagtcgaggcagacattcacgggccgccctctgtatctagctcatcctggtccattcctcatgcatccgactttgatgtggacagtttatccatacttgacaccctggagggagctagcgtgaccagcggggcaacgtcagccgagactaactcttacttcgcaaagagtatggagtttctggcgcgaccggtgcctgcgcctcgaacagtattcaggaaccctccacatcccgctccgcgcacaagaacaccgtcacttgcacccagcagggcctgctcgagaaccagcctagtttccaccccgccaggcgtgaatagggtgatcactagagaggagctcgaggcgcttaccccgtcacgcactcctagcaggtcggtctcgagaaccagcctggtctccaacccgccaggcgtaaatagggtgattacaagagaggagtttgaggcgttcgtagcacaacaacaatgacggtttgatgcgggtgcatacatcttttcctccgacaccggtcaagggcatttacaacaaaaatcagtaaggcaaacggtgctatccgaagtggtgttggagaggaccgaattggagatttcgtatgccccgcgcctcgaccaagaaaaagaagaattactacgcaagaaattacagttaaatcccacacctgctaacagaagcagataccagtccaggaaggtggagaacatgaaagccataacagctagacgtattctgcaaggcctagggcattatttgaaggcagaaggaaaagtggagtgctaccgaaccctgcatcctgttcctttgtattcatctagtgtgaaccgtgccttttcaagccccaaggtcgcagtggaagcctgtaacgccatgttgaaagagaactttccgactgtggcttcttactgtattattccagagtacgatgcctatttggacatggttgacggagcttcatgctgcttagacactgccagtttttgccctgcaaagctgcgcagctttccaaagaaacactcctatttggaacccacaatacgatcggcagtgccttcagcgatccagaacacgctccagaacgtcctggcagctgccacaaaaagaaattgcaatgtcacgcaaatgagagaattgcccgtattggattcggcggcctttaatgtggaatgcttcaagaaatatgcgtgtaataatgaatattgggaaacgtttaaagaaaaccccatcaggcttactgaagaaaacgtggtaaattacattaccaaattaaaaggaccaaaagctgctgctctttttgcgaagacacataatttgaatatgttgcaggacataccaatggacaggtttgtaatggacttaaagagagacgtgaaagtgactccaggaacaaaacatactgaagaacggcccaaggtacaggtgatccaggctgccgatccgctagcaacagcgtatctgtgcggaatccaccgagagctggttaggagattaaatgcggtcctgcttccgaacattcatacactgtttgatatgtcggctgaagactttgacgctattatagccgagcacttccagcctggggattgtgttctggaaactgacatcgcgtcgtttgataaaagtgaggacgacgccatggctctgaccgcgttaatgattctggaagacttaggtgtggacgcagagctgttgacgctgattgaggcggctttcggcgaaatttcatcaatacatttgcccactaaaactaaatttaaattcggagccatgatgaaatctggaatgttcctcacactgtttgtgaacacagtcattaacattgtaatcgcaagcagagtgttgagagaacggctaaccggatcaccatgtgcagcattcattggagatgacaatatcgtgaaaggagtcaaatcggacaaattaatggcagacaggtgcgccacctggttgaatatggaagtcaagattatagatgctgtggtgggcgagaaagcgccttatttctgtggagggtttattttgtgtgactccgtgaccggcacagcgtgccgtgtggcagaccccctaaaaaggctgtttaagcttggcaaacctctggcagcagacgatgaacatgatgatgacaggagaagggcattgcatgaagagtcaacacgctggaaccgagtgggtattctttcagagctgtgcaaggcagtagaatcaaggtatgaaaccgtaggaacttccatcatagttatggccatgactactctagctagcagtgttaaatcattcagctacctgagaggggcccctataactctctacggctaacctgaatggactacgacatagtctagtccgccaagatgttcccgttccagccaatgtatccgatgcagccaatgccctatcgcaacccgttcgcggccccgcgcaggccctggttccccagaaccgacccttttctggcgatgcaggtgcaggaattaacccgctcgatggctaacctgacgttcaagcaacgccgggacgcgccacctgaggggccatccgctaagaaaccgaagaaggaggcctcgcaaaaacagaaagggggaggccaagggaagaagaagaagaaccaagggaagaagaaggctaagacagggccgcctaatccgaaggcacagaatggaaacaagaagaagaccaacaagaaaccaggcaagagacagcgcatggtcatgaaattggaatctgacaagacgttcccaatcatgttggaagggaagataaacggctacgcttgtgtggtcggagggaagttattcaggccgatgcatgtggaaggcaagatcgacaacgacgttctggccgcgcttaagacgaagaaagcatccaaatacgatcttgagtatgcagatgtgccacagaacatgcgggccgatacattcaaatacacccatgagaaaccccaaggctattacagctggcatcatggagcagtccaatatgaaaatgggcgtttcacggtgccgaaaggagttggggccaagggagacagcggacgacccattctggataaccagggacgggtggtcgctattgtgctgggaggtgtgaatgaaggatctaggacagccctttcagtcgtcatgtggaacgagaagggagttaccgtgaagtatactccggagaactgcgagcaatggtcactagtgaccaccatgtgtctgctcgccaatgtgacgttcccatgtgctcaaccaccaatttgctacgacagaaaaccagcagagactttggccatgctcagcgttaacgttgacaacccgggctacgatgagctgctggaagcagctgttaagtgccccggaaggaaaaggagatccaccgaggagctgtttaaggagtataagctaacgcgcccttacatggccagatgcatcagatgtgcagttgggagctgccatagtccaatagcaatcgaggcagtaaagagcgacgggcacgacggttatgttagacttcagacttcctcgcagtatggcctggattcctccggcaacttaaagggcaggaccatgcggtatgacatgcacgggaccattaaagagataccactacatcaagtgtcactccatacatctcgcccgtgtcacattgtggatgggcacggttatttcctgcttgccaggtgcccggcaggggactccatcaccatggaatttaagaaagattccgtcacacactcctgctcggtgccgtatgaagtgaaatttaatcctgtaggcagagaactctatactcatcccccagaacacggagtagagcaagcgtgccaagtctacgcacatgatgcacagaacagaggagcttatgtcgagatgcacctcccgggctcagaagtggacagcagtttggtttccttgagcggcagttcagtcaccgtgacacctcctgttgggactagcgccctggtggaatgcgagtgtggcggcacaaagatctccgagaccatcaacaagacaaaacagttcagccagtgcacaaagaaggagcagtgcagagcatatcggctgcagaacgataagtgggtgtataattctgacaaactgcccaaagcagcgggagccaccttaaaaggaaaactgcatgtcccattcttgctggcagacggcaaatgcaccgtgcctctagcaccagaacctatgataacctttggtttcagatcagtgtcactgaaactgcaccctaagaatcccacatatctaaccacccgccaacttgctgatgagcctcactacacgcacgagctcatatctgaaccagctgttaggaattttaccgtcaccgaaaaagggtgggagtttgtatggggaaaccacccgccgaaaaggttttgggcacaggaaacagcacccggaaatccacatgggctaccgcacgaggtgataactcattattaccacagataccctatgtccaccatcctgggtttgtcaatttgtgccgccattgcaaccgtttccgttgcagcgtctacctggctgttttgcagatctagagttgcgtgcctaactccttaccggctaacacctaacgctaggataccattttgtctggctgtgctttgctgcgcccgcactgcccgggccgagaccacctgggagtccttggatcacctatggaacaataaccaacagatgttctggattcaattgctgatccctctggccgccttgatcgtagtgactcgcctgctcaggtgcgtgtgctgtgtcgtgccttttttagtcatggccggcgccgcaggcgccggcgcctacgagcacgcgaccacgatgccgagccaagcgggaatctcgtataacactatagtcaacagagcaggctacgcaccactccctatcagcataacaccaacaaagatcaagctgatacctacagtgaacttggagtacgtcacctgccactacaaaacaggaatggattcaccagccatcaaatgctgcggatctcaggaatgcactccaacttacaggcctgatgaacagtgcaaagtcttcacaggggtttacccgttcatgtggggtggtgcatattgcttttgcgacactgagaacacccaagtcagcaaggcctacgtaatgaaatctgacgactgccttgcggatcatgctgaagcatataaagcgcacacagcctcagtgcaggcgttcctcaacatcacagtgggagaacactctattgtgactaccgtgtatgtgaatggagaaactcctgtgaatttcaatggggtcaaattaactgcaggtccgctttccacagcttggacaccctttgatcgcaaaatcgtgcagtatgccggggagatctataattatgattttcctgagtatggggcaggacaaccaggagcatttggagatatacaatccagaacagtctcaagctcagatctgtatgccaataccaacctagtgctgcagagacccaaagcaggagcgatccacgtgccatacactcaggcaccttcgggttttgagcaatggaagaaagataaagctccatcattgaaatttaccgcccctttcggatgcgaaatatatacaaaccccattcgcgccgaaaactgtgctgtagggtcaattccattagcctttgacattcccgacgccttgttcaccagggtgtcagaaacaccgacactttcagcggccgaatgcactcttaacgagtgcgtgtattcttccgactttggtgggatcgccacggtcaagtactcggccagcaagtcaggcaagtgcgcagtccatgtgccatcagggactgctaccctaaaagaagcagcagtcgagctaaccgagcaagggtcggcgactatccatttctcgaccgcaaatatccacccggagttcaggctccaaatatgcacatcatatgttacgtgcaaaggtgattgtcaccccccgaaagaccatattgtgacacaccctcagtatcacgcccaaacatttacagccgcggtgtcaaaaaccgcgtggacgtggttaacatccctgctgggaggatcagccgtaattattataattggcttggtgctggctactattgtggccatgtacgtgctgaccaaccagaaacataattgaatacagcagcaattggcaagctgcttacatagaactcgcggcgattggcatgccgccttaaaatttttattttattttttcttttcttttccgaatcggattttgtttttaatatttc

SEQ ID NO: 4 - DNA, 9577 bp, synthetic construct
  misc_feature 1..9577: note = Description of Artificial Sequence: Synthetic polynucleotide
  source 1..9577: mol_type = other DNA
atgggcggcgcatgagagaagcccagaccaattacctacccaaaatggagaaagttcacgttgacatcgaggaagacagcccattcctcagagctttgcagcggagcttcccgcagtttgaggtagaagccaagcaggtcactgataatgaccatgctaatgccagagcgttttcgcatctggcttcaaaactgatcgaaacggaggtggacccatccgacacgatccttgacattggaagtgcgcccgcccgcagaatgtattctaagcacaagtatcattgtatctgtccgatgagatgtgcggaagatccggacagattgtataagtatgcaactaagctgaagaaaaactgtaaggaaataactgataaggaattggacaagaaaatgaaggagctcgccgccgtcatgagcgaccctgacctggaaactgagactatgtgcctccacgacgacgagtcgtgtcgctacgaagggcaagtcgctgtttaccaggatgtatacgcggttgacggaccgacaagtctctatcaccaagccaataagggagttagagtcgcctactggataggctttgacaccaccccttttatgtttaagaacttggctggagcatatccatcatactctaccaactgggccgacgaaaccgtgttaacggctcgtaacataggcctatgcagctctgacgttatggagcggtcacgtagagggatgtccattcttagaaagaagtatttgaaaccatccaacaatgttctattctctgttggctcgaccatctaccacgagaagagggacttactgaggagctggcacctgccgtctgtatttcacttacgtggcaagcaaaattacacatgtcggtgtgagactatagttagttgcgacgggtacgtcgttaaaagaatagctatcagtccaggcctgtatgggaagccttcaggctatgctgctacgatgcaccgcgagggattcttgtgctgcaaagtgacagacacattgaacggggagagggtctcttttcccgtgtgcacgtatgtgccagctacattgtgtgaccaaatgactggcatactggcaacagatgtcagtgcggacgacgcgcaaaaactgctggttgggctcaaccagcgtatagtcgtcaacggtcgcacccagagaaacaccaataccatgaaaaattaccttttgcccgtagtggcccaggcatttgctaggtgggcaaaggaatataaggaagatcaagaagatgaaaggccactaggactacgagatagacagttagtcatggggtgttgttgggcttttagaaggcacaagataacatctatttataagcgcccggatacccaaaccatcatcaaagtgaacagcgatttccactcattcgtgctgcccaggataggcagtaacacattggagatcgggctgagaacaagaatcaggaaaatgttagaggagcacaaggagccgtcacctctcattaccgccgaggacgtacaagaagctaagtgcgcagccgatgaggctaaggaggtgcgtgaagccgaggagttgcgcgcagctctaccacctttggcagctgatgttgaggagcccactctggaagccgatgtcgacttgatgttacaagaggctggggccggctcagtggagacacctcgtggcttgataaaggttaccagctacgctggcgaggacaagatcggctcttacgctgtgctttctccgcaggctgtactcaagagtgaaaaattatcttgcatccaccctctcgctgaacaagtcatagtgataacacactctggccgaaaagggcgttatgccgtggaaccataccatggtaaagtagtggtgccagagggacatgcaatacccgtccaggactttcaagctctgagtgaaagtgccaccattgtgtacaacgaacgtgagttcgtaaacaggtacctgcaccatattgccacacatggaggagcgctgaacactgatgaagaatattacaaaactgtcaagcccagcgagcacgacggcgaatacctgtacgacatcgacaggaaacagtgcgtcaagaaagaactagtcactgggctagggctcacaggcgagctggtggatcctcccttccatgaattcgcctacgagagtctgagaacacgaccagccgctccttaccaagtaccaaccataggggtgtatggcgtgccaggatcaggcaagtctggcatcattaaaagcgcagtcaccaaaaaagatctagtggtgagcgccaagaaagaaaactgtgcagaaattataagggacgtcaagaaaatgaaagggctggacgtcaatgccagaactgtggactcagtgctcttgaatggatgcaaacaccccgtagagaccctgtatattgacgaagcttttgcttgtcatgcaggtactctcagagcgctcatagccattataagacctaaaaaggcagtgctctgcggggatcccaaacagtgcggtttttttaacatgatgtgcctgaaagtgcattttaaccacgagatttgcacacaagtcttccacaaaagcatctctcgccgttgcactaaatctgtgacttcggtcgtctcaaccttgttttacgacaaaaaaatgagaacgacgaatccgaaagagactaagattgtgattgacactaccggcagtaccaaacctaagcaggacgatctcattctcacttgtttcagagggtgggtgaagcagttgcaaatagattacaaaggcaacgaaataatgacggcagctgcctctcaagggctgacccgtaaaggtgtgtatgccgttcggtacaaggtgaatgaaaatcctctgtacgcacccacctcagaacatgtgaacgtcctactgacccgcacggaggaccgcatcgtgtggaaaacactagccggcgacccatggataaaaacactgactgccaagtaccctgggaatttcactgccacgatagaggagtggcaagcagagcatgatgccatcatgaggcacatcttggagagaccggaccctaccgacgtcttccagaataaggcaaacgtgtgttgggccaaggctttagtgccggtgctgaagaccgctggcatagacatgaccactgaacaatggaacactgtggattattttgaaacggacaaagctcactcagcagagatagtattgaaccaactatgcgtgaggttctttggactcgatctggactccggtctattttctgcacccactgttccgttatccattaggaataatcactgggataactccccgtcgcctaacatgtacgggctgaataaagaagtggtccgtcagctctctcgcaggtacccacaactgcctcgggcagttgccactggaagagtctatgacatgaacactggtacactgcgcaattatgatccgcgcataaacctagtacctgtaaacagaagactgcctcatgctttagtcctccaccataatgaacacccacagagtgacttttcttcattcgtcagcaaattgaagggcagaactgtcctggtggtcggggaaaagttgtccgtcccaggcaaaatggttgactggttgtcagaccggcctgaggctaccttcagagctcggctggatttaggcatcccaggtgatgtgcccaaatatgacataatatttgttaatgtgaggaccccatataaataccatcactatcagcagtgtgaagaccatgccattaagcttagcatgttgaccaagaaagcttgtctgcatctgaatcccggcggaacctgtgtcagcataggttatggttacgctgacagggccagcgaaagcatcattggtgctatagcgcggcagttcaagttttcccgggtatgcaaaccgaaatcctcacttgaagagacggaagttctgtttgtattcattgggtacgatcgcaaggcccgtacgcacaatccttacaagctttcatcaaccttgaccaacatttatacaggttccagactccacgaagccggatgtgcaccctcatatcatgtggtgcgaggggatattgccacggccaccgaaggagtgattataaatgctgctaacagcaaaggacaacctggcggaggggtgtgcggagcgctgtataagaaattcccggaaagcttcgatttacagccgatcgaagtaggaaaagcgcgactggtcaaaggtgcagctaaacatatcattcatgccgtaggaccaaacttcaacaaagtttcggaggttgaaggtgacaaacagttggcagaggcttatgagtccatcgctaagattgtcaacgataacaattacaagtcagtagcgattccactgttgtccaccggcatcttttccgggaacaaagatcgactaacccaatcattgaaccatttgctgacagctttagacaccactgatgcagatgtagccatatactgcagggacaagaaatgggaaatgactctcaaggaagcagtggctaggagagaagcagtggaggagatatgcatatccgacgactcttcagtgacagaacctgatgcagagctggtgagggtgcatccgaagagttctttggctggaaggaagggctacagcacaagcgatggcaaaactttctcatatttggaagggaccaagtttcaccaggcggccaaggatatagcagaaattaatgccatgtggcccgttgcaacggaggccaatgagcaggtatgcatgtatatcctcggagaaagcatgagcagtattaggtcgaaatgccccgtcgaagagtcggaagcctccacaccacctagcacgctgccttgcttgtgcatccatgccatgactccagaaagagtacagcgcctaaaagcctcacgtccagaacaaattactgtgtgctcatcctttccattgccgaagtatagaatcactggtgtgcagaagatccaatgctcccagcctatattgttctcaccgaaagtgcctgcgtatattcatccaaggaagtatctcgtggaaacaccaccggtagacgagactccggagccatcggcagagaaccaatccacagaggggacacctgaacaaccaccacttataaccgaggatgagaccaggactagaacgcctgagccgatcatcatcgaagaggaagaagaggatagcataagtttgctgtcagatggcccgacccaccaggtgctgcaagtcgaggcagacattcacgggccgccctctgtatctagctcatcctggtccattcctcatgcatccgactttgatgtggacagtttatccatacttgacaccctggagggagctagcgtgaccagcggggcaacgtcagccgagactaactcttacttcgcaaagagtatggagtttctggcgcgaccggtgcctgcgcctcgaacagtattcaggaaccctccacatcccgctccgcgcacaagaacaccgtcacttgcacccagcagggcctgctcgagaaccagcctagtttccaccccgccaggcgtgaatagggtgatcactagagaggagctcgaggcgcttaccccgtcacgcactcctagcaggtcggtctcgagaaccagcctggtctccaacccgccaggcgtaaatagggtgattacaagagaggagtttgaggcgttcgtagcacaacaacaatgacggtttgatgcgggtgcatacatcttttcctccgacaccggtcaagggcatttacaacaaaaatcagtaaggcaaacggtgctatccgaagtggtgttggagaggaccgaattggagatttcgtatgccccgcgcctcgaccaagaaaaagaagaattactacgcaagaaattacagttaaatcccacacctgctaacagaagcagataccagtccaggaaggtggagaacatgaaagccataacagctagacgtattctgcaaggcctagggcattatttgaaggcagaaggaaaagtggagtgctaccgaaccctgcatcctgttcctttgtattcatctagtgtgaaccgtgccttttcaagccccaaggtcgcagtggaagcctgtaacgccatgttgaaagagaactttccgactgtggcttcttactgtattattccagagtacgatgcctatttggacatggttgacggagcttcatgctgcttagacactgccagtttttgccctgcaaagctgcgcagctttccaaagaaacactcctatttggaacccacaatacgatcggcagtgccttcagcgatccagaacacgctccagaacgtcctggcagctgccacaaaaagaaattgcaatgtcacgcaaatgagagaattgcccgtattggattcggcggcctttaatgtggaatgcttcaagaaatatgcgtgtaataatgaatattgggaaacgtttaaagaaaaccccatcaggcttactgaagaaaacgtggtaaattacattaccaaattaaaaggaccaaaagctgctgctctttttgcgaagacacataatttgaatatgttgcaggacataccaatggacaggtttgtaatggacttaaagagagacgtgaaagtgactccaggaacaaaacatactgaagaacggcccaaggtacaggtgatccaggctgccgatccgctagcaacagcgtatctgtgcggaatccaccgagagctggttaggagattaaatgcggtcctgcttccgaacattcatacactgtttgatatgtcggctgaagactttgacgctattatagccgagcacttccagcctggggattgtgttctggaaactgacatcgcgtcgtttgataaaagtgaggacgacgccatggctctgaccgcgttaatgattctggaagacttaggtgtggacgcagagctgttgacgctgattgaggcggctttcggcgaaatttcatcaatacatttgcccactaaaactaaatttaaattcggagccatgatgaaatctggaatgttcctcacactgtttgtgaacacagtcattaacattgtaatcgcaagcagagtgttgagagaacggctaaccggatcaccatgtgcagcattcattggagatgacaatatcgtgaaaggagtcaaatcggacaaattaatggcagacaggtgcgccacctggttgaatatggaagtcaagattatagatgctgtggtgggcgagaaagcgccttatttctgtggagggtttattttgtgtgactccgtgaccggcacagcgtgccgtgtggcagaccccctaaaaaggctgtttaagcttggcaaacctctggcagcagacgatgaacatgatgatgacaggagaagggcattgcatgaagagtcaacacgctggaaccgagtgggtattctttcagagctgtgcaaggcagtagaatcaaggtatgaaaccgtaggaacttccatcatagttatggccatgactactctagctagcagtgttaaatcattcagctacctgagaggggcccctataactctctacggctaacctgaatggactacgactctagaatagtctttaattaagccaccatggcaggcatgtttcaggcgctgagcgaaggctgcaccccgtatgatattaaccagatgctgaacgtgctgggcgatcatcaggtctcaggccttgagcagcttgagagtataatcaactttgaaaaactgactgaatggaccagttctaatgttatgcctatcctgtctcctctgacaaagggcatcctgggcttcgtgtttaccctgaccgtgccttctgagagaggacttagctgcattagcgaagcggatgcgaccaccccggaaagcgcgaacctgggcgaagaaattctgagccagctgtatctttggccaagggtgacctaccattcccctagttatgcttaccaccaatttgaaagacgagccaaatataaaagacacttccccggctttggccagagcctgctgtttggctaccctgtgtacgtgttcggcgattgcgtgcagggcgattgggatgcgattcgctttcgctattgcgcgccgccgggctatgcgctgctgcgctgcaacgataccaactatagcgctctgctggctgtgggggccctagaaggacccaggaatcaggactggcttggtgtcccaagacaacttgtaactcggatgcaggctattcagaatgccggcctgtgtaccctggtggccatgctggaagagacaatcttctggctgcaagcgtttctgatggcgctgaccgatagcggcccgaaaaccaacattattgtggatagccagtatgtgatgggcattagcaaaccgagctttcaggaatttgtggattgggaaaacgtgagcccggaactgaacagcaccgatcagccgttttggcaagccggaatcctggccagaaatctggtgcctatggtggccacagtgcagggccagaacctgaagtaccagggtcagtcactagtcatctctgcttctatcattgtcttcaacctgctggaactggaaggtgattatcgagatgatggcaacgtgtgggtgcataccccgctgagcccgcgcaccctgaacgcgtgggtgaaagcggtggaagaaaaaaaaggtattccagttcacctagagctggccagtatgaccaacatggagctcatgagcagtattgtgcatcagcaggtcagaacatacggccccgtgttcatgtgtctcggcggactgcttacaatggtggctggtgctgtgtggctgacagtgcgagtgctcgagctgttccgggccgcgcagctggccaacgacgtggtcctccagatcatggagctttgtggtgcagcgtttcgccaggtgtgccataccaccgtgccgtggccgaacgcgagcctgaccccgaaatggaacaacgaaaccacccagccccagatcgccaactgcagcgtgtatgacttttttgtgtggctccattattattctgttcgagacacactttggccaagggtgacctaccatatgaacaaatatgcgtatcatatgctggaaagacgagccaaatataaaagaggaccaggacctggcgctaaatttgtggccgcctggacactgaaagccgctgctggtcctggacctggccagtacatcaaggccaacagcaagttcatcggcatcaccgaactcggacccggaccaggctgatgattcgaacggccgtatcacgcccaaacatttacagccgcggtgtcaaaaaccgcgtggacgtggttaacatccctgctgggaggatcagccgtaattattataattggcttggtgctggctactattgtggccatgtacgtgctgaccaaccagaaacataattgaatacagcagcaattggcaagctgcttacatagaactcgcggcgattggcatgccgccttaaaatttttattttattttttcttttcttttccgaatcggattttgtttttaatatttcaaaaaaaaaaaaaaaaaaaaaaaaaaaaaaaaaaaaaaaaaaaaaaaaaaaaaaaaaaaaaaaaaaaaaaaaaaaaaaaa

SEQ ID NO: 5 - DNA, 11447 bp, Venezuelan equine encephalitis virus; identical to SEQ ID NO: 3
  source 1..11447: mol_type = other DNA

SEQ ID NO: 6 - DNA, 7894 bp, synthetic construct
  misc_feature 1..7894: note = Description of Artificial Sequence: Synthetic polynucleotide
  source 1..7894: mol_type = other DNA
atgggcggcgcatgagagaagcccagaccaattacctacccaaaatggagaaagttcacgttgacatcgaggaagacagcccattcctcagagctttgcagcggagcttcccgcagtttgaggtagaagccaagcaggtcactgataatgaccatgctaatgccagagcgttttcgcatctggcttcaaaactgatcgaaacggaggtggacccatccgacacgatccttgacattggaagtgcgcccgcccgcagaatgtattctaagcacaagtatcattgtatctgtccgatgagatgtgcggaagatccggacagattgtataagtatgcaactaagctgaagaaaaactgtaaggaaataactgataaggaattggacaagaaaatgaaggagctcgccgccgtcatgagcgaccctgacctggaaactgagactatgtgcctccacgacgacgagtcgtgtcgctacgaagggcaagtcgctgtttaccaggatgtatacgcggttgacggaccgacaagtctctatcaccaagccaataagggagttagagtcgcctactggataggctttgacaccaccccttttatgtttaagaacttggctggagcatatccatcatactctaccaactgggccgacgaaaccgtgttaacggctcgtaacataggcctatgcagctctgacgttatggagcggtcacgtagagggatgtccattcttagaaagaagtatttgaaaccatccaacaatgttctattctctgttggctcgaccatctaccacgagaagagggacttactgaggagctggcacctgccgtctgtatttcacttacgtggcaagcaaaattacacatgtcggtgtgagactatagttagttgcgacgggtacgtcgttaaaagaatagctatcagtccaggcctgtatgggaagccttcaggctatgctgctacgatgcaccgcgagggattcttgtgctgcaaagtgacagacacattgaacggggagagggtctcttttcccgtgtgcacgtatgtgccagctacattgtgtgaccaaatgactggcatactggcaacagatgtcagtgcggacgacgcgcaaaaactgctggttgggctcaaccagcgtatagtcgtcaacggtcgcacccagagaaacaccaataccatgaaaaattaccttttgcccgtagtggcccaggcatttgctaggtgggcaaaggaatataaggaagatcaagaagatgaaaggccactaggactacgagatagacagttagtcatggggtgttgttgggcttttagaaggcacaagataacatctatttataagcgcccggatacccaaaccatcatcaaagtgaacagcgatttccactcattcgtgctgcccaggataggcagtaacacattggagatcgggctgagaacaagaatcaggaaaatgttagaggagcacaaggagccgtcacctctcattaccgccgaggacgtacaagaagctaagtgcgcagccgatgaggctaaggaggtgcgtgaagccgaggagttgcgcgcagctctaccacctttggcagctgatgttgaggagcccactctggaagccgatgtcgacttgatgttacaagaggctggggccggctcagtggagacacctcgtggcttgataaaggttaccagctacgctggcgaggacaagatcggctcttacgctgtgctttctccgcaggctgtactcaagagtgaaaaattatcttgcatccaccctctcgctgaacaagtcatagtgataacacactctggccgaaaagggcgttatgccgtggaaccataccatggtaaagtagtggtgccagagggacatgcaatacccgtccaggactttcaagctctgagtgaaagtgccaccattgtgtacaacgaacgtgagttcgtaaacaggtacctgcaccatattgccacacatggaggagcgctgaacactgatgaagaatattacaaaactgtcaagcccagcgagcacgacggcgaatacctgtacgacatcgacaggaaacagtgcgtcaagaaagaactagtcactgggctagggctcacaggcgagctggtggatcctcccttccatgaattcgcctacgagagtctgagaacacgaccagccgctccttaccaagtaccaaccataggggtgtatggcgtgccaggatcaggcaagtctggcatcattaaaagcgcagtcaccaaaaaagatctagtggtgagcgccaagaaagaaaactgtgcagaaattataagggacgtcaagaaaatgaaagggctggacgtcaatgccagaactgtggactcagtgctcttgaatggatgcaaacaccccgtagagaccctgtatattgacgaagcttttgcttgtcatgcaggtactctcagagcgctcatagccattataagacctaaaaaggcagtgctctgcggggatcccaaacagtgcggtttttttaacatgatgtgcctgaaagtgcattttaaccacgagatttgcacacaagtcttccacaaaagcatctctcgccgttgcactaaatctgtgacttcggtcgtctcaaccttgttttacgacaaaaaaatgagaacgacgaatccgaaagagactaagattgtgattgacactaccggcagtaccaaacctaagcaggacgatctcattctcacttgtttcagagggtgggtgaagcagttgcaaatagattacaaaggcaacgaaataatgacggcagctgcctctcaagggctgacccgtaaaggtgtgtatgccgttcggtacaaggtgaatgaaaatcctctgtacgcacccacctcagaacatgtgaacgtcctactgacccgcacggaggaccgcatcgtgtggaaaacactagccggcgacccatggataaaaacactgactgccaagtaccctgggaatttcactgccacgatagaggagtggcaagcagagcatgatgccatcatgaggcacatcttggagagaccggaccctaccgacgtcttccagaataaggcaaacgtgtgttgggccaaggctttagtgccggtgctgaagaccgctggcatagacatgaccactgaacaatggaacactgtggattattttgaaacggacaaagctcactcagcagagatagtattgaaccaactatgcgtgaggttctttggactcgatctggactccggtctattttctgcacccactgttccgttatccattaggaataatcactgggataactccccgtcgcctaacatgtacgggctgaataaagaagtggtccgtcagctctctcgcaggtacccacaactgcctcgggcagttgccactggaagagtctatgacatgaacactggtacactgcgcaattatgatccgcgcataaacctagtacctgtaaacagaagactgcctcatgctttagtcctccaccataatgaacacccacagagtgacttttcttcattcgtcagcaaattgaagggcagaactgtcctggtggtcggggaaaagttgtccgtcccaggcaaaatggttgactggttgtcagaccggcctgaggctaccttcagagctcggctggatttaggcatcccaggtgatgtgcccaaatatgacataatatttgttaatgtgaggaccccatataaataccatcactatcagcagtgtgaagaccatgccattaagcttagcatgttgaccaagaaagcttgtctgcatctgaatcccggcggaacctgtgtcagcataggttatggttacgctgacagggccagcgaaagcatcattggtgctatagcgcggcagttcaagttttcccgggtatgcaaaccgaaatcctcacttgaagagacggaagttctgtttgtattcattgggtacgatcgcaaggcccgtacgcacaatccttacaagctttcatcaaccttgaccaacatttatacaggttccagactccacgaagccggatgtgcaccctcatatcatgtggtgcgaggggatattgccacggccaccgaaggagtgattataaatgctgctaacagcaaaggacaacctggcggaggggtgtgcggagcgctgtataagaaattcccggaaagcttcgatttacagccgatcgaagtaggaaaagcgcgactggtcaaaggtgcagctaaacatatcattcatgccgtaggaccaaacttcaacaaagtttcggaggttgaaggtgacaaacagttggcagaggcttatgagtccatcgctaagattgtcaacgataacaattacaagtcagtagcgattccactgttgtccaccggcatcttttccgggaacaaagatcgactaacccaatcattgaaccatttgctgacagctttagacaccactgatgcagatgtagccatatactgcagggacaagaaatgggaaatgactctcaaggaagcagtggctaggagagaagcagtggaggagatatgcatatccgacgactcttcagtgacagaacctgatgcagagctggtgagggtgcatccgaagagttctttggctggaaggaagggctacagcacaagcgatggcaaaactttctcatatttggaagggaccaagtttcaccaggcggccaaggatatagcagaaattaatgccatgtggcccgttgcaacggaggccaatgagcaggtatgcatgtatatcctcggagaaagcatgagcagtattaggtcgaaatgccccgtcgaagagtcggaagcctccacaccacctagcacgctgccttgcttgtgcatccatgccatgactccagaaagagtacagcgcctaaaagcctcacgtccagaacaaattactgtgtgctcatcctttccattgccgaagtatagaatcactggtgtgcagaagatccaatgctcccagcctatattgttctcaccgaaagtgcctgcgtatattcatccaaggaagtatctcgtggaaacaccaccggtagacgagactccggagccatcggcagagaaccaatccacagaggggacacctgaacaaccaccacttataaccgaggatgagaccaggactagaacgcctgagccgatcatcatcgaagaggaagaagaggatagcataagtttgctgtcagatggcccgacccaccaggtgctgcaagtcgaggcagacattcacgggccgccctctgtatctagctcatcctggtccattcctcatgcatccgactttgatgtggacagtttatccatacttgacaccctggagggagctagcgtgaccagcggggcaacgtcagccgagactaactcttacttcgcaaagagtatggagtttctggcgcgaccggtgcctgcgcctcgaacagtattcaggaaccctccacatcccgctccgcgcacaagaacaccgtcacttgcacccagcagggcctgctcgagaaccagcctagtttccaccccgccaggcgtgaatagggtgatcactagagaggagctcgaggcgcttaccccgtcacgcactcctagcaggtcggtctcgagaaccagcctggtctccaacccgccaggcgtaaatagggtgattacaagagaggagtttgaggcgttcgtagcacaacaacaatgacggtttgatgcgggtgcatacatcttttcctccgacaccggtcaagggcatttacaacaaaaatcagtaaggcaaacggtgctatccgaagtggtgttggagaggaccgaattggagatttcgtatgccccgcgcctcgaccaagaaaaagaagaattactacgcaagaaattacagttaaatcccacacctgctaacagaagcagataccagtccaggaaggtggagaacatgaaagccataacagctagacgtattctgcaaggcctagggcattatttgaaggcagaaggaaaagtggagtgctaccgaaccctgcatcctgttcctttgtattcatctagtgtgaaccgtgccttttcaagccccaaggtcgcagtggaagcctgtaacgccatgttgaaagagaactttccgactgtggcttcttactgtattattccagagtacgatgcctatttggacatggttgacggagcttcatgctgcttagacactgccagtttttgccctgcaaagctgcgcagctttccaaagaaacactcctatttggaacccacaatacgatcggcagtgccttcagcgatccagaacacgctccagaacgtcctggcagctgccacaaaaagaaattgcaatgtcacgcaaatgagagaattgcccgtattggattcggcggcctttaatgtggaatgcttcaagaaatatgcgtgtaataatgaatattgggaaacgtttaaagaaaaccccatcaggcttactgaagaaaacgtggtaaattacattaccaaattaaaaggaccaaaagctgctgctctttttgcgaagacacataatttgaatatgttgcaggacataccaatggacaggtttgtaatggacttaaagagagacgtgaaagtgactccaggaacaaaacatactgaagaacggcccaaggtacaggtgatccaggctgccgatccgctagcaacagcgtatctgtgcggaatccaccgagagctggttaggagattaaatgcggtcctgcttccgaacattcatacactgtttgatatgtcggctgaagactttgacgctattatagccgagcacttccagcctggggattgtgttctggaaactgacatcgcgtcgtttgataaaagtgaggacgacgccatggctctgaccgcgttaatgattctggaagacttaggtgtggacgcagagctgttgacgctgattgaggcggctttcggcgaaatttcatcaatacatttgcccactaaaactaaatttaaattcggagccatgatgaaatctggaatgttcctcacactgtttgtgaacacagtcattaacattgtaatcgcaagcagagtgttgagagaacggctaaccggatcaccatgtgcagcattcattggagatgacaatatcgtgaaaggagtcaaatcggacaaattaatggcagacaggtgcgccacctggttgaatatggaagtcaagattatagatgctgtggtgggcgagaaagcgccttatttctgtggagggtttattttgtgtgactccgtgaccggcacagcgtgccgtgtggcagaccccctaaaaaggctgtttaagcttggcaaacctctggcagcagacgatgaacatgatgatgacaggagaagggcattgcatgaagagtcaacacgctggaaccgagtgggtattctttcagagctgtgcaaggcagtagaatcaaggtatgaaaccgtaggaacttccatcatagttatggccatgactactctagctagcagtgttaaatcattcagctacctgagaggggcccctataactctctacggctaacctgaatggactacgactatcacgcccaaacatttacagccgcggtgtcaaaaaccgcgtggacgtggttaacatccctgctgggaggatcagccgtaattattataattggcttggtgctggctactattgtggccatgtacgtgctgaccaaccagaaacataattgaatacagcagcaattggcaagctgcttacatagaactcgcggcgattggcatgccgccttaaaatttttattttattttttcttttcttttccgaatcggattttgtttttaatatttcaaaaaaaaaaaaaaaaaaaaaaaaaaaaaaaaaaaaaaaaaaaaaaaaaaaaaaaaaaaaaaaaaaaaaaaaaaaaaaaa

SEQ ID NO: 7 - DNA, 7893 bp, synthetic construct
  misc_feature 1..7893: note = Description of Artificial Sequence: Synthetic polynucleotide
  source 1..7893: mol_type = other DNA
ataggcggcgcatgagagaagcccagaccaattacctacccaaaatggagaaagttcacgttgacatcgaggaagacagcccattcctcagagctttgcagcggagcttcccgcagtttgaggtagaagccaagcaggtcactgataatgaccatgctaatgccagagcgttttcgcatctggcttcaaaactgatcgaaacggaggtggacccatccgacacgatccttgacattggaagtgcgcccgcccgcagaatgtattctaagcacaagtatcattgtatctgtccgatgagatgtgcggaagatccggacagattgtataagtatgcaactaagctgaagaaaaactgtaaggaaataactgataaggaattggacaagaaaatgaaggagctcgccgccgtcatgagcgaccctgacctggaaactgagactatgtgcctccacgacgacgagtcgtgtcgctacgaagggcaagtcgctgtttaccaggatgtatacgcggttgacggaccgacaagtctctatcaccaagccaataagggagttagagtcgcctactggataggctttgacaccaccccttttatgtttaagaacttggctggagcatatccatcatactctaccaactgggccgacgaaaccgtgttaacggctcgtaacataggcctatgcagctctgacgttatggagcggtcacgtagagggatgtccattcttagaaagaagtatttgaaaccatccaacaatgttctattctctgttggctcgaccatctaccacgagaagagggacttactgaggagctggcacctgccgtctgtatttcacttacgtggcaagcaaaattacacatgtcggtgtgagactatagttagttgcgacgggtacgtcgttaaaagaatagctatcagtccaggcctgtatgggaagccttcaggctatgctgctacgatgcaccgcgagggattcttgtgctgcaaagtgacagacacattgaacggggagagggtctcttttcccgtgtgcacgtatgtgccagctacattgtgtgaccaaatgactggcatactggcaacagatgtcagtgcggacgacgcgcaaaaactgctggttgggctcaaccagcgtatagtcgtcaacggtcgcacccagagaaacaccaataccatgaaaaattaccttttgcccgtagtggcccaggcatttgctaggtgggcaaaggaatataaggaagatcaagaagatgaaaggccactaggactacgagatagacagttagtcatggggtgttgttgggcttttagaaggcacaagataacatctatttataagcgcccggatacccaaaccatcatcaaagtgaacagcgatttccactcattcgtgctgcccaggataggcagtaacacattggagatcgggctgagaacaagaatcaggaaaatgttagaggagcacaaggagccgtcacctctcattaccgccgaggacgtacaagaagctaagtgcgcagccgatgaggctaaggaggtgcgtgaagccgaggagttgcgcgcagctctaccacctttggcagctgatgttgaggagcccactctggaagccgatgtcgacttgatgttacaagaggctggggccggctcagtggagacacctcgtggcttgataaaggttaccagctacgatggcgaggacaagatcggctcttacgctgtgctttctccgcaggctgtactcaagagtgaaaaattatcttgcatccaccctctcgctgaacaagtcatagtgataacacactctggccgaaaagggcgttatgccgtggaaccataccatggtaaagtagtggtgccagagggacatgcaatacccgtccaggactttcaagctctgagtgaaagtgccaccattgtgtacaacgaacgtgagttcgtaaacaggtacctgcaccatattgccacacatggaggagcgctgaacactgatgaagaatattacaaaactgtcaagcccagcgagcacgacggcgaatacctgtacgacatcgacaggaaacagtgcgtcaagaaagaactagtcactgggctagggctcacaggcgagctggtggatcctcccttccatgaattcgcctacgagagtctgagaacacgaccagccgctccttaccaagtaccaaccataggggtgtatggcgtgccaggatcaggcaagtctggcatcattaaaagcgcagtcaccaaaaaagatctagtggtgagcgccaagaaagaaaactgtgcagaaattataagggacgtcaagaaaatgaaagggctggacgtcaatgccagaactgtggactcagtgctcttgaatggatgcaaacaccccgtagagaccctgtatattgacgaagcttttgcttgtcatgcaggtactctcagagcgctcatagccattataagacctaaaaaggcagtgctctgcggggatcccaaacagtgcggtttttttaacatgatgtgcctgaaagtgcattttaaccacgagatttgcacacaagtcttccacaaaagcatctctcgccgttgcactaaatctgtgacttcggtcgtctcaaccttgttttacgacaaaaaaatgagaacgacgaatccgaaagagactaagattgtgattgacactaccggcagtaccaaacctaagcaggacgatctcattctcacttgtttcagagggtgggtgaagcagttgcaaatagattacaaaggcaacgaaataatgacggcagctgcctctcaagggctgacccgtaaaggtgtgtatgccgttcggtacaaggtgaatgaaaatcctctgtacgcacccacctcagaacatgtgaacgtcctactgacccgcacggaggaccgcatcgtgtggaaaacactagccggcgacccatggataaaaacactgactgccaagtaccctgggaatttcactgccacgatagaggagtggcaagcagagcatgatgccatcatgaggcacatcttggagagaccggaccctaccgacgtcttccagaataaggcaaacgtgtgttgggccaaggctttagtgccggtgctgaagaccgctggcatagacatgaccactgaacaatggaacactgtggattattttgaaacggacaaagctcactcagcagagatagtattgaaccaactatgcgtgaggttctttggactcgatctggactccggtctattttctgcacccactgttccgttatccattaggaataatcactgggataactccccgtcgcctaacatgtacgggctgaataaagaagtggtccgtcagctctctcgcaggtacccacaactgcctcgggcagttgccactggaagagtctatgacatgaacactggtacactgcgcaattatgatccgcgcataaacctagtacctgtaaacagaagactgcctcatgctttagtcctccaccataatgaacacccacagagtgacttttcttcattcgtcagcaaattgaagggcagaactgtcctggtggtcggggaaaagttgtccgtcccaggcaaaatggttgactggttgtcagaccggcctgaggctaccttcagagctcggctggatttaggcatcccaggtgatgtgcccaaatatgacataatatttgttaatgtgaggaccccatataaataccatcactatcagcagtgtgaagaccatgccattaagcttagcatgttgaccaagaaagcttgtctgcatctgaatcccggcggaacctgtgtcagcataggttatggttacgctgacagggccagcgaaagcatcattggtgctatagcgcggcagttcaagttttcccgggtatgcaaaccgaaatcctcacttgaagagacggaagttctgtttgtattcattgggtacgatcgcaaggcccgtacgcacaatccttacaagctttcatcaaccttgaccaacatttatacaggttccagactccacgaagccggatgtgcaccctcatatcatgtggtgcgaggggatattgccacggccaccgaaggagtgattataaatgctgctaacagcaaaggacaacctggcggaggggtgtgcggagcgctgtataagaaattcccggaaagcttcgatttacagccgatcgaagtaggaaaagcgcgactggtcaaaggtgcagctaaacatatcattcatgccgtaggaccaaacttcaacaaagtttcggaggttgaaggtgacaaacagttggcagaggcttatgagtccatcgctaagattgtcaacgataacaattacaagtcagtagcgattccactgttgtccaccggcatcttttccgggaacaaagatcgactaacccaatcattgaaccatttgctgacagctttagacaccactgatgcagatgtagccatatactgcagggacaagaaatgggaaatgactctcaaggaagcagtggctaggagagaagcagtggaggagatatgcatatccgacgactcttcagtgacagaacctgatgcagagctggtgagggtgcatccgaagagttctttggctggaaggaagggctacagcacaagcgatggcaaaactttctcatatttggaagggaccaagtttcaccaggcggccaaggatatagcagaaattaatgccatgtggcccgttgcaacggaggccaatgagcaggtatgcatgtatatcctcggagaaagcatgagcagtattaggtcgaaatgccccgtcgaagagtcggaagcctccacaccacctagcacgctgccttgcttgtgcatccatgccatgactccagaaagagtacagcgcctaaaagcctcacgtccagaacaaattactgtgtgctcatcctttccattgccgaagtatagaatcactggtgtgcagaagatccaatgctcccagcctatattgttctcaccgaaagtgcctgcgtatattcatccaaggaagtatctcgtggaaacaccaccggtagacgagactccggagccatcggcagagaaccaatccacagaggggacacctgaacaaccaccacttataaccgaggatgagaccaggactagaacgcctgagccgatcatcatcgaagaggaagaagaggatagcataagtttgctgtcagatggcccgacccaccaggtgctgcaagtcgaggcagacattcacgggccgccctctgtatctagctcatcctggtccattcctcatgcatccgactttgatgtggacagtttatccatacttgacaccctggagggagctagcgtgaccagcggggcaacgtcagccgagactaactcttacttcgcaaagagtatggagtttctggcgcgaccggtgcctgcgcctcgaacagtattcaggaaccctccacatcccgctccgcgcacaagaacaccgtcacttgcacccagcagggcctgctcgagaaccagcctagtttccaccccgccaggcgtgaatagggtgatcactagagaggagctcgaggcgcttaccccgtcacgcactcctagcaggtcggtctcgagaaccagcctggtctccaacccgccaggcgtaaatagggtgattacaagagaggagtttgaggcgttcgtagcacaacaacaatgacggtttgatgcgggtgcatacatcttttcctccgacaccggtcaagggcatttacaacaaaaatcagtaaggcaaacggtgctatccgaagtggtgttggagaggaccgaattggagatttcgtatgccccgcgcctcgaccaagaaaaagaagaattactacgcaagaaattacagttaaatcccacacctgctaacagaagcagataccagtccaggaaggtggagaacatgaaagccataacagctagacgtattctgcaaggcctagggcattatttgaaggcagaaggaaaagtggagtgctaccgaaccctgcatcctgttcctttgtattcatctagtgtgaaccgtgccttttcaagccccaaggtcgcagtggaagcctgtaacgccatgttgaaagagaactttccgactgtggcttcttactgtattattccagagtacgatgcctatttggacatggttgacggagcttcatgctgcttagacactgccagtttttgccctgcaaagctgcgcagctttccaaagaaacactcctatttggaacccacaatacgatcggcagtgccttcagcgatccagaacacgctccagaacgtcctggcagctgccacaaaaagaaattgcaatgtcacgcaaatgagagaattgcccgtattggattcggcggcctttaatgtggaatgcttcaagaaatatgcgtgtaataatgaatattgggaaacgtttaaagaaaaccccatcaggcttactgaagaaaacgtggtaaattacattaccaaattaaaaggaccaaaagctgctgctctttttgcgaagacacataatttgaatatgttgcaggacataccaatggacaggtttgtaatggacttaaagagagacgtgaaagtgactccaggaacaaaacatactgaagaacggcccaaggtacaggtgatccaggctgccgatccgctagcaacagcgtatctgtgcggaatccaccgagagctggttaggagattaaatgcggtcctgcttccgaacattcatacactgtttgatatgtcggctgaagactttgacgctattatagccgagcacttccagcctggggattgtgttctggaaactgacatcgcgtcgtttgataaaagtgaggacgacgccatggctctgaccgcgttaatgattctggaagacttaggtgtggacgcagagctgttgacgctgattgaggcggctttcggcgaaatttcatcaatacatttgcccactaaaactaaatttaaattcggagccatgatgaaatctggaatgttcctcacactgtttgtgaacacagtcattaacattgtaatcgcaagcagagtgttgagagaacggctaaccggatcaccatgtgcagcattcattggagatgacaatatcgtgaaaggagtcaaatcggacaaattaatggcagacaggtgcgccacctggttgaatatggaagtcaagattatagatgctgtggtgggcgagaaagcgccttatttctgtggagggtttattttgtgtgactccgtgaccggcacagcgtgccgtgtggcagaccccctaaaaaggctgtttaagcttggcaaacctctggcagcagacgatgaacatgatgatgacaggagaagggcattgcatgaagagtcaacacgctggaaccgagtgggtattctttcagagctgtgcaaggcagtagaatcaaggtatgaaaccgtaggaacttccatcatagttatggccatgactactctagctagcagtgttaaatcattcagctacctgagaggggcccctataactctctacggctaacctgaatggactacgactatcacgcccaaacatttacagccgcggtgtcaaaaaccgcgtggacgtggttaacatccctgctgggaggatcagccgtaattattataattggcttggtgctggctactattgtggccatgtacgtgctgaccaaccagaaacataattgaatacagcagcaattggcaagctgcttacatagaactcgcggcgattggcatgccgccttaaaatttttattttatttttcttttcttttccgaatcggattttgtttttaatatttcaaaaaaaaaaaaaaaaaaaaaaaaaaaaaaaaaaaaaaaaaaaaaaaaaaaaaaaaaaaaaaaaaaaaaaaaaaaaaaaa

SEQ ID NO: 8 - DNA, 7927 bp, synthetic construct
  misc_feature 1..7927: note = Description of Artificial Sequence: Synthetic polynucleotide
  source 1..7927: mol_type = other DNA
taatacgactcactataggatgggcggcgcatgagagaagcccagaccaattacctacccaaaatggagaaagttcacgttgacatcgaggaagacagcccattcctcagagctttgcagcggagcttcccgcagtttgaggtagaagccaagcaggtcactgataatgaccatgctaatgccagagcgttttcgcatctggcttcaaaactgatcgaaacggaggtggacccatccgacacgatccttgacattggaagtgcgcccgcccgcagaatgtattctaagcacaagtatcattgtatctgtccgatgagatgtgcggaagatccggacagattgtataagtatgcaactaagctgaagaaaaactgtaaggaaataactgataaggaattggacaagaaaatgaaggagctcgccgccgtcatgagcgaccctgacctggaaactgagactatgtgcctccacgacgacgagtcgtgtcgctacgaagggcaagtcgctgtttaccaggatgtatacgcggttgacggaccgacaagtctctatcaccaagccaataagggagttagagtcgcctactggataggctttgacaccaccccttttatgtttaagaacttggctggagcatatccatcatactctaccaactgggccgacgaaaccgtgttaacggctcgtaacataggcctatgcagctctgacgttatggagcggtcacgtagagggatgtccattcttagaaagaagtatttgaaaccatccaacaatgttctattctctgttggctcgaccatctaccacgagaagagggacttactgaggagctggcacctgccgtctgtatttcacttacgtggcaagcaaaattacacatgtcggtgtgagactatagttagttgcgacgggtacgtcgttaaaagaatagctatcagtccaggcctgtatgggaagccttcaggctatgctgctacgatgcaccgcgagggattcttgtgctgcaaagtgacagacacattgaacggggagagggtctcttttcccgtgtgcacgtatgtgccagctacattgtgtgaccaaatgactggcatactggcaacagatgtcagtgcggacgacgcgcaaaaactgctggttgggctcaaccagcgtatagtcgtcaacggtcgcacccagagaaacaccaataccatgaaaaattaccttttgcccgtagtggcccaggcatttgctaggtgggcaaaggaatataaggaagatcaagaagatgaaaggccactaggactacgagatagacagttagtcatggggtgttgttgggcttttagaaggcacaagataacatctatttataagcgcccggatacccaaaccatcatcaaagtgaacagcgatttccactcattcgtgctgcccaggataggcagtaacacattggagatcgggctgagaacaagaatcaggaaaatgttagaggagcacaaggagccgtcacctctcattaccgccgaggacgtacaagaagctaagtgcgcagccgatgaggctaaggaggtgcgtgaagccgaggagttgcgcgcagctctaccacctttggcagctgatgttgaggagcccactctggaagccgatgtcgacttgatgttacaagaggctggggccggctcagtggagacacctcgtggcttgataaaggttaccagctacgctggcgaggacaagatcggctcttacgctgtgctttctccgcaggctgtactcaagagtgaaaaattatcttgcatccaccctctcgctgaacaagtcatagtgataacacactctggccgaaaagggcgttatgccgtggaaccataccatggtaaagtagtggtgccagagggacatgcaatacccgtccaggactttcaagctctgagtgaaagtgccaccattgtgtacaacgaacgtgagttcgtaaacaggtacctgcaccatattgccacacatggaggagcgctgaacactgatgaagaatattacaaaactgtcaagcccagcgagcacgacggcgaatacctgtacgacatcgacaggaaacagtgcgtcaagaaagaactagtcactgggctagggctcacaggcgagctggtggatcctcccttccatgaattcgcctacgagagtctgagaacacgaccagccgctccttaccaagtaccaaccataggggtgtatggcgtgccaggatcaggcaagtctggcatcattaaaagcgcagtcaccaaaaaagatctagtggtgagcgccaagaaagaaaactgtgcagaaattataagggacgtcaagaaaatgaaagggctggacgtcaatgccagaactgtggactcagtgctcttgaatggatgcaaacaccccgtagagaccctgtatattgacgaagcttttgcttgtcatgcaggtactctcagagcgctcatagccattataagacctaaaaaggcagtgctctgcggggatcccaaacagtgcggtttttttaacatgatgtgcctgaaagtgcattttaaccacgagatttgcacacaagtcttccacaaaagcatctctcgccgttgcactaaatctgtgacttcggtcgtctcaaccttgttttacgacaaaaaaatgagaacgacgaatccgaaagagactaagattgtgattgacactaccggcagtaccaaacctaagcaggacgatctcattctcacttgtttcagagggtgggtgaagcagttgcaaatagattacaaaggcaacgaaataatgacggcagctgcctctcaagggctgacccgtaaaggtgtgtatgccgttcggtacaaggtgaatgaaaatcctctgtacgcacccacctcagaacatgtgaacgtcctactgacccgcacggaggaccgcatcgtgtggaaaacactagccggcgacccatggataaaaacactgactgccaagtaccctgggaatttcactgccacgatagaggagtggcaagcagagcatgatgccatcatgaggcacatcttggagagaccggaccctaccgacgtcttccagaataaggcaaacgtgtgttgggccaaggctttagtgccggtgctgaagaccgctggcatagacatgaccactgaacaatggaacactgtggattattttgaaacggacaaagctcactcagcagagatagtattgaaccaactatgcgtgaggttctttggactcgatctggactccggtctattttctgcacccactgttccgttatccattaggaataatcactgggataactccccgtcgcctaacatgtacgggctgaataaagaagtggtccgtcagctctctcgcaggtacccacaactgcctcgggcagttgccactggaagagtctatgacatgaacactggtacactgcgcaattatgatccgcgcataaacctagtacctgtaaacagaagactgcctcatgctttagtcctccaccataatgaacacccacagagtgacttttcttcattcgtcagcaaattgaagggcagaactgtcctggtggtcggggaaaagttgtccgtcccaggcaaaatggttgactggttgtcagaccggcctgaggctaccttcagagctcggctggatttaggcatcccaggtgatgtgcccaaatatgacataatatttgttaatgtgaggaccccatataaataccatcactatcagcagtgtgaagaccatgccattaagcttagcatgttgaccaagaaagcttgtctgcatctgaatcccggcggaacctgtgtcagcataggttatggttacgctgacagggccagcgaaagcatcattggtgctatagcgcggcagttcaagttttcccgggtatgcaaaccgaaatcctcacttgaagagacggaagttctgtttgtattcattgggtacgatcgcaaggcccgtacgcacaatccttacaagctttcatcaaccttgaccaacatttatacaggttccagactccacgaagccggatgtgcaccctcatatcatgtggtgcgaggggatattgccacggccaccgaaggagtgattataaatgctgctaacagcaaaggacaacctggcggaggggtgtgcggagcgctgtataagaaattcccggaaagcttcgatttacagccgatcgaagtaggaaaagcgcgactggtcaaaggtgcagctaaacatatcattcatgccgtaggaccaaacttcaacaaagtttcggaggttgaaggtgacaaacagttggcagaggcttatgagtccatcgctaagattgtcaacgataacaattacaagtcagtagcgattccactgttgtccaccggcatcttttccgggaacaaagatcgactaacccaatcattgaaccatttgctgacagctttagacaccactgatgcagatgtagccatatactgcagggacaagaaatgggaaatgactctcaaggaagcagtggctaggagagaagcagtggaggagatatgcatatccgacgactcttcagtgacagaacctgatgcagagctggtgagggtgcatccgaagagttctttggctggaaggaagggctacagcacaagcgatggcaaaactttctcatatttggaagggaccaagtttcaccaggcggccaaggatatagcagaaattaatgccatgtggcccgttgcaacggaggccaatgagcaggtatgcatgtatatcctcggagaaagcatgagcagtattaggtcgaaatgccccgtcgaagagtcggaagcctccacaccacctagcacgctgccttgcttgtgcatccatgccatgactccagaaagagtacagcgcctaaaagcctcacgtccagaacaaattactgtgtgctcatcctttccattgccgaagtatagaatcactggtgtgcagaagatccaatgctcccagcctatattgttctcaccgaaagtgcctgcgtatattcatccaaggaagtatctcgtggaaacaccaccggtagacgagactccggagccatcggcagagaaccaatccacagaggggacacctgaacaaccaccacttataaccgaggatgagaccaggactagaacgcctgagccgatcatcatcgaagaggaagaagaggatagcataagtttgctgtcagatggcccgacccaccaggtgctgcaagtcgaggcagacattcacgggccgccctctgtatctagctcatcctggtccattcctcatgcatccgactttgatgtggacagtttatccatacttgacaccctggagggagctagcgtgaccagcggggcaacgtcagccgagactaactcttacttcgcaaagagtatggagtttctggcgcgaccggtgcctgcgcctcgaacagtattcaggaaccctccacatcccgctccgcgcacaagaacaccgtcacttgcacccagcagggcctgctcgagaaccagcctagtttccaccccgccaggcgtgaatagggtgatcactagagaggagctcgaggcgcttaccccgtcacgcactcctagcaggtcggtctcgagaaccagcctggtctccaacccgccaggcgtaaatagggtgattacaagagaggagtttgaggcgttcgtagcacaacaacaatgacggtttgatgcgggtgcatacatcttttcctccgacaccggtcaagggcatttacaacaaaaatcagtaaggcaaacggtgctatccgaagtggtgttggagaggaccgaattggagatttcgtatgccccgcgcctcgaccaagaaaaagaagaattactacgcaagaaattacagttaaatcccacacctgctaacagaagcagataccagtccaggaaggtggagaacatgaaagccataacagctagacgtattctgcaaggcctagggcattatttgaaggcagaaggaaaagtggagtgctaccgaaccctgcatcctgttcctttgtattcatctagtgtgaaccgtgccttttcaagccccaaggtcgcagtggaagcctgtaacgccatgttgaaagagaactttccgactgtggcttcttactgtattattccagagtacgatgcctatttggacatggttgacggagcttcatgctgcttagacactgccagtttttgccctgcaaagctgcgcagctttccaaagaaacactcctatttggaacccacaatacgatcggcagtgccttcagcgatccagaacacgctccagaacgtcctggcagctgccacaaaaagaaattgcaatgtcacgcaaatgagagaattgcccgtattggattcggcggcctttaatgtggaatgcttcaagaaatatgcgtgtaataatgaatattgggaaacgtttaaagaaaaccccatcaggcttactgaagaaaacgtggtaaattacattaccaaattaaaaggaccaaaagctgctgctctttttgcgaagacacataatttgaatatgttgcaggacataccaatggacaggtttgtaatggacttaaagagagacgtgaaagtgactccaggaacaaaacatactgaagaacggcccaaggtacaggtgatccaggctgccgatccgctagcaacagcgtatctgtgcggaatccaccgagagctggttaggagattaaatgcggtcctgcttccgaacattcatacactgtttgatatgtcggctgaagactttgacgctattatagccgagcacttccagcctggggattgtgttctggaaactgacatcgcgtcgtttgataaaagtgaggacgacgccatggctctgaccgcgttaatgattctggaagacttaggtgtggacgcagagctgttgacgctgattgaggcggctttcggcgaaatttcatcaatacatttgcccactaaaactaaatttaaattcggagccatgatgaaatctggaatgttcctcacactgtttgtgaacacagtcattaacattgtaatcgcaagcagagtgttgagagaacggctaaccggatcaccatgtgcagcattcattggagatgacaatatcgtgaaaggagtcaaatcggacaaattaatggcagacaggtgcgccacctggttgaatatggaagtcaagattatagatgctgtggtgggcgagaaagcgccttatttctgtggagggtttattttgtgtgactccgtgaccggcacagcgtgccgtgtggcagaccccctaaaaaggctgtttaagcttggcaaacctctggcagcagacgatgaacatgatgatgacaggagaagggcattgcatgaagagtcaacacgctggaaccgagtgggtattctttcagagctgtgcaaggcagtagaatcaaggtatgaaaccgtaggaacttccatcatagttatggccatgactactctagctagcagtgttaaatcattcagctacctgagaggggcccctataactctctacggctaacctgaatggactacgactatcacgcccaaacatttacagccgcggtgtcaaaaaccgcgtggacgtggttaacatccctgctgggaggatcagccgtaattattataattggcttggtgctggctactattgtggccatgtacgtgctgaccaaccagaaacataattgaatacagcagcaattggcaagctgcttacatagaactcgcggcgattggcatgccgccttaaaatttttattttattttttcttttcttttccgaatcggattttgtttttaatatttcaaaaaaaaaaaaaaaaaaaaaaaaaaaaaaaaaaaaaaaaaaaaaaaaaaaaaaaaaaaaaaaaaaaaaaaaaaaaaaaatacgtagtttaaac

SEQ ID NO: 9 - DNA, 7926 bp, synthetic construct
  misc_feature 1..7926: note = Description of Artificial Sequence: Synthetic polynucleotide
  source 1..7926: mol_type = other DNA
taatacgactcactataggataggcggcgcatgagagaagcccagaccaattacctacccaaaatggagaaagttcacgttgacatcgaggaagacagcccattcctcagagctttgcagcggagcttcccgcagtttgaggtagaagccaagcaggtcactgataatgaccatgctaatgccagagcgttttcgcatctggcttcaaaactgatcgaaacggaggtggacccatccgacacgatccttgacattggaagtgcgcccgcccgcagaatgtattctaagcacaagtatcattgtatctgtccgatgagatgtgcggaagatccggacagattgtataagtatgcaactaagctgaagaaaaactgtaaggaaataactgataaggaattggacaagaaaatgaaggagctcgccgccgtcatgagcgaccctgacctggaaactgagactatgtgcctccacgacgacgagtcgtgtcgctacgaagggcaagtcgctgtttaccaggatgtatacgcggttgacggaccgacaagtctctatcaccaagccaataagggagttagagtcgcctactggataggctttgacaccaccccttttatgtttaagaacttggctggagcatatccatcatactctaccaactgggccgacgaaaccgtgttaacggctcgtaacataggcctatgcagctctgacgttatggagcggtcacgtagagggatgtccattcttagaaagaagtatttgaaaccatccaacaatgttctattctctgttggctcgaccatctaccacgagaagagggacttactgaggagctggcacctgccgtctgtatttcacttacgtggcaagcaaaattacacatgtcggtgtgagactatagttagttgcgacgggtacgtcgttaaaagaatagctatcagtccaggcctgtatgggaagccttcaggctatgctgctacgatgcaccgcgagggattcttgtgctgcaaagtgacagacacattgaacggggagagggtctcttttcccgtgtgcacgtatgtgccagctacattgtgtgaccaaatgactggcatactggcaacagatgtcagtgcggacgacgcgcaaaaactgctggttgggctcaaccagcgtatagtcgtcaacggtcgcacccagagaaacaccaataccatgaaaaattaccttttgcccgtagtggcccaggcatttgctaggtgggcaaaggaatataaggaagatcaagaagatgaaaggccactaggactacgagatagacagttagtcatggggtgttgttgggcttttagaaggcacaagataacatctatttataagcgcccggatacccaaaccatcatcaaagtgaacagcgatttccactcattcgtgctgcccaggataggcagtaacacattggagatcgggctgagaacaagaatcaggaaaatgttagaggagcacaaggagccgtcacctctcattaccgccgaggacgtacaagaagctaagtgcgcagccgatgaggctaaggaggtgcgtgaagccgaggagttgcgcgcagctctaccacctttggcagctgatgttgaggagcccactctggaagccgatgtcgacttgatgttacaagaggctggggccggctcagtggagacacctcgtggcttgataaaggttaccagctacgatggcgaggacaagatcggctcttacgctgtgctttctccgcaggctgtactcaagagtgaaaaattatcttgcatccaccctctcgctgaacaagtcatagtgataacacactctggccgaaaagggcgttatgccgtggaaccataccatggtaaagtagtggtgccagagggacatgcaatacccgtccaggactttcaagctctgagtgaaagtgccaccattgtgtacaacgaacgtgagttcgtaaacaggtacctgcaccatattgccacacatggaggagcgctgaacactgatgaagaatattacaaaactgtcaagcccagcgagcacgacggcgaatacctgtacgacatcgacaggaaacagtgcgtcaagaaagaactagtcactgggctagggctcacaggcgagctggtggatcctcccttccatgaattcgcctacgagagtctgagaacacgaccagccgctccttaccaagtaccaaccataggggtgtatggcgtgccaggatcaggcaagtctggcatcattaaaagcgcagtcaccaaaaaagatctagtggtgagcgccaagaaagaaaactgtgcagaaattataagggacgtcaagaaaatgaaagggctggacgtcaatgccagaactgtggactcagtgctcttgaatggatgcaaacaccccgtagagaccctgtatattgacgaagcttttgcttgtcatgcaggtactctcagagcgctcatagccattataagacctaaaaaggcagtgctctgcggggatcccaaacagtgcggtttttttaacatgatgtgcctgaaagtgcattttaaccacgagatttgcacacaagtcttccacaaaagcatctctcgccgttgcactaaatctgtgacttcggtcgtctcaaccttgttttacgacaaaaaaatgagaacgacgaatccgaaagagactaagattgtgattgacactaccggcagtaccaaacctaagcaggacgatctcattctcacttgtttcagagggtgggtgaagcagttgcaaatagattacaaaggcaacgaaataatgacggcagctgcctctcaagggctgacccgtaaaggtgtgtatgccgttcggtacaaggtgaatgaaaatcctctgtacgcacccacctcagaacatgtgaacgtcctactgacccgcacggaggaccgcatcgtgtggaaaacactagccggcgacccatggataaaaacactgactgccaagtaccctgggaatttcactgccacgatagaggagtggcaagcagagcatgatgccatcatgaggcacatcttggagagaccggaccctaccgacgtcttccagaataaggcaaacgtgtgttgggccaaggctttagtgccggtgctgaagaccgctggcatagacatgaccactgaacaatggaacactgtggattattttgaaacggacaaagctcactcagcagagatagtattgaaccaactatgcgtgaggttctttggactcgatctggactccggtctattttctgcacccactgttccgttatccattaggaataatcactgggataactccccgtcgcctaacatgtacgggctgaataaagaagtggtccgtcagctctctcgcaggtacccacaactgcctcgggcagttgccactggaagagtctatgacatgaacactggtacactgcgcaattatgatccgcgcataaacctagtacctgtaaacagaagactgcctcatgctttagtcctccaccataatgaacacccacagagtgacttttcttcattcgtcagcaaattgaagggcagaactgtcctggtggtcggggaaaagttgtccgtcccaggcaaaatggttgactggttgtcagaccggcctgaggctaccttcagagctcggctggatttaggcatcccaggtgatgtgcccaaatatgacataatatttgttaatgtgaggaccccatataaataccatcactatcagcagtgtgaagaccatgccattaagcttagcatgttgaccaagaaagcttgtctgcatctgaatcccggcggaacctgtgtcagcataggttatggttacgctgacagggccagcgaaagcatcattggtgctatagcgcggcagttcaagttttcccgggtatgcaaaccgaaatcctcacttgaagagacggaagttctgtttgtattcattgggtacgatcgcaaggcccgtacgcacaatccttacaagctttcatcaaccttgaccaacatttatacaggttccagactccacgaagccggatgtgcaccctcatatcatgtggtgcgaggggatattgccacggccaccgaaggagtgattataaatgctgctaacagcaaaggacaacctggcggaggggtgtgcggagcgctgtataagaaattcccggaaagcttcgatttacagccgatcgaagtaggaaaagcgcgactggtcaaaggtgcagctaaacatatcattcatgccgtaggaccaaacttcaacaaagtttcggaggttgaaggtgacaaacagttggcagaggcttatgagtccatcgctaagattgtcaacgataacaattacaagtcagtagcgattccactgttgtccaccggcatcttttccgggaacaaagatcgactaacccaatcattgaaccatttgctgacagctttagacaccactgatgcagatgtagccatatactgcagggacaagaaatgggaaatgactctcaaggaagcagtggctaggagagaagcagtggaggagatatgcatatccgacgactcttcagtgacagaacctgatgcagagctggtgagggtgcatccgaagagttctttggctggaaggaagggctacagcacaagcgatggcaaaactttctcatatttggaagggaccaagtttcaccaggcggccaaggatatagcagaaattaatgccatgtggcccgttgcaacggaggccaatgagcaggtatgcatgtatatcctcggagaaagcatgagcagtattaggtcgaaatgccccgtcgaagagtcggaagcctccacaccacctagcacgctgccttgcttgtgcatccatgccatgactccagaaagagtacagcgcctaaaagcctcacgtccagaacaaattactgtgtgctcatcctttccattgccgaagtatagaatcactggtgtgcagaagatccaatgctcccagcctatattgttctcaccgaaagtgcctgcgtatattcatccaaggaagtatctcgtggaaacaccaccggtagacgagactccggagccatcggcagagaaccaatccacagaggggacacctgaacaaccaccacttataaccgaggatgagaccaggactagaacgcctgagccgatcatcatcgaagaggaagaagaggatagcataagtttgctgtcagatggcccgacccaccaggtgctgcaagtcgaggcagacattcacgggccgccctctgtatctagctcatcctggtccattcctcatgcatccgactttgatgtggacagtttatccatacttgacaccctggagggagctagcgtgaccagcggggcaacgtcagccgagactaactcttacttcgcaaagagtatggagtttctggcgcgaccggtgcctgcgcctcgaacagtattcaggaaccctccacatcccgctccgcgcacaagaacaccgtcacttgcacccagcagggcctgctcgagaaccagcctagtttccaccccgccaggcgtgaatagggtgatcactagagaggagctcgaggcgcttaccccgtcacgcactcctagcaggtcggtctcgagaaccagcctggtctccaacccgccaggcgtaaatagggtgattacaagagaggagtttgaggcgttcgtagcacaacaacaatgacggtttgatgcgggtgcatacatcttttcctccgacaccggtcaagggcatttacaacaaaaatcagtaaggcaaacggtgctatccgaagtggtgttggagaggaccgaattggagatttcgtatgccccgcgcctcgaccaagaaaaagaagaattactacgcaagaaattacagttaaatcccacacctgctaacagaagcagataccagtccaggaaggtggagaacatgaaagccataacagctagacgtattctgcaaggcctagggcattatttgaaggcagaaggaaaagtggagtgctaccgaaccctgcatcctgttcctttgtattcatctagtgtgaaccgtgccttttcaagccccaaggtcgcagtggaagcctgtaacgccatgttgaaagagaactttccgactgtggcttcttactgtattattccagagtacgatgcctatttggacatggttgacggagcttcatgctgcttagacactgccagtttttgccctgcaaagctgcgcagctttccaaagaaacactcctatttggaacccacaatacgatcggcagtgccttcagcgatccagaacacgctccagaacgtcctggcagctgccacaaaaagaaattgcaatgtcacgcaaatgagagaattgcccgtattggattcggcggcctttaatgtggaatgcttcaagaaatatgcgtgtaataatgaatattgggaaacgtttaaagaaaaccccatcaggcttactgaagaaaacgtggtaaattacattaccaaattaaaaggaccaaaagctgctgctctttttgcgaagacacataatttgaatatgttgcaggacataccaatggacaggtttgtaatggacttaaagagagacgtgaaagtgactccaggaacaaaacatactgaagaacggcccaaggtacaggtgatccaggctgccgatccgctagcaacagcgtatctgtgcggaatccaccgagagctggttaggagattaaatgcggtcctgcttccgaacattcatacactgtttgatatgtcggctgaagactttgacgctattatagccgagcacttccagcctggggattgtgttctggaaactgacatcgcgtcgtttgataaaagtgaggacgacgccatggctctgaccgcgttaatgattctggaagacttaggtgtggacgcagagctgttgacgctgattgaggcggctttcggcgaaatttcatcaatacatttgcccactaaaactaaatttaaattcggagccatgatgaaatctggaatgttcctcacactgtttgtgaacacagtcattaacattgtaatcgcaagcagagtgttgagagaacggctaaccggatcaccatgtgcagcattcattggagatgacaatatcgtgaaaggagtcaaatcggacaaattaatggcagacaggtgcgccacctggttgaatatggaagtcaagattatagatgctgtggtgggcgagaaagcgccttatttctgtggagggtttattttgtgtgactccgtgaccggcacagcgtgccgtgtggcagaccccctaaaaaggctgtttaagcttggcaaacctctggcagcagacgatgaacatgatgatgacaggagaagggcattgcatgaagagtcaacacgctggaaccgagtgggtattctttcagagctgtgcaaggcagtagaatcaaggtatgaaaccgtaggaacttccatcatagttatggccatgactactctagctagcagtgttaaatcattcagctacctgagaggggcccctataactctctacggctaacctgaatggactacgactatcacgcccaaacatttacagccgcggtgtcaaaaaccgcgtggacgtggttaacatccctgctgggaggatcagccgtaattattataattggcttggtgctggctactattgtggccatgtacgtgctgaccaaccagaaacataattgaatacagcagcaattggcaagctgcttacatagaactcgcggcgattggcatgccgccttaaaatttttattttatttttcttttcttttccgaatcggattttgtttttaatatttcaaaaaaaaaaaaaaaaaaaaaaaaaaaaaaaaaaaaaaaaaaaaaaaaaaaaaaaaaaaaaaaaaaaaaaaaaaaaaaaatacgtagtttaaac

SEQ ID NO: 10 - DNA, 36519 bp, synthetic construct
  misc_feature 1..36519: note = Description of Artificial Sequence: Synthetic polynucleotide
  source 1..36519: mol_type = other DNA
ccatcttcaataatatacctcaaactttttgtgcgcgttaatatgcaaatgaggcgtttgaatttggggaggaagggcggtgattggtcgagggatgagcgaccgttaggggcggggcgagtgacgttttgatgacgtggttgcgaggaggagccagtttgcaagttctcgtgggaaaagtgacgtcaaacgaggtgtggtttgaacacggaaatactcaattttcccgcgctctctgacaggaaatgaggtgtttctgggcggatgcaagtgaaaacgggccattttcgcgcgaaaactgaatgaggaagtgaaaatctgagtaatttcgcgtttatggcagggaggagtatttgccgagggccgagtagactttgaccgattacgtgggggtttcgattaccgtgtttttcacctaaatttccgcgtacggtgtcaaagtccggtgtttttacgtaggtgtcagctgatcgccagggtatttaaacctgcgctctccagtcaagaggccactcttgagtgccagcgagaagagttttctcctccgcgccgcgagtcagatctacactttgaaagatgaggcacctgagagacctgcccgatgagaaaatcatcatcgcttccgggaacgagattctggaactggtggtaaatgccatgatgggcgacgaccctccggagccccccaccccatttgagacaccttcgctgcacgatttgtatgatctggaggtggatgtgcccgaggacgatcccaatgaggaggcggtaaatgatttttttagcgatgccgcgctgctagctgccgaggaggcttcgagctctagctcagacagcgactcttcactgcatacccctagacccggcagaggtgagaaaaagatccccgagcttaaaggggaagagatggacttgcgctgctatgaggaatgcttgcccccgagcgatgatgaggacgagcaggcgatccagaacgcagcgagccagggagtgcaagccgccagcgagagctttgcgctggactgcccgcctctgcccggacacggctgtaagtcttgtgaatttcatcgcatgaatactggagataaagctgtgttgtgtgcactttgctatatgagagcttacaaccattgtgtttacagtaagtgtgattaagttgaactttagagggaggcagagagcagggtgactgggcgatgactggtttatttatgtatatatgttctttatataggtcccgtctctgacgcagatgatgagacccccactacaaagtccacttcgtcacccccagaaattggcacatctccacctgagaatattgttagaccagttcctgttagagccactgggaggagagcagctgtggaatgtttggatgacttgctacagggtggggttgaacctttggacttgtgtacccggaaacgccccaggcactaagtgccacacatgtgtgtttacttgaggtgatgtcagtatttatagggtgtggagtgcaataaaaaatgtgttgactttaagtgcgtggtttatgactcaggggtggggactgtgagtatataagcaggtgcagacctgtgtggttagctcagagcggcatggagatttggacggtcttggaagactttcacaagactagacagctgctagagaacgcctcgaacggagtctcttacctgtggagattctgcttcggtggcgacctagctaggctagtctacagggccaaacaggattatagtgaacaatttgaggttattttgagagagtgttctggtctttttgacgctcttaacttgggccatcagtctcactttaaccagaggatttcgagagcccttgattttactactcctggcagaaccactgcagcagtagccttttttgcttttattcttgacaaatggagtcaagaaacccatttcagcagggattaccagctggatttcttagcagtagctttgtggagaacatggaagtgccagcgcctgaatgcaatctccggctacttgccggtacagccgctagacactctgaggatcctgaatctccaggagagtcccagggcacgccaacgtcgccagcagcagcagcaggaggaggatcaagaagagaacccgagagccggcctggaccctccggcggaggaggaggagtagctgacctgtttcctgaactgcgccgggtgctgactaggtcttcgagtggtcgggagagggggattaagcgggagaggcatgatgagactaatcacagaactgaactgactgtgggtctgatgagtcgcaagcgcccagaaacagtgtggtggcatgaggtgcagtcgactggcacagatgaggtgtcggtgatgcatgagaggttttctctagaacaagtcaagacttgttggttagagcctgaggatgattgggaggtagccatcaggaattatgccaagctggctctgaggccagacaagaagtacaagattactaagctgataaatatcagaaatgcctgctacatctcagggaatggggctgaagtggagatctgtctccaggaaagggtggctttcagatgctgcatgatgaatatgtacccgggagtggtgggcatggatggggttacctttatgaacatgaggttcaggggagatgggtataatggcacggtctttatggccaataccaagctgacagtccatggctgctccttctttgggtttaataacacctgcatcgaggcctggggtcaggtcggtgtgaggggctgcagtttttcagccaactggatgggggtcgtgggcaggaccaagagtatgctgtccgtgaagaaatgcttgtttgagaggtgccacctgggggtgatgagcgagggcgaagccagaatccgccactgcgcctctaccgagacgggctgctttgtgctgtgcaagggcaatgctaagatcaagcataatatgatctgtggagcctcggacgagcgcggctaccagatgctgacctgcgccggcgggaacagccatatgctggccaccgtacatgtggcttcccatgctcgcaagccctggcccgagttcgagcacaatgtcatgaccaggtgcaatatgcatctggggtcccgccgaggcatgttcatgccctaccagtgcaacctgaattatgtgaaggtgctgctggagcccgatgccatgtccagagtgagcctgacgggggtgtttgacatgaatgtggaggtgtggaagattctgagatatgatgaatccaagaccaggtgccgagcctgcgagtgcggagggaagcatgccaggttccagcccgtgtgtgtggatgtgacggaggacctgcgacccgatcatttggtgttgccctgcaccgggacggagttcggttccagcggggaagaatctgactagagtgagtagtgttctggggcgggggaggacctgcatgagggccagaataactgaaatctgtgcttttctgtgtgttgcagcagcatgagcggaagcggctcctttgagggaggggtattcagcccttatctgacggggcgtctcccctcctgggcgggagtgcgtcagaatgtgatgggatccacggtggacggccggcccgtgcagcccgcgaactcttcaaccctgacctatgcaaccctgagctcttcgtcgttggacgcagctgccgccgcagctgctgcatctgccgccagcgccgtgcgcggaatggccatgggcgccggctactacggcactctggtggccaactcgagttccaccaataatcccgccagcctgaacgaggagaagctgttgctgctgatggcccagctcgaggccttgacccagcgcctgggcgagctgacccagcaggtggctcagctgcaggagcagacgcgggccgcggttgccacggtgaaatccaaataaaaaatgaatcaataaataaacggagacggttgttgattttaacacagagtctgaatctttatttgatttttcgcgcgcggtaggccctggaccaccggtctcgatcattgagcacccggtggatcttttccaggacccggtagaggtgggcttggatgttgaggtacatgggcatgagcccgtcccgggggtggaggtagctccattgcagggcctcgtgctcgggggtggtgttgtaaatcacccagtcatagcaggggcgcagggcatggtgttgcacaatatctttgaggaggagactgatggccacgggcagccctttggtgtaggtgtttacaaatctgttgagctgggagggatgcatgcggggggagatgaggtgcatcttggcctggatcttgagattggcgatgttaccgcccagatcccgcctggggttcatgttgtgcaggaccaccagcacggtgtatccggtgcacttggggaatttatcatgcaacttggaagggaaggcgtgaaagaatttggcgacgcctttgtgcccgcccaggttttccatgcactcatccatgatgatggcgatgggcccgtgggcggcggcctgggcaaagacgtttcgggggtcggacacatcatagttgtggtcctgggtgaggtcatcataggccattttaatgaatttggggcggagggtgccggactgggggacaaaggtaccctcgatcccgggggcgtagttcccctcacagatctgcatctcccaggctttgagctcggagggggggatcatgtccacctgcggggcgataaagaacacggtttccggggcgggggagatgagctgggccgaaagcaagttccggagcagctgggacttgccgcagccggtggggccgtagatgaccccgatgaccggctgcaggtggtagttgagggagagacagctgccgtcctcccggaggaggggggccacctcgttcatcatctcgcgcacgtgcatgttctcgcgcaccagttccgccaggaggcgctctccccccagggataggagctcctggagcgaggcgaagtttttcagcggcttgagtccgtcggccatgggcattttggagagggtttgttgcaagagttccaggcggtcccagagctcggtgatgtgctctacggcatctcgatccagcagacctcctcgtttcgcgggttgggacggctgcgggagtagggcaccagacgatgggcgtccagcgcagccagggtccggtccttccagggtcgcagcgtccgcgtcagggtggtctccgtcacggtgaaggggtgcgcgccgggctgggcgcttgcgagggtgcgcttcaggctcatccggctggtcgaaaaccgctcccgatcggcgccctgcgcgtcggccaggtagcaattgaccatgagttcgtagttgagcgcctcggccgcgtggcctttggcgcggagcttacctttggaagtctgcccgcaggcgggacagaggagggacttgagggcgtagagcttgggggcgaggaagacggactcgggggcgtaggcgtccgcgccgcagtgggcgcagacggtctcgcactccacgagccaggtgaggtcgggctggtcggggtcaaaaaccagtttcccgccgttctttttgatgcgtttcttacctttggtctccatgagctcgtgtccccgctgggtgacaaagaggctgtccgtgtccccgtagaccgactttatgggccggtcctcgagcggtgtgccgcggtcctcctcgtagaggaaccccgcccactccgagacgaaagcccgggtccaggccagcacgaaggaggccacgtgggacgggtagcggtcgttgtccaccagcgggtccaccttttccagggtatgcaaacacatgtccccctcgtccacatccaggaaggtgattggcttgtaagtgtaggccacgtgaccgggggtcccggccgggggggtataaaagggtgcgggtccctgctcgtcctcactgtcttccggatcgctgtccaggagcgccagctgttggggtaggtattccctctcgaaggcgggcatgacctcggcactcaggttgtcagtttctagaaacgaggaggatttgatattgacggtgccggcggagatgcctttcaagagcccctcgtccatctggtcagaaaagacgatctttttgttgtcgagcttggtggcgaaggagccgtagagggcgttggagaggagcttggcgatggagcgcatggtctggtttttttccttgtcggcgcgctccttggcggcgatgttgagctgcacgtactcgcgcgccacgcacttccattcggggaagacggtggtcagctcgtcgggcacgattctgacctgccagccccgattatgcagggtgatgaggtccacactggtggccacctcgccgcgcaggggctcattagtccagcagaggcgtccgcccttgcgcgagcagaaggggggcagggggtccagcatgacctcgtcgggggggtcggcatcgatggtgaagatgccgggcaggaggtcggggtcaaagtagctgatggaagtggccagatcgtccagggcagcttgccattcgcgcacggccagcgcgcgctcgtagggactgaggggcgtgccccagggcatgggatgggtaagcgcggaggcgtacatgccgcagatgtcgtagacgtagaggggctcctcgaggatgccgatgtaggtggggtagcagcgccccccgcggatgctggcgcgcacgtagtcatacagctcgtgcgagggggcgaggagccccgggcccaggttggtgcgactgggcttttcggcgcggtagacgatctggcggaaaatggcatgcgagttggaggagatggtgggcctttggaagatgttgaagtgggcgtggggcagtccgaccgagtcgcggatgaagtgggcgtaggagtcttgcagcttggcgacgagctcggcggtgactaggacgtccagagcgcagtagtcgagggtctcctggatgatgtcatacttgagctgtcccttttgtttccacagctcgcggttgagaaggaactcttcgcggtccttccagtactcttcgagggggaacccgtcctgatctgcacggtaagagcctagcatgtagaactggttgacggccttgtaggcgcagcagcccttctccacggggagggcgtaggcctgggcggccttgcgcagggaggtgtgcgtgagggcgaaagtgtccctgaccatgaccttgaggaactggtgcttgaagtcgatatcgtcgcagcccccctgctcccagagctggaagtccgtgcgcttcttgtaggcggggttgggcaaagcgaaagtaacatcgttgaagaggatcttgcccgcgcggggcataaagttgcgagtgatgcggaaaggttggggcacctcggcccggttgttgatgacctgggcggcgagcacgatctcgtcgaagccgttgatgttgtggcccacgatgtagagttccacgaatcgcggacggcccttgacgtggggcagtttcttgagctcctcgtaggtgagctcgtcggggtcgctgagcccgtgctgctcgagcgcccagtcggcgagatgggggttggcgcggaggaaggaagtccagagatccacggccagggcggtttgcagacggtcccggtactgacggaactgctgcccgacggccattttttcgggggtgacgcagtagaaggtgcgggggtccccgtgccagcgatcccatttgagctggagggcgagatcgagggcgagctcgacgagccggtcgtccccggagagtttcatgaccagcatgaaggggacgagctgcttgccgaaggaccccatccaggtgtaggtttccacatcgtaggtgaggaagagcctttcggtgcgaggatgcgagccgatggggaagaactggatctcctgccaccaattggaggaatggctgttgatgtgatggaagtagaaatgccgacggcgcgccgaacactcgtgcttgtgtttatacaagcggccacagtgctcgcaacgctgcacgggatgcacgtgctgcacgagctgtacctgagttcctttgacgaggaatttcagtgggaagtggagtcgtggcgcctgcatctcgtgctgtactacgtcgtggtggtcggcctggccctcttctgcctcgatggtggtcatgctgacgagcccgcgcgggaggcaggtccagacctcggcgcgagcgggtcggagagcgaggacgagggcgcgcaggccggagctgtccagggtcctgagacgctgcggagtcaggtcagtgggcagcggcggcgcgcggttgacttgcaggagtttttccagggcgcgcgggaggtccagatggtacttgatctccaccgcgccattggtggcgacgtcgatggcttgcagggtcccgtgcccctggggtgtgaccaccgtcccccgtttcttcttgggcggctggggcgacgggggcggtgcctcttccatggttagaagcggcggcgaggacgcgcgccgggcggcaggggcggctcggggcccggaggcaggggcggcaggggcacgtcggcgccgcgcgcgggtaggttctggtactgcgcccggagaagactggcgtgagcgacgacgcgacggttgacgtcctggatctgacgcctctgggtgaaggccacgggacccgtgagtttgaacctgaaagagagttcgacagaatcaatctcggtatcgttgacggcggcctgccgcaggatctcttgcacgtcgcccgagttgtcctggtaggcgatctcggtcatgaactgctcgatctcctcctcttgaaggtctccgcggccggcgcgctccacggtggccgcgaggtcgttggagatgcggcccatgagctgcgagaaggcgttcatgcccgcctcgttccagacgcggctgtagaccacgacgccctcgggatcgcgggcgcgcatgaccacctgggcgaggttgagctccacgtggcgcgtgaagaccgcgtagttgcagaggcgctggtagaggtagttgagcgtggtggcgatgtgctcggtgacgaagaaatacatgatccagcggcggagcggcatctcgctgacgtcgcccagcgcctccaaacgttccatggcctcgtaaaagtccacggcgaagttgaaaaactgggagttgcgcgccgagacggtcaactcctcctccagaagacggatgagctcggcgatggtggcgcgcacctcgcgctcgaaggcccccgggagttcctccacttcctcttcttcctcctccactaacatctcttctacttcctcctcaggcggcagtggtggcgggggagggggcctgcgtcgccggcggcgcacgggcagacggtcgatgaagcgctcgatggtctcgccgcgccggcgtcgcatggtctcggtgacggcgcgcccgtcctcgcggggccgcagcgtgaagacgccgccgcgcatctccaggtggccgggggggtccccgttgggcagggagagggcgctgacgatgcatcttatcaattgccccgtagggactccgcgcaaggacctgagcgtctcgagatccacgggatctgaaaaccgctgaacgaaggcttcgagccagtcgcagtcgcaaggtaggctgagcacggtttcttctggcgggtcatgttggttgggagcggggcgggcgatgctgctggtgatgaagttgaaataggcggttctgagacggcggatggtggcgaggagcaccaggtctttgggcccggcttgctggatgcgcagacggtcggccatgccccaggcgtggtcctgacacctggccaggtccttgtagtagtcctgcatgagccgctccacgggcacctcctcctcgcccgcgcggccgtgcatgcgcgtgagcccgaagccgcgctggggctggacgagcgccaggtcggcgacgacgcgctcggcgaggatggcttgctggatctgggtgagggtggtctggaagtcatcaaagtcgacgaagcggtggtaggctccggtgttgatggtgtaggagcagttggccatgacggaccagttgacggtctggtggcccggacgcacgagctcgtggtacttgaggcgcgagtaggcgcgcgtgtcgaagatgtagtcgttgcaggtgcgcaccaggtactggtagccgatgaggaagtgcggcggcggctggcggtagagcggccatcgctcggtggcgggggcgccgggcgcgaggtcctcgagcatggtgcggtggtagccgtagatgtacctggacatccaggtgatgccggcggcggtggtggaggcgcgcgggaactcgcggacgcggttccagatgttgcgcagcggcaggaagtagttcatggtgggcacggtctggcccgtgaggcgcgcgcagtcgtggatgctctatacgggcaaaaacgaaagcggtcagcggctcgactccgtggcctggaggctaagcgaacgggttgggctgcgcgtgtaccccggttcgaatctcgaatcaggctggagccgcagctaacgtggtattggcactcccgtctcgacccaagcctgcaccaaccctccaggatacggaggcgggtcgttttgcaacttttttttggaggccggatgagactagtaagcgcggaaagcggccgaccgcgatggctcgctgccgtagtctggagaagaatcgccagggttgcgttgcggtgtgccccggttcgaggccggccggattccgcggctaacgagggcgtggctgccccgtcgtttccaagaccccatagccagccgacttctccagttacggagcgagcccctcttttgttttgtttgtttttgccagatgcatcccgtactgcggcagatgcgcccccaccaccctccaccgcaacaacagccccctccacagccggcgcttctgcccccgccccagcagcaacttccagccacgaccgccgcggccgccgtgagcggggctggacagagttatgatcaccagctggccttggaagagggcgaggggctggcgcgcctgggggcgtcgtcgccggagcggcacccgcgcgtgcagatgaaaagggacgctcgcgaggcctacgtgcccaagcagaacctgttcagagacaggagcggcgaggagcccgaggagatgcgcgcggcccggttccacgcggggcgggagctgcggcgcggcctggaccgaaagagggtgctgagggacgaggatttcgaggcggacgagctgacggggatcagccccgcgcgcgcgcacgtggccgcggccaacctggtcacggcgtacgagcagaccgtgaaggaggagagcaacttccaaaaatccttcaacaaccacgtgcgcaccctgatcgcgcgcgaggaggtgaccctgggcctgatgcacctgtgggacctgctggaggccatcgtgcagaaccccaccagcaagccgctgacggcgcagctgttcctggtggtgcagcatagtcgggacaacgaagcgttcagggaggcgctgctgaatatcaccgagcccgagggccgctggctcctggacctggtgaacattctgcagagcatcgtggtgcaggagcgcgggctgccgctgtccgagaagctggcggccatcaacttctcggtgctgagtttgggcaagtactacgctaggaagatctacaagaccccgtacgtgcccatagacaaggaggtgaagatcgacgggttttacatgcgcatgaccctgaaagtgctgaccctgagcgacgatctgggggtgtaccgcaacgacaggatgcaccgtgcggtgagcgccagcaggcggcgcgagctgagcgaccaggagctgatgcatagtctgcagcgggccctgaccggggccgggaccgagggggagagctactttgacatgggcgcggacctgcactggcagcccagccgccgggccttggaggcggcggcaggaccctacgtagaagaggtggacgatgaggtggacgaggagggcgagtacctggaagactgatggcgcgaccgtatttttgctagatgcaacaacaacagccacctcctgatcccgcgatgcgggcggcgctgcagagccagccgtccggcattaactcctcggacgattggacccaggccatgcaacgcatcatggcgctgacgacccgcaaccccgaagcctttagacagcagccccaggccaaccggctctcggccatcctggaggccgtggtgccctcgcgctccaaccccacgcacgagaaggtcctggccatcgtgaacgcgctggtggagaacaaggccatccgcggcgacgaggccggcctggtgtacaacgcgctgctggagcgcgtggcccgctacaacagcaccaacgtgcagaccaacctggaccgcatggtgaccgacgtgcgcgaggccgtggcccagcgcgagcggttccaccgcgagtccaacctgggatccatggtggcgctgaacgccttcctcagcacccagcccgccaacgtgccccggggccaggaggactacaccaacttcatcagcgccctgcgcctgatggtgaccgaggtgccccagagcgaggtgtaccagtccgggccggactacttcttccagaccagtcgccagggcttgcagaccgtgaacctgagccaggctttcaagaacttgcagggcctgtggggcgtgcaggccccggtcggggaccgcgcgacggtgtcgagcctgctgacgccgaactcgcgcctgctgctgctgctggtggcccccttcacggacagcggcagcatcaaccgcaactcgtacctgggctacctgattaacctgtaccgcgaggccatcggccaggcgcacgtggacgagcagacctaccaggagatcacccacgtgagccgcgccctgggccaggacgacccgggcaacctggaagccaccctgaactttttgctgaccaaccggtcgcagaagatcccgccccagtacgcgctcagcaccgaggaggagcgcatcctgcgttacgtgcagcagagcgtgggcctgttcctgatgcaggagggggccacccccagcgccgcgctcgacatgaccgcgcgcaacatggagcccagcatgtacgccagcaaccgcccgttcatcaataaactgatggactacttgcatcgggcggccgccatgaactctgactatttcaccaacgccatcctgaatccccactggctcccgccgccggggttctacacgggcgagtacgacatgcccgaccccaatgacgggttcctgtgggacgatgtggacagcagcgtgttctccccccgaccgggtgctaacgagcgccccttgtggaagaaggaaggcagcgaccgacgcccgtcctcggcgctgtccggccgcgagggtgctgccgcggcggtgcccgaggccgccagtcctttcccgagcttgcccttctcgctgaacagtatccgcagcagcgagctgggcaggatcacgcgcccgcgcttgctgggcgaagaggagtacttgaatgactcgctgttgagacccgagcgggagaagaacttccccaataacgggatagaaagcctggtggacaagatgagccgctggaagacgtatgcgcaggagcacagggacgatccccgggcgtcgcagggggccacgagccggggcagcgccgcccgtaaacgccggtggcacgacaggcagcggggacagatgtgggacgatgaggactccgccgacgacagcagcgtgttggacttgggtgggagtggtaacccgttcgctcacctgcgcccccgtatcgggcgcatgatgtaagagaaaccgaaaataaatgatactcaccaaggccatggcgaccagcgtgcgttcgtttcttctctgttgttgttgtatctagtatgatgaggcgtgcgtacccggagggtcctcctccctcgtacgagagcgtgatgcagcaggcgatggcggcggcggcgatgcagcccccgctggaggctccttacgtgcccccgcggtacctggcgcctacggaggggcggaacagcattcgttactcggagctggcacccttgtacgataccacccggttgtacctggtggacaacaagtcggcggacatcgcctcgctgaactaccagaacgaccacagcaacttcctgaccaccgtggtgcagaacaatgacttcacccccacggaggccagcacccagaccatcaactttgacgagcgctcgcggtggggcggccagctgaaaaccatcatgcacaccaacatgcccaacgtgaacgagttcatgtacagcaacaagttcaaggcgcgggtgatggtctcccgcaagacccccaatggggtgacagtgacagaggattatgatggtagtcaggatgagctgaagtatgaatgggtggaatttgagctgcccgaaggcaacttctcggtgaccatgaccatcgacctgatgaacaacgccatcatcgacaattacttggcggtggggcggcagaacggggtgctggagagcgacatcggcgtgaagttcgacactaggaacttcaggctgggctgggaccccgtgaccgagctggtcatgcccggggtgtacaccaacgaggctttccatcccgatattgtcttgctgcccggctgcggggtggacttcaccgagagccgcctcagcaacctgctgggcattcgcaagaggcagcccttccaggaaggcttccagatcatgtacgaggatctggaggggggcaacatccccgcgctcctggatgtcgacgcctatgagaaaagcaaggaggatgcagcagctgaagcaactgcagccgtagctaccgcctctaccgaggtcaggggcgataattttgcaagcgccgcagcagtggcagcggccgaggcggctgaaaccgaaagtaagatagtcattcagccggtggagaaggatagcaagaacaggagctacaacgtactaccggacaagataaacaccgcctaccgcagctggtacctagcctacaactatggcgaccccgagaagggcgtgcgctcctggacgctgctcaccacctcggacgtcacctgcggcgtggagcaagtctactggtcgctgcccgacatgatgcaagacccggtcaccttccgctccacgcgtcaagttagcaactacccggtggtgggcgccgagctcctgcccgtctactccaagagcttcttcaacgagcaggccgtctactcgcagcagctgcgcgccttcacctcgcttacgcacgtcttcaaccgcttccccgagaaccagatcctcgtccgcccgcccgcgcccaccattaccaccgtcagtgaaaacgttcctgctctcacagatcacgggaccctgccgctgcgcagcagtatccggggagtccagcgcgtgaccgttactgacgccagacgccgcacctgcccctacgtctacaaggccctgggcatagtcgcgccgcgcgtcctctcgagccgcaccttctaaatgtccattctcatctcgcccagtaataacaccggttggggcctgcgcgcgcccagcaagatgtacggaggcgctcgccaacgctccacgcaacaccccgtgcgcgtgcgcgggcacttccgcgctccctggggcgccctcaagggccgcgtgcggtcgcgcaccaccgtcgacgacgtgatcgaccaggtggtggccgacgcgcgcaactacacccccgccgccgcgcccgtctccaccgtggacgccgtcatcgacagcgtggtggccgacgcgcgccggtacgcccgcgccaagagccggcggcggcgcatcgcccggcggcaccggagcacccccgccatgcgcgcggcgcgagccttgctgcgcagggccaggcgcacgggacgcagggccatgctcagggcggccagacgcgcggcttcaggcgccagcgccggcaggacccggagacgcgcggccacggcggcggcagcggccatcgccagcatgtcccgcccgcggcgagggaacgtgtactgggtgcgcgacgccgccaccggtgtgcgcgtgcccgtgcgcacccgcccccctcgcacttgaagatgttcacttcgcgatgttgatgtgtcccagcggcgaggaggatgtccaagcgcaaattcaaggaagagatgctccaggtcatcgcgcctgagatctacggccctgcggtggtgaaggaggaaagaaagccccgcaaaatcaagcgggtcaaaaaggacaaaaaggaagaagaaagtgatgtggacggattggtggagtttgtgcgcgagttcgccccccggcggcgcgtgcagtggcgcgggcggaaggtgcaaccggtgctgagacccggcaccaccgtggtcttcacgcccggcgagcgctccggcaccgcttccaagcgctcctacgacgaggtgtacggggatgatgatattctggagcaggcggccgagcgcctgggcgagtttgcttacggcaagcgcagccgttccgcaccgaaggaagaggcggtgtccatcccgctggaccacggcaaccccacgccgagcctcaagcccgtgaccttgcagcaggtgctgccgaccgcggcgccgcgccgggggttcaagcgcgagggcgaggatctgtaccccaccatgcagctgatggtgcccaagcgccagaagctggaagacgtgctggagaccatgaaggtggacccggacgtgcagcccgaggtcaaggtgcggcccatcaagcaggtggccccgggcctgggcgtgcagaccgtggacatcaagattcccacggagcccatggaaacgcagaccgagcccatgatcaagcccagcaccagcaccatggaggtgcagacggatccctggatgccatcggctcctagtcgaagaccccggcgcaagtacggcgcggccagcctgctgatgcccaactacgcgctgcatccttccatcatccccacgccgggctaccgcggcacgcgcttctaccgcggtcataccagcagccgccgccgcaagaccaccactcgccgccgccgtcgccgcaccgccgctgcaaccacccctgccgccctggtgcggagagtgtaccgccgcggccgcgcacctctgaccctgccgcgcgcgcgctaccacccgagcatcgccatttaaactttcgcctgctttgcagatcaatggccctcacatgccgccttcgcgttcccattacgggctaccgaggaagaaaaccgcgccgtagaaggctggcggggaacgggatgcgtcgccaccaccaccggcggcggcgcgccatcagcaagcggttggggggaggcttcctgcccgcgctgatccccatcatcgccgcggcgatcggggcgatccccggcattgcttccgtggcggtgcaggcctctcagcgccactgagacacacttggaaacatcttgtaataaaccaatggactctgacgctcctggtcctgtgatgtgttttcgtagacagatggaagacatcaatttttcgtccctggctccgcgacacggcacgcggccgttcatgggcacctggagcgacatcggcaccagccaactgaacgggggcgccttcaattggagcagtctctggagcgggcttaagaatttcgggtccacgcttaaaacctatggcagcaaggcgtggaacagcaccacagggcaggcgctgagggataagctgaaagagcagaacttccagcagaaggtggtcgatgggctcgcctcgggcatcaacggggtggtggacctggccaaccaggccgtgcagcggcagatcaacagccgcctggacccggtgccgcccgccggctccgtggagatgccgcaggtggaggaggagctgcctcccctggacaagcggggcgagaagcgaccccgccccgatgcggaggagacgctgctgacgcacacggacgagccgcccccgtacgaggaggcggtgaaactgggtctgcccaccacgcggcccatcgcgcccctggccaccggggtgctgaaacccgaaaagcccgcgaccctggacttgcctcctccccagccttcccgcccctctacagtggctaagcccctgccgccggtggccgtggcccgcgcgcgacccgggggcaccgcccgccctcatgcgaactggcagagcactctgaacagcatcgtgggtctgggagtgcagagtgtgaagcgccgccgctgctattaaacctaccgtagcgcttaacttgcttgtctgtgtgtgtatgtattatgtcgccgccgccgctgtccaccagaaggaggagtgaagaggcgcgtcgccgagttgcaagatggccaccccatcgatgctgccccagtgggcgtacatgcacatcgccggacaggacgcttcggagtacctgagtccgggtctggtgcagtttgcccgcgccacagacacctacttcagtctggggaacaagtttaggaaccccacggtggcgcccacgcacgatgtgaccaccgaccgcagccagcggctgacgctgcgcttcgtgcccgtggaccgcgaggacaacacctactcgtacaaagtgcgctacacgctggccgtgggcgacaaccgcgtgctggacatggccagcacctactttgacatccgcggcgtgctggatcggggccctagcttcaaaccctactccggcaccgcctacaacagtctggcccccaagggagcacccaacacttgtcagtggacatataaagccgatggtgaaactgccacagaaaaaacctatacatatggaaatgcacccgtgcagggcattaacatcacaaaagatggtattcaacttggaactgacaccgatgatcagccaatctacgcagataaaacctatcagcctgaacctcaagtgggtgatgctgaatggcatgacatcactggtactgatgaaaagtatggaggcagagctcttaagcctgataccaaaatgaagccttgttatggttcttttgccaagcctactaataaagaaggaggtcaggcaaatgtgaaaacaggaacaggcactactaaagaatatgacatagacatggctttctttgacaacagaagtgcggctgctgctggcctagctccagaaattgttttgtatactgaaaatgtggatttggaaactccagatacccatattgtatacaaagcaggcacagatgacagcagctcttctattaatttgggtcagcaagccatgcccaacagacctaactacattggtttcagagacaactttatcgggctcatgtactacaacagcactggcaatatgggggtgctggccggtcaggcttctcagctgaatgctgtggttgacttgcaagacagaaacaccgagctgtcctaccagctcttgcttgactctctgggtgacagaacccggtatttcagtatgtggaatcaggcggtggacagctatgatcctgatgtgcgcattattgaaaatcatggtgtggaggatgaacttcccaactattgtttccctctggatgctgttggcagaacagatacttatcagggaattaaggctaatggaactgatcaaaccacatggaccaaagatgacagtgtcaatgatgctaatgagataggcaagggtaatccattcgccatggaaatcaacatccaagccaacctgtggaggaacttcctctacgccaacgtggccctgtacctgcccgactcttacaagtacacgccggccaatgttaccctgcccaccaacaccaacacctacgattacatgaacggccgggtggtggcgccctcgctggtggactcctacatcaacatcggggcgcgctggtcgctggatcccatggacaacgtgaaccccttcaaccaccaccgcaatgcggggctgcgctaccgctccatgctcctgggcaacgggcgctacgtgcccttccacatccaggtgccccagaaatttttcgccatcaagagcctcctgctcctgcccgggtcctacacctacgagtggaacttccgcaaggacgtcaacatgatcctgcagagctccctcggcaacgacctgcgcacggacggggcctccatctccttcaccagcatcaacctctacgccaccttcttccccatggcgcacaacacggcctccacgctcgaggccatgctgcgcaacgacaccaacgaccagtccttcaacgactacctctcggcggccaacatgctctaccccatcccggccaacgccaccaacgtgcccatctccatcccctcgcgcaactgggccgccttccgcggctggtccttcacgcgtctcaagaccaaggagacgccctcgctgggctccgggttcgacccctacttcgtctactcgggctccatcccctacctcgacggcaccttctacctcaaccacaccttcaagaaggtctccatcaccttcgactcctccgtcagctggcccggcaacgaccggctcctgacgcccaacgagttcgaaatcaagcgcaccgtcgacggcgagggctacaacgtggcccagtgcaacatgaccaaggactggttcctggtccagatgctggcccactacaacatcggctaccagggcttctacgtgcccgagggctacaaggaccgcatgtactccttcttccgcaacttccagcccatgagccgccaggtggtggacgaggtcaactacaaggactaccaggccgtcaccctggcctaccagcacaacaactcgggcttcgtcggctacctcgcgcccaccatgcgccagggccagccctaccccgccaactacccctacccgctcatcggcaagagcgccgtcaccagcgtcacccagaaaaagttcctctgcgacagggtcatgtggcgcatccccttctccagcaacttcatgtccatgggcgcgctcaccgacctcggccagaacatgctctatgccaactccgcccacgcgctagacatgaatttcgaagtcgaccccatggatgagtccacccttctctatgttgtcttcgaagtcttcgacgtcgtccgagtgcaccagccccaccgcggcgtcatcgaggccgtctacctgcgcacccccttctcggccggtaacgccaccacctaagctcttgcttcttgcaagccatggccgcgggctccggcgagcaggagctcagggccatcatccgcgacctgggctgcgggccctacttcctgggcaccttcgataagcgcttcccgggattcatggccccgcacaagctggcctgcgccatcgtcaacacggccggccgcgagaccgggggcgagcactggctggccttcgcctggaacccgcgctcgaacacctgctacctcttcgaccccttcgggttctcggacgagcgcctcaagcagatctaccagttcgagtacgagggcctgctgcgccgcagcgccctggccaccgaggaccgctgcgtcaccctggaaaagtccacccagaccgtgcagggtccgcgctcggccgcctgcgggctcttctgctgcatgttcctgcacgccttcgtgcactggcccgaccgccccatggacaagaaccccaccatgaacttgctgacgggggtgcccaacggcatgctccagtcgccccaggtggaacccaccctgcgccgcaaccaggaggcgctctaccgcttcctcaactcccactccgcctactttcgctcccaccgcgcgcgcatcgagaaggccaccgccttcgaccgcatgaatcaagacatgtaaaccgtgtgtgtatgttaaatgtctttaataaacagcactttcatgttacacatgcatctgagatgatttatttagaaatcgaaagggttctgccgggtctcggcatggcccgcgggcagggacacgttgcggaactggtacttggccagccacttgaactcggggatcagcagtttgggcagcggggtgtcggggaaggagtcggtccacagcttccgcgtcagttgcagggcgcccagcaggtcgggcgcggagatcttgaaatcgcagttgggacccgcgttctgcgcgcgggagttgcggtacacggggttgcagcactggaacaccatcagggccgggtgcttcacgctcgccagcaccgtcgcgtcggtgatgctctccacgtcgaggtcctcggcgttggccatcccgaagggggtcatcttgcaggtctgccttcccatggtgggcacgcacccgggcttgtggttgcaatcgcagtgcagggggatcagcatcatctgggcctggtcggcgttcatccccgggtacatggccttcatgaaagcctccaattgcctgaacgcctgctgggccttggctccctcggtgaagaagaccccgcaggacttgctagagaactggttggtggcgcacccggcgtcgtgcacgcagcagcgcgcgtcgttgttggccagctgcaccacgctgcgcccccagcggttctgggtgatcttggcccggtcggggttctccttcagcgcgcgctgcccgttctcgctcgccacatccatctcgatcatgtgctccttctggatcatggtggtcccgtgcaggcaccgcagcttgccctcggcctcggtgcacccgtgcagccacagcgcgcacccggtgcactcccagttcttgtgggcgatctgggaatgcgcgtgcacgaagccctgcaggaagcggcccatcatggtggtcagggtcttgttgctagtgaaggtcagcggaatgccgcggtgctcctcgttgatgtacaggtggcagatgcggcggtacacctcgccctgctcgggcatcagctggaagttggctttcaggtcggtctccacgcggtagcggtccatcagcatagtcatgatttccatacccttctcccaggccgagacgatgggcaggctcatagggttcttcaccatcatcttagcgctagcagccgcggccagggggtcgctctcgtccagggtctcaaagctccgcttgccgtccttctcggtgatccgcaccggggggtagctgaagcccacggccgccagctcctcctcggcctgtctttcgtcctcgctgtcctggctgacgtcctgcaggaccacatgcttggtcttgcggggtttcttcttgggcggcagcggcggcggagatgttggagatggcgagggggagcgcgagttctcgctcaccactactatctcttcctcttcttggtccgaggccacgcggcggtaggtatgtctcttcgggggcagaggcggaggcgacgggctctcgccgccgcgacttggcggatggctggcagagccccttccgcgttcgggggtgcgctcccggcggcgctctgactgacttcctccgcggccggccattgtgttctcctagggaggaacaacaagcatggagactcagccatcgccaacctcgccatctgcccccaccgccgacgagaagcagcagcagcagaatgaaagcttaaccgccccgccgcccagccccgccacctccgacgcggccgtcccagacatgcaagagatggaggaatccatcgagattgacctgggctatgtgacgcccgcggagcacgaggaggagctggcagtgcgcttttcacaagaagagatacaccaagaacagccagagcaggaagcagagaatgagcagagtcaggctgggctcgagcatgacggcgactacctccacctgagcgggggggaggacgcgctcatcaagcatctggcccggcaggccaccatcgtcaaggatgcgctgctcgaccgcaccgaggtgcccctcagcgtggaggagctcagccgcgcctacgagttgaacctcttctcgccgcgcgtgccccccaagcgccagcccaatggcacctgcgagcccaacccgcgcctcaacttctacccggtcttcgcggtgcccgaggccctggccacctaccacatctttttcaagaaccaaaagatccccgtctcctgccgcgccaaccgcacccgcgccgacgcccttttcaacctgggtcccggcgcccgcctacctgatatcgcctccttggaagaggttcccaagatcttcgagggtctgggcagcgacgagactcgggccgcgaacgctctgcaaggagaaggaggagagcatgagcaccacagcgccctggtcgagttggaaggcgacaacgcgcggctggcggtgctcaaacgcacggtcgagctgacccatttcgcctacccggctctgaacctgccccccaaagtcatgagcgcggtcatggaccaggtgctcatcaagcgcgcgtcgcccatctccgaggacgagggcatgcaagactccgaggagggcaagcccgtggtcagcgacgagcagctggcccggtggctgggtcctaatgctagtccccagagtttggaagagcggcgcaaactcatgatggccgtggtcctggtgaccgtggagctggagtgcctgcgccgcttcttcgccgacgcggagaccctgcgcaaggtcgaggagaacctgcactacctcttcaggcacgggttcgtgcgccaggcctgcaagatctccaacgtggagctgaccaacctggtctcctacatgggcatcttgcacgagaaccgcctggggcagaacgtgctgcacaccaccctgcgcggggaggcccggcgcgactacatccgcgactgcgtctacctctacctctgccacacctggcagacgggcatgggcgtgtggcagcagtgtctggaggagcagaacctgaaagagctctgcaagctcctgcagaagaacctcaagggtctgtggaccgggttcgacgagcgcaccaccgcctcggacctggccgacctcattttccccgagcgcctcaggctgacgctgcgcaacggcctgcccgactttatgagccaaagcatgttgcaaaactttcgctctttcatcctcgaacgctccggaatcctgcccgccacctgctccgcgctgccctcggacttcgtgccgctgaccttccgcgagtgccccccgccgctgtggagccactgctacctgctgcgcctggccaactacctggcctaccactcggacgtgatcgaggacgtcagcggcgagggcctgctcgagtgccactgccgctgcaacctctgcacgccgcaccgctccctggcctgcaacccccagctgctgagcgagacccagatcatcggcaccttcgagttgcaagggcccagcgaaggcgagggttcagccgccaaggggggtctgaaactcaccccggggctgtggacctcggcctacttgcgcaagttcgtgcccgaggactaccatcccttcgagatcaggttctacgaggaccaatcccatccgcccaaggccgagctgtcggcctgcgtcatcacccagggggcgatcctggcccaattgcaagccatccagaaatcccgccaagaattcttgctgaaaaagggccgcggggtctacctcgacccccagaccggtgaggagctcaaccccggcttcccccaggatgccccgaggaaacaagaagctgaaagtggagctgccgcccgtggaggatttggaggaagactgggagaacagcagtcaggcagaggaggaggagatggaggaagactgggacagcactcaggcagaggaggacagcctgcaagacagtctggaggaagacgaggaggaggcagaggaggaggtggaagaagcagccgccgccagaccgtcgtcctcggcgggggagaaagcaagcagcacggataccatctccgctccgggtcggggtcccgctcgaccacacagtagatgggacgagaccggacgattcccgaaccccaccacccagaccggtaagaaggagcggcagggatacaagtcctggcgggggcacaaaaacgccatcgtctcctgcttgcaggcctgcgggggcaacatctccttcacccggcgctacctgctcttccaccgcggggtgaactttccccgcaacatcttgcattactaccgtcacctccacagcccctactacttccaagaagaggcagcagcagcagaaaaagaccagcagaaaaccagcagctagaaaatccacagcggcggcagcaggtggactgaggatcgcggcgaacgagccggcgcaaacccgggagctgaggaaccggatctttcccaccctctatgccatcttccagcagagtcgggggcaggagcaggaactgaaagtcaagaaccgttctctgcgctcgctcacccgcagttgtctgtatcacaagagcgaagaccaacttcagcgcactctcgaggacgccgaggctctcttcaacaagtactgcgcgctcactcttaaagagtagcccgcgcccgcccagtcgcagaaaaaggcgggaattacgtcacctgtgcccttcgccctagccgcctccacccatcatcatgagcaaagagattcccacgccttacatgtggagctaccagccccagatgggcctggccgccggtgccgcccaggactactccacccgcatgaattggctcagcgccgggcccgcgatgatctcacgggtgaatgacatccgcgcccaccgaaaccagatactcctagaacagtcagcgctcaccgccacgccccgcaatcacctcaatccgcgtaattggcccgccgccctggtgtaccaggaaattccccagcccacgaccgtactacttccgcgagacgcccaggccgaagtccagctgactaactcaggtgtccagctggcgggcggcgccaccctgtgtcgtcaccgccccgctcagggtataaagcggctggtgatccggggcagaggcacacagctcaacgacgaggtggtgagctcttcgctgggtctgcgacctgacggagtcttccaactcgccggatcggggagatcttccttcacgcctcgtcaggccgtcctgactttggagagttcgtcctcgcagccccgctcgggtggcatcggcactctccagttcgtggaggagttcactccctcggtctacttcaaccccttctccggctcccccggccactacccggacgagttcatcccgaacttcgacgccatcagcgagtcggtggacggctacgattgaatgtcccatggtggcgcagctgacctagctcggcttcgacacctggaccactgccgccgcttccgctgcttcgctcgggatctcgccgagtttgcctactttgagctgcccgaggagcaccctcagggcccggcccacggagtgcggatcgtcgtcgaagggggcctcgactcccacctgcttcggatcttcagccagcgtccgatcctggtcgagcgcgagcaaggacagacccttctgactctgtactgcatctgcaaccaccccggcctgcatgaaagtctttgttgtctgctgtgtactgagtataataaaagctgagatcagcgactactccggacttccgtgtgttcctgaatccatcaaccagtctttgttcttcaccgggaacgagaccgagctccagctccagtgtaagccccacaagaagtacctcacctggctgttccagggctccccgatcgccgttgtcaaccactgcgacaacgacggagtcctgctgagcggccctgccaaccttactttttccacccgcagaagcaagctccagctcttccaacccttcctccccgggacctatcagtgcgtctcgggaccctgccatcacaccttccacctgatcccgaataccacagcgtcgctccccgctactaacaaccaaactaacctccaccaacgccaccgtcgcgacctttctgaatctaatactaccacccacaccggaggtgagctccgaggtcaaccaacctctgggatttactacggcccctgggaggtggttgggttaatagcgctaggcctagttgcgggtgggcttttggttctctgctacctatacctcccttgctgttcgtacttagtggtgctgtgttgctggtttaagaaatggggaagatcaccctagtgagctgcggtgcgctggtggcggtgttgctttcgattgtgggactgggcggtgcggctgtagtgaaggagaaggccgatccctgcttgcatttcaatcccaacaaatgccagctgagttttcagcccgatggcaatcggtgcgcggtactgatcaagtgcggatgggaatgcgagaacgtgagaatcgagtacaataacaagactcggaacaatactctcgcgtccgtgtggcagcccggggaccccgagtggtacaccgtctctgtccccggtgctgacggctccccgcgcaccgtgaataatactttcatttttgcgcacatgtgcgacacggtcatgtggatgagcaagcagtacgatatgtggccccccacgaaggagaacatcgtggtcttctccatcgcttacagcctgtgcacggcgctaatcaccgctatcgtgtgcctgagcattcacatgctcatcgctattcgccccagaaataatgccgaaaaagaaaaacagccataacgttttttttcacacctttttcagaccatggcctctgttaaatttttgcttttatttgccagtctcattgccgtcattcatggaatgagtaatgagaaaattactatttacactggcactaatcacacattgaaaggtccagaaaaagccacagaagtttcatggtattgttattttaatgaatcagatgtatctactgaactctgtggaaacaataacaaaaaaaatgagagcattactctcatcaagtttcaatgtggatctgacttaaccctaattaacatcactagagactatgtaggtatgtattatggaactacagcaggcatttcggacatggaattttatcaagtttctgtgtctgaacccaccacgcctagaatgaccacaaccacaaaaactacacctgttaccactatgcagctcactaccaataacatttttgccatgcgtcaaatggtcaacaatagcactcaacccaccccacccagtgaggaaattcccaaatccatgattggcattattgttgctgtagtggtgtgcatgttgatcatcgccttgtgcatggtgtactatgccttctgctacagaaagcacagactgaacgacaagctggaacacttactaagtgttgaattttaattttttagaaccatgaagatcctaggccttttaattttttctatcattacctctgctctatgcaattctgacaatgaggacgttactgtcgttgtcggatcaaattatacactgaaaggtccagcgaagggtatgctttcgtggtattgctattttggatctgacactacagaaactgaattatgcaatcttaagaatggcaaaattcaaaattctaaaattaacaattatatatgcaatggtactgatctgatactcctcaatatcacgaaatcatatgctggcagttacacctgccctggagatgatgctgacagtatgattttttacaaagtaactgttgttgatcccactactccacctccacccaccacaactactcacaccacacacacagatcaaaccgcagcagaggaggcagcaaagttagccttgcaggtccaagacagttcatttgttggcattacccctacacctgatcagcggtgtccggggctgctagtcagcggcattgtcggtgtgctttcgggattagcagtcataatcatctgcatgttcatttttgcttgctgctatagaaggctttaccgacaaaaatcagacccactgctgaacctctatgtttaattttttccagagtcatgaaggcagttagcgctctagttttttgttctttgattggcattgttttttgcaatcctattcctaaagttagctttattaaagatgtgaatgttactgaggggggcaatgtgacactggtaggtgtagagggtgctgaaaacaccacctggacaaaataccacctcaatgggtggaaagatatttgcaattggagtgtattagtttatacatgtgagggagttaatcttaccattgtcaatgccacctcagctcaaaatggtagaattcaaggacaaagtgtcagtgtatctaatgggtattttacccaacatacttttatctatgacgttaaagtcataccactgcctacgcctagcccacctagcactaccacacagacaacccacactacacagacaaccacatacagtacattaaatcagcctaccaccactacagcagcagaggttgccagctcgtctggggtccgagtggcatttttgatgttggccccatctagcagtcccactgctagtaccaatgagcagactactgaatttttgtccactgtcgagagccacaccacagctacctccagtgccttctctagcaccgccaatctctcctcgctttcctctacaccaatcagtcccgctactactcctagccccgctcctcttcccactcccctgaagcaaacagacggcggcatgcaatggcagatcaccctgctcattgtgatcgggttggtcatcctggccgtgttgctctactacatcttctgccgccgcattcccaacgcgcaccgcaagccggtctacaagcccatcattgtcgggcagccggagccgcttcaggtggaagggggtctaaggaatcttctcttctcttttacagtatggtgattgaactatgattcctagacaattcttgatcactattcttatctgcctcctccaagtctgtgccaccctcgctctggtggccaacgccagtccagactgtattgggcccttcgcctcctacgtgctctttgccttcaccacctgcatctgctgctgtagcatagtctgcctgcttatcaccttcttccagttcattgactggatctttgtgcgcatcgcctacctgcgccaccacccccagtaccgcgaccagcgagtggcgcggctgctcaggctcctctgataagcatgcgggctctgctacttctcgcgcttctgctgttagtgctcccccgtcccgtcgacccccggtcccccacccagtcccccgaggaggtccgcaaatgcaaattccaagaaccctggaaattcctcaaatgctaccgccaaaaatcagacatgcatcccagctggatcatgatcattgggatcgtgaacattctggcctgcaccctcatctcctttgtgatttacccctgctttgactttggttggaactcgccagaggcgctctatctcccgcctgaacctgacacaccaccacagcaacctcaggcacacgcactaccaccactacagcctaggccacaatacatgcccatattagactatgaggccgagccacagcgacccatgctccccgctattagttacttcaatctaaccggcggagatgactgacccactggccaacaacaacgtcaacgaccttctcctggacatggacggccgcgcctcggagcagcgactcgcccaacttcgcattcgccagcagcaggagagagccgtcaaggagctgcaggatgcggtggccatccaccagtgcaagagaggcatcttctgcctggtgaaacaggccaagatctcctacgaggtcactccaaacgaccatcgcctctcctacgagctcctgcagcagcgccagaagttcacctgcctggtcggagtcaaccccatcgtcatcacccagcagtctggcgataccaaggggtgcatccactgctcctgcgactcccccgactgcgtccacactctgatcaagaccctctgcggcctccgcgacctcctccccatgaactaatcacccccttatccagtgaaataaagatcatattgatgatgattttacagaaataaaaaataatcatttgatttgaaataaagatacaatcatattgatgatttgagtttaacaaaaaaataaagaatcacttacttgaaatctgataccaggtctctgtccatgttttctgccaacaccacttcactcccctcttcccagctctggtactgcaggccccggcgggctgcaaacttcctccacacgctgaaggggatgtcaaattcctcctgtccctcaatcttcattttatcttctatcagatgtccaaaaagcgcgtccgggtggatgatgacttcgaccccgtctacccctacgatgcagacaacgcaccgaccgtgcccttcatcaacccccccttcgtctcttcagatggattccaagagaagcccctgggggtgttgtccctgcgactggccgaccccgtcaccaccaagaacggggaaatcaccctcaagctgggagagggggtggacctcgattcctcgggaaaactcatctccaacacggccaccaaggccgccgcccctctcagtttttccaacaacaccatttcccttaacatggatcaccccttttacactaaagatggaaaattatccttacaagtttctccaccattaaatatactgagaacaagcattctaaacacactagctttaggttttggatcaggtttaggactccgtggctctgccttggcagtacagttagtctctccacttacatttgatactgatggaaacataaagcttaccttagacagaggtttgcatgttacaacaggagatgcaattgaaagcaacataagctgggctaaaggtttaaaatttgaagatggagccatagcaaccaacattggaaatgggttagagtttggaagcagtagtacagaaacaggtgttgatgatgcttacccaatccaagttaaacttggatctggccttagctttgacagtacaggagccataatggctggtaacaaagaagacgataaactcactttgtggacaacacctgatccatcaccaaactgtcaaatactcgcagaaaatgatgcaaaactaacactttgcttgactaaatgtggtagtcaaatactggccactgtgtcagtcttagttgtaggaagtggaaacctaaaccccattactggcaccgtaagcagtgctcaggtgtttctacgttttgatgcaaacggtgttcttttaacagaacattctacactaaaaaaatactgggggtataggcagggagatagcatagatggcactccatataccaatgctgtaggattcatgcccaatttaaaagcttatccaaagtcacaaagttctactactaaaaataatatagtagggcaagtatacatgaatggagatgtttcaaaacctatgcttctcactataaccctcaatggtactgatgacagcaacagtacatattcaatgtcattttcatacacctggactaatggaagctatgttggagcaacatttggggctaactcttataccttctcatacatcgcccaagaatgaacactgtatcccaccctgcatgccaacccttcccaccccactctgtggaacaaactctgaaacacaaaataaaataaagttcaagtgttttattgattcaacagttttacaggattcgagcagttatttttcctccaccctcccaggacatggaatacaccaccctctccccccgcacagccttgaacatctgaatgccattggtgatggacatgcttttggtctccacgttccacacagtttcagagcgagccagtctcgggtcggtcagggagatgaaaccctccgggcactcccgcatctgcacctcacagctcaacagctgaggattgtcctcggtggtcgggatcacggttatctggaagaagcagaagagcggcggtgggaatcatagtccgcgaacgggatcggccggtggtgtcgcatcaggccccgcagcagtcgctgccgccgccgctccgtcaagctgctgctcagggggtccgggtccagggactccctcagcatgatgcccacggccctcagcatcagtcgtctggtgcggcgggcgcagcagcgcatgcggatctcgctcaggtcgctgcagtacgtgcaacacagaaccaccaggttgttcaacagtccatagttcaacacgctccagccgaaactcatcgcgggaaggatgctacccacgtggccgtcgtaccagatcctcaggtaaatcaagtggtgccccctccagaacacgctgcccacgtacatgatctccttgggcatgtggcggttcaccacctcccggtaccacatcaccctctggttgaacatgcagccccggatgatcctgcggaaccacagggccagcaccgccccgcccgccatgcagcgaagagaccccgggtcccggcaatggcaatggaggacccaccgctcgtacccgtggatcatctgggagctgaacaagtctatgttggcacagcacaggcatatgctcatgcatctcttcagcactctcaactcctcgggggtcaaaaccatatcccagggcacggggaactcttgcaggacagcgaaccccgcagaacagggcaatcctcgcacagaacttacattgtgcatggacagggtatcgcaatcaggcagcaccgggtgatcctccaccagagaagcgcgggtctcggtctcctcacagcgtggtaagggggccggccgatacgggtgatggcgggacgcggctgatcgtgttcgcgaccgtgtcatgatgcagttgctttcggacattttcgtacttgctgtagcagaacctggtccgggcgctgcacaccgatcgccggcggcggtctcggcgcttggaacgctcggtgttgaaattgtaaaacagccactctctcagaccgtgcagcagatctagggcctcaggagtgatgaagatcccatcatgcctgatggctctgatcacatcgaccaccgtggaatgggccagacccagccagatgatgcaattttgttgggtttcggtgacggcgggggagggaagaacaggaagaaccatgattaacttttaatccaaacggtctcggagtacttcaaaatgaagatcgcggagatggcacctctcgcccccgctgtgttggtggaaaataacagccaggtcaaaggtgatacggttctcgagatgttccacggtggcttccagcaaagcctccacgcgcacatccagaaacaagacaatagcgaaagcgggagggttctctaattcctcaatcatcatgttacactcctgcaccatccccagataattttcatttttccagccttgaatgattcgaactagttcctgaggtaaatccaagccagccatgataaagagctcgcgcagagcgccctccaccggcattcttaagcacaccctcataattccaagatattctgctcctggttcacctgcagcagattgacaagcggaatatcaaaatctctgccgcgatccctgagctcctccctcagcaataactgtaagtactctttcatatcctctccgaaatttttagccataggaccaccaggaataagattagggcaagccacagtacagataaaccgaagtcctccccagtgagcattgccaaatgcaagactgctataagcatgctggctagacccggtgatatcttccagataactggacagaaaatcgcccaggcaatttttaagaaaatcaacaaaagaaaaatcctccaggtggacgtttagagcctcgggaacaacgatgaagtaaatgcaagcggtgcgttccagcatggttagttagctgatctgtagaaaaaacaaaaatgaacattaaaccatgctagcctggcgaacaggtgggtaaatcgttctctccagcaccaggcaggccacggggtctccggcgcgaccctcgtaaaaattgtcgctatgattgaaaaccatcacagagagacgttcccggtggccggcgtgaatgattcgacaagatgaatacacccccggaacattggcgtccgcgagtgaaaaaaagcgcccgaggaagcaataaggcactacaatgctcagtctcaagtccagcaaagcgatgccatgcggatgaagcacaaaattctcaggtgcgtacaaaatgtaattactcccctcctgcacaggcagcaaagcccccgatccctccaggtacacatacaaagcctcagcgtccatagcttaccgagcagcagcacacaacaggcgcaagagtcagagaaaggctgagctctaacctgtccacccgctctctgctcaatatatagcccagatctacactgacgtaaaggccaaagtctaaaaatacccgccaaataatcacacacgcccagcacacgcccagaaaccggtgacacactcaaaaaaatacgcgcacttcctcaaacgcccaaaactgccgtcatttccgggttcccacgctacgtcatcaaaacacgactttcaaattccgtcgaccgttaaaaacgtcacccgccccgcccctaacggtcgcccgtctctcagccaatcagcgccccgcatccccaaattcaaacacctcatttgcatattaacgcgcacaaaaagtttgaggtatattattgatgatgg

SEQ ID NO: 11 - DNA, 31867 bp, synthetic construct
  misc_feature 1..31867: note = Description of Artificial Sequence: Synthetic polynucleotide
  source 1..31867: mol_type = other DNA
ccatcttcaataatatacctcaaactttttgtgcgcgttaatatgcaaatgaggcgtttgaatttggggaggaagggcggtgattggtcgagggatgagcgaccgttaggggcggggcgagtgacgttttgatgacgtggttgcgaggaggagccagtttgcaagttctcgtgggaaaagtgacgtcaaacgaggtgtggtttgaacacggaaatactcaattttcccgcgctctctgacaggaaatgaggtgtttctgggcggatgcaagtgaaaacgggccattttcgcgcgaaaactgaatgaggaagtgaaaatctgagtaatttcgcgtttatggcagggaggagtatttgccgagggccgagtagactttgaccgattacgtgggggtttcgattaccgtgtttttcacctaaatttccgcgtacggtgtcaaagtccggtgtttttacgtaggtgtcagctgatcgccagggtatttaaacctgcgctctccagtcaagaggccactcttgagtgccagcgagaagagttttctcctccgcgccgcgagtcagatctacactttgaaagtagggataacagggtaatgacattgattattgactagttgttaatagtaatcaattacggggtcattagttcatagcccatatatggagttccgcgttacataacttacggtaaatggcccgcctggctgaccgcccaacgacccccgcccattgacgtcaataatgacgtatgttcccatagtaacgccaatagggactttccattgacgtcaatgggtggagtatttacggtaaactgcccacttggcagtacatcaagtgtatcatatgccaagtccgccccctattgacgtcaatgacggtaaatggcccgcctggcattatgcccagtacatgaccttacgggactttcctacttggcagtacatctacgtattagtcatcgctattaccatggtgatgcggttttggcagtacaccaatgggcgtggatagcggtttgactcacggggatttccaagtctccaccccattgacgtcaatgggagtttgttttggcaccaaaatcaacgggactttccaaaatgtcgtaataaccccgccccgttgacgcaaatgggcggtaggcgtgtacggtgggaggtctatataagcagagctcgtttagtgaaccgtcagatcgcctggaacgccatccacgctgttttgacctccatagaagacagcgatcgcgccaccatggtgagcaagggcgaggagctgttcaccggggtggtgcccatcctggtcgagctggacggcgacgtaaacggccacaagttcagcgtgtccggcgagggcgagggcgatgccacctacggcaagctgaccctgaagttcatctgcaccaccggcaagctgcccgtgccctggcccaccctcgtgaccaccctgacctacggcgtgcagtgcttcagccgctaccccgaccacatgaagcagcacgacttcttcaagtccgccatgcccgaaggctacgtccaggagcgcaccatcttcttcaaggacgacggcaactacaagacccgcgccgaggtgaagttcgagggcgacaccctggtgaaccgcatcgagctgaagggcatcgacttcaaggaggacggcaacatcctggggcacaagctggagtacaactacaacagccacaacgtctatatcatggccgacaagcagaagaacggcatcaaggtgaacttcaagatccgccacaacatcgaggacggcagcgtgcagctcgccgaccactaccagcagaacacccccatcggcgacggccccgtgctgctgcccgacaaccactacctgagcacccagtccgccctgagcaaagaccccaacgagaagcgcgatcacatggtcctgctggagttcgtgaccgccgccgggatcactctcggcatggacgagctttacaagtagtgagtttaaactcccatttaaatgtgagggttaatgcttcgagcagacatgataagatacattgatgagtttggacaaaccacaactagaatgcagtgaaaaaaatgctttatttgtgaaatttgtgatgctattgctttatttgtaaccattataagctgcaataaacaagttaacaacaacaattgcattcattttatgtttcaggttcagggggagatgtgggaggttttttaaagcaagtaaaacctctacaaatgtggtaaaataactataacggtcctaaggtagcgagtgagtagtgttctggggcgggggaggacctgcatgagggccagaataactgaaatctgtgcttttctgtgtgttgcagcagcatgagcggaagcggctcctttgagggaggggtattcagcccttatctgacggggcgtctcccctcctgggcgggagtgcgtcagaatgtgatgggatccacggtggacggccggcccgtgcagcccgcgaactcttcaaccctgacctatgcaaccctgagctcttcgtcgttggacgcagctgccgccgcagctgctgcatctgccgccagcgccgtgcgcggaatggccatgggcgccggctactacggcactctggtggccaactcgagttccaccaataatcccgccagcctgaacgaggagaagctgttgctgctgatggcccagctcgaggccttgacccagcgcctgggcgagctgacccagcaggtggctcagctgcaggagcagacgcgggccgcggttgccacggtgaaatccaaataaaaaatgaatcaataaataaacggagacggttgttgattttaacacagagtctgaatctttatttgatttttcgcgcgcggtaggccctggaccaccggtctcgatcattgagcacccggtggatcttttccaggacccggtagaggtgggcttggatgttgaggtacatgggcatgagcccgtcccgggggtggaggtagctccattgcagggcctcgtgctcgggggtggtgttgtaaatcacccagtcatagcaggggcgcagggcatggtgttgcacaatatctttgaggaggagactgatggccacgggcagccctttggtgtaggtgtttacaaatctgttgagctgggagggatgcatgcggggggagatgaggtgcatcttggcctggatcttgagattggcgatgttaccgcccagatcccgcctggggttcatgttgtgcaggaccaccagcacggtgtatccggtgcacttggggaatttatcatgcaacttggaagggaaggcgtgaaagaatttggcgacgcctttgtgcccgcccaggttttccatgcactcatccatgatgatggcgatgggcccgtgggcggcggcctgggcaaagacgtttcgggggtcggacacatcatagttgtggtcctgggtgaggtcatcataggccattttaatgaatttggggcggagggtgccggactgggggacaaaggtaccctcgatcccgggggcgtagttcccctcacagatctgcatctcccaggctttgagctcggagggggggatcatgtccacctgcggggcgataaagaacacggtttccggggcgggggagatgagctgggccgaaagcaagttccggagcagctgggacttgccgcagccggtggggccgtagatgaccccgatgaccggctgcaggtggtagttgagggagagacagctgccgtcctcccggaggaggggggccacctcgttcatcatctcgcgcacgtgcatgttctcgcgcaccagttccgccaggaggcgctctccccccagggataggagctcctggagcgaggcgaagtttttcagcggcttgagtccgtcggccatgggcattttggagagggtttgttgcaagagttccaggcggtcccagagctcggtgatgtgctctacggcatctcgatccagcagacctcctcgtttcgcgggttgggacggctgcgggagtagggcaccagacgatgggcgtccagcgcagccagggtccggtccttccagggtcgcagcgtccgcgtcagggtggtctccgtcacggtgaaggggtgcgcgccgggctgggcgcttgcgagggtgcgcttcaggctcatccggctggtcgaaaaccgctcccgatcggcgccctgcgcgtcggccaggtagcaattgaccatgagttcgtagttgagcgcctcggccgcgtggcctttggcgcggagcttacctttggaagtctgcccgcaggcgggacagaggagggacttgagggcgtagagcttgggggcgaggaagacggactcgggggcgtaggcgtccgcgccgcagtgggcgcagacggtctcgcactccacgagccaggtgaggtcgggctggtcggggtcaaaaaccagtttcccgccgttctttttgatgcgtttcttacctttggtctccatgagctcgtgtccccgctgggtgacaaagaggctgtccgtgtccccgtagaccgactttatgggccggtcctcgagcggtgtgccgcggtcctcctcgtagaggaaccccgcccactccgagacgaaagcccgggtccaggccagcacgaaggaggccacgtgggacgggtagcggtcgttgtccaccagcgggtccaccttttccagggtatgcaaacacatgtccccctcgtccacatccaggaaggtgattggcttgtaagtgtaggccacgtgaccgggggtcccggccgggggggtataaaagggtgcgggtccctgctcgtcctcactgtcttccggatcgctgtccaggagcgccagctgttggggtaggtattccctctcgaaggcgggcatgacctcggcactcaggttgtcagtttctagaaacgaggaggatttgatattgacggtgccggcggagatgcctttcaagagcccctcgtccatctggtcagaaaagacgatctttttgttgtcgagcttggtggcgaaggagccgtagagggcgttggagaggagcttggcgatggagcgcatggtctggtttttttccttgtcggcgcgctccttggcggcgatgttgagctgcacgtactcgcgcgccacgcacttccattcggggaagacggtggtcagctcgtcgggcacgattctgacctgccagccccgattatgcagggtgatgaggtccacactggtggccacctcgccgcgcaggggctcattagtccagcagaggcgtccgcccttgcgcgagcagaaggggggcagggggtccagcatgacctcgtcgggggggtcggcatcgatggtgaagatgccgggcaggaggtcggggtcaaagtagctgatggaagtggccagatcgtccagggcagcttgccattcgcgcacggccagcgcgctctcgtagggactgaggggcgtgccccagggcatgggatgggtaagcgcggaggcgtacatgccgcagatgtcgtagacgtagaggggctcctcgaggatgccgatgtaggtggggtagcagcgccccccgcggatgctggcgcgcacgtagtcatacagctcgtgcgagggggcgaggagccccgggcccaggttggtgcgactgggcttttcggcgcggtagacgatctggcggaaaatggcatgcgagttggaggagatggtgggcctttggaagatgttgaagtgggcgtggggcagtccgaccgagtcgcggatgaagtgggcgtaggagtcttgcagcttggcgacgagctcggcggtgactaggacgtccagagcgcagtagtcgagggtctcctggatgatgtcatacttgagctgtcccttttgtttccacagctcgcggttgagaaggaactcttcgcggtccttccagtactcttcgagggggaacccgtcctgatctgcacggtaagagcctagcatgtagaactggttgacggccttgtaggcgcagcagcccttctccacggggagggcgtaggcctgggcggccttgcgcagggaggtgtgcgtgagggcgaaagtgtccctgaccatgaccttgaggaactggtgcttgaagtcgatatcgtcgcagcccccctgctcccagagctggaagtccgtgcgcttcttgtaggcggggttgggcaaagcgaaagtaacatcgttgaagaggatcttgcccgcgcggggcataaagttgcgagtgatgcggaaaggttggggcacctcggcccggttgttgatgacctgggcggcgagcacgatctcgtcgaagccgttgatgttgtggcccacgatgtagagttccacgaatcgcggacggcccttgacgtggggcagtttcttgagctcctcgtaggtgagctcgtcggggtcgctgagcccgtgctgctcgagcgcccagtcggcgagatgggggttggcgcggaggaaggaagtccagagatccacggccagggcggtttgcagacggtcccggtactgacggaactgctgcccgacggccattttttcgggggtgacgcagtagaaggtgcgggggtccccgtgccagcgatcccatttgagctggagggcgagatcgagggcgagctcgacgagccggtcgtccccggagagtttcatgaccagcatgaaggggacgagctgcttgccgaaggaccccatccaggtgtaggtttccacatcgtaggtgaggaagagcctttcggtgcgaggatgcgagccgatggggaagaactggatctcctgccaccaattggaggaatggctgttgatgtgatggaagtagaaatgccgacggcgcgccgaacactcgtgcttgtgtttatacaagcggccacagtgctcgcaacgctgcacgggatgcacgtgctgcacgagctgtacctgagttcctttgacgaggaatttcagtgggaagtggagtcgtggcgcctgcatctcgtgctgtactacgtcgtggtggtcggcctggccctcttctgcctcgatggtggtcatgctgacgagcccgcgcgggaggcaggtccagacctcggcgcgagcgggtcggagagcgaggacgagggcgcgcaggccggagctgtccagggtcctgagacgctgcggagtcaggtcagtgggcagcggcggcgcgcggttgacttgcaggagtttttccagggcgcgcgggaggtccagatggtacttgatctccaccgcgccattggtggcgacgtcgatggcttgcagggtcccgtgcccctggggtgtgaccaccgtcccccgtttcttcttgggcggctggggcgacgggggcggtgcctcttccatggttagaagcggcggcgaggacgcgcgccgggcggcaggggcggctcggggcccggaggcaggggcggcaggggcacgtcggcgccgcgcgcgggtaggttctggtactgcgcccggagaagactggcgtgagcgacgacgcgacggttgacgtcctggatctgacgcctctgggtgaaggccacgggacccgtgagtttgaacctgaaagagagttcgacagaatcaatctcggtatcgttgacggcggcctgccgcaggatctcttgcacgtcgcccgagttgtcctggtaggcgatctcggtcatgaactgctcgatctcctcctcttgaaggtctccgcggccggcgcgctccacggtggccgcgaggtcgttggagatgcggcccatgagctgcgagaaggcgttcatgcccgcctcgttccagacgcggctgtagaccacgacgccctcgggatcgcgggcgcgcatgaccacctgggcgaggttgagctccacgtggcgcgtgaagaccgcgtagttgcagaggcgctggtagaggtagttgagcgtggtggcgatgtgctcggtgacgaagaaatacatgatccagcggcggagcggcatctcgctgacgtcgcccagcgcctccaaacgttccatggcctcgtaaaagtccacggcgaagttgaaaaactgggagttgcgcgccgagacggtcaactcctcctccagaagacggatgagctcggcgatggtggcgcgcacctcgcgctcgaaggcccccgggagttcctccacttcctcttcttcctcctccactaacatctcttctacttcctcctcaggcggcagtggtggcgggggagggggcctgcgtcgccggcggcgcacgggcagacggtcgatgaagcgctcgatggtctcgccgcgccggcgtcgcatggtctcggtgacggcgcgcccgtcctcgcggggccgcagcgtgaagacgccgccgcgcatctccaggtggccgggggggtccccgttgggcagggagagggcgctgacgatgcatcttatcaattgccccgtagggactccgcgcaaggacctgagcgtctcgagatccacgggatctgaaaaccgctgaacgaaggcttcgagccagtcgcagtcgcaaggtaggctgagcacggtttcttctggcgggtcatgttggttgggagcggggcgggcgatgctgctggtgatgaagttgaaataggcggttctgagacggcggatggtggcgaggagcaccaggtctttgggcccggcttgctggatgcgcagacggtcggccatgccccaggcgtggtcctgacacctggccaggtccttgtagtagtcctgcatgagccgctccacgggcacctcctcctcgcccgcgcggccgtgcatgcgcgtgagcccgaagccgcgctggggctggacgagcgccaggtcggcgacgacgcgctcggcgaggatggcttgctggatctgggtgagggtggtctggaagtcatcaaagtcgacgaagcggtggtaggctccggtgttgatggtgtaggagcagttggccatgacggaccagttgacggtctggtggcccggacgcacgagctcgtggtacttgaggcgcgagtaggcgcgcgtgtcgaagatgtagtcgttgcaggtgcgcaccaggtactggtagccgatgaggaagtgcggcggcggctggcggtagagcggccatcgctcggtggcgggggcgccgggcgcgaggtcctcgagcatggtgcggtggtagccgtagatgtacctggacatccaggtgatgccggcggcggtggtggaggcgcgcgggaactcgcggacgcggttccagatgttgcgcagcggcaggaagtagttcatggtgggcacggtctggcccgtgaggcgcgcgcagtcgtggatgctctatacgggcaaaaacgaaagcggtcagcggctcgactccgtggcctggaggctaagcgaacgggttgggctgcgcgtgtaccccggttcgaatctcgaatcaggctggagccgcagctaacgtggtattggcactcccgtctcgacccaagcctgcaccaaccctccaggatacggaggcgggtcgttttgcaacttttttttggaggccggatgagactagtaagcgcggaaagcggccgaccgcgatggctcgctgccgtagtctggagaagaatcgccagggttgcgttgcggtgtgccccggttcgaggccggccggattccgcggctaacgagggcgtggctgccccgtcgtttccaagaccccatagccagccgacttctccagttacggagcgagcccctcttttgttttgtttgtttttgccagatgcatcccgtactgcggcagatgcgcccccaccaccctccaccgcaacaacagccccctccacagccggcgcttctgcccccgccccagcagcaacttccagccacgaccgccgcggccgccgtgagcggggctggacagagttatgatcaccagctggccttggaagagggcgaggggctggcgcgcctgggggcgtcgtcgccggagcggcacccgcgcgtgcagatgaaaagggacgctcgcgaggcctacgtgcccaagcagaacctgttcagagacaggagcggcgaggagcccgaggagatgcgcgcggcccggttccacgcggggcgggagctgcggcgcggcctggaccgaaagagggtgctgagggacgaggatttcgaggcggacgagctgacggggatcagccccgcgcgcgcgcacgtggccgcggccaacctggtcacggcgtacgagcagaccgtgaaggaggagagcaacttccaaaaatccttcaacaaccacgtgcgcaccctgatcgcgcgcgaggaggtgaccctgggcctgatgcacctgtgggacctgctggaggccatcgtgcagaaccccaccagcaagccgctgacggcgcagctgttcctggtggtgcagcatagtcgggacaacgaagcgttcagggaggcgctgctgaatatcaccgagcccgagggccgctggctcctggacctggtgaacattctgcagagcatcgtggtgcaggagcgcgggctgccgctgtccgagaagctggcggccatcaacttctcggtgctgagtttgggcaagtactacgctaggaagatctacaagaccccgtacgtgcccatagacaaggaggtgaagatcgacgggttttacatgcgcatgaccctgaaagtgctgaccctgagcgacgatctgggggtgtaccgcaacgacaggatgcaccgtgcggtgagcgccagcaggcggcgcgagctgagcgaccaggagctgatgcatagtctgcagcgggccctgaccggggccgggaccgagggggagagctactttgacatgggcgcggacctgcactggcagcccagccgccgggccttggaggcggcggcaggaccctacgtagaagaggtggacgatgaggtggacgaggagggcgagtacctggaagactgatggcgcgaccgtatttttgctagatgcaacaacaacagccacctcctgatcccgcgatgcgggcggcgctgcagagccagccgtccggcattaactcctcggacgattggacccaggccatgcaacgcatcatggcgctgacgacccgcaaccccgaagcctttagacagcagccccaggccaaccggctctcggccatcctggaggccgtggtgccctcgcgctccaaccccacgcacgagaaggtcctggccatcgtgaacgcgctggtggagaacaaggccatccgcggcgacgaggccggcctggtgtacaacgcgctgctggagcgcgtggcccgctacaacagcaccaacgtgcagaccaacctggaccgcatggtgaccgacgtgcgcgaggccgtggcccagcgcgagcggttccaccgcgagtccaacctgggatccatggtggcgctgaacgccttcctcagcacccagcccgccaacgtgccccggggccaggaggactacaccaacttcatcagcgccctgcgcctgatggtgaccgaggtgccccagagcgaggtgtaccagtccgggccggactacttcttccagaccagtcgccagggcttgcagaccgtgaacctgagccaggctttcaagaacttgcagggcctgtggggcgtgcaggccccggtcggggaccgcgcgacggtgtcgagcctgctgacgccgaactcgcgcctgctgctgctgctggtggcccccttcacggacagcggcagcatcaaccgcaactcgtacctgggctacctgattaacctgtaccgcgaggccatcggccaggcgcacgtggacgagcagacctaccaggagatcacccacgtgagccgcgccctgggccaggacgacccgggcaacctggaagccaccctgaactttttgctgaccaaccggtcgcagaagatcccgccccagtacgcgctcagcaccgaggaggagcgcatcctgcgttacgtgcagcagagcgtgggcctgttcctgatgcaggagggggccacccccagcgccgcgctcgacatgaccgcgcgcaacatggagcccagcatgtacgccagcaaccgcccgttcatcaataaactgatggactacttgcatcgggcggccgccatgaactctgactatttcaccaacgccatcctgaatccccactggctcccgccgccggggttctacacgggcgagtacgacatgcccgaccccaatgacgggttcctgtgggacgatgtggacagcagcgtgttctccccccgaccgggtgctaacgagcgccccttgtggaagaaggaaggcagcgaccgacgcccgtcctcggcgctgtccggccgcgagggtgctgccgcggcggtgcccgaggccgccagtcctttcccgagcttgcccttctcgctgaacagtatccgcagcagcgagctgggcaggatcacgcgcccgcgcttgctgggcgaagaggagtacttgaatgactcgctgttgagacccgagcgggagaagaacttccccaataacgggatagaaagcctggtggacaagatgagccgctggaagacgtatgcgcaggagcacagggacgatccccgggcgtcgcagggggccacgagccggggcagcgccgcccgtaaacgccggtggcacgacaggcagcggggacagatgtgggacgatgaggactccgccgacgacagcagcgtgttggacttgggtgggagtggtaacccgttcgctcacctgcgcccccgtatcgggcgcatgatgtaagagaaaccgaaaataaatgatactcaccaaggccatggcgaccagcgtgcgttcgtttcttctctgttgttgttgtatctagtatgatgaggcgtgcgtacccggagggtcctcctccctcgtacgagagcgtgatgcagcaggcgatggcggcggcggcgatgcagcccccgctggaggctccttacgtgcccccgcggtacctggcgcctacggaggggcggaacagcattcgttactcggagctggcacccttgtacgataccacccggttgtacctggtggacaacaagtcggcggacatcgcctcgctgaactaccagaacgaccacagcaacttcctgaccaccgtggtgcagaacaatgacttcacccccacggaggccagcacccagaccatcaactttgacgagcgctcgcggtggggcggccagctgaaaaccatcatgcacaccaacatgcccaacgtgaacgagttcatgtacagcaacaagttcaaggcgcgggtgatggtctcccgcaagacccccaatggggtgacagtgacagaggattatgatggtagtcaggatgagctgaagtatgaatgggtggaatttgagctgcccgaaggcaacttctcggtgaccatgaccatcgacctgatgaacaacgccatcatcgacaattacttggcggtggggcggcagaacggggtgctggagagcgacatcggcgtgaagttcgacactaggaacttcaggctgggctgggaccccgtgaccgagctggtcatgcccggggtgtacaccaacgaggctttccatcccgatattgtcttgctgcccggctgcggggtggacttcaccgagagccgcctcagcaacctgctgggcattcgcaagaggcagcccttccaggaaggcttccagatcatgtacgaggatctggaggggggcaacatccccgcgctcctggatgtcgacgcctatgagaaaagcaaggaggatgcagcagctgaagcaactgcagccgtagctaccgcctctaccgaggtcaggggcgataattttgcaagcgccgcagcagtggcagcggccgaggcggctgaaaccgaaagtaagatagtcattcagccggtggagaaggatagcaagaacaggagctacaacgtactaccggacaagataaacaccgcctaccgcagctggtacctagcctacaactatggcgaccccgagaagggcgtgcgctcctggacgctgctcaccacctcggacgtcacctgcggcgtggagcaagtctactggtcgctgcccgacatgatgcaagacccggtcaccttccgctccacgcgtcaagttagcaactacccggtggtgggcgccgagctcctgcccgtctactccaagagcttcttcaacgagcaggccgtctactcgcagcagctgcgcgccttcacctcgcttacgcacgtcttcaaccgcttccccgagaaccagatcctcgtccgcccgcccgcgcccaccattaccaccgtcagtgaaaacgttcctgctctcacagatcacgggaccctgccgctgcgcagcagtatccggggagtccagcgcgtgaccgttactgacgccagacgccgcacctgcccctacgtctacaaggccctgggcatagtcgcgccgcgcgtcctctcgagccgcaccttctaaatgtccattctcatctcgcccagtaataacaccggttggggcctgcgcgcgcccagcaagatgtacggaggcgctcgccaacgctccacgcaacaccccgtgcgcgtgcgcgggcacttccgcgctccctggggcgccctcaagggccgcgtgcggtcgcgcaccaccgtcgacgacgtgatcgaccaggtggtggccgacgcgcgcaactacacccccgccgccgcgcccgtctccaccgtggacgccgtcatcgacagcgtggtggccgacgcgcgccggtacgcccgcgccaagagccggcggcggcgcatcgcccggcggcaccggagcacccccgccatgcgcgcggcgcgagccttgctgcgcagggccaggcgcacgggacgcagggccatgctcagggcggccagacgcgcggcttcaggcgccagcgccggcaggacccggagacgcgcggccacggcggcggcagcggccatcgccagcatgtcccgcccgcggcgagggaacgtgtactgggtgcgcgacgccgccaccggtgtgcgcgtgcccgtgcgcacccgcccccctcgcacttgaagatgttcacttcgcgatgttgatgtgtcccagcggcgaggaggatgtccaagcgcaaattcaaggaagagatgctccaggtcatcgcgcctgagatctacggccctgcggtggtgaaggaggaaagaaagccccgcaaaatcaagcgggtcaaaaaggacaaaaaggaagaagaaagtgatgtggacggattggtggagtttgtgcgcgagttcgccccccggcggcgcgtgcagtggcgcgggcggaaggtgcaaccggtgctgagacccggcaccaccgtggtcttcacgcccggcgagcgctccggcaccgcttccaagcgctcctacgacgaggtgtacggggatgatgatattctggagcaggcggccgagcgcctgggcgagtttgcttacggcaagcgcagccgttccgcaccgaaggaagaggcggtgtccatcccgctggaccacggcaaccccacgccgagcctcaagcccgtgaccttgcagcaggtgctgccgaccgcggcgccgcgccgggggttcaagcgcgagggcgaggatctgtaccccaccatgcagctgatggtgcccaagcgccagaagctggaagacgtgctggagaccatgaaggtggacccggacgtgcagcccgaggtcaaggtgcggcccatcaagcaggtggccccgggcctgggcgtgcagaccgtggacatcaagattcccacggagcccatggaaacgcagaccgagcccatgatcaagcccagcaccagcaccatggaggtgcagacggatccctggatgccatcggctcctagtcgaagaccccggcgcaagtacggcgcggccagcctgctgatgcccaactacgcgctgcatccttccatcatccccacgccgggctaccgcggcacgcgcttctaccgcggtcataccagcagccgccgccgcaagaccaccactcgccgccgccgtcgccgcaccgccgctgcaaccacccctgccgccctggtgcggagagtgtaccgccgcggccgcgcacctctgaccctgccgcgcgcgcgctaccacccgagcatcgccatttaaactttcgcctgctttgcagatcaatggccctcacatgccgccttcgcgttcccattacgggctaccgaggaagaaaaccgcgccgtagaaggctggcggggaacgggatgcgtcgccaccaccaccggcggcggcgcgccatcagcaagcggttggggggaggcttcctgcccgcgctgatccccatcatcgccgcggcgatcggggcgatccccggcattgcttccgtggcggtgcaggcctctcagcgccactgagacacacttggaaacatcttgtaataaaccaatggactctgacgctcctggtcctgtgatgtgttttcgtagacagatggaagacatcaatttttcgtccctggctccgcgacacggcacgcggccgttcatgggcacctggagcgacatcggcaccagccaactgaacgggggcgccttcaattggagcagtctctggagcgggcttaagaatttcgggtccacgcttaaaacctatggcagcaaggcgtggaacagcaccacagggcaggcgctgagggataagctgaaagagcagaacttccagcagaaggtggtcgatgggctcgcctcgggcatcaacggggtggtggacctggccaaccaggccgtgcagcggcagatcaacagccgcctggacccggtgccgcccgccggctccgtggagatgccgcaggtggaggaggagctgcctcccctggacaagcggggcgagaagcgaccccgccccgatgcggaggagacgctgctgacgcacacggacgagccgcccccgtacgaggaggcggtgaaactgggtctgcccaccacgcggcccatcgcgcccctggccaccggggtgctgaaacccgaaaagcccgcgaccctggacttgcctcctccccagccttcccgcccctctacagtggctaagcccctgccgccggtggccgtggcccgcgcgcgacccgggggcaccgcccgccctcatgcgaactggcagagcactctgaacagcatcgtgggtctgggagtgcagagtgtgaagcgccgccgctgctattaaacctaccgtagcgcttaacttgcttgtctgtgtgtgtatgtattatgtcgccgccgccgctgtccaccagaaggaggagtgaagaggcgcgtcgccgagttgcaagatggccaccccatcgatgctgccccagtgggcgtacatgcacatcgccggacaggacgcttcggagtacctgagtccgggtctggtgcagtttgcccgcgccacagacacctacttcagtctggggaacaagtttaggaaccccacggtggcgcccacgcacgatgtgaccaccgaccgcagccagcggctgacgctgcgcttcgtgcccgtggaccgcgaggacaacacctactcgtacaaagtgcgctacacgctggccgtgggcgacaaccgcgtgctggacatggccagcacctactttgacatccgcggcgtgctggatcggggccctagcttcaaaccctactccggcaccgcctacaacagtctggcccccaagggagcacccaacacttgtcagtggacatataaagccgatggtgaaactgccacagaaaaaacctatacatatggaaatgcacccgtgcagggcattaacatcacaaaagatggtattcaacttggaactgacaccgatgatcagccaatctacgcagataaaacctatcagcctgaacctcaagtgggtgatgctgaatggcatgacatcactggtactgatgaaaagtatggaggcagagctcttaagcctgataccaaaatgaagccttgttatggttcttttgccaagcctactaataaagaaggaggtcaggcaaatgtgaaaacaggaacaggcactactaaagaatatgacatagacatggctttctttgacaacagaagtgcggctgctgctggcctagctccagaaattgttttgtatactgaaaatgtggatttggaaactccagatacccatattgtatacaaagcaggcacagatgacagcagctcttctattaatttgggtcagcaagccatgcccaacagacctaactacattggtttcagagacaactttatcgggctcatgtactacaacagcactggcaatatgggggtgctggccggtcaggcttctcagctgaatgctgtggttgacttgcaagacagaaacaccgagctgtcctaccagctcttgcttgactctctgggtgacagaacccggtatttcagtatgtggaatcaggcggtggacagctatgatcctgatgtgcgcattattgaaaatcatggtgtggaggatgaacttcccaactattgtttccctctggatgctgttggcagaacagatacttatcagggaattaaggctaatggaactgatcaaaccacatggaccaaagatgacagtgtcaatgatgctaatgagataggcaagggtaatccattcgccatggaaatcaacatccaagccaacctgtggaggaacttcctctacgccaacgtggccctgtacctgcccgactcttacaagtacacgccggccaatgttaccctgcccaccaacaccaacacctacgattacatgaacggccgggtggtggcgccctcgctggtggactcctacatcaacatcggggcgcgctggtcgctggatcccatggacaacgtgaaccccttcaaccaccaccgcaatgcggggctgcgctaccgctccatgctcctgggcaacgggcgctacgtgcccttccacatccaggtgccccagaaatttttcgccatcaagagcctcctgctcctgcccgggtcctacacctacgagtggaacttccgcaaggacgtcaacatgatcctgcagagctccctcggcaacgacctgcgcacggacggggcctccatctccttcaccagcatcaacctctacgccaccttcttccccatggcgcacaacacggcctccacgctcgaggccatgctgcgcaacgacaccaacgaccagtccttcaacgactacctctcggcggccaacatgctctaccccatcccggccaacgccaccaacgtgcccatctccatcccctcgcgcaactgggccgccttccgcggctggtccttcacgcgtctcaagaccaaggagacgccctcgctgggctccgggttcgacccctacttcgtctactcgggctccatcccctacctcgacggcaccttctacctcaaccacaccttcaagaaggtctccatcaccttcgactcctccgtcagctggcccggcaacgaccggctcctgacgcccaacgagttcgaaatcaagcgcaccgtcgacggcgagggctacaacgtggcccagtgcaacatgaccaaggactggttcctggtccagatgctggcccactacaacatcggctaccagggcttctacgtgcccgagggctacaaggaccgcatgtactccttcttccgcaacttccagcccatgagccgccaggtggtggacgaggtcaactacaaggactaccaggccgtcaccctggcctaccagcacaacaactcgggcttcgtcggctacctcgcgcccaccatgcgccagggccagccctaccccgccaactacccctacccgctcatcggcaagagcgccgtcaccagcgtcacccagaaaaagttcctctgcgacagggtcatgtggcgcatccccttctccagcaacttcatgtccatgggcgcgctcaccgacctcggccagaacatgctctatgccaactccgcccacgcgctagacatgaatttcgaagtcgaccccatggatgagtccacccttctctatgttgtcttcgaagtcttcgacgtcgtccgagtgcaccagccccaccgcggcgtcatcgaggccgtctacctgcgcacccccttctcggccggtaacgccaccacctaagctcttgcttcttgcaagccatggccgcgggctccggcgagcaggagctcagggccatcatccgcgacctgggctgcgggccctacttcctgggcaccttcgataagcgcttcccgggattcatggccccgcacaagctggcctgcgccatcgtcaacacggccggccgcgagaccgggggcgagcactggctggccttcgcctggaacccgcgctcgaacacctgctacctcttcgaccccttcgggttctcggacgagcgcctcaagcagatctaccagttcgagtacgagggcctgctgcgccgcagcgccctggccaccgaggaccgctgcgtcaccctggaaaagtccacccagaccgtgcagggtccgcgctcggccgcctgcgggctcttctgctgcatgttcctgcacgccttcgtgcactggcccgaccgccccatggacaagaaccccaccatgaacttgctgacgggggtgcccaacggcatgctccagtcgccccaggtggaacccaccctgcgccgcaaccaggaggcgctctaccgcttcctcaactcccactccgcctactttcgctcccaccgcgcgcgcatcgagaaggccaccgccttcgaccgcatgaatcaagacatgtaaaccgtgtgtgtatgttaaatgtctttaataaacagcactttcatgttacacatgcatctgagatgatttatttagaaatcgaaagggttctgccgggtctcggcatggcccgcgggcagggacacgttgcggaactggtacttggccagccacttgaactcggggatcagcagtttgggcagcggggtgtcggggaaggagtcggtccacagcttccgcgtcagttgcagggcgcccagcaggtcgggcgcggagatcttgaaatcgcagttgggacccgcgttctgcgcgcgggagttgcggtacacggggttgcagcactggaacaccatcagggccgggtgcttcacgctcgccagcaccgtcgcgtcggtgatgctctccacgtcgaggtcctcggcgttggccatcccgaagggggtcatcttgcaggtctgccttcccatggtgggcacgcacccgggcttgtggttgcaatcgcagtgcagggggatcagcatcatctgggcctggtcggcgttcatccccgggtacatggccttcatgaaagcctccaattgcctgaacgcctgctgggccttggctccctcggtgaagaagaccccgcaggacttgctagagaactggttggtggcgcacccggcgtcgtgcacgcagcagcgcgcgtcgttgttggccagctgcaccacgctgcgcccccagcggttctgggtgatcttggcccggtcggggttctccttcagcgcgcgctgcccgttctcgctcgccacatccatctcgatcatgtgctccttctggatcatggtggtcccgtgcaggcaccgcagcttgccctcggcctcggtgcacccgtgcagccacagcgcgcacccggtgcactcccagttcttgtgggcgatctgggaatgcgcgtgcacgaagccctgcaggaagcggcccatcatggtggtcagggtcttgttgctagtgaaggtcagcggaatgccgcggtgctcctcgttgatgtacaggtggcagatgcggcggtacacctcgccctgctcgggcatcagctggaagttggctttcaggtcggtctccacgcggtagcggtccatcagcatagtcatgatttccatacccttctcccaggccgagacgatgggcaggctcatagggttcttcaccatcatcttagcgctagcagccgcggccagggggtcgctctcgtccagggtctcaaagctccgcttgccgtccttctcggtgatccgcaccggggggtagctgaagcccacggccgccagctcctcctcggcctgtctttcgtcctcgctgtcctggctgacgtcctgcaggaccacatgcttggtcttgcggggtttcttcttgggcggcagcggcggcggagatgttggagatggcgagggggagcgcgagttctcgctcaccactactatctcttcctcttcttggtccgaggccacgcggcggtaggtatgtctcttcgggggcagaggcggaggcgacgggctctcgccgccgcgacttggcggatggctggcagagccccttccgcgttcgggggtgcgctcccggcggcgctctgactgacttcctccgcggccggccattgtgttctcctagggaggaacaacaagcatggagactcagccatcgccaacctcgccatctgcccccaccgccgacgagaagcagcagcagcagaatgaaagcttaaccgccccgccgcccagccccgccacctccgacgcggccgtcccagacatgcaagagatggaggaatccatcgagattgacctgggctatgtgacgcccgcggagcacgaggaggagctggcagtgcgcttttcacaagaagagatacaccaagaacagccagagcaggaagcagagaatgagcagagtcaggctgggctcgagcatgacggcgactacctccacctgagcgggggggaggacgcgctcatcaagcatctggcccggcaggccaccatcgtcaaggatgcgctgctcgaccgcaccgaggtgcccctcagcgtggaggagctcagccgcgcctacgagttgaacctcttctcgccgcgcgtgccccccaagcgccagcccaatggcacctgcgagcccaacccgcgcctcaacttctacccggtcttcgcggtgcccgaggccctggccacctaccacatctttttcaagaaccaaaagatccccgtctcctgccgcgccaaccgcacccgcgccgacgcccttttcaacctgggtcccggcgcccgcctacctgatatcgcctccttggaagaggttcccaagatcttcgagggtctgggcagcgacgagactcgggccgcgaacgctctgcaaggagaaggaggagagcatgagcaccacagcgccctggtcgagttggaaggcgacaacgcgcggctggcggtgctcaaacgcacggtcgagctgacccatttcgcctacccggctctgaacctgccccccaaagtcatgagcgcggtcatggaccaggtgctcatcaagcgcgcgtcgcccatctccgaggacgagggcatgcaagactccgaggagggcaagcccgtggtcagcgacgagcagctggcccggtggctgggtcctaatgctagtccccagagtttggaagagcggcgcaaactcatgatggccgtggtcctggtgaccgtggagctggagtgcctgcgccgcttcttcgccgacgcggagaccctgcgcaaggtcgaggagaacctgcactacctcttcaggcacgggttcgtgcgccaggcctgcaagatctccaacgtggagctgaccaacctggtctcctacatgggcatcttgcacgagaaccgcctggggcagaacgtgctgcacaccaccctgcgcggggaggcccggcgcgactacatccgcgactgcgtctacctctacctctgccacacctggcagacgggcatgggcgtgtggcagcagtgtctggaggagcagaacctgaaagagctctgcaagctcctgcagaagaacctcaagggtctgtggaccgggttcgacgagcgcaccaccgcctcggacctggccgacctcattttccccgagcgcctcaggctgacgctgcgcaacggcctgcccgactttatgagccaaagcatgttgcaaaactttcgctctttcatcctcgaacgctccggaatcctgcccgccacctgctccgcgctgccctcggacttcgtgccgctgaccttccgcgagtgccccccgccgctgtggagccactgctacctgctgcgcctggccaactacctggcctaccactcggacgtgatcgaggacgtcagcggcgagggcctgctcgagtgccactgccgctgcaacctctgcacgccgcaccgctccctggcctgcaacccccagctgctgagcgagacccagatcatcggcaccttcgagttgcaagggcccagcgaaggcgagggttcagccgccaaggggggtctgaaactcaccccggggctgtggacctcggcctacttgcgcaagttcgtgcccgaggactaccatcccttcgagatcaggttctacgaggaccaatcccatccgcccaaggccgagctgtcggcctgcgtcatcacccagggggcgatcctggcccaattgcaagccatccagaaatcccgccaagaattcttgctgaaaaagggccgcggggtctacctcgacccccagaccggtgaggagctcaaccccggcttcccccaggatgccccgaggaaacaagaagctgaaagtggagctgccgcccgtggaggatttggaggaagactgggagaacagcagtcaggcagaggaggaggagatggaggaagactgggacagcactcaggcagaggaggacagcctgcaagacagtctggaggaagacgaggaggaggcagaggaggaggtggaagaagcagccgccgccagaccgtcgtcctcggcgggggagaaagcaagcagcacggataccatctccgctccgggtcggggtcccgctcgaccacacagtagatgggacgagaccggacgattcccgaaccccaccacccagaccggtaagaaggagcggcagggatacaagtcctggcgggggcacaaaaacgccatcgtctcctgcttgcaggcctgcgggggcaacatctccttcacccggcgctacctgctcttccaccgcggggtgaactttccccgcaacatcttgcattactaccgtcacctccacagcccctactacttccaagaagaggcagcagcagcagaaaaagaccagcagaaaaccagcagctagaaaatccacagcggcggcagcaggtggactgaggatcgcggcgaacgagccggcgcaaacccgggagctgaggaaccggatctttcccaccctctatgccatcttccagcagagtcgggggcaggagcaggaactgaaagtcaagaaccgttctctgcgctcgctcacccgcagttgtctgtatcacaagagcgaagaccaacttcagcgcactctcgaggacgccgaggctctcttcaacaagtactgcgcgctcactcttaaagagtagcccgcgcccgcccagtcgcagaaaaaggcgggaattacgtcacctgtgcccttcgccctagccgcctccacccatcatcatgagcaaagagattcccacgccttacatgtggagctaccagccccagatgggcctggccgccggtgccgcccaggactactccacccgcatgaattggctcagcgccgggcccgcgatgatctcacgggtgaatgacatccgcgcccaccgaaaccagatactcctagaacagtcagcgctcaccgccacgccccgcaatcacctcaatccgcgtaattggcccgccgccctggtgtaccaggaaattccccagcccacgaccgtactacttccgcgagacgcccaggccgaagtccagctgactaactcaggtgtccagctggcgggcggcgccaccctgtgtcgtcaccgccccgctcagggtataaagcggctggtgatccggggcagaggcacacagctcaacgacgaggtggtgagctcttcgctgggtctgcgacctgacggagtcttccaactcgccggatcggggagatcttccttcacgcctcgtcaggccgtcctgactttggagagttcgtcctcgcagccccgctcgggtggcatcggcactctccagttcgtggaggagttcactccctcggtctacttcaaccccttctccggctcccccggccactacccggacgagttcatcccgaacttcgacgccatcagcgagtcggtggacggctacgattgaatgtcccatggtggcgcagctgacctagctcggcttcgacacctggaccactgccgccgcttccgctgcttcgctcgggatctcgccgagtttgcctactttgagctgcccgaggagcaccctcagggcccggcccacggagtgcggatcgtcgtcgaagggggcctcgactcccacctgcttcggatcttcagccagcgtccgatcctggtcgagcgcgagcaaggacagacccttctgactctgtactgcatctgcaaccaccccggcctgcatgaaagtctttgttgtctgctgtgtactgagtataataaaagctgagatcagcgactactccggacttccgtgtgttcctgaatccatcaaccagtctttgttcttcaccgggaacgagaccgagctccagctccagtgtaagccccacaagaagtacctcacctggctgttccagggctccccgatcgccgttgtcaaccactgcgacaacgacggagtcctgctgagcggccctgccaaccttactttttccacccgcagaagcaagctccagctcttccaacccttcctccccgggacctatcagtgcgtctcgggaccctgccatcacaccttccacctgatcccgaataccacagcgtcgctccccgctactaacaaccaaactaacctccaccaacgccaccgtcgcgacggccacaatacatgcccatattagactatgaggccgagccacagcgacccatgctccccgctattagttacttcaatctaaccggcggagatgactgacccactggccaacaacaacgtcaacgaccttctcctggacatggacggccgcgcctcggagcagcgactcgcccaacttcgcattcgccagcagcaggagagagccgtcaaggagctgcaggatgcggtggccatccaccagtgcaagagaggcatcttctgcctggtgaaacaggccaagatctcctacgaggtcactccaaacgaccatcgcctctcctacgagctcctgcagcagcgccagaagttcacctgcctggtcggagtcaaccccatcgtcatcacccagcagtctggcgataccaaggggtgcatccactgctcctgcgactcccccgactgcgtccacactctgatcaagaccctctgcggcctccgcgacctcctccccatgaactaatcacccccttatccagtgaaataaagatcatattgatgatgattttacagaaataaaaaataatcatttgatttgaaataaagatacaatcatattgatgatttgagtttaacaaaaaaataaagaatcacttacttgaaatctgataccaggtctctgtccatgttttctgccaacaccacttcactcccctcttcccagctctggtactgcaggccccggcgggctgcaaacttcctccacacgctgaaggggatgtcaaattcctcctgtccctcaatcttcattttatcttctatcagatgtccaaaaagcgcgtccgggtggatgatgacttcgaccccgtctacccctacgatgcagacaacgcaccgaccgtgcccttcatcaacccccccttcgtctcttcagatggattccaagagaagcccctgggggtgttgtccctgcgactggccgaccccgtcaccaccaagaacggggaaatcaccctcaagctgggagagggggtggacctcgattcctcgggaaaactcatctccaacacggccaccaaggccgccgcccctctcagtttttccaacaacaccatttcccttaacatggatcaccccttttacactaaagatggaaaattatccttacaagtttctccaccattaaatatactgagaacaagcattctaaacacactagctttaggttttggatcaggtttaggactccgtggctctgccttggcagtacagttagtctctccacttacatttgatactgatggaaacataaagcttaccttagacagaggtttgcatgttacaacaggagatgcaattgaaagcaacataagctgggctaaaggtttaaaatttgaagatggagccatagcaaccaacattggaaatgggttagagtttggaagcagtagtacagaaacaggtgttgatgatgcttacccaatccaagttaaacttggatctggccttagctttgacagtacaggagccataatggctggtaacaaagaagacgataaactcactttgtggacaacacctgatccatcaccaaactgtcaaatactcgcagaaaatgatgcaaaactaacactttgcttgactaaatgtggtagtcaaatactggccactgtgtcagtcttagttgtaggaagtggaaacctaaaccccattactggcaccgtaagcagtgctcaggtgtttctacgttttgatgcaaacggtgttcttttaacagaacattctacactaaaaaaatactgggggtataggcagggagatagcatagatggcactccatataccaatgctgtaggattcatgcccaatttaaaagcttatccaaagtcacaaagttctactactaaaaataatatagtagggcaagtatacatgaatggagatgtttcaaaacctatgcttctcactataaccctcaatggtactgatgacagcaacagtacatattcaatgtcattttcatacacctggactaatggaagctatgttggagcaacatttggggctaactcttataccttctcatacatcgcccaagaatgaacactgtatcccaccctgcatgccaacccttcccaccccactctgtggaacaaactctgaaacacaaaataaaataaagttcaagtgttttattgattcaacagttttacaggattcgagcagttatttttcctccaccctcccaggacatggaatacaccaccctctccccccgcacagccttgaacatctgaatgccattggtgatggacatgcttttggtctccacgttccacacagtttcagagcgagccagtctcgggtcggtcagggagatgaaaccctccgggcactcccgcatctgcacctcacagctcaacagctgaggattgtcctcggtggtcgggatcacggttatctggaagaagcagaagagcggcggtgggaatcatagtccgcgaacgggatcggccggtggtgtcgcatcaggccccgcagcagtcgctgccgccgccgctccgtcaagctgctgctcagggggtccgggtccagggactccctcagcatgatgcccacggccctcagcatcagtcgtctggtgcggcgggcgcagcagcgcatgcggatctcgctcaggtcgctgcagtacgtgcaacacagaaccaccaggttgttcaacagtccatagttcaacacgctccagccgaaactcatcgcgggaaggatgctacccacgtggccgtcgtaccagatcctcaggtaaatcaagtggtgccccctccagaacacgctgcccacgtacatgatctccttgggcatgtggcggttcaccacctcccggtaccacatcaccctctggttgaacatgcagccccggatgatcctgcggaaccacagggccagcaccgccccgcccgccatgcagcgaagagaccccgggtcccggcaatggcaatggaggacccaccgctcgtacccgtggatcatctgggagctgaacaagtctatgttggcacagcacaggcatatgctcatgcatctcttcagcactctcaactcctcgggggtcaaaaccatatcccagggcacggggaactcttgcaggacagcgaaccccgcagaacagggcaatcctcgcacagaacttacattgtgcatggacagggtatcgcaatcaggcagcaccgggtgatcctccaccagagaagcgcgggtctcggtctcctcacagcgtggtaagggggccggccgatacgggtgatggcgggacgcggctgatcgtgttcgcgaccgtgtcatgatgcagttgctttcggacattttcgtacttgctgtagcagaacctggtccgggcgctgcacaccgatcgccggcggcggtctcggcgcttggaacgctcggtgttgaaattgtaaaacagccactctctcagaccgtgcagcagatctagggcctcaggagtgatgaagatcccatcatgcctgatggctctgatcacatcgaccaccgtggaatgggccagacccagccagatgatgcaattttgttgggtttcggtgacggcgggggagggaagaacaggaagaaccatgattaacttttaatccaaacggtctcggagtacttcaaaatgaagatcgcggagatggcacctctcgcccccgctgtgttggtggaaaataacagccaggtcaaaggtgatacggttctcgagatgttccacggtggcttccagcaaagcctccacgcgcacatccagaaacaagacaatagcgaaagcgggagggttctctaattcctcaatcatcatgttacactcctgcaccatccccagataattttcatttttccagccttgaatgattcgaactagttcgtgaggtaaatccaagccagccatgataaagagctcgcgcagagcgccctccaccggcattcttaagcacaccctcataattccaagatattctgctcctggttcacctgcagcagattgacaagcggaatatcaaaatctctgccgcgatccctgagctcctccctcagcaataactgtaagtactctttcatatcctctccgaaatttttagccataggaccaccaggaataagattagggcaagccacagtacagataaaccgaagtcctccccagtgagcattgccaaatgcaagactgctataagcatgctggctagacccggtgatatcttccagataactggacagaaaatcgcccaggcaatttttaagaaaatcaacaaaagaaaaatcctccaggtggacgtttagagcctcgggaacaacgatgaagtaaatgcaagcggtgcgttccagcatggttagttagctgatctgtagaaaaaacaaaaatgaacattaaaccatgctagcctggcgaacaggtgggtaaatcgttctctccagcaccaggcaggccacggggtctccggcgcgaccctcgtaaaaattgtcgctatgattgaaaaccatcacagagagacgttcccggtggccggcgtgaatgattcgacaagatgaatacacccccggaacattggcgtccgcgagtgaaaaaaagcgcccgaggaagcaataaggcactacaatgctcagtctcaagtccagcaaagcgatgccatgcggatgaagcacaaaattctcaggtgcgtacaaaatgtaattactcccctcctgcacaggcagcaaagcccccgatccctccaggtacacatacaaagcctcagcgtccatagcttaccgagcagcagcacacaacaggcgcaagagtcagagaaaggctgagctctaacctgtccacccgctctctgctcaatatatagcccagatctacactgacgtaaaggccaaagtctaaaaatacccgccaaataatcacacacgcccagcacacgcccagaaaccggtgacacactcaaaaaaatacgcgcacttcctcaaacgcccaaaactgccgtcatttccgggttcccacgctacgtcatcaaaacacgactttcaaattccgtcgaccgttaaaaacgtcacccgccccgcccctaacggtcgcccgtctctcagccaatcagcgccccgcatccccaaattcaaacacctcatttgcatattaacgcgcacaaaaagtttgaggtatattattgatgatgg

SEQ ID NO: 12 - DNA, 32788 bp, synthetic construct
  misc_feature 1..32788: note = Description of Artificial Sequence: Synthetic polynucleotide
  source 1..32788: mol_type = other DNA
ccatcttcaataatatacctcaaactttttgtgcgcgttaatatgcaaatgaggcgtttgaatttggggaggaagggcggtgattggtcgagggatgagcgaccgttaggggcggggcgagtgacgttttgatgacgtggttgcgaggaggagccagtttgcaagttctcgtgggaaaagtgacgtcaaacgaggtgtggtttgaacacggaaatactcaattttcccgcgctctctgacaggaaatgaggtgtttctgggcggatgcaagtgaaaacgggccattttcgcgcgaaaactgaatgaggaagtgaaaatctgagtaatttcgcgtttatggcagggaggagtatttgccgagggccgagtagactttgaccgattacgtgggggtttcgattaccgtgtttttcacctaaatttccgcgtacggtgtcaaagtccggtgtttttacgtaggtgtcagctgatcgccagggtatttaaacctgcgctctccagtcaagaggccactcttgagtgccagcgagaagagttttctcctccgcgccgcgagtcagatctacactttgaaagtagggataacagggtaatgacattgattattgactagttgttaatagtaatcaattacggggtcattagttcatagcccatatatggagttccgcgttacataacttacggtaaatggcccgcctggctgaccgcccaacgacccccgcccattgacgtcaataatgacgtatgttcccatagtaacgccaatagggactttccattgacgtcaatgggtggagtatttacggtaaactgcccacttggcagtacatcaagtgtatcatatgccaagtccgccccctattgacgtcaatgacggtaaatggcccgcctggcattatgcccagtacatgaccttacgggactttcctacttggcagtacatctacgtattagtcatcgctattaccatggtgatgcggttttggcagtacaccaatgggcgtggatagcggtttgactcacggggatttccaagtctccaccccattgacgtcaatgggagtttgttttggcaccaaaatcaacgggactttccaaaatgtcgtaataaccccgccccgttgacgcaaatgggcggtaggcgtgtacggtgggaggtctatataagcagagctcgtttagtgaaccgtcagatcgcctggaacgccatccacgctgttttgacctccatagaagacagcgatcgcgccaccatggccgggatgttccaggcactgtccgaaggctgcacaccctatgatattaaccagatgctgaatgtcctgggagaccaccaggtctctggcctggagcagctggagagcatcatcaacttcgagaagctgaccgagtggacaagctccaatgtgatgcctatcctgtccccactgaccaagggcatcctgggcttcgtgtttaccctgacagtgccttctgagcggggcctgtcttgcatcagcgaggcagacgcaaccacaccagagtccgccaatctgggcgaggagatcctgtctcagctgtacctgtggccccgggtgacatatcactccccttcttacgcctatcaccagttcgagcggagagccaagtacaagagacacttcccaggctttggccagtctctgctgttcggctaccccgtgtacgtgttcggcgattgcgtgcagggcgactgggatgccatccggtttagatactgcgcaccacctggatatgcactgctgaggtgtaacgacaccaattattccgccctgctggcagtgggcgccctggagggccctcgcaatcaggattggctgggcgtgccaaggcagctggtgacacgcatgcaggccatccagaacgcaggcctgtgcaccctggtggcaatgctggaggagacaatcttctggctgcaggcctttctgatggccctgaccgacagcggccccaagacaaacatcatcgtggattcccagtacgtgatgggcatctccaagccttctttccaggagtttgtggactgggagaacgtgagcccagagctgaattccaccgatcagccattctggcaggcaggaatcctggcaaggaacctggtgcctatggtggccacagtgcagggccagaatctgaagtaccagggccagagcctggtcatcagcgcctccatcatcgtgtttaacctgctggagctggagggcgactatcgggacgatggcaacgtgtgggtgcacaccccactgagccccagaacactgaacgcctgggtgaaggccgtggaggagaagaagggcatcccagtgcacctggagctggcctccatgaccaatatggagctgatgtctagcatcgtgcaccagcaggtgaggacatacggacccgtgttcatgtgcctgggaggcctgctgaccatggtggcaggagccgtgtggctgacagtgcgggtgctggagctgttcagagccgcccagctggccaacgatgtggtgctgcagatcatggagctgtgcggagcagcctttcgccaggtgtgccacaccacagtgccatggcccaatgcctccctgacccccaagtggaacaatgagacaacacagcctcagatcgccaactgtagcgtgtacgacttcttcgtgtggctgcactactatagcgtgagggataccctgtggccccgcgtgacataccacatgaataagtacgcctatcacatgctggagaggcgcgccaagtataagagaggccctggcccaggcgcaaagtttgtggcagcatggaccctgaaggccgccgccggccccggccccggccagtatatcaaggctaacagtaagttcattggaatcacagagctgggacccggacctggataatgagtttaaactcccatttaaatgtgagggttaatgcttcgagcagacatgataagatacattgatgagtttggacaaaccacaactagaatgcagtgaaaaaaatgctttatttgtgaaatttgtgatgctattgctttatttgtaaccattataagctgcaataaacaagttaacaacaacaattgcattcattttatgtttcaggttcagggggagatgtgggaggttttttaaagcaagtaaaacctctacaaatgtggtaaaataactataacggtcctaaggtagcgagtgagtagtgttctggggcgggggaggacctgcatgagggccagaataactgaaatctgtgcttttctgtgtgttgcagcagcatgagcggaagcggctcctttgagggaggggtattcagcccttatctgacggggcgtctcccctcctgggcgggagtgcgtcagaatgtgatgggatccacggtggacggccggcccgtgcagcccgcgaactcttcaaccctgacctatgcaaccctgagctcttcgtcgttggacgcagctgccgccgcagctgctgcatctgccgccagcgccgtgcgcggaatggccatgggcgccggctactacggcactctggtggccaactcgagttccaccaataatcccgccagcctgaacgaggagaagctgttgctgctgatggcccagctcgaggccttgacccagcgcctgggcgagctgacccagcaggtggctcagctgcaggagcagacgcgggccgcggttgccacggtgaaatccaaataaaaaatgaatcaataaataaacggagacggttgttgattttaacacagagtctgaatctttatttgatttttcgcgcgcggtaggccctggaccaccggtctcgatcattgagcacccggtggatcttttccaggacccggtagaggtgggcttggatgttgaggtacatgggcatgagcccgtcccgggggtggaggtagctccattgcagggcctcgtgctcgggggtggtgttgtaaatcacccagtcatagcaggggcgcagggcatggtgttgcacaatatctttgaggaggagactgatggccacgggcagccctttggtgtaggtgtttacaaatctgttgagctgggagggatgcatgcggggggagatgaggtgcatcttggcctggatcttgagattggcgatgttaccgcccagatcccgcctggggttcatgttgtgcaggaccaccagcacggtgtatccggtgcacttggggaatttatcatgcaacttggaagggaaggcgtgaaagaatttggcgacgcctttgtgcccgcccaggttttccatgcactcatccatgatgatggcgatgggcccgtgggcggcggcctgggcaaagacgtttcgggggtcggacacatcatagttgtggtcctgggtgaggtcatcataggccattttaatgaatttggggcggagggtgccggactgggggacaaaggtaccctcgatcccgggggcgtagttcccctcacagatctgcatctcccaggctttgagctcggagggggggatcatgtccacctgcggggcgataaagaacacggtttccggggcgggggagatgagctgggccgaaagcaagttccggagcagctgggacttgccgcagccggtggggccgtagatgaccccgatgaccggctgcaggtggtagttgagggagagacagctgccgtcctcccggaggaggggggccacctcgttcatcatctcgcgcacgtgcatgttctcgcgcaccagttccgccaggaggcgctctccccccagggataggagctcctggagcgaggcgaagtttttcagcggcttgagtccgtcggccatgggcattttggagagggtttgttgcaagagttccaggcggtcccagagctcggtgatgtgctctacggcatctcgatccagcagacctcctcgtttcgcgggttgggacggctgcgggagtagggcaccagacgatgggcgtccagcgcagccagggtccggtccttccagggtcgcagcgtccgcgtcagggtggtctccgtcacggtgaaggggtgcgcgccgggctgggcgcttgcgagggtgcgcttcaggctcatccggctggtcgaaaaccgctcccgatcggcgccctgcgcgtcggccaggtagcaattgaccatgagttcgtagttgagcgcctcggccgcgtggcctttggcgcggagcttacctttggaagtctgcccgcaggcgggacagaggagggacttgagggcgtagagcttgggggcgaggaagacggactcgggggcgtaggcgtccgcgccgcagtgggcgcagacggtctcgcactccacgagccaggtgaggtcgggctggtcggggtcaaaaaccagtttcccgccgttctttttgatgcgtttcttacctttggtctccatgagctcgtgtccccgctgggtgacaaagaggctgtccgtgtccccgtagaccgactttatgggccggtcctcgagcggtgtgccgcggtcctcctcgtagaggaaccccgcccactccgagacgaaagcccgggtccaggccagcacgaaggaggccacgtgggacgggtagcggtcgttgtccaccagcgggtccaccttttccagggtatgcaaacacatgtccccctcgtccacatccaggaaggtgattggcttgtaagtgtaggccacgtgaccgggggtcccggccgggggggtataaaagggtgcgggtccctgctcgtcctcactgtcttccggatcgctgtccaggagcgccagctgttggggtaggtattccctctcgaaggcgggcatgacctcggcactcaggttgtcagtttctagaaacgaggaggatttgatattgacggtgccggcggagatgcctttcaagagcccctcgtccatctggtcagaaaagacgatctttttgttgtcgagcttggtggcgaaggagccgtagagggcgttggagaggagcttggcgatggagcgcatggtctggtttttttccttgtcggcgcgctccttggcggcgatgttgagctgcacgtactcgcgcgccacgcacttccattcggggaagacggtggtcagctcgtcgggcacgattctgacctgccagccccgattatgcagggtgatgaggtccacactggtggccacctcgccgcgcaggggctcattagtccagcagaggcgtccgcccttgcgcgagcagaaggggggcagggggtccagcatgacctcgtcgggggggtcggcatcgatggtgaagatgccgggcaggaggtcggggtcaaagtagctgatggaagtggccagatcgtccagggcagcttgccattcgcgcacggccagcgcgctctcgtagggactgaggggcgtgccccagggcatgggatgggtaagcgcggaggcgtacatgccgcagatgtcgtagacgtagaggggctcctcgaggatgccgatgtaggtggggtagcagcgccccccgcggatgctggcgcgcacgtagtcatacagctcgtgcgagggggcgaggagccccgggcccaggttggtgcgactgggcttttcggcgcggtagacgatctggcggaaaatggcatgcgagttggaggagatggtgggcctttggaagatgttgaagtgggcgtggggcagtccgaccgagtcgcggatgaagtgggcgtaggagtcttgcagcttggcgacgagctcggcggtgactaggacgtccagagcgcagtagtcgagggtctcctggatgatgtcatacttgagctgtcccttttgtttccacagctcgcggttgagaaggaactcttcgcggtccttccagtactcttcgagggggaacccgtcctgatctgcacggtaagagcctagcatgtagaactggttgacggccttgtaggcgcagcagcccttctccacggggagggcgtaggcctgggcggccttgcgcagggaggtgtgcgtgagggcgaaagtgtccctgaccatgaccttgaggaactggtgcttgaagtcgatatcgtcgcagcccccctgctcccagagctggaagtccgtgcgcttcttgtaggcggggttgggcaaagcgaaagtaacatcgttgaagaggatcttgcccgcgcggggcataaagttgcgagtgatgcggaaaggttggggcacctcggcccggttgttgatgacctgggcggcgagcacgatctcgtcgaagccgttgatgttgtggcccacgatgtagagttccacgaatcgcggacggcccttgacgtggggcagtttcttgagctcctcgtaggtgagctcgtcggggtcgctgagcccgtgctgctcgagcgcccagtcggcgagatgggggttggcgcggaggaaggaagtccagagatccacggccagggcggtttgcagacggtcccggtactgacggaactgctgcccgacggccattttttcgggggtgacgcagtagaaggtgcgggggtccccgtgccagcgatcccatttgagctggagggcgagatcgagggcgagctcgacgagccggtcgtccccggagagtttcatgaccagcatgaaggggacgagctgcttgccgaaggaccccatccaggtgtaggtttccacatcgtaggtgaggaagagcctttcggtgcgaggatgcgagccgatggggaagaactggatctcctgccaccaattggaggaatggctgttgatgtgatggaagtagaaatgccgacggcgcgccgaacactcgtgcttgtgtttatacaagcggccacagtgctcgcaacgctgcacgggatgcacgtgctgcacgagctgtacctgagttcctttgacgaggaatttcagtgggaagtggagtcgtggcgcctgcatctcgtgctgtactacgtcgtggtggtcggcctggccctcttctgcctcgatggtggtcatgctgacgagcccgcgcgggaggcaggtccagacctcggcgcgagcgggtcggagagcgaggacgagggcgcgcaggccggagctgtccagggtcctgagacgctgcggagtcaggtcagtgggcagcggcggcgcgcggttgacttgcaggagtttttccagggcgcgcgggaggtccagatggtacttgatctccaccgcgccattggtggcgacgtcgatggcttgcagggtcccgtgcccctggggtgtgaccaccgtcccccgtttcttcttgggcggctggggcgacgggggcggtgcctcttccatggttagaagcggcggcgaggacgcgcgccgggcggcaggggcggctcggggcccggaggcaggggcggcaggggcacgtcggcgccgcgcgcgggtaggttctggtactgcgcccggagaagactggcgtgagcgacgacgcgacggttgacgtcctggatctgacgcctctgggtgaaggccacgggacccgtgagtttgaacctgaaagagagttcgacagaatcaatctcggtatcgttgacggcggcctgccgcaggatctcttgcacgtcgcccgagttgtcctggtaggcgatctcggtcatgaactgctcgatctcctcctcttgaaggtctccgcggccggcgcgctccacggtggccgcgaggtcgttggagatgcggcccatgagctgcgagaaggcgttcatgcccgcctcgttccagacgcggctgtagaccacgacgccctcgggatcgcgggcgcgcatgaccacctgggcgaggttgagctccacgtggcgcgtgaagaccgcgtagttgcagaggcgctggtagaggtagttgagcgtggtggcgatgtgctcggtgacgaagaaatacatgatccagcggcggagcggcatctcgctgacgtcgcccagcgcctccaaacgttccatggcctcgtaaaagtccacggcgaagttgaaaaactgggagttgcgcgccgagacggtcaactcctcctccagaagacggatgagctcggcgatggtggcgcgcacctcgcgctcgaaggcccccgggagttcctccacttcctcttcttcctcctccactaacatctcttctacttcctcctcaggcggcagtggtggcgggggagggggcctgcgtcgccggcggcgcacgggcagacggtcgatgaagcgctcgatggtctcgccgcgccggcgtcgcatggtctcggtgacggcgcgcccgtcctcgcggggccgcagcgtgaagacgccgccgcgcatctccaggtggccgggggggtccccgttgggcagggagagggcgctgacgatgcatcttatcaattgccccgtagggactccgcgcaaggacctgagcgtctcgagatccacgggatctgaaaaccgctgaacgaaggcttcgagccagtcgcagtcgcaaggtaggctgagcacggtttcttctggcgggtcatgttggttgggagcggggcgggcgatgctgctggtgatgaagttgaaataggcggttctgagacggcggatggtggcgaggagcaccaggtctttgggcccggcttgctggatgcgcagacggtcggccatgccccaggcgtggtcctgacacctggccaggtccttgtagtagtcctgcatgagccgctccacgggcacctcctcctcgcccgcgcggccgtgcatgcgcgtgagcccgaagccgcgctggggctggacgagcgccaggtcggcgacgacgcgctcggcgaggatggcttgctggatctgggtgagggtggtctggaagtcatcaaagtcgacgaagcggtggtaggctccggtgttgatggtgtaggagcagttggccatgacggaccagttgacggtctggtggcccggacgcacgagctcgtggtacttgaggcgcgagtaggcgcgcgtgtcgaagatgtagtcgttgcaggtgcgcaccaggtactggtagccgatgaggaagtgcggcggcggctggcggtagagcggccatcgctcggtggcgggggcgccgggcgcgaggtcctcgagcatggtgcggtggtagccgtagatgtacctggacatccaggtgatgccggcggcggtggtggaggcgcgcgggaactcgcggacgcggttccagatgttgcgcagcggcaggaagtagttcatggtgggcacggtctggcccgtgaggcgcgcgcagtcgtggatgctctatacgggcaaaaacgaaagcggtcagcggctcgactccgtggcctggaggctaagcgaacgggttgggctgcgcgtgtaccccggttcgaatctcgaatcaggctggagccgcagctaacgtggtattggcactcccgtctcgacccaagcctgcaccaaccctccaggatacggaggcgggtcgttttgcaacttttttttggaggccggatgagactagtaagcgcggaaagcggccgaccgcgatggctcgctgccgtagtctggagaagaatcgccagggttgcgttgcggtgtgccccggttcgaggccggccggattccgcggctaacgagggcgtggctgccccgtcgtttccaagaccccatagccagccgacttctccagttacggagcgagcccctcttttgttttgtttgtttttgccagatgcatcccgtactgcggcagatgcgcccccaccaccctccaccgcaacaacagccccctccacagccggcgcttctgcccccgccccagcagcaacttccagccacgaccgccgcggccgccgtgagcggggctggacagagttatgatcaccagctggccttggaagagggcgaggggctggcgcgcctgggggcgtcgtcgccggagcggcacccgcgcgtgcagatgaaaagggacgctcgcgaggcctacgtgcccaagcagaacctgttcagagacaggagcggcgaggagcccgaggagatgcgcgcggcccggttccacgcggggcgggagctgcggcgcggcctggaccgaaagagggtgctgagggacgaggatttcgaggcggacgagctgacggggatcagccccgcgcgcgcgcacgtggccgcggccaacctggtcacggcgtacgagcagaccgtgaaggaggagagcaacttccaaaaatccttcaacaaccacgtgcgcaccctgatcgcgcgcgaggaggtgaccctgggcctgatgcacctgtgggacctgctggaggccatcgtgcagaaccccaccagcaagccgctgacggcgcagctgttcctggtggtgcagcatagtcgggacaacgaagcgttcagggaggcgctgctgaatatcaccgagcccgagggccgctggctcctggacctggtgaacattctgcagagcatcgtggtgcaggagcgcgggctgccgctgtccgagaagctggcggccatcaacttctcggtgctgagtttgggcaagtactacgctaggaagatctacaagaccccgtacgtgcccatagacaaggaggtgaagatcgacgggttttacatgcgcatgaccctgaaagtgctgaccctgagcgacgatctgggggtgtaccgcaacgacaggatgcaccgtgcggtgagcgccagcaggcggcgcgagctgagcgaccaggagctgatgcatagtctgcagcgggccctgaccggggccgggaccgagggggagagctactttgacatgggcgcggacctgcactggcagcccagccgccgggccttggaggcggcggcaggaccctacgtagaagaggtggacgatgaggtggacgaggagggcgagtacctggaagactgatggcgcgaccgtatttttgctagatgcaacaacaacagccacctcctgatcccgcgatgcgggcggcgctgcagagccagccgtccggcattaactcctcggacgattggacccaggccatgcaacgcatcatggcgctgacgacccgcaaccccgaagcctttagacagcagccccaggccaaccggctctcggccatcctggaggccgtggtgccctcgcgctccaaccccacgcacgagaaggtcctggccatcgtgaacgcgctggtggagaacaaggccatccgcggcgacgaggccggcctggtgtacaacgcgctgctggagcgcgtggcccgctacaacagcaccaacgtgcagaccaacctggaccgcatggtgaccgacgtgcgcgaggccgtggcccagcgcgagcggttccaccgcgagtccaacctgggatccatggtggcgctgaacgccttcctcagcacccagcccgccaacgtgccccggggccaggaggactacaccaacttcatcagcgccctgcgcctgatggtgaccgaggtgccccagagcgaggtgtaccagtccgggccggactacttcttccagaccagtcgccagggcttgcagaccgtgaacctgagccaggctttcaagaacttgcagggcctgtggggcgtgcaggccccggtcggggaccgcgcgacggtgtcgagcctgctgacgccgaactcgcgcctgctgctgctgctggtggcccccttcacggacagcggcagcatcaaccgcaactcgtacctgggctacctgattaacctgtaccgcgaggccatcggccaggcgcacgtggacgagcagacctaccaggagatcacccacgtgagccgcgccctgggccaggacgacccgggcaacctggaagccaccctgaactttttgctgaccaaccggtcgcagaagatcccgccccagtacgcgctcagcaccgaggaggagcgcatcctgcgttacgtgcagcagagcgtgggcctgttcctgatgcaggagggggccacccccagcgccgcgctcgacatgaccgcgcgcaacatggagcccagcatgtacgccagcaaccgcccgttcatcaataaactgatggactacttgcatcgggcggccgccatgaactctgactatttcaccaacgccatcctgaatccccactggctcccgccgccggggttctacacgggcgagtacgacatgcccgaccccaatgacgggttcctgtgggacgatgtggacagcagcgtgttctccccccgaccgggtgctaacgagcgccccttgtggaagaaggaaggcagcgaccgacgcccgtcctcggcgctgtccggccgcgagggtgctgccgcggcggtgcccgaggccgccagtcctttcccgagcttgcccttctcgctgaacagtatccgcagcagcgagctgggcaggatcacgcgcccgcgcttgctgggcgaagaggagtacttgaatgactcgctgttgagacccgagcgggagaagaacttccccaataacgggatagaaagcctggtggacaagatgagccgctggaagacgtatgcgcaggagcacagggacgatccccgggcgtcgcagggggccacgagccggggcagcgccgcccgtaaacgccggtggcacgacaggcagcggggacagatgtgggacgatgaggactccgccgacgacagcagcgtgttggacttgggtgggagtggtaacccgttcgctcacctgcgcccccgtatcgggcgcatgatgtaagagaaaccgaaaataaatgatactcaccaaggccatggcgaccagcgtgcgttcgtttcttctctgttgttgttgtatctagtatgatgaggcgtgcgtacccggagggtcctcctccctcgtacgagagcgtgatgcagcaggcgatggcggcggcggcgatgcagcccccgctggaggctccttacgtgcccccgcggtacctggcgcctacggaggggcggaacagcattcgttactcggagctggcacccttgtacgataccacccggttgtacctggtggacaacaagtcggcggacatcgcctcgctgaactaccagaacgaccacagcaacttcctgaccaccgtggtgcagaacaatgacttcacccccacggaggccagcacccagaccatcaactttgacgagcgctcgcggtggggcggccagctgaaaaccatcatgcacaccaacatgcccaacgtgaacgagttcatgtacagcaacaagttcaaggcgcgggtgatggtctcccgcaagacccccaatggggtgacagtgacagaggattatgatggtagtcaggatgagctgaagtatgaatgggtggaatttgagctgcccgaaggcaacttctcggtgaccatgaccatcgacctgatgaacaacgccatcatcgacaattacttggcggtggggcggcagaacggggtgctggagagcgacatcggcgtgaagttcgacactaggaacttcaggctgggctgggaccccgtgaccgagctggtcatgcccggggtgtacaccaacgaggctttccatcccgatattgtcttgctgcccggctgcggggtggacttcaccgagagccgcctcagcaacctgctgggcattcgcaagaggcagcccttccaggaaggcttccagatcatgtacgaggatctggaggggggcaacatccccgcgctcctggatgtcgacgcctatgagaaaagcaaggaggatgcagcagctgaagcaactgcagccgtagctaccgcctctaccgaggtcaggggcgataattttgcaagcgccgcagcagtggcagcggccgaggcggctgaaaccgaaagtaagatagtcattcagccggtggagaaggatagcaagaacaggagctacaacgtactaccggacaagataaacaccgcctaccgcagctggtacctagcctacaactatggcgaccccgagaagggcgtgcgctcctggacgctgctcaccacctcggacgtcacctgcggcgtggagcaagtctactggtcgctgcccgacatgatgcaagacccggtcaccttccgctccacgcgtcaagttagcaactacccggtggtgggcgccgagctcctgcccgtctactccaagagcttcttcaacgagcaggccgtctactcgcagcagctgcgcgccttcacctcgcttacgcacgtcttcaaccgcttccccgagaaccagatcctcgtccgcccgcccgcgcccaccattaccaccgtcagtgaaaacgttcctgctctcacagatcacgggaccctgccgctgcgcagcagtatccggggagtccagcgcgtgaccgttactgacgccagacgccgcacctgcccctacgtctacaaggccctgggcatagtcgcgccgcgcgtcctctcgagccgcaccttctaaatgtccattctcatctcgcccagtaataacaccggttggggcctgcgcgcgcccagcaagatgtacggaggcgctcgccaacgctccacgcaacaccccgtgcgcgtgcgcgggcacttccgcgctccctggggcgccctcaagggccgcgtgcggtcgcgcaccaccgtcgacgacgtgatcgaccaggtggtggccgacgcgcgcaactacacccccgccgccgcgcccgtctccaccgtggacgccgtcatcgacagcgtggtggccgacgcgcgccggtacgcccgcgccaagagccggcggcggcgcatcgcccggcggcaccggagcacccccgccatgcgcgcggcgcgagccttgctgcgcagggccaggcgcacgggacgcagggccatgctcagggcggccagacgcgcggcttcaggcgccagcgccggcaggacccggagacgcgcggccacggcggcggcagcggccatcgccagcatgtcccgcccgcggcgagggaacgtgtactgggtgcgcgacgccgccaccggtgtgcgcgtgcccgtgcgcacccgcccccctcgcacttgaagatgttcacttcgcgatgttgatgtgtcccagcggcgaggaggatgtccaagcgcaaattcaaggaagagatgctccaggtcatcgcgcctgagatctacggccctgcggtggtgaaggaggaaagaaagccccgcaaaatcaagcgggtcaaaaaggacaaaaaggaagaagaaagtgatgtggacggattggtggagtttgtgcgcgagttcgccccccggcggcgcgtgcagtggcgcgggcggaaggtgcaaccggtgctgagacccggcaccaccgtggtcttcacgcccggcgagcgctccggcaccgcttccaagcgctcctacgacgaggtgtacggggatgatgatattctggagcaggcggccgagcgcctgggcgagtttgcttacggcaagcgcagccgttccgcaccgaaggaagaggcggtgtccatcccgctggaccacggcaaccccacgccgagcctcaagcccgtgaccttgcagcaggtgctgccgaccgcggcgccgcgccgggggttcaagcgcgagggcgaggatctgtaccccaccatgcagctgatggtgcccaagcgccagaagctggaagacgtgctggagaccatgaaggtggacccggacgtgcagcccgaggtcaaggtgcggcccatcaagcaggtggccccgggcctgggcgtgcagaccgtggacatcaagattcccacggagcccatggaaacgcagaccgagcccatgatcaagcccagcaccagcaccatggaggtgcagacggatccctggatgccatcggctcctagtcgaagaccccggcgcaagtacggcgcggccagcctgctgatgcccaactacgcgctgcatccttccatcatccccacgccgggctaccgcggcacgcgcttctaccgcggtcataccagcagccgccgccgcaagaccaccactcgccgccgccgtcgccgcaccgccgctgcaaccacccctgccgccctggtgcggagagtgtaccgccgcggccgcgcacctctgaccctgccgcgcgcgcgctaccacccgagcatcgccatttaaactttcgcctgctttgcagatcaatggccctcacatgccgccttcgcgttcccattacgggctaccgaggaagaaaaccgcgccgtagaaggctggcggggaacgggatgcgtcgccaccaccaccggcggcggcgcgccatcagcaagcggttggggggaggcttcctgcccgcgctgatccccatcatcgccgcggcgatcggggcgatccccggcattgcttccgtggcggtgcaggcctctcagcgccactgagacacacttggaaacatcttgtaataaaccaatggactctgacgctcctggtcctgtgatgtgttttcgtagacagatggaagacatcaatttttcgtccctggctccgcgacacggcacgcggccgttcatgggcacctggagcgacatcggcaccagccaactgaacgggggcgccttcaattggagcagtctctggagcgggcttaagaatttcgggtccacgcttaaaacctatggcagcaaggcgtggaacagcaccacagggcaggcgctgagggataagctgaaagagcagaacttccagcagaaggtggtcgatgggctcgcctcgggcatcaacggggtggtggacctggccaaccaggccgtgcagcggcagatcaacagccgcctggacccggtgccgcccgccggctccgtggagatgccgcaggtggaggaggagctgcctcccctggacaagcggggcgagaagcgaccccgccccgatgcggaggagacgctgctgacgcacacggacgagccgcccccgtacgaggaggcggtgaaactgggtctgcccaccacgcggcccatcgcgcccctggccaccggggtgctgaaacccgaaaagcccgcgaccctggacttgcctcctccccagccttcccgcccctctacagtggctaagcccctgccgccggtggccgtggcccgcgcgcgacccgggggcaccgcccgccctcatgcgaactggcagagcactctgaacagcatcgtgggtctgggagtgcagagtgtgaagcgccgccgctgctattaaacctaccgtagcgcttaacttgcttgtctgtgtgtgtatgtattatgtcgccgccgccgctgtccaccagaaggaggagtgaagaggcgcgtcgccgagttgcaagatggccaccccatcgatgctgccccagtgggcgtacatgcacatcgccggacaggacgcttcggagtacctgagtccgggtctggtgcagtttgcccgcgccacagacacctacttcagtctggggaacaagtttaggaaccccacggtggcgcccacgcacgatgtgaccaccgaccgcagccagcggctgacgctgcgcttcgtgcccgtggaccgcgaggacaacacctactcgtacaaagtgcgctacacgctggccgtgggcgacaaccgcgtgctggacatggccagcacctactttgacatccgcggcgtgctggatcggggccctagcttcaaaccctactccggcaccgcctacaacagtctggcccccaagggagcacccaacacttgtcagtggacatataaagccgatggtgaaactgccacagaaaaaacctatacatatggaaatgcacccgtgcagggcattaacatcacaaaagatggtattcaacttggaactgacaccgatgatcagccaatctacgcagataaaacctatcagcctgaacctcaagtgggtgatgctgaatggcatgacatcactggtactgatgaaaagtatggaggcagagctcttaagcctgataccaaaatgaagccttgttatggttcttttgccaagcctactaataaagaaggaggtcaggcaaatgtgaaaacaggaacaggcactactaaagaatatgacatagacatggctttctttgacaacagaagtgcggctgctgctggcctagctccagaaattgttttgtatactgaaaatgtggatttggaaactccagatacccatattgtatacaaagcaggcacagatgacagcagctcttctattaatttgggtcagcaagccatgcccaacagacctaactacattggtttcagagacaactttatcgggctcatgtactacaacagcactggcaatatgggggtgctggccggtcaggcttctcagctgaatgctgtggttgacttgcaagacagaaacaccgagctgtcctaccagctcttgcttgactctctgggtgacagaacccggtatttcagtatgtggaatcaggcggtggacagctatgatcctgatgtgcgcattattgaaaatcatggtgtggaggatgaacttcccaactattgtttccctctggatgctgttggcagaacagatacttatcagggaattaaggctaatggaactgatcaaaccacatggaccaaagatgacagtgtcaatgatgctaatgagataggcaagggtaatccattcgccatggaaatcaacatccaagccaacctgtggaggaacttcctctacgccaacgtggccctgtacctgcccgactcttacaagtacacgccggccaatgttaccctgcccaccaacaccaacacctacgattacatgaacggccgggtggtggcgccctcgctggtggactcctacatcaacatcggggcgcgctggtcgctggatcccatggacaacgtgaaccccttcaaccaccaccgcaatgcggggctgcgctaccgctccatgctcctgggcaacgggcgctacgtgcccttccacatccaggtgccccagaaatttttcgccatcaagagcctcctgctcctgcccgggtcctacacctacgagtggaacttccgcaaggacgtcaacatgatcctgcagagctccctcggcaacgacctgcgcacggacggggcctccatctccttcaccagcatcaacctctacgccaccttcttccccatggcgcacaacacggcctccacgctcgaggccatgctgcgcaacgacaccaacgaccagtccttcaacgactacctctcggcggccaacatgctctaccccatcccggccaacgccaccaacgtgcccatctccatcccctcgcgcaactgggccgccttccgcggctggtccttcacgcgtctcaagaccaaggagacgccctcgctgggctccgggttcgacccctacttcgtctactcgggctccatcccctacctcgacggcaccttctacctcaaccacaccttcaagaaggtctccatcaccttcgactcctccgtcagctggcccggcaacgaccggctcctgacgcccaacgagttcgaaatcaagcgcaccgtcgacggcgagggctacaacgtggcccagtgcaacatgaccaaggactggttcctggtccagatgctggcccactacaacatcggctaccagggcttctacgtgcccgagggctacaaggaccgcatgtactccttcttccgcaacttccagcccatgagccgccaggtggtggacgaggtcaactacaaggactaccaggccgtcaccctggcctaccagcacaacaactcgggcttcgtcggctacctcgcgcccaccatgcgccagggccagccctaccccgccaactacccctacccgctcatcggcaagagcgccgtcaccagcgtcacccagaaaaagttcctctgcgacagggtcatgtggcgcatccccttctccagcaacttcatgtccatgggcgcgctcaccgacctcggccagaacatgctctatgccaactccgcccacgcgctagacatgaatttcgaagtcgaccccatggatgagtccacccttctctatgttgtcttcgaagtcttcgacgtcgtccgagtgcaccagccccaccgcggcgtcatcgaggccgtctacctgcgcacccccttctcggccggtaacgccaccacctaagctcttgcttcttgcaagccatggccgcgggctccggcgagcaggagctcagggccatcatccgcgacctgggctgcgggccctacttcctgggcaccttcgataagcgcttcccgggattcatggccccgcacaagctggcctgcgccatcgtcaacacggccggccgcgagaccgggggcgagcactggctggccttcgcctggaacccgcgctcgaacacctgctacctcttcgaccccttcgggttctcggacgagcgcctcaagcagatctaccagttcgagtacgagggcctgctgcgccgcagcgccctggccaccgaggaccgctgcgtcaccctggaaaagtccacccagaccgtgcagggtccgcgctcggccgcctgcgggctcttctgctgcatgttcctgcacgccttcgtgcactggcccgaccgccccatggacaagaaccccaccatgaacttgctgacgggggtgcccaacggcatgctccagtcgccccaggtggaacccaccctgcgccgcaaccaggaggcgctctaccgcttcctcaactcccactccgcctactttcgctcccaccgcgcgcgcatcgagaaggccaccgccttcgaccgcatgaatcaagacatgtaaaccgtgtgtgtatgttaaatgtctttaataaacagcactttcatgttacacatgcatctgagatgatttatttagaaatcgaaagggttctgccgggtctcggcatggcccgcgggcagggacacgttgcggaactggtacttggccagccacttgaactcggggatcagcagtttgggcagcggggtgtcggggaaggagtcggtccacagcttccgcgtcagttgcagggcgcccagcaggtcgggcgcggagatcttgaaatcgcagttgggacccgcgttctgcgcgcgggagttgcggtacacggggttgcagcactggaacaccatcagggccgggtgcttcacgctcgccagcaccgtcgcgtcggtgatgctctccacgtcgaggtcctcggcgttggccatcccgaagggggtcatcttgcaggtctgccttcccatggtgggcacgcacccgggcttgtggttgcaatcgcagtgcagggggatcagcatcatctgggcctggtcggcgttcatccccgggtacatggccttcatgaaagcctccaattgcctgaacgcctgctgggccttggctccctcggtgaagaagaccccgcaggacttgctagagaactggttggtggcgcacccggcgtcgtgcacgcagcagcgcgcgtcgttgttggccagctgcaccacgctgcgcccccagcggttctgggtgatcttggcccggtcggggttctccttcagcgcgcgctgcccgttctcgctcgccacatccatctcgatcatgtgctccttctggatcatggtggtcccgtgcaggcaccgcagcttgccctcggcctcggtgcacccgtgcagccacagcgcgcacccggtgcactcccagttcttgtgggcgatctgggaatgcgcgtgcacgaagccctgcaggaagcggcccatcatggtggtcagggtcttgttgctagtgaaggtcagcggaatgccgcggtgctcctcgttgatgtacaggtggcagatgcggcggtacacctcgccctgctcgggcatcagctggaagttggctttcaggtcggtctccacgcggtagcggtccatcagcatagtcatgatttccatacccttctcccaggccgagacgatgggcaggctcatagggttcttcaccatcatcttagcgctagcagccgcggccagggggtcgctctcgtccagggtctcaaagctccgcttgccgtccttctcggtgatccgcaccggggggtagctgaagcccacggccgccagctcctcctcggcctgtctttcgtcctcgctgtcctggctgacgtcctgcaggaccacatgcttggtcttgcggggtttcttcttgggcggcagcggcggcggagatgttggagatggcgagggggagcgcgagttctcgctcaccactactatctcttcctcttcttggtccgaggccacgcggcggtaggtatgtctcttcgggggcagaggcggaggcgacgggctctcgccgccgcgacttggcggatggctggcagagccccttccgcgttcgggggtgcgctcccggcggcgctctgactgacttcctccgcggccggccattgtgttctcctagggaggaacaacaagcatggagactcagccatcgccaacctcgccatctgcccccaccgccgacgagaagcagcagcagcagaatgaaagcttaaccgccccgccgcccagccccgccacctccgacgcggccgtcccagacatgcaagagatggaggaatccatcgagattgacctgggctatgtgacgcccgcggagcacgaggaggagctggcagtgcgcttttcacaagaagagatacaccaagaacagccagagcaggaagcagagaatgagcagagtcaggctgggctcgagcatgacggcgactacctccacctgagcgggggggaggacgcgctcatcaagcatctggcccggcaggccaccatcgtcaaggatgcgctgctcgaccgcaccgaggtgcccctcagcgtggaggagctcagccgcgcctacgagttgaacctcttctcgccgcgcgtgccccccaagcgccagcccaatggcacctgcgagcccaacccgcgcctcaacttctacccggtcttcgcggtgcccgaggccctggccacctaccacatctttttcaagaaccaaaagatccccgtctcctgccgcgccaaccgcacccgcgccgacgcccttttcaacctgggtcccggcgcccgcctacctgatatcgcctccttggaagaggttcccaagatcttcgagggtctgggcagcgacgagactcgggccgcgaacgctctgcaaggagaaggaggagagcatgagcaccacagcgccctggtcgagttggaaggcgacaacgcgcggctggcggtgctcaaacgcacggtcgagctgacccatttcgcctacccggctctgaacctgccccccaaagtcatgagcgcggtcatggaccaggtgctcatcaagcgcgcgtcgcccatctccgaggacgagggcatgcaagactccgaggagggcaagcccgtggtcagcgacgagcagctggcccggtggctgggtcctaatgctagtccccagagtttggaagagcggcgcaaactcatgatggccgtggtcctggtgaccgtggagctggagtgcctgcgccgcttcttcgccgacgcggagaccctgcgcaaggtcgaggagaacctgcactacctcttcaggcacgggttcgtgcgccaggcctgcaagatctccaacgtggagctgaccaacctggtctcctacatgggcatcttgcacgagaaccgcctggggcagaacgtgctgcacaccaccctgcgcggggaggcccggcgcgactacatccgcgactgcgtctacctctacctctgccacacctggcagacgggcatgggcgtgtggcagcagtgtctggaggagcagaacctgaaagagctctgcaagctcctgcagaagaacctcaagggtctgtggaccgggttcgacgagcgcaccaccgcctcggacctggccgacctcattttccccgagcgcctcaggctgacgctgcgcaacggcctgcccgactttatgagccaaagcatgttgcaaaactttcgctctttcatcctcgaacgctccggaatcctgcccgccacctgctccgcgctgccctcggacttcgtgccgctgaccttccgcgagtgccccccgccgctgtggagccactgctacctgctgcgcctggccaactacctggcctaccactcggacgtgatcgaggacgtcagcggcgagggcctgctcgagtgccactgccgctgcaacctctgcacgccgcaccgctccctggcctgcaacccccagctgctgagcgagacccagatcatcggcaccttcgagttgcaagggcccagcgaaggcgagggttcagccgccaaggggggtctgaaactcaccccggggctgtggacctcggcctacttgcgcaagttcgtgcccgaggactaccatcccttcgagatcaggttctacgaggaccaatcccatccgcccaaggccgagctgtcggcctgcgtcatcacccagggggcgatcctggcccaattgcaagccatccagaaatcccgccaagaattcttgctgaaaaagggccgcggggtctacctcgacccccagaccggtgaggagctcaaccccggcttcccccaggatgccccgaggaaacaagaagctgaaagtggagctgccgcccgtggaggatttggaggaagactgggagaacagcagtcaggcagaggaggaggagatggaggaagactgggacagcactcaggcagaggaggacagcctgcaagacagtctggaggaagacgaggaggaggcagaggaggaggtggaagaagcagccgccgccagaccgtcgtcctcggcgggggagaaagcaagcagcacggataccatctccgctccgggtcggggtcccgctcgaccacacagtagatgggacgagaccggacgattcccgaaccccaccacccagaccggtaagaaggagcggcagggatacaagtcctggcgggggcacaaaaacgccatcgtctcctgcttgcaggcctgcgggggcaacatctccttcacccggcgctacctgctcttccaccgcggggtgaactttccccgcaacatcttgcattactaccgtcacctccacagcccctactacttccaagaagaggcagcagcagcagaaaaagaccagcagaaaaccagcagctagaaaatccacagcggcggcagcaggtggactgaggatcgcggcgaacgagccggcgcaaacccgggagctgaggaaccggatctttcccaccctctatgccatcttccagcagagtcgggggcaggagcaggaactgaaagtcaagaaccgttctctgcgctcgctcacccgcagttgtctgtatcacaagagcgaagaccaacttcagcgcactctcgaggacgccgaggctctcttcaacaagtactgcgcgctcactcttaaagagtagcccgcgcccgcccagtcgcagaaaaaggcgggaattacgtcacctgtgcccttcgccctagccgcctccacccatcatcatgagcaaagagattcccacgccttacatgtggagctaccagccccagatgggcctggccgccggtgccgcccaggactactccacccgcatgaattggctcagcgccgggcccgcgatgatctcacgggtgaatgacatccgcgcccaccgaaaccagatactcctagaacagtcagcgctcaccgccacgccccgcaatcacctcaatccgcgtaattggcccgccgccctggtgtaccaggaaattccccagcccacgaccgtactacttccgcgagacgcccaggccgaagtccagctgactaactcaggtgtccagctggcgggcggcgccaccctgtgtcgtcaccgccccgctcagggtataaagcggctggtgatccggggcagaggcacacagctcaacgacgaggtggtgagctcttcgctgggtctgcgacctgacggagtcttccaactcgccggatcggggagatcttccttcacgcctcgtcaggccgtcctgactttggagagttcgtcctcgcagccccgctcgggtggcatcggcactctccagttcgtggaggagttcactccctcggtctacttcaaccccttctccggctcccccggccactacccggacgagttcatcccgaacttcgacgccatcagcgagtcggtggacggctacgattgaatgtcccatggtggcgcagctgacctagctcggcttcgacacctggaccactgccgccgcttccgctgcttcgctcgggatctcgccgagtttgcctactttgagctgcccgaggagcaccctcagggcccggcccacggagtgcggatcgtcgtcgaagggggcctcgactcccacctgcttcggatcttcagccagcgtccgatcctggtcgagcgcgagcaaggacagacccttctgactctgtactgcatctgcaaccaccccggcctgcatgaaagtctttgttgtctgctgtgtactgagtataataaaagctgagatcagcgactactccggacttccgtgtgttcctgaatccatcaaccagtctttgttcttcaccgggaacgagaccgagctccagctccagtgtaagccccacaagaagtacctcacctggctgttccagggctccccgatcgccgttgtcaaccactgcgacaacgacggagtcctgctgagcggccctgccaaccttactttttccacccgcagaagcaagctccagctcttccaacccttcctccccgggacctatcagtgcgtctcgggaccctgccatcacaccttccacctgatcccgaataccacagcgtcgctccccgctactaacaaccaaactaacctccaccaacgccaccgtcgcgacggccacaatacatgcccatattagactatgaggccgagccacagcgacccatgctccccgctattagttacttcaatctaaccggcggagatgactgacccactggccaacaacaacgtcaacgaccttctcctggacatggacggccgcgcctcggagcagcgactcgcccaacttcgcattcgccagcagcaggagagagccgtcaaggagctgcaggatgcggtggccatccaccagtgcaagagaggcatcttctgcctggtgaaacaggccaagatctcctacgaggtcactccaaacgaccatcgcctctcctacgagctcctgcagcagcgccagaagttcacctgcctggtcggagtcaaccccatcgtcatcacccagcagtctggcgataccaaggggtgcatccactgctcctgcgactcccccgactgcgtccacactctgatcaagaccctctgcggcctccgcgacctcctccccatgaactaatcacccccttatccagtgaaataaagatcatattgatgatgattttacagaaataaaaaataatcatttgatttgaaataaagatacaatcatattgatgatttgagtttaacaaaaaaataaagaatcacttacttgaaatctgataccaggtctctgtccatgttttctgccaacaccacttcactcccctcttcccagctctggtactgcaggccccggcgggctgcaaacttcctccacacgctgaaggggatgtcaaattcctcctgtccctcaatcttcattttatcttctatcagatgtccaaaaagcgcgtccgggtggatgatgacttcgaccccgtctacccctacgatgcagacaacgcaccgaccgtgcccttcatcaacccccccttcgtctcttcagatggattccaagagaagcccctgggggtgttgtccctgcgactggccgaccccgtcaccaccaagaacggggaaatcaccctcaagctgggagagggggtggacctcgattcctcgggaaaactcatctccaacacggccaccaaggccgccgcccctctcagtttttccaacaacaccatttcccttaacatggatcaccccttttacactaaagatggaaaattatccttacaagtttctccaccattaaatatactgagaacaagcattctaaacacactagctttaggttttggatcaggtttaggactccgtggctctgccttggcagtacagttagtctctccacttacatttgatactgatggaaacataaagcttaccttagacagaggtttgcatgttacaacaggagatgcaattgaaagcaacataagctgggctaaaggtttaaaatttgaagatggagccatagcaaccaacattggaaatgggttagagtttggaagcagtagtacagaaacaggtgttgatgatgcttacccaatccaagttaaacttggatctggccttagctttgacagtacaggagccataatggctggtaacaaagaagacgataaactcactttgtggacaacacctgatccatcaccaaactgtcaaatactcgcagaaaatgatgcaaaactaacactttgcttgactaaatgtggtagtcaaatactggccactgtgtcagtcttagttgtaggaagtggaaacctaaaccccattactggcaccgtaagcagtgctcaggtgtttctacgttttgatgcaaacggtgttcttttaacagaacattctacactaaaaaaatactgggggtataggcagggagatagcatagatggcactccatataccaatgctgtaggattcatgcccaatttaaaagcttatccaaagtcacaaagttctactactaaaaataatatagtagggcaagtatacatgaatggagatgtttcaaaacctatgcttctcactataaccctcaatggtactgatgacagcaacagtacatattcaatgtcattttcatacacctggactaatggaagctatgttggagcaacatttggggctaactcttataccttctcatacatcgcccaagaatgaacactgtatcccaccctgcatgccaacccttcccaccccactctgtggaacaaactctgaaacacaaaataaaataaagttcaagtgttttattgattcaacagttttacaggattcgagcagttatttttcctccaccctcccaggacatggaatacaccaccctctccccccgcacagccttgaacatctgaatgccattggtgatggacatgcttttggtctccacgttccacacagtttcagagcgagccagtctcgggtcggtcagggagatgaaaccctccgggcactcccgcatctgcacctcacagctcaacagctgaggattgtcctcggtggtcgggatcacggttatctggaagaagcagaagagcggcggtgggaatcatagtccgcgaacgggatcggccggtggtgtcgcatcaggccccgcagcagtcgctgccgccgccgctccgtcaagctgctgctcagggggtccgggtccagggactccctcagcatgatgcccacggccctcagcatcagtcgtctggtgcggcgggcgcagcagcgcatgcggatctcgctcaggtcgctgcagtacgtgcaacacagaaccaccaggttgttcaacagtccatagttcaacacgctccagccgaaactcatcgcgggaaggatgctacccacgtggccgtcgtaccagatcctcaggtaaatcaagtggtgccccctccagaacacgctgcccacgtacatgatctccttgggcatgtggcggttcaccacctcccggtaccacatcaccctctggttgaacatgcagccccggatgatcctgcggaaccacagggccagcaccgccccgcccgccatgcagcgaagagaccccgggtcccggcaatggcaatggaggacccaccgctcgtacccgtggatcatctgggagctgaacaagtctatgttggcacagcacaggcatatgctcatgcatctcttcagcactctcaactcctcgggggtcaaaaccatatcccagggcacggggaactcttgcaggacagcgaaccccgcagaacagggcaatcctcgcacagaacttacattgtgcatggacagggtatcgcaatcaggcagcaccgggtgatcctccaccagagaagcgcgggtctcggtctcctcacagcgtggtaagggggccggccgatacgggtgatggcgggacgcggctgatcgtgttcgcgaccgtgtcatgatgcagttgctttcggacattttcgtacttgctgtagcagaacctggtccgggcgctgcacaccgatcgccggcggcggtctcggcgcttggaacgctcggtgttgaaattgtaaaacagccactctctcagaccgtgcagcagatctagggcctcaggagtgatgaagatcccatcatgcctgatggctctgatcacatcgaccaccgtggaatgggccagacccagccagatgatgcaattttgttgggtttcggtgacggcgggggagggaagaacaggaagaaccatgattaacttttaatccaaacggtctcggagtacttcaaaatgaagatcgcggagatggcacctctcgcccccgctgtgttggtggaaaataacagccaggtcaaaggtgatacggttctcgagatgttccacggtggcttccagcaaagcctccacgcgcacatccagaaacaagacaatagcgaaagcgggagggttctctaattcctcaatcatcatgttacactcctgcaccatccccagataattttcatttttccagccttgaatgattcgaactagttcgtgaggtaaatccaagccagccatgataaagagctcgcgcagagcgccctccaccggcattcttaagcacaccctcataattccaagatattctgctcctggttcacctgcagcagattgacaagcggaatatcaaaatctctgccgcgatccctgagctcctccctcagcaataactgtaagtactctttcatatcctctccgaaatttttagccataggaccaccaggaataagattagggcaagccacagtacagataaaccgaagtcctccccagtgagcattgccaaatgcaagactgctataagcatgctggctagacccggtgatatcttccagataactggacagaaaatcgcccaggcaatttttaagaaaatcaacaaaagaaaaatcctccaggtggacgtttagagcctcgggaacaacgatgaagtaaatgcaagcggtgcgttccagcatggttagttagctgatctgtagaaaaaacaaaaatgaacattaaaccatgctagcctggcgaacaggtgggtaaatcgttctctccagcaccaggcaggccacggggtctccggcgcgaccctcgtaaaaattgtcgctatgattgaaaaccatcacagagagacgttcccggtggccggcgtgaatgattcgacaagatgaatacacccccggaacattggcgtccgcgagtgaaaaaaagcgcccgaggaagcaataaggcactacaatgctcagtctcaagtccagcaaagcgatgccatgcggatgaagcacaaaattctcaggtgcgtacaaaatgtaattactcccctcctgcacaggcagcaaagcccccgatccctccaggtacacatacaaagcctcagcgtccatagcttaccgagcagcagcacacaacaggcgcaagagtcagagaaaggctgagctctaacctgtccacccgctctctgctcaatatatagcccagatctacactgacgtaaaggccaaagtctaaaaatacccgccaaataatcacacacgcccagcacacgcccagaaaccggtgacacactcaaaaaaatacgcgcacttcctcaaacgcccaaaactgccgtcatttccgggttcccacgctacgtcatcaaaacacgactttcaaattccgtcgaccgttaaaaacgtcacccgccccgcccctaacggtcgcccgtctctcagccaatcagcgccccgcatccccaaattcaaacacctcatttgcatattaacgcgcacaaaaagtttgaggtatattattgatgatgg

SEQ ID NO: 13 - DNA, 30684 bp, synthetic construct
  misc_feature 1..30684: note = Description of Artificial Sequence: Synthetic polynucleotide
  source 1..30684: mol_type = other DNA
ccatcttcaataatatacctcaaactttttgtgcgcgttaatatgcaaatgaggcgtttgaatttggggaggaagggcggtgattggtcgagggatgagcgaccgttaggggcggggcgagtgacgttttgatgacgtggttgcgaggaggagccagtttgcaagttctcgtgggaaaagtgacgtcaaacgaggtgtggtttgaacacggaaatactcaattttcccgcgctctctgacaggaaatgaggtgtttctgggcggatgcaagtgaaaacgggccattttcgcgcgaaaactgaatgaggaagtgaaaatctgagtaatttcgcgtttatggcagggaggagtatttgccgagggccgagtagactttgaccgattacgtgggggtttcgattaccgtgtttttcacctaaatttccgcgtacggtgtcaaagtccggtgtttttacgtaggtgtcagctgatcgccagggtatttaaacctgcgctctccagtcaagaggccactcttgagtgccagcgagaagagttttctcctccgcgccgcgagtcagatctacactttgaaagtagggataacagggtaatgacattgattattgactagttgttaatagtaatcaattacggggtcattagttcatagcccatatatggagttccgcgttacataacttacggtaaatggcccgcctggctgaccgcccaacgacccccgcccattgacgtcaataatgacgtatgttcccatagtaacgccaatagggactttccattgacgtcaatgggtggagtatttacggtaaactgcccacttggcagtacatcaagtgtatcatatgccaagtccgccccctattgacgtcaatgacggtaaatggcccgcctggcattatgcccagtacatgaccttacgggactttcctacttggcagtacatctacgtattagtcatcgctattaccatggtgatgcggttttggcagtacaccaatgggcgtggatagcggtttgactcacggggatttccaagtctccaccccattgacgtcaatgggagtttgttttggcaccaaaatcaacgggactttccaaaatgtcgtaataaccccgccccgttgacgcaaatgggcggtaggcgtgtacggtgggaggtctatataagcagagctcgtttagtgaaccgtcagatcgcctggaacgccatccacgctgttttgacctccatagaagacagcgatcgcgccaccatggtgagcaagggcgaggagctgttcaccggggtggtgcccatcctggtcgagctggacggcgacgtaaacggccacaagttcagcgtgtccggcgagggcgagggcgatgccacctacggcaagctgaccctgaagttcatctgcaccaccggcaagctgcccgtgccctggcccaccctcgtgaccaccctgacctacggcgtgcagtgcttcagccgctaccccgaccacatgaagcagcacgacttcttcaagtccgccatgcccgaaggctacgtccaggagcgcaccatcttcttcaaggacgacggcaactacaagacccgcgccgaggtgaagttcgagggcgacaccctggtgaaccgcatcgagctgaagggcatcgacttcaaggaggacggcaacatcctggggcacaagctggagtacaactacaacagccacaacgtctatatcatggccgacaagcagaagaacggcatcaaggtgaacttcaagatccgccacaacatcgaggacggcagcgtgcagctcgccgaccactaccagcagaacacccccatcggcgacggccccgtgctgctgcccgacaaccactacctgagcacccagtccgccctgagcaaagaccccaacgagaagcgcgatcacatggtcctgctggagttcgtgaccgccgccgggatcactctcggcatggacgagctttacaagtagtgagtttaaactcccatttaaatgtgagggttaatgcttcgagcagacatgataagatacattgatgagtttggacaaaccacaactagaatgcagtgaaaaaaatgctttatttgtgaaatttgtgatgctattgctttatttgtaaccattataagctgcaataaacaagttaacaacaacaattgcattcattttatgtttcaggttcagggggagatgtgggaggttttttaaagcaagtaaaacctctacaaatgtggtaaaataactataacggtcctaaggtagcgagtgagtagtgttctggggcgggggaggacctgcatgagggccagaataactgaaatctgtgcttttctgtgtgttgcagcagcatgagcggaagcggctcctttgagggaggggtattcagcccttatctgacggggcgtctcccctcctgggcgggagtgcgtcagaatgtgatgggatccacggtggacggccggcccgtgcagcccgcgaactcttcaaccctgacctatgcaaccctgagctcttcgtcgttggacgcagctgccgccgcagctgctgcatctgccgccagcgccgtgcgcggaatggccatgggcgccggctactacggcactctggtggccaactcgagttccaccaataatcccgccagcctgaacgaggagaagctgttgctgctgatggcccagctcgaggccttgacccagcgcctgggcgagctgacccagcaggtggctcagctgcaggagcagacgcgggccgcggttgccacggtgaaatccaaataaaaaatgaatcaataaataaacggagacggttgttgattttaacacagagtctgaatctttatttgatttttcgcgcgcggtaggccctggaccaccggtctcgatcattgagcacccggtggatcttttccaggacccggtagaggtgggcttggatgttgaggtacatgggcatgagcccgtcccgggggtggaggtagctccattgcagggcctcgtgctcgggggtggtgttgtaaatcacccagtcatagcaggggcgcagggcatggtgttgcacaatatctttgaggaggagactgatggccacgggcagccctttggtgtaggtgtttacaaatctgttgagctgggagggatgcatgcggggggagatgaggtgcatcttggcctggatcttgagattggcgatgttaccgcccagatcccgcctggggttcatgttgtgcaggaccaccagcacggtgtatccggtgcacttggggaatttatcatgcaacttggaagggaaggcgtgaaagaatttggcgacgcctttgtgcccgcccaggttttccatgcactcatccatgatgatggcgatgggcccgtgggcggcggcctgggcaaagacgtttcgggggtcggacacatcatagttgtggtcctgggtgaggtcatcataggccattttaatgaatttggggcggagggtgccggactgggggacaaaggtaccctcgatcccgggggcgtagttcccctcacagatctgcatctcccaggctttgagctcggagggggggatcatgtccacctgcggggcgataaagaacacggtttccggggcgggggagatgagctgggccgaaagcaagttccggagcagctgggacttgccgcagccggtggggccgtagatgaccccgatgaccggctgcaggtggtagttgagggagagacagctgccgtcctcccggaggaggggggccacctcgttcatcatctcgcgcacgtgcatgttctcgcgcaccagttccgccaggaggcgctctccccccagggataggagctcctggagcgaggcgaagtttttcagcggcttgagtccgtcggccatgggcattttggagagggtttgttgcaagagttccaggcggtcccagagctcggtgatgtgctctacggcatctcgatccagcagacctcctcgtttcgcgggttgggacggctgcgggagtagggcaccagacgatgggcgtccagcgcagccagggtccggtccttccagggtcgcagcgtccgcgtcagggtggtctccgtcacggtgaaggggtgcgcgccgggctgggcgcttgcgagggtgcgcttcaggctcatccggctggtcgaaaaccgctcccgatcggcgccctgcgcgtcggccaggtagcaattgaccatgagttcgtagttgagcgcctcggccgcgtggcctttggcgcggagcttacctttggaagtctgcccgcaggcgggacagaggagggacttgagggcgtagagcttgggggcgaggaagacggactcgggggcgtaggcgtccgcgccgcagtgggcgcagacggtctcgcactccacgagccaggtgaggtcgggctggtcggggtcaaaaaccagtttcccgccgttctttttgatgcgtttcttacctttggtctccatgagctcgtgtccccgctgggtgacaaagaggctgtccgtgtccccgtagaccgactttatgggccggtcctcgagcggtgtgccgcggtcctcctcgtagaggaaccccgcccactccgagacgaaagcccgggtccaggccagcacgaaggaggccacgtgggacgggtagcggtcgttgtccaccagcgggtccaccttttccagggtatgcaaacacatgtccccctcgtccacatccaggaaggtgattggcttgtaagtgtaggccacgtgaccgggggtcccggccgggggggtataaaagggtgcgggtccctgctcgtcctcactgtcttccggatcgctgtccaggagcgccagctgttggggtaggtattccctctcgaaggcgggcatgacctcggcactcaggttgtcagtttctagaaacgaggaggatttgatattgacggtgccggcggagatgcctttcaagagcccctcgtccatctggtcagaaaagacgatctttttgttgtcgagcttggtggcgaaggagccgtagagggcgttggagaggagcttggcgatggagcgcatggtctggtttttttccttgtcggcgcgctccttggcggcgatgttgagctgcacgtactcgcgcgccacgcacttccattcggggaagacggtggtcagctcgtcgggcacgattctgacctgccagccccgattatgcagggtgatgaggtccacactggtggccacctcgccgcgcaggggctcattagtccagcagaggcgtccgcccttgcgcgagcagaaggggggcagggggtccagcatgacctcgtcgggggggtcggcatcgatggtgaagatgccgggcaggaggtcggggtcaaagtagctgatggaagtggccagatcgtccagggcagcttgccattcgcgcacggccagcgcgcgctcgtagggactgaggggcgtgccccagggcatgggatgggtaagcgcggaggcgtacatgccgcagatgtcgtagacgtagaggggctcctcgaggatgccgatgtaggtggggtagcagcgccccccgcggatgctggcgcgcacgtagtcatacagctcgtgcgagggggcgaggagccccgggcccaggttggtgcgactgggcttttcggcgcggtagacgatctggcggaaaatggcatgcgagttggaggagatggtgggcctttggaagatgttgaagtgggcgtggggcagtccgaccgagtcgcggatgaagtgggcgtaggagtcttgcagcttggcgacgagctcggcggtgactaggacgtccagagcgcagtagtcgagggtctcctggatgatgtcatacttgagctgtcccttttgtttccacagctcgcggttgagaaggaactcttcgcggtccttccagtactcttcgagggggaacccgtcctgatctgcacggtaagagcctagcatgtagaactggttgacggccttgtaggcgcagcagcccttctccacggggagggcgtaggcctgggcggccttgcgcagggaggtgtgcgtgagggcgaaagtgtccctgaccatgaccttgaggaactggtgcttgaagtcgatatcgtcgcagcccccctgctcccagagctggaagtccgtgcgcttcttgtaggcggggttgggcaaagcgaaagtaacatcgttgaagaggatcttgcccgcgcggggcataaagttgcgagtgatgcggaaaggttggggcacctcggcccggttgttgatgacctgggcggcgagcacgatctcgtcgaagccgttgatgttgtggcccacgatgtagagttccacgaatcgcggacggcccttgacgtggggcagtttcttgagctcctcgtaggtgagctcgtcggggtcgctgagcccgtgctgctcgagcgcccagtcggcgagatgggggttggcgcggaggaaggaagtccagagatccacggccagggcggtttgcagacggtcccggtactgacggaactgctgcccgacggccattttttcgggggtgacgcagtagaaggtgcgggggtccccgtgccagcgatcccatttgagctggagggcgagatcgagggcgagctcgacgagccggtcgtccccggagagtttcatgaccagcatgaaggggacgagctgcttgccgaaggaccccatccaggtgtaggtttccacatcgtaggtgaggaagagcctttcggtgcgaggatgcgagccgatggggaagaactggatctcctgccaccaattggaggaatggctgttgatgtgatggaagtagaaatgccgacggcgcgccgaacactcgtgcttgtgtttatacaagcggccacagtgctcgcaacgctgcacgggatgcacgtgctgcacgagctgtacctgagttcctttgacgaggaatttcagtgggaagtggagtcgtggcgcctgcatctcgtgctgtactacgtcgtggtggtcggcctggccctcttctgcctcgatggtggtcatgctgacgagcccgcgcgggaggcaggtccagacctcggcgcgagcgggtcggagagcgaggacgagggcgcgcaggccggagctgtccagggtcctgagacgctgcggagtcaggtcagtgggcagcggcggcgcgcggttgacttgcaggagtttttccagggcgcgcgggaggtccagatggtacttgatctccaccgcgccattggtggcgacgtcgatggcttgcagggtcccgtgcccctggggtgtgaccaccgtcccccgtttcttcttgggcggctggggcgacgggggcggtgcctcttccatggttagaagcggcggcgaggacgcgcgccgggcggcaggggcggctcggggcccggaggcaggggcggcaggggcacgtcggcgccgcgcgcgggtaggttctggtactgcgcccggagaagactggcgtgagcgacgacgcgacggttgacgtcctggatctgacgcctctgggtgaaggccacgggacccgtgagtttgaacctgaaagagagttcgacagaatcaatctcggtatcgttgacggcggcctgccgcaggatctcttgcacgtcgcccgagttgtcctggtaggcgatctcggtcatgaactgctcgatctcctcctcttgaaggtctccgcggccggcgcgctccacggtggccgcgaggtcgttggagatgcggcccatgagctgcgagaaggcgttcatgcccgcctcgttccagacgcggctgtagaccacgacgccctcgggatcgcgggcgcgcatgaccacctgggcgaggttgagctccacgtggcgcgtgaagaccgcgtagttgcagaggcgctggtagaggtagttgagcgtggtggcgatgtgctcggtgacgaagaaatacatgatccagcggcggagcggcatctcgctgacgtcgcccagcgcctccaaacgttccatggcctcgtaaaagtccacggcgaagttgaaaaactgggagttgcgcgccgagacggtcaactcctcctccagaagacggatgagctcggcgatggtggcgcgcacctcgcgctcgaaggcccccgggagttcctccacttcctcttcttcctcctccactaacatctcttctacttcctcctcaggcggcagtggtggcgggggagggggcctgcgtcgccggcggcgcacgggcagacggtcgatgaagcgctcgatggtctcgccgcgccggcgtcgcatggtctcggtgacggcgcgcccgtcctcgcggggccgcagcgtgaagacgccgccgcgcatctccaggtggccgggggggtccccgttgggcagggagagggcgctgacgatgcatcttatcaattgccccgtagggactccgcgcaaggacctgagcgtctcgagatccacgggatctgaaaaccgctgaacgaaggcttcgagccagtcgcagtcgcaaggtaggctgagcacggtttcttctggcgggtcatgttggttgggagcggggcgggcgatgctgctggtgatgaagttgaaataggcggttctgagacggcggatggtggcgaggagcaccaggtctttgggcccggcttgctggatgcgcagacggtcggccatgccccaggcgtggtcctgacacctggccaggtccttgtagtagtcctgcatgagccgctccacgggcacctcctcctcgcccgcgcggccgtgcatgcgcgtgagcccgaagccgcgctggggctggacgagcgccaggtcggcgacgacgcgctcggcgaggatggcttgctggatctgggtgagggtggtctggaagtcatcaaagtcgacgaagcggtggtaggctccggtgttgatggtgtaggagcagttggccatgacggaccagttgacggtctggtggcccggacgcacgagctcgtggtacttgaggcgcgagtaggcgcgcgtgtcgaagatgtagtcgttgcaggtgcgcaccaggtactggtagccgatgaggaagtgcggcggcggctggcggtagagcggccatcgctcggtggcgggggcgccgggcgcgaggtcctcgagcatggtgcggtggtagccgtagatgtacctggacatccaggtgatgccggcggcggtggtggaggcgcgcgggaactcgcggacgcggttccagatgttgcgcagcggcaggaagtagttcatggtgggcacggtctggcccgtgaggcgcgcgcagtcgtggatgctctatacgggcaaaaacgaaagcggtcagcggctcgactccgtggcctggaggctaagcgaacgggttgggctgcgcgtgtaccccggttcgaatctcgaatcaggctggagccgcagctaacgtggtattggcactcccgtctcgacccaagcctgcaccaaccctccaggatacggaggcgggtcgttttgcaacttttttttggaggccggatgagactagtaagcgcggaaagcggccgaccgcgatggctcgctgccgtagtctggagaagaatcgccagggttgcgttgcggtgtgccccggttcgaggccggccggattccgcggctaacgagggcgtggctgccccgtcgtttccaagaccccatagccagccgacttctccagttacggagcgagcccctcttttgttttgtttgtttttgccagatgcatcccgtactgcggcagatgcgcccccaccaccctccaccgcaacaacagccccctccacagccggcgcttctgcccccgccccagcagcaacttccagccacgaccgccgcggccgccgtgagcggggctggacagagttatgatcaccagctggccttggaagagggcgaggggctggcgcgcctgggggcgtcgtcgccggagcggcacccgcgcgtgcagatgaaaagggacgctcgcgaggcctacgtgcccaagcagaacctgttcagagacaggagcggcgaggagcccgaggagatgcgcgcggcccggttccacgcggggcgggagctgcggcgcggcctggaccgaaagagggtgctgagggacgaggatttcgaggcggacgagctgacggggatcagccccgcgcgcgcgcacgtggccgcggccaacctggtcacggcgtacgagcagaccgtgaaggaggagagcaacttccaaaaatccttcaacaaccacgtgcgcaccctgatcgcgcgcgaggaggtgaccctgggcctgatgcacctgtgggacctgctggaggccatcgtgcagaaccccaccagcaagccgctgacggcgcagctgttcctggtggtgcagcatagtcgggacaacgaagcgttcagggaggcgctgctgaatatcaccgagcccgagggccgctggctcctggacctggtgaacattctgcagagcatcgtggtgcaggagcgcgggctgccgctgtccgagaagctggcggccatcaacttctcggtgctgagtttgggcaagtactacgctaggaagatctacaagaccccgtacgtgcccatagacaaggaggtgaagatcgacgggttttacatgcgcatgaccctgaaagtgctgaccctgagcgacgatctgggggtgtaccgcaacgacaggatgcaccgtgcggtgagcgccagcaggcggcgcgagctgagcgaccaggagctgatgcatagtctgcagcgggccctgaccggggccgggaccgagggggagagctactttgacatgggcgcggacctgcactggcagcccagccgccgggccttggaggcggcggcaggaccctacgtagaagaggtggacgatgaggtggacgaggagggcgagtacctggaagactgatggcgcgaccgtatttttgctagatgcaacaacaacagccacctcctgatcccgcgatgcgggcggcgctgcagagccagccgtccggcattaactcctcggacgattggacccaggccatgcaacgcatcatggcgctgacgacccgcaaccccgaagcctttagacagcagccccaggccaaccggctctcggccatcctggaggccgtggtgccctcgcgctccaaccccacgcacgagaaggtcctggccatcgtgaacgcgctggtggagaacaaggccatccgcggcgacgaggccggcctggtgtacaacgcgctgctggagcgcgtggcccgctacaacagcaccaacgtgcagaccaacctggaccgcatggtgaccgacgtgcgcgaggccgtggcccagcgcgagcggttccaccgcgagtccaacctgggatccatggtggcgctgaacgccttcctcagcacccagcccgccaacgtgccccggggccaggaggactacaccaacttcatcagcgccctgcgcctgatggtgaccgaggtgccccagagcgaggtgtaccagtccgggccggactacttcttccagaccagtcgccagggcttgcagaccgtgaacctgagccaggctttcaagaacttgcagggcctgtggggcgtgcaggccccggtcggggaccgcgcgacggtgtcgagcctgctgacgccgaactcgcgcctgctgctgctgctggtggcccccttcacggacagcggcagcatcaaccgcaactcgtacctgggctacctgattaacctgtaccgcgaggccatcggccaggcgcacgtggacgagcagacctaccaggagatcacccacgtgagccgcgccctgggccaggacgacccgggcaacctggaagccaccctgaactttttgctgaccaaccggtcgcagaagatcccgccccagtacgcgctcagcaccgaggaggagcgcatcctgcgttacgtgcagcagagcgtgggcctgttcctgatgcaggagggggccacccccagcgccgcgctcgacatgaccgcgcgcaacatggagcccagcatgtacgccagcaaccgcccgttcatcaataaactgatggactacttgcatcgggcggccgccatgaactctgactatttcaccaacgccatcctgaatccccactggctcccgccgccggggttctacacgggcgagtacgacatgcccgaccccaatgacgggttcctgtgggacgatgtggacagcagcgtgttctccccccgaccgggtgctaacgagcgccccttgtggaagaaggaaggcagcgaccgacgcccgtcctcggcgctgtccggccgcgagggtgctgccgcggcggtgcccgaggccgccagtcctttcccgagcttgcccttctcgctgaacagtatccgcagcagcgagctgggcaggatcacgcgcccgcgcttgctgggcgaagaggagtacttgaatgactcgctgttgagacccgagcgggagaagaacttccccaataacgggatagaaagcctggtggacaagatgagccgctggaagacgtatgcgcaggagcacagggacgatccccgggcgtcgcagggggccacgagccggggcagcgccgcccgtaaacgccggtggcacgacaggcagcggggacagatgtgggacgatgaggactccgccgacgacagcagcgtgttggacttgggtgggagtggtaacccgttcgctcacctgcgcccccgtatcgggcgcatgatgtaagagaaaccgaaaataaatgatactcaccaaggccatggcgaccagcgtgcgttcgtttcttctctgttgttgttgtatctagtatgatgaggcgtgcgtacccggagggtcctcctccctcgtacgagagcgtgatgcagcaggcgatggcggcggcggcgatgcagcccccgctggaggctccttacgtgcccccgcggtacctggcgcctacggaggggcggaacagcattcgttactcggagctggcacccttgtacgataccacccggttgtacctggtggacaacaagtcggcggacatcgcctcgctgaactaccagaacgaccacagcaacttcctgaccaccgtggtgcagaacaatgacttcacccccacggaggccagcacccagaccatcaactttgacgagcgctcgcggtggggcggccagctgaaaaccatcatgcacaccaacatgcccaacgtgaacgagttcatgtacagcaacaagttcaaggcgcgggtgatggtctcccgcaagacccccaatggggtgacagtgacagaggattatgatggtagtcaggatgagctgaagtatgaatgggtggaatttgagctgcccgaaggcaacttctcggtgaccatgaccatcgacctgatgaacaacgccatcatcgacaattacttggcggtggggcggcagaacggggtgctggagagcgacatcggcgtgaagttcgacactaggaacttcaggctgggctgggaccccgtgaccgagctggtcatgcccggggtgtacaccaacgaggctttccatcccgatattgtcttgctgcccggctgcggggtggacttcaccgagagccgcctcagcaacctgctgggcattcgcaagaggcagcccttccaggaaggcttccagatcatgtacgaggatctggaggggggcaacatccccgcgctcctggatgtcgacgcctatgagaaaagcaaggaggatgcagcagctgaagcaactgcagccgtagctaccgcctctaccgaggtcaggggcgataattttgcaagcgccgcagcagtggcagcggccgaggcggctgaaaccgaaagtaagatagtcattcagccggtggagaaggatagcaagaacaggagctacaacgtactaccggacaagataaacaccgcctaccgcagctggtacctagcctacaactatggcgaccccgagaagggcgtgcgctcctggacgctgctcaccacctcggacgtcacctgcggcgtggagcaagtctactggtcgctgcccgacatgatgcaagacccggtcaccttccgctccacgcgtcaagttagcaactacccggtggtgggcgccgagctcctgcccgtctactccaagagcttcttcaacgagcaggccgtctactcgcagcagctgcgcgccttcacctcgcttacgcacgtcttcaaccgcttccccgagaaccagatcctcgtccgcccgcccgcgcccaccattaccaccgtcagtgaaaacgttcctgctctcacagatcacgggaccctgccgctgcgcagcagtatccggggagtccagcgcgtgaccgttactgacgccagacgccgcacctgcccctacgtctacaaggccctgggcatagtcgcgccgcgcgtcctctcgagccgcaccttctaaatgtccattctcatctcgcccagtaataacaccggttggggcctgcgcgcgcccagcaagatgtacggaggcgctcgccaacgctccacgcaacaccccgtgcgcgtgcgcgggcacttccgcgctccctggggcgccctcaagggccgcgtgcggtcgcgcaccaccgtcgacgacgtgatcgaccaggtggtggccgacgcgcgcaactacacccccgccgccgcgcccgtctccaccgtggacgccgtcatcgacagcgtggtggccgacgcgcgccggtacgcccgcgccaagagccggcggcggcgcatcgcccggcggcaccggagcacccccgccatgcgcgcggcgcgagccttgctgcgcagggccaggcgcacgggacgcagggccatgctcagggcggccagacgcgcggcttcaggcgccagcgccggcaggacccggagacgcgcggccacggcggcggcagcggccatcgccagcatgtcccgcccgcggcgagggaacgtgtactgggtgcgcgacgccgccaccggtgtgcgcgtgcccgtgcgcacccgcccccctcgcacttgaagatgttcacttcgcgatgttgatgtgtcccagcggcgaggaggatgtccaagcgcaaattcaaggaagagatgctccaggtcatcgcgcctgagatctacggccctgcggtggtgaaggaggaaagaaagccccgcaaaatcaagcgggtcaaaaaggacaaaaaggaagaagaaagtgatgtggacggattggtggagtttgtgcgcgagttcgccccccggcggcgcgtgcagtggcgcgggcggaaggtgcaaccggtgctgagacccggcaccaccgtggtcttcacgcccggcgagcgctccggcaccgcttccaagcgctcctacgacgaggtgtacggggatgatgatattctggagcaggcggccgagcgcctgggcgagtttgcttacggcaagcgcagccgttccgcaccgaaggaagaggcggtgtccatcccgctggaccacggcaaccccacgccgagcctcaagcccgtgaccttgcagcaggtgctgccgaccgcggcgccgcgccgggggttcaagcgcgagggcgaggatctgtaccccaccatgcagctgatggtgcccaagcgccagaagctggaagacgtgctggagaccatgaaggtggacccggacgtgcagcccgaggtcaaggtgcggcccatcaagcaggtggccccgggcctgggcgtgcagaccgtggacatcaagattcccacggagcccatggaaacgcagaccgagcccatgatcaagcccagcaccagcaccatggaggtgcagacggatccctggatgccatcggctcctagtcgaagaccccggcgcaagtacggcgcggccagcctgctgatgcccaactacgcgctgcatccttccatcatccccacgccgggctaccgcggcacgcgcttctaccgcggtcataccagcagccgccgccgcaagaccaccactcgccgccgccgtcgccgcaccgccgctgcaaccacccctgccgccctggtgcggagagtgtaccgccgcggccgcgcacctctgaccctgccgcgcgcgcgctaccacccgagcatcgccatttaaactttcgcctgctttgcagatcaatggccctcacatgccgccttcgcgttcccattacgggctaccgaggaagaaaaccgcgccgtagaaggctggcggggaacgggatgcgtcgccaccaccaccggcggcggcgcgccatcagcaagcggttggggggaggcttcctgcccgcgctgatccccatcatcgccgcggcgatcggggcgatccccggcattgcttccgtggcggtgcaggcctctcagcgccactgagacacacttggaaacatcttgtaataaaccaatggactctgacgctcctggtcctgtgatgtgttttcgtagacagatggaagacatcaatttttcgtccctggctccgcgacacggcacgcggccgttcatgggcacctggagcgacatcggcaccagccaactgaacgggggcgccttcaattggagcagtctctggagcgggcttaagaatttcgggtccacgcttaaaacctatggcagcaaggcgtggaacagcaccacagggcaggcgctgagggataagctgaaagagcagaacttccagcagaaggtggtcgatgggctcgcctcgggcatcaacggggtggtggacctggccaaccaggccgtgcagcggcagatcaacagccgcctggacccggtgccgcccgccggctccgtggagatgccgcaggtggaggaggagctgcctcccctggacaagcggggcgagaagcgaccccgccccgatgcggaggagacgctgctgacgcacacggacgagccgcccccgtacgaggaggcggtgaaactgggtctgcccaccacgcggcccatcgcgcccctggccaccggggtgctgaaacccgaaaagcccgcgaccctggacttgcctcctccccagccttcccgcccctctacagtggctaagcccctgccgccggtggccgtggcccgcgcgcgacccgggggcaccgcccgccctcatgcgaactggcagagcactctgaacagcatcgtgggtctgggagtgcagagtgtgaagcgccgccgctgctattaaacctaccgtagcgcttaacttgcttgtctgtgtgtgtatgtattatgtcgccgccgccgctgtccaccagaaggaggagtgaagaggcgcgtcgccgagttgcaagatggccaccccatcgatgctgccccagtgggcgtacatgcacatcgccggacaggacgcttcggagtacctgagtccgggtctggtgcagtttgcccgcgccacagacacctacttcagtctggggaacaagtttaggaaccccacggtggcgcccacgcacgatgtgaccaccgaccgcagccagcggctgacgctgcgcttcgtgcccgtggaccgcgaggacaacacctactcgtacaaagtgcgctacacgctggccgtgggcgacaaccgcgtgctggacatggccagcacctactttgacatccgcggcgtgctggatcggggccctagcttcaaaccctactccggcaccgcctacaacagtctggcccccaagggagcacccaacacttgtcagtggacatataaagccgatggtgaaactgccacagaaaaaacctatacatatggaaatgcacccgtgcagggcattaacatcacaaaagatggtattcaacttggaactgacaccgatgatcagccaatctacgcagataaaacctatcagcctgaacctcaagtgggtgatgctgaatggcatgacatcactggtactgatgaaaagtatggaggcagagctcttaagcctgataccaaaatgaagccttgttatggttcttttgccaagcctactaataaagaaggaggtcaggcaaatgtgaaaacaggaacaggcactactaaagaatatgacatagacatggctttctttgacaacagaagtgcggctgctgctggcctagctccagaaattgttttgtatactgaaaatgtggatttggaaactccagatacccatattgtatacaaagcaggcacagatgacagcagctcttctattaatttgggtcagcaagccatgcccaacagacctaactacattggtttcagagacaactttatcgggctcatgtactacaacagcactggcaatatgggggtgctggccggtcaggcttctcagctgaatgctgtggttgacttgcaagacagaaacaccgagctgtcctaccagctcttgcttgactctctgggtgacagaacccggtatttcagtatgtggaatcaggcggtggacagctatgatcctgatgtgcgcattattgaaaatcatggtgtggaggatgaacttcccaactattgtttccctctggatgctgttggcagaacagatacttatcagggaattaaggctaatggaactgatcaaaccacatggaccaaagatgacagtgtcaatgatgctaatgagataggcaagggtaatccattcgccatggaaatcaacatccaagccaacctgtggaggaacttcctctacgccaacgtggccctgtacctgcccgactcttacaagtacacgccggccaatgttaccctgcccaccaacaccaacacctacgattacatgaacggccgggtggtggcgccctcgctggtggactcctacatcaacatcggggcgcgctggtcgctggatcccatggacaacgtgaaccccttcaaccaccaccgcaatgcggggctgcgctaccgctccatgctcctgggcaacgggcgctacgtgcccttccacatccaggtgccccagaaatttttcgccatcaagagcctcctgctcctgcccgggtcctacacctacgagtggaacttccgcaaggacgtcaacatgatcctgcagagctccctcggcaacgacctgcgcacggacggggcctccatctccttcaccagcatcaacctctacgccaccttcttccccatggcgcacaacacggcctccacgctcgaggccatgctgcgcaacgacaccaacgaccagtccttcaacgactacctctcggcggccaacatgctctaccccatcccggccaacgccaccaacgtgcccatctccatcccctcgcgcaactgggccgccttccgcggctggtccttcacgcgtctcaagaccaaggagacgccctcgctgggctccgggttcgacccctacttcgtctactcgggctccatcccctacctcgacggcaccttctacctcaaccacaccttcaagaaggtctccatcaccttcgactcctccgtcagctggcccggcaacgaccggctcctgacgcccaacgagttcgaaatcaagcgcaccgtcgacggcgagggctacaacgtggcccagtgcaacatgaccaaggactggttcctggtccagatgctggcccactacaacatcggctaccagggcttctacgtgcccgagggctacaaggaccgcatgtactccttcttccgcaacttccagcccatgagccgccaggtggtggacgaggtcaactacaaggactaccaggccgtcaccctggcctaccagcacaacaactcgggcttcgtcggctacctcgcgcccaccatgcgccagggccagccctaccccgccaactacccctacccgctcatcggcaagagcgccgtcaccagcgtcacccagaaaaagttcctctgcgacagggtcatgtggcgcatccccttctccagcaacttcatgtccatgggcgcgctcaccgacctcggccagaacatgctctatgccaactccgcccacgcgctagacatgaatttcgaagtcgaccccatggatgagtccacccttctctatgttgtcttcgaagtcttcgacgtcgtccgagtgcaccagccccaccgcggcgtcatcgaggccgtctacctgcgcacccccttctcggccggtaacgccaccacctaagctcttgcttcttgcaagccatggccgcgggctccggcgagcaggagctcagggccatcatccgcgacctgggctgcgggccctacttcctgggcaccttcgataagcgcttcccgggattcatggccccgcacaagctggcctgcgccatcgtcaacacggccggccgcgagaccgggggcgagcactggctggccttcgcctggaacccgcgctcgaacacctgctacctcttcgaccccttcgggttctcggacgagcgcctcaagcagatctaccagttcgagtacgagggcctgctgcgccgcagcgccctggccaccgaggaccgctgcgtcaccctggaaaagtccacccagaccgtgcagggtccgcgctcggccgcctgcgggctcttctgctgcatgttcctgcacgccttcgtgcactggcccgaccgccccatggacaagaaccccaccatgaacttgctgacgggggtgcccaacggcatgctccagtcgccccaggtggaacccaccctgcgccgcaaccaggaggcgctctaccgcttcctcaactcccactccgcctactttcgctcccaccgcgcgcgcatcgagaaggccaccgccttcgaccgcatgaatcaagacatgtaaaccgtgtgtgtatgttaaatgtctttaataaacagcactttcatgttacacatgcatctgagatgatttatttagaaatcgaaagggttctgccgggtctcggcatggcccgcgggcagggacacgttgcggaactggtacttggccagccacttgaactcggggatcagcagtttgggcagcggggtgtcggggaaggagtcggtccacagcttccgcgtcagttgcagggcgcccagcaggtcgggcgcggagatcttgaaatcgcagttgggacccgcgttctgcgcgcgggagttgcggtacacggggttgcagcactggaacaccatcagggccgggtgcttcacgctcgccagcaccgtcgcgtcggtgatgctctccacgtcgaggtcctcggcgttggccatcccgaagggggtcatcttgcaggtctgccttcccatggtgggcacgcacccgggcttgtggttgcaatcgcagtgcagggggatcagcatcatctgggcctggtcggcgttcatccccgggtacatggccttcatgaaagcctccaattgcctgaacgcctgctgggccttggctccctcggtgaagaagaccccgcaggacttgctagagaactggttggtggcgcacccggcgtcgtgcacgcagcagcgcgcgtcgttgttggccagctgcaccacgctgcgcccccagcggttctgggtgatcttggcccggtcggggttctccttcagcgcgcgctgcccgttctcgctcgccacatccatctcgatcatgtgctccttctggatcatggtggtcccgtgcaggcaccgcagcttgccctcggcctcggtgcacccgtgcagccacagcgcgcacccggtgcactcccagttcttgtgggcgatctgggaatgcgcgtgcacgaagccctgcaggaagcggcccatcatggtggtcagggtcttgttgctagtgaaggtcagcggaatgccgcggtgctcctcgttgatgtacaggtggcagatgcggcggtacacctcgccctgctcgggcatcagctggaagttggctttcaggtcggtctccacgcggtagcggtccatcagcatagtcatgatttccatacccttctcccaggccgagacgatgggcaggctcatagggttcttcaccatcatcttagcgctagcagccgcggccagggggtcgctctcgtccagggtctcaaagctccgcttgccgtccttctcggtgatccgcaccggggggtagctgaagcccacggccgccagctcctcctcggcctgtctttcgtcctcgctgtcctggctgacgtcctgcaggaccacatgcttggtcttgcggggtttcttcttgggcggcagcggcggcggagatgttggagatggcgagggggagcgcgagttctcgctcaccactactatctcttcctcttcttggtccgaggccacgcggcggtaggtatgtctcttcgggggcagaggcggaggcgacgggctctcgccgccgcgacttggcggatggctggcagagccccttccgcgttcgggggtgcgctcccggcggcgctctgactgacttcctccgcggccggccattgtgttctcctagggaggaacaacaagcatggagactcagccatcgccaacctcgccatctgcccccaccgccgacgagaagcagcagcagcagaatgaaagcttaaccgccccgccgcccagccccgccacctccgacgcggccgtcccagacatgcaagagatggaggaatccatcgagattgacctgggctatgtgacgcccgcggagcacgaggaggagctggcagtgcgcttttcacaagaagagatacaccaagaacagccagagcaggaagcagagaatgagcagagtcaggctgggctcgagcatgacggcgactacctccacctgagcgggggggaggacgcgctcatcaagcatctggcccggcaggccaccatcgtcaaggatgcgctgctcgaccgcaccgaggtgcccctcagcgtggaggagctcagccgcgcctacgagttgaacctcttctcgccgcgcgtgccccccaagcgccagcccaatggcacctgcgagcccaacccgcgcctcaacttctacccggtcttcgcggtgcccgaggccctggccacctaccacatctttttcaagaaccaaaagatccccgtctcctgccgcgccaaccgcacccgcgccgacgcccttttcaacctgggtcccggcgcccgcctacctgatatcgcctccttggaagaggttcccaagatcttcgagggtctgggcagcgacgagactcgggccgcgaacgctctgcaaggagaaggaggagagcatgagcaccacagcgccctggtcgagttggaaggcgacaacgcgcggctggcggtgctcaaacgcacggtcgagctgacccatttcgcctacccggctctgaacctgccccccaaagtcatgagcgcggtcatggaccaggtgctcatcaagcgcgcgtcgcccatctccgaggacgagggcatgcaagactccgaggagggcaagcccgtggtcagcgacgagcagctggcccggtggctgggtcctaatgctagtccccagagtttggaagagcggcgcaaactcatgatggccgtggtcctggtgaccgtggagctggagtgcctgcgccgcttcttcgccgacgcggagaccctgcgcaaggtcgaggagaacctgcactacctcttcaggcacgggttcgtgcgccaggcctgcaagatctccaacgtggagctgaccaacctggtctcctacatgggcatcttgcacgagaaccgcctggggcagaacgtgctgcacaccaccctgcgcggggaggcccggcgcgactacatccgcgactgcgtctacctctacctctgccacacctggcagacgggcatgggcgtgtggcagcagtgtctggaggagcagaacctgaaagagctctgcaagctcctgcagaagaacctcaagggtctgtggaccgggttcgacgagcgcaccaccgcctcggacctggccgacctcattttccccgagcgcctcaggctgacgctgcgcaacggcctgcccgactttatgagccaaagcatgttgcaaaactttcgctctttcatcctcgaacgctccggaatcctgcccgccacctgctccgcgctgccctcggacttcgtgccgctgaccttccgcgagtgccccccgccgctgtggagccactgctacctgctgcgcctggccaactacctggcctaccactcggacgtgatcgaggacgtcagcggcgagggcctgctcgagtgccactgccgctgcaacctctgcacgccgcaccgctccctggcctgcaacccccagctgctgagcgagacccagatcatcggcaccttcgagttgcaagggcccagcgaaggcgagggttcagccgccaaggggggtctgaaactcaccccggggctgtggacctcggcctacttgcgcaagttcgtgcccgaggactaccatcccttcgagatcaggttctacgaggaccaatcccatccgcccaaggccgagctgtcggcctgcgtcatcacccagggggcgatcctggcccaattgcaagccatccagaaatcccgccaagaattcttgctgaaaaagggccgcggggtctacctcgacccccagaccggtgaggagctcaaccccggcttcccccaggatgccccgaggaaacaagaagctgaaagtggagctgccgcccgtggaggatttggaggaagactgggagaacagcagtcaggcagaggaggaggagatggaggaagactgggacagcactcaggcagaggaggacagcctgcaagacagtctggaggaagacgaggaggaggcagaggaggaggtggaagaagcagccgccgccagaccgtcgtcctcggcgggggagaaagcaagcagcacggataccatctccgctccgggtcggggtcccgctcgaccacacagtagatgggacgagaccggacgattcccgaaccccaccacccagaccggtaagaaggagcggcagggatacaagtcctggcgggggcacaaaaacgccatcgtctcctgcttgcaggcctgcgggggcaacatctccttcacccggcgctacctgctcttccaccgcggggtgaactttccccgcaacatcttgcattactaccgtcacctccacagcccctactacttccaagaagaggcagcagcagcagaaaaagaccagcagaaaaccagcagctagaaaatccacagcggcggcagcaggtggactgaggatcgcggcgaacgagccggcgcaaacccgggagctgaggaaccggatctttcccaccctctatgccatcttccagcagagtcgggggcaggagcaggaactgaaagtcaagaaccgttctctgcgctcgctcacccgcagttgtctgtatcacaagagcgaagaccaacttcagcgcactctcgaggacgccgaggctctcttcaacaagtactgcgcgctcactcttaaagagtagcccgcgcccgcccagtcgcagaaaaaggcgggaattacgtcacctgtgcccttcgccctagccgcctccacccatcatcatgagcaaagagattcccacgccttacatgtggagctaccagccccagatgggcctggccgccggtgccgcccaggactactccacccgcatgaattggctcagcgccgggcccgcgatgatctcacgggtgaatgacatccgcgcccaccgaaaccagatactcctagaacagtcagcgctcaccgccacgccccgcaatcacctcaatccgcgtaattggcccgccgccctggtgtaccaggaaattccccagcccacgaccgtactacttccgcgagacgcccaggccgaagtccagctgactaactcaggtgtccagctggcgggcggcgccaccctgtgtcgtcaccgccccgctcagggtataaagcggctggtgatccggggcagaggcacacagctcaacgacgaggtggtgagctcttcgctgggtctgcgacctgacggagtcttccaactcgccggatcggggagatcttccttcacgcctcgtcaggccgtcctgactttggagagttcgtcctcgcagccccgctcgggtggcatcggcactctccagttcgtggaggagttcactccctcggtctacttcaaccccttctccggctcccccggccactacccggacgagttcatcccgaacttcgacgccatcagcgagtcggtggacggctacgattgaaactaatcacccccttatccagtgaaataaagatcatattgatgatgattttacagaaataaaaaataatcatttgatttgaaataaagatacaatcatattgatgatttgagtttaacaaaaaaataaagaatcacttacttgaaatctgataccaggtctctgtccatgttttctgccaacaccacttcactcccctcttcccagctctggtactgcaggccccggcgggctgcaaacttcctccacacgctgaaggggatgtcaaattcctcctgtccctcaatcttcattttatcttctatcagatgtccaaaaagcgcgtccgggtggatgatgacttcgaccccgtctacccctacgatgcagacaacgcaccgaccgtgcccttcatcaacccccccttcgtctcttcagatggattccaagagaagcccctgggggtgttgtccctgcgactggccgaccccgtcaccaccaagaacggggaaatcaccctcaagctgggagagggggtggacctcgattcctcgggaaaactcatctccaacacggccaccaaggccgccgcccctctcagtttttccaacaacaccatttcccttaacatggatcaccccttttacactaaagatggaaaattatccttacaagtttctccaccattaaatatactgagaacaagcattctaaacacactagctttaggttttggatcaggtttaggactccgtggctctgccttggcagtacagttagtctctccacttacatttgatactgatggaaacataaagcttaccttagacagaggtttgcatgttacaacaggagatgcaattgaaagcaacataagctgggctaaaggtttaaaatttgaagatggagccatagcaaccaacattggaaatgggttagagtttggaagcagtagtacagaaacaggtgttgatgatgcttacccaatccaagttaaacttggatctggccttagctttgacagtacaggagccataatggctggtaacaaagaagacgataaactcactttgtggacaacacctgatccatcaccaaactgtcaaatactcgcagaaaatgatgcaaaactaacactttgcttgactaaatgtggtagtcaaatactggccactgtgtcagtcttagttgtaggaagtggaaacctaaaccccattactggcaccgtaagcagtgctcaggtgtttctacgttttgatgcaaacggtgttcttttaacagaacattctacactaaaaaaatactgggggtataggcagggagatagcatagatggcactccatataccaatgctgtaggattcatgcccaatttaaaagcttatccaaagtcacaaagttctactactaaaaataatatagtagggcaagtatacatgaatggagatgtttcaaaacctatgcttctcactataaccctcaatggtactgatgacagcaacagtacatattcaatgtcattttcatacacctggactaatggaagctatgttggagcaacatttggggctaactcttataccttctcatacatcgcccaagaatgaacactgtatcccaccctgcatgccaacccttcccaccccactctgtggaacaaactctgaaacacaaaataaaataaagttcaagtgttttattgattcaacagttttacaggattcgagcagttatttttcctccaccctcccaggacatggaatacaccaccctctccccccgcacagccttgaacatctgaatgccattggtgatggacatgcttttggtctccacgttccacacagtttcagagcgagccagtctcgggtcggtcagggagatgaaaccctccgggcactcccgcatctgcacctcacagctcaacagctgaggattgtcctcggtggtcgggatcacggttatctggaagaagcagaagagcggcggtgggaatcatagtccgcgaacgggatcggccggtggtgtcgcatcaggccccgcagcagtcgctgccgccgccgctccgtcaagctgctgctcagggggtccgggtccagggactccctcagcatgatgcccacggccctcagcatcagtcgtctggtgcggcgggcgcagcagcgcatgcggatctcgctcaggtcgctgcagtacgtgcaacacagaaccaccaggttgttcaacagtccatagttcaacacgctccagccgaaactcatcgcgggaaggatgctacccacgtggccgtcgtaccagatcctcaggtaaatcaagtggtgccccctccagaacacgctgcccacgtacatgatctccttgggcatgtggcggttcaccacctcccggtaccacatcaccctctggttgaacatgcagccccggatgatcctgcggaaccacagggccagcaccgccccgcccgccatgcagcgaagagaccccgggtcccggcaatggcaatggaggacccaccgctcgtacccgtggatcatctgggagctgaacaagtctatgttggcacagcacaggcatatgctcatgcatctcttcagcactctcaactcctcgggggtcaaaaccatatcccagggcacggggaactcttgcaggacagcgaaccccgcagaacagggcaatcctcgcacagaacttacattgtgcatggacagggtatcgcaatcaggcagcaccgggtgatcctccaccagagaagcgcgggtctcggtctcctcacagcgtggtaagggggccggccgatacgggtgatggcgggacgcggctgatcgtgttcgcgaccgtgtcatgatgcagttgctttcggacattttcgtacttgctgtagcagaacctggtccgggcgctgcacaccgatcgccggcggcggtctcggcgcttggaacgctcggtgttgaaattgtaaaacagccactctctcagaccgtgcagcagatctagggcctcaggagtgatgaagatcccatcatgcctgatggctctgatcacatcgaccaccgtggaatgggccagacccagccagatgatgcaattttgttgggtttcggtgacggcgggggagggaagaacaggaagaaccatgattaacttttaatccaaacggtctcggagtacttcaaaatgaagatcgcggagatggcacctctcgcccccgctgtgttggtggaaaataacagccaggtcaaaggtgatacggttctcgagatgttccacggtggcttccagcaaagcctccacgcgcacatccagaaacaagacaatagcgaaagcgggagggttctctaattcctcaatcatcatgttacactcctgcaccatccccagataattttcatttttccagccttgaatgattcgaactagttcctgaggtaaatccaagccagccatgataaagagctcgcgcagagcgccctccaccggcattcttaagcacaccctcataattccaagatattctgctcctggttcacctgcagcagattgacaagcggaatatcaaaatctctgccgcgatccctgagctcctccctcagcaataactgtaagtactctttcatatcctctccgaaatttttagccataggaccaccaggaataagattagggcaagccacagtacagataaaccgaagtcctccccagtgagcattgccaaatgcaagactgctataagcatgctggctagacccggtgatatcttccagataactggacagaaaatcgcccaggcaatttttaagaaaatcaacaaaagaaaaatcctccaggtggacgtttagagcctcgggaacaacgatgaagtaaatgcaagcggtgcgttccagcatggttagttagctgatctgtagaaaaaacaaaaatgaacattaaaccatgctagcctggcgaacaggtgggtaaatcgttctctccagcaccaggcaggccacggggtctccggcgcgaccctcgtaaaaattgtcgctatgattgaaaaccatcacagagagacgttcccggtggccggcgtgaatgattcgacaagatgaatacacccccggaacattggcgtccgcgagtgaaaaaaagcgcccgaggaagcaataaggcactacaatgctcagtctcaagtccagcaaagcgatgccatgcggatgaagcacaaaattctcaggtgcgtacaaaatgtaattactcccctcctgcacaggcagcaaagcccccgatccctccaggtacacatacaaagcctcagcgtccatagcttaccgagcagcagcacacaacaggcgcaagagtcagagaaaggctgagctctaacctgtccacccgctctctgctcaatatatagcccagatctacactgacgtaaaggccaaagtctaaaaatacccgccaaataatcacacacgcccagcacacgcccagaaaccggtgacacactcaaaaaaatacgcgcacttcctcaaacgcccaaaactgccgtcatttccgggttcccacgctacgtcatcaaaacacgactttcaaattccgtcgaccgttaaaaacgtcacccgccccgcccctaacggtcgcccgtctctcagccaatcagcgccccgcatccccaaattcaaacacctcatttgcatattaacgcgcacaaaaagtttgaggtatattattgatgatgg

SEQ ID NO: 14 - DNA, 8602 bp, synthetic construct
  misc_feature 1..8602: note = Description of Artificial Sequence: Synthetic polynucleotide
  source 1..8602: mol_type = other DNA
atgggcggcgcatgagagaagcccagaccaattacctacccaaaatggagaaagttcacgttgacatcgaggaagacagcccattcctcagagctttgcagcggagcttcccgcagtttgaggtagaagccaagcaggtcactgataatgaccatgctaatgccagagcgttttcgcatctggcttcaaaactgatcgaaacggaggtggacccatccgacacgatccttgacattggaagtgcgcccgcccgcagaatgtattctaagcacaagtatcattgtatctgtccgatgagatgtgcggaagatccggacagattgtataagtatgcaactaagctgaagaaaaactgtaaggaaataactgataaggaattggacaagaaaatgaaggagctcgccgccgtcatgagcgaccctgacctggaaactgagactatgtgcctccacgacgacgagtcgtgtcgctacgaagggcaagtcgctgtttaccaggatgtatacgcggttgacggaccgacaagtctctatcaccaagccaataagggagttagagtcgcctactggataggctttgacaccaccccttttatgtttaagaacttggctggagcatatccatcatactctaccaactgggccgacgaaaccgtgttaacggctcgtaacataggcctatgcagctctgacgttatggagcggtcacgtagagggatgtccattcttagaaagaagtatttgaaaccatccaacaatgttctattctctgttggctcgaccatctaccacgagaagagggacttactgaggagctggcacctgccgtctgtatttcacttacgtggcaagcaaaattacacatgtcggtgtgagactatagttagttgcgacgggtacgtcgttaaaagaatagctatcagtccaggcctgtatgggaagccttcaggctatgctgctacgatgcaccgcgagggattcttgtgctgcaaagtgacagacacattgaacggggagagggtctcttttcccgtgtgcacgtatgtgccagctacattgtgtgaccaaatgactggcatactggcaacagatgtcagtgcggacgacgcgcaaaaactgctggttgggctcaaccagcgtatagtcgtcaacggtcgcacccagagaaacaccaataccatgaaaaattaccttttgcccgtagtggcccaggcatttgctaggtgggcaaaggaatataaggaagatcaagaagatgaaaggccactaggactacgagatagacagttagtcatggggtgttgttgggcttttagaaggcacaagataacatctatttataagcgcccggatacccaaaccatcatcaaagtgaacagcgatttccactcattcgtgctgcccaggataggcagtaacacattggagatcgggctgagaacaagaatcaggaaaatgttagaggagcacaaggagccgtcacctctcattaccgccgaggacgtacaagaagctaagtgcgcagccgatgaggctaaggaggtgcgtgaagccgaggagttgcgcgcagctctaccacctttggcagctgatgttgaggagcccactctggaagccgatgtcgacttgatgttacaagaggctggggccggctcagtggagacacctcgtggcttgataaaggttaccagctacgctggcgaggacaagatcggctcttacgctgtgctttctccgcaggctgtactcaagagtgaaaaattatcttgcatccaccctctcgctgaacaagtcatagtgataacacactctggccgaaaagggcgttatgccgtggaaccataccatggtaaagtagtggtgccagagggacatgcaatacccgtccaggactttcaagctctgagtgaaagtgccaccattgtgtacaacgaacgtgagttcgtaaacaggtacctgcaccatattgccacacatggaggagcgctgaacactgatgaagaatattacaaaactgtcaagcccagcgagcacgacggcgaatacctgtacgacatcgacaggaaacagtgcgtcaagaaagaactagtcactgggctagggctcacaggcgagctggtggatcctcccttccatgaattcgcctacgagagtctgagaacacgaccagccgctccttaccaagtaccaaccataggggtgtatggcgtgccaggatcaggcaagtctggcatcattaaaagcgcagtcaccaaaaaagatctagtggtgagcgccaagaaagaaaactgtgcagaaattataagggacgtcaagaaaatgaaagggctggacgtcaatgccagaactgtggactcagtgctcttgaatggatgcaaacaccccgtagagaccctgtatattgacgaagcttttgcttgtcatgcaggtactctcagagcgctcatagccattataagacctaaaaaggcagtgctctgcggggatcccaaacagtgcggtttttttaacatgatgtgcctgaaagtgcattttaaccacgagatttgcacacaagtcttccacaaaagcatctctcgccgttgcactaaatctgtgacttcggtcgtctcaaccttgttttacgacaaaaaaatgagaacgacgaatccgaaagagactaagattgtgattgacactaccggcagtaccaaacctaagcaggacgatctcattctcacttgtttcagagggtgggtgaagcagttgcaaatagattacaaaggcaacgaaataatgacggcagctgcctctcaagggctgacccgtaaaggtgtgtatgccgttcggtacaaggtgaatgaaaatcctctgtacgcacccacctcagaacatgtgaacgtcctactgacccgcacggaggaccgcatcgtgtggaaaacactagccggcgacccatggataaaaacactgactgccaagtaccctgggaatttcactgccacgatagaggagtggcaagcagagcatgatgccatcatgaggcacatcttggagagaccggaccctaccgacgtcttccagaataaggcaaacgtgtgttgggccaaggctttagtgccggtgctgaagaccgctggcatagacatgaccactgaacaatggaacactgtggattattttgaaacggacaaagctcactcagcagagatagtattgaaccaactatgcgtgaggttctttggactcgatctggactccggtctattttctgcacccactgttccgttatccattaggaataatcactgggataactccccgtcgcctaacatgtacgggctgaataaagaagtggtccgtcagctctctcgcaggtacccacaactgcctcgggcagttgccactggaagagtctatgacatgaacactggtacactgcgcaattatgatccgcgcataaacctagtacctgtaaacagaagactgcctcatgctttagtcctccaccataatgaacacccacagagtgacttttcttcattcgtcagcaaattgaagggcagaactgtcctggtggtcggggaaaagttgtccgtcccaggcaaaatggttgactggttgtcagaccggcctgaggctaccttcagagctcggctggatttaggcatcccaggtgatgtgcccaaatatgacataatatttgttaatgtgaggaccccatataaataccatcactatcagcagtgtgaagaccatgccattaagcttagcatgttgaccaagaaagcttgtctgcatctgaatcccggcggaacctgtgtcagcataggttatggttacgctgacagggccagcgaaagcatcattggtgctatagcgcggcagttcaagttttcccgggtatgcaaaccgaaatcctcacttgaagagacggaagttctgtttgtattcattgggtacgatcgcaaggcccgtacgcacaatccttacaagctttcatcaaccttgaccaacatttatacaggttccagactccacgaagccggatgtgcaccctcatatcatgtggtgcgaggggatattgccacggccaccgaaggagtgattataaatgctgctaacagcaaaggacaacctggcggaggggtgtgcggagcgctgtataagaaattcccggaaagcttcgatttacagccgatcgaagtaggaaaagcgcgactggtcaaaggtgcagctaaacatatcattcatgccgtaggaccaaacttcaacaaagtttcggaggttgaaggtgacaaacagttggcagaggcttatgagtccatcgctaagattgtcaacgataacaattacaagtcagtagcgattccactgttgtccaccggcatcttttccgggaacaaagatcgactaacccaatcattgaaccatttgctgacagctttagacaccactgatgcagatgtagccatatactgcagggacaagaaatgggaaatgactctcaaggaagcagtggctaggagagaagcagtggaggagatatgcatatccgacgactcttcagtgacagaacctgatgcagagctggtgagggtgcatccgaagagttctttggctggaaggaagggctacagcacaagcgatggcaaaactttctcatatttggaagggaccaagtttcaccaggcggccaaggatatagcagaaattaatgccatgtggcccgttgcaacggaggccaatgagcaggtatgcatgtatatcctcggagaaagcatgagcagtattaggtcgaaatgccccgtcgaagagtcggaagcctccacaccacctagcacgctgccttgcttgtgcatccatgccatgactccagaaagagtacagcgcctaaaagcctcacgtccagaacaaattactgtgtgctcatcctttccattgccgaagtatagaatcactggtgtgcagaagatccaatgctcccagcctatattgttctcaccgaaagtgcctgcgtatattcatccaaggaagtatctcgtggaaacaccaccggtagacgagactccggagccatcggcagagaaccaatccacagaggggacacctgaacaaccaccacttataaccgaggatgagaccaggactagaacgcctgagccgatcatcatcgaagaggaagaagaggatagcataagtttgctgtcagatggcccgacccaccaggtgctgcaagtcgaggcagacattcacgggccgccctctgtatctagctcatcctggtccattcctcatgcatccgactttgatgtggacagtttatccatacttgacaccctggagggagctagcgtgaccagcggggcaacgtcagccgagactaactcttacttcgcaaagagtatggagtttctggcgcgaccggtgcctgcgcctcgaacagtattcaggaaccctccacatcccgctccgcgcacaagaacaccgtcacttgcacccagcagggcctgctcgagaaccagcctagtttccaccccgccaggcgtgaatagggtgatcactagagaggagctcgaggcgcttaccccgtcacgcactcctagcaggtcggtctcgagaaccagcctggtctccaacccgccaggcgtaaatagggtgattacaagagaggagtttgaggcgttcgtagcacaacaacaatgacggtttgatgcgggtgcatacatcttttcctccgacaccggtcaagggcatttacaacaaaaatcagtaaggcaaacggtgctatccgaagtggtgttggagaggaccgaattggagatttcgtatgccccgcgcctcgaccaagaaaaagaagaattactacgcaagaaattacagttaaatcccacacctgctaacagaagcagataccagtccaggaaggtggagaacatgaaagccataacagctagacgtattctgcaaggcctagggcattatttgaaggcagaaggaaaagtggagtgctaccgaaccctgcatcctgttcctttgtattcatctagtgtgaaccgtgccttttcaagccccaaggtcgcagtggaagcctgtaacgccatgttgaaagagaactttccgactgtggcttcttactgtattattccagagtacgatgcctatttggacatggttgacggagcttcatgctgcttagacactgccagtttttgccctgcaaagctgcgcagctttccaaagaaacactcctatttggaacccacaatacgatcggcagtgccttcagcgatccagaacacgctccagaacgtcctggcagctgccacaaaaagaaattgcaatgtcacgcaaatgagagaattgcccgtattggattcggcggcctttaatgtggaatgcttcaagaaatatgcgtgtaataatgaatattgggaaacgtttaaagaaaaccccatcaggcttactgaagaaaacgtggtaaattacattaccaaattaaaaggaccaaaagctgctgctctttttgcgaagacacataatttgaatatgttgcaggacataccaatggacaggtttgtaatggacttaaagagagacgtgaaagtgactccaggaacaaaacatactgaagaacggcccaaggtacaggtgatccaggctgccgatccgctagcaacagcgtatctgtgcggaatccaccgagagctggttaggagattaaatgcggtcctgcttccgaacattcatacactgtttgatatgtcggctgaagactttgacgctattatagccgagcacttccagcctggggattgtgttctggaaactgacatcgcgtcgtttgataaaagtgaggacgacgccatggctctgaccgcgttaatgattctggaagacttaggtgtggacgcagagctgttgacgctgattgaggcggctttcggcgaaatttcatcaatacatttgcccactaaaactaaatttaaattcggagccatgatgaaatctggaatgttcctcacactgtttgtgaacacagtcattaacattgtaatcgcaagcagagtgttgagagaacggctaaccggatcaccatgtgcagcattcattggagatgacaatatcgtgaaaggagtcaaatcggacaaattaatggcagacaggtgcgccacctggttgaatatggaagtcaagattatagatgctgtggtgggcgagaaagcgccttatttctgtggagggtttattttgtgtgactccgtgaccggcacagcgtgccgtgtggcagaccccctaaaaaggctgtttaagcttggcaaacctctggcagcagacgatgaacatgatgatgacaggagaagggcattgcatgaagagtcaacacgctggaaccgagtgggtattctttcagagctgtgcaaggcagtagaatcaaggtatgaaaccgtaggaacttccatcatagttatggccatgactactctagctagcagtgttaaatcattcagctacctgagaggggcccctataactctctacggctaacctgaatggactacgactctagaatagtctttaattaaagtccgccatatgaggccaccatgcagatcttcgtgaagaccctgaccggcaagaccatcaccctagaggtggagcccagtgacaccatcgagaacgtgaaggccaagatccaggataaagagggcatcccccctgaccagcagaggctgatctttgccggcaagcagctggaagatggccgcaccctctctgattacaacatccagaaggagtcaaccctgcacctggtccttcgcctgagaggtggcgctgcttacagtataatcaactttgaaaaactggctgcttacggcatcctgggctttgtgtttacactggctgcctacctgctgtttggctatcctgtgtacgtggccgcttatggactgtgtaccctggtggccatgctggctgcttacaatctggtgcctatggtggccacagtggccgcctattgtcttggcggactgctgacaatggtggcagcctacagcccgagctatgcgtatcatcagtttgcagcctacggcccaggaccaggcgctaaatttgtggctgcctggacactgaaagccgccgctggaccaggtcctggacagtacatcaaggccaacagcaagttcatcggcatcaccgaactcggcccaggaccaggctatccctacgatgtgcctgattacgcctgatagtgatgattcgaacggccgtatcacgcccaaacatttacagccgcggtgtcaaaaaccgcgtggacgtggttaacatccctgctgggaggatcagccgtaattattataattggcttggtgctggctactattgtggccatgtacgtgctgaccaaccagaaacataattgaatacagcagcaattggcaagctgcttacatagaactcgcggcgattggcatgccgccttaaaatttttattttattttttcttttcttttccgaatcggattttgtttttaatatttcaaaaaaaaaaaaaaaaaaaaaaaaaaaaaaaaaaaaaaaaaaaaaaaaaaaaaaaaaaaaaaaaaaaaaaaaaaaaaaaa

SEQ ID NO: 15 - DNA, 9595 bp, synthetic construct
  misc_feature 1..9595: note = Description of Artificial Sequence: Synthetic polynucleotide
  source 1..9595: mol_type = other DNA
atgggcggcgcatgagagaagcccagaccaattacctacccaaaatggagaaagttcacgttgacatcgaggaagacagcccattcctcagagctttgcagcggagcttcccgcagtttgaggtagaagccaagcaggtcactgataatgaccatgctaatgccagagcgttttcgcatctggcttcaaaactgatcgaaacggaggtggacccatccgacacgatccttgacattggaagtgcgcccgcccgcagaatgtattctaagcacaagtatcattgtatctgtccgatgagatgtgcggaagatccggacagattgtataagtatgcaactaagctgaagaaaaactgtaaggaaataactgataaggaattggacaagaaaatgaaggagctcgccgccgtcatgagcgaccctgacctggaaactgagactatgtgcctccacgacgacgagtcgtgtcgctacgaagggcaagtcgctgtttaccaggatgtatacgcggttgacggaccgacaagtctctatcaccaagccaataagggagttagagtcgcctactggataggctttgacaccaccccttttatgtttaagaacttggctggagcatatccatcatactctaccaactgggccgacgaaaccgtgttaacggctcgtaacataggcctatgcagctctgacgttatggagcggtcacgtagagggatgtccattcttagaaagaagtatttgaaaccatccaacaatgttctattctctgttggctcgaccatctaccacgagaagagggacttactgaggagctggcacctgccgtctgtatttcacttacgtggcaagcaaaattacacatgtcggtgtgagactatagttagttgcgacgggtacgtcgttaaaagaatagctatcagtccaggcctgtatgggaagccttcaggctatgctgctacgatgcaccgcgagggattcttgtgctgcaaagtgacagacacattgaacggggagagggtctcttttcccgtgtgcacgtatgtgccagctacattgtgtgaccaaatgactggcatactggcaacagatgtcagtgcggacgacgcgcaaaaactgctggttgggctcaaccagcgtatagtcgtcaacggtcgcacccagagaaacaccaataccatgaaaaattaccttttgcccgtagtggcccaggcatttgctaggtgggcaaaggaatataaggaagatcaagaagatgaaaggccactaggactacgagatagacagttagtcatggggtgttgttgggcttttagaaggcacaagataacatctatttataagcgcccggatacccaaaccatcatcaaagtgaacagcgatttccactcattcgtgctgcccaggataggcagtaacacattggagatcgggctgagaacaagaatcaggaaaatgttagaggagcacaaggagccgtcacctctcattaccgccgaggacgtacaagaagctaagtgcgcagccgatgaggctaaggaggtgcgtgaagccgaggagttgcgcgcagctctaccacctttggcagctgatgttgaggagcccactctggaagccgatgtcgacttgatgttacaagaggctggggccggctcagtggagacacctcgtggcttgataaaggttaccagctacgctggcgaggacaagatcggctcttacgctgtgctttctccgcaggctgtactcaagagtgaaaaattatcttgcatccaccctctcgctgaacaagtcatagtgataacacactctggccgaaaagggcgttatgccgtggaaccataccatggtaaagtagtggtgccagagggacatgcaatacccgtccaggactttcaagctctgagtgaaagtgccaccattgtgtacaacgaacgtgagttcgtaaacaggtacctgcaccatattgccacacatggaggagcgctgaacactgatgaagaatattacaaaactgtcaagcccagcgagcacgacggcgaatacctgtacgacatcgacaggaaacagtgcgtcaagaaagaactagtcactgggctagggctcacaggcgagctggtggatcctcccttccatgaattcgcctacgagagtctgagaacacgaccagccgctccttaccaagtaccaaccataggggtgtatggcgtgccaggatcaggcaagtctggcatcattaaaagcgcagtcaccaaaaaagatctagtggtgagcgccaagaaagaaaactgtgcagaaattataagggacgtcaagaaaatgaaagggctggacgtcaatgccagaactgtggactcagtgctcttgaatggatgcaaacaccccgtagagaccctgtatattgacgaagcttttgcttgtcatgcaggtactctcagagcgctcatagccattataagacctaaaaaggcagtgctctgcggggatcccaaacagtgcggtttttttaacatgatgtgcctgaaagtgcattttaaccacgagatttgcacacaagtcttccacaaaagcatctctcgccgttgcactaaatctgtgacttcggtcgtctcaaccttgttttacgacaaaaaaatgagaacgacgaatccgaaagagactaagattgtgattgacactaccggcagtaccaaacctaagcaggacgatctcattctcacttgtttcagagggtgggtgaagcagttgcaaatagattacaaaggcaacgaaataatgacggcagctgcctctcaagggctgacccgtaaaggtgtgtatgccgttcggtacaaggtgaatgaaaatcctctgtacgcacccacctcagaacatgtgaacgtcctactgacccgcacggaggaccgcatcgtgtggaaaacactagccggcgacccatggataaaaacactgactgccaagtaccctgggaatttcactgccacgatagaggagtggcaagcagagcatgatgccatcatgaggcacatcttggagagaccggaccctaccgacgtcttccagaataaggcaaacgtgtgttgggccaaggctttagtgccggtgctgaagaccgctggcatagacatgaccactgaacaatggaacactgtggattattttgaaacggacaaagctcactcagcagagatagtattgaaccaactatgcgtgaggttctttggactcgatctggactccggtctattttctgcacccactgttccgttatccattaggaataatcactgggataactccccgtcgcctaacatgtacgggctgaataaagaagtggtccgtcagctctctcgcaggtacccacaactgcctcgggcagttgccactggaagagtctatgacatgaacactggtacactgcgcaattatgatccgcgcataaacctagtacctgtaaacagaagactgcctcatgctttagtcctccaccataatgaacacccacagagtgacttttcttcattcgtcagcaaattgaagggcagaactgtcctggtggtcggggaaaagttgtccgtcccaggcaaaatggttgactggttgtcagaccggcctgaggctaccttcagagctcggctggatttaggcatcccaggtgatgtgcccaaatatgacataatatttgttaatgtgaggaccccatataaataccatcactatcagcagtgtgaagaccatgccattaagcttagcatgttgaccaagaaagcttgtctgcatctgaatcccggcggaacctgtgtcagcataggttatggttacgctgacagggccagcgaaagcatcattggtgctatagcgcggcagttcaagttttcccgggtatgcaaaccgaaatcctcacttgaagagacggaagttctgtttgtattcattgggtacgatcgcaaggcccgtacgcacaatccttacaagctttcatcaaccttgaccaacatttatacaggttccagactccacgaagccggatgtgcaccctcatatcatgtggtgcgaggggatattgccacggccaccgaaggagtgattataaatgctgctaacagcaaaggacaacctggcggaggggtgtgcggagcgctgtataagaaattcccggaaagcttcgatttacagccgatcgaagtaggaaaagcgcgactggtcaaaggtgcagctaaacatatcattcatgccgtaggaccaaacttcaacaaagtttcggaggttgaaggtgacaaacagttggcagaggcttatgagtccatcgctaagattgtcaacgataacaattacaagtcagtagcgattccactgttgtccaccggcatcttttccgggaacaaagatcgactaacccaatcattgaaccatttgctgacagctttagacaccactgatgcagatgtagccatatactgcagggacaagaaatgggaaatgactctcaaggaagcagtggctaggagagaagcagtggaggagatatgcatatccgacgactcttcagtgacagaacctgatgcagagctggtgagggtgcatccgaagagttctttggctggaaggaagggctacagcacaagcgatggcaaaactttctcatatttggaagggaccaagtttcaccaggcggccaaggatatagcagaaattaatgccatgtggcccgttgcaacggaggccaatgagcaggtatgcatgtatatcctcggagaaagcatgagcagtattaggtcgaaatgccccgtcgaagagtcggaagcctccacaccacctagcacgctgccttgcttgtgcatccatgccatgactccagaaagagtacagcgcctaaaagcctcacgtccagaacaaattactgtgtgctcatcctttccattgccgaagtatagaatcactggtgtgcagaagatccaatgctcccagcctatattgttctcaccgaaagtgcctgcgtatattcatccaaggaagtatctcgtggaaacaccaccggtagacgagactccggagccatcggcagagaaccaatccacagaggggacacctgaacaaccaccacttataaccgaggatgagaccaggactagaacgcctgagccgatcatcatcgaagaggaagaagaggatagcataagtttgctgtcagatggcccgacccaccaggtgctgcaagtcgaggcagacattcacgggccgccctctgtatctagctcatcctggtccattcctcatgcatccgactttgatgtggacagtttatccatacttgacaccctggagggagctagcgtgaccagcggggcaacgtcagccgagactaactcttacttcgcaaagagtatggagtttctggcgcgaccggtgcctgcgcctcgaacagtattcaggaaccctccacatcccgctccgcgcacaagaacaccgtcacttgcacccagcagggcctgctcgagaaccagcctagtttccaccccgccaggcgtgaatagggtgatcactagagaggagctcgaggcgcttaccccgtcacgcactcctagcaggtcggtctcgagaaccagcctggtctccaacccgccaggcgtaaatagggtgattacaagagaggagtttgaggcgttcgtagcacaacaacaatgacggtttgatgcgggtgcatacatcttttcctccgacaccggtcaagggcatttacaacaaaaatcagtaaggcaaacggtgctatccgaagtggtgttggagaggaccgaattggagatttcgtatgccccgcgcctcgaccaagaaaaagaagaattactacgcaagaaattacagttaaatcccacacctgctaacagaagcagataccagtccaggaaggtggagaacatgaaagccataacagctagacgtattctgcaaggcctagggcattatttgaaggcagaaggaaaagtggagtgctaccgaaccctgcatcctgttcctttgtattcatctagtgtgaaccgtgccttttcaagccccaaggtcgcagtggaagcctgtaacgccatgttgaaagagaactttccgactgtggcttcttactgtattattccagagtacgatgcctatttggacatggttgacggagcttcatgctgcttagacactgccagtttttgccctgcaaagctgcgcagctttccaaagaaacactcctatttggaacccacaatacgatcggcagtgccttcagcgatccagaacacgctccagaacgtcctggcagctgccacaaaaagaaattgcaatgtcacgcaaatgagagaattgcccgtattggattcggcggcctttaatgtggaatgcttcaagaaatatgcgtgtaataatgaatattgggaaacgtttaaagaaaaccccatcaggcttactgaagaaaacgtggtaaattacattaccaaattaaaaggaccaaaagctgctgctctttttgcgaagacacataatttgaatatgttgcaggacataccaatggacaggtttgtaatggacttaaagagagacgtgaaagtgactccaggaacaaaacatactgaagaacggcccaaggtacaggtgatccaggctgccgatccgctagcaacagcgtatctgtgcggaatccaccgagagctggttaggagattaaatgcggtcctgcttccgaacattcatacactgtttgatatgtcggctgaagactttgacgctattatagccgagcacttccagcctggggattgtgttctggaaactgacatcgcgtcgtttgataaaagtgaggacgacgccatggctctgaccgcgttaatgattctggaagacttaggtgtggacgcagagctgttgacgctgattgaggcggctttcggcgaaatttcatcaatacatttgcccactaaaactaaatttaaattcggagccatgatgaaatctggaatgttcctcacactgtttgtgaacacagtcattaacattgtaatcgcaagcagagtgttgagagaacggctaaccggatcaccatgtgcagcattcattggagatgacaatatcgtgaaaggagtcaaatcggacaaattaatggcagacaggtgcgccacctggttgaatatggaagtcaagattatagatgctgtggtgggcgagaaagcgccttatttctgtggagggtttattttgtgtgactccgtgaccggcacagcgtgccgtgtggcagaccccctaaaaaggctgtttaagcttggcaaacctctggcagcagacgatgaacatgatgatgacaggagaagggcattgcatgaagagtcaacacgctggaaccgagtgggtattctttcagagctgtgcaaggcagtagaatcaaggtatgaaaccgtaggaacttccatcatagttatggccatgactactctagctagcagtgttaaatcattcagctacctgagaggggcccctataactctctacggctaacctgaatggactacgactctagaatagtctttaattaaagtccgccatatgagatggaagatgccaaaaacattaagaagggcccagcgccattctacccactcgaagacgggaccgccggcgagcagctgcacaaagccatgaagcgctacgccctggtgcccggcaccatcgcctttaccgacgcacatatcgaggtggacattacctacgccgagtacttcgagatgagcgttcggctggcagaagctatgaagcgctatgggctgaatacaaaccatcggatcgtggtgtgcagcgagaatagcttgcagttcttcatgcccgtgttgggtgccctgttcatcggtgtggctgtggccccagctaacgacatctacaacgagcgcgagctgctgaacagcatgggcatcagccagcccaccgtcgtattcgtgagcaagaaagggctgcaaaagatcctcaacgtgcaaaagaagctaccgatcatacaaaagatcatcatcatggatagcaagaccgactaccagggcttccaaagcatgtacaccttcgtgacttcccatttgccacccggcttcaacgagtacgacttcgtgcccgagagcttcgaccgggacaaaaccatcgccctgatcatgaacagtagtggcagtaccggattgcccaagggcgtagccctaccgcaccgcaccgcttgtgtccgattcagtcatgcccgcgaccccatcttcggcaaccagatcatccccgacaccgctatcctcagcgtggtgccatttcaccacggcttcggcatgttcaccacgctgggctacttgatctgcggctttcgggtcgtgctcatgtaccgcttcgaggaggagctattcttgcgcagcttgcaagactataagattcaatctgccctgctggtgcccacactatttagcttcttcgctaagagcactctcatcgacaagtacgacctaagcaacttgcacgagatcgccagcggcggggcgccgctcagcaaggaggtaggtgaggccgtggccaaacgcttccacctaccaggcatccgccagggctacggcctgacagaaacaaccagcgccattctgatcacccccgaaggggacgacaagcctggcgcagtaggcaaggtggtgcccttcttcgaggctaaggtggtggacttggacaccggtaagacactgggtgtgaaccagcgcggcgagctgtgcgtccgtggccccatgatcatgagcggctacgttaacaaccccgaggctacaaacgctctcatcgacaaggacggctggctgcacagcggcgacatcgcctactgggacgaggacgagcacttcttcatcgtggaccggctgaagagcctgatcaaatacaagggctaccaggtagccccagccgaactggagagcatcctgctgcaacaccccaacatcttcgacgccggggtcgccggcctgcccgacgacgatgccggcgagctgcccgccgcagtcgtcgtgctggaacacggtaaaaccatgaccgagaaggagatcgtggactatgtggccagccaggttacaaccgccaagaagctgcgcggtggtgttgtgttcgtggacgaggtgcctaaaggactgaccggcaagttggacgcccgcaagatccgcgagattctcattaaggccaagaagggcggcaagatcgccgtgtaattcgaacggccgtatcacgcccaaacatttacagccgcggtgtcaaaaaccgcgtggacgtggttaacatccctgctgggaggatcagccgtaattattataattggcttggtgctggctactattgtggccatgtacgtgctgaccaaccagaaacataattgaatacagcagcaattggcaagctgcttacatagaactcgcggcgattggcatgccgccttaaaatttttattttattttttcttttcttttccgaatcggattttgtttttaatatttcaaaaaaaaaaaaaaaaaaaaaaaaaaaaaaaaaaaaaaaaaaaaaaaaaaaaaaaaaaaaaaaaaaaaaaaaaaaaaaaa

SEQ ID NO: 16 - protein, 139 aa, synthetic construct
  REGION 1..139: note = Description of Artificial Sequence: Synthetic polypeptide
PSSLSASVGDRVTITCRASQSINSYLDWYQQKPGKAPKLLIYAASSLQSGVPSRFSGSGSGTDFTLTISSLQPEDFATYYCQQYYSTPFTFGPGTKVEIKRTVAAPSVFIFPPSDEQLKSGTASVVCLLNNFYPREAKV

SEQ ID NO: 17 - protein, 167 aa, synthetic construct
  REGION 1..167: note = Description of Artificial Sequence: Synthetic polypeptide
GVVQPGRSLRLSCAASGFTFSSYGMHWVRQAPGKGLEWVAVIWYDGSNKYYADSVKGRFTISRDNSKNTLYLQMNSLRAEDTAVYYCARDPRGATLYYYYYGMDVWGQGTTVTVSSASTKGPSVFPLAPCSRSTSESTAALGCLVKDYFPEPVTVSWNSGALTSGVH

SEQ ID NO: 18 - protein, 10 aa, synthetic construct
  REGION 1..10: note = Description of Artificial Sequence: Synthetic peptide
GFTFSSYGMH

SEQ ID NO: 19 - protein, 15 aa, synthetic construct
  REGION 1..15: note = Description of Artificial Sequence: Synthetic peptide
VIWYDGSNKYYADSV

SEQ ID NO: 20 - protein, 16 aa, synthetic construct
  REGION 1..16: note = Description of Artificial Sequence: Synthetic peptide
DPRGATLYYYYYGMDV

SEQ ID NO: 21 - protein, 11 aa, synthetic construct
  REGION 1..11: note = Description of Artificial Sequence: Synthetic peptide
RASQSINSYLD

SEQ ID NO: 22 - protein, 7 aa, synthetic construct
  REGION 1..7: note = Description of Artificial Sequence: Synthetic peptide
AASSLQS

SEQ ID NO: 23 - protein, 9 aa, synthetic construct
  REGION 1..9: note = Description of Artificial Sequence: Synthetic peptide
QQYYSTPFT

SEQ ID NO: 24 - protein, 108 aa, synthetic construct
  REGION 1..108: note = Description of Artificial Sequence: Synthetic polypeptide
EIVLTQSPGTLSLSPGERATLSCRASQRVSSSYLAWYQQKPGQAPRLLIYDASSRATGIPDRFSGSGSGTDFTLTISRLEPEDFAVYYCQQYGSLPWTFGQGTKVEIK

SEQ ID NO: 25 - protein, 121 aa, synthetic construct
  REGION 1..121: note = Description of Artificial Sequence: Synthetic polypeptide
EVQLVESGGGLVQPGGSLRLSCAASGFTFSRYWMSWVRQAPGKGLEWVANIKQDGSEKYYVDSVKGRFTISRDNAKNSLYLQMNSLRAEDTAVYYCAREGGWFGELAFDYWGQGTLVTVSS

SEQ ID NO: 26 - protein, 5 aa, synthetic construct
  REGION 1..5: note = Description of Artificial Sequence: Synthetic peptide
RYWMS

SEQ ID NO: 27 - protein, 17 aa, synthetic construct
  REGION 1..17: note = Description of Artificial Sequence: Synthetic peptide
NIKQDGSEKYYVDSVKG

SEQ ID NO: 28 - protein, 12 aa, synthetic construct
  REGION 1..12: note = Description of Artificial Sequence: Synthetic peptide
EGGWFGELAFDY

SEQ ID NO: 29 - protein, 12 aa, synthetic construct
  REGION 1..12: note = Description of Artificial Sequence: Synthetic peptide
RASQRVSSSYLA

SEQ ID NO: 30 - protein, 7 aa, synthetic construct
  REGION 1..7: note = Description of Artificial Sequence: Synthetic peptide
DASSRAT

SEQ ID NO: 31 - protein, 9 aa, synthetic construct
  REGION 1..9: note = Description of Artificial Sequence: Synthetic peptide
QQYGSLPWT

SEQ ID NO: 32 - DNA, 2019 bp, synthetic construct
  misc_feature 1..2019: note = Description of Artificial Sequence: Synthetic polynucleotide
  source 1..2019: mol_type = other DNA
gcccgggcatttaaatgcgatcgcatcgattacgactctagaatagtctagtccgcaggccaccatgcagatcttcgtgaagaccctgaccggcaagaccatcaccctagaggtggagcccagtgacaccatcgagaacgtgaaggccaagatccaggataaagagggcatcccccctgaccagcagaggctgatctttgccggcaagcagctggaagatggccgcaccctctctgattacaacatccagaaggagtcaaccctgcacctggtccttcgcctgagaggtgccatgtttcaggcgctgagcgaaggctgcaccccgtatgatattaaccagatgctgaacgtgctgggcgatcatcaggtctcaggccttgagcagcttgagagtataatcaactttgaaaaactgactgaatggaccagttctaatgttatgcctatcctgtctcctctgacaaagggcatcctgggcttcgtgtttaccctgaccgtgccttctgagagaggacttagctgcattagcgaagcggatgcgaccaccccggaaagcgcgaacctgggcgaagaaattctgagccagctgtatctttggccaagggtgacctaccattcccctagttatgcttaccaccaatttgaaagacgagccaaatataaaagacacttccccggctttggccagagcctgctgtttggctaccctgtgtacgtgttcggcgattgcgtgcagggcgattgggatgcgattcgctttcgctattgcgcgccgccgggctatgcgctgctgcgctgcaacgataccaactatagcgctctgctggctgtgggggccctagaaggacccaggaatcaggactggcttggtgtcccaagacaacttgtaactcggatgcaggctattcagaatgccggcctgtgtaccctggtggccatgctggaagagacaatcttctggctgcaagcgtttctgatggcgctgaccgatagcggcccgaaaaccaacattattgtggatagccagtatgtgatgggcattagcaaaccgagctttcaggaatttgtggattgggaaaacgtgagcccggaactgaacagcaccgatcagccgttttggcaagccggaatcctggccagaaatctggtgcctatggtggccacagtgcagggccagaacctgaagtaccagggtcagtcactagtcatctctgcttctatcattgtcttcaacctgctggaactggaaggtgattatcgagatgatggcaacgtgtgggtgcataccccgctgagcccgcgcaccctgaacgcgtgggtgaaagcggtggaagaaaaaaaaggtattccagttcacctagagctggccagtatgaccaacatggagctcatgagcagtattgtgcatcagcaggtcagaacatacggccccgtgttcatgtgtctcggcggactgcttacaatggtggctggtgctgtgtggctgacagtgcgagtgctcgagctgttccgggccgcgcagctggccaacgacgtggtcctccagatcatggagctttgtggtgcagcgtttcgccaggtgtgccataccaccgtgccgtggccgaacgcgagcctgaccccgaaatggaacaacgaaaccacccagccccagatcgccaactgcagcgtgtatgacttttttgtgtggctccattattattctgttcgagacacactttggccaagggtgacctaccatatgaacaaatatgcgtatcatatgctggaaagacgagccaaatataaaagaggaccaggacctggcgctaaatttgtggccgcctggacactgaaagccgctgctggtcctggacctggccagtacatcaaggccaacagcaagttcatcggcatcaccgaactcggacccggaccaggctgatgatttcgaaatttaaataagcttgcggccgctagggataacagggtaattatcacgcccaaacatttacagccgcggtgtcaaaaaccgcgtgg

SEQ ID NO: 33 - protein, 619 aa, synthetic construct
  REGION 1..619: note = Description of Artificial Sequence: Synthetic polypeptide
MQIFVKTLTGKTITLEVEPSDTIENVKAKIQDKEGIPPDQQRLIFAGKQLEDGRTLSDYNIQKESTLHLVLRLRGAMFQALSEGCTPYDINQMLNVLGDHQVSGLEQLESIINFEKLTEWTSSNVMPILSPLTKGILGFVFTLTVPSERGLSCISEADATTPESANLGEEILSQLYLWPRVTYHSPSYAYHQFERRAKYKRHFPGFGQSLLFGYPVYVFGDCVQGDWDAIRFRYCAPPGYALLRCNDTNYSALLAVGALEGPRNQDWLGVPRQLVTRMQAIQNAGLCTLVAMLEETIFWLQAFLMALTDSGPKTNIIVDSQYVMGISKPSFQEFVDWENVSPELNSTDQPFWQAGILARNLVPMVATVQGQNLKYQGQSLVISASIIVFNLLELEGDYRDDGNVWVHTPLSPRTLNAWVKAVEEKKGIPVHLELASMTNMELMSSIVHQQVRTYGPVFMCLGGLLTMVAGAVWLTVRVLELFRAAQLANDVVLQIMELCGAAFRQVCHTTVPWPNASLTPKWNNETTQPQIANCSVYDFFVWLHYYSVRDTLWPRVTYHMNKYAYHMLERRAKYKRGPGPGAKFVAAWTLKAAAGPGPGQYIKANSKFIGITELGPGPG

SEQ ID NO: 34 - DNA, 1638 bp, synthetic construct
  misc_feature 1..1638: note = Description of Artificial Sequence: Synthetic polynucleotide
  source 1..1638: mol_type = other DNA
atggccgggatgttccaggcactgtccgaaggctgcacaccctatgatattaaccagatgctgaatgtcctgggagaccaccaggtctctggcctggagcagctggagagcatcatcaacttcgagaagctgaccgagtggacaagctccaatgtgatgcctatcctgtccccactgaccaagggcatcctgggcttcgtgtttaccctgacagtgccttctgagcggggcctgtcttgcatcagcgaggcagacgcaaccacaccagagtccgccaatctgggcgaggagatcctgtctcagctgtacctgtggccccgggtgacatatcactccccttcttacgcctatcaccagttcgagcggagagccaagtacaagagacacttcccaggctttggccagtctctgctgttcggctaccccgtgtacgtgttcggcgattgcgtgcagggcgactgggatgccatccggtttagatactgcgcaccacctggatatgcactgctgaggtgtaacgacaccaattattccgccctgctggcagtgggcgccctggagggccctcgcaatcaggattggctgggcgtgccaaggcagctggtgacacgcatgcaggccatccagaacgcaggcctgtgcaccctggtggcaatgctggaggagacaatcttctggctgcaggcctttctgatggccctgaccgacagcggccccaagacaaacatcatcgtggattcccagtacgtgatgggcatctccaagccttctttccaggagtttgtggactgggagaacgtgagcccagagctgaattccaccgatcagccattctggcaggcaggaatcctggcaaggaacctggtgcctatggtggccacagtgcagggccagaatctgaagtaccagggccagagcctggtcatcagcgcctccatcatcgtgtttaacctgctggagctggagggcgactatcgggacgatggcaacgtgtgggtgcacaccccactgagccccagaacactgaacgcctgggtgaaggccgtggaggagaagaagggcatcccagtgcacctggagctggcctccatgaccaatatggagctgatgtctagcatcgtgcaccagcaggtgaggacatacggacccgtgttcatgtgcctgggaggcctgctgaccatggtggcaggagccgtgtggctgacagtgcgggtgctggagctgttcagagccgcccagctggccaacgatgtggtgctgcagatcatggagctgtgcggagcagcctttcgccaggtgtgccacaccacagtgccatggcccaatgcctccctgacccccaagtggaacaatgagacaacacagcctcagatcgccaactgtagcgtgtacgacttcttcgtgtggctgcactactatagcgtgagggataccctgtggccccgcgtgacataccacatgaataagtacgcctatcacatgctggagaggcgcgccaagtataagagaggccctggcccaggcgcaaagtttgtggcagcatggaccctgaaggccgccgccggccccggccccggccagtatatcaaggctaacagtaagttcattggaatcacagagctgggacccggacctgga

SEQ ID NO: 35 - protein, 546 aa, synthetic construct
  REGION 1..546: note = Description of Artificial Sequence: Synthetic polypeptide
MAGMFQALSEGCTPYDINQMLNVLGDHQVSGLEQLESIINFEKLTEWTSSNVMPILSPLTKGILGFVFTLTVPSERGLSCISEADATTPESANLGEEILSQLYLWPRVTYHSPSYAYHQFERRAKYKRHFPGFGQSLLFGYPVYVFGDCVQGDWDAIRFRYCAPPGYALLRCNDTNYSALLAVGALEGPRNQDWLGVPRQLVTRMQAIQNAGLCTLVAMLEETIFWLQAFLMALTDSGPKTNIIVDSQYVMGISKPSFQEFVDWENVSPELNSTDQPFWQAGILARNLVPMVATVQGQNLKYQGQSLVISASIIVFNLLELEGDYRDDGNVWVHTPLSPRTLNAWVKAVEEKKGIPVHLELASMTNMELMSSIVHQQVRTYGPVFMCLGGLLTMVAGAVWLTVRVLELFRAAQLANDVVLQIMELCGAAFRQVCHTTVPWPNASLTPKWNNETTQPQIANCSVYDFFVWLHYYSVRDTLWPRVTYHMNKYAYHMLERRAKYKRGPGPGAKFVAAWTLKAAAGPGPGQYIKANSKFIGITELGPGPG

SEQ ID NO: 36 - DNA, 2019 bp, synthetic construct
  misc_feature 1..2019: note = Description of Artificial Sequence: Synthetic polynucleotide
  source 1..2019: mol_type = other DNA
gcccgggcatttaaatgcgatcgcatcgattacgactctagaatagtctagtccgcaggccaccatgcagatcttcgtgaagaccctgaccggcaagaccatcaccctagaggtggagcccagtgacaccatcgagaacgtgaaggccaagatccaggataaagagggcatcccccctgaccagcagaggctgatctttgccggcaagcagctggaagatggccgcaccctctctgattacaacatccagaaggagtcaaccctgcacctggtccttcgcctgagaggtgccatgtttcaggcgctgagcgaaggctgcaccccgtatgatattaaccagatgctgaacgtgctgggcgatcatcagtttaagcacatcaaagcctttgaccggacatttgctaacaacccaggtcccatggttgtgtttgccacacctgggcctatcctgtctcctctgacaaagggcatcctgggcttcgtgtttaccctgaccgtgccttctgagagaggacttagctgcattagcgaagcggatgcgaccaccccggaaagcgcgaacctgggcgaagaaattctgagccagctgtatctttggccaagggtgacctaccattcccctagttatgcttaccaccaatttgaaagacgagccaaatataaaagacacttccccggctttggccagagcctgctgtttggctaccctgtgtacgtgttcggcgattgcgtgcagggcgattgggatgcgattcgctttcgctattgcgcgccgccgggctatgcgctgctgcgctgcaacgataccaactatagcgctctgctggctgtgggggccctagaaggacccaggaatcaggactggcttggtgtcccaagacaacttgtaactcggatgcaggctattcagaatgccggcctgtgtaccctggtggccatgctggaagagacaatcttctggctgcaagcgtttctgatggcgctgaccgatagcggcccgaaaaccaacattattgtggatagccagtatgtgatgggcattagcaaaccgagctttcaggaatttgtggattgggaaaacgtgagcccggaactgaacagcaccgatcagccgttttggcaagccggaatcctggccagaaatctggtgcctatggtggccacagtgcagggccagaacctgaagtaccagggtcagtcactagtcatctctgcttctatcattgtcttcaacctgctggaactggaaggtgattatcgagatgatggcaacgtgtgggtgcataccccgctgagcccgcgcaccctgaacgcgtgggtgaaagcggtggaagaaaaaaaaggtattccagttcacctagagctggccagtatgaccaacatggagctcatgagcagtattgtgcatcagcaggtcagaacatacggccccgtgttcatgtgtctcggcggactgcttacaatggtggctggtgctgtgtggctgacagtgcgagtgctcgagctgttccgggccgcgcagctggccaacgacgtggtcctccagatcatggagctttgtggtgcagcgtttcgccaggtgtgccataccaccgtgccgtggccgaacgcgagcctgaccccgaaatggaacaacgaaaccacccagccccagatcgccaactgcagcgtgtatgacttttttgtgtggctccattattattctgttcgagacacactttggccaagggtgacctaccatatgaacaaatatgcgtatcatatgctggaaagacgagccaaatataaaagaggaccaggacctggcgctaaatttgtggccgcctggacactgaaagccgctgctggtcctggacctggccagtacatcaaggccaacagcaagttcatcggcatcaccgaactcggacccggaccaggctgatgatttcgaaatttaaataagcttgcggccgctagggataacagggtaattatcacgcccaaacatttacagccgcggtgtcaaaaaccgcgtgg

SEQ ID NO: 37 - protein, 619 aa, synthetic construct
  REGION 1..619: note = Description of Artificial Sequence: Synthetic polypeptide
MQIFVKTLTGKTITLEVEPSDTIENVKAKIQDKEGIPPDQQRLIFAGKQLEDGRTLSDYNIQKESTLHLVLRLRGAMFQALSEGCTPYDINQMLNVLGDHQFKHIKAFDRTFANNPGPMVVFATPGPILSPLTKGILGFVFTLTVPSERGLSCISEADATTPESANLGEEILSQLYLWPRVTYHSPSYAYHQFERRAKYKRHFPGFGQSLLFGYPVYVFGDCVQGDWDAIRFRYCAPPGYALLRCNDTNYSALLAVGALEGPRNQDWLGVPRQLVTRMQAIQNAGLCTLVAMLEETIFWLQAFLMALTDSGPKTNIIVDSQYVMGISKPSFQEFVDWENVSPELNSTDQPFWQAGILARNLVPMVATVQGQNLKYQGQSLVISASIIVFNLLELEGDYRDDGNVWVHTPLSPRTLNAWVKAVEEKKGIPVHLELASMTNMELMSSIVHQQVRTYGPVFMCLGGLLTMVAGAVWLTVRVLELFRAAQLANDVVLQIMELCGAAFRQVCHTTVPWPNASLTPKWNNETTQPQIANCSVYDFFVWLHYYSVRDTLWPRVTYHMNKYAYHMLERRAKYKRGPGPGAKFVAAWTLKAAAGPGPGQYIKANSKFIGITELGPGPG

SEQ ID NO: 38 - DNA, 228 bp, synthetic construct
  misc_feature 1..228: note = Description of Artificial Sequence: Synthetic polynucleotide
  source 1..228: mol_type = other DNA
atgcagatcttcgtgaagaccctgaccggcaagaccatcaccctagaggtggagcccagtgacaccatcgagaacgtgaaggccaagatccaggataaagagggcatcccccctgaccagcagaggctgatctttgccggcaagcagctggaagatggccgcaccctctctgattacaacatccagaaggagtcaaccctgcacctggtccttcgcctgagaggtggc

SEQ ID NO: 39 - DNA, 228 bp, synthetic construct
  misc_feature 1..228: note = Description of Artificial Sequence: Synthetic polynucleotide
  source 1..228: mol_type = other DNA
atgcagatcttcgtgaagaccctgaccggcaagaccatcaccctagaggtggagcccagtgacaccatcgagaacgtgaaggccaagatccaggataaagagggcatcccccctgaccagcagaggctgatctttgccggcaagcagctggaagatggccgcaccctctctgattacaacatccagaaggagtcaaccctgcacctggtccttcgcctgagaggtgcc

SEQ ID NO: 40 - DNA, 78 bp, Homo sapiens
  source 1..78: mol_type = other DNA
atggccgtcatggcgccccgaaccctcgtcctgctactctcgggggctctggccctgacccagacctgggcgggctct

SEQ ID NO: 41 - DNA, 201 bp, Homo sapiens
  source 1..201: mol_type = other DNA
ccgtcttcccagcccaccatccccatcgtgggcatcattgctggcctggttctctttggagctgtgatcactggagctgtggtcgctgctgtgatgtggaggaggaagagctcagatagaaaaggagggagctactctcaggctgcaagcagtgacagtgcccagggctctgatgtgtctctcacagcttgtaaagtgtga

SEQ ID NO: 42 - DNA, 60 bp, synthetic construct
  misc_feature 1..60: note = Description of Artificial Sequence: Synthetic oligonucleotide
  source 1..60: mol_type = other DNA
atggagaccgatacactgctgctgtgggtgctgctcctgtgggtgccaggaagcacaggc

SEQ ID NO: 43 - DNA, 3178 bp, Homo sapiens
  source 1..3178: mol_type = other DNA
ggcaccgattcggggcctgcccggacttcgccgcacgctgcagaacctcgcccagcgcccaccatgccccggcagctcagcgcggcggccgcgctcttcgcgtccctggccgtaattttgcacgatggcagtcaaatgagagcaaaagcatttccagaaaccagagattattctcaacctactgcagcagcaacagtacaggacataaaaaaacctgtccagcaaccagctaagcaagcacctcaccaaactttagcagcaagattcatggatggtcatatcacctttcaaacagcggccacagtaaaaattccaacaactaccccagcaactacaaaaaacactgcaaccaccagcccaattacctacaccctggtcacaacccaggccacacccaacaactcacacacagctcctccagttactgaagttacagtcggccctagcttagccccttattcactgccacccaccatcaccccaccagctcatacagctggaaccagttcatcaaccgtcagccacacaactgggaacaccactcaacccagtaaccagaccacccttccagcaactttatcgatagcactgcacaaaagcacaaccggtcagaagcctgatcaacccacccatgccccaggaacaacggcagctgcccacaataccacccgcacagctgcacctgcctccacggttcctgggcccacccttgcacctcagccatcgtcagtcaagactggaatttatcaggttctaaacggaagcagactctgtataaaagcagagatggggatacagctgattgttcaagacaaggagtcggttttttcacctcggagatacttcaacatcgaccccaacgcaacgcaagcctctgggaactgtggcacccgaaaatccaaccttctgttgaattttcagggcggatttgtgaatctcacatttaccaaggatgaagaatcatattatatcagtgaagtgggagcctatttgaccgtctcagatccagagacagtttaccaaggaatcaaacatgcggtggtgatgttccagacagcagtcgggcattccttcaagtgcgtgagtgaacagagcctccagttgtcagcccacctgcaggtgaaaacaaccgatgtccaacttcaagcctttgattttgaagatgaccactttggaaatgtggatgagtgctcgtctgactacacaattgtgcttcctgtgattggggccatcgtggttggtctctgccttatgggtatgggtgtctataaaatccgcctaaggtgtcaatcatctggataccagagaatctaattgttgcccggggggaatgaaaataatggaatttagagaactctttcatcccttccaggatggatgttgggaaattccctcagagtgtgggtccttcaaacaatgtaaaccaccatcttctattcaaatgaagtgagtcatgtgtgatttaagttcaggcagcacatcaatttctaaatactttttgtttattttatgaaagatatagtgagctgtttattttctagtttcctttagaatattttagccactcaaagtcaacatttgagatatgttgaattaacataatatatgtaaagtagaataagccttcaaattataaaccaagggtcaattgtaactaatactactgtgtgtgcattgaagattttattttacccttgatcttaacaaagcctttgctttgttatcaaatggactttcagtgcttttactatctgtgttttatggtttcatgtaacatacatattcctggtgtagcacttaactccttttccactttaaatttgtttttgttttttgagacggagtttcactcttgtcacccaggctggagtacagtggcacgatctcggcttatggcaacctccgcctcccgggttcaagtgattctcctgcttcagcttcccgagtagctgggattacaggcacacactaccacgcctggctaatttttgtatttttattatagacgggtttcaccatgttggccagactggtcttgaactcttgacctcaggtgatccacccacctcagcctcccaaagtgctgggattacaggcatgagccattgcgcccggccttaaatgttttttttaatcatcaaaaagaacaacatatctcaggttgtctaagtgtttttatgtaaaaccaacaaaaagaacaaatcagcttatattttttatcttgatgactcctgctccagaattgctagactaagaattaggtggctacagatggtagaactaaacaataagcaagagacaataataatggcccttaattattaacaaagtgccagagtctaggctaagcactttatctatatctcatttcattctcacaacttataagtgaatgagtaaactgagacttaagggaactgaatcacttaaatgtcacctggctaactgatggcagagccagagcttgaattcatgttggtctgacatcaaggtctttggtcttctccctacaccaagttacctacaagaacaatgacaccacactctgcctgaaggctcacacctcataccagcatacgctcaccttacagggaaatgggtttatccaggatcatgagacattagggtagatgaaaggagagctttgcagataacaaaatagcctatccttaataaatcctccactctctggaaggagactgaggggctttgtaaaacattagtcagttgctcatttttatgggattgcttagctgggctgtaaagatgaaggcatcaaataaactcaaagtatttttaaatttttttgataatagagaaacttcgctaaccaactgttctttcttgagtgtatagccccatcttgtggtaacttgctgcttctgcacttcatatccatatttcctattgttcactttattctgtagagcagcctgccaagaattttatttctgctgttttttttgctgctaaagaaaggaactaagtcaggatgttaacagaaaagtccacataaccctagaattcttagtcaaggaataattcaagtcagcctagagaccatgttgactttcctcatgtgtttccttatgactcagtaagttggcaaggtcctgactttagtcttaataaaacattgaattgtagtaaaggtttttgcaataaaaacttactttgg

SEQ ID NO: 44 - DNA, 1858 bp, Mus sp.
  source 1..1858: mol_type = other DNA
attccggaggtgaaaaacaatggcacaacgtgtataatggccagcttctctgcctcctttctgaccacctacgagactgcgaatggttctcagatcgtgaacatttccctgccagcctctgcagaagtactgaaaaatggcagttcttgtggtaaagaaaatgtttctgaccccagcctcacaattacttttggaagaggatatttactgacactcaacttcacaaaaaatacaacacgttacagtgtccagcatatgtattttacatataacttgtcagatacagaacattttcccaatgccatcagcaaagagatctacaccatggattccacaactgacatcaaggcagacatcaacaaagcataccggtgtgtcagtgatatccgggtctacatgaagaatgtgaccgttgtgctccgggatgccactatccaggcctacctgtcgagtggcaacttcagcaaggaagagacacactgcacacaggatggaccttccccaaccactgggccacccagcccctcaccaccacttgtgcccacaaaccccactgtatccaagtacaatgttactggtaacaacggaacctgcctgctggcctctatggcactgcaactgaatatcacctacctgaaaaaggacaacaagacggtgaccagagcgttcaacatcagcccaaatgacacatctagtgggagttgcggtatcaacttggtgaccctgaaagtggagaacaagaacagagccctggaattgcagtttgggatgaatgccagctctagcctgtttttcttgcaaggagtgcgcttgaatatgactcttcctgatgccctagtgcccacattcagcatctccaaccattcactgaaagctcttcaggccactgtgggaaactcatacaagtgcaacactgaggaacacatctttgtcagcaagatgctctccctcaatgtcttcagtgtgcaggtccaggctttcaaggtggacagtgacaggtttgggtctgtggaagagtgtgttcaggatggtaacaacatgttgatccccattgctgtgggcggtgccctggcagggctgatcctcatcgtcctcattgcctacctcattggcaggaagaggagtcacgccggctatcagaccatctagcctggtgggcaggtgcaccagagatgcacaggggcctgttctcacatccccaagcttagataggtgtggaagggaggcacactttctggcaaactgttttaaaatctgctttatcaaatgtgaagttcatcttgcaacatttactatgcacaaaggaataactattgaaatgacggtgttaattttgctaactgggttaaatattgatgagaaggctccactgatttgacttttaagacttggtgtttggttcttcattcttttactcagatttaagcctatcaaagggatactctggtccagaccttggcctggcaagggtggctgatggttaggctgcacacacttaagaagcaacgggagcagggaaggcttgcacacaggcacgcacagggtcaacctctggacacttggcttgggctacctggccttgggggggctgaactctggcatctggctgggtacacacccccccaatttctgtgctctgccacccgtgagctgccactttcctaaatagaaaatggcattatttttatttacttttttgtaaagtgatttccagtcttgtgttggcgttcagggtggccctgtctctgcactgtgtacaataatagattcacactgctgacgtgtcttgcagcgtaggtgggttgtacactgggcatcagctcacgtaatgcattgcctgtaacgatgctaataaaaa

SEQ ID NO: 45 - DNA, 2339 bp, Homo sapiens
  source 1..2339: mol_type = other DNA
ggcccaaccgccgcccgcgcccccgctctccgcaccgtacccggccgcctcgcgccatggcggcccccggcagcgcccggcgacccctgctgctgctactgctgttgctgctgctcggcctcatgcattgtgcgtcagcagcaatgtttatggtgaaaaatggcaacgggaccgcgtgcataatggccaacttctctgctgccttctcagtgaactacgacaccaagagtggccctaagaacatgacctttgacctgccatcagatgccacagtggtgctcaaccgcagctcctgtggaaaagagaacacttctgaccccagtctcgtgattgcttttggaagaggacatacactcactctcaatttcacgagaaatgcaacacgttacagcgtccagctcatgagttttgtttataacttgtcagacacacaccttttccccaatgcgagctccaaagaaatcaagactgtggaatctataactgacatcagggcagatatagataaaaaatacagatgtgttagtggcacccaggtccacatgaacaacgtgaccgtaacgctccatgatgccaccatccaggcgtacctttccaacagcagcttcagcaggggagagacacgctgtgaacaagacaggccttccccaaccacagcgccccctgcgccacccagcccctcgccctcacccgtgcccaagagcccctctgtggacaagtacaacgtgagcggcaccaacgggacctgcctgctggccagcatggggctgcagctgaacctcacctatgagaggaaggacaacacgacggtgacaaggcttctcaacatcaaccccaacaagacctcggccagcgggagctgcggcgcccacctggtgactctggagctgcacagcgagggcaccaccgtcctgctcttccagttcgggatgaatgcaagttctagccggtttttcctacaaggaatccagttgaatacaattcttcctgacgccagagaccctgcctttaaagctgccaacggctccctgcgagcgctgcaggccacagtcggcaattcctacaagtgcaacgcggaggagcacgtccgtgtcacgaaggcgttttcagtcaatatattcaaagtgtgggtccaggctttcaaggtggaaggtggccagtttggctctgtggaggagtgtctgctggacgagaacagcatgctgatccccatcgctgtgggtggtgccctggcggggctggtcctcatcgtcctcatcgcctacctcgtcggcaggaagaggagtcacgcaggctaccagactatctagcctggtgcacgcaggcacagcagctgcaggggcctctgttcctttctctgggcttagggtcctgtcgaaggggaggcacactttctggcaaacgtttctcaaatctgcttcatccaatgtgaagttcatcttgcagcatttactatgcacaacagagtaactatcgaaatgacggtgttaattttgctaactgggttaaatattttgctaactggttaaacattaatatttaccaaagtaggattttgagggtgggggtgctctctctgagggggtgggggtgccgctgtctctgaggggtgggggtgccgctgtctctgaggggtgggggtgccgctctctctgagggggtgggggtgccgctttctctgagggggtgggggtgccgctctctctgagggggtgggggtgctgctctctccgaggggtggaatgccgctgtctctgaggggtgggggtgccgctctaaattggctccatatcatttgagtttagggttctggtgtttggtttcttcattctttactgcactcagatttaagccttacaaagggaaagcctctggccgtcacacgtaggacgcatgaaggtcactcgtggtgaggctgacatgctcacacattacaacagtagagagggaaaatcctaagacagaggaactccagagatgagtgtctggagcgcttcagttcagctttaaaggccaggacgggccacacgtggctggcggcctcgttccagtggcggcacgtccttgggcgtctctaatgtctgcagctcaagggctggcacttttttaaatataaaaatgggtgttatttttatttttttttgtaaagtgatttttggtcttctgttgacattcggggtgatcctgttctgcgctgtgtacaatgtgagatcggtgcgttctcctgatgttttgccgtggcttggggattgtacacgggaccagctcacgtaatgcattgcctgtaacaatgtaataaaaagcctctttcttttaaaaaaaaaaaaaaaaaaaaaaaa

SEQ ID NO: 46 - DNA, 45 bp, synthetic construct
  misc_feature 1..45: note = Description of Artificial Sequence: Synthetic oligonucleotide
  source 1..45: mol_type = other DNA
cagtacatcaaggccaacagcaagttcatcggcatcaccgaactc

SEQ ID NO: 47 - protein, 15 aa, synthetic construct
  REGION 1..15: note = Description of Artificial Sequence: Synthetic peptide
QYIKANSKFIGITEL

SEQ ID NO: 48 - DNA, 39 bp, synthetic construct
  misc_feature 1..39: note = Description of Artificial Sequence: Synthetic oligonucleotide
  source 1..39: mol_type = other DNA
gctaaatttgtggctgcctggacactgaaagccgccgct

SEQ ID NO: 49 - protein, 13 aa, synthetic construct
  REGION 1..13: note = Description of Artificial Sequence: Synthetic peptide
AKFVAAWTLKAAA

SEQ ID NO: 50 - DNA, 593 bp, Woodchuck hepatitis virus
  source 1..593: mol_type = other DNA
aatcaacctctggattacaaaatttgtgaaagattgactggtattcttaactatgttgctccttttacgctatgtggatacgctgctttaatgcctttgtatcatgctattgcttcccgtatggctttcattttctcctccttgtataaatcctggttgctgtctctttatgaggagttgtggcccgttgtcaggcaacgtggcgtggtgtgcactgtgtttgctgacgcaacccccactggttggggcattgccaccacctgtcagctcctttccgggactttcgctttccccctccctattgccacggcggaactcatcgccgcctgccttgcccgctgctggacaggggctcggctgttgggcactgacaattccgtggtgttgtcggggaagctgacgtcctttccatggctgctcgcctgtgttgccacctggattctgcgcgggacgtccttctgctacgtcccttcggccctcaatccagcggaccttccttcccgcggcctgctgccggctctgcggcctcttccgcgtcttcgccttcgccctcagacgagtcggatctccctttgggccgcctccccgcctgt

SEQ ID NO: 51 - DNA, 589 bp, synthetic construct
  misc_feature 1..589: note = Description of Artificial Sequence: Synthetic polynucleotide
  source 1..589: mol_type = other DNA
tctcccccccccccctctccctcccccccccctaacgttactggccgaagccgcttggaataaggccggtgtgcgtttgtctatatgttattttccaccatattgccgtcttttggcaatgtgagggcccggaaacctggccctgtcttcttgacgagcattcctaggggtctttcccctctcgccaaaggaatgcaaggtctgttgaatgtcgtgaaggaagcagttcctctggaagcttcttgaagacaaacaacgtctgtagcgaccctttgcaggcagcggaaccccccacctggcgacaggtgcctctgcggccaaaagccacgtgtataagatacacctgcaaaggcggcacaaccccagtgccacgttgtgagttggatagttgtggaaagagtcaaatggctctcctcaagcgtattcaacaaggggctgaaggatgcccagaaggtaccccattgtatgggatctgatctggggcctcggtgcacatgctttacatgtgtttagtcgaggttaaaaaaacgtctaggccccccgaaccacggggacgtggttttcctttgaaaaacacgatgataatatg

SEQ ID NO: 52 - DNA, 720 bp, synthetic construct
  misc_feature 1..720: note = Description of Artificial Sequence: Synthetic polynucleotide
  source 1..720: mol_type = other DNA
atggtgagcaagggcgaggagctgttcaccggggtggtgcccatcctggtcgagctggacggcgacgtaaacggccacaagttcagcgtgtccggcgagggcgagggcgatgccacctacggcaagctgaccctgaagttcatctgcaccaccggcaagctgcccgtgccctggcccaccctcgtgaccaccctgacctacggcgtgcagtgcttcagccgctaccccgaccacatgaagcagcacgacttcttcaagtccgccatgcccgaaggctacgtccaggagcgcaccatcttcttcaaggacgacggcaactacaagacccgcgccgaggtgaagttcgagggcgacaccctggtgaaccgcatcgagctgaagggcatcgacttcaaggaggacggcaacatcctggggcacaagctggagtacaactacaacagccacaacgtctatatcatggccgacaagcagaagaacggcatcaaggtgaacttcaagatccgccacaacatcgaggacggcagcgtgcagctcgccgaccactaccagcagaacacccccatcggcgacggccccgtgctgctgcccgacaaccactacctgagcacccagtccgccctgagcaaagaccccaacgagaagcgcgatcacatggtcctgctggagttcgtgaccgccgccgggatcactctcggcatggacgagctgtacaagtag

SEQ ID NO: 53 - DNA, 1563 bp, synthetic construct
  misc_feature 1..1563: note = Description of Artificial Sequence: Synthetic polynucleotide
  source 1..1563: mol_type = other DNA
atgctgctgctgctgctgctgctgggcctgaggctacagctctccctgggcatcatcccagttgaggaggagaacccggacttctggaaccgcgaggcagccgaggccctgggtgccgccaagaagctgcagcctgcacagacagccgccaagaacctcatcatcttcctgggcgatgggatgggggtgtctacggtgacagctgccaggatcctaaaagggcagaagaaggacaaactggggcctgagatacccctggccatggaccgcttcccatatgtggctctgtccaagacatacaatgtagacaaacatgtgccagacagtggagccacagccacggcctacctgtgcggggtcaagggcaacttccagaccattggcttgagtgcagccgcccgctttaaccagtgcaacacgacacgcggcaacgaggtcatctccgtgatgaatcgggccaagaaagcagggaagtcagtgggagtggtaaccaccacacgagtgcagcacgcctcgccagccggcacctacgcccacacggtgaaccgcaactggtactcggacgccgacgtgcctgcctcggcccgccaggaggggtgccaggacatcgctacgcagctcatctccaacatggacattgacgtgatcctaggtggaggccgaaagtacatgtttcgcatgggaaccccagaccctgagtacccagatgactacagccaaggtgggaccaggctggacgggaagaatctggtgcaggaatggctggcgaagcgccagggtgcccggtatgtgtggaaccgcactgagctcatgcaggcttccctggacccgtctgtgacccatctcatgggtctctttgagcctggagacatgaaatacgagatccaccgagactccacactggacccctccctgatggagatgacagaggctgccctgcgcctgctgagcaggaacccccgcggcttcttcctcttcgtggagggtggtcgcatcgaccatggtcatcatgaaagcagggcttaccgggcactgactgagacgatcatgttcgacgacgccattgagagggcgggccagctcaccagcgaggaggacacgctgagcctcgtcactgccgaccactcccacgtcttctccttcggaggctaccccctgcgagggagctccatcttcgggctggcccctggcaaggcccgggacaggaaggcctacacggtcctcctatacggaaacggtccaggctatgtgctcaaggacggcgcccggccggatgttaccgagagcgagagcgggagccccgagtatcggcagcagtcagcagtgcccctggacgaagagacccacgcaggcgaggacgtggcggtgttcgcgcgcggcccgcaggcgcacctggttcacggcgtgcaggagcagaccttcatagcgcacgtcatggccttcgccgcctgcctggagccctacaccgcctgcgacctggcgccccccgccggcaccaccgacgccgcgcacccgggttactctagagtcggggcggccggccgcttcgagcagacatgataa

SEQ ID NO: 54 - DNA, 1653 bp, synthetic construct
  misc_feature 1..1653: note = Description of Artificial Sequence: Synthetic polynucleotide
  source 1..1653: mol_type = other DNA
atggaagatgccaaaaacattaagaagggcccagcgccattctacccactcgaagacgggaccgccggcgagcagctgcacaaagccatgaagcgctacgccctggtgcccggcaccatcgcctttaccgacgcacatatcgaggtggacattacctacgccgagtacttcgagatgagcgttcggctggcagaagctatgaagcgctatgggctgaatacaaaccatcggatcgtggtgtgcagcgagaatagcttgcagttcttcatgcccgtgttgggtgccctgttcatcggtgtggctgtggccccagctaacgacatctacaacgagcgcgagctgctgaacagcatgggcatcagccagcccaccgtcgtattcgtgagcaagaaagggctgcaaaagatcctcaacgtgcaaaagaagctaccgatcatacaaaagatcatcatcatggatagcaagaccgactaccagggcttccaaagcatgtacaccttcgtgacttcccatttgccacccggcttcaacgagtacgacttcgtgcccgagagcttcgaccgggacaaaaccatcgccctgatcatgaacagtagtggcagtaccggattgcccaagggcgtagccctaccgcaccgcaccgcttgtgtccgattcagtcatgcccgcgaccccatcttcggcaaccagatcatccccgacaccgctatcctcagcgtggtgccatttcaccacggcttcggcatgttcaccacgctgggctacttgatctgcggctttcgggtcgtgctcatgtaccgcttcgaggaggagctattcttgcgcagcttgcaagactataagattcaatctgccctgctggtgcccacactatttagcttcttcgctaagagcactctcatcgacaagtacgacctaagcaacttgcacgagatcgccagcggcggggcgccgctcagcaaggaggtaggtgaggccgtggccaaacgcttccacctaccaggcatccgccagggctacggcctgacagaaacaaccagcgccattctgatcacccccgaaggggacgacaagcctggcgcagtaggcaaggtggtgcccttcttcgaggctaaggtggtggacttggacaccggtaagacactgggtgtgaaccagcgcggcgagctgtgcgtccgtggccccatgatcatgagcggctacgttaacaaccccgaggctacaaacgctctcatcgacaaggacggctggctgcacagcggcgacatcgcctactgggacgaggacgagcacttcttcatcgtggaccggctgaagagcctgatcaaatacaagggctaccaggtagccccagccgaactggagagcatcctgctgcaacaccccaacatcttcgacgccggggtcgccggcctgcccgacgacgatgccggcgagctgcccgccgcagtcgtcgtgctggaacacggtaaaaccatgaccgagaaggagatcgtggactatgtggccagccaggttacaaccgccaagaagctgcgcggtggtgttgtgttcgtggacgaggtgcctaaaggactgaccggcaagttggacgcccgcaagatccgcgagattctcattaaggccaagaagggcggcaagatcgccgtgtaa

SEQ ID NO: 55 - DNA, 66 bp, Foot-and-mouth disease virus
  source 1..66: mol_type = other DNA
gtaaagcaaacactgaactttgaccttctcaagttggctggagacgttgagtccaatcctgggccc

SEQ ID NO: 56 - protein, 5 aa, synthetic construct
  REGION 1..5: note = Description of Artificial Sequence: Synthetic peptide
GPGPG

SEQ ID NO: 57 - protein, 594 aa, synthetic construct
  REGION 1..594: note = Description of Artificial Sequence: Synthetic polypeptide
TSRTLSYYKLGASQRVAGDSGFAAYSRYRIGNYCAAGTTQTACTDDNALAYYNTTKGGWPQIAQFAPSASAFFGMSRIGMEVTPSGTWLTYTGAIKLDDKDPNPANNAAIVLQLPQGTTLPKGFYAEGGVPINTNSSPDDQIGYYRRATRRIRLYLYALVYFLQSINFVRIIMRLWLCSTDVVYRAFDIYNDKVAGFAKFLKTRQKRTATKAYNVTQAFGRRGPEQTQPYVCNAPGCDVTDVTQLYLGGMSYYACLVGLMWLSYFIASFRLFARTRSMWSFNPETNILLNVPLHGTILTRPLLESELVILLNKHIDAYKTFPPTEPKKDKKKKADETQALPQRQKKQQTVTVGDSAEVAVKMFDAYVNTFSSTFNVMDLFMRIFTIGTVTLKQGEIKDATPSDFVRATATIPIQASLPFGWLILLQFAYANRNRFLYIIKLIFLWLLWPVLAVFQSASKIITLKKRWQLALSKGVHFVCNLLLLHVMSKHTDFSSEIIGYKAIDGGVTRDCVVLHSYFTSDYYQLYSTQLSTDTGVEHVTFFIYNKIVDEPEEHVQIHTIDGSSGVCNIVNVSLVKPSFYVYSRVKNLNSSRVP

SEQ ID NO: 58 - protein, 640 aa, synthetic construct
  REGION 1..640: note = Description of Artificial Sequence: Synthetic polypeptide
MAGTSRTLSYYKLGASQRVAGDSGFAAYSRYRIGNYCAAGTTQTACTDDNALAYYNTTKGGWPQIAQFAPSASAFFGMSRIGMEVTPSGTWLTYTGAIKLDDKDPNPANNAAIVLQLPQGTTLPKGFYAEGGVPINTNSSPDDQIGYYRRATRRIRLYLYALVYFLQSINFVRIIMRLWLCSTDVVYRAFDIYNDKVAGFAKFLKTRQKRTATKAYNVTQAFGRRGPEQTQPYVCNAPGCDVTDVTQLYLGGMSYYACLVGLMWLSYFIASFRLFARTRSMWSFNPETNILLNVPLHGTILTRPLLESELVILLNKHIDAYKTFPPTEPKKDKKKKADETQALPQRQKKQQTVTVGDSAEVAVKMFDAYVNTFSSTFNVMDLFMRIFTIGTVTLKQGEIKDATPSDFVRATATIPIQASLPFGWLILLQFAYANRNRFLYIIKLIFLWLLWPVLAVFQSASKIITLKKRWQLALSKGVHFVCNLLLLHVMSKHTDFSSEIIGYKAIDGGVTRDCVVLHSYFTSDYYQLYSTQLSTDTGVEHVTFFIYNKIVDEPEEHVQIHTIDGSSGVCNIVNVSLVKPSFYVYSRVKNLNSSRVPGPGPGAKFVAAWTLKAAAGPGPGQYIKANSKFIGITELGPGPG

SEQ ID NO: 59 - protein, 1273 aa, Severe acute respiratory syndrome coronavirus 2
MFVFLVLLPLVSSQCVNLTTRTQLPPAYTNSFTRGVYYPDKVFRSSVLHSTQDLFLPFFSNVTWFHAIHVSGTNGTKRFDNPVLPFNDGVYFASTEKSNIIRGWIFGTTLDSKTQSLLIVNNATNVVIKVCEFQFCNDPFLGVYYHKNNKSWMESEFRVYSSANNCTFEYVSQPFLMDLEGKQGNFKNLREFVFKNIDGYFKIYSKHTPINLVRDLPQGFSALEPLVDLPIGINITRFQTLLALHRSYLTPGDSSSGWTAGAAAYYVGYLQPRTFLLKYNENGTITDAVDCALDPLSETKCTLKSFTVEKGIYQTSNFRVQPTESIVRFPNITNLCPFGEVFNATRFASVYAWNRKRISNCVADYSVLYNSASFSTFKCYGVSPTKLNDLCFTNVYADSFVIRGDEVRQIAPGQTGKIADYNYKLPDDFTGCVIAWNSNNLDSKVGGNYNYLYRLFRKSNLKPFERDISTEIYQAGSTPCNGVEGFNCYFPLQSYGFQPTNGVGYQPYRVVVLSFELLHAPATVCGPKKSTNLVKNKCVNFNFNGLTGTGVLTESNKKFLPFQQFGRDIADTTDAVRDPQTLEILDITPCSFGGVSVITPGTNTSNQVAVLYQDVNCTEVPVAIHADQLTPTWRVYSTGSNVFQTRAGCLIGAEHVNNSYECDIPIGAGICASYQTQTNSPRRARSVASQSIIAYTMSLGAENSVAYSNNSIAIPTNFTISVTTEILPVSMTKTSVDCTMYICGDSTECSNLLLQYGSFCTQLNRALTGIAVEQDKNTQEVFAQVKQIYKTPPIKDFGGFNFSQILPDPSKPSKRSFIEDLLFNKVTLADAGFIKQYGDCLGDIAARDLICAQKFNGLTVLPPLLTDEMIAQYTSALLAGTITSGWTFGAGAALQIPFAMQMAYRFNGIGVTQNVLYENQKLIANQFNSAIGKIQDSLSSTASALGKLQDVVNQNAQALNTLVKQLSSNFGAISSVLNDILSRLDKVEAEVQIDRLITGRLQSLQTYVTQQLIRAAEIRASANLAATKMSECVLGQSKRVDFCGKGYHLMSFPQSAPHGVVFLHVTYVPAQEKNFTTAPAICHDGKAHFPREGVFVSNGTHWFVTQRNFYEPQIITTDNTFVSGNCDVVIGIVNNTVYDPLQPELDSFKEELDKYFKNHTSPDVDLGDISGINASVVNIQKEIDRLNEVAKNLNESLIDLQELGKYEQYIKWPWYIWLGFIAGLIAIVMVTIMLCCMTSCCSCLKGCCSCGSCCKFDEDDSEPVLKGVKLHYT

SEQ ID NO: 60 - protein, 1273 aa, synthetic construct
  REGION 1..1273: note = Description of Artificial Sequence: Synthetic polypeptide
MFVFLVLLPLVSSQCVNLTTRTQLPPAYTNSFTRGVYYPDKVFRSSVLHSTQDLFLPFFSNVTWFHAIHVSGTNGTKRFDNPVLPFNDGVYFASTEKSNIIRGWIFGTTLDSKTQSLLIVNNATNVVIKVCEFQFCNDPFLGVYYHKNNKSWMESEFRVYSSANNCTFEYVSQPFLMDLEGKQGNFKNLREFVFKNIDGYFKIYSKHTPINLVRDLPQGFSALEPLVDLPIGINITRFQTLLALHRSYLTPGDSSSGWTAGAAAYYVGYLQPRTFLLKYNENGTITDAVDCALDPLSETKCTLKSFTVEKGIYQTSNFRVQPTESIVRFPNITNLCPFGEVFNATRFASVYAWNRKRISNCVADYSVLYNSASFSTFKCYGVSPTKLNDLCFTNVYADSFVIRGDEVRQIAPGQTGKIADYNYKLPDDFTGCVIAWNSNNLDSKVGGNYNYLYRLFRKSNLKPFERDISTEIYQAGSTPCNGVEGFNCYFPLQSYGFQPTNGVGYQPYRVVVLSFELLHAPATVCGPKKSTNLVKNKCVNFNFNGLTGTGVLTESNKKFLPFQQFGRDIADTTDAVRDPQTLEILDITPCSFGGVSVITPGTNTSNQVAVLYQGVNCTEVPVAIHADQLTPTWRVYSTGSNVFQTRAGCLIGAEHVNNSYECDIPIGAGICASYQTQTNSPVRARSVASQSIIAYTMSLGAENSVAYSNNSIAIPTNFTISVTTEILPVSMTKTSVDCTMYICGDSTECSNLLLQYGSFCTQLNRALTGIAVEQDKNTQEVFAQVKQIYKTPPIKDFGGFNFSQILPDPSKPSKNSFIEDLLFNKVTLADAGFIKQYGDCLGDIAARDLICAQKFNGLTVLPPLLTDEMIAQYTSALLAGTITSGWTFGAGAALQIPFAMQMAYRFNGIGVTQNVLYENQKLIANQFNSAIGKIQDSLSSTASALGKLQDVVNQNAQALNTLVKQLSSNFGAISSVLNDILSRLDPPEAEVQIDRLITGRLQSLQTYVTQQLIRAAEIRASANLAATKMSECVLGQSKRVDFCGKGYHLMSFPQSAPHGVVFLHVTYVPAQEKNFTTAPAICHDGKAHFPREGVFVSNGTHWFVTQRNFYEPQIITTDNTFVSGNCDVVIGIVNNTVYDPLQPELDSFKEELDKYFKNHTSPDVDLGDISGINASVVNIQKEIDRLNEVAKNLNESLIDLQELGKYEQYIKWPWYIWLGFIAGLIAIVMVTIMLCCMTSCCSCLKGCCSCGSCCKFDEDDSEPVLKGVKLHYT

SEQ ID NO: 61 - protein, 222 aa, Severe acute respiratory syndrome coronavirus 2
MADSNGTITVEELKKLLEQWNLVIGFLFLTWICLLQFAYANRNRFLYIIKLIFLWLLWPVTLACFVLAAVYRINWITGGIAIAMACLVGLMWLSYFIASFRLFARTRSMWSFNPETNILLNVPLHGTILTRPLLESELVIGAVILRGHLRIAGHHLGRCDIKDLPKEITVATSRTLSYYKLGASQRVAGDSGFAAYSRYRIGNYKLNTDHSSSSDNIALLVQ

SEQ ID NO: 62 - protein, 419 aa, Severe acute respiratory syndrome coronavirus 2
MSDNGPQNQRNAPRITFGGPSDSTGSNQNGERSGARSKQRRPQGLPNNTASWFTALTQHGKEDLKFPRGQGVPINTNSSPDDQIGYYRRATRRIRGGDGKMKDLSPRWYFYYLGTGPEAGLPYGANKDGIIWVATEGALNTPKDHIGTRNPANNAAIVLQLPQGTTLPKGFYAEGSRGGSQASSRSSSRSRNSSRNSTPGSSRGTSPARMAGNGGDAALALLLLDRLNQLESKMSGKGQQQQGQTVTKKSAAEASKKPRQKRTATKAYNVTQAFGRRGPEQTQGNFGDQELIRQGTDYKHWPQIAQFAPSASAFFGMSRIGMEVTPSGTWLTYTGAIKLDDKDPNFKDQVILLNKHIDAYKTFPPTEPKKDKKKKADETQALPQRQKKQQTVTLLPAADLDDFSKQLQQSMSSADSTQA

SEQ ID NO: 63 - protein, 75 aa, Severe acute respiratory syndrome coronavirus 2
MYSFVSEETGTLIVNSVLLFLAFVVFLLVTLAILTALRLCAYCCNIVNVSLVKPSFYVYSRVKNLNSSRVPDLLV

SEQ ID NO: 64 - DNA, 1920 bp, synthetic construct
  misc_feature 1..1920: note = Description of Artificial Sequence: Synthetic polynucleotide
  source 1..1920: mol_type = other DNA
atggctggcacttcccgcaccttgtcctattacaaacttggcgcgagtcaacgggtggcgggtgactccggatttgcggcatattcacgatataggatcgggaattactgcgcagcaggtactacgcagactgcttgcacggatgataacgcgctggcctattacaatacaacaaaaggaggctggccccagatcgcccaattcgccccatcagccagtgctttcttcggcatgagtcgaatcggtatggaagtaacaccctccggcacatggcttacctacactggcgcgataaagctcgatgacaaagaccctaatcctgcgaataacgctgcaattgttctccagcttcctcagggtacgaccctgccaaaaggtttttacgcagagggcggcgtcccaatcaatacgaatagcagcccggacgatcaaataggatactacagaagggccacacggcggatcaggctgtacctctatgcgcttgtctatttcctccagagtattaatttcgtgaggatcatcatgcggttgtggctctgctctacagacgtagtatatcgagcttttgacatttacaatgacaaagtagccgggtttgccaaatttctcaaaaccagacagaagcggacggcaactaaggcttacaatgtgactcaggcgttcgggcggagaggtccggaacagacccaaccttatgtgtgcaatgcaccgggatgtgatgtcacagatgtgactcagctctaccttggagggatgtcctattatgcgtgtctcgtgggcctcatgtggttgtcctatttcatagcatcatttcgattgtttgctcgaacgaggtctatgtggtccttcaatcctgagacgaacatacttctgaatgtcccactccacggcaccatactgactcggccgctccttgaaagtgaactcgtaatcctccttaacaaacacatcgatgcctacaaaacgtttccaccaacggaaccgaagaaggataaaaagaagaaggccgatgaaacgcaggccctgccccaacgccaaaaaaagcagcagacggtcacggttggcgattctgccgaagtagctgtaaagatgtttgacgcctacgtcaatacattctcatcaacctttaatgtgatggatctgtttatgagaattttcactattggaaccgtcactcttaagcagggagaaatcaaagacgcgacaccatctgattttgttagggcaacagccactatccccatacaagccagcttgccatttggatggctgatccttctccaattcgcgtatgctaaccggaatcgctttctctacataataaagctgatcttcctttggcttctctggcccgttttggctgtattccagtcagccagtaagataataactctcaaaaagcggtggcagcttgcacttagtaaaggcgtccatttcgtctgcaatctccttttgctgcatgttatgtctaagcacacagactttagttcagagattattggatacaaagctattgatggtggtgttactagagattgtgtagttctccattcatacttcacgtcagattattatcaactctacagcacgcagctttccacggatacaggcgtagagcatgtgaccttcttcatctataataagatagtcgacgaacctgaggaacatgtccaaattcatacaattgatgggtcctccggcgtatgcaacatcgttaacgtgagccttgtcaaacctagcttctatgtctattctagggttaagaacctgaattcctccagggtccctggacccggaccaggcgccaaatttgttgctgcttggacactgaaagctgctgctgggcccggaccaggccagtacatcaaggccaactctaagtttatcggcatcaccgaattgggacctggacccggc

SEQ ID NO: 65 - DNA, 2305 bp, synthetic construct
  misc_feature 1..2305: note = Description of Artificial Sequence: Synthetic polynucleotide
  source 1..2305: mol_type = other DNA
gacattgattattgactagttgttaatagtaatcaattacggggtcattagttcatagcccatatatggagttccgcgttacataacttacggtaaatggcccgcctggctgaccgcccaacgacccccgcccattgacgtcaataatgacgtatgttcccatagtaacgccaatagggactttccattgacgtcaatgggtggagtatttacggtaaactgcccacttggcagtacatcaagtgtatcatatgccaagtccgccccctattgacgtcaatgacggtaaatggcccgcctggcattatgcccagtacatgaccttacgggactttcctacttggcagtacatctacgtattagtcatcgctattaccatggtgatgcggttttggcagtacaccaatgggcgtggatagcggtttgactcacggggatttccaagtctccaccccattgacgtcaatgggagtttgttttggcaccaaaatcaacgggactttccaaaatgtcgtaataaccccgccccgttgacgcaaatgggcggtaggcgtgtacggtgggaggtctatataagcagagctcgtttagtgaaccgtcagatcgcctggaacgccatccacgctgttttgacctccatagaagacagcgatcgcgccaccgccgggtttgccaaatttctcaaaaccagacagaagcggacggcaactaaggcttacaatgtgactcaggcgttcgggcggagaggtccggaacagacccaaccttatgtgtgcaatgcaccgggatgtgatgtcacagatgtgactcagctctaccttggagggatgtcctattatgcgtgtctcgtgggcctcatgtggttgtcctatttcatagcatcatttcgattgtttgctcgaacgaggtctatgtggtccttcaatcctgagacgaacatacttctgaatgtcccactccacggcaccatactgactcggccgctccttgaaagtgaactcgtaatcctccttaacaaacacatcgatgcctacaaaacgtttccaccaacggaaccgaagaaggataaaaagaagaaggccgatgaaacgcaggccctgccccaacgccaaaaaaagcagcagacggtcacggttggcgattctgccgaagtagctgtaaagatgtttgacgcctacgtcaatacattctcatcaacctttaatgtgatggatctgtttatgagaattttcactattggaaccgtcactcttaagcagggagaaatcaaagacgcgacaccatctgattttgttagggcaacagccactatccccatacaagccagcttgccatttggatggctgatccttctccaattcgcgtatgctaaccggaatcgctttctctacataataaagctgatcttcctttggcttctctggcccgttttggctgtattccagtcagccagtaagataataactctcaaaaagcggtggcagcttgcacttagtaaaggcgtccatttcgtctgcaatctccttttgctgcatgttatgtctaagcacacagactttagttcagagattattggatacaaagctattgatggtggtgttactagagattgtgtagttctccattcatacttcacgtcagattattatcaactctacagcacgcagctttccacggatacaggcgtagagcatgtgaccttcttcatctataataagatagtcgacgaacctgaggaacatgtccaaattcatacaattgatgggtcctccggcgtatgcaacatcgttaacgtgagccttgtcaaacctagcttctatgtctattctagggttaagaacctgaattcctccagggtccctggacccggaccaggcgccaaatttgttgctgcttggacactgaaagctgctgctgggcccggaccaggccagtacatcaaggccaactctaagtttatcggcatcaccgaattgggacctggacccggctagtgagtttaaactcccatttaaatgtgagggttaatgcttcgagcagagctcgctgatcagcctcgactgtgccttctagttgccagccatctgttgtttgcccctcccccgtgccttccttgaccctggaaggtgccactcccactgtcctttcctaataaaatgaggaaattgcatcgcattgtctgagtaggtgtcattctattctggggggtggggtggggcaggacagcaagggggaggattgggaagacaatagcaggcatgctggggatgcggtgggctctatggcttctgaggcggaaagaacc

SEQ ID NO: 66 - DNA, 5496 bp, synthetic construct
  misc_feature 1..5496: note = Description of Artificial Sequence: Synthetic polynucleotide
  source 1..5496: mol_type = other DNA
gacattgattattgactagttgttaatagtaatcaattacggggtcattagttcatagcccatatatggagttccgcgttacataacttacggtaaatggcccgcctggctgaccgcccaacgacccccgcccattgacgtcaataatgacgtatgttcccatagtaacgccaatagggactttccattgacgtcaatgggtggagtatttacggtaaactgcccacttggcagtacatcaagtgtatcatatgccaagtccgccccctattgacgtcaatgacggtaaatggcccgcctggcattatgcccagtacatgaccttacgggactttcctacttggcagtacatctacgtattagtcatcgctattaccatggtgatgcggttttggcagtacaccaatgggcgtggatagcggtttgactcacggggatttccaagtctccaccccattgacgtcaatgggagtttgttttggcaccaaaatcaacgggactttccaaaatgtcgtaataaccccgccccgttgacgcaaatgggcggtaggcgtgtacggtgggaggtctatataagcagagctcgtttagtgaaccgtcagatcgcctggaacgccatccacgctgttttgacctccatagaagacagcgatcgcgccaccatgtttgtctttctggtcctgcttcccctcgttagttctcagtgtgtgaacctcaccacacggacgcaactccctccagcttacacaaattcttttacgcgaggcgtgtattatccggataaagttttcaggtcctccgtcctgcactccacgcaggacctttttttgccgttcttttctaacgtaacatggtttcatgccattcatgtttccgggacaaacggtacgaaacgctttgataaccctgtgctgccgttcaatgatggcgtttactttgcctctacggaaaagagtaacataatccgaggctggatcttcgggaccaccctggatagcaagactcagagtcttctcatcgttaataacgctacaaacgttgttatcaaggtgtgtgaattccagttttgcaacgatccctttttgggggtatactatcacaaaaacaataaaagttggatggaatcagagtttcgcgtgtattcttctgcgaacaactgcacgtttgaatacgttagtcagccttttctcatggacttggaaggtaagcaggggaactttaaaaacttgcgggagttcgtttttaagaacatagatggttacttcaaaatttatagcaaacatacaccgatcaacctcgtgagagatctcccacagggtttttccgcactcgaaccgctcgtggatctgccgattggaattaacattacccgcttccagaccctgttggctctgcacagaagctatctgacgccaggggattccagcagtggatggacggcgggtgcggccgcgtattatgtaggctatctccaaccccgaacgttcttgctgaagtacaatgagaatgggaccattacggatgctgtggattgtgcattggatcctctctctgagacaaaatgcacccttaaaagcttcactgtagaaaagggtatttatcagactagcaacttccgcgtacaaccaacggagtctatcgttaggttccccaacattactaacttgtgcccatttggcgaagtgtttaacgcaactaggtttgctagtgtctatgcttggaatcgaaagagaataagcaattgtgtcgcagattactccgtattgtataattctgcaagcttttcaacattcaagtgctacggagtgtctcccaccaaattgaacgacctgtgttttactaacgtgtatgccgactctttcgttatccgaggcgatgaggtcaggcaaattgcccccggacaaactgggaaaattgcggattataattacaagcttccagacgactttacgggctgtgttatcgcatggaactccaacaatctcgacagcaaagtgggtggaaattataattatttgtatagattgtttcgcaagtccaacctgaagccattcgagagagacatctccaccgagatttatcaagccggctcaactccttgcaacggagtcgaaggcttcaactgttattttccgcttcagtcctatggttttcaacctacgaacggcgtgggataccagccgtatcgagtcgtggtactgtcctttgaacttttgcacgccccagcaactgtttgcggaccaaaaaagtccacaaatctcgtcaaaaacaagtgcgttaattttaattttaacgggcttacgggtactggtgtactgacggagtccaataagaaattcctgccattccaacagtttggacgggatattgctgatacgaccgacgctgtgcgagatccccagacacttgagatcctcgacataaccccctgtagttttggtggagtgtctgtaattacccccggaacgaacaccagcaaccaagttgcggtgctttatcaggatgttaattgcactgaggttcctgtcgcgatacatgccgaccaactgacgcctacatggcgagtatattcaacgggctccaacgtcttccagacgcgagccggttgtctcattggagctgaacatgtgaacaactcttatgaatgcgatataccaattggggcaggtatctgcgcctcttatcagacgcagactaactcacccagacgagcacggagcgtggcaagccaatccattattgcctacaccatgtccttgggagctgagaattcagtcgcctattctaataatagcattgctataccgacgaactttacaatttccgtaactaccgaaatattgcccgtcagtatgactaagactagcgttgactgcacaatgtacatttgcggcgatagtaccgaatgctctaatcttcttctgcagtatggtagtttttgtacacaactgaatcgagctctgactgggatcgcagtcgaacaggacaaaaatacacaggaagttttcgcgcaagtgaagcaaatctacaaaacgcctcccataaaagatttcggaggattcaatttcagtcagatactccctgatccctctaaaccatctaaacgatcctttatcgaagatttgctgttcaacaaggtgacccttgctgacgctggattcataaagcagtacggggattgtcttggcgatatcgcagcccgagaccttatttgtgcccaaaaatttaacggacttacggtactccctccccttctgactgacgaaatgatagcccagtacaccagtgctctgctggctggcaccataacgagcggatggacttttggtgcgggtgcagcactgcagatccccttcgcgatgcaaatggcatacaggtttaatgggattggggtcacccagaatgtattgtacgagaaccagaagcttatagcgaatcaatttaacagtgcaattggtaagattcaggacagcctttcaagtaccgcgagtgctctcgggaagttgcaggatgtagtaaatcaaaatgcgcaggcgctgaatacgttggttaaacagctcagcagtaattttggagcaatttctagcgtgctgaatgacatcctcagcagactcgataaggtggaggctgaggtacagatagatagactcatcacgggcagattgcagagtttgcagacatacgtcacgcaacaactcattcgagcagcagaaattagagcatccgcaaatctggcggccacgaaaatgtctgagtgcgttctggggcagtccaagagagttgacttttgtgggaaaggatatcatctgatgagttttccgcagtcagcgccacatggtgtggtctttctgcacgttacttatgtccccgcacaggagaagaattttacgaccgcgccagctatttgccatgacggtaaggctcacttcccgagggaaggggtattcgtttctaacggtacgcattggtttgttacgcaacggaacttttatgaaccacagattattaccaccgacaacacattcgtaagtggaaactgtgatgtcgttatcggaatagtaaataataccgtttatgacccccttcagcctgaacttgattccttcaaggaagagctcgataaatactttaagaaccacaccagccccgatgttgacctgggtgatatatctgggatcaacgcttctgtcgtcaacattcaaaaagagatcgatcgcctgaatgaggtggccaaaaacctcaatgaaagtctcattgaccttcaagaactcggtaagtacgagcaatacatcaagtggccatggtacatatggctgggcttcattgctgggttgatagctatagtgatggttacgataatgttgtgttgtatgacatcctgctgtagctgccttaaaggttgttgttcttgcggttcttgttgtaagtttgacgaagatgattcagagcctgttctgaaaggggtgaagctccattatactggcggttctggaggtgtccgtgctgaaggacgcgggtcccttctcacctgcggcgacgttgaggaaaaccctggccctatggctgacagcaatggtactattacggtggaagaactgaaaaagctcttggaacagtggaaccttgtgatcggttttctgtttttgacctggatttgcttgctccagttcgcctatgctaatagaaacaggtttctctatataatcaagttgatttttctgtggctgctctggcccgttacgcttgcgtgttttgtcctggctgctgtgtaccggatcaattggatcactggtggcattgctatcgccatggcttgtcttgtcgggctgatgtggctttcctattttatcgcttcatttaggctgtttgctcgaaccagatcaatgtggtcatttaatccagagactaatattctcttgaatgttccgctgcacggaactatcctcacacgacccctgttggagtccgaattggttatcggtgccgtaattctcaggggccaccttagaatcgcgggccaccatttgggacggtgcgatattaaagacctgcccaaagagatcacagtggccacaagtagaacgctctcatactataaactgggagcttcccagagagtggccggggatagtggcttcgcggcatatagtcgctaccgcatcggtaactataaacttaatacggaccatagtagctctagcgataacattgccttgctggttcagtgataagtttaaactcccatttaaatgtgagggttaatgcttcgagcagacatgataagatacattgatgagtttggacaaaccacaactagaatgcagtgaaaaaaatgctttatttgtgaaatttgtgatgctattgctttatttgtaaccattataagctgcaataaacaagttaacaacaacaattgcattcattttatgtttcaggttcagggggagatgtgggaggttttttaaagcaagtaaaacctctacaaatgtggtaaaa

SEQ ID NO: 67 - DNA, 5536 bp, synthetic construct
  misc_feature 1..5536: note = Description of Artificial Sequence: Synthetic polynucleotide
  source 1..5536: mol_type = other DNA
gacattgattattgactagttgttaatagtaatcaattacggggtcattagttcatagcccatatatggagttccgcgttacataacttacggtaaatggcccgcctggctgaccgcccaacgacccccgcccattgacgtcaataatgacgtatgttcccatagtaacgccaatagggactttccattgacgtcaatgggtggagtatttacggtaaactgcccacttggcagtacatcaagtgtatcatatgccaagtccgccccctattgacgtcaatgacggtaaatggcccgcctggcattatgcccagtacatgaccttacgggactttcctacttggcagtacatctacgtattagtcatcgctattaccatggtgatgcggttttggcagtacaccaatgggcgtggatagcggtttgactcacggggatttccaagtctccaccccattgacgtcaatgggagtttgttttggcaccaaaatcaacgggactttccaaaatgtcgtaataaccccgccccgttgacgcaaatgggcggtaggcgtgtacggtgggaggtctatataagcagagctcgtttagtgaaccgtcagatcgcctggaacgccatccacgctgttttgacctccatagaagacagcgatcgcgccaccatgtttgtctttctggtcctgcttcccctcgttagttctcagtgtgtgaacctcaccacacggacgcaactccctccagcttacacaaattcttttacgcgaggcgtgtattatccggataaagttttcaggtcctccgtcctgcactccacgcaggacctttttttgccgttcttttctaacgtaacatggtttcatgccattcatgtttccgggacaaacggtacgaaacgctttgataaccctgtgctgccgttcaatgatggcgtttactttgcctctacggaaaagagtaacataatccgaggctggatcttcgggaccaccctggatagcaagactcagagtcttctcatcgttaataacgctacaaacgttgttatcaaggtgtgtgaattccagttttgcaacgatccctttttgggggtatactatcacaaaaacaataaaagttggatggaatcagagtttcgcgtgtattcttctgcgaacaactgcacgtttgaatacgttagtcagccttttctcatggacttggaaggtaagcaggggaactttaaaaacttgcgggagttcgtttttaagaacatagatggttacttcaaaatttatagcaaacatacaccgatcaacctcgtgagagatctcccacagggtttttccgcactcgaaccgctcgtggatctgccgattggaattaacattacccgcttccagaccctgttggctctgcacagaagctatctgacgccaggggattccagcagtggatggacggcgggtgcggccgcgtattatgtaggctatctccaaccccgaacgttcttgctgaagtacaatgagaatgggaccattacggatgctgtggattgtgcattggatcctctctctgagacaaaatgcacccttaaaagcttcactgtagaaaagggtatttatcagactagcaacttccgcgtacaaccaacggagtctatcgttaggttccccaacattactaacttgtgcccatttggcgaagtgtttaacgcaactaggtttgctagtgtctatgcttggaatcgaaagagaataagcaattgtgtcgcagattactccgtattgtataattctgcaagcttttcaacattcaagtgctacggagtgtctcccaccaaattgaacgacctgtgttttactaacgtgtatgccgactctttcgttatccgaggcgatgaggtcaggcaaattgcccccggacaaactgggaaaattgcggattataattacaagcttccagacgactttacgggctgtgttatcgcatggaactccaacaatctcgacagcaaagtgggtggaaattataattatttgtatagattgtttcgcaagtccaacctgaagccattcgagagagacatctccaccgagatttatcaagccggctcaactccttgcaacggagtcgaaggcttcaactgttattttccgcttcagtcctatggttttcaacctacgaacggcgtgggataccagccgtatcgagtcgtggtactgtcctttgaacttttgcacgccccagcaactgtttgcggaccaaaaaagtccacaaatctcgtcaaaaacaagtgcgttaattttaattttaacgggcttacgggtactggtgtactgacggagtccaataagaaattcctgccattccaacagtttggacgggatattgctgatacgaccgacgctgtgcgagatccccagacacttgagatcctcgacataaccccctgtagttttggtggagtgtctgtaattacccccggaacgaacaccagcaaccaagttgcggtgctttatcaggatgttaattgcactgaggttcctgtcgcgatacatgccgaccaactgacgcctacatggcgagtatattcaacgggctccaacgtcttccagacgcgagccggttgtctcattggagctgaacatgtgaacaactcttatgaatgcgatataccaattggggcaggtatctgcgcctcttatcagacgcagactaactcacccagacgagcacggagcgtggcaagccaatccattattgcctacaccatgtccttgggagctgagaattcagtcgcctattctaataatagcattgctataccgacgaactttacaatttccgtaactaccgaaatattgcccgtcagtatgactaagactagcgttgactgcacaatgtacatttgcggcgatagtaccgaatgctctaatcttcttctgcagtatggtagtttttgtacacaactgaatcgagctctgactgggatcgcagtcgaacaggacaaaaatacacaggaagttttcgcgcaagtgaagcaaatctacaaaacgcctcccataaaagatttcggaggattcaatttcagtcagatactccctgatccctctaaaccatctaaacgatcctttatcgaagatttgctgttcaacaaggtgacccttgctgacgctggattcataaagcagtacggggattgtcttggcgatatcgcagcccgagaccttatttgtgcccaaaaatttaacggacttacggtactccctccccttctgactgacgaaatgatagcccagtacaccagtgctctgctggctggcaccataacgagcggatggacttttggtgcgggtgcagcactgcagatccccttcgcgatgcaaatggcatacaggtttaatgggattggggtcacccagaatgtattgtacgagaaccagaagcttatagcgaatcaatttaacagtgcaattggtaagattcaggacagcctttcaagtaccgcgagtgctctcgggaagttgcaggatgtagtaaatcaaaatgcgcaggcgctgaatacgttggttaaacagctcagcagtaattttggagcaatttctagcgtgctgaatgacatcctcagcagactcgataaggtggaggctgaggtacagatagatagactcatcacgggcagattgcagagtttgcagacatacgtcacgcaacaactcattcgagcagcagaaattagagcatccgcaaatctggcggccacgaaaatgtctgagtgcgttctggggcagtccaagagagttgacttttgtgggaaaggatatcatctgatgagttttccgcagtcagcgccacatggtgtggtctttctgcacgttacttatgtccccgcacaggagaagaattttacgaccgcgccagctatttgccatgacggtaaggctcacttcccgagggaaggggtattcgtttctaacggtacgcattggtttgttacgcaacggaacttttatgaaccacagattattaccaccgacaacacattcgtaagtggaaactgtgatgtcgttatcggaatagtaaataataccgtttatgacccccttcagcctgaacttgattccttcaaggaagagctcgataaatactttaagaaccacaccagccccgatgttgacctgggtgatatatctgggatcaacgcttctgtcgtcaacattcaaaaagagatcgatcgcctgaatgaggtggccaaaaacctcaatgaaagtctcattgaccttcaagaactcggtaagtacgagcaatacatcaagtggccatggtacatatggctgggcttcattgctgggttgatagctatagtgatggttacgataatgttgtgttgtatgacatcctgctgtagctgccttaaaggttgttgttcttgcggttcttgttgtaagtttgacgaagatgattcagagcctgttctgaaaggggtgaagctccattatactggcggttctggaggtgtccgtgctgaaggacgcgggtcccttctcacctgcggcgacgttgaggaaaaccctggccctatggctgacagcaatggtactattacggtggaagaactgaaaaagctcttggaacagtggaaccttgtgatcggttttctgtttttgacctggatttgcttgctccagttcgcctatgctaatagaaacaggtttctctatataatcaagttgatttttctgtggctgctctggcccgttacgcttgcgtgttttgtcctggctgctgtgtaccggatcaattggatcactggtggcattgctatcgccatggcttgtcttgtcgggctgatgtggctttcctattttatcgcttcatttaggctgtttgctcgaaccagatcaatgtggtcatttaatccagagactaatattctcttgaatgttccgctgcacggaactatcctcacacgacccctgttggagtccgaattggttatcggtgccgtaattctcaggggccaccttagaatcgcgggccaccatttgggacggtgcgatattaaagacctgcccaaagagatcacagtggccacaagtagaacgctctcatactataaactgggagcttcccagagagtggccggggatagtggcttcgcggcatatagtcgctaccgcatcggtaactataaacttaatacggaccatagtagctctagcgataacattgccttgctggttcagtgagtttaaactcccatttaaatgtgagggttaatgcttcgagcagagctcgctgatcagcctcgactgtgccttctagttgccagccatctgttgtttgcccctcccccgtgccttccttgaccctggaaggtgccactcccactgtcctttcctaataaaatgaggaaattgcatcgcattgtctgagtaggtgtcattctattctggggggtggggtggggcaggacagcaagggggaggattgggaagacaatagcaggcatgctggggatgcggtgggctctatggcttctgaggcggaaagaacc

SEQ ID NO: 68 - DNA, 7631 bp, synthetic construct
  misc_feature 1..7631: note = Description of Artificial Sequence: Synthetic polynucleotide
  source 1..7631: mol_type = other DNA
gacattgattattgactagttgttaatagtaatcaattacggggtcattagttcatagcccatatatggagttccgcgttacataacttacggtaaatggcccgcctggctgaccgcccaacgacccccgcccattgacgtcaataatgacgtatgttcccatagtaacgccaatagggactttccattgacgtcaatgggtggagtatttacggtaaactgcccacttggcagtacatcaagtgtatcatatgccaagtccgccccctattgacgtcaatgacggtaaatggcccgcctggcattatgcccagtacatgaccttacgggactttcctacttggcagtacatctacgtattagtcatcgctattaccatggtgatgcggttttggcagtacaccaatgggcgtggatagcggtttgactcacggggatttccaagtctccaccccattgacgtcaatgggagtttgttttggcaccaaaatcaacgggactttccaaaatgtcgtaataaccccgccccgttgacgcaaatgggcggtaggcgtgtacggtgggaggtctatataagcagagctcgtttagtgaaccgtcagatcgcctggaacgccatccacgctgttttgacctccatagaagacagcgatcgcgccaccatgtttgtctttctggtcctgcttcccctcgttagttctcagtgtgtgaacctcaccacacggacgcaactccctccagcttacacaaattcttttacgcgaggcgtgtattatccggataaagttttcaggtcctccgtcctgcactccacgcaggacctttttttgccgttcttttctaacgtaacatggtttcatgccattcatgtttccgggacaaacggtacgaaacgctttgataaccctgtgctgccgttcaatgatggcgtttactttgcctctacggaaaagagtaacataatccgaggctggatcttcgggaccaccctggatagcaagactcagagtcttctcatcgttaataacgctacaaacgttgttatcaaggtgtgtgaattccagttttgcaacgatccctttttgggggtatactatcacaaaaacaataaaagttggatggaatcagagtttcgcgtgtattcttctgcgaacaactgcacgtttgaatacgttagtcagccttttctcatggacttggaaggtaagcaggggaactttaaaaacttgcgggagttcgtttttaagaacatagatggttacttcaaaatttatagcaaacatacaccgatcaacctcgtgagagatctcccacagggtttttccgcactcgaaccgctcgtggatctgccgattggaattaacattacccgcttccagaccctgttggctctgcacagaagctatctgacgccaggggattccagcagtggatggacggcgggtgcggccgcgtattatgtaggctatctccaaccccgaacgttcttgctgaagtacaatgagaatgggaccattacggatgctgtggattgtgcattggatcctctctctgagacaaaatgcacccttaaaagcttcactgtagaaaagggtatttatcagactagcaacttccgcgtacaaccaacggagtctatcgttaggttccccaacattactaacttgtgcccatttggcgaagtgtttaacgcaactaggtttgctagtgtctatgcttggaatcgaaagagaataagcaattgtgtcgcagattactccgtattgtataattctgcaagcttttcaacattcaagtgctacggagtgtctcccaccaaattgaacgacctgtgttttactaacgtgtatgccgactctttcgttatccgaggcgatgaggtcaggcaaattgcccccggacaaactgggaaaattgcggattataattacaagcttccagacgactttacgggctgtgttatcgcatggaactccaacaatctcgacagcaaagtgggtggaaattataattatttgtatagattgtttcgcaagtccaacctgaagccattcgagagagacatctccaccgagatttatcaagccggctcaactccttgcaacggagtcgaaggcttcaactgttattttccgcttcagtcctatggttttcaacctacgaacggcgtgggataccagccgtatcgagtcgtggtactgtcctttgaacttttgcacgccccagcaactgtttgcggaccaaaaaagtccacaaatctcgtcaaaaacaagtgcgttaattttaattttaacgggcttacgggtactggtgtactgacggagtccaataagaaattcctgccattccaacagtttggacgggatattgctgatacgaccgacgctgtgcgagatccccagacacttgagatcctcgacataaccccctgtagttttggtggagtgtctgtaattacccccggaacgaacaccagcaaccaagttgcggtgctttatcaggatgttaattgcactgaggttcctgtcgcgatacatgccgaccaactgacgcctacatggcgagtatattcaacgggctccaacgtcttccagacgcgagccggttgtctcattggagctgaacatgtgaacaactcttatgaatgcgatataccaattggggcaggtatctgcgcctcttatcagacgcagactaactcacccagacgagcacggagcgtggcaagccaatccattattgcctacaccatgtccttgggagctgagaattcagtcgcctattctaataatagcattgctataccgacgaactttacaatttccgtaactaccgaaatattgcccgtcagtatgactaagactagcgttgactgcacaatgtacatttgcggcgatagtaccgaatgctctaatcttcttctgcagtatggtagtttttgtacacaactgaatcgagctctgactgggatcgcagtcgaacaggacaaaaatacacaggaagttttcgcgcaagtgaagcaaatctacaaaacgcctcccataaaagatttcggaggattcaatttcagtcagatactccctgatccctctaaaccatctaaacgatcctttatcgaagatttgctgttcaacaaggtgacccttgctgacgctggattcataaagcagtacggggattgtcttggcgatatcgcagcccgagaccttatttgtgcccaaaaatttaacggacttacggtactccctccccttctgactgacgaaatgatagcccagtacaccagtgctctgctggctggcaccataacgagcggatggacttttggtgcgggtgcagcactgcagatccccttcgcgatgcaaatggcatacaggtttaatgggattggggtcacccagaatgtattgtacgagaaccagaagcttatagcgaatcaatttaacagtgcaattggtaagattcaggacagcctttcaagtaccgcgagtgctctcgggaagttgcaggatgtagtaaatcaaaatgcgcaggcgctgaatacgttggttaaacagctcagcagtaattttggagcaatttctagcgtgctgaatgacatcctcagcagactcgataaggtggaggctgaggtacagatagatagactcatcacgggcagattgcagagtttgcagacatacgtcacgcaacaactcattcgagcagcagaaattagagcatccgcaaatctggcggccacgaaaatgtctgagtgcgttctggggcagtccaagagagttgacttttgtgggaaaggatatcatctgatgagttttccgcagtcagcgccacatggtgtggtctttctgcacgttacttatgtccccgcacaggagaagaattttacgaccgcgccagctatttgccatgacggtaaggctcacttcccgagggaaggggtattcgtttctaacggtacgcattggtttgttacgcaacggaacttttatgaaccacagattattaccaccgacaacacattcgtaagtggaaactgtgatgtcgttatcggaatagtaaataataccgtttatgacccccttcagcctgaacttgattccttcaaggaagagctcgataaatactttaagaaccacaccagccccgatgttgacctgggtgatatatctgggatcaacgcttctgtcgtcaacattcaaaaagagatcgatcgcctgaatgaggtggccaaaaacctcaatgaaagtctcattgaccttcaagaactcggtaagtacgagcaatacatcaagtggccatggtacatatggctgggcttcattgctgggttgatagctatagtgatggttacgataatgttgtgttgtatgacatcctgctgtagctgccttaaaggttgttgttcttgcggttcttgttgtaagtttgacgaagatgattcagagcctgttctgaaaggggtgaagctccattatacttgatgggtttaaactcccatttaaatgtgagggttaatgcttcgagcagacatgataagatacattgatgagtttggacaaaccacaactagaatgcagtgaaaaaaatgctttatttgtgaaatttgtgatgctattgctttatttgtaaccattataagctgcaataaacaagttaacaacaacaattgcattcattttatgtttcaggttcagggggagatgtgggaggttttttaaagcaagtaaaacctctacaaatgtggtaaaataactataacggtcctaaggtagcgagacattgattattgactagttgttaatagtaatcaattacggggtcattagttcatagcccatatatggagttccgcgttacataacttacggtaaatggcccgcctggctgaccgcccaacgacccccgcccattgacgtcaataatgacgtatgttcccatagtaacgccaatagggactttccattgacgtcaatgggtggagtatttacggtaaactgcccacttggcagtacatcaagtgtatcatatgccaagtccgccccctattgacgtcaatgacggtaaatggcccgcctggcattatgcccagtacatgaccttacgggactttcctacttggcagtacatctacgtattagtcatcgctattaccatggtgatgcggttttggcagtacaccaatgggcgtggatagcggtttgactcacggggatttccaagtctccaccccattgacgtcaatgggagtttgttttggcaccaaaatcaacgggactttccaaaatgtcgtaataaccccgccccgttgacgcaaatgggcggtaggcgtgtacggtgggaggtctatataagcagagctcgtttagtgaaccgtcagatcgcctggaacgccatccacgctgttttgacctccatagaagacagcgatcgcgccaccatggctggcacttcccgcaccttgtcctattacaaacttggcgcgagtcaacgggtggcgggtgactccggatttgcggcatattcacgatataggatcgggaattactgcgcagcaggtactacgcagactgcttgcacggatgataacgcgctggcctattacaatacaacaaaaggaggctggccccagatcgcccaattcgccccatcagccagtgctttcttcggcatgagtcgaatcggtatggaagtaacaccctccggcacatggcttacctacactggcgcgataaagctcgatgacaaagaccctaatcctgcgaataacgctgcaattgttctccagcttcctcagggtacgaccctgccaaaaggtttttacgcagagggcggcgtcccaatcaatacgaatagcagcccggacgatcaaataggatactacagaagggccacacggcggatcaggctgtacctctatgcgcttgtctatttcctccagagtattaatttcgtgaggatcatcatgcggttgtggctctgctctacagacgtagtatatcgagcttttgacatttacaatgacaaagtagccgggtttgccaaatttctcaaaaccagacagaagcggacggcaactaaggcttacaatgtgactcaggcgttcgggcggagaggtccggaacagacccaaccttatgtgtgcaatgcaccgggatgtgatgtcacagatgtgactcagctctaccttggagggatgtcctattatgcgtgtctcgtgggcctcatgtggttgtcctatttcatagcatcatttcgattgtttgctcgaacgaggtctatgtggtccttcaatcctgagacgaacatacttctgaatgtcccactccacggcaccatactgactcggccgctccttgaaagtgaactcgtaatcctccttaacaaacacatcgatgcctacaaaacgtttccaccaacggaaccgaagaaggataaaaagaagaaggccgatgaaacgcaggccctgccccaacgccaaaaaaagcagcagacggtcacggttggcgattctgccgaagtagctgtaaagatgtttgacgcctacgtcaatacattctcatcaacctttaatgtgatggatctgtttatgagaattttcactattggaaccgtcactcttaagcagggagaaatcaaagacgcgacaccatctgattttgttagggcaacagccactatccccatacaagccagcttgccatttggatggctgatccttctccaattcgcgtatgctaaccggaatcgctttctctacataataaagctgatcttcctttggcttctctggcccgttttggctgtattccagtcagccagtaagataataactctcaaaaagcggtggcagcttgcacttagtaaaggcgtccatttcgtctgcaatctccttttgctgcatgttatgtctaagcacacagactttagttcagagattattggatacaaagctattgatggtggtgttactagagattgtgtagttctccattcatacttcacgtcagattattatcaactctacagcacgcagctttccacggatacaggcgtagagcatgtgaccttcttcatctataataagatagtcgacgaacctgaggaacatgtccaaattcatacaattgatgggtcctccggcgtatgcaacatcgttaacgtgagccttgtcaaacctagcttctatgtctattctagggttaagaacctgaattcctccagggtccctggacccggaccaggcgccaaatttgttgctgcttggacactgaaagctgctgctgggcccggaccaggccagtacatcaaggccaactctaagtttatcggcatcaccgaattgggacctggacccggctagtgagtttaaactcccatttaaatgtgagggttaatgcttcgagcagacatgataagatacattgatgagtttggacaaaccacaactagaatgcagtgaaaaaaatgctttatttgtgaaatttgtgatgctattgctttatttgtaaccattataagctgcaataaacaagttaacaacaacaattgcattcattttatgtttcaggttcagggggagatgtgggaggttttttaaagcaagtaaaacctctacaaatgtggtaaaa

SEQ ID NO: 69 - DNA, 4752 bp, synthetic construct
  misc_feature 1..4752: note = Description of Artificial Sequence: Synthetic polynucleotide
  source 1..4752: mol_type = other DNA
gacattgattattgactagttgttaatagtaatcaattacggggtcattagttcatagcccatatatggagttccgcgttacataacttacggtaaatggcccgcctggctgaccgcccaacgacccccgcccattgacgtcaataatgacgtatgttcccatagtaacgccaatagggactttccattgacgtcaatgggtggagtatttacggtaaactgcccacttggcagtacatcaagtgtatcatatgccaagtccgccccctattgacgtcaatgacggtaaatggcccgcctggcattatgcccagtacatgaccttacgggactttcctacttggcagtacatctacgtattagtcatcgctattaccatggtgatgcggttttggcagtacaccaatgggcgtggatagcggtttgactcacggggatttccaagtctccaccccattgacgtcaatgggagtttgttttggcaccaaaatcaacgggactttccaaaatgtcgtaataaccccgccccgttgacgcaaatgggcggtaggcgtgtacggtgggaggtctatataagcagagctcgtttagtgaaccgtcagatcgcctggaacgccatccacgctgttttgacctccatagaagacagcgatcgcgccaccatgtttgtctttctggtcctgcttcccctcgttagttctcagtgtgtgaacctcaccacacggacgcaactccctccagcttacacaaattcttttacgcgaggcgtgtattatccggataaagttttcaggtcctccgtcctgcactccacgcaggacctttttttgccgttcttttctaacgtaacatggtttcatgccattcatgtttccgggacaaacggtacgaaacgctttgataaccctgtgctgccgttcaatgatggcgtttactttgcctctacggaaaagagtaacataatccgaggctggatcttcgggaccaccctggatagcaagactcagagtcttctcatcgttaataacgctacaaacgttgttatcaaggtgtgtgaattccagttttgcaacgatccctttttgggggtatactatcacaaaaacaataaaagttggatggaatcagagtttcgcgtgtattcttctgcgaacaactgcacgtttgaatacgttagtcagccttttctcatggacttggaaggtaagcaggggaactttaaaaacttgcgggagttcgtttttaagaacatagatggttacttcaaaatttatagcaaacatacaccgatcaacctcgtgagagatctcccacagggtttttccgcactcgaaccgctcgtggatctgccgattggaattaacattacccgcttccagaccctgttggctctgcacagaagctatctgacgccaggggattccagcagtggatggacggcgggtgcggccgcgtattatgtaggctatctccaaccccgaacgttcttgctgaagtacaatgagaatgggaccattacggatgctgtggattgtgcattggatcctctctctgagacaaaatgcacccttaaaagcttcactgtagaaaagggtatttatcagactagcaacttccgcgtacaaccaacggagtctatcgttaggttccccaacattactaacttgtgcccatttggcgaagtgtttaacgcaactaggtttgctagtgtctatgcttggaatcgaaagagaataagcaattgtgtcgcagattactccgtattgtataattctgcaagcttttcaacattcaagtgctacggagtgtctcccaccaaattgaacgacctgtgttttactaacgtgtatgccgactctttcgttatccgaggcgatgaggtcaggcaaattgcccccggacaaactgggaaaattgcggattataattacaagcttccagacgactttacgggctgtgttatcgcatggaactccaacaatctcgacagcaaagtgggtggaaattataattatttgtatagattgtttcgcaagtccaacctgaagccattcgagagagacatctccaccgagatttatcaagccggctcaactccttgcaacggagtcgaaggcttcaactgttattttccgcttcagtcctatggttttcaacctacgaacggcgtgggataccagccgtatcgagtcgtggtactgtcctttgaacttttgcacgccccagcaactgtttgcggaccaaaaaagtccacaaatctcgtcaaaaacaagtgcgttaattttaattttaacgggcttacgggtactggtgtactgacggagtccaataagaaattcctgccattccaacagtttggacgggatattgctgatacgaccgacgctgtgcgagatccccagacacttgagatcctcgacataaccccctgtagttttggtggagtgtctgtaattacccccggaacgaacaccagcaaccaagttgcggtgctttatcaggatgttaattgcactgaggttcctgtcgcgatacatgccgaccaactgacgcctacatggcgagtatattcaacgggctccaacgtcttccagacgcgagccggttgtctcattggagctgaacatgtgaacaactcttatgaatgcgatataccaattggggcaggtatctgcgcctcttatcagacgcagactaactcacccagacgagcacggagcgtggcaagccaatccattattgcctacaccatgtccttgggagctgagaattcagtcgcctattctaataatagcattgctataccgacgaactttacaatttccgtaactaccgaaatattgcccgtcagtatgactaagactagcgttgactgcacaatgtacatttgcggcgatagtaccgaatgctctaatcttcttctgcagtatggtagtttttgtacacaactgaatcgagctctgactgggatcgcagtcgaacaggacaaaaatacacaggaagttttcgcgcaagtgaagcaaatctacaaaacgcctcccataaaagatttcggaggattcaatttcagtcagatactccctgatccctctaaaccatctaaacgatcctttatcgaagatttgctgttcaacaaggtgacccttgctgacgctggattcataaagcagtacggggattgtcttggcgatatcgcagcccgagaccttatttgtgcccaaaaatttaacggacttacggtactccctccccttctgactgacgaaatgatagcccagtacaccagtgctctgctggctggcaccataacgagcggatggacttttggtgcgggtgcagcactgcagatccccttcgcgatgcaaatggcatacaggtttaatgggattggggtcacccagaatgtattgtacgagaaccagaagcttatagcgaatcaatttaacagtgcaattggtaagattcaggacagcctttcaagtaccgcgagtgctctcgggaagttgcaggatgtagtaaatcaaaatgcgcaggcgctgaatacgttggttaaacagctcagcagtaattttggagcaatttctagcgtgctgaatgacatcctcagcagactcgataaggtggaggctgaggtacagatagatagactcatcacgggcagattgcagagtttgcagacatacgtcacgcaacaactcattcgagcagcagaaattagagcatccgcaaatctggcggccacgaaaatgtctgagtgcgttctggggcagtccaagagagttgacttttgtgggaaaggatatcatctgatgagttttccgcagtcagcgccacatggtgtggtctttctgcacgttacttatgtccccgcacaggagaagaattttacgaccgcgccagctatttgccatgacggtaaggctcacttcccgagggaaggggtattcgtttctaacggtacgcattggtttgttacgcaacggaacttttatgaaccacagattattaccaccgacaacacattcgtaagtggaaactgtgatgtcgttatcggaatagtaaataataccgtttatgacccccttcagcctgaacttgattccttcaaggaagagctcgataaatactttaagaaccacaccagccccgatgttgacctgggtgatatatctgggatcaacgcttctgtcgtcaacattcaaaaagagatcgatcgcctgaatgaggtggccaaaaacctcaatgaaagtctcattgaccttcaagaactcggtaagtacgagcaatacatcaagtggccatggtacatatggctgggcttcattgctgggttgatagctatagtgatggttacgataatgttgtgttgtatgacatcctgctgtagctgccttaaaggttgttgttcttgcggttcttgttgtaagtttgacgaagatgattcagagcctgttctgaaaggggtgaagctccattatacttgatgggtttaaactcccatttaaatgtgagggttaatgcttcgagcagacatgataagatacattgatgagtttggacaaaccacaactagaatgcagtgaaaaaaatgctttatttgtgaaatttgtgatgctattgctttatttgtaaccattataagctgcaataaacaagttaacaacaacaattgcattcattttatgtttcaggttcagggggagatgtgggaggttttttaaagcaagtaaaacctctacaaatgtggtaaaa

SEQ ID NO: 70 - DNA, 4752 bp, synthetic construct
  misc_feature 1..4752: note = Description of Artificial Sequence: Synthetic polynucleotide
  source 1..4752: mol_type = other DNA
gacattgattattgactagttgttaatagtaatcaattacggggtcattagttcatagcccatatatggagttccgcgttacataacttacggtaaatggcccgcctggctgaccgcccaacgacccccgcccattgacgtcaataatgacgtatgttcccatagtaacgccaatagggactttccattgacgtcaatgggtggagtatttacggtaaactgcccacttggcagtacatcaagtgtatcatatgccaagtccgccccctattgacgtcaatgacggtaaatggcccgcctggcattatgcccagtacatgaccttacgggactttcctacttggcagtacatctacgtattagtcatcgctattaccatggtgatgcggttttggcagtacaccaatgggcgtggatagcggtttgactcacggggatttccaagtctccaccccattgacgtcaatgggagtttgttttggcaccaaaatcaacgggactttccaaaatgtcgtaataaccccgccccgttgacgcaaatgggcggtaggcgtgtacggtgggaggtctatataagcagagctcgtttagtgaaccgtcagatcgcctggaacgccatccacgctgttttgacctccatagaagacagcgatcgcgccaccatgtttgtctttctggtcctgcttcccctcgttagttctcagtgtgtgaacctcaccacacggacgcaactccctccagcttacacaaattcttttacgcgaggcgtgtattatccggataaagttttcaggtcctccgtcctgcactccacgcaggacctttttttgccgttcttttctaacgtaacatggtttcatgccattcatgtttccgggacaaacggtacgaaacgctttgataaccctgtgctgccgttcaatgatggcgtttactttgcctctacggaaaagagtaacataatccgaggctggatcttcgggaccaccctggatagcaagactcagagtcttctcatcgttaataacgctacaaacgttgttatcaaggtgtgtgaattccagttttgcaacgatccctttttgggggtatactatcacaaaaacaataaaagttggatggaatcagagtttcgcgtgtattcttctgcgaacaactgcacgtttgaatacgttagtcagccttttctcatggacttggaaggtaagcaggggaactttaaaaacttgcgggagttcgtttttaagaacatagatggttacttcaaaatttatagcaaacatacaccgatcaacctcgtgagagatctcccacagggtttttccgcactcgaaccgctcgtggatctgccgattggaattaacattacccgcttccagaccctgttggctctgcacagaagctatctgacgccaggggattccagcagtggatggacggcgggtgcggccgcgtattatgtaggctatctccaaccccgaacgttcttgctgaagtacaatgagaatgggaccattacggatgctgtggattgtgcattggatcctctctctgagacaaaatgcacccttaaaagcttcactgtagaaaagggtatttatcagactagcaacttccgcgtacaaccaacggagtctatcgttaggttccccaacattactaacttgtgcccatttggcgaagtgtttaacgcaactaggtttgctagtgtctatgcttggaatcgaaagagaataagcaattgtgtcgcagattactccgtattgtataattctgcaagcttttcaacattcaagtgctacggagtgtctcccaccaaattgaacgacctgtgttttactaacgtgtatgccgactctttcgttatccgaggcgatgaggtcaggcaaattgcccccggacaaactgggaaaattgcggattataattacaagcttccagacgactttacgggctgtgttatcgcatggaactccaacaatctcgacagcaaagtgggtggaaattataattatttgtatagattgtttcgcaagtccaacctgaagccattcgagagagacatctccaccgagatttatcaagccggctcaactccttgcaacggagtcgaaggcttcaactgttattttccgcttcagtcctatggttttcaacctacgaacggcgtgggataccagccgtatcgagtcgtggtactgtcctttgaacttttgcacgccccagcaactgtttgcggaccaaaaaagtccacaaatctcgtcaaaaacaagtgcgttaattttaattttaacgggcttacgggtactggtgtactgacggagtccaataagaaattcctgccattccaacagtttggacgggatattgctgatacgaccgacgctgtgcgagatccccagacacttgagatcctcgacataaccccctgtagttttggtggagtgtctgtaattacccccggaacgaacaccagcaaccaagttgcggtgctttatcagggtgttaattgcactgaggttcctgtcgcgatacatgccgaccaactgacgcctacatggcgagtatattcaacgggctccaacgtcttccagacgcgagccggttgtctcattggagctgaacatgtgaacaactcttatgaatgcgatataccaattggggcaggtatctgcgcctcttatcagacgcagactaactcacccgtacgagcacggagcgtggcaagccaatccattattgcctacaccatgtccttgggagctgagaattcagtcgcctattctaataatagcattgctataccgacgaactttacaatttccgtaactaccgaaatattgcccgtcagtatgactaagactagcgttgactgcacaatgtacatttgcggcgatagtaccgaatgctctaatcttcttctgcagtatggtagtttttgtacacaactgaatcgagctctgactgggatcgcagtcgaacaggacaaaaatacacaggaagttttcgcgcaagtgaagcaaatctacaaaacgcctcccataaaagatttcggaggattcaatttcagtcagatactccctgatccctctaaaccatctaaaaactcctttatcgaagatttgctgttcaacaaggtgacccttgctgacgctggattcataaagcagtacggggattgtcttggcgatatcgcagcccgagaccttatttgtgcccaaaaatttaacggacttacggtactccctccccttctgactgacgaaatgatagcccagtacaccagtgctctgctggctggcaccataacgagcggatggacttttggtgcgggtgcagcactgcagatccccttcgcgatgcaaatggcatacaggtttaatgggattggggtcacccagaatgtattgtacgagaaccagaagcttatagcgaatcaatttaacagtgcaattggtaagattcaggacagcctttcaagtaccgcgagtgctctcgggaagttgcaggatgtagtaaatcaaaatgcgcaggcgctgaatacgttggttaaacagctcagcagtaattttggagcaatttctagcgtgctgaatgacatcctcagcagactcgatcccccagaggctgaggtacagatagatagactcatcacgggcagattgcagagtttgcagacatacgtcacgcaacaactcattcgagcagcagaaattagagcatccgcaaatctggcggccacgaaaatgtctgagtgcgttctggggcagtccaagagagttgacttttgtgggaaaggatatcatctgatgagttttccgcagtcagcgccacatggtgtggtctttctgcacgttacttatgtccccgcacaggagaagaattttacgaccgcgccagctatttgccatgacggtaaggctcacttcccgagggaaggggtattcgtttctaacggtacgcattggtttgttacgcaacggaacttttatgaaccacagattattaccaccgacaacacattcgtaagtggaaactgtgatgtcgttatcggaatagtaaataataccgtttatgacccccttcagcctgaacttgattccttcaaggaagagctcgataaatactttaagaaccacaccagccccgatgttgacctgggtgatatatctgggatcaacgcttctgtcgtcaacattcaaaaagagatcgatcgcctgaatgaggtggccaaaaacctcaatgaaagtctcattgaccttcaagaactcggtaagtacgagcaatacatcaagtggccatggtacatatggctgggcttcattgctgggttgatagctatagtgatggttacgataatgttgtgttgtatgacatcctgctgtagctgccttaaaggttgttgttcttgcggttcttgttgtaagtttgacgaagatgattcagagcctgttctgaaaggggtgaagctccattatacttgataagtttaaactcccatttaaatgtgagggttaatgcttcgagcagacatgataagatacattgatgagtttggacaaaccacaactagaatgcagtgaaaaaaatgctttatttgtgaaatttgtgatgctattgctttatttgtaaccattataagctgcaataaacaagttaacaacaacaattgcattcattttatgtttcaggttcagggggagatgtgggaggttttttaaagcaagtaaaacctctacaaatgtggtaaaa

SEQ ID NO: 71 - DNA, 7922 bp, synthetic construct
  misc_feature 1..7922: note = Description of Artificial Sequence: Synthetic polynucleotide
  source 1..7922: mol_type = other DNA
gacattgattattgactagttgttaatagtaatcaattacggggtcattagttcatagcccatatatggagttccgcgttacataacttacggtaaatggcccgcctggctgaccgcccaacgacccccgcccattgacgtcaataatgacgtatgttcccatagtaacgccaatagggactttccattgacgtcaatgggtggagtatttacggtaaactgcccacttggcagtacatcaagtgtatcatatgccaagtccgccccctattgacgtcaatgacggtaaatggcccgcctggcattatgcccagtacatgaccttacgggactttcctacttggcagtacatctacgtattagtcatcgctattaccatggtgatgcggttttggcagtacaccaatgggcgtggatagcggtttgactcacggggatttccaagtctccaccccattgacgtcaatgggagtttgttttggcaccaaaatcaacgggactttccaaaatgtcgtaataaccccgccccgttgacgcaaatgggcggtaggcgtgtacggtgggaggtctatataagcagagctcgtttagtgaaccgtcagatcgcctggaacgccatccacgctgttttgacctccatagaagacagcgatcgcgccaccatgtttgtctttctggtcctgcttcccctcgttagttctcagtgtgtgaacctcaccacacggacgcaactccctccagcttacacaaattcttttacgcgaggcgtgtattatccggataaagttttcaggtcctccgtcctgcactccacgcaggacctttttttgccgttcttttctaacgtaacatggtttcatgccattcatgtttccgggacaaacggtacgaaacgctttgataaccctgtgctgccgttcaatgatggcgtttactttgcctctacggaaaagagtaacataatccgaggctggatcttcgggaccaccctggatagcaagactcagagtcttctcatcgttaataacgctacaaacgttgttatcaaggtgtgtgaattccagttttgcaacgatccctttttgggggtatactatcacaaaaacaataaaagttggatggaatcagagtttcgcgtgtattcttctgcgaacaactgcacgtttgaatacgttagtcagccttttctcatggacttggaaggtaagcaggggaactttaaaaacttgcgggagttcgtttttaagaacatagatggttacttcaaaatttatagcaaacatacaccgatcaacctcgtgagagatctcccacagggtttttccgcactcgaaccgctcgtggatctgccgattggaattaacattacccgcttccagaccctgttggctctgcacagaagctatctgacgccaggggattccagcagtggatggacggcgggtgcggccgcgtattatgtaggctatctccaaccccgaacgttcttgctgaagtacaatgagaatgggaccattacggatgctgtggattgtgcattggatcctctctctgagacaaaatgcacccttaaaagcttcactgtagaaaagggtatttatcagactagcaacttccgcgtacaaccaacggagtctatcgttaggttccccaacattactaacttgtgcccatttggcgaagtgtttaacgcaactaggtttgctagtgtctatgcttggaatcgaaagagaataagcaattgtgtcgcagattactccgtattgtataattctgcaagcttttcaacattcaagtgctacggagtgtctcccaccaaattgaacgacctgtgttttactaacgtgtatgccgactctttcgttatccgaggcgatgaggtcaggcaaattgcccccggacaaactgggaaaattgcggattataattacaagcttccagacgactttacgggctgtgttatcgcatggaactccaacaatctcgacagcaaagtgggtggaaattataattatttgtatagattgtttcgcaagtccaacctgaagccattcgagagagacatctccaccgagatttatcaagccggctcaactccttgcaacggagtcgaaggcttcaactgttattttccgcttcagtcctatggttttcaacctacgaacggcgtgggataccagccgtatcgagtcgtggtactgtcctttgaacttttgcacgccccagcaactgtttgcggaccaaaaaagtccacaaatctcgtcaaaaacaagtgcgttaattttaattttaacgggcttacgggtactggtgtactgacggagtccaataagaaattcctgccattccaacagtttggacgggatattgctgatacgaccgacgctgtgcgagatccccagacacttgagatcctcgacataaccccctgtagttttggtggagtgtctgtaattacccccggaacgaacaccagcaaccaagttgcggtgctttatcaggatgttaattgcactgaggttcctgtcgcgatacatgccgaccaactgacgcctacatggcgagtatattcaacgggctccaacgtcttccagacgcgagccggttgtctcattggagctgaacatgtgaacaactcttatgaatgcgatataccaattggggcaggtatctgcgcctcttatcagacgcagactaactcacccagacgagcacggagcgtggcaagccaatccattattgcctacaccatgtccttgggagctgagaattcagtcgcctattctaataatagcattgctataccgacgaactttacaatttccgtaactaccgaaatattgcccgtcagtatgactaagactagcgttgactgcacaatgtacatttgcggcgatagtaccgaatgctctaatcttcttctgcagtatggtagtttttgtacacaactgaatcgagctctgactgggatcgcagtcgaacaggacaaaaatacacaggaagttttcgcgcaagtgaagcaaatctacaaaacgcctcccataaaagatttcggaggattcaatttcagtcagatactccctgatccctctaaaccatctaaacgatcctttatcgaagatttgctgttcaacaaggtgacccttgctgacgctggattcataaagcagtacggggattgtcttggcgatatcgcagcccgagaccttatttgtgcccaaaaatttaacggacttacggtactccctccccttctgactgacgaaatgatagcccagtacaccagtgctctgctggctggcaccataacgagcggatggacttttggtgcgggtgcagcactgcagatccccttcgcgatgcaaatggcatacaggtttaatgggattggggtcacccagaatgtattgtacgagaaccagaagcttatagcgaatcaatttaacagtgcaattggtaagattcaggacagcctttcaagtaccgcgagtgctctcgggaagttgcaggatgtagtaaatcaaaatgcgcaggcgctgaatacgttggttaaacagctcagcagtaattttggagcaatttctagcgtgctgaatgacatcctcagcagactcgataaggtggaggctgaggtacagatagatagactcatcacgggcagattgcagagtttgcagacatacgtcacgcaacaactcattcgagcagcagaaattagagcatccgcaaatctggcggccacgaaaatgtctgagtgcgttctggggcagtccaagagagttgacttttgtgggaaaggatatcatctgatgagttttccgcagtcagcgccacatggtgtggtctttctgcacgttacttatgtccccgcacaggagaagaattttacgaccgcgccagctatttgccatgacggtaaggctcacttcccgagggaaggggtattcgtttctaacggtacgcattggtttgttacgcaacggaacttttatgaaccacagattattaccaccgacaacacattcgtaagtggaaactgtgatgtcgttatcggaatagtaaataataccgtttatgacccccttcagcctgaacttgattccttcaaggaagagctcgataaatactttaagaaccacaccagccccgatgttgacctgggtgatatatctgggatcaacgcttctgtcgtcaacattcaaaaagagatcgatcgcctgaatgaggtggccaaaaacctcaatgaaagtctcattgaccttcaagaactcggtaagtacgagcaatacatcaagtggccatggtacatatggctgggcttcattgctgggttgatagctatagtgatggttacgataatgttgtgttgtatgacatcctgctgtagctgccttaaaggttgttgttcttgcggttcttgttgtaagtttgacgaagatgattcagagcctgttctgaaaggggtgaagctccattatactggtggaagcggtgggttcgggcagagggcagaggctcactgctcacgtgtggtgatgtagaagagaatccaggtcctatgtactcattcgtatccgaggagaccggcacgttgatcgttaattctgtattgttgtttctcgcttttgtggtatttctccttgttacgcttgcgattcttaccgcccttcgcctctgtgcttactgctgcaacattgtgaatgtctccctcgtgaagccctccttttatgtttactccagagtgaaaaacctcaatagctccagggttccagacctgctggtgtgataaagacatgataagatacattgatgagtttggacaaaccacaactagaatgcagtgaaaaaaatgctttatttgtgaaatttgtgatgctattgctttatttgtaaccattataagctgcaataaacaagttaacaacaacaattgcattcattttatgtttcaggttcagggggagatgtgggaggttttttaaagcaagtaaaacctctacaaatgtggtaaaaggcacgtcgacgttagacattgattattgactagttgttaatagtaatcaattacggggtcattagttcatagcccatatatggagttccgcgttacataacttacggtaaatggcccgcctggctgaccgcccaacgacccccgcccattgacgtcaataatgacgtatgttcccatagtaacgccaatagggactttccattgacgtcaatgggtggagtatttacggtaaactgcccacttggcagtacatcaagtgtatcatatgccaagtccgccccctattgacgtcaatgacggtaaatggcccgcctggcattatgcccagtacatgaccttacgggactttcctacttggcagtacatctacgtattagtcatcgctattaccatggtgatgcggttttggcagtacaccaatgggcgtggatagcggtttgactcacggggatttccaagtctccaccccattgacgtcaatgggagtttgttttggcaccaaaatcaacgggactttccaaaatgtcgtaataaccccgccccgttgacgcaaatgggcggtaggcgtgtacggtgggaggtctatataagcagagctcgtttagtgaaccgtcagatcactcttctggtccccacagactcagagagaacccagtttaaacgccaccatgtcagataatgggcctcagaaccagcggaatgcccccaggatcacgttcggtgggccttcagattcaactggaagcaatcagaacggggaaagatccggtgcaaggtccaagcaacgccgaccccagggattgcctaataatacagcaagttggtttactgcactgacccaacacgggaaagaggaccttaaatttccgcgggggcaaggagtacctataaacactaatagcagccccgatgaccaaattgggtactaccgcagagcaacccggcgaatcagagggggtgacggtaagatgaaggacctctcccccaggtggtacttctactatttgggaacggggccagaagccggactgccctacggcgcaaacaaagacggtataatatgggtcgccactgagggcgctctgaatacgccaaaagatcacattggtactagaaacccggcgaacaatgcggcaattgtgcttcagctccctcaaggaacaacgttgccaaaaggattttacgcagagggatcacgggggggttcccaggctagttctcgcagttcctcaaggagtcgaaattccagtaggaactcaaccccaggctcaagccgcgggacttcacctgcaagaatggccggtaacgggggagacgctgctttggctcttcttctccttgatcgccttaatcagcttgagtctaagatgtctggtaaaggccaacagcaacaaggacagacggtaacgaaaaaatccgccgccgaggcctctaaaaaaccgagacaaaaacggactgctacgaaagcgtataacgtcactcaggcttttggtaggcggggcccggaacaaacccagggtaattttggcgatcaggaactgattagacaaggcaccgactacaagcactggcctcagatcgcgcagtttgcaccctccgcttcagcgttcttcgggatgtcacgcatcgggatggaggttacaccgagtggaacatggctgacatatactggtgcaatcaagctggacgacaaggatcccaacttcaaagatcaagttatactcctcaacaaacatatcgatgcgtataagacattccccccgacggaacccaaaaaagataaaaaaaagaaggccgacgagacccaagccctcccacaacgacaaaagaaacaacaaacagtaacactgctcccagccgcagacttggatgatttctccaaacagttgcagcaatctatgagttcagccgatagtactcaggccggcggttctggaggtgtccgtgctgaaggacgcgggtcccttctcacctgcggcgacgttgaggaaaaccctggccctatggctgacagcaatggtactattacggtggaagaactgaaaaagctcttggaacagtggaaccttgtgatcggttttctgtttttgacctggatttgcttgctccagttcgcctatgctaatagaaacaggtttctctatataatcaagttgatttttctgtggctgctctggcccgttacgcttgcgtgttttgtcctggctgctgtgtaccggatcaattggatcactggtggcattgctatcgccatggcttgtcttgtcgggctgatgtggctttcctattttatcgcttcatttaggctgtttgctcgaaccagatcaatgtggtcatttaatccagagactaatattctcttgaatgttccgctgcacggaactatcctcacacgacccctgttggagtccgaattggttatcggtgccgtaattctcaggggccaccttagaatcgcgggccaccatttgggacggtgcgatattaaagacctgcccaaagagatcacagtggccacaagtagaacgctctcatactataaactgggagcttcccagagagtggccggggatagtggcttcgcggcatatagtcgctaccgcatcggtaactataaacttaatacggaccatagtagctctagcgataacattgccttgctggttcagtgatagatttaaatctgtgccttctagttgccagccatctgttgtttgcccctcccccgtgccttccttgaccctggaaggtgccactcccactgtcctttcctaataaaatgaggaaattgcatcgcattgtctgagtaggtgtcattctattctggggggtggggtggggcaggacagcaagggggaggattgggaagacaatagcaggcatgctggggatgcggtgggctctatgg

SEQ ID NO: 72 - DNA, 7619 bp, synthetic construct
  misc_feature 1..7619: note = Description of Artificial Sequence: Synthetic polynucleotide
  source 1..7619: mol_type = other DNA
gacattgattattgactagttgttaatagtaatcaattacggggtcattagttcatagcccatatatggagttccgcgttacataacttacggtaaatggcccgcctggctgaccgcccaacgacccccgcccattgacgtcaataatgacgtatgttcccatagtaacgccaatagggactttccattgacgtcaatgggtggagtatttacggtaaactgcccacttggcagtacatcaagtgtatcatatgccaagtccgccccctattgacgtcaatgacggtaaatggcccgcctggcattatgcccagtacatgaccttacgggactttcctacttggcagtacatctacgtattagtcatcgctattaccatggtgatgcggttttggcagtacaccaatgggcgtggatagcggtttgactcacggggatttccaagtctccaccccattgacgtcaatgggagtttgttttggcaccaaaatcaacgggactttccaaaatgtcgtaataaccccgccccgttgacgcaaatgggcggtaggcgtgtacggtgggaggtctatataagcagagctcgtttagtgaaccgtcagatcgcctggaacgccatccacgctgttttgacctccatagaagacagcgatcgcgccaccatgtttgtctttctggtcctgcttcccctcgttagttctcagtgtgtgaacctcaccacacggacgcaactccctccagcttacacaaattcttttacgcgaggcgtgtattatccggataaagttttcaggtcctccgtcctgcactccacgcaggacctttttttgccgttcttttctaacgtaacatggtttcatgccattcatgtttccgggacaaacggtacgaaacgctttgataaccctgtgctgccgttcaatgatggcgtttactttgcctctacggaaaagagtaacataatccgaggctggatcttcgggaccaccctggatagcaagactcagagtcttctcatcgttaataacgctacaaacgttgttatcaaggtgtgtgaattccagttttgcaacgatccctttttgggggtatactatcacaaaaacaataaaagttggatggaatcagagtttcgcgtgtattcttctgcgaacaactgcacgtttgaatacgttagtcagccttttctcatggacttggaaggtaagcaggggaactttaaaaacttgcgggagttcgtttttaagaacatagatggttacttcaaaatttatagcaaacatacaccgatcaacctcgtgagagatctcccacagggtttttccgcactcgaaccgctcgtggatctgccgattggaattaacattacccgcttccagaccctgttggctctgcacagaagctatctgacgccaggggattccagcagtggatggacggcgggtgcggccgcgtattatgtaggctatctccaaccccgaacgttcttgctgaagtacaatgagaatgggaccattacggatgctgtggattgtgcattggatcctctctctgagacaaaatgcacccttaaaagcttcactgtagaaaagggtatttatcagactagcaacttccgcgtacaaccaacggagtctatcgttaggttccccaacattactaacttgtgcccatttggcgaagtgtttaacgcaactaggtttgctagtgtctatgcttggaatcgaaagagaataagcaattgtgtcgcagattactccgtattgtataattctgcaagcttttcaacattcaagtgctacggagtgtctcccaccaaattgaacgacctgtgttttactaacgtgtatgccgactctttcgttatccgaggcgatgaggtcaggcaaattgcccccggacaaactgggaaaattgcggattataattacaagcttccagacgactttacgggctgtgttatcgcatggaactccaacaatctcgacagcaaagtgggtggaaattataattatttgtatagattgtttcgcaagtccaacctgaagccattcgagagagacatctccaccgagatttatcaagccggctcaactccttgcaacggagtcgaaggcttcaactgttattttccgcttcagtcctatggttttcaacctacgaacggcgtgggataccagccgtatcgagtcgtggtactgtcctttgaacttttgcacgccccagcaactgtttgcggaccaaaaaagtccacaaatctcgtcaaaaacaagtgcgttaattttaattttaacgggcttacgggtactggtgtactgacggagtccaataagaaattcctgccattccaacagtttggacgggatattgctgatacgaccgacgctgtgcgagatccccagacacttgagatcctcgacataaccccctgtagttttggtggagtgtctgtaattacccccggaacgaacaccagcaaccaagttgcggtgctttatcaggatgttaattgcactgaggttcctgtcgcgatacatgccgaccaactgacgcctacatggcgagtatattcaacgggctccaacgtcttccagacgcgagccggttgtctcattggagctgaacatgtgaacaactcttatgaatgcgatataccaattggggcaggtatctgcgcctcttatcagacgcagactaactcacccagacgagcacggagcgtggcaagccaatccattattgcctacaccatgtccttgggagctgagaattcagtcgcctattctaataatagcattgctataccgacgaactttacaatttccgtaactaccgaaatattgcccgtcagtatgactaagactagcgttgactgcacaatgtacatttgcggcgatagtaccgaatgctctaatcttcttctgcagtatggtagtttttgtacacaactgaatcgagctctgactgggatcgcagtcgaacaggacaaaaatacacaggaagttttcgcgcaagtgaagcaaatctacaaaacgcctcccataaaagatttcggaggattcaatttcagtcagatactccctgatccctctaaaccatctaaacgatcctttatcgaagatttgctgttcaacaaggtgacccttgctgacgctggattcataaagcagtacggggattgtcttggcgatatcgcagcccgagaccttatttgtgcccaaaaatttaacggacttacggtactccctccccttctgactgacgaaatgatagcccagtacaccagtgctctgctggctggcaccataacgagcggatggacttttggtgcgggtgcagcactgcagatccccttcgcgatgcaaatggcatacaggtttaatgggattggggtcacccagaatgtattgtacgagaaccagaagcttatagcgaatcaatttaacagtgcaattggtaagattcaggacagcctttcaagtaccgcgagtgctctcgggaagttgcaggatgtagtaaatcaaaatgcgcaggcgctgaatacgttggttaaacagctcagcagtaattttggagcaatttctagcgtgctgaatgacatcctcagcagactcgataaggtggaggctgaggtacagatagatagactcatcacgggcagattgcagagtttgcagacatacgtcacgcaacaactcattcgagcagcagaaattagagcatccgcaaatctggcggccacgaaaatgtctgagtgcgttctggggcagtccaagagagttgacttttgtgggaaaggatatcatctgatgagttttccgcagtcagcgccacatggtgtggtctttctgcacgttacttatgtccccgcacaggagaagaattttacgaccgcgccagctatttgccatgacggtaaggctcacttcccgagggaaggggtattcgtttctaacggtacgcattggtttgttacgcaacggaacttttatgaaccacagattattaccaccgacaacacattcgtaagtggaaactgtgatgtcgttatcggaatagtaaataataccgtttatgacccccttcagcctgaacttgattccttcaaggaagagctcgataaatactttaagaaccacaccagccccgatgttgacctgggtgatatatctgggatcaacgcttctgtcgtcaacattcaaaaagagatcgatcgcctgaatgaggtggccaaaaacctcaatgaaagtctcattgaccttcaagaactcggtaagtacgagcaatacatcaagtggccatggtacatatggctgggcttcattgctgggttgatagctatagtgatggttacgataatgttgtgttgtatgacatcctgctgtagctgccttaaaggttgttgttcttgcggttcttgttgtaagtttgacgaagatgattcagagcctgttctgaaaggggtgaagctccattatacttgaggagacatgataagatacattgatgagtttggacaaaccacaactagaatgcagtgaaaaaaatgctttatttgtgaaatttgtgatgctattgctttatttgtaaccattataagctgcaataaacaagttaacaacaacaattgcattcattttatgtttcaggttcagggggagatgtgggaggttttttaaagcaagtaaaacctctacaaatgtggtaaaaggcacgtcgacgttagacattgattattgactagttgttaatagtaatcaattacggggtcattagttcatagcccatatatggagttccgcgttacataacttacggtaaatggcccgcctggctgaccgcccaacgacccccgcccattgacgtcaataatgacgtatgttcccatagtaacgccaatagggactttccattgacgtcaatgggtggagtatttacggtaaactgcccacttggcagtacatcaagtgtatcatatgccaagtccgccccctattgacgtcaatgacggtaaatggcccgcctggcattatgcccagtacatgaccttacgggactttcctacttggcagtacatctacgtattagtcatcgctattaccatggtgatgcggttttggcagtacaccaatgggcgtggatagcggtttgactcacggggatttccaagtctccaccccattgacgtcaatgggagtttgttttggcaccaaaatcaacgggactttccaaaatgtcgtaataaccccgccccgttgacgcaaatgggcggtaggcgtgtacggtgggaggtctatataagcagagctcgtttagtgaaccgtcagatcactcttctggtccccacagactcagagagaacccagtttaaacgccaccatgtcagataatgggcctcagaaccagcggaatgcccccaggatcacgttcggtgggccttcagattcaactggaagcaatcagaacggggaaagatccggtgcaaggtccaagcaacgccgaccccagggattgcctaataatacagcaagttggtttactgcactgacccaacacgggaaagaggaccttaaatttccgcgggggcaaggagtacctataaacactaatagcagccccgatgaccaaattgggtactaccgcagagcaacccggcgaatcagagggggtgacggtaagatgaaggacctctcccccaggtggtacttctactatttgggaacggggccagaagccggactgccctacggcgcaaacaaagacggtataatatgggtcgccactgagggcgctctgaatacgccaaaagatcacattggtactagaaacccggcgaacaatgcggcaattgtgcttcagctccctcaaggaacaacgttgccaaaaggattttacgcagagggatcacgggggggttcccaggctagttctcgcagttcctcaaggagtcgaaattccagtaggaactcaaccccaggctcaagccgcgggacttcacctgcaagaatggccggtaacgggggagacgctgctttggctcttcttctccttgatcgccttaatcagcttgagtctaagatgtctggtaaaggccaacagcaacaaggacagacggtaacgaaaaaatccgccgccgaggcctctaaaaaaccgagacaaaaacggactgctacgaaagcgtataacgtcactcaggcttttggtaggcggggcccggaacaaacccagggtaattttggcgatcaggaactgattagacaaggcaccgactacaagcactggcctcagatcgcgcagtttgcaccctccgcttcagcgttcttcgggatgtcacgcatcgggatggaggttacaccgagtggaacatggctgacatatactggtgcaatcaagctggacgacaaggatcccaacttcaaagatcaagttatactcctcaacaaacatatcgatgcgtataagacattccccccgacggaacccaaaaaagataaaaaaaagaaggccgacgagacccaagccctcccacaacgacaaaagaaacaacaaacagtaacactgctcccagccgcagacttggatgatttctccaaacagttgcagcaatctatgagttcagccgatagtactcaggccggcggttctggaggtgtccgtgctgaaggacgcgggtcccttctcacctgcggcgacgttgaggaaaaccctggccctatggctgacagcaatggtactattacggtggaagaactgaaaaagctcttggaacagtggaaccttgtgatcggttttctgtttttgacctggatttgcttgctccagttcgcctatgctaatagaaacaggtttctctatataatcaagttgatttttctgtggctgctctggcccgttacgcttgcgtgttttgtcctggctgctgtgtaccggatcaattggatcactggtggcattgctatcgccatggcttgtcttgtcgggctgatgtggctttcctattttatcgcttcatttaggctgtttgctcgaaccagatcaatgtggtcatttaatccagagactaatattctcttgaatgttccgctgcacggaactatcctcacacgacccctgttggagtccgaattggttatcggtgccgtaattctcaggggccaccttagaatcgcgggccaccatttgggacggtgcgatattaaagacctgcccaaagagatcacagtggccacaagtagaacgctctcatactataaactgggagcttcccagagagtggccggggatagtggcttcgcggcatatagtcgctaccgcatcggtaactataaacttaatacggaccatagtagctctagcgataacattgccttgctggttcagtgatagatttaaatctgtgccttctagttgccagccatctgttgtttgcccctcccccgtgccttccttgaccctggaaggtgccactcccactgtcctttcctaataaaatgaggaaattgcatcgcattgtctgagtaggtgtcattctattctggggggtggggtggggcaggacagcaagggggaggattgggaagacaatagcaggcatgctggggatgcggtgggctctatgg

SEQ ID NO: 73 - DNA, 4484 bp, synthetic construct
  misc_feature 1..4484: note = Description of Artificial Sequence: Synthetic polynucleotide
  source 1..4484: mol_type = other DNA
gacattgattattgactagttgttaatagtaatcaattacggggtcattagttcatagcccatatatggagttccgcgttacataacttacggtaaatggcccgcctggctgaccgcccaacgacccccgcccattgacgtcaataatgacgtatgttcccatagtaacgccaatagggactttccattgacgtcaatgggtggagtatttacggtaaactgcccacttggcagtacatcaagtgtatcatatgccaagtccgccccctattgacgtcaatgacggtaaatggcccgcctggcattatgcccagtacatgaccttacgggactttcctacttggcagtacatctacgtattagtcatcgctattaccatggtgatgcggttttggcagtacaccaatgggcgtggatagcggtttgactcacggggatttccaagtctccaccccattgacgtcaatgggagtttgttttggcaccaaaatcaacgggactttccaaaatgtcgtaataaccccgccccgttgacgcaaatgggcggtaggcgtgtacggtgggaggtctatataagcagagctcgtttagtgaaccgtcagatcgcctggaacgccatccacgctgttttgacctccatagaagacagcgatcgcgccaccatgtttgtctttctggtcctgcttcccctcgttagttctcagtgtgtgaacctcaccacacggacgcaactccctccagcttacacaaattcttttacgcgaggcgtgtattatccggataaagttttcaggtcctccgtcctgcactccacgcaggacctttttttgccgttcttttctaacgtaacatggtttcatgccattcatgtttccgggacaaacggtacgaaacgctttgataaccctgtgctgccgttcaatgatggcgtttactttgcctctacggaaaagagtaacataatccgaggctggatcttcgggaccaccctggatagcaagactcagagtcttctcatcgttaataacgctacaaacgttgttatcaaggtgtgtgaattccagttttgcaacgatccctttttgggggtatactatcacaaaaacaataaaagttggatggaatcagagtttcgcgtgtattcttctgcgaacaactgcacgtttgaatacgttagtcagccttttctcatggacttggaaggtaagcaggggaactttaaaaacttgcgggagttcgtttttaagaacatagatggttacttcaaaatttatagcaaacatacaccgatcaacctcgtgagagatctcccacagggtttttccgcactcgaaccgctcgtggatctgccgattggaattaacattacccgcttccagaccctgttggctctgcacagaagctatctgacgccaggggattccagcagtggatggacggcgggtgcggccgcgtattatgtaggctatctccaaccccgaacgttcttgctgaagtacaatgagaatgggaccattacggatgctgtggattgtgcattggatcctctctctgagacaaaatgcacccttaaaagcttcactgtagaaaagggtatttatcagactagcaacttccgcgtacaaccaacggagtctatcgttaggttccccaacattactaacttgtgcccatttggcgaagtgtttaacgcaactaggtttgctagtgtctatgcttggaatcgaaagagaataagcaattgtgtcgcagattactccgtattgtataattctgcaagcttttcaacattcaagtgctacggagtgtctcccaccaaattgaacgacctgtgttttactaacgtgtatgccgactctttcgttatccgaggcgatgaggtcaggcaaattgcccccggacaaactgggaaaattgcggattataattacaagcttccagacgactttacgggctgtgttatcgcatggaactccaacaatctcgacagcaaagtgggtggaaattataattatttgtatagattgtttcgcaagtccaacctgaagccattcgagagagacatctccaccgagatttatcaagccggctcaactccttgcaacggagtcgaaggcttcaactgttattttccgcttcagtcctatggttttcaacctacgaacggcgtgggataccagccgtatcgagtcgtggtactgtcctttgaacttttgcacgccccagcaactgtttgcggaccaaaaaagtccacaaatctcgtcaaaaacaagtgcgttaattttaattttaacgggcttacgggtactggtgtactgacggagtccaataagaaattcctgccattccaacagtttggacgggatattgctgatacgaccgacgctgtgcgagatccccagacacttgagatcctcgacataaccccctgtagttttggtggagtgtctgtaattacccccggaacgaacaccagcaaccaagttgcggtgctttatcaggatgttaattgcactgaggttcctgtcgcgatacatgccgaccaactgacgcctacatggcgagtatattcaacgggctccaacgtcttccagacgcgagccggttgtctcattggagctgaacatgtgaacaactcttatgaatgcgatataccaattggggcaggtatctgcgcctcttatcagacgcagactaactcacccagacgagcacggagcgtggcaagccaatccattattgcctacaccatgtccttgggagctgagaattcagtcgcctattctaataatagcattgctataccgacgaactttacaatttccgtaactaccgaaatattgcccgtcagtatgactaagactagcgttgactgcacaatgtacatttgcggcgatagtaccgaatgctctaatcttcttctgcagtatggtagtttttgtacacaactgaatcgagctctgactgggatcgcagtcgaacaggacaaaaatacacaggaagttttcgcgcaagtgaagcaaatctacaaaacgcctcccataaaagatttcggaggattcaatttcagtcagatactccctgatccctctaaaccatctaaacgatcctttatcgaagatttgctgttcaacaaggtgacccttgctgacgctggattcataaagcagtacggggattgtcttggcgatatcgcagcccgagaccttatttgtgcccaaaaatttaacggacttacggtactccctccccttctgactgacgaaatgatagcccagtacaccagtgctctgctggctggcaccataacgagcggatggacttttggtgcgggtgcagcactgcagatccccttcgcgatgcaaatggcatacaggtttaatgggattggggtcacccagaatgtattgtacgagaaccagaagcttatagcgaatcaatttaacagtgcaattggtaagattcaggacagcctttcaagtaccgcgagtgctctcgggaagttgcaggatgtagtaaatcaaaatgcgcaggcgctgaatacgttggttaaacagctcagcagtaattttggagcaatttctagcgtgctgaatgacatcctcagcagactcgataaggtggaggctgaggtacagatagatagactcatcacgggcagattgcagagtttgcagacatacgtcacgcaacaactcattcgagcagcagaaattagagcatccgcaaatctggcggccacgaaaatgtctgagtgcgttctggggcagtccaagagagttgacttttgtgggaaaggatatcatctgatgagttttccgcagtcagcgccacatggtgtggtctttctgcacgttacttatgtccccgcacaggagaagaattttacgaccgcgccagctatttgccatgacggtaaggctcacttcccgagggaaggggtattcgtttctaacggtacgcattggtttgttacgcaacggaacttttatgaaccacagattattaccaccgacaacacattcgtaagtggaaactgtgatgtcgttatcggaatagtaaataataccgtttatgacccccttcagcctgaacttgattccttcaaggaagagctcgataaatactttaagaaccacaccagccccgatgttgacctgggtgatatatctgggatcaacgcttctgtcgtcaacattcaaaaagagatcgatcgcctgaatgaggtggccaaaaacctcaatgaaagtctcattgaccttcaagaactcggtaagtacgagcaatacatcaagtggccatggtacatatggctgggcttcattgctgggttgatagctatagtgatggttacgataatgttgtgttgtatgacatcctgctgtagctgccttaaaggttgttgttcttgcggttcttgttgtaagtttgacgaagatgattcagagcctgttctgaaaggggtgaagctccattatacttga

SEQ ID NO: 74 - DNA, 8641 bp, synthetic construct
  misc_feature 1..8641: note = Description of Artificial Sequence: Synthetic polynucleotide
  source 1..8641: mol_type = other DNA
gacattgattattgactagttgttaatagtaatcaattacggggtcattagttcatagcccatatatggagttccgcgttacataacttacggtaaatggcccgcctggctgaccgcccaacgacccccgcccattgacgtcaataatgacgtatgttcccatagtaacgccaatagggactttccattgacgtcaatgggtggagtatttacggtaaactgcccacttggcagtacatcaagtgtatcatatgccaagtccgccccctattgacgtcaatgacggtaaatggcccgcctggcattatgcccagtacatgaccttacgggactttcctacttggcagtacatctacgtattagtcatcgctattaccatggtgatgcggttttggcagtacaccaatgggcgtggatagcggtttgactcacggggatttccaagtctccaccccattgacgtcaatgggagtttgttttggcaccaaaatcaacgggactttccaaaatgtcgtaataaccccgccccgttgacgcaaatgggcggtaggcgtgtacggtgggaggtctatataagcagagctcgtttagtgaaccgtcagatcgcctggaacgccatccacgctgttttgacctccatagaagacagcgatcgcgccaccatgtttgtctttctggtcctgcttcccctcgttagttctcagtgtgtgaacctcaccacacggacgcaactccctccagcttacacaaattcttttacgcgaggcgtgtattatccggataaagttttcaggtcctccgtcctgcactccacgcaggacctttttttgccgttcttttctaacgtaacatggtttcatgccattcatgtttccgggacaaacggtacgaaacgctttgataaccctgtgctgccgttcaatgatggcgtttactttgcctctacggaaaagagtaacataatccgaggctggatcttcgggaccaccctggatagcaagactcagagtcttctcatcgttaataacgctacaaacgttgttatcaaggtgtgtgaattccagttttgcaacgatccctttttgggggtatactatcacaaaaacaataaaagttggatggaatcagagtttcgcgtgtattcttctgcgaacaactgcacgtttgaatacgttagtcagccttttctcatggacttggaaggtaagcaggggaactttaaaaacttgcgggagttcgtttttaagaacatagatggttacttcaaaatttatagcaaacatacaccgatcaacctcgtgagagatctcccacagggtttttccgcactcgaaccgctcgtggatctgccgattggaattaacattacccgcttccagaccctgttggctctgcacagaagctatctgacgccaggggattccagcagtggatggacggcgggtgcggccgcgtattatgtaggctatctccaaccccgaacgttcttgctgaagtacaatgagaatgggaccattacggatgctgtggattgtgcattggatcctctctctgagacaaaatgcacccttaaaagcttcactgtagaaaagggtatttatcagactagcaacttccgcgtacaaccaacggagtctatcgttaggttccccaacattactaacttgtgcccatttggcgaagtgtttaacgcaactaggtttgctagtgtctatgcttggaatcgaaagagaataagcaattgtgtcgcagattactccgtattgtataattctgcaagcttttcaacattcaagtgctacggagtgtctcccaccaaattgaacgacctgtgttttactaacgtgtatgccgactctttcgttatccgaggcgatgaggtcaggcaaattgcccccggacaaactgggaaaattgcggattataattacaagcttccagacgactttacgggctgtgttatcgcatggaactccaacaatctcgacagcaaagtgggtggaaattataattatttgtatagattgtttcgcaagtccaacctgaagccattcgagagagacatctccaccgagatttatcaagccggctcaactccttgcaacggagtcgaaggcttcaactgttattttccgcttcagtcctatggttttcaacctacgaacggcgtgggataccagccgtatcgagtcgtggtactgtcctttgaacttttgcacgccccagcaactgtttgcggaccaaaaaagtccacaaatctcgtcaaaaacaagtgcgttaattttaattttaacgggcttacgggtactggtgtactgacggagtccaataagaaattcctgccattccaacagtttggacgggatattgctgatacgaccgacgctgtgcgagatccccagacacttgagatcctcgacataaccccctgtagttttggtggagtgtctgtaattacccccggaacgaacaccagcaaccaagttgcggtgctttatcaggatgttaattgcactgaggttcctgtcgcgatacatgccgaccaactgacgcctacatggcgagtatattcaacgggctccaacgtcttccagacgcgagccggttgtctcattggagctgaacatgtgaacaactcttatgaatgcgatataccaattggggcaggtatctgcgcctcttatcagacgcagactaactcacccagacgagcacggagcgtggcaagccaatccattattgcctacaccatgtccttgggagctgagaattcagtcgcctattctaataatagcattgctataccgacgaactttacaatttccgtaactaccgaaatattgcccgtcagtatgactaagactagcgttgactgcacaatgtacatttgcggcgatagtaccgaatgctctaatcttcttctgcagtatggtagtttttgtacacaactgaatcgagctctgactgggatcgcagtcgaacaggacaaaaatacacaggaagttttcgcgcaagtgaagcaaatctacaaaacgcctcccataaaagatttcggaggattcaatttcagtcagatactccctgatccctctaaaccatctaaacgatcctttatcgaagatttgctgttcaacaaggtgacccttgctgacgctggattcataaagcagtacggggattgtcttggcgatatcgcagcccgagaccttatttgtgcccaaaaatttaacggacttacggtactccctccccttctgactgacgaaatgatagcccagtacaccagtgctctgctggctggcaccataacgagcggatggacttttggtgcgggtgcagcactgcagatccccttcgcgatgcaaatggcatacaggtttaatgggattggggtcacccagaatgtattgtacgagaaccagaagcttatagcgaatcaatttaacagtgcaattggtaagattcaggacagcctttcaagtaccgcgagtgctctcgggaagttgcaggatgtagtaaatcaaaatgcgcaggcgctgaatacgttggttaaacagctcagcagtaattttggagcaatttctagcgtgctgaatgacatcctcagcagactcgataaggtggaggctgaggtacagatagatagactcatcacgggcagattgcagagtttgcagacatacgtcacgcaacaactcattcgagcagcagaaattagagcatccgcaaatctggcggccacgaaaatgtctgagtgcgttctggggcagtccaagagagttgacttttgtgggaaaggatatcatctgatgagttttccgcagtcagcgccacatggtgtggtctttctgcacgttacttatgtccccgcacaggagaagaattttacgaccgcgccagctatttgccatgacggtaaggctcacttcccgagggaaggggtattcgtttctaacggtacgcattggtttgttacgcaacggaacttttatgaaccacagattattaccaccgacaacacattcgtaagtggaaactgtgatgtcgttatcggaatagtaaataataccgtttatgacccccttcagcctgaacttgattccttcaaggaagagctcgataaatactttaagaaccacaccagccccgatgttgacctgggtgatatatctgggatcaacgcttctgtcgtcaacattcaaaaagagatcgatcgcctgaatgaggtggccaaaaacctcaatgaaagtctcattgaccttcaagaactcggtaagtacgagcaatacatcaagtggccatggtacatatggctgggcttcattgctgggttgatagctatagtgatggttacgataatgttgtgttgtatgacatcctgctgtagctgccttaaaggttgttgttcttgcggttcttgttgtaagtttgacgaagatgattcagagcctgttctgaaaggggtgaagctccattatactggtggaagcggtggggttcgggcagagggcagaggctcactgctcacgtgtggtgatgtagaagagaatccaggtcctatgtactcattcgtatccgaggagaccggcacgttgatcgttaattctgtattgttgtttctcgcttttgtggtatttctccttgttacgcttgcgattcttaccgcccttcgcctctgtgcttactgctgcaacattgtgaatgtctccctcgtgaagccctccttttatgtttactccagagtgaaaaacctcaatagctccagggttccagacctgctggtgggcggttctggaggtgtccgtgctgaaggacgcgggtcccttctcacctgcggcgacgttgaggaaaaccctggccctatggctgacagcaatggtactattacggtggaagaactgaaaaagctcttggaacagtggaaccttgtgatcggttttctgtttttgacctggatttgcttgctccagttcgcctatgctaatagaaacaggtttctctatataatcaagttgatttttctgtggctgctctggcccgttacgcttgcgtgttttgtcctggctgctgtgtaccggatcaattggatcactggtggcattgctatcgccatggcttgtcttgtcgggctgatgtggctttcctattttatcgcttcatttaggctgtttgctcgaaccagatcaatgtggtcatttaatccagagactaatattctcttgaatgttccgctgcacggaactatcctcacacgacccctgttggagtccgaattggttatcggtgccgtaattctcaggggccaccttagaatcgcgggccaccatttgggacggtgcgatattaaagacctgcccaaagagatcacagtggccacaagtagaacgctctcatactataaactgggagcttcccagagagtggccggggatagtggcttcgcggcatatagtcgctaccgcatcggtaactataaacttaatacggaccatagtagctctagcgataacattgccttgctggttcagtgataaagacatgataagatacattgatgagtttggacaaaccacaactagaatgcagtgaaaaaaatgctttatttgtgaaatttgtgatgctattgctttatttgtaaccattataagctgcaataaacaagttaacaacaacaattgcattcattttatgtttcaggttcagggggagatgtgggaggttttttaaagcaagtaaaacctctacaaatgtggtaaaaggcacgtcgacgttagacattgattattgactagttgttaatagtaatcaattacggggtcattagttcatagcccatatatggagttccgcgttacataacttacggtaaatggcccgcctggctgaccgcccaacgacccccgcccattgacgtcaataatgacgtatgttcccatagtaacgccaatagggactttccattgacgtcaatgggtggagtatttacggtaaactgcccacttggcagtacatcaagtgtatcatatgccaagtccgccccctattgacgtcaatgacggtaaatggcccgcctggcattatgcccagtacatgaccttacgggactttcctacttggcagtacatctacgtattagtcatcgctattaccatggtgatgcggttttggcagtacaccaatgggcgtggatagcggtttgactcacggggatttccaagtctccaccccattgacgtcaatgggagtttgttttggcaccaaaatcaacgggactttccaaaatgtcgtaataaccccgccccgttgacgcaaatgggcggtaggcgtgtacggtgggaggtctatataagcagagctcgtttagtgaaccgtcagatcactcttctggtccccacagactcagagagaacccagtttaaacgccaccatggctggcacttcccgcaccttgtcctattacaaacttggcgcgagtcaacgggtggcgggtgactccggatttgcggcatattcacgatataggatcgggaattactgcgcagcaggtactacgcagactgcttgcacggatgataacgcgctggcctattacaatacaacaaaaggaggctggccccagatcgcccaattcgccccatcagccagtgctttcttcggcatgagtcgaatcggtatggaagtaacaccctccggcacatggcttacctacactggcgcgataaagctcgatgacaaagaccctaatcctgcgaataacgctgcaattgttctccagcttcctcagggtacgaccctgccaaaaggtttttacgcagagggcggcgtcccaatcaatacgaatagcagcccggacgatcaaataggatactacagaagggccacacggcggatcaggctgtacctctatgcgcttgtctatttcctccagagtattaatttcgtgaggatcatcatgcggttgtggctctgctctacagacgtagtatatcgagcttttgacatttacaatgacaaagtagccgggtttgccaaatttctcaaaaccagacagaagcggacggcaactaaggcttacaatgtgactcaggcgttcgggcggagaggtccggaacagacccaaccttatgtgtgcaatgcaccgggatgtgatgtcacagatgtgactcagctctaccttggagggatgtcctattatgcgtgtctcgtgggcctcatgtggttgtcctatttcatagcatcatttcgattgtttgctcgaacgaggtctatgtggtccttcaatcctgagacgaacatacttctgaatgtcccactccacggcaccatactgactcggccgctccttgaaagtgaactcgtaatcctccttaacaaacacatcgatgcctacaaaacgtttccaccaacggaaccgaagaaggataaaaagaagaaggccgatgaaacgcaggccctgccccaacgccaaaaaaagcagcagacggtcacggttggcgattctgccgaagtagctgtaaagatgtttgacgcctacgtcaatacattctcatcaacctttaatgtgatggatctgtttatgagaattttcactattggaaccgtcactcttaagcagggagaaatcaaagacgcgacaccatctgattttgttagggcaacagccactatccccatacaagccagcttgccatttggatggctgatccttctccaattcgcgtatgctaaccggaatcgctttctctacataataaagctgatcttcctttggcttctctggcccgttttggctgtattccagtcagccagtaagataataactctcaaaaagcggtggcagcttgcacttagtaaaggcgtccatttcgtctgcaatctccttttgctgcatgttatgtctaagcacacagactttagttcagagattattggatacaaagctattgatggtggtgttactagagattgtgtagttctccattcatacttcacgtcagattattatcaactctacagcacgcagctttccacggatacaggcgtagagcatgtgaccttcttcatctataataagatagtcgacgaacctgaggaacatgtccaaattcatacaattgatgggtcctccggcgtatgcaacatcgttaacgtgagccttgtcaaacctagcttctatgtctattctagggttaagaacctgaattcctccagggtccctggacccggaccaggcgccaaatttgttgctgcttggacactgaaagctgctgctgggcccggaccaggccagtacatcaaggccaactctaagtttatcggcatcaccgaattgggacctggacccggctagtgagtttaaactcccatttaaatgtgagggttaatgcttcgagcagagctcgctgatcagcctcgactgtgccttctagttgccagccatctgttgtttgcccctcccccgtgccttccttgaccctggaaggtgccactcccactgtcctttcctaataaaatgaggaaattgcatcgcattgtctgagtaggtgtcattctattctggggggtggggtggggcaggacagcaagggggaggattgggaagacaatagcaggcatgctggggatgcggtgggctctatgg

SEQ ID NO: 75 - DNA, 28278 bp, synthetic construct
  misc_feature 1..28278: note = Description of Artificial Sequence: Synthetic polynucleotide
  source 1..28278: mol_type = other DNA
catcttcaataatatacctcaaactttttgtgcgcgttaatatgcaaatgaggcgtttgaatttggggaggaagggcggtgattggtcgagggatgagcgaccgttaggggcggggcgagtgacgttttgatgacgtggttgcgaggaggagccagtttgcaagttctcgtgggaaaagtgacgtcaaacgaggtgtggtttgaacacggaaatactcaattttcccgcgctctctgacaggaaatgaggtgtttctgggcggatgcaagtgaaaacgggccattttcgcgcgaaaactgaatgaggaagtgaaaatctgagtaatttcgcgtttatggcagggaggagtatttgccgagggccgagtagactttgaccgattacgtgggggtttcgattaccgtgtttttcacctaaatttccgcgtacggtgtcaaagtccggtgtttttacgtaggtgtcagctgatcgccagggtatttaaacctgcgctctccagtcaagaggccactcttgagtgccagcgagaagagttttctcctccgcgccgcgagtcagatctacactttgaaagtagggataaggtagcgagtgagtagtgttctggggcgggggaggacctgcatgagggccagaataactgaaatctgtgcttttctgtgtgttgcagcagcatgagcggaagcggctcctttgagggaggggtattcagcccttatctgacggggcgtctcccctcctgggcgggagtgcgtcagaatgtgatgggatccacggtggacggccggcccgtgcagcccgcgaactcttcaaccctgacctatgcaaccctgagctcttcgtcgttggacgcagctgccgccgcagctgctgcatctgccgccagcgccgtgcgcggaatggccatgggcgccggctactacggcactctggtggccaactcgagttccaccaataatcccgccagcctgaacgaggagaagctgttgctgctgatggcccagctcgaggccttgacccagcgcctgggcgagctgacccagcaggtggctcagctgcaggagcagacgcgggccgcggttgccacggtgaaatccaaataaaaaatgaatcaataaataaacggagacggttgttgattttaacacagagtctgaatctttatttgatttttcgcgcgcggtaggccctggaccaccggtctcgatcattgagcacccggtggatcttttccaggacccggtagaggtgggcttggatgttgaggtacatgggcatgagcccgtcccgggggtggaggtagctccattgcagggcctcgtgctcgggggtggtgttgtaaatcacccagtcatagcaggggcgcagggcatggtgttgcacaatatctttgaggaggagactgatggccacgggcagccctttggtgtaggtgtttacaaatctgttgagctgggagggatgcatgcggggggagatgaggtgcatcttggcctggatcttgagattggcgatgttaccgcccagatcccgcctggggttcatgttgtgcaggaccaccagcacggtgtatccggtgcacttggggaatttatcatgcaacttggaagggaaggcgtgaaagaatttggcgacgcctttgtgcccgcccaggttttccatgcactcatccatgatgatggcgatgggcccgtgggcggcggcctgggcaaagacgtttcgggggtcggacacatcatagttgtggtcctgggtgaggtcatcataggccattttaatgaatttggggcggagggtgccggactgggggacaaaggtaccctcgatcccgggggcgtagttcccctcacagatctgcatctcccaggctttgagctcggagggggggatcatgtccacctgcggggcgataaagaacacggtttccggggcgggggagatgagctgggccgaaagcaagttccggagcagctgggacttgccgcagccggtggggccgtagatgaccccgatgaccggctgcaggtggtagttgagggagagacagctgccgtcctcccggaggaggggggccacctcgttcatcatctcgcgcacgtgcatgttctcgcgcaccagttccgccaggaggcgctctccccccagggataggagctcctggagcgaggcgaagtttttcagcggcttgagtccgtcggccatgggcattttggagagggtttgttgcaagagttccaggcggtcccagagctcggtgatgtgctctacggcatctcgatccagcagacctcctcgtttcgcgggttgggacggctgcgggagtagggcaccagacgatgggcgtccagcgcagccagggtccggtccttccagggtcgcagcgtccgcgtcagggtggtctccgtcacggtgaaggggtgcgcgccgggctgggcgcttgcgagggtgcgcttcaggctcatccggctggtcgaaaaccgctcccgatcggcgccctgcgcgtcggccaggtagcaattgaccatgagttcgtagttgagcgcctcggccgcgtggcctttggcgcggagcttacctttggaagtctgcccgcaggcgggacagaggagggacttgagggcgtagagcttgggggcgaggaagacggactcgggggcgtaggcgtccgcgccgcagtgggcgcagacggtctcgcactccacgagccaggtgaggtcgggctggtcggggtcaaaaaccagtttcccgccgttctttttgatgcgtttcttacctttggtctccatgagctcgtgtccccgctgggtgacaaagaggctgtccgtgtccccgtagaccgactttatgggccggtcctcgagcggtgtgccgcggtcctcctcgtagaggaaccccgcccactccgagacgaaagcccgggtccaggccagcacgaaggaggccacgtgggacgggtagcggtcgttgtccaccagcgggtccaccttttccagggtatgcaaacacatgtccccctcgtccacatccaggaaggtgattggcttgtaagtgtaggccacgtgaccgggggtcccggccgggggggtataaaagggtgcgggtccctgctcgtcctcactgtcttccggatcgctgtccaggagcgccagctgttggggtaggtattccctctcgaaggcgggcatgacctcggcactcaggttgtcagtttctagaaacgaggaggatttgatattgacggtgccggcggagatgcctttcaagagcccctcgtccatctggtcagaaaagacgatctttttgttgtcgagcttggtggcgaaggagccgtagagggcgttggagaggagcttggcgatggagcgcatggtctggtttttttccttgtcggcgcgctccttggcggcgatgttgagctgcacgtactcgcgcgccacgcacttccattcggggaagacggtggtcagctcgtcgggcacgattctgacctgccagccccgattatgcagggtgatgaggtccacactggtggccacctcgccgcgcaggggctcattagtccagcagaggcgtccgcccttgcgcgagcagaaggggggcagggggtccagcatgacctcgtcgggggggtcggcatcgatggtgaagatgccgggcaggaggtcggggtcaaagtagctgatggaagtggccagatcgtccagggcagcttgccattcgcgcacggccagcgcgcgctcgtagggactgaggggcgtgccccagggcatgggatgggtaagcgcggaggcgtacatgccgcagatgtcgtagacgtagaggggctcctcgaggatgccgatgtaggtggggtagcagcgccccccgcggatgctggcgcgcacgtagtcatacagctcgtgcgagggggcgaggagccccgggcccaggttggtgcgactgggcttttcggcgcggtagacgatctggcggaaaatggcatgcgagttggaggagatggtgggcctttggaagatgttgaagtgggcgtggggcagtccgaccgagtcgcggatgaagtgggcgtaggagtcttgcagcttggcgacgagctcggcggtgactaggacgtccagagcgcagtagtcgagggtctcctggatgatgtcatacttgagctgtcccttttgtttccacagctcgcggttgagaaggaactcttcgcggtccttccagtactcttcgagggggaacccgtcctgatctgcacggtaagagcctagcatgtagaactggttgacggccttgtaggcgcagcagcccttctccacggggagggcgtaggcctgggcggccttgcgcagggaggtgtgcgtgagggcgaaagtgtccctgaccatgaccttgaggaactggtgcttgaagtcgatatcgtcgcagcccccctgctcccagagctggaagtccgtgcgcttcttgtaggcggggttgggcaaagcgaaagtaacatcgttgaagaggatcttgcccgcgcggggcataaagttgcgagtgatgcggaaaggttggggcacctcggcccggttgttgatgacctgggcggcgagcacgatctcgtcgaagccgttgatgttgtggcccacgatgtagagttccacgaatcgcggacggcccttgacgtggggcagtttcttgagctcctcgtaggtgagctcgtcggggtcgctgagcccgtgctgctcgagcgcccagtcggcgagatgggggttggcgcggaggaaggaagtccagagatccacggccagggcggtttgcagacggtcccggtactgacggaactgctgcccgacggccattttttcgggggtgacgcagtagaaggtgcgggggtccccgtgccagcgatcccatttgagctggagggcgagatcgagggcgagctcgacgagccggtcgtccccggagagtttcatgaccagcatgaaggggacgagctgcttgccgaaggaccccatccaggtgtaggtttccacatcgtaggtgaggaagagcctttcggtgcgaggatgcgagccgatggggaagaactggatctcctgccaccaattggaggaatggctgttgatgtgatggaagtagaaatgccgacggcgcgccgaacactcgtgcttgtgtttatacaagcggccacagtgctcgcaacgctgcacgggatgcacgtgctgcacgagctgtacctgagttcctttgacgaggaatttcagtgggaagtggagtcgtggcgcctgcatctcgtgctgtactacgtcgtggtggtcggcctggccctcttctgcctcgatggtggtcatgctgacgagcccgcgcgggaggcaggtccagacctcggcgcgagcgggtcggagagcgaggacgagggcgcgcaggccggagctgtccagggtcctgagacgctgcggagtcaggtcagtgggcagcggcggcgcgcggttgacttgcaggagtttttccagggcgcgcgggaggtccagatggtacttgatctccaccgcgccattggtggcgacgtcgatggcttgcagggtcccgtgcccctggggtgtgaccaccgtcccccgtttcttcttgggcggctggggcgacgggggcggtgcctcttccatggttagaagcggcggcgaggacgcgcgccgggcggcaggggcggctcggggcccggaggcaggggcggcaggggcacgtcggcgccgcgcgcgggtaggttctggtactgcgcccggagaagactggcgtgagcgacgacgcgacggttgacgtcctggatctgacgcctctgggtgaaggccacgggacccgtgagtttgaacctgaaagagagttcgacagaatcaatctcggtatcgttgacggcggcctgccgcaggatctcttgcacgtcgcccgagttgtcctggtaggcgatctcggtcatgaactgctcgatctcctcctcttgaaggtctccgcggccggcgcgctccacggtggccgcgaggtcgttggagatgcggcccatgagctgcgagaaggcgttcatgcccgcctcgttccagacgcggctgtagaccacgacgccctcgggatcgcgggcgcgcatgaccacctgggcgaggttgagctccacgtggcgcgtgaagaccgcgtagttgcagaggcgctggtagaggtagttgagcgtggtggcgatgtgctcggtgacgaagaaatacatgatccagcggcggagcggcatctcgctgacgtcgcccagcgcctccaaacgttccatggcctcgtaaaagtccacggcgaagttgaaaaactgggagttgcgcgccgagacggtcaactcctcctccagaagacggatgagctcggcgatggtggcgcgcacctcgcgctcgaaggcccccgggagttcctccacttcctcttcttcctcctccactaacatctcttctacttcctcctcaggcggcagtggtggcgggggagggggcctgcgtcgccggcggcgcacgggcagacggtcgatgaagcgctcgatggtctcgccgcgccggcgtcgcatggtctcggtgacggcgcgcccgtcctcgcggggccgcagcgtgaagacgccgccgcgcatctccaggtggccgggggggtccccgttgggcagggagagggcgctgacgatgcatcttatcaattgccccgtagggactccgcgcaaggacctgagcgtctcgagatccacgggatctgaaaaccgctgaacgaaggcttcgagccagtcgcagtcgcaaggtaggctgagcacggtttcttctggcgggtcatgttggttgggagcggggcgggcgatgctgctggtgatgaagttgaaataggcggttctgagacggcggatggtggcgaggagcaccaggtctttgggcccggcttgctggatgcgcagacggtcggccatgccccaggcgtggtcctgacacctggccaggtccttgtagtagtcctgcatgagccgctccacgggcacctcctcctcgcccgcgcggccgtgcatgcgcgtgagcccgaagccgcgctggggctggacgagcgccaggtcggcgacgacgcgctcggcgaggatggcttgctggatctgggtgagggtggtctggaagtcatcaaagtcgacgaagcggtggtaggctccggtgttgatggtgtaggagcagttggccatgacggaccagttgacggtctggtggcccggacgcacgagctcgtggtacttgaggcgcgagtaggcgcgcgtgtcgaagatgtagtcgttgcaggtgcgcaccaggtactggtagccgatgaggaagtgcggcggcggctggcggtagagcggccatcgctcggtggcgggggcgccgggcgcgaggtcctcgagcatggtgcggtggtagccgtagatgtacctggacatccaggtgatgccggcggcggtggtggaggcgcgcgggaactcgcggacgcggttccagatgttgcgcagcggcaggaagtagttcatggtgggcacggtctggcccgtgaggcgcgcgcagtcgtggatgctctatacgggcaaaaacgaaagcggtcagcggctcgactccgtggcctggaggctaagcgaacgggttgggctgcgcgtgtaccccggttcgaatctcgaatcaggctggagccgcagctaacgtggtattggcactcccgtctcgacccaagcctgcaccaaccctccaggatacggaggcgggtcgttttgcaacttttttttggaggccggatgagactagtaagcgcggaaagcggccgaccgcgatggctcgctgccgtagtctggagaagaatcgccagggttgcgttgcggtgtgccccggttcgaggccggccggattccgcggctaacgagggcgtggctgccccgtcgtttccaagaccccatagccagccgacttctccagttacggagcgagcccctcttttgttttgtttgtttttgccagatgcatcccgtactgcggcagatgcgcccccaccaccctccaccgcaacaacagccccctccacagccggcgcttctgcccccgccccagcagcaacttccagccacgaccgccgcggccgccgtgagcggggctggacagagttatgatcaccagctggccttggaagagggcgaggggctggcgcgcctgggggcgtcgtcgccggagcggcacccgcgcgtgcagatgaaaagggacgctcgcgaggcctacgtgcccaagcagaacctgttcagagacaggagcggcgaggagcccgaggagatgcgcgcggcccggttccacgcggggcgggagctgcggcgcggcctggaccgaaagagggtgctgagggacgaggatttcgaggcggacgagctgacggggatcagccccgcgcgcgcgcacgtggccgcggccaacctggtcacggcgtacgagcagaccgtgaaggaggagagcaacttccaaaaatccttcaacaaccacgtgcgcaccctgatcgcgcgcgaggaggtgaccctgggcctgatgcacctgtgggacctgctggaggccatcgtgcagaaccccaccagcaagccgctgacggcgcagctgttcctggtggtgcagcatagtcgggacaacgaagcgttcagggaggcgctgctgaatatcaccgagcccgagggccgctggctcctggacctggtgaacattctgcagagcatcgtggtgcaggagcgcgggctgccgctgtccgagaagctggcggccatcaacttctcggtgctgagtttgggcaagtactacgctaggaagatctacaagaccccgtacgtgcccatagacaaggaggtgaagatcgacgggttttacatgcgcatgaccctgaaagtgctgaccctgagcgacgatctgggggtgtaccgcaacgacaggatgcaccgtgcggtgagcgccagcaggcggcgcgagctgagcgaccaggagctgatgcatagtctgcagcgggccctgaccggggccgggaccgagggggagagctactttgacatgggcgcggacctgcactggcagcccagccgccgggccttggaggcggcggcaggaccctacgtagaagaggtggacgatgaggtggacgaggagggcgagtacctggaagactgatggcgcgaccgtatttttgctagatgcaacaacaacagccacctcctgatcccgcgatgcgggcggcgctgcagagccagccgtccggcattaactcctcggacgattggacccaggccatgcaacgcatcatggcgctgacgacccgcaaccccgaagcctttagacagcagccccaggccaaccggctctcggccatcctggaggccgtggtgccctcgcgctccaaccccacgcacgagaaggtcctggccatcgtgaacgcgctggtggagaacaaggccatccgcggcgacgaggccggcctggtgtacaacgcgctgctggagcgcgtggcccgctacaacagcaccaacgtgcagaccaacctggaccgcatggtgaccgacgtgcgcgaggccgtggcccagcgcgagcggttccaccgcgagtccaacctgggatccatggtggcgctgaacgccttcctcagcacccagcccgccaacgtgccccggggccaggaggactacaccaacttcatcagcgccctgcgcctgatggtgaccgaggtgccccagagcgaggtgtaccagtccgggccggactacttcttccagaccagtcgccagggcttgcagaccgtgaacctgagccaggctttcaagaacttgcagggcctgtggggcgtgcaggccccggtcggggaccgcgcgacggtgtcgagcctgctgacgccgaactcgcgcctgctgctgctgctggtggcccccttcacggacagcggcagcatcaaccgcaactcgtacctgggctacctgattaacctgtaccgcgaggccatcggccaggcgcacgtggacgagcagacctaccaggagatcacccacgtgagccgcgccctgggccaggacgacccgggcaacctggaagccaccctgaactttttgctgaccaaccggtcgcagaagatcccgccccagtacgcgctcagcaccgaggaggagcgcatcctgcgttacgtgcagcagagcgtgggcctgttcctgatgcaggagggggccacccccagcgccgcgctcgacatgaccgcgcgcaacatggagcccagcatgtacgccagcaaccgcccgttcatcaataaactgatggactacttgcatcgggcggccgccatgaactctgactatttcaccaacgccatcctgaatccccactggctcccgccgccggggttctacacgggcgagtacgacatgcccgaccccaatgacgggttcctgtgggacgatgtggacagcagcgtgttctccccccgaccgggtgctaacgagcgccccttgtggaagaaggaaggcagcgaccgacgcccgtcctcggcgctgtccggccgcgagggtgctgccgcggcggtgcccgaggccgccagtcctttcccgagcttgcccttctcgctgaacagtatccgcagcagcgagctgggcaggatcacgcgcccgcgcttgctgggcgaagaggagtacttgaatgactcgctgttgagacccgagcgggagaagaacttccccaataacgggatagaaagcctggtggacaagatgagccgctggaagacgtatgcgcaggagcacagggacgatccccgggcgtcgcagggggccacgagccggggcagcgccgcccgtaaacgccggtggcacgacaggcagcggggacagatgtgggacgatgaggactccgccgacgacagcagcgtgttggacttgggtgggagtggtaacccgttcgctcacctgcgcccccgtatcgggcgcatgatgtaagagaaaccgaaaataaatgatactcaccaaggccatggcgaccagcgtgcgttcgtttcttctctgttgttgttgtatctagtatgatgaggcgtgcgtacccggagggtcctcctccctcgtacgagagcgtgatgcagcaggcgatggcggcggcggcgatgcagcccccgctggaggctccttacgtgcccccgcggtacctggcgcctacggaggggcggaacagcattcgttactcggagctggcacccttgtacgataccacccggttgtacctggtggacaacaagtcggcggacatcgcctcgctgaactaccagaacgaccacagcaacttcctgaccaccgtggtgcagaacaatgacttcacccccacggaggccagcacccagaccatcaactttgacgagcgctcgcggtggggcggccagctgaaaaccatcatgcacaccaacatgcccaacgtgaacgagttcatgtacagcaacaagttcaaggcgcgggtgatggtctcccgcaagacccccaatggggtgacagtgacagaggattatgatggtagtcaggatgagctgaagtatgaatgggtggaatttgagctgcccgaaggcaacttctcggtgaccatgaccatcgacctgatgaacaacgccatcatcgacaattacttggcggtggggcggcagaacggggtgctggagagcgacatcggcgtgaagttcgacactaggaacttcaggctgggctgggaccccgtgaccgagctggtcatgcccggggtgtacaccaacgaggctttccatcccgatattgtcttgctgcccggctgcggggtggacttcaccgagagccgcctcagcaacctgctgggcattcgcaagaggcagcccttccaggaaggcttccagatcatgtacgaggatctggaggggggcaacatccccgcgctcctggatgtcgacgcctatgagaaaagcaaggaggatgcagcagctgaagcaactgcagccgtagctaccgcctctaccgaggtcaggggcgataattttgcaagcgccgcagcagtggcagcggccgaggcggctgaaaccgaaagtaagatagtcattcagccggtggagaaggatagcaagaacaggagctacaacgtactaccggacaagataaacaccgcctaccgcagctggtacctagcctacaactatggcgaccccgagaagggcgtgcgctcctggacgctgctcaccacctcggacgtcacctgcggcgtggagcaagtctactggtcgctgcccgacatgatgcaagacccggtcaccttccgctccacgcgtcaagttagcaactacccggtggtgggcgccgagctcctgcccgtctactccaagagcttcttcaacgagcaggccgtctactcgcagcagctgcgcgccttcacctcgcttacgcacgtcttcaaccgcttccccgagaaccagatcctcgtccgcccgcccgcgcccaccattaccaccgtcagtgaaaacgttcctgctctcacagatcacgggaccctgccgctgcgcagcagtatccggggagtccagcgcgtgaccgttactgacgccagacgccgcacctgcccctacgtctacaaggccctgggcatagtcgcgccgcgcgtcctctcgagccgcaccttctaaatgtccattctcatctcgcccagtaataacaccggttggggcctgcgcgcgcccagcaagatgtacggaggcgctcgccaacgctccacgcaacaccccgtgcgcgtgcgcgggcacttccgcgctccctggggcgccctcaagggccgcgtgcggtcgcgcaccaccgtcgacgacgtgatcgaccaggtggtggccgacgcgcgcaactacacccccgccgccgcgcccgtctccaccgtggacgccgtcatcgacagcgtggtggccgacgcgcgccggtacgcccgcgccaagagccggcggcggcgcatcgcccggcggcaccggagcacccccgccatgcgcgcggcgcgagccttgctgcgcagggccaggcgcacgggacgcagggccatgctcagggcggccagacgcgcggcttcaggcgccagcgccggcaggacccggagacgcgcggccacggcggcggcagcggccatcgccagcatgtcccgcccgcggcgagggaacgtgtactgggtgcgcgacgccgccaccggtgtgcgcgtgcccgtgcgcacccgcccccctcgcacttgaagatgttcacttcgcgatgttgatgtgtcccagcggcgaggaggatgtccaagcgcaaattcaaggaagagatgctccaggtcatcgcgcctgagatctacggccctgcggtggtgaaggaggaaagaaagccccgcaaaatcaagcgggtcaaaaaggacaaaaaggaagaagaaagtgatgtggacggattggtggagtttgtgcgcgagttcgccccccggcggcgcgtgcagtggcgcgggcggaaggtgcaaccggtgctgagacccggcaccaccgtggtcttcacgcccggcgagcgctccggcaccgcttccaagcgctcctacgacgaggtgtacggggatgatgatattctggagcaggcggccgagcgcctgggcgagtttgcttacggcaagcgcagccgttccgcaccgaaggaagaggcggtgtccatcccgctggaccacggcaaccccacgccgagcctcaagcccgtgaccttgcagcaggtgctgccgaccgcggcgccgcgccgggggttcaagcgcgagggcgaggatctgtaccccaccatgcagctgatggtgcccaagcgccagaagctggaagacgtgctggagaccatgaaggtggacccggacgtgcagcccgaggtcaaggtgcggcccatcaagcaggtggccccgggcctgggcgtgcagaccgtggacatcaagattcccacggagcccatggaaacgcagaccgagcccatgatcaagcccagcaccagcaccatggaggtgcagacggatccctggatgccatcggctcctagtcgaagaccccggcgcaagtacggcgcggccagcctgctgatgcccaactacgcgctgcatccttccatcatccccacgccgggctaccgcggcacgcgcttctaccgcggtcataccagcagccgccgccgcaagaccaccactcgccgccgccgtcgccgcaccgccgctgcaaccacccctgccgccctggtgcggagagtgtaccgccgcggccgcgcacctctgaccctgccgcgcgcgcgctaccacccgagcatcgccatttaaactttcgcctgctttgcagatcaatggccctcacatgccgccttcgcgttcccattacgggctaccgaggaagaaaaccgcgccgtagaaggctggcggggaacgggatgcgtcgccaccaccaccggcggcggcgcgccatcagcaagcggttggggggaggcttcctgcccgcgctgatccccatcatcgccgcggcgatcggggcgatccccggcattgcttccgtggcggtgcaggcctctcagcgccactgagacacacttggaaacatcttgtaataaaccaatggactctgacgctcctggtcctgtgatgtgttttcgtagacagatggaagacatcaatttttcgtccctggctccgcgacacggcacgcggccgttcatgggcacctggagcgacatcggcaccagccaactgaacgggggcgccttcaattggagcagtctctggagcgggcttaagaatttcgggtccacgcttaaaacctatggcagcaaggcgtggaacagcaccacagggcaggcgctgagggataagctgaaagagcagaacttccagcagaaggtggtcgatgggctcgcctcgggcatcaacggggtggtggacctggccaaccaggccgtgcagcggcagatcaacagccgcctggacccggtgccgcccgccggctccgtggagatgccgcaggtggaggaggagctgcctcccctggacaagcggggcgagaagcgaccccgccccgatgcggaggagacgctgctgacgcacacggacgagccgcccccgtacgaggaggcggtgaaactgggtctgcccaccacgcggcccatcgcgcccctggccaccggggtgctgaaacccgaaaagcccgcgaccctggacttgcctcctccccagccttcccgcccctctacagtggctaagcccctgccgccggtggccgtggcccgcgcgcgacccgggggcaccgcccgccctcatgcgaactggcagagcactctgaacagcatcgtgggtctgggagtgcagagtgtgaagcgccgccgctgctattaaacctaccgtagcgcttaacttgcttgtctgtgtgtgtatgtattatgtcgccgccgccgctgtccaccagaaggaggagtgaagaggcgcgtcgccgagttgcaagatggccaccccatcgatgctgccccagtgggcgtacatgcacatcgccggacaggacgcttcggagtacctgagtccgggtctggtgcagtttgcccgcgccacagacacctacttcagtctggggaacaagtttaggaaccccacggtggcgcccacgcacgatgtgaccaccgaccgcagccagcggctgacgctgcgcttcgtgcccgtggaccgcgaggacaacacctactcgtacaaagtgcgctacacgctggccgtgggcgacaaccgcgtgctggacatggccagcacctactttgacatccgcggcgtgctggatcggggccctagcttcaaaccctactccggcaccgcctacaacagtctggcccccaagggagcacccaacacttgtcagtggacatataaagccgatggtgaaactgccacagaaaaaacctatacatatggaaatgcacccgtgcagggcattaacatcacaaaagatggtattcaacttggaactgacaccgatgatcagccaatctacgcagataaaacctatcagcctgaacctcaagtgggtgatgctgaatggcatgacatcactggtactgatgaaaagtatggaggcagagctcttaagcctgataccaaaatgaagccttgttatggttcttttgccaagcctactaataaagaaggaggtcaggcaaatgtgaaaacaggaacaggcactactaaagaatatgacatagacatggctttctttgacaacagaagtgcggctgctgctggcctagctccagaaattgttttgtatactgaaaatgtggatttggaaactccagatacccatattgtatacaaagcaggcacagatgacagcagctcttctattaatttgggtcagcaagccatgcccaacagacctaactacattggtttcagagacaactttatcgggctcatgtactacaacagcactggcaatatgggggtgctggccggtcaggcttctcagctgaatgctgtggttgacttgcaagacagaaacaccgagctgtcctaccagctcttgcttgactctctgggtgacagaacccggtatttcagtatgtggaatcaggcggtggacagctatgatcctgatgtgcgcattattgaaaatcatggtgtggaggatgaacttcccaactattgtttccctctggatgctgttggcagaacagatacttatcagggaattaaggctaatggaactgatcaaaccacatggaccaaagatgacagtgtcaatgatgctaatgagataggcaagggtaatccattcgccatggaaatcaacatccaagccaacctgtggaggaacttcctctacgccaacgtggccctgtacctgcccgactcttacaagtacacgccggccaatgttaccctgcccaccaacaccaacacctacgattacatgaacggccgggtggtggcgccctcgctggtggactcctacatcaacatcggggcgcgctggtcgctggatcccatggacaacgtgaaccccttcaaccaccaccgcaatgcggggctgcgctaccgctccatgctcctgggcaacgggcgctacgtgcccttccacatccaggtgccccagaaatttttcgccatcaagagcctcctgctcctgcccgggtcctacacctacgagtggaacttccgcaaggacgtcaacatgatcctgcagagctccctcggcaacgacctgcgcacggacggggcctccatctccttcaccagcatcaacctctacgccaccttcttccccatggcgcacaacacggcctccacgctcgaggccatgctgcgcaacgacaccaacgaccagtccttcaacgactacctctcggcggccaacatgctctaccccatcccggccaacgccaccaacgtgcccatctccatcccctcgcgcaactgggccgccttccgcggctggtccttcacgcgtctcaagaccaaggagacgccctcgctgggctccgggttcgacccctacttcgtctactcgggctccatcccctacctcgacggcaccttctacctcaaccacaccttcaagaaggtctccatcaccttcgactcctccgtcagctggcccggcaacgaccggctcctgacgcccaacgagttcgaaatcaagcgcaccgtcgacggcgagggctacaacgtggcccagtgcaacatgaccaaggactggttcctggtccagatgctggcccactacaacatcggctaccagggcttctacgtgcccgagggctacaaggaccgcatgtactccttcttccgcaacttccagcccatgagccgccaggtggtggacgaggtcaactacaaggactaccaggccgtcaccctggcctaccagcacaacaactcgggcttcgtcggctacctcgcgcccaccatgcgccagggccagccctaccccgccaactacccctacccgctcatcggcaagagcgccgtcaccagcgtcacccagaaaaagttcctctgcgacagggtcatgtggcgcatccccttctccagcaacttcatgtccatgggcgcgctcaccgacctcggccagaacatgctctatgccaactccgcccacgcgctagacatgaatttcgaagtcgaccccatggatgagtccacccttctctatgttgtcttcgaagtcttcgacgtcgtccgagtgcaccagccccaccgcggcgtcatcgaggccgtctacctgcgcacccccttctcggccggtaacgccaccacctaagctcttgcttcttgcaagccatggccgcgggctccggcgagcaggagctcagggccatcatccgcgacctgggctgcgggccctacttcctgggcaccttcgataagcgcttcccgggattcatggccccgcacaagctggcctgcgccatcgtcaacacggccggccgcgagaccgggggcgagcactggctggccttcgcctggaacccgcgctcgaacacctgctacctcttcgaccccttcgggttctcggacgagcgcctcaagcagatctaccagttcgagtacgagggcctgctgcgccgcagcgccctggccaccgaggaccgctgcgtcaccctggaaaagtccacccagaccgtgcagggtccgcgctcggccgcctgcgggctcttctgctgcatgttcctgcacgccttcgtgcactggcccgaccgccccatggacaagaaccccaccatgaacttgctgacgggggtgcccaacggcatgctccagtcgccccaggtggaacccaccctgcgccgcaaccaggaggcgctctaccgcttcctcaactcccactccgcctactttcgctcccaccgcgcgcgcatcgagaaggccaccgccttcgaccgcatgaatcaagacatgtaaaccgtgtgtgtatgttaaatgtctttaataaacagcactttcatgttacacatgcatctgagatgatttatttagaaatcgaaagggttctgccgggtctcggcatggcccgcgggcagggacacgttgcggaactggtacttggccagccacttgaactcggggatcagcagtttgggcagcggggtgtcggggaaggagtcggtccacagcttccgcgtcagttgcagggcgcccagcaggtcgggcgcggagatcttgaaatcgcagttgggacccgcgttctgcgcgcgggagttgcggtacacggggttgcagcactggaacaccatcagggccgggtgcttcacgctcgccagcaccgtcgcgtcggtgatgctctccacgtcgaggtcctcggcgttggccatcccgaagggggtcatcttgcaggtctgccttcccatggtgggcacgcacccgggcttgtggttgcaatcgcagtgcagggggatcagcatcatctgggcctggtcggcgttcatccccgggtacatggccttcatgaaagcctccaattgcctgaacgcctgctgggccttggctccctcggtgaagaagaccccgcaggacttgctagagaactggttggtggcgcacccggcgtcgtgcacgcagcagcgcgcgtcgttgttggccagctgcaccacgctgcgcccccagcggttctgggtgatcttggcccggtcggggttctccttcagcgcgcgctgcccgttctcgctcgccacatccatctcgatcatgtgctccttctggatcatggtggtcccgtgcaggcaccgcagcttgccctcggcctcggtgcacccgtgcagccacagcgcgcacccggtgcactcccagttcttgtgggcgatctgggaatgcgcgtgcacgaagccctgcaggaagcggcccatcatggtggtcagggtcttgttgctagtgaaggtcagcggaatgccgcggtgctcctcgttgatgtacaggtggcagatgcggcggtacacctcgccctgctcgggcatcagctggaagttggctttcaggtcggtctccacgcggtagcggtccatcagcatagtcatgatttccatacccttctcccaggccgagacgatgggcaggctcatagggttcttcaccatcatcttagcgctagcagccgcggccagggggtcgctctcgtccagggtctcaaagctccgcttgccgtccttctcggtgatccgcaccggggggtagctgaagcccacggccgccagctcctcctcggcctgtctttcgtcctcgctgtcctggctgacgtcctgcaggaccacatgcttggtcttgcggggtttcttcttgggcggcagcggcggcggagatgttggagatggcgagggggagcgcgagttctcgctcaccactactatctcttcctcttcttggtccgaggccacgcggcggtaggtatgtctcttcgggggcagaggcggaggcgacgggctctcgccgccgcgacttggcggatggctggcagagccccttccgcgttcgggggtgcgctcccggcggcgctctgactgacttcctccgcggccggccattgtgttctcctagggaggaacaacaagcatggagactcagccatcgccaacctcgccatctgcccccaccgccgacgagaagcagcagcagcagaatgaaagcttaaccgccccgccgcccagccccgccacctccgacgcggccgtcccagacatgcaagagatggaggaatccatcgagattgacctgggctatgtgacgcccgcggagcacgaggaggagctggcagtgcgcttttcacaagaagagatacaccaagaacagccagagcaggaagcagagaatgagcagagtcaggctgggctcgagcatgacggcgactacctccacctgagcgggggggaggacgcgctcatcaagcatctggcccggcaggccaccatcgtcaaggatgcgctgctcgaccgcaccgaggtgcccctcagcgtggaggagctcagccgcgcctacgagttgaacctcttctcgccgcgcgtgccccccaagcgccagcccaatggcacctgcgagcccaacccgcgcctcaacttctacccggtcttcgcggtgcccgaggccctggccacctaccacatctttttcaagaaccaaaagatccccgtctcctgccgcgccaaccgcacccgcgccgacgcccttttcaacctgggtcccggcgcccgcctacctgatatcgcctccttggaagaggttcccaagatcttcgagggtctgggcagcgacgagactcgggccgcgaacgctctgcaaggagaaggaggagagcatgagcaccacagcgccctggtcgagttggaaggcgacaacgcgcggctggcggtgctcaaacgcacggtcgagctgacccatttcgcctacccggctctgaacctgccccccaaagtcatgagcgcggtcatggaccaggtgctcatcaagcgcgcgtcgcccatctccgaggacgagggcatgcaagactccgaggagggcaagcccgtggtcagcgacgagcagctggcccggtggctgggtcctaatgctagtccccagagtttggaagagcggcgcaaactcatgatggccgtggtcctggtgaccgtggagctggagtgcctgcgccgcttcttcgccgacgcggagaccctgcgcaaggtcgaggagaacctgcactacctcttcaggcacgggttcgtgcgccaggcctgcaagatctccaacgtggagctgaccaacctggtctcctacatgggcatcttgcacgagaaccgcctggggcagaacgtgctgcacaccaccctgcgcggggaggcccggcgcgactacatccgcgactgcgtctacctctacctctgccacacctggcagacgggcatgggcgtgtggcagcagtgtctggaggagcagaacctgaaagagctctgcaagctcctgcagaagaacctcaagggtctgtggaccgggttcgacgagcgcaccaccgcctcggacctggccgacctcattttccccgagcgcctcaggctgacgctgcgcaacggcctgcccgactttatgagccaaagcatgttgcaaaactttcgctctttcatcctcgaacgctccggaatcctgcccgccacctgctccgcgctgccctcggacttcgtgccgctgaccttccgcgagtgccccccgccgctgtggagccactgctacctgctgcgcctggccaactacctggcctaccactcggacgtgatcgaggacgtcagcggcgagggcctgctcgagtgccactgccgctgcaacctctgcacgccgcaccgctccctggcctgcaacccccagctgctgagcgagacccagatcatcggcaccttcgagttgcaagggcccagcgaaggcgagggttcagccgccaaggggggtctgaaactcaccccggggctgtggacctcggcctacttgcgcaagttcgtgcccgaggactaccatcccttcgagatcaggttctacgaggaccaatcccatccgcccaaggccgagctgtcggcctgcgtcatcacccagggggcgatcctggcccaattgcaagccatccagaaatcccgccaagaattcttgctgaaaaagggccgcggggtctacctcgacccccagaccggtgaggagctcaaccccggcttcccccaggatgccccgaggaaacaagaagctgaaagtggagctgccgcccgtggaggatttggaggaagactgggagaacagcagtcaggcagaggaggaggagatggaggaagactgggacagcactcaggcagaggaggacagcctgcaagacagtctggaggaagacgaggaggaggcagaggaggaggtggaagaagcagccgccgccagaccgtcgtcctcggcgggggagaaagcaagcagcacggataccatctccgctccgggtcggggtcccgctcgaccacacagtagatgggacgagaccggacgattcccgaaccccaccacccagaccggtaagaaggagcggcagggatacaagtcctggcgggggcacaaaaacgccatcgtctcctgcttgcaggcctgcgggggcaacatctccttcacccggcgctacctgctcttccaccgcggggtgaactttccccgcaacatcttgcattactaccgtcacctccacagcccctactacttccaagaagaggcagcagcagcagaaaaagaccagcagaaaaccagcagctagaaaatccacagcggcggcagcaggtggactgaggatcgcggcgaacgagccggcgcaaacccgggagctgaggaaccggatctttcccaccctctatgccatcttccagcagagtcgggggcaggagcaggaactgaaagtcaagaaccgttctctgcgctcgctcacccgcagttgtctgtatcacaagagcgaagaccaacttcagcgcactctcgaggacgccgaggctctcttcaacaagtactgcgcgctcactcttaaagagtagcccgcgcccgcccagtcgcagaaaaaggcgggaattacgtcacctgtgcccttcgccctagccgcctccacccatcatcatgagcaaagagattcccacgccttacatgtggagctaccagccccagatgggcctggccgccggtgccgcccaggactactccacccgcatgaattggctcagcgccgggcccgcgatgatctcacgggtgaatgacatccgcgcccaccgaaaccagatactcctagaacagtcagcgctcaccgccacgccccgcaatcacctcaatccgcgtaattggcccgccgccctggtgtaccaggaaattccccagcccacgaccgtactacttccgcgagacgcccaggccgaagtccagctgactaactcaggtgtccagctggcgggcggcgccaccctgtgtcgtcaccgccccgctcagggtataaagcggctggtgatccggggcagaggcacacagctcaacgacgaggtggtgagctcttcgctgggtctgcgacctgacggagtcttccaactcgccggatcggggagatcttccttcacgcctcgtcaggccgtcctgactttggagagttcgtcctcgcagccccgctcgggtggcatcggcactctccagttcgtggaggagttcactccctcggtctacttcaaccccttctccggctcccccggccactacccggacgagttcatcccgaacttcgacgccatcagcgagtcggtggacggctacgattgaaactaatcacccccttatccagtgaaataaagatcatattgatgatgattttacagaaataaaaaataatcatttgatttgaaataaagatacaatcatattgatgatttgagtttaacaaaaaaataaagaatcacttacttgaaatctgataccaggtctctgtccatgttttctgccaacaccacttcactcccctcttcccagctctggtactgcaggccccggcgggctgcaaacttcctccacacgctgaaggggatgtcaaattcctcctgtccctcaatcttcattttatcttctatcagatgtccaaaaagcgcgtccgggtggatgatgacttcgaccccgtctacccctacgatgcagacaacgcaccgaccgtgcccttcatcaacccccccttcgtctcttcagatggattccaagagaagcccctgggggtgttgtccctgcgactggccgaccccgtcaccaccaagaacggggaaatcaccctcaagctgggagagggggtggacctcgattcctcgggaaaactcatctccaacacggccaccaaggccgccgcccctctcagtttttccaacaacaccatttcccttaacatggatcaccccttttacactaaagatggaaaattatccttacaagtttctccaccattaaatatactgagaacaagcattctaaacacactagctttaggttttggatcaggtttaggactccgtggctctgccttggcagtacagttagtctctccacttacatttgatactgatggaaacataaagcttaccttagacagaggtttgcatgttacaacaggagatgcaattgaaagcaacataagctgggctaaaggtttaaaatttgaagatggagccatagcaaccaacattggaaatgggttagagtttggaagcagtagtacagaaacaggtgttgatgatgcttacccaatccaagttaaacttggatctggccttagctttgacagtacaggagccataatggctggtaacaaagaagacgataaactcactttgtggacaacacctgatccatcaccaaactgtcaaatactcgcagaaaatgatgcaaaactaacactttgcttgactaaatgtggtagtcaaatactggccactgtgtcagtcttagttgtaggaagtggaaacctaaaccccattactggcaccgtaagcagtgctcaggtgtttctacgttttgatgcaaacggtgttcttttaacagaacattctacactaaaaaaatactgggggtataggcagggagatagcatagatggcactccatataccaatgctgtaggattcatgcccaatttaaaagcttatccaaagtcacaaagttctactactaaaaataatatagtagggcaagtatacatgaatggagatgtttcaaaacctatgcttctcactataaccctcaatggtactgatgacagcaacagtacatattcaatgtcattttcatacacctggactaatggaagctatgttggagcaacatttggggctaactcttataccttctcatacatcgcccaagaatgaacactgtatcccaccctgcatgccaacccttcccaccccactctgtggaacaaactctgaaacacaaaataaaataaagttcaagtgttttattgattcaacagttttacaggattcgagcagttatttttcctccaccctcccaggacatggaatacaccaccctctccccccgcacagccttgaacatctgaatgccattggtgatggacatgcttttggtctccacgttccacacagtttcagagcgagccagtctcgggtcggtcagggagatgaaaccctccgggcactcccgcatctgcacctcacagctcaacagctgaggattgtcctcggtggtcgggatcacggttatctggaagaagcagaagagcggcggtgggaatcatagtccgcgaacgggatcggccggtggtgtcgcatcaggccccgcagcagtcgctgccgccgccgctccgtcaagctgctgctcagggggtccgggtccagggactccctcagcatgatgcccacggccctcagcatcagtcgtctggtgcggcgggcgcagcagcgcatgcggatctcgctcaggtcgctgcagtacgtgcaacacagaaccaccaggttgttcaacagtccatagttcaacacgctccagccgaaactcatcgcgggaaggatgctacccacgtggccgtcgtaccagatcctcaggtaaatcaagtggtgccccctccagaacacgctgcccacgtacatgatctccttgggcatgtggcggttcaccacctcccggtaccacatcaccctctggttgaacatgcagccccggatgatcctgcggaaccacagggccagcaccgccccgcccgccatgcagcgaagagaccccgggtcccggcaatggcaatggaggacccaccgctcgtacccgtggatcatctgggagctgaacaagtctatgttggcacagcacaggcatatgctcatgcatctcttcagcactctcaactcctcgggggtcaaaaccatatcccagggcacggggaactcttgcaggacagcgaaccccgcagaacagggcaatcctcgcacagaacttacattgtgcatggacagggtatcgcaatcaggcagcaccgggtgatcctccaccagagaagcgcgggtctcggtctcctcacagcgtggtaagggggccggccgatacgggtgatggcgggacgcggctgatcgtgttcgcgaccgtgtcatgatgcagttgctttcggacattttcgtacttgctgtagcagaacctggtccgggcgctgcacaccgatcgccggcggcggtctcggcgcttggaacgctcggtgttgaaattgtaaaacagccactctctcagaccgtgcagcagatctagggcctcaggagtgatgaagatcccatcatgcctgatggctctgatcacatcgaccaccgtggaatgggccagacccagccagatgatgcaattttgttgggtttcggtgacggcgagcctcgggaacaacgatgaagtaaatgcaagcggtgcgttccagcatggttagttagctgatctgtagaaaaaacaaaaatgaacattaaaccatgctagcctggcgaacaggtgggtaaatcgttctctccagcaccaggcaggccacggggtctccggcgcgaccctcgtaaaaattgtcgctatgattgaaaaccatcacagagagacgttcccggtggccggcgtgaatgattcgacaagatgaatacacccccggaacattggcgtccgcgagtgaaaaaaagcgcccgaggaagcaataaggcactacaatgctcagtctcaagtccagcaaagcgatgccatgcggatgaagcacaaaattctcaggtgcgtacaaaatgtaattactcccctcctgcacaggcagcaaagcccccgatccctccaggtacacatacaaagcctcagcgtccatagcttaccgagcagcagcacacaacaggcgcaagagtcagagaaaggctgagctctaacctgtccacccgctctctgctcaatatatagcccagatctacactgacgtaaaggccaaagtctaaaaatacccgccaaataatcacacacgcccagcacacgcccagaaaccggtgacacactcaaaaaaatacgcgcacttcctcaaacgcccaaaactgccgtcatttccgggttcccacgctacgtcatcaaaacacgactttcaaattccgtcgaccgttaaaaacgtcacccgccccgcccctaacggtcgcccgtctctcagccaatcagcgccccgcatccccaaattcaaacacctcatttgcatattaacgcgcacaaaaagtttgaggtatattattgatgatg

SEQ ID NO: 76 - DNA, 29903 bp, Severe acute respiratory syndrome coronavirus 2
  source 1..29903: mol_type = other DNA
attaaaggtttataccttcccaggtaacaaaccaaccaactttcgatctcttgtagatctgttctctaaacgaactttaaaatctgtgtggctgtcactcggctgcatgcttagtgcactcacgcagtataattaataactaattactgtcgttgacaggacacgagtaactcgtctatcttctgcaggctgcttacggtttcgtccgtgttgcagccgatcatcagcacatctaggtttcgtccgggtgtgaccgaaaggtaagatggagagccttgtccctggtttcaacgagaaaacacacgtccaactcagtttgcctgttttacaggttcgcgacgtgctcgtacgtggctttggagactccgtggaggaggtcttatcagaggcacgtcaacatcttaaagatggcacttgtggcttagtagaagttgaaaaaggcgttttgcctcaacttgaacagccctatgtgttcatcaaacgttcggatgctcgaactgcacctcatggtcatgttatggttgagctggtagcagaactcgaaggcattcagtacggtcgtagtggtgagacacttggtgtccttgtccctcatgtgggcgaaataccagtggcttaccgcaaggttcttcttcgtaagaacggtaataaaggagctggtggccatagttacggcgccgatctaaagtcatttgacttaggcgacgagcttggcactgatccttatgaagattttcaagaaaactggaacactaaacatagcagtggtgttacccgtgaactcatgcgtgagcttaacggaggggcatacactcgctatgtcgataacaacttctgtggccctgatggctaccctcttgagtgcattaaagaccttctagcacgtgctggtaaagcttcatgcactttgtccgaacaactggactttattgacactaagaggggtgtatactgctgccgtgaacatgagcatgaaattgcttggtacacggaacgttctgaaaagagctatgaattgcagacaccttttgaaattaaattggcaaagaaatttgacaccttcaatggggaatgtccaaattttgtatttcccttaaattccataatcaagactattcaaccaagggttgaaaagaaaaagcttgatggctttatgggtagaattcgatctgtctatccagttgcgtcaccaaatgaatgcaaccaaatgtgcctttcaactctcatgaagtgtgatcattgtggtgaaacttcatggcagacgggcgattttgttaaagccacttgcgaattttgtggcactgagaatttgactaaagaaggtgccactacttgtggttacttaccccaaaatgctgttgttaaaatttattgtccagcatgtcacaattcagaagtaggacctgagcatagtcttgccgaataccataatgaatctggcttgaaaaccattcttcgtaagggtggtcgcactattgcctttggaggctgtgtgttctcttatgttggttgccataacaagtgtgcctattgggttccacgtgctagcgctaacataggttgtaaccatacaggtgttgttggagaaggttccgaaggtcttaatgacaaccttcttgaaatactccaaaaagagaaagtcaacatcaatattgttggtgactttaaacttaatgaagagatcgccattattttggcatctttttctgcttccacaagtgcttttgtggaaactgtgaaaggtttggattataaagcattcaaacaaattgttgaatcctgtggtaattttaaagttacaaaaggaaaagctaaaaaaggtgcctggaatattggtgaacagaaatcaatactgagtcctctttatgcatttgcatcagaggctgctcgtgttgtacgatcaattttctcccgcactcttgaaactgctcaaaattctgtgcgtgttttacagaaggccgctataacaatactagatggaatttcacagtattcactgagactcattgatgctatgatgttcacatctgatttggctactaacaatctagttgtaatggcctacattacaggtggtgttgttcagttgacttcgcagtggctaactaacatctttggcactgtttatgaaaaactcaaacccgtccttgattggcttgaagagaagtttaaggaaggtgtagagtttcttagagacggttgggaaattgttaaatttatctcaacctgtgcttgtgaaattgtcggtggacaaattgtcacctgtgcaaaggaaattaaggagagtgttcagacattctttaagcttgtaaataaatttttggctttgtgtgctgactctatcattattggtggagctaaacttaaagccttgaatttaggtgaaacatttgtcacgcactcaaagggattgtacagaaagtgtgttaaatccagagaagaaactggcctactcatgcctctaaaagccccaaaagaaattatcttcttagagggagaaacacttcccacagaagtgttaacagaggaagttgtcttgaaaactggtgatttacaaccattagaacaacctactagtgaagctgttgaagctccattggttggtacaccagtttgtattaacgggcttatgttgctcgaaatcaaagacacagaaaagtactgtgcccttgcacctaatatgatggtaacaaacaataccttcacactcaaaggcggtgcaccaacaaaggttacttttggtgatgacactgtgatagaagtgcaaggttacaagagtgtgaatatcacttttgaacttgatgaaaggattgataaagtacttaatgagaagtgctctgcctatacagttgaactcggtacagaagtaaatgagttcgcctgtgttgtggcagatgctgtcataaaaactttgcaaccagtatctgaattacttacaccactgggcattgatttagatgagtggagtatggctacatactacttatttgatgagtctggtgagtttaaattggcttcacatatgtattgttctttctaccctccagatgaggatgaagaagaaggtgattgtgaagaagaagagtttgagccatcaactcaatatgagtatggtactgaagatgattaccaaggtaaacctttggaatttggtgccacttctgctgctcttcaacctgaagaagagcaagaagaagattggttagatgatgatagtcaacaaactgttggtcaacaagacggcagtgaggacaatcagacaactactattcaaacaattgttgaggttcaacctcaattagagatggaacttacaccagttgttcagactattgaagtgaatagttttagtggttatttaaaacttactgacaatgtatacattaaaaatgcagacattgtggaagaagctaaaaaggtaaaaccaacagtggttgttaatgcagccaatgtttaccttaaacatggaggaggtgttgcaggagccttaaataaggctactaacaatgccatgcaagttgaatctgatgattacatagctactaatggaccacttaaagtgggtggtagttgtgttttaagcggacacaatcttgctaaacactgtcttcatgttgtcggcccaaatgttaacaaaggtgaagacattcaacttcttaagagtgcttatgaaaattttaatcagcacgaagttctacttgcaccattattatcagctggtatttttggtgctgaccctatacattctttaagagtttgtgtagatactgttcgcacaaatgtctacttagctgtctttgataaaaatctctatgacaaacttgtttcaagctttttggaaatgaagagtgaaaagcaagttgaacaaaagatcgctgagattcctaaagaggaagttaagccatttataactgaaagtaaaccttcagttgaacagagaaaacaagatgataagaaaatcaaagcttgtgttgaagaagttacaacaactctggaagaaactaagttcctcacagaaaacttgttactttatattgacattaatggcaatcttcatccagattctgccactcttgttagtgacattgacatcactttcttaaagaaagatgctccatatatagtgggtgatgttgttcaagagggtgttttaactgctgtggttatacctactaaaaaggctggtggcactactgaaatgctagcgaaagctttgagaaaagtgccaacagacaattatataaccacttacccgggtcagggtttaaatggttacactgtagaggaggcaaagacagtgcttaaaaagtgtaaaagtgccttttacattctaccatctattatctctaatgagaagcaagaaattcttggaactgtttcttggaatttgcgagaaatgcttgcacatgcagaagaaacacgcaaattaatgcctgtctgtgtggaaactaaagccatagtttcaactatacagcgtaaatataagggtattaaaatacaagagggtgtggttgattatggtgctagattttacttttacaccagtaaaacaactgtagcgtcacttatcaacacacttaacgatctaaatgaaactcttgttacaatgccacttggctatgtaacacatggcttaaatttggaagaagctgctcggtatatgagatctctcaaagtgccagctacagtttctgtttcttcacctgatgctgttacagcgtataatggttatcttacttcttcttctaaaacacctgaagaacattttattgaaaccatctcacttgctggttcctataaagattggtcctattctggacaatctacacaactaggtatagaatttcttaagagaggtgataaaagtgtatattacactagtaatcctaccacattccacctagatggtgaagttatcacctttgacaatcttaagacacttctttctttgagagaagtgaggactattaaggtgtttacaacagtagacaacattaacctccacacgcaagttgtggacatgtcaatgacatatggacaacagtttggtccaacttatttggatggagctgatgttactaaaataaaacctcataattcacatgaaggtaaaacattttatgttttacctaatgatgacactctacgtgttgaggcttttgagtactaccacacaactgatcctagttttctgggtaggtacatgtcagcattaaatcacactaaaaagtggaaatacccacaagttaatggtttaacttctattaaatgggcagataacaactgttatcttgccactgcattgttaacactccaacaaatagagttgaagtttaatccacctgctctacaagatgcttattacagagcaagggctggtgaagctgctaacttttgtgcacttatcttagcctactgtaataagacagtaggtgagttaggtgatgttagagaaacaatgagttacttgtttcaacatgccaatttagattcttgcaaaagagtcttgaacgtggtgtgtaaaacttgtggacaacagcagacaacccttaagggtgtagaagctgttatgtacatgggcacactttcttatgaacaatttaagaaaggtgttcagataccttgtacgtgtggtaaacaagctacaaaatatctagtacaacaggagtcaccttttgttatgatgtcagcaccacctgctcagtatgaacttaagcatggtacatttacttgtgctagtgagtacactggtaattaccagtgtggtcactataaacatataacttctaaagaaactttgtattgcatagacggtgctttacttacaaagtcctcagaatacaaaggtcctattacggatgttttctacaaagaaaacagttacacaacaaccataaaaccagttacttataaattggatggtgttgtttgtacagaaattgaccctaagttggacaattattataagaaagacaattcttatttcacagagcaaccaattgatcttgtaccaaaccaaccatatccaaacgcaagcttcgataattttaagtttgtatgtgataatatcaaatttgctgatgatttaaaccagttaactggttataagaaacctgcttcaagagagcttaaagttacatttttccctgacttaaatggtgatgtggtggctattgattataaacactacacaccctcttttaagaaaggagctaaattgttacataaacctattgtttggcatgttaacaatgcaactaataaagccacgtataaaccaaatacctggtgtatacgttgtctttggagcacaaaaccagttgaaacatcaaattcgtttgatgtactgaagtcagaggacgcgcagggaatggataatcttgcctgcgaagatctaaaaccagtctctgaagaagtagtggaaaatcctaccatacagaaagacgttcttgagtgtaatgtgaaaactaccgaagttgtaggagacattatacttaaaccagcaaataatagtttaaaaattacagaagaggttggccacacagatctaatggctgcttatgtagacaattctagtcttactattaagaaacctaatgaattatctagagtattaggtttgaaaacccttgctactcatggtttagctgctgttaatagtgtcccttgggatactatagctaattatgctaagccttttcttaacaaagttgttagtacaactactaacatagttacacggtgtttaaaccgtgtttgtactaattatatgccttatttctttactttattgctacaattgtgtacttttactagaagtacaaattctagaattaaagcatctatgccgactactatagcaaagaatactgttaagagtgtcggtaaattttgtctagaggcttcatttaattatttgaagtcacctaatttttctaaactgataaatattataatttggtttttactattaagtgtttgcctaggttctttaatctactcaaccgctgctttaggtgttttaatgtctaatttaggcatgccttcttactgtactggttacagagaaggctatttgaactctactaatgtcactattgcaacctactgtactggttctataccttgtagtgtttgtcttagtggtttagattctttagacacctatccttctttagaaactatacaaattaccatttcatcttttaaatgggatttaactgcttttggcttagttgcagagtggtttttggcatatattcttttcactaggtttttctatgtacttggattggctgcaatcatgcaattgtttttcagctattttgcagtacattttattagtaattcttggcttatgtggttaataattaatcttgtacaaatggccccgatttcagctatggttagaatgtacatcttctttgcatcattttattatgtatggaaaagttatgtgcatgttgtagacggttgtaattcatcaacttgtatgatgtgttacaaacgtaatagagcaacaagagtcgaatgtacaactattgttaatggtgttagaaggtccttttatgtctatgctaatggaggtaaaggcttttgcaaactacacaattggaattgtgttaattgtgatacattctgtgctggtagtacatttattagtgatgaagttgcgagagacttgtcactacagtttaaaagaccaataaatcctactgaccagtcttcttacatcgttgatagtgttacagtgaagaatggttccatccatctttactttgataaagctggtcaaaagacttatgaaagacattctctctctcattttgttaacttagacaacctgagagctaataacactaaaggttcattgcctattaatgttatagtttttgatggtaaatcaaaatgtgaagaatcatctgcaaaatcagcgtctgtttactacagtcagcttatgtgtcaacctatactgttactagatcaggcattagtgtctgatgttggtgatagtgcggaagttgcagttaaaatgtttgatgcttacgttaatacgttttcatcaacttttaacgtaccaatggaaaaactcaaaacactagttgcaactgcagaagctgaacttgcaaagaatgtgtccttagacaatgtcttatctacttttatttcagcagctcggcaagggtttgttgattcagatgtagaaactaaagatgttgttgaatgtcttaaattgtcacatcaatctgacatagaagttactggcgatagttgtaataactatatgctcacctataacaaagttgaaaacatgacaccccgtgaccttggtgcttgtattgactgtagtgcgcgtcatattaatgcgcaggtagcaaaaagtcacaacattgctttgatatggaacgttaaagatttcatgtcattgtctgaacaactacgaaaacaaatacgtagtgctgctaaaaagaataacttaccttttaagttgacatgtgcaactactagacaagttgttaatgttgtaacaacaaagatagcacttaagggtggtaaaattgttaataattggttgaagcagttaattaaagttacacttgtgttcctttttgttgctgctattttctatttaataacacctgttcatgtcatgtctaaacatactgacttttcaagtgaaatcataggatacaaggctattgatggtggtgtcactcgtgacatagcatctacagatacttgttttgctaacaaacatgctgattttgacacatggtttagccagcgtggtggtagttatactaatgacaaagcttgcccattgattgctgcagtcataacaagagaagtgggttttgtcgtgcctggtttgcctggcacgatattacgcacaactaatggtgactttttgcatttcttacctagagtttttagtgcagttggtaacatctgttacacaccatcaaaacttatagagtacactgactttgcaacatcagcttgtgttttggctgctgaatgtacaatttttaaagatgcttctggtaagccagtaccatattgttatgataccaatgtactagaaggttctgttgcttatgaaagtttacgccctgacacacgttatgtgctcatggatggctctattattcaatttcctaacacctaccttgaaggttctgttagagtggtaacaacttttgattctgagtactgtaggcacggcacttgtgaaagatcagaagctggtgtttgtgtatctactagtggtagatgggtacttaacaatgattattacagatctttaccaggagttttctgtggtgtagatgctgtaaatttacttactaatatgtttacaccactaattcaacctattggtgctttggacatatcagcatctatagtagctggtggtattgtagctatcgtagtaacatgccttgcctactattttatgaggtttagaagagcttttggtgaatacagtcatgtagttgcctttaatactttactattccttatgtcattcactgtactctgtttaacaccagtttactcattcttacctggtgtttattctgttatttacttgtacttgacattttatcttactaatgatgtttcttttttagcacatattcagtggatggttatgttcacacctttagtacctttctggataacaattgcttatatcatttgtatttccacaaagcatttctattggttctttagtaattacctaaagagacgtgtagtctttaatggtgtttcctttagtacttttgaagaagctgcgctgtgcacctttttgttaaataaagaaatgtatctaaagttgcgtagtgatgtgctattacctcttacgcaatataatagatacttagctctttataataagtacaagtattttagtggagcaatggatacaactagctacagagaagctgcttgttgtcatctcgcaaaggctctcaatgacttcagtaactcaggttctgatgttctttaccaaccaccacaaacctctatcacctcagctgttttgcagagtggttttagaaaaatggcattcccatctggtaaagttgagggttgtatggtacaagtaacttgtggtacaactacacttaacggtctttggcttgatgacgtagtttactgtccaagacatgtgatctgcacctctgaagacatgcttaaccctaattatgaagatttactcattcgtaagtctaatcataatttcttggtacaggctggtaatgttcaactcagggttattggacattctatgcaaaattgtgtacttaagcttaaggttgatacagccaatcctaagacacctaagtataagtttgttcgcattcaaccaggacagactttttcagtgttagcttgttacaatggttcaccatctggtgtttaccaatgtgctatgaggcccaatttcactattaagggttcattccttaatggttcatgtggtagtgttggttttaacatagattatgactgtgtctctttttgttacatgcaccatatggaattaccaactggagttcatgctggcacagacttagaaggtaacttttatggaccttttgttgacaggcaaacagcacaagcagctggtacggacacaactattacagttaatgttttagcttggttgtacgctgctgttataaatggagacaggtggtttctcaatcgatttaccacaactcttaatgactttaaccttgtggctatgaagtacaattatgaacctctaacacaagaccatgttgacatactaggacctctttctgctcaaactggaattgccgttttagatatgtgtgcttcattaaaagaattactgcaaaatggtatgaatggacgtaccatattgggtagtgctttattagaagatgaatttacaccttttgatgttgttagacaatgctcaggtgttactttccaaagtgcagtgaaaagaacaatcaagggtacacaccactggttgttactcacaattttgacttcacttttagttttagtccagagtactcaatggtctttgttcttttttttgtatgaaaatgcctttttaccttttgctatgggtattattgctatgtctgcttttgcaatgatgtttgtcaaacataagcatgcatttctctgtttgtttttgttaccttctcttgccactgtagcttattttaatatggtctatatgcctgctagttgggtgatgcgtattatgacatggttggatatggttgatactagtttgtctggttttaagctaaaagactgtgttatgtatgcatcagctgtagtgttactaatccttatgacagcaagaactgtgtatgatgatggtgctaggagagtgtggacacttatgaatgtcttgacactcgtttataaagtttattatggtaatgctttagatcaagccatttccatgtgggctcttataatctctgttacttctaactactcaggtgtagttacaactgtcatgtttttggccagaggtattgtttttatgtgtgttgagtattgccctattttcttcataactggtaatacacttcagtgtataatgctagtttattgtttcttaggctatttttgtacttgttactttggcctcttttgtttactcaaccgctactttagactgactcttggtgtttatgattacttagtttctacacaggagtttagatatatgaattcacagggactactcccacccaagaatagcatagatgccttcaaactcaacattaaattgttgggtgttggtggcaaaccttgtatcaaagtagccactgtacagtctaaaatgtcagatgtaaagtgcacatcagtagtcttactctcagttttgcaacaactcagagtagaatcatcatctaaattgtgggctcaatgtgtccagttacacaatgacattctcttagctaaagatactactgaagcctttgaaaaaatggtttcactactttctgttttgctttccatgcagggtgctgtagacataaacaagctttgtgaagaaatgctggacaacagggcaaccttacaagctatagcctcagagtttagttcccttccatcatatgcagcttttgctactgctcaagaagcttatgagcaggctgttgctaatggtgattctgaagttgttcttaaaaagttgaagaagtctttgaatgtggctaaatctgaatttgaccgtgatgcagccatgcaacgtaagttggaaaagatggctgatcaagctatgacccaaatgtataaacaggctagatctgaggacaagagggcaaaagttactagtgctatgcagacaatgcttttcactatgcttagaaagttggataatgatgcactcaacaacattatcaacaatgcaagagatggttgtgttcccttgaacataatacctcttacaacagcagccaaactaatggttgtcataccagactataacacatataaaaatacgtgtgatggtacaacatttacttatgcatcagcattgtgggaaatccaacaggttgtagatgcagatagtaaaattgttcaacttagtgaaattagtatggacaattcacctaatttagcatggcctcttattgtaacagctttaagggccaattctgctgtcaaattacagaataatgagcttagtcctgttgcactacgacagatgtcttgtgctgccggtactacacaaactgcttgcactgatgacaatgcgttagcttactacaacacaacaaagggaggtaggtttgtacttgcactgttatccgatttacaggatttgaaatgggctagattccctaagagtgatggaactggtactatctatacagaactggaaccaccttgtaggtttgttacagacacacctaaaggtcctaaagtgaagtatttatactttattaaaggattaaacaacctaaatagaggtatggtacttggtagtttagctgccacagtacgtctacaagctggtaatgcaacagaagtgcctgccaattcaactgtattatctttctgtgcttttgctgtagatgctgctaaagcttacaaagattatctagctagtgggggacaaccaatcactaattgtgttaagatgttgtgtacacacactggtactggtcaggcaataacagttacaccggaagccaatatggatcaagaatcctttggtggtgcatcgtgttgtctgtactgccgttgccacatagatcatccaaatcctaaaggattttgtgacttaaaaggtaagtatgtacaaatacctacaacttgtgctaatgaccctgtgggttttacacttaaaaacacagtctgtaccgtctgcggtatgtggaaaggttatggctgtagttgtgatcaactccgcgaacccatgcttcagtcagctgatgcacaatcgtttttaaacgggtttgcggtgtaagtgcagcccgtcttacaccgtgcggcacaggcactagtactgatgtcgtatacagggcttttgacatctacaatgataaagtagctggttttgctaaattcctaaaaactaattgttgtcgcttccaagaaaaggacgaagatgacaatttaattgattcttactttgtagttaagagacacactttctctaactaccaacatgaagaaacaatttataatttacttaaggattgtccagctgttgctaaacatgacttctttaagtttagaatagacggtgacatggtaccacatatatcacgtcaacgtcttactaaatacacaatggcagacctcgtctatgctttaaggcattttgatgaaggtaattgtgacacattaaaagaaatacttgtcacatacaattgttgtgatgatgattatttcaataaaaaggactggtatgattttgtagaaaacccagatatattacgcgtatacgccaacttaggtgaacgtgtacgccaagctttgttaaaaacagtacaattctgtgatgccatgcgaaatgctggtattgttggtgtactgacattagataatcaagatctcaatggtaactggtatgatttcggtgatttcatacaaaccacgccaggtagtggagttcctgttgtagattcttattattcattgttaatgcctatattaaccttgaccagggctttaactgcagagtcacatgttgacactgacttaacaaagccttacattaagtgggatttgttaaaatatgacttcacggaagagaggttaaaactctttgaccgttattttaaatattgggatcagacataccacccaaattgtgttaactgtttggatgacagatgcattctgcattgtgcaaactttaatgttttattctctacagtgttcccacctacaagttttggaccactagtgagaaaaatatttgttgatggtgttccatttgtagtttcaactggataccacttcagagagctaggtgttgtacataatcaggatgtaaacttacatagctctagacttagttttaaggaattacttgtgtatgctgctgaccctgctatgcacgctgcttctggtaatctattactagataaacgcactacgtgcttttcagtagctgcacttactaacaatgttgcttttcaaactgtcaaacccggtaattttaacaaagacttctatgactttgctgtgtctaagggtttctttaaggaaggaagttctgttgaattaaaacacttcttctttgctcaggatggtaatgctgctatcagcgattatgactactatcgttataatctaccaacaatgtgtgatatcagacaactactatttgtagttgaagttgttgataagtactttgattgttacgatggtggctgtattaatgctaaccaagtcatcgtcaacaacctagacaaatcagctggttttccatttaataaatggggtaaggctagactttattatgattcaatgagttatgaggatcaagatgcacttttcgcatatacaaaacgtaatgtcatccctactataactcaaatgaatcttaagtatgccattagtgcaaagaatagagctcgcaccgtagctggtgtctctatctgtagtactatgaccaatagacagtttcatcaaaaattattgaaatcaatagccgccactagaggagctactgtagtaattggaacaagcaaattctatggtggttggcacaacatgttaaaaactgtttatagtgatgtagaaaaccctcaccttatgggttgggattatcctaaatgtgatagagccatgcctaacatgcttagaattatggcctcacttgttcttgctcgcaaacatacaacgtgttgtagcttgtcacaccgtttctatagattagctaatgagtgtgctcaagtattgagtgaaatggtcatgtgtggcggttcactatatgttaaaccaggtggaacctcatcaggagatgccacaactgcttatgctaatagtgtttttaacatttgtcaagctgtcacggccaatgttaatgcacttttatctactgatggtaacaaaattgccgataagtatgtccgcaatttacaacacagactttatgagtgtctctatagaaatagagatgttgacacagactttgtgaatgagttttacgcatatttgcgtaaacatttctcaatgatgatactctctgacgatgctgttgtgtgtttcaatagcacttatgcatctcaaggtctagtggctagcataaagaactttaagtcagttctttattatcaaaacaatgtttttatgtctgaagcaaaatgttggactgagactgaccttactaaaggacctcatgaattttgctctcaacatacaatgctagttaaacagggtgatgattatgtgtaccttccttacccagatccatcaagaatcctaggggccggctgttttgtagatgatatcgtaaaaacagatggtacacttatgattgaacggttcgtgtctttagctatagatgcttacccacttactaaacatcctaatcaggagtatgctgatgtctttcatttgtacttacaatacataagaaagctacatgatgagttaacaggacacatgttagacatgtattctgttatgcttactaatgataacacttcaaggtattgggaacctgagttttatgaggctatgtacacaccgcatacagtcttacaggctgttggggcttgtgttctttgcaattcacagacttcattaagatgtggtgcttgcatacgtagaccattcttatgttgtaaatgctgttacgaccatgtcatatcaacatcacataaattagtcttgtctgttaatccgtatgtttgcaatgctccaggttgtgatgtcacagatgtgactcaactttacttaggaggtatgagctattattgtaaatcacataaaccacccattagttttccattgtgtgctaatggacaagtttttggtttatataaaaatacatgtgttggtagcgataatgttactgactttaatgcaattgcaacatgtgactggacaaatgctggtgattacattttagctaacacctgtactgaaagactcaagctttttgcagcagaaacgctcaaagctactgaggagacatttaaactgtcttatggtattgctactgtacgtgaagtgctgtctgacagagaattacatctttcatgggaagttggtaaacctagaccaccacttaaccgaaattatgtctttactggttatcgtgtaactaaaaacagtaaagtacaaataggagagtacacctttgaaaaaggtgactatggtgatgctgttgtttaccgaggtacaacaacttacaaattaaatgttggtgattattttgtgctgacatcacatacagtaatgccattaagtgcacctacactagtgccacaagagcactatgttagaattactggcttatacccaacactcaatatctcagatgagttttctagcaatgttgcaaattatcaaaaggttggtatgcaaaagtattctacactccagggaccacctggtactggtaagagtcattttgctattggcctagctctctactacccttctgctcgcatagtgtatacagcttgctctcatgccgctgttgatgcactatgtgagaaggcattaaaatatttgcctatagataaatgtagtagaattatacctgcacgtgctcgtgtagagtgttttgataaattcaaagtgaattcaacattagaacagtatgtcttttgtactgtaaatgcattgcctgagacgacagcagatatagttgtctttgatgaaatttcaatggccacaaattatgatttgagtgttgtcaatgccagattacgtgctaagcactatgtgtacattggcgaccctgctcaattacctgcaccacgcacattgctaactaagggcacactagaaccagaatatttcaattcagtgtgtagacttatgaaaactataggtccagacatgttcctcggaacttgtcggcgttgtcctgctgaaattgttgacactgtgagtgctttggtttatgataataagcttaaagcacataaagacaaatcagctcaatgctttaaaatgttttataagggtgttatcacgcatgatgtttcatctgcaattaacaggccacaaataggcgtggtaagagaattccttacacgtaaccctgcttggagaaaagctgtctttatttcaccttataattcacagaatgctgtagcctcaaagattttgggactaccaactcaaactgttgattcatcacagggctcagaatatgactatgtcatattcactcaaaccactgaaacagctcactcttgtaatgtaaacagatttaatgttgctattaccagagcaaaagtaggcatactttgcataatgtctgatagagacctttatgacaagttgcaatttacaagtcttgaaattccacgtaggaatgtggcaactttacaagctgaaaatgtaacaggactctttaaagattgtagtaaggtaatcactgggttacatcctacacaggcacctacacacctcagtgttgacactaaattcaaaactgaaggtttatgtgttgacatacctggcatacctaaggacatgacctatagaagactcatctctatgatgggttttaaaatgaattatcaagttaatggttaccctaacatgtttatcacccgcgaagaagctataagacatgtacgtgcatggattggcttcgatgtcgaggggtgtcatgctactagagaagctgttggtaccaatttacctttacagctaggtttttctacaggtgttaacctagttgctgtacctacaggttatgttgatacacctaataatacagatttttccagagttagtgctaaaccaccgcctggagatcaatttaaacacctcataccacttatgtacaaaggacttccttggaatgtagtgcgtataaagattgtacaaatgttaagtgacacacttaaaaatctctctgacagagtcgtatttgtcttatgggcacatggctttgagttgacatctatgaagtattttgtgaaaataggacctgagcgcacctgttgtctatgtgatagacgtgccacatgcttttccactgcttcagacacttatgcctgttggcatcattctattggatttgattacgtctataatccgtttatgattgatgttcaacaatggggttttacaggtaacctacaaagcaaccatgatctgtattgtcaagtccatggtaatgcacatgtagctagttgtgatgcaatcatgactaggtgtctagctgtccacgagtgctttgttaagcgtgttgactggactattgaatatcctataattggtgatgaactgaagattaatgcggcttgtagaaaggttcaacacatggttgttaaagctgcattattagcagacaaattcccagttcttcacgacattggtaaccctaaagctattaagtgtgtacctcaagctgatgtagaatggaagttctatgatgcacagccttgtagtgacaaagcttataaaatagaagaattattctattcttatgccacacattctgacaaattcacagatggtgtatgcctattttggaattgcaatgtcgatagatatcctgctaattccattgtttgtagatttgacactagagtgctatctaaccttaacttgcctggttgtgatggtggcagtttgtatgtaaataaacatgcattccacacaccagcttttgataaaagtgcttttgttaatttaaaacaattaccatttttctattactctgacagtccatgtgagtctcatggaaaacaagtagtgtcagatatagattatgtaccactaaagtctgctacgtgtataacacgttgcaatttaggtggtgctgtctgtagacatcatgctaatgagtacagattgtatctcgatgcttataacatgatgatctcagctggctttagcttgtgggtttacaaacaatttgatacttataacctctggaacacttttacaagacttcagagtttagaaaatgtggcttttaatgttgtaaataagggacactttgatggacaacagggtgaagtaccagtttctatcattaataacactgtttacacaaaagttgatggtgttgatgtagaattgtttgaaaataaaacaacattacctgttaatgtagcatttgagctttgggctaagcgcaacattaaaccagtaccagaggtgaaaatactcaataatttgggtgtggacattgctgctaatactgtgatctgggactacaaaagagatgctccagcacatatatctactattggtgtttgttctatgactgacatagccaagaaaccaactgaaacgatttgtgcaccactcactgtcttttttgatggtagagttgatggtcaagtagacttatttagaaatgcccgtaatggtgttcttattacagaaggtagtgttaaaggtttacaaccatctgtaggtcccaaacaagctagtcttaatggagtcacattaattggagaagccgtaaaaacacagttcaattattataagaaagttgatggtgttgtccaacaattacctgaaacttactttactcagagtagaaatttacaagaatttaaacccaggagtcaaatggaaattgatttcttagaattagctatggatgaattcattgaacggtataaattagaaggctatgccttcgaacatatcgtttatggagattttagtcatagtcagttaggtggtttacatctactgattggactagctaaacgttttaaggaatcaccttttgaattagaagattttattcctatggacagtacagttaaaaactatttcataacagatgcgcaaacaggttcatctaagtgtgtgtgttctgttattgatttattacttgatgattttgttgaaataataaaatcccaagatttatctgtagtttctaaggttgtcaaagtgactattgactatacagaaatttcatttatgctttggtgtaaagatggccatgtagaaacattttacccaaaattacaatctagtcaagcgtggcaaccgggtgttgctatgcctaatctttacaaaatgcaaagaatgctattagaaaagtgtgaccttcaaaattatggtgatagtgcaacattacctaaaggcataatgatgaatgtcgcaaaatatactcaactgtgtcaatatttaaacacattaacattagctgtaccctataatatgagagttatacattttggtgctggttctgataaaggagttgcaccaggtacagctgttttaagacagtggttgcctacgggtacgctgcttgtcgattcagatcttaatgactttgtctctgatgcagattcaactttgattggtgattgtgcaactgtacatacagctaataaatgggatctcattattagtgatatgtacgaccctaagactaaaaatgttacaaaagaaaatgactctaaagagggttttttcacttacatttgtgggtttatacaacaaaagctagctcttggaggttccgtggctataaagataacagaacattcttggaatgctgatctttataagctcatgggacacttcgcatggtggacagcctttgttactaatgtgaatgcgtcatcatctgaagcatttttaattggatgtaattatcttggcaaaccacgcgaacaaatagatggttatgtcatgcatgcaaattacatattttggaggaatacaaatccaattcagttgtcttcctattctttatttgacatgagtaaatttccccttaaattaaggggtactgctgttatgtctttaaaagaaggtcaaatcaatgatatgattttatctcttcttagtaaaggtagacttataattagagaaaacaacagagttgttatttctagtgatgttcttgttaacaactaaacgaacaatgtttgtttttcttgttttattgccactagtctctagtcagtgtgttaatcttacaaccagaactcaattaccccctgcatacactaattctttcacacgtggtgtttattaccctgacaaagttttcagatcctcagttttacattcaactcaggacttgttcttacctttcttttccaatgttacttggttccatgctatacatgtctctgggaccaatggtactaagaggtttgataaccctgtcctaccatttaatgatggtgtttattttgcttccactgagaagtctaacataataagaggctggatttttggtactactttagattcgaagacccagtccctacttattgttaataacgctactaatgttgttattaaagtctgtgaatttcaattttgtaatgatccatttttgggtgtttattaccacaaaaacaacaaaagttggatggaaagtgagttcagagtttattctagtgcgaataattgcacttttgaatatgtctctcagccttttcttatggaccttgaaggaaaacagggtaatttcaaaaatcttagggaatttgtgtttaagaatattgatggttattttaaaatatattctaagcacacgcctattaatttagtgcgtgatctccctcagggtttttcggctttagaaccattggtagatttgccaataggtattaacatcactaggtttcaaactttacttgctttacatagaagttatttgactcctggtgattcttcttcaggttggacagctggtgctgcagcttattatgtgggttatcttcaacctaggacttttctattaaaatataatgaaaatggaaccattacagatgctgtagactgtgcacttgaccctctctcagaaacaaagtgtacgttgaaatccttcactgtagaaaaaggaatctatcaaacttctaactttagagtccaaccaacagaatctattgttagatttcctaatattacaaacttgtgcccttttggtgaagtttttaacgccaccagatttgcatctgtttatgcttggaacaggaagagaatcagcaactgtgttgctgattattctgtcctatataattccgcatcattttccacttttaagtgttatggagtgtctcctactaaattaaatgatctctgctttactaatgtctatgcagattcatttgtaattagaggtgatgaagtcagacaaatcgctccagggcaaactggaaagattgctgattataattataaattaccagatgattttacaggctgcgttatagcttggaattctaacaatcttgattctaaggttggtggtaattataattacctgtatagattgtttaggaagtctaatctcaaaccttttgagagagatatttcaactgaaatctatcaggccggtagcacaccttgtaatggtgttgaaggttttaattgttactttcctttacaatcatatggtttccaacccactaatggtgttggttaccaaccatacagagtagtagtactttcttttgaacttctacatgcaccagcaactgtttgtggacctaaaaagtctactaatttggttaaaaacaaatgtgtcaatttcaacttcaatggtttaacaggcacaggtgttcttactgagtctaacaaaaagtttctgcctttccaacaatttggcagagacattgctgacactactgatgctgtccgtgatccacagacacttgagattcttgacattacaccatgttcttttggtggtgtcagtgttataacaccaggaacaaatacttctaaccaggttgctgttctttatcaggatgttaactgcacagaagtccctgttgctattcatgcagatcaacttactcctacttggcgtgtttattctacaggttctaatgtttttcaaacacgtgcaggctgtttaataggggctgaacatgtcaacaactcatatgagtgtgacatacccattggtgcaggtatatgcgctagttatcagactcagactaattctcctcggcgggcacgtagtgtagctagtcaatccatcattgcctacactatgtcacttggtgcagaaaattcagttgcttactctaataactctattgccatacccacaaattttactattagtgttaccacagaaattctaccagtgtctatgaccaagacatcagtagattgtacaatgtacatttgtggtgattcaactgaatgcagcaatcttttgttgcaatatggcagtttttgtacacaattaaaccgtgctttaactggaatagctgttgaacaagacaaaaacacccaagaagtttttgcacaagtcaaacaaatttacaaaacaccaccaattaaagattttggtggttttaatttttcacaaatattaccagatccatcaaaaccaagcaagaggtcatttattgaagatctacttttcaacaaagtgacacttgcagatgctggcttcatcaaacaatatggtgattgccttggtgatattgctgctagagacctcatttgtgcacaaaagtttaacggccttactgttttgccacctttgctcacagatgaaatgattgctcaatacacttctgcactgttagcgggtacaatcacttctggttggacctttggtgcaggtgctgcattacaaataccatttgctatgcaaatggcttataggtttaatggtattggagttacacagaatgttctctatgagaaccaaaaattgattgccaaccaatttaatagtgctattggcaaaattcaagactcactttcttccacagcaagtgcacttggaaaacttcaagatgtggtcaaccaaaatgcacaagctttaaacacgcttgttaaacaacttagctccaattttggtgcaatttcaagtgttttaaatgatatcctttcacgtcttgacaaagttgaggctgaagtgcaaattgataggttgatcacaggcagacttcaaagtttgcagacatatgtgactcaacaattaattagagctgcagaaatcagagcttctgctaatcttgctgctactaaaatgtcagagtgtgtacttggacaatcaaaaagagttgatttttgtggaaagggctatcatcttatgtccttccctcagtcagcacctcatggtgtagtcttcttgcatgtgacttatgtccctgcacaagaaaagaacttcacaactgctcctgccatttgtcatgatggaaaagcacactttcctcgtgaaggtgtctttgtttcaaatggcacacactggtttgtaacacaaaggaatttttatgaaccacaaatcattactacagacaacacatttgtgtctggtaactgtgatgttgtaataggaattgtcaacaacacagtttatgatcctttgcaacctgaattagactcattcaaggaggagttagataaatattttaagaatcatacatcaccagatgttgatttaggtgacatctctggcattaatgcttcagttgtaaacattcaaaaagaaattgaccgcctcaatgaggttgccaagaatttaaatgaatctctcatcgatctccaagaacttggaaagtatgagcagtatataaaatggccatggtacatttggctaggttttatagctggcttgattgccatagtaatggtgacaattatgctttgctgtatgaccagttgctgtagttgtctcaagggctgttgttcttgtggatcctgctgcaaatttgatgaagacgactctgagccagtgctcaaaggagtcaaattacattacacataaacgaacttatggatttgtttatgagaatcttcacaattggaactgtaactttgaagcaaggtgaaatcaaggatgctactccttcagattttgttcgcgctactgcaacgataccgatacaagcctcactccctttcggatggcttattgttggcgttgcacttcttgctgtttttcagagcgcttccaaaatcataaccctcaaaaagagatggcaactagcactctccaagggtgttcactttgtttgcaacttgctgttgttgtttgtaacagtttactcacaccttttgctcgttgctgctggccttgaagccccttttctctatctttatgctttagtctacttcttgcagagtataaactttgtaagaataataatgaggctttggctttgctggaaatgccgttccaaaaacccattactttatgatgccaactattttctttgctggcatactaattgttacgactattgtataccttacaatagtgtaacttcttcaattgtcattacttcaggtgatggcacaacaagtcctatttctgaacatgactaccagattggtggttatactgaaaaatgggaatctggagtaaaagactgtgttgtattacacagttacttcacttcagactattaccagctgtactcaactcaattgagtacagacactggtgttgaacatgttaccttcttcatctacaataaaattgttgatgagcctgaagaacatgtccaaattcacacaatcgacggttcatccggagttgttaatccagtaatggaaccaatttatgatgaaccgacgacgactactagcgtgcctttgtaagcacaagctgatgagtacgaacttatgtactcattcgtttcggaagagacaggtacgttaatagttaatagcgtacttctttttcttgctttcgtggtattcttgctagttacactagccatccttactgcgcttcgattgtgtgcgtactgctgcaatattgttaacgtgagtcttgtaaaaccttctttttacgtttactctcgtgttaaaaatctgaattcttctagagttcctgatcttctggtctaaacgaactaaatattatattagtttttctgtttggaactttaattttagccatggcagattccaacggtactattaccgttgaagagcttaaaaagctccttgaacaatggaacctagtaataggtttcctattccttacatggatttgtcttctacaatttgcctatgccaacaggaataggtttttgtatataattaagttaattttcctctggctgttatggccagtaactttagcttgttttgtgcttgctgctgtttacagaataaattggatcaccggtggaattgctatcgcaatggcttgtcttgtaggcttgatgtggctcagctacttcattgcttctttcagactgtttgcgcgtacgcgttccatgtggtcattcaatccagaaactaacattcttctcaacgtgccactccatggcactattctgaccagaccgcttctagaaagtgaactcgtaatcggagctgtgatccttcgtggacatcttcgtattgctggacaccatctaggacgctgtgacatcaaggacctgcctaaagaaatcactgttgctacatcacgaacgctttcttattacaaattgggagcttcgcagcgtgtagcaggtgactcaggttttgctgcatacagtcgctacaggattggcaactataaattaaacacagaccattccagtagcagtgacaatattgctttgcttgtacagtaagtgacaacagatgtttcatctcgttgactttcaggttactatagcagagatattactaattattatgaggacttttaaagtttccatttggaatcttgattacatcataaacctcataattaaaaatttatctaagtcactaactgagaataaatattctcaattagatgaagagcaaccaatggagattgattaaacgaacatgaaaattattcttttcttggcactgataacactcgctacttgtgagctttatcactaccaagagtgtgttagaggtacaacagtacttttaaaagaaccttgctcttctggaacatacgagggcaattcaccatttcatcctctagctgataacaaatttgcactgacttgctttagcactcaatttgcttttgcttgtcctgacggcgtaaaacacgtctatcagttacgtgccagatcagtttcacctaaactgttcatcagacaagaggaagttcaagaactttactctccaatttttcttattgttgcggcaatagtgtttataacactttgcttcacactcaaaagaaagacagaatgattgaactttcattaattgacttctatttgtgctttttagcctttctgctattccttgttttaattatgcttattatcttttggttctcacttgaactgcaagatcataatgaaacttgtcacgcctaaacgaacatgaaatttcttgttttcttaggaatcatcacaactgtagctgcatttcaccaagaatgtagtttacagtcatgtactcaacatcaaccatatgtagttgatgacccgtgtcctattcacttctattctaaatggtatattagagtaggagctagaaaatcagcacctttaattgaattgtgcgtggatgaggctggttctaaatcacccattcagtacatcgatatcggtaattatacagtttcctgtttaccttttacaattaattgccaggaacctaaattgggtagtcttgtagtgcgttgttcgttctatgaagactttttagagtatcatgacgttcgtgttgttttagatttcatctaaacgaacaaactaaaatgtctgataatggaccccaaaatcagcgaaatgcaccccgcattacgtttggtggaccctcagattcaactggcagtaaccagaatggagaacgcagtggggcgcgatcaaaacaacgtcggccccaaggtttacccaataatactgcgtcttggttcaccgctctcactcaacatggcaaggaagaccttaaattccctcgaggacaaggcgttccaattaacaccaatagcagtccagatgaccaaattggctactaccgaagagctaccagacgaattcgtggtggtgacggtaaaatgaaagatctcagtccaagatggtatttctactacctaggaactgggccagaagctggacttccctatggtgctaacaaagacggcatcatatgggttgcaactgagggagccttgaatacaccaaaagatcacattggcacccgcaatcctgctaacaatgctgcaatcgtgctacaacttcctcaaggaacaacattgccaaaaggcttctacgcagaagggagcagaggcggcagtcaagcctcttctcgttcctcatcacgtagtcgcaacagttcaagaaattcaactccaggcagcagtaggggaacttctcctgctagaatggctggcaatggcggtgatgctgctcttgctttgctgctgcttgacagattgaaccagcttgagagcaaaatgtctggtaaaggccaacaacaacaaggccaaactgtcactaagaaatctgctgctgaggcttctaagaagcctcggcaaaaacgtactgccactaaagcatacaatgtaacacaagctttcggcagacgtggtccagaacaaacccaaggaaattttggggaccaggaactaatcagacaaggaactgattacaaacattggccgcaaattgcacaatttgcccccagcgcttcagcgttcttcggaatgtcgcgcattggcatggaagtcacaccttcgggaacgtggttgacctacacaggtgccatcaaattggatgacaaagatccaaatttcaaagatcaagtcattttgctgaataagcatattgacgcatacaaaacattcccaccaacagagcctaaaaaggacaaaaagaagaaggctgatgaaactcaagccttaccgcagagacagaagaaacagcaaactgtgactcttcttcctgctgcagatttggatgatttctccaaacaattgcaacaatccatgagcagtgctgactcaactcaggcctaaactcatgcagaccacacaaggcagatgggctatataaacgttttcgcttttccgtttacgatatatagtctactcttgtgcagaatgaattctcgtaactacatagcacaagtagatgtagttaactttaatctcacatagcaatctttaatcagtgtgtaacattagggaggacttgaaagagccaccacattttcaccgaggccacgcggagtacgatcgagtgtacagtgaacaatgctagggagagctgcctatatggaagagccctaatgtgtaaaattaattttagtagtgctatccccatgtgattttaatagcttcttaggagaatgacaaaaaaaaaaaaaaaaaaaaaaaaaaaaaaaaa

SEQ ID NO: 77 - DNA, 7912 bp, synthetic construct
  misc_feature 1..7912: note = Description of Artificial Sequence: Synthetic polynucleotide
  source 1..7912: mol_type = other DNA
taatacgactcactataatgggcggcgcatgagagaagcccagaccaattacctacccaaaatggagaaagttcacgttgacatcgaggaagacagcccattcctcagagctttgcagcggagcttcccgcagtttgaggtagaagccaagcaggtcactgataatgaccatgctaatgccagagcgttttcgcatctggcttcaaaactgatcgaaacggaggtggacccatccgacacgatccttgacattggaagtgcgcccgcccgcagaatgtattctaagcacaagtatcattgtatctgtccgatgagatgtgcggaagatccggacagattgtataagtatgcaactaagctgaagaaaaactgtaaggaaataactgataaggaattggacaagaaaatgaaggagctcgccgccgtcatgagcgaccctgacctggaaactgagactatgtgcctccacgacgacgagtcgtgtcgctacgaagggcaagtcgctgtttaccaggatgtatacgcggttgacggaccgacaagtctctatcaccaagccaataagggagttagagtcgcctactggataggctttgacaccaccccttttatgtttaagaacttggctggagcatatccatcatactctaccaactgggccgacgaaaccgtgttaacggctcgtaacataggcctatgcagctctgacgttatggagcggtcacgtagagggatgtccattcttagaaagaagtatttgaaaccatccaacaatgttctattctctgttggctcgaccatctaccacgagaagagggacttactgaggagctggcacctgccgtctgtatttcacttacgtggcaagcaaaattacacatgtcggtgtgagactatagttagttgcgacgggtacgtcgttaaaagaatagctatcagtccaggcctgtatgggaagccttcaggctatgctgctacgatgcaccgcgagggattcttgtgctgcaaagtgacagacacattgaacggggagagggtctcttttcccgtgtgcacgtatgtgccagctacattgtgtgaccaaatgactggcatactggcaacagatgtcagtgcggacgacgcgcaaaaactgctggttgggctcaaccagcgtatagtcgtcaacggtcgcacccagagaaacaccaataccatgaaaaattaccttttgcccgtagtggcccaggcatttgctaggtgggcaaaggaatataaggaagatcaagaagatgaaaggccactaggactacgagatagacagttagtcatggggtgttgttgggcttttagaaggcacaagataacatctatttataagcgcccggatacccaaaccatcatcaaagtgaacagcgatttccactcattcgtgctgcccaggataggcagtaacacattggagatcgggctgagaacaagaatcaggaaaatgttagaggagcacaaggagccgtcacctctcattaccgccgaggacgtacaagaagctaagtgcgcagccgatgaggctaaggaggtgcgtgaagccgaggagttgcgcgcagctctaccacctttggcagctgatgttgaggagcccactctggaagccgatgtcgacttgatgttacaagaggctggggccggctcagtggagacacctcgtggcttgataaaggttaccagctacgctggcgaggacaagatcggctcttacgctgtgctttctccgcaggctgtactcaagagtgaaaaattatcttgcatccaccctctcgctgaacaagtcatagtgataacacactctggccgaaaagggcgttatgccgtggaaccataccatggtaaagtagtggtgccagagggacatgcaatacccgtccaggactttcaagctctgagtgaaagtgccaccattgtgtacaacgaacgtgagttcgtaaacaggtacctgcaccatattgccacacatggaggagcgctgaacactgatgaagaatattacaaaactgtcaagcccagcgagcacgacggcgaatacctgtacgacatcgacaggaaacagtgcgtcaagaaagaactagtcactgggctagggctcacaggcgagctggtggatcctcccttccatgaattcgcctacgagagtctgagaacacgaccagccgctccttaccaagtaccaaccataggggtgtatggcgtgccaggatcaggcaagtctggcatcattaaaagcgcagtcaccaaaaaagatctagtggtgagcgccaagaaagaaaactgtgcagaaattataagggacgtcaagaaaatgaaagggctggacgtcaatgccagaactgtggactcagtgctcttgaatggatgcaaacaccccgtagagaccctgtatattgacgaagcttttgcttgtcatgcaggtactctcagagcgctcatagccattataagacctaaaaaggcagtgctctgcggggatcccaaacagtgcggtttttttaacatgatgtgcctgaaagtgcattttaaccacgagatttgcacacaagtcttccacaaaagcatctctcgccgttgcactaaatctgtgacttcggtcgtctcaaccttgttttacgacaaaaaaatgagaacgacgaatccgaaagagactaagattgtgattgacactaccggcagtaccaaacctaagcaggacgatctcattctcacttgtttcagagggtgggtgaagcagttgcaaatagattacaaaggcaacgaaataatgacggcagctgcctctcaagggctgacccgtaaaggtgtgtatgccgttcggtacaaggtgaatgaaaatcctctgtacgcacccacctcagaacatgtgaacgtcctactgacccgcacggaggaccgcatcgtgtggaaaacactagccggcgacccatggataaaaacactgactgccaagtaccctgggaatttcactgccacgatagaggagtggcaagcagagcatgatgccatcatgaggcacatcttggagagaccggaccctaccgacgtcttccagaataaggcaaacgtgtgttgggccaaggctttagtgccggtgctgaagaccgctggcatagacatgaccactgaacaatggaacactgtggattattttgaaacggacaaagctcactcagcagagatagtattgaaccaactatgcgtgaggttctttggactcgatctggactccggtctattttctgcacccactgttccgttatccattaggaataatcactgggataactccccgtcgcctaacatgtacgggctgaataaagaagtggtccgtcagctctctcgcaggtacccacaactgcctcgggcagttgccactggaagagtctatgacatgaacactggtacactgcgcaattatgatccgcgcataaacctagtacctgtaaacagaagactgcctcatgctttagtcctccaccataatgaacacccacagagtgacttttcttcattcgtcagcaaattgaagggcagaactgtcctggtggtcggggaaaagttgtccgtcccaggcaaaatggttgactggttgtcagaccggcctgaggctaccttcagagctcggctggatttaggcatcccaggtgatgtgcccaaatatgacataatatttgttaatgtgaggaccccatataaataccatcactatcagcagtgtgaagaccatgccattaagcttagcatgttgaccaagaaagcttgtctgcatctgaatcccggcggaacctgtgtcagcataggttatggttacgctgacagggccagcgaaagcatcattggtgctatagcgcggcagttcaagttttcccgggtatgcaaaccgaaatcctcacttgaagagacggaagttctgtttgtattcattgggtacgatcgcaaggcccgtacgcacaatccttacaagctttcatcaaccttgaccaacatttatacaggttccagactccacgaagccggatgtgcaccctcatatcatgtggtgcgaggggatattgccacggccaccgaaggagtgattataaatgctgctaacagcaaaggacaacctggcggaggggtgtgcggagcgctgtataagaaattcccggaaagcttcgatttacagccgatcgaagtaggaaaagcgcgactggtcaaaggtgcagctaaacatatcattcatgccgtaggaccaaacttcaacaaagtttcggaggttgaaggtgacaaacagttggcagaggcttatgagtccatcgctaagattgtcaacgataacaattacaagtcagtagcgattccactgttgtccaccggcatcttttccgggaacaaagatcgactaacccaatcattgaaccatttgctgacagctttagacaccactgatgcagatgtagccatatactgcagggacaagaaatgggaaatgactctcaaggaagcagtggctaggagagaagcagtggaggagatatgcatatccgacgactcttcagtgacagaacctgatgcagagctggtgagggtgcatccgaagagttctttggctggaaggaagggctacagcacaagcgatggcaaaactttctcatatttggaagggaccaagtttcaccaggcggccaaggatatagcagaaattaatgccatgtggcccgttgcaacggaggccaatgagcaggtatgcatgtatatcctcggagaaagcatgagcagtattaggtcgaaatgccccgtcgaagagtcggaagcctccacaccacctagcacgctgccttgcttgtgcatccatgccatgactccagaaagagtacagcgcctaaaagcctcacgtccagaacaaattactgtgtgctcatcctttccattgccgaagtatagaatcactggtgtgcagaagatccaatgctcccagcctatattgttctcaccgaaagtgcctgcgtatattcatccaaggaagtatctcgtggaaacaccaccggtagacgagactccggagccatcggcagagaaccaatccacagaggggacacctgaacaaccaccacttataaccgaggatgagaccaggactagaacgcctgagccgatcatcatcgaagaggaagaagaggatagcataagtttgctgtcagatggcccgacccaccaggtgctgcaagtcgaggcagacattcacgggccgccctctgtatctagctcatcctggtccattcctcatgcatccgactttgatgtggacagtttatccatacttgacaccctggagggagctagcgtgaccagcggggcaacgtcagccgagactaactcttacttcgcaaagagtatggagtttctggcgcgaccggtgcctgcgcctcgaacagtattcaggaaccctccacatcccgctccgcgcacaagaacaccgtcacttgcacccagcagggcctgctcgagaaccagcctagtttccaccccgccaggcgtgaatagggtgatcactagagaggagctcgaggcgcttaccccgtcacgcactcctagcaggtcggtctcgagaaccagcctggtctccaacccgccaggcgtaaatagggtgattacaagagaggagtttgaggcgttcgtagcacaacaacaatgacggtttgatgcgggtgcatacatcttttcctccgacaccggtcaagggcatttacaacaaaaatcagtaaggcaaacggtgctatccgaagtggtgttggagaggaccgaattggagatttcgtatgccccgcgcctcgaccaagaaaaagaagaattactacgcaagaaattacagttaaatcccacacctgctaacagaagcagataccagtccaggaaggtggagaacatgaaagccataacagctagacgtattctgcaaggcctagggcattatttgaaggcagaaggaaaagtggagtgctaccgaaccctgcatcctgttcctttgtattcatctagtgtgaaccgtgccttttcaagccccaaggtcgcagtggaagcctgtaacgccatgttgaaagagaactttccgactgtggcttcttactgtattattccagagtacgatgcctatttggacatggttgacggagcttcatgctgcttagacactgccagtttttgccctgcaaagctgcgcagctttccaaagaaacactcctatttggaacccacaatacgatcggcagtgccttcagcgatccagaacacgctccagaacgtcctggcagctgccacaaaaagaaattgcaatgtcacgcaaatgagagaattgcccgtattggattcggcggcctttaatgtggaatgcttcaagaaatatgcgtgtaataatgaatattgggaaacgtttaaagaaaaccccatcaggcttactgaagaaaacgtggtaaattacattaccaaattaaaaggaccaaaagctgctgctctttttgcgaagacacataatttgaatatgttgcaggacataccaatggacaggtttgtaatggacttaaagagagacgtgaaagtgactccaggaacaaaacatactgaagaacggcccaaggtacaggtgatccaggctgccgatccgctagcaacagcgtatctgtgcggaatccaccgagagctggttaggagattaaatgcggtcctgcttccgaacattcatacactgtttgatatgtcggctgaagactttgacgctattatagccgagcacttccagcctggggattgtgttctggaaactgacatcgcgtcgtttgataaaagtgaggacgacgccatggctctgaccgcgttaatgattctggaagacttaggtgtggacgcagagctgttgacgctgattgaggcggctttcggcgaaatttcatcaatacatttgcccactaaaactaaatttaaattcggagccatgatgaaatctggaatgttcctcacactgtttgtgaacacagtcattaacattgtaatcgcaagcagagtgttgagagaacggctaaccggatcaccatgtgcagcattcattggagatgacaatatcgtgaaaggagtcaaatcggacaaattaatggcagacaggtgcgccacctggttgaatatggaagtcaagattatagatgctgtggtgggcgagaaagcgccttatttctgtggagggtttattttgtgtgactccgtgaccggcacagcgtgccgtgtggcagaccccctaaaaaggctgtttaagcttggcaaacctctggcagcagacgatgaacatgatgatgacaggagaagggcattgcatgaagagtcaacacgctggaaccgagtgggtattctttcagagctgtgcaaggcagtagaatcaaggtatgaaaccgtaggaacttccatcatagttatggccatgactactctagctagcagtgttaaatcattcagctacctgagaggggcccctataactctctacggctaacctgaatggactacgacttatcacgcccaaacatttacagccgcggtgtcaaaaaccgcgtggacgtggttaacatccctgctgggaggatcagccgtaattattataattggcttggtgctggctactattgtggccatgtacgtgctgaccaaccagaaacataattgaatacagcagcaattggcaagctgcttacatagaactcgcggcgattggcatgccgccttaaaatttttattttattttttcttttcttttccgaatcggattttgtttttaatatttcaaaaaaaaaaaaaaaaaaaaaaaaaaaaaaaaaaaaaaaaaaaaaaaaaaaaaaaaaaaaaaaaaaaaaaaaaaaaaaaa

SEQ ID NO: 78 - DNA, 3822 bp, Severe acute respiratory syndrome coronavirus 2
  source 1..3822: mol_type = other DNA
atgtttgtttttcttgttttattgccactagtctctagtcagtgtgttaatcttacaaccagaactcaattaccccctgcatacactaattctttcacacgtggtgtttattaccctgacaaagttttcagatcctcagttttacattcaactcaggacttgttcttacctttcttttccaatgttacttggttccatgctatacatgtctctgggaccaatggtactaagaggtttgataaccctgtcctaccatttaatgatggtgtttattttgcttccactgagaagtctaacataataagaggctggatttttggtactactttagattcgaagacccagtccctacttattgttaataacgctactaatgttgttattaaagtctgtgaatttcaattttgtaatgatccatttttgggtgtttattaccacaaaaacaacaaaagttggatggaaagtgagttcagagtttattctagtgcgaataattgcacttttgaatatgtctctcagccttttcttatggaccttgaaggaaaacagggtaatttcaaaaatcttagggaatttgtgtttaagaatattgatggttattttaaaatatattctaagcacacgcctattaatttagtgcgtgatctccctcagggtttttcggctttagaaccattggtagatttgccaataggtattaacatcactaggtttcaaactttacttgctttacatagaagttatttgactcctggtgattcttcttcaggttggacagctggtgctgcagcttattatgtgggttatcttcaacctaggacttttctattaaaatataatgaaaatggaaccattacagatgctgtagactgtgcacttgaccctctctcagaaacaaagtgtacgttgaaatccttcactgtagaaaaaggaatctatcaaacttctaactttagagtccaaccaacagaatctattgttagatttcctaatattacaaacttgtgcccttttggtgaagtttttaacgccaccagatttgcatctgtttatgcttggaacaggaagagaatcagcaactgtgttgctgattattctgtcctatataattccgcatcattttccacttttaagtgttatggagtgtctcctactaaattaaatgatctctgctttactaatgtctatgcagattcatttgtaattagaggtgatgaagtcagacaaatcgctccagggcaaactggaaagattgctgattataattataaattaccagatgattttacaggctgcgttatagcttggaattctaacaatcttgattctaaggttggtggtaattataattacctgtatagattgtttaggaagtctaatctcaaaccttttgagagagatatttcaactgaaatctatcaggccggtagcacaccttgtaatggtgttgaaggttttaattgttactttcctttacaatcatatggtttccaacccactaatggtgttggttaccaaccatacagagtagtagtactttcttttgaacttctacatgcaccagcaactgtttgtggacctaaaaagtctactaatttggttaaaaacaaatgtgtcaatttcaacttcaatggtttaacaggcacaggtgttcttactgagtctaacaaaaagtttctgcctttccaacaatttggcagagacattgctgacactactgatgctgtccgtgatccacagacacttgagattcttgacattacaccatgttcttttggtggtgtcagtgttataacaccaggaacaaatacttctaaccaggttgctgttctttatcaggatgttaactgcacagaagtccctgttgctattcatgcagatcaacttactcctacttggcgtgtttattctacaggttctaatgtttttcaaacacgtgcaggctgtttaataggggctgaacatgtcaacaactcatatgagtgtgacatacccattggtgcaggtatatgcgctagttatcagactcagactaattctcctcggcgggcacgtagtgtagctagtcaatccatcattgcctacactatgtcacttggtgcagaaaattcagttgcttactctaataactctattgccatacccacaaattttactattagtgttaccacagaaattctaccagtgtctatgaccaagacatcagtagattgtacaatgtacatttgtggtgattcaactgaatgcagcaatcttttgttgcaatatggcagtttttgtacacaattaaaccgtgctttaactggaatagctgttgaacaagacaaaaacacccaagaagtttttgcacaagtcaaacaaatttacaaaacaccaccaattaaagattttggtggttttaatttttcacaaatattaccagatccatcaaaaccaagcaagaggtcatttattgaagatctacttttcaacaaagtgacacttgcagatgctggcttcatcaaacaatatggtgattgccttggtgatattgctgctagagacctcatttgtgcacaaaagtttaacggccttactgttttgccacctttgctcacagatgaaatgattgctcaatacacttctgcactgttagcgggtacaatcacttctggttggacctttggtgcaggtgctgcattacaaataccatttgctatgcaaatggcttataggtttaatggtattggagttacacagaatgttctctatgagaaccaaaaattgattgccaaccaatttaatagtgctattggcaaaattcaagactcactttcttccacagcaagtgcacttggaaaacttcaagatgtggtcaaccaaaatgcacaagctttaaacacgcttgttaaacaacttagctccaattttggtgcaatttcaagtgttttaaatgatatcctttcacgtcttgacaaagttgaggctgaagtgcaaattgataggttgatcacaggcagacttcaaagtttgcagacatatgtgactcaacaattaattagagctgcagaaatcagagcttctgctaatcttgctgctactaaaatgtcagagtgtgtacttggacaatcaaaaagagttgatttttgtggaaagggctatcatcttatgtccttccctcagtcagcacctcatggtgtagtcttcttgcatgtgacttatgtccctgcacaagaaaagaacttcacaactgctcctgccatttgtcatgatggaaaagcacactttcctcgtgaaggtgtctttgtttcaaatggcacacactggtttgtaacacaaaggaatttttatgaaccacaaatcattactacagacaacacatttgtgtctggtaactgtgatgttgtaataggaattgtcaacaacacagtttatgatcctttgcaacctgaattagactcattcaaggaggagttagataaatattttaagaatcatacatcaccagatgttgatttaggtgacatctctggcattaatgcttcagttgtaaacattcaaaaagaaattgaccgcctcaatgaggttgccaagaatttaaatgaatctctcatcgatctccaagaacttggaaagtatgagcagtatataaaatggccatggtacatttggctaggttttatagctggcttgattgccatagtaatggtgacaattatgctttgctgtatgaccagttgctgtagttgtctcaagggctgttgttcttgtggatcctgctgcaaatttgatgaagacgactctgagccagtgctcaaaggagtcaaattacattacacataa

SEQ ID NO: 79 - DNA, 3822 bp, synthetic construct
  misc_feature 1..3822: note = Description of Artificial Sequence: Synthetic polynucleotide
  source 1..3822: mol_type = other DNA
atgtttgtcttcctggtcttgctgccgctggtgagcagccagtgcgtgaatctcaccacccgcacccagcttccacctgcctacactaacagcttcacccgaggggtgtattaccctgacaaggtattccggtcctccgtcctccatagcacgcaggacctttttctgcccttcttctcaaatgtgacatggttccatgccattcacgtgagcggcacgaatggaacgaagcgctttgataaccccgtgctgcctttcaatgacggcgtctacttcgcctccactgaaaagtcaaacatcatccggggctggatctttggcaccactcttgattcaaagacccagtcactgctgattgtgaacaatgctacaaacgtggttatcaaggtgtgtgagtttcagttctgtaacgatccatttttgggagtgtactaccacaagaacaacaagtcctggatggagtctgagttcagagtgtatagctctgctaacaactgcaccttcgagtacgtgtcccagcctttccttatggacctggaaggcaaacagggcaatttcaaaaacctgagagagttcgtgtttaagaacattgacggatacttcaaaatttattctaagcacacaccaattaacttagtgcgggacctaccccaaggctttagcgccctagagcccctggttgacctgcccattgggatcaatataacaaggttccaaactctactggctctgcatagaagttatctgaccccaggagacagctctagtggttggaccgccggcgcagcagcctactatgtcgggtacttacagccacgcacgttccttctgaagtacaatgagaacgggacaatcactgacgcagtagactgtgcactggacccgctaagcgagactaagtgcacacttaaatccttcacggtggagaaaggcatttatcagacctctaacttcagggtgcagccaacagaaagcattgtgcgattcccaaatattactaatctttgccctttcggggaggtctttaatgcaactagattcgcatcagtctatgcgtggaaccgcaaacgcatttccaattgtgtcgcagactactcagtgctgtacaactctgcctctttcagtacgttcaagtgttacggagtgtcacccactaaactgaacgacctgtgctttacaaatgtctacgctgactccttcgtgattaggggagacgaggtgagacaaattgcccccggacagactgggaagattgccgactacaattataagcttcctgatgatttcactggctgtgttattgcctggaatagtaacaatctggatagcaaggtgggaggcaactataactacttatatcgactgtttaggaagagtaatctgaaaccatttgagcgggatatttccacagaaatttaccaggccgggagcacaccatgtaatggggtggagggatttaattgttacttcccactccagagctatggtttccaacccaccaatggagtgggttaccagccctatagagtcgtggtgcttagttttgagctgcttcacgccccagcaaccgtctgcggtcccaaaaagtcgaccaatctcgtgaaaaacaaatgcgtaaacttcaactttaacggcttaacaggaaccggcgtgctcaccgaaagcaacaagaaattccttccatttcagcaattcggaagggacatcgccgacacaacagacgcggtgagggacccacagactctggagatactggacatcactccttgttcgtttgggggcgtctcggtcatcacacccgggactaatactagtaatcaggtagcagttttatatcaaggcgtcaactgtaccgaagtacctgtggccatacacgctgatcagctaacgccaacatggcgagtctattccaccggctctaacgtttttcagaccagggctgggtgcctgataggggcagagcacgtcaataattcctatgagtgtgatatccccataggtgcggggatctgtgccagctatcaaacccaaaccaattcaccaaggcgagcacggtctgtggcttctcagagcataattgcatatacaatgtcactgggcgctgagaatagcgttgcatactctaataacagcatagccattcccacgaactttactatcagtgtgacaaccgaaatattgccagtttcgatgaccaaaactagcgtggattgcacgatgtacatctgtggagactctaccgaatgcagcaatctgctattacaatatggcagcttctgtacacagttaaatcgagccttgacaggcatcgcagtggaacaggacaaaaatactcaagaggtgtttgcacaggtgaagcaaatctacaaaacgccccccattaaagattttggcgggttcaatttttcacaaattctccccgacccgtctaagccgagtaagcggtccttcatcgaagatctgctctttaacaaagtaaccctcgccgatgccggctttattaagcagtatggcgactgcctgggggatatagccgctcgtgacctgatttgcgcccagaagttcaatggtctgaccgtgttgcctcctttattgaccgatgaaatgattgcccagtacactagtgccctgctggccggcactatcacgtctgggtggaccttcggagctggtgccgccttgcagataccttttgcaatgcagatggcctataggtttaatggtatcggagtgactcagaacgtactgtacgagaaccagaagctcatcgctaatcaatttaactccgctatcggaaaaatccaggacagcctctcttctacagctagcgctctgggcaaactgcaggatgtcgttaatcagaatgcccaggccctgaacaccttggttaaacaactatcttccaacttcggggccatatccagtgtgttgaatgatattctctcccgcttggataaggtggaagctgaggtgcagatcgatcgcttgatcaccggcagactgcagtccctccagacatatgtaactcagcagctgattagagccgccgagataagggcaagtgcgaatctggctgccaccaagatgagcgaatgtgtattgggccagagcaaacgagttgatttttgcggtaaggggtatcatttaatgtctttccctcaatccgcacctcatggcgtagttttcctgcatgtgacttatgtcccggctcaggagaagaattttaccacagcccccgcgatctgccatgacggaaaggcccacttcccccgggaaggcgtgtttgtatccaatgggactcactggtttgtcactcagcgaaatttttatgaaccacagatcatcaccactgacaacacatttgttagtggaaactgcgatgtggtcatcggcatcgtgaataacactgtctatgatccactgcaacctgaactggattcttttaaagaggaactcgacaagtattttaaaaaccacactagccctgacgtggatctcggtgacatttctggcatcaacgctagcgtagtgaacattcagaaagagatagatagacttaatgaggtggccaagaacctcaacgaaagtctgatcgacctccaggaactggggaaatacgagcagtacattaaatggccttggtacatatggctggggttcattgctgggctgatcgcaatagtgatggtgaccataatgctctgttgcatgactagctgctgcagctgcctgaagggctgctgtagttgtgggtcatgttgtaagtttgacgaagatgatagcgagcctgtccttaaaggagtgaagctccactacacctag

SEQ ID NO: 80 - DNA, 3822 bp, synthetic construct
  misc_feature 1..3822: note = Description of Artificial Sequence: Synthetic polynucleotide
  source 1..3822: mol_type = other DNA
atgttcgtatttctggtgctgctgcccctagtgagctcccagtgcgtgaacctgaccaccagaacccagcttcctcccgcctacaccaatagcttcacaaggggagtgtactaccccgataaggttttccggtcgtctgtcttgcatagcactcaggacctctttctgccgttcttctctaacgtgacttggtttcacgccattcacgtgagcggtacaaacggaactaagaggtttgataaccctgttctcccatttaacgatggggtctacttcgccagcacggagaagtctaatatcatccgcgggtggattttcggcacgacactagacagtaagacccagtcacttttaatagttaataacgcgactaatgttgtgataaaagtatgtgaattccagttctgcaatgatccgtttctcggtgtatactaccataagaataataagtcttggatggagtccgaattccgtgtttactcgtcagctaataactgtacattcgagtacgtaagccaaccctttctgatggatctggagggtaaacagggaaactttaaaaacctaagggaatttgttttcaagaatattgacggatactttaagatctattccaagcatacccctataaacttggtgagagatctgccacagggcttttccgctctagagcccttggttgacttacctattggtatcaatattactagatttcaaacgctgcttgccctacatagatcttatttgaccccgggtgactcgagttccggctggaccgcaggtgcggcggcatactacgttggttacctgcagccgcgcacttttctcctcaaatacaatgagaatgggaccatcacggatgccgtcgactgcgcattagatccgctgtccgagaccaaatgcaccctaaaaagctttactgttgaaaagggtatttaccaaacgtctaatttccgcgtacaacccactgagtcgatagttcggttccccaatatcaccaatctatgccctttcggtgaagtctttaacgcaacacgtttcgcgtccgtttacgcctggaaccgtaagcggataagcaactgcgtggctgattatagtgtgctatataactctgcgtcctttagcactttcaaatgctatggagtatcccccacgaagctgaatgacttgtgttttacgaatgtttatgccgattcgttcgtcatacgtggagacgaggtgagacagatagctccaggccagactgggaaaatcgctgactacaactacaaacttcctgacgatttcacgggttgcgtgatagcatggaacagtaataacctagattcaaaagttggcggcaattataattatttgtatcgcctgttccgtaagtccaatttaaagccatttgagcgggatataagtacagaaatctaccaagcgggttcgacgccgtgtaacggagtagaaggctttaactgctattttccgttacagtcgtacgggttccagcctaccaacggcgtggggtaccagccgtatagagtcgtagtattgtcgtttgaactcctccatgccccagcgacggtatgtgggccgaagaaatccactaacttagtcaaaaacaagtgtgttaacttcaattttaacggcttaacggggacgggggtcctcacggagtcgaataagaaattcctaccattccagcaatttggtagggacatagccgacaccactgacgcggtgagggacccgcagacgctcgagatattagacataacgccttgctcgttcggtggtgtgagcgtcataactccgggaaccaatactagcaatcaggtagcggtattatatcagggagtaaattgtactgaggtacctgttgcgatccatgctgaccaattaacacccacgtggcgcgtctactccactggcagtaatgtatttcagactcgggccgggtgcctaataggagcagaacatgtaaataacagttacgagtgcgatataccgataggcgcagggatatgtgctagttaccagacacaaactaatagcccccgtagggcgcgctccgtagcgtcccagtctattatagcgtataccatgagcctcggggctgagaacagcgtagcatatagtaacaacagcatagcgattccgacgaacttcactatatccgtgacgactgagatcttgcctgtctcgatgactaagacaagcgtagactgtacgatgtatatctgcggtgatagtacggaatgcagcaacctcctattacagtacggctccttttgtacgcagctgaaccgcgcgttgacaggcattgcggtcgagcaggataaaaatacgcaggaggtcttcgcccaagttaagcagatatacaagacgccccccataaaggactttgggggatttaatttctcgcagatccttcccgatccctctaaacctagcaagcgttcgttcattgaggatttactttttaacaaggtgacgctggcagatgcaggcttcataaagcaatacggcgactgtctgggtgacatcgcagcccgtgacctgatttgtgcgcaaaaattcaatggcctgaccgtcctaccccctctgttgactgatgaaatgattgcacagtatacgtctgccctattagcaggtacaattacaagcggttggacgtttggagcaggggccgcgctacagatacctttcgctatgcagatggcgtataggttcaacggcattggggtcactcagaacgtgctttatgaaaaccagaaactgatagctaaccagttcaacagcgctataggcaaaatacaggactcgctctcctctacggcatcagccctaggtaagctccaagacgtcgtgaatcagaatgcccaggcgttaaataccttagtgaaacaactgtcgtccaacttcggcgcgatatcgtcggtacttaatgacattttgagcagacttgacaaggtcgaggccgaggtgcaaatcgatagacttatcacaggccgcttacagagtcttcaaacctacgtaactcagcagttgataagagcggcagagattagggcaagcgctaatctagccgctacaaagatgagtgaatgtgtcctaggccagtcgaagcgcgtcgatttctgtgggaaaggctatcatctcatgtcttttccccagtcggccccgcacggcgttgtattcctccacgtgacatatgttcccgcgcaagagaagaactttacgaccgcgcctgcgatctgtcatgacggtaaagcccactttcccagggagggcgttttcgtctcgaacgggactcactggttcgtgacccagcgtaacttctacgagccgcagataattaccacggacaatacgttcgtgtcgggtaattgtgacgtggtaatcggcatagtcaataatactgtctatgaccccttgcaaccagagttagactccttcaaagaagaattggacaagtattttaagaaccacacgtcgcctgacgtagatttgggcgacatctcgggtattaatgcatctgtagtgaacatccagaaagagatagataggttaaacgaagtagctaagaatttgaatgagagcctgattgatctacaagagttgggtaaatatgagcagtacataaagtggccgtggtatatttggctcggctttatagccggtcttatagctatagtgatggttacgattatgctgtgttgcatgactagttgctgtagctgcctgaagggctgctgttcatgcggctcatgttgtaaattcgatgaggatgacagtgaaccggtgcttaagggcgtaaagctacactatacctga

SEQ ID NO: 81 - DNA, 3822 bp, synthetic construct
  misc_feature 1..3822: note = Description of Artificial Sequence: Synthetic polynucleotide
  source 1..3822: mol_type = other DNA
atgttcgtgttcctagtgctgctgcctctggtgagcagtcagtgtgtgaacctgaccactagaacacagctccccccagcatacactaatagctttacccgcggcgtgtactaccctgacaaagtgttccggtctagcgtcctgcatagcacccaagacctgttcctgccattcttcagcaacgtgacctggttccacgccattcacgtgagtggcaccaatgggacaaaaaggtttgacaatcccgtcctcccctttaatgatggggtctacttcgcctctactgagaaatctaatattatccgggggtggattttcggaaccactttagattcaaagacacagagcttgttgatagtgaataatgcaaccaacgtggtaatcaaagtctgtgaattccagttctgcaacgacccgttcctgggagtttattaccacaagaataataagtcctggatggagtcagaattcagagtgtatagcagcgccaataattgcacttttgagtacgtgagccagcccttcctgatggaccttgaaggaaaacagggcaacttcaagaacctgcgagagtttgtgtttaaaaacatcgacggctactttaaaatctattctaaacatactccaatcaacctcgtaagagatctgccacagggcttcagcgctctggagcccctcgtggacctcccgatcggcattaacatcactcggttccaaaccctgctggctcttcaccgcagctatttgactcctggggatagtagtagcggctggaccgccggcgcagccgcctattatgtgggctacctgcagcccaggacattcctgcttaaatataatgagaacggcaccattacagacgccgtggattgtgctctagatcccctgtcagagactaagtgcacactgaagtctttcacagttgagaagggaatttatcagacctctaatttccgcgtccagcctaccgagtccattgtcagatttcctaatataaccaatctttgtccattcggagaagtttttaatgccacccggttcgcatctgtctacgcctggaatagaaaaaggattagcaattgtgtggctgattattcagtcttgtacaattcagcatccttctccacctttaaatgctacggtgtgtcacctaccaagctgaatgatctttgcttcactaacgtttatgccgattcttttgtgatcaggggcgatgaggtgcgacagatcgcccctggccagactggcaaaattgcagactacaattacaagctgccagatgatttcaccggctgtgtaatcgcttggaactcaaacaaccttgatagcaaagtaggaggaaattataattacctttatagactgttcaggaagagcaacttgaagcctttcgagcgggatatttcaactgagatctaccaggctggaagcaccccctgtaatggtgtcgaggggtttaactgctattttcctcttcagtcctatggattccagccgaccaacggagtggggtaccagccttacagagtggtggtgctctcatttgaactcttgcatgcaccagccaccgtgtgcggaccgaagaagtctactaacctggtgaagaacaaatgcgtcaattttaatttcaatggtctaacgggtacaggagtgctcactgagtctaacaagaagttccttccctttcaacaatttggccgggacatagccgataccacagatgctgtgagagacccccagactctcgaaatcctggacataactccttgcagctttggtggggtgtcggttattacaccagggactaataccagcaaccaggtcgccgtgttgtatcagggtgtcaactgtacagaggtgccagtggcaattcacgcagatcagctgacccctacctggcgggtttacagcacaggcagcaatgtgtttcagacccgggccggatgcctgattggcgccgagcatgtcaacaacagttacgaatgtgacataccaataggcgctggcatttgtgcatcttaccagacccagacaaattctcccagaagggcccgtagcgtcgctagccagtccataatagcctacactatgtctctgggggctgagaactctgtggcgtattcaaataattcaattgccatcccaactaacttcacaattagtgtcacaaccgagattcttcctgtgtctatgaccaaaacaagtgtggactgcacaatgtacatatgcggggacagcactgaatgttccaacctcttgctccagtacgggtctttctgtacccagctgaaccgagccctgactgggattgcggtggaacaggataagaatactcaggaggtctttgcgcaggtaaagcagatttacaaaaccccccccattaaagactttgggggttttaacttttctcagatacttcccgacccctctaagccatccaagaggtccttcattgaggatcttctgtttaataaggtcacattagctgatgccggcttcattaagcaatatggcgactgtctgggtgacattgctgctagagacctgatttgcgcccagaaattcaacggactgactgtcctgccgcctctgctgaccgatgaaatgattgcccaatacacctcagccctgctcgccggaacgattactagcggatggacatttggggcaggggcagcactccaaattccatttgccatgcagatggcttatcgctttaacggcatcggcgtcactcagaatgtcctctatgaaaatcagaagctcattgcaaatcaatttaattccgcaattggaaagattcaggacagcctctcttccactgcctccgcactggggaagctgcaggacgttgtcaaccagaacgctcaggctttgaacactctcgtgaaacagctgagctcaaatttcggcgctatctcctccgtgttaaatgacattttgtcacggttagataaagtggaggccgaggttcagattgaccgcctcattaccgggagattgcagtctctgcagacctacgtgacacagcagttaatccgagctgctgagataagagccagtgccaacctggctgccacgaagatgtcggagtgtgttctgggccagagcaaaagggtggacttctgcgggaaggggtatcatctcatgagcttccctcagtctgcaccccacggggtggtttttctgcacgtcacttacgtcccagctcaagagaaaaattttaccaccgccccggcaatctgtcatgatggcaaggcccactttccccgggagggcgtttttgtaagtaatggaacacactggtttgtgactcagagaaatttctacgaaccccagatcattacgactgacaacaccttcgtgtcaggaaactgtgatgtcgtcattggaatcgtgaacaacactgtgtatgaccctctacagcccgagttggactcctttaaggaggagctggacaagtacttcaaaaatcacacgagtcccgatgttgatttgggcgatatctcaggcatcaacgcctccgtcgtgaatatccaaaaggaaatagatcgtcttaacgaggtggcaaagaatctgaacgaaagccttattgacttacaggaactgggaaagtacgaacagtacattaagtggccctggtacatctggctcggatttattgctggattgattgctatcgtgatggtcaccatcatgttgtgctgcatgacgtcctgttgctcctgccttaagggctgttgtagctgtggaagttgctgcaagtttgatgaagacgacagtgagcctgtgctcaagggggtgaagctccactacacatga

SEQ ID NO: 82 - DNA, 3822 bp, synthetic construct
  misc_feature 1..3822: note = Description of Artificial Sequence: Synthetic polynucleotide
  source 1..3822: mol_type = other DNA
atgtttgttttcctggtgctgcttccactagtgtcctcccagtgcgtgaaccttaccactagaacacaactccccccagcttacactaatagcttcactaggggagtgtactacccagataaagtgttccgctcctctgtgctgcatagcactcaggacctgtttctgcctttcttctctaacgttacttggttccacgccatccacgtgagtgggaccaacggcaccaagcggtttgataaccccgtcctgccatttaatgacggtgtttactttgccagcactgaaaagtctaacatcatccgtggttggatcttcggtaccacactggactctaaaacccagtcactgctgattgtgaataacgccacaaacgtggtgatcaaggtgtgcgagtttcagttctgcaatgacccattccttggcgtctactaccataaaaacaataagtcctggatggagagcgaatttagagtttactcctcagctaataattgtacctttgagtatgtttcccagcccttcctgatggatctcgaaggcaaacagggaaacttcaagaacctaagagagtttgtgtttaaaaatatcgacgggtatttcaaaatctacagcaagcatacccctatcaatctggtcagggacttgccacaggggttctctgccctggagcctctcgtcgaccttccaattggtatcaacattactagattccagaccttgctggcactccacaggagttaccttacaccaggcgattcatcgagcggctggacagccggcgctgcagcctattacgtcggctatctgcaaccccgaacattcctcctaaaatataacgagaatggaacaatcaccgatgctgtcgattgtgcgctggaccccctgtctgagactaagtgcaccttgaaatcctttacggtggaaaaaggcatatatcaaacctccaacttcagagttcagcctacagagtccattgtccggtttcctaatattaccaacctatgcccctttggagaggtcttcaatgccaccaggttcgcgtctgtgtacgcttggaataggaagaggataagtaactgtgtcgcagactatagcgtcctgtataattccgccagcttctccaccttcaagtgctacggggtgagcccaaccaaactgaatgatctgtgttttactaacgtgtatgccgactcgttcgttattcgcggtgatgaagttaggcagatagccccaggccagaccggaaagatcgccgattacaattacaaattacctgacgacttcaccgggtgtgttattgcctggaacagcaataacctcgatagtaaagttggaggtaattataactacctatatagactctttagaaaaagtaacctcaagccttttgaaagagacattagcaccgagatctaccaggcaggctcaacgccatgtaacggggtcgagggattcaactgctacttcccacttcagtcttacgggttccagccaactaacggagtgggctatcagccttatagggtggtcgtgctaagttttgagctcctccacgctcccgcaacagtgtgcggccctaaaaagagtaccaacttggtgaagaataagtgcgttaatttcaattttaatggccttaccggaaccggagtcctgacagaatctaataagaagtttttaccattccagcagttcgggcgcgacatagccgacaccaccgacgcagtgcgagacccccagacattggaaatcttggatatcacaccatgcagtttcggcggggtctcagtgatcactcctgggactaacacaagcaaccaggtagccgtgctgtatcagggtgttaactgtactgaagtgcccgtggcaatccatgctgatcagctgacacccacttggagggtgtacagcaccggcagcaatgtttttcagacacgcgcaggctgcctaatcggcgccgagcacgtaaataattcatacgagtgcgatatacctatcggggctggcatttgtgccagctaccagacacagaccaactcacctagacgcgcacggtctgtcgcctcacaaagcataattgcttataccatgtccttaggagccgagaactccgtcgcgtattccaacaatagcattgcgatccctaccaatttcactataagcgttactactgaaattcttcccgtctccatgacaaaaacctctgttgactgcactatgtatatctgtggggattccactgagtgtagtaatctcctgctgcagtacggatccttctgcacacagctgaaccgggccctgactgggattgcagttgagcaggacaagaatacccaggaagtcttcgcccaggtcaagcaaatctataaaacacctcccatcaaagattttggggggtttaactttagtcagatcctgcccgaccctagtaaaccctctaaacgctcatttattgaggacttactttttaacaaagtcactcttgctgacgccggctttatcaagcagtatggagactgtttgggcgacattgccgcccgggaccttatctgcgcccagaaattcaacgggctaaccgttctcccgcccctactgactgacgagatgatcgctcagtatacgtctgcactgctagcaggtaccatcactagcggatggacctttggcgcaggagcagccctccagatcccattcgctatgcagatggcctaccgttttaacggtatcggcgtaactcagaatgtgctctatgagaaccagaagctaattgccaatcagtttaattcagctataggcaaaattcaggatagcttatccagtacagcctccgcccttggcaaactgcaggatgtggtgaatcagaacgcacaggcccttaatacactggtgaaacagctctcatcaaatttcggggcaatttccagcgttttgaatgacatcctctctcgactggacaaggtggaggcagaggtgcagattgatcggctcatcaccggccgcctgcagtccttgcagacatatgttacacaacagttgatcagagctgccgaaataagagcctcagcaaacctggccgccactaaaatgagtgagtgcgtcctcggccagtcaaagcgggtggatttttgtgggaagggctaccacctgatgagcttcccgcagtcagccccacacggcgtggtgttcctgcatgtgacctatgtgcctgcccaggagaagaactttacaaccgccccagccatctgtcatgatggtaaggctcactttccaagggagggcgtgttcgtgtcaaatgggacccactggtttgtgacccaaaggaatttttacgaaccccagattatcacaactgacaacacttttgtgtctggcaactgcgacgtcgtcatcggcattgtcaataacaccgtgtacgaccctctccagcccgagcttgatagtttcaaggaggaactcgacaaatactttaagaaccacacctcaccggatgttgacctgggagacatcagcggcattaacgcttccgtcgttaatatccagaaggaaatcgatcgtttgaacgaggtggccaaaaatctgaacgaaagcctaattgatctccaggaactggggaaatatgagcagtacataaaatggccctggtacatctggcttgggttcatcgctggcctcattgccattgtgatggtgacaatcatgctttgttgtatgaccagttgctgctcgtgccttaagggttgttgttcttgcggaagctgctgtaagttcgatgaggacgatagcgagccagtgcttaaaggcgtgaagcttcattatacatga

SEQ ID NO: 83 - DNA, 3822 bp, synthetic construct
  misc_feature 1..3822: note = Description of Artificial Sequence: Synthetic polynucleotide
  source 1..3822: mol_type = other DNA
atgtttgtgttcttggtgctgctacccctggtgagtagccagtgcgtgaacctgactactaggacacagctgccccccgcctataccaactcctttacaaggggcgtgtactaccctgacaaggtattcagaagcagtgtgctgcacagcactcaggatctctttctgccattcttcagcaatgtgacttggttccatgccatccacgtgagcggaaccaacgggacaaaacggtttgacaaccctgtgcttcctttcaatgatggtgtctactttgcctccactgagaaatccaatatcatccgcggctggatcttcgggaccacactcgattctaaaacacagtcactgctgattgtgaataatgctactaatgttgtgatcaaggtctgtgaattccagttttgcaatgatcctttcctgggagtatactatcataaaaacaacaagtcttggatggagagtgagttccgcgtctatagctccgcaaacaattgtacctttgagtacgtgtcacagccttttctaatggacttagagggaaaacaggggaattttaaaaacctgagagagttcgtcttcaagaatattgatggctatttcaagatctactccaaacacacacctatcaacttggtccgcgatctacctcagggattctcagccttagaacctctggtagatcttcccatagggatcaacataacccggttccagaccttactcgccctgcataggagttacctgacccccggagactcttcgtccggatggacagccggcgctgccgcatattacgtgggctacctccagcccagaacttttctgcttaagtataatgaaaatggaacaataaccgatgcagtggattgtgccctggaccccctgtccgagaccaagtgcactctgaaaagctttaccgtggaaaaaggaatttaccaaacctcaaattttcgagtgcagcctacagagagcattgttagatttcctaacatcactaacctatgtccatttggagaagtgtttaatgccactcggttcgcttccgtttatgcatggaatcggaaacggataagcaactgtgtcgcagactacagcgtgttgtacaacagcgcttcttttagtactttcaagtgttacggagtcagtccaactaaactcaacgacctatgcttcaccaacgtctacgccgacagctttgttattagaggagacgaggtgaggcagattgctccaggtcagaccggcaagatcgccgactacaattacaagctgcctgatgattttaccgggtgcgttattgcctggaactccaacaatttggattcaaaggttgggggtaactataactatctgtacagactgtttagaaagtctaacttgaagccatttgaacgtgacatctctacagaaatatatcaggcgggaagcacgccatgtaacggggtggaggggttcaactgctattttccactgcagtcttacggttttcagcccaccaatggtgtggggtaccagccatatagggtggtggtcctgagtttcgagctcctgcacgcacctgccacagtctgtggccctaagaagagcaccaatcttgtgaagaataagtgcgtcaacttcaactttaatgggctaactggtacaggcgtgctgaccgaatcgaacaaaaagttcctccccttccaacagtttggtagagacatcgcagataccacagacgccgtgcgggatcctcagaccctcgagattctcgatatcacgccttgctcctttggcggagtctccgtgattacgccaggaacaaatacttctaaccaggtggccgtgctttatcagggggtgaattgcaccgaagtgcctgtcgctattcatgcagaccagctgactccgacctggagggtgtattcaacaggatcgaacgtatttcagactcgcgctggttgccttattggggccgagcacgtcaataacagttatgagtgcgacatccctatcggggctggcatctgcgcatcgtaccagacacagactaactctcctaggagagcccgttccgtcgcatctcagtctatcatcgcctacactatgtctctgggagccgagaatagcgtggcctatagtaataattctattgcgatacctacgaacttcactatcagtgtgacgaccgaaattctgcccgtgtccatgaccaagacaagcgttgactgcaccatgtacatctgtggtgactctaccgagtgctccaacctgcttttacagtacggctcattttgtacacagttgaaccgcgcactcaccggaatcgctgtggagcaagataaaaatacgcaggaagtcttcgctcaagttaagcagatttataagactcccccaatcaaagacttcggcggcttcaattttagtcagatactgccagatcctagcaagcccagcaagaggtccttcattgaagatctccttttcaacaaggtgactttggctgacgctggcttcatcaagcagtatggagactgtctgggcgacatagccgcacgagacctgatttgtgcgcagaaattcaacgggctgacagtgctaccacctttactgactgatgaaatgatcgcccagtacaccagtgctctattggcaggaactatcacttctggttggacctttggggcaggcgccgctcttcagattccttttgctatgcagatggcataccgctttaacggcataggtgttacccagaatgtgctgtatgagaaccagaagctcattgcgaatcagtttaactcagccattgggaagatccaggattcactgtccagtactgcgtcagcattaggaaagctgcaagatgtagtgaatcagaacgcacaggctctgaatacactcgtgaaacaactctcttctaatttcggggcaatcagctccgtactgaatgatatcttgagtagactggacaaagtggaggctgaggtgcagatcgataggctgatcacaggccgcctccagagtctgcagacttacgtgacccagcagctcatccgggccgccgagatcagagcttcagccaatctggccgccacaaaaatgtcagagtgtgtgttaggccagagtaagcgggtagacttctgtggaaagggttaccatctgatgagctttccacagagcgccccccatggagttgtttttcttcatgtgacatacgtaccggcccaggaaaagaatttcaccacagcccctgcaatttgccatgacgggaaggcccacttccctcgggagggagtgttcgtgagcaacggaacccactggtttgtaacacagcgcaatttttacgaaccccagattatcaccaccgataatacattcgtttccggcaattgtgacgtggtcataggtatcgttaataacaccgtgtatgacccgttgcagcccgaattggactccttcaaggaagaactcgataagtacttcaaaaatcacacctccccggatgtggatttaggcgatataagcggaatcaatgctagtgtcgtgaatatccagaaagagatagacagattgaatgaagtggccaagaaccttaatgagtccctgatcgacctgcaggagttgggcaaatacgagcagtacatcaaatggccctggtatatctggctgggctttattgctggactgatcgcaatcgtcatggtgaccatcatgctctgctgcatgacctcctgctgctcatgcctgaagggctgttgttcctgcgggtcttgttgtaaatttgatgaagacgacagtgagccagtattgaaaggcgtaaaacttcattatacatga

SEQ ID NO: 84 - DNA, 3822 bp, synthetic construct
  misc_feature 1..3822: note = Description of Artificial Sequence: Synthetic polynucleotide
  source 1..3822: mol_type = other DNA
atgttcgtgttccttgtcctcctcccgttggtaagtagtcaatgtgtaaacctcaccactcggacacaactacccccggcatacacaaactcgttcacacggggcgtatattaccccgacaaagtttttaggagctctgttctacattccacacaagacctgtttctaccatttttcagcaatgtcacatggttccatgcaatacacgtgtctggtacaaacggcaccaagcgcttcgacaatcctgtgcttcccttcaacgacggggtttactttgcgagtaccgaaaagtccaatatcattcgcggctggatattcggaacaaccctagactctaagacacagagcttactgattgtaaataatgctacgaacgtcgtcattaaagtgtgcgaatttcagttctgcaatgaccccttcctcggcgtgtattatcacaaaaataacaagtcatggatggaaagcgaattccgagtctactcaagtgccaacaactgcaccttcgagtacgtttcacagccgtttctgatggacctagaaggaaagcaaggaaatttcaaaaaccttagagagtttgtgtttaagaatattgatggatactttaaaatatattcaaaacatacacccatcaacctcgtcagggatctccctcaggggttcagcgcattagagcctctcgttgacctacccatcgggattaatatcacgaggtttcaaacattgctagcactccataggtcctatctaacgcctggagattcttcttctgggtggacagcaggggctgcagcatattatgtcggctatctgcagcccaggaccttcttattgaaatataatgagaacgggacgatcacagacgccgtcgactgtgcgctcgatcctttaagtgaaacgaagtgtacactcaaaagctttaccgtggaaaaaggtatctatcagactagcaactttagggtccaacccacagaatctatcgtaaggttccctaatattacaaatctctgtccatttggtgaagttttcaacgcaacaagatttgcatcagtatatgcgtggaatagaaaacgcatctcaaactgcgtagcggactactcggtgctatacaactctgcttcattttccacttttaaatgttacggggtatccccgactaaacttaatgatctatgttttactaatgtctatgccgatagctttgtcatacgaggggatgaggttcgacagatagcccctggccaaacggggaagattgctgattataactataaattgccggatgacttcacaggatgcgttatagcatggaactcgaataatttagattctaaagtcggaggcaattacaattacctatacagattgtttagaaaatcgaacttgaaaccttttgaacgagatatttccacagagatatatcaggctgggtcaactccgtgtaatggggttgaaggcttcaattgctatttccctctacaatcatacggcttccagccgacgaacggagtggggtaccagccctaccgagttgttgtactaagttttgagcttcttcacgcacctgcaactgtatgtgggccgaagaagagcacaaacctagtgaagaacaagtgcgtaaactttaattttaacggcttgaccgggaccggtgtcctgacggagtccaacaaaaagttcctgcctttccagcagtttggtcgtgatattgcagataccactgatgcggtgagggacccgcagaccctggaaatcctagatataaccccatgcagcttcggcggagtatccgtgatcacgccgggtacgaatacaagtaaccaggtcgctgtcctttatcaaggagtaaactgtacggaggttccagtagctatccacgcggaccaactgacgcctacgtggcgtgtttattcgacgggatcaaatgtctttcagactcgtgcggggtgcctcatcggggcggagcatgtcaataatagctatgagtgcgacatccccataggcgcaggaatatgtgcatcctaccaaacccagacaaattcaccccgtagggcacgcagtgttgcgtctcaaagcattattgcatatacgatgtcgcttggcgcggagaactctgtggcctacagtaataacagtatcgccatacccactaatttcactattagcgttactacggaaatactgccagtgtccatgacgaaaacatccgtagactgtaccatgtacatatgcggggattcgactgagtgtagcaacctattgctccaatacggatctttttgcacgcaactaaatcgggccctaacgggcatagcggttgaacaggacaaaaacacccaggaagtatttgcgcaggtgaaacaaatttataagacgcctccgattaaagattttggcggattcaacttctcgcaaatcttaccagacccctctaagccctcaaagagaagtttcatagaggatctcttattcaacaaggtcaccttggcagatgcaggttttataaagcaatatggggactgtctcggtgacatcgctgcgcgtgacctgatatgcgctcaaaaattcaatggtctgacggtgttaccgccgctgctaaccgacgagatgattgctcagtacacctcggcactgctggccggtacgattacgtcgggatggacgttcggtgcgggtgcggcactacaaataccgttcgcgatgcagatggcgtaccgctttaatgggattggcgtcacgcagaatgtgctgtacgagaaccagaagttaatagcaaaccagttcaatagcgcaattggtaaaatacaggattccctatcaagtactgcaagcgccctggggaaactccaagacgtcgtgaaccaaaatgcccaagcccttaatactcttgtaaaacagctgagttccaactttggggctattagtagtgttctgaacgacatactttcgcgacttgacaaggtggaggcggaagttcaaatcgaccggttaatcacggggaggctgcaatcactgcagacctacgtaacacaacaattgataagggccgcagaaattcgggcatccgctaatctagccgcgaccaagatgtctgaatgcgttctaggccagtcgaagcgagtggacttctgcggtaagggttaccatctaatgagctttccccagtccgctccccatggtgtagtcttcttgcatgtgacttatgtcccggcacaggaaaagaacttcacgacagcacccgctatatgccacgacggaaaggcgcactttccacgagagggggtcttcgtgagtaatggaacccattggttcgtgacacagcgtaatttttatgagcctcagatcataacgactgacaatacttttgtcagtgggaactgcgacgtagttataggaattgtgaataatacagtgtatgatcccctacaaccggagttggattcttttaaggaagagctcgataaatattttaaaaaccatactagcccggacgtcgaccttggggatataagtgggataaatgcttcagtggtgaatatccaaaaagagattgatcgcctaaacgaggtggccaagaacctaaatgaaagcttaatagatctacaagaattgggcaagtacgaacaatatataaagtggccatggtacatctggctgggctttatcgccggtctcattgccattgtcatggtcacgattatgctttgttgcatgacttcttgttgctcctgtttaaagggttgctgttcatgcggttcatgttgcaagtttgatgaggacgatagcgagcccgtcttaaaaggagttaaattacattatacctga

SEQ ID NO: 85 - DNA, 3822 bp, synthetic construct
  misc_feature 1..3822: note = Description of Artificial Sequence: Synthetic polynucleotide
  source 1..3822: mol_type = other DNA
atgtttgtcttcctggtcttgctgccgctcgtgtctagccagtgcgtgaatctcaccacccgcacccagcttccacctgcctacactaacagcttcacccgaggggtgtattaccctgacaaggtattccggtcctccgtcctccatagcacgcaggacctttttctgcccttcttctcaaatgtgacatggttccatgccattcacgtgagcggcacgaatggaacgaagcgctttgataaccccgtgctgcctttcaatgacggcgtctacttcgcctccactgaaaagtcaaacatcatccggggctggatctttggcaccactcttgattcaaagacccagtcactgctgattgtgaacaatgctacaaacgtggttatcaaagtctgcgagtttcagttctgtaacgatccatttttgggagtgtactaccacaagaacaacaagtcctggatggagtctgagttcagagtgtatagctctgctaacaactgcaccttcgagtacgtgtcccagcctttccttatggacctggaaggcaaacagggcaatttcaaaaacctgagagagttcgtgtttaagaacattgacggatacttcaaaatttattctaagcacacaccaattaacttagtgcgggacctaccccaaggctttagcgccctagagcccctggttgacctgcccattgggatcaatataacaaggttccaaactctactggctctgcatagaagttatctgaccccaggagacagctctagtggttggaccgccggcgcagcagcctactatgtcgggtacttacagccacgcacgttccttctgaagtacaatgagaacgggacaatcactgacgcagtagactgtgcactggacccgctaagcgagactaagtgcacacttaaatccttcacggtggagaaaggcatttatcagacctctaacttcagggtgcagccaacagaaagcattgtgcgattcccaaatattactaatctttgccctttcggggaggtctttaatgcaactagattcgcatcagtctatgcgtggaaccgcaaacgcatttccaattgtgtcgcagactactcagtgctgtacaactctgcctctttcagtacgttcaagtgttacggagtgtcacccactaaactgaacgacctgtgctttacaaatgtctacgctgactccttcgtgattaggggagacgaggtgagacaaattgcccccggacagactgggaagattgccgactacaattataagcttcctgatgatttcactggctgtgttattgcctggaatagtaacaatctggatagcaaggtgggaggcaactataactacttatatcgactgtttaggaagagtaatctgaaaccatttgagcgggatatttccacagaaatttaccaggccgggagcacaccatgtaatggggtggagggatttaattgttacttcccactccagagctatggtttccaacccaccaatggagtgggttaccagccctatagagtcgtggtgcttagttttgagctgcttcacgccccagcaaccgtctgcggtcccaaaaagtcgaccaatctcgtgaaaaacaaatgcgtaaacttcaactttaacggcttaacaggaaccggcgtgctcaccgaaagcaacaagaaattccttccatttcagcaattcggaagggacatcgccgacacaacagacgccgtcagggacccacagactctggagatactggacatcactccttgttcgtttgggggcgtctcggtcatcacacccgggactaatactagtaatcaggtagcagttttatatcaaggcgtcaactgtaccgaagtacctgtggccatacacgctgatcagctaacgccaacatggcgagtctattccaccggctctaacgtttttcagaccagggctgggtgcctgataggggcagagcacgtcaataattcctatgagtgtgatatccccataggtgcggggatctgtgccagctatcaaacccaaaccaattcaccaaggcgagcacggtctgtggcttctcagagcataattgcatatacaatgtcactgggcgctgagaatagcgttgcatactctaataacagcatagccattcccacgaactttactatcagtgtgacaaccgaaatattgccagtttcgatgaccaaaactagcgtggattgcacgatgtacatctgtggagactctaccgaatgcagcaatctgctattacaatatggcagcttctgtacacagttaaatcgagccttgacaggcatcgcagtggaacaggacaaaaatactcaagaggtgtttgcacaggtgaagcaaatctacaaaacgccccccattaaagattttggcgggttcaatttttcacaaattctccccgacccgtctaagccgagtaagcggtccttcatcgaagatctgctctttaacaaagtaaccctcgccgatgccggctttattaagcagtatggcgactgcctgggggatatagccgctcgtgacctgatttgcgcccagaagttcaatggtctgaccgtgttgcctcctttattgaccgatgaaatgattgcccagtacactagtgccctgctggccggcactatcacgtctgggtggaccttcggagctggtgccgccttgcagataccttttgcaatgcagatggcctataggtttaatggtatcggagtgactcagaacgtactgtacgagaaccagaagctcatcgctaatcaatttaactccgctatcggaaaaatccaggacagcctctcttctacagctagcgctctgggcaaactgcaggatgtcgttaatcagaatgcccaggccctgaacaccttggttaaacaactatcttccaacttcggggccatatccagtgtgttgaatgatattctctcccgcttggataaggtggaagctgaggtgcagatcgatcgcttgatcaccggcagactgcagtccctccagacatatgtaactcagcagctgattagagccgccgagataagggcaagtgcgaatctggctgccaccaagatgagcgaatgtgtattgggccagagcaaacgagttgatttttgcggtaaggggtatcatttaatgtctttccctcaatccgcacctcatggcgtagttttcctgcatgtgacttatgtcccggctcaggagaagaattttaccacagcccccgcgatctgccatgacggaaaggcccacttcccccgggaaggcgtgtttgtatccaatgggactcactggtttgtcactcagcgaaatttttatgaaccacagatcatcaccactgacaacacatttgttagtggaaactgcgatgtggtcatcggcatcgtgaataacactgtctatgatccactgcaacctgaactggattcttttaaagaggaactcgacaagtattttaaaaaccacactagccctgacgtggatctcggtgacatttctggcatcaacgctagcgtagtgaacattcagaaagagatagatagacttaatgaggtggccaagaacctcaacgaaagtctgatcgacctccaggaactggggaaatacgagcagtacattaaatggccttggtacatatggctggggttcattgctgggctgatcgcaatagtgatggtgaccataatgctctgttgcatgactagctgctgcagctgcctgaagggctgctgtagttgtgggtcatgttgtaagtttgacgaagatgatagcgagcctgtccttaaaggagtgaagctccactacacctag

SEQ ID NO: 86 - DNA, 3822 bp, synthetic construct
  misc_feature 1..3822: note = Description of Artificial Sequence: Synthetic polynucleotide
  source 1..3822: mol_type = other DNA
atgtttgtctttctggtcctgcttcccctcgttagttctcagtgtgtgaacctcaccacacggacgcaactccctccagcttacacaaattcttttacgcgaggcgtgtattatccggataaagttttcaggtcctccgtcctgcactccacgcaggacctttttttgccgttcttttctaacgtaacatggtttcatgccattcatgtttccgggacaaacggtacgaaacgctttgataaccctgtgctgccgttcaatgatggcgtttactttgcctctacggaaaagagtaacataatccgaggctggatcttcgggaccaccctggatagcaagactcagagtcttctcatcgttaataacgctacaaacgttgttatcaaagtctgcgaattccagttttgcaacgatccctttttgggggtatactatcacaaaaacaacaaaagttggatggaatcagagtttcgcgtgtattcttctgcgaacaactgcacgtttgaatacgttagtcagccttttctcatggacttggagggcaaacaggggaactttaaaaacttgcgggagttcgtttttaagaacatagatggttacttcaaaatttatagcaaacatacaccgatcaacctcgtgagagatctcccacagggtttttccgcactcgaaccgctcgtggatctgccgattggaattaacattacccgcttccagaccctgttggctctgcacagaagctatctgacgccaggggattccagcagtggatggacggcgggtgcggccgcgtattatgtaggctatctccaaccccgaacgttcttgctgaagtacaatgagaatgggaccattacggatgctgtggattgtgcattggatcctctctctgagacaaaatgcacccttaaaagcttcactgtagaaaagggtatttatcagactagcaacttccgcgtacaaccaacggagtctatcgttaggttccccaacattactaacttgtgcccatttggcgaagtgtttaacgcaactaggtttgctagtgtctatgcttggaatcgaaagagaataagcaattgtgtcgcagattactccgtattgtataattctgcaagcttttcaacattcaagtgctacggagtgtctcccaccaaattgaacgacctgtgttttactaacgtgtatgccgactctttcgttatccgaggcgatgaggtcaggcaaattgcccccggacaaactgggaaaattgcggattataattacaagcttccagacgactttacgggctgtgttatcgcatggaactccaacaatctcgacagcaaagtgggtggaaattataattatttgtatagattgtttcgcaagtccaacctgaagccattcgagagagacatctccaccgagatttatcaagccggctcaactccttgcaacggagtcgaaggcttcaactgttattttccgcttcagtcctatggttttcaacctacgaacggcgtgggataccagccgtatcgagtcgtggtactgtcctttgaacttttgcacgccccagcaactgtttgcggaccaaaaaagtccacaaatctcgtcaaaaacaagtgcgttaattttaattttaacgggcttacgggtactggtgtactgacggagtccaataagaaattcctgccattccaacagtttggacgggatattgctgatacgaccgacgctgtgcgagatccccagacacttgagatcctcgacataaccccctgtagttttggtggagtgtctgtaattacccccggaacgaacaccagcaaccaagttgcggtgctttatcagggtgttaattgcactgaggttcctgtcgcgatacatgccgaccaactgacgcctacatggcgagtatattcaacgggctccaacgtcttccagacgcgagccggttgtctcattggagctgaacatgtgaacaactcttatgaatgcgatataccaattggggctggaatctgcgcctcttatcagacgcagactaactcacccagacgagcacggagcgtggcaagccaatccattattgcctacaccatgtccttgggagctgagaattcagtcgcctattctaataatagcattgctataccgacgaactttacaatttccgtaactaccgaaatattgcccgtcagtatgactaagactagcgttgactgcacaatgtacatttgcggcgatagtaccgaatgctctaatcttcttctgcagtatggtagtttttgtacacaactgaatcgagctctgactgggatcgcagtcgaacaggacaaaaatacacaggaagttttcgcgcaagtgaagcaaatctacaaaacgcctcccataaaagatttcggaggattcaatttcagtcagatactccctgatccctctaaaccatctaaacgatcctttatcgaagatttgctgttcaacaaagtcacccttgctgacgctggattcataaagcagtacggggattgtcttggcgatatcgcagcccgagaccttatttgtgcccaaaaatttaacggacttacggtactccctccccttctgactgacgaaatgatagcccagtacaccagtgctctgctggctggcaccataacgagcggatggacttttggtgcgggtgcagcactgcagatccccttcgcgatgcaaatggcatacaggtttaatgggattggggtcacccagaatgtattgtacgagaaccagaagcttatagcgaatcaatttaacagtgcaattggtaagattcaggacagcctttcaagtaccgcgagtgctctcgggaagttgcaggatgtagtaaatcaaaatgcgcaggcgctgaatacgttggttaaacagctcagcagtaattttggagcaatttctagcgtgctgaatgacatcctcagcagactcgataaggtggaggctgaggtacagatagatagactcatcacgggcagattgcagagtttgcagacatacgtcacgcaacaactcattcgagcagcagaaattagagcatccgcaaatctggcggccacgaaaatgtctgagtgcgttctggggcagtccaagagagttgacttttgtgggaaaggatatcatctgatgagttttccgcagtcagcgccacatggtgtggtctttctgcacgttacttatgtccccgcacaggagaagaattttacgaccgcgccagctatttgccatgacggtaaggctcacttcccgagggaaggggtattcgtttctaacggtacgcattggtttgttacgcaacggaacttttatgaaccacagattattaccaccgacaacacattcgtaagtggaaactgtgatgtcgttatcggaatagtaaataataccgtttatgacccccttcagcctgaacttgattccttcaaggaagagctcgataaatactttaagaaccacaccagccccgatgttgacctgggtgatatatctgggatcaacgcttctgtcgtcaacattcaaaaagagatcgatcgcctgaatgaggtggccaaaaacctcaatgaaagtctcattgaccttcaagaactcggtaagtacgagcaatacatcaagtggccatggtacatatggctgggcttcattgctgggttgatagctatagtgatggttacgataatgttgtgttgtatgacatcctgctgtagctgccttaaaggttgttgttcttgcggttcttgttgtaagtttgacgaagatgattcagagcctgttctgaaaggggtgaagctccattatacttga

SEQ ID NO: 87 - DNA, 3822 bp, synthetic construct
  misc_feature 1..3822: note = Description of Artificial Sequence: Synthetic polynucleotide
  source 1..3822: mol_type = other DNA
atgttcgtgttcctggtgcttctccctctggtgtctagccagtgcgttaatctgaccaccagaacacaacttcctcctgcctacaccaacagcttcaccagaggcgtgtactaccctgataaggtgttcagatcttctgtgctgcacagcacccaggacctgtttctgcccttcttcagcaacgtgacctggtttcatgccattcatgtgtctggcaccaatggcaccaagaggttcgacaatcccgttctgcccttcaatgatggcgtgtattttgccagcaccgagaagagcaacatcatcaggggatggatcttcggcaccacactggacagcaaaacacagtctctgctgatcgtgaacaatgccaccaacgtggtgatcaaggtgtgcgagttccagttctgcaacgacccttttctgggcgtgtattaccacaagaacaacaagtcctggatggagagcgagttccgggtgtactctagcgccaacaactgcaccttcgagtatgtttctcagcctttcctgatggacctggagggcaaacagggcaacttcaagaacctgcgggagtttgtgttcaagaacatcgacggctacttcaagatctacagcaagcacacccccatcaacctggtgagggacctgcctcaaggattttctgcccttgaacctttagtggatctgcctatcggcatcaacatcacccggttccagaccctgttagctctgcacagaagctatctgacacctggcgattcttcttctggatggacagctggagctgccgcctattatgtgggctatttacagcctaggaccttcctgctgaagtacaacgagaatggcaccatcaccgacgctgtggattgtgctcttgatcctctgtctgagaccaagtgtaccctgaagagcttcacagtggagaagggcatctaccagaccagcaacttcagagtgcagcctacagagagcatcgtgagattccccaacatcaccaacctgtgcccatttggcgaggtgtttaatgccaccagattcgccagcgtgtatgcctggaacagaaagaggatcagcaattgcgtggccgattatagcgtgctgtacaacagcgccagcttcagcaccttcaagtgttatggcgtttctcccaccaagctgaatgacctgtgcttcaccaacgtgtacgccgacagcttcgtgattagaggcgatgaggtgagacagattgctcctggacaaacaggcaagattgccgactacaactacaagctgcccgacgactttaccggctgtgtgattgcctggaatagcaacaatctggacagcaaagtgggaggcaactacaactacctgtaccggctgttccggaagagcaacctgaagccattcgagagagatatcagcaccgagatctatcaggctggcagcacaccctgtaatggagtggagggcttcaactgctactttcctctgcagtcttatggctttcagcccaccaacggagtgggatatcagccctacagagtggttgttctgagcttcgagctgcttcatgctcctgctacagtgtgtggccctaagaagagcaccaatctggtgaagaacaagtgcgtgaacttcaacttcaacggcctgacaggcaccggagtgctgaccgagagcaacaagaagtttctgccttttcagcagtttggaagggatatcgccgacaccaccgatgccgtgagagaccctcaaacactggagattctggatattaccccttgctcttttggaggcgtgagcgtgatcacacctggcaccaataccagcaatcaggttgctgtgctgtatcagggagtgaattgcaccgaggttcctgtggccatccatgctgatcaactgacacctacctggagagtgtactctacaggcagcaacgtgtttcagaccagagccggatgtctgattggagccgaacacgtgaacaacagctatgagtgcgatatccctattggagccggcatctgtgcctcttaccagacccagaccaatagccccagaagagctagatcagttgcttctcagagcatcatcgcctacaccatgtctctgggagccgagaactctgtggcctacagcaataactctatcgccatccctaccaacttcaccatcagcgtgaccaccgagattctgcccgtgagcatgacaaagactagcgtggattgcaccatgtacatttgcggcgatagcaccgagtgcagcaacctgctgctgcaatatggcagcttttgtacccagctgaatagagcccttacaggcattgccgtggagcaggacaagaacacacaggaggtgtttgctcaggtgaagcagatctacaagaccccacccatcaaggactttggcggcttcaacttcagccagattctgcctgatcccagcaaacctagcaagcggagctttatcgaagacctgctgttcaacaaggtgacactggctgatgccggcttcatcaagcagtacggcgattgtttgggcgatattgccgctagagatctgatttgtgcccagaagttcaacggcctgacagtgctgcctcctctgctgacagatgagatgattgcccagtatacatctgctcttcttgccggcaccatcacctctggctggacctttggagctggagctgctctgcaaattccttttgctatgcaaatggcctaccggttcaacggcatcggagtgacccagaacgtgctgtacgagaaccaaaagctgattgctaaccagttcaacagcgccatcggcaagatccaggacagcctgagctctacagcttctgctttgggaaaactgcaggatgtggtgaaccagaatgctcaggccctgaacaccctggtgaaacagctgagcagcaattttggcgccatctcttctgtgctgaatgacatcctgagcaggctggacaaagtggaagccgaggtgcaaatcgacaggctgattacaggcagactgcagtctctgcagacatacgttacacaacagctgatcagagccgccgagatcagagctagcgctaatctggctgccaccaagatgtctgaatgtgtgttaggacagagcaagcgggtggacttttgcggcaagggatatcacctgatgagcttccctcaatctgctcctcatggagtggtgttcctgcatgtgacctacgtgcctgctcaggagaagaatttcacaacagctcctgccatctgccacgatggaaaagcccacttcccaagagaaggcgtgttcgtgtctaatggaacacactggttcgtgacccagcggaatttctacgagccccagatcatcaccaccgacaacacatttgtgagcggcaattgcgatgtggtgatcggcatcgtgaacaacaccgtgtacgaccctctgcaacctgaactggacagctttaaggaggagctggacaagtacttcaagaaccacaccagccctgacgtggatctgggcgatatctctggcattaatgccagcgtggtgaatatccagaaggagatcgaccggctgaatgaagtggccaagaacctgaacgaaagcctgatcgacctgcaagaactgggcaagtatgagcagtacatcaagtggccctggtacatctggctgggctttattgccggactgatcgccatcgttatggtgaccattatgctgtgctgcatgaccagctgctgctcttgtctgaagggctgttgctcttgtggctcttgctgtaagttcgatgaggacgattccgagcctgtgctgaaaggcgtgaaactgcactatacatga

SEQ ID NO: 88 - DNA, 119 bp, synthetic construct
  misc_feature 1..119: note = Description of Artificial Sequence: Synthetic polynucleotide
  source 1..119: mol_type = other DNA
gtaagtttagtctttttgtcttttatttcaggtccatcggtgctgctttaacactgttgaggctcctggtggtgcaaatcaaagaactgctcctcagtggacgttgcctttacttctag

SEQ ID NO: 89 - DNA, 3822 bp, synthetic construct
  misc_feature 1..3822: note = Description of Artificial Sequence: Synthetic polynucleotide
  source 1..3822: mol_type = other DNA
atgtttgtcttcctggtcttgctgccgctggtgagcagccagtgcgtgaatctcaccacccgcacccagcttccacctgcctacactaacagcttcacccgaggggtgtattaccctgacaaggtattccggtcctccgtcctccatagcacgcaggacctttttctgcccttcttctcaaatgtgacatggttccatgccattcacgtgagcggcacgaatggaacgaagcgctttgataaccccgtgctgcctttcaatgacggcgtctacttcgcctccactgaaaagtcaaacatcatccggggctggatctttggcaccactcttgattcaaagacccagtcactgctgattgtgaacaatgctacaaacgtggttatcaaggtgtgtgagtttcagttctgtaacgatccatttttgggagtgtactaccacaagaacaacaagtcctggatggagtctgagttcagagtgtatagctctgctaacaactgcaccttcgagtacgtgtcccagcctttccttatggacctggaaggcaaacagggcaatttcaaaaacctgagagagttcgtgtttaagaacattgacggatacttcaaaatttattctaagcacacaccaattaacttagtgcgggacctaccccaaggctttagcgccctagagcccctggttgacctgcccattgggatcaatataacaaggttccaaactctactggctctgcatagaagttatctgaccccaggagacagctctagtggttggaccgccggcgcagcagcctactatgtcgggtacttacagccacgcacgttccttctgaagtacaatgagaacgggacaatcactgacgcagtagactgtgcactggacccgctaagcgagactaagtgcacacttaaatccttcacggtggagaaaggcatttatcagacctctaacttcagggtgcagccaacagaaagcattgtgcgattcccaaatattactaatctttgccctttcggggaggtctttaatgcaactagattcgcatcagtctatgcgtggaaccgcaaacgcatttccaattgtgtcgcagactactcagtgctgtacaactctgcctctttcagtacgttcaagtgttacggagtgtcacccactaaactgaacgacctgtgctttacaaatgtctacgctgactccttcgtgattaggggagacgaggtgagacaaattgcccccggacagactgggaagattgccgactacaattataagcttcctgatgatttcactggctgtgttattgcctggaatagtaacaatctggatagcaaggtgggaggcaactataactacttatatcgactgtttaggaagagtaatctgaaaccatttgagcgggatatttccacagaaatttaccaggccgggagcacaccatgtaatggggtggagggatttaattgttacttcccactccagagctatggtttccaacccaccaatggagtgggttaccagccctatagagtcgtggtgcttagttttgagctgcttcacgccccagcaaccgtctgcggtcccaaaaagtcgaccaatctcgtgaaaaacaaatgcgtaaacttcaactttaacggcttaacaggaaccggcgtgctcaccgaaagcaacaagaaattccttccatttcagcaattcggaagggacatcgccgacacaacagacgcggtgagggacccacagactctggagatactggacatcactccttgttcgtttgggggcgtctcggtcatcacacccgggactaatactagtaatcaggtagcagttttatatcaaggcgtcaactgtaccgaagtacctgtggccatacacgctgatcagctaacgccaacatggcgagtctattccaccggctctaacgtttttcagaccagggctgggtgcctgataggggcagagcacgtcaataattcctatgagtgtgatatccccataggtgcggggatctgtgccagctatcaaacccaaaccaattcaccagggagcgcaagctctgtggcttctcagagcataattgcatatacaatgtcactgggcgctgagaatagcgttgcatactctaataacagcatagccattcccacgaactttactatcagtgtgacaaccgaaatattgccagtttcgatgaccaaaactagcgtggattgcacgatgtacatctgtggagactctaccgaatgcagcaatctgctattacaatatggcagcttctgtacacagttaaatcgagccttgacaggcatcgcagtggaacaggacaaaaatactcaagaggtgtttgcacaggtgaagcaaatctacaaaacgccccccattaaagattttggcgggttcaatttttcacaaattctccccgacccgtctaagccgagtaagcggtccttcatcgaagatctgctctttaacaaagtaaccctcgccgatgccggctttattaagcagtatggcgactgcctgggggatatagccgctcgtgacctgatttgcgcccagaagttcaatggtctgaccgtgttgcctcctttattgaccgatgaaatgattgcccagtacactagtgccctgctggccggcactatcacgtctgggtggaccttcggagctggtgccgccttgcagataccttttgcaatgcagatggcctataggtttaatggtatcggagtgactcagaacgtactgtacgagaaccagaagctcatcgctaatcaatttaactccgctatcggaaaaatccaggacagcctctcttctacagctagcgctctgggcaaactgcaggatgtcgttaatcagaatgcccaggccctgaacaccttggttaaacaactatcttccaacttcggggccatatccagtgtgttgaatgatattctctcccgcttggatccacctgaagctgaggtgcagatcgatcgcttgatcaccggcagactgcagtccctccagacatatgtaactcagcagctgattagagccgccgagataagggcaagtgcgaatctggctgccaccaagatgagcgaatgtgtattgggccagagcaaacgagttgatttttgcggtaaggggtatcatttaatgtctttccctcaatccgcacctcatggcgtagttttcctgcatgtgacttatgtcccggctcaggagaagaattttaccacagcccccgcgatctgccatgacggaaaggcccacttcccccgggaaggcgtgtttgtatccaatgggactcactggtttgtcactcagcgaaatttttatgaaccacagatcatcaccactgacaacacatttgttagtggaaactgcgatgtggtcatcggcatcgtgaataacactgtctatgatccactgcaacctgaactggattcttttaaagaggaactcgacaagtattttaaaaaccacactagccctgacgtggatctcggtgacatttctggcatcaacgctagcgtagtgaacattcagaaagagatagatagacttaatgaggtggccaagaacctcaacgaaagtctgatcgacctccaggaactggggaaatacgagcagtacattaaatggccttggtacatatggctggggttcattgctgggctgatcgcaatagtgatggtgaccataatgctctgttgcatgactagctgctgcagctgcctgaagggctgctgtagttgtgggtcatgttgtaagtttgacgaagatgatagcgagcctgtccttaaaggagtgaagctccactacacctag

SEQ ID NO: 90 - protein, 1273 aa, synthetic construct
  REGION 1..1273: note = Description of Artificial Sequence: Synthetic polypeptide
MFVFLVLLPLVSSQCVNLTTRTQLPPAYTNSFTRGVYYPDKVFRSSVLHSTQDLFLPFFSNVTWFHAIHVSGTNGTKRFDNPVLPFNDGVYFASTEKSNIIRGWIFGTTLDSKTQSLLIVNNATNVVIKVCEFQFCNDPFLGVYYHKNNKSWMESEFRVYSSANNCTFEYVSQPFLMDLEGKQGNFKNLREFVFKNIDGYFKIYSKHTPINLVRDLPQGFSALEPLVDLPIGINITRFQTLLALHRSYLTPGDSSSGWTAGAAAYYVGYLQPRTFLLKYNENGTITDAVDCALDPLSETKCTLKSFTVEKGIYQTSNFRVQPTESIVRFPNITNLCPFGEVFNATRFASVYAWNRKRISNCVADYSVLYNSASFSTFKCYGVSPTKLNDLCFTNVYADSFVIRGDEVRQIAPGQTGKIADYNYKLPDDFTGCVIAWNSNNLDSKVGGNYNYLYRLFRKSNLKPFERDISTEIYQAGSTPCNGVEGFNCYFPLQSYGFQPTNGVGYQPYRVVVLSFELLHAPATVCGPKKSTNLVKNKCVNFNFNGLTGTGVLTESNKKFLPFQQFGRDIADTTDAVRDPQTLEILDITPCSFGGVSVITPGTNTSNQVAVLYQGVNCTEVPVAIHADQLTPTWRVYSTGSNVFQTRAGCLIGAEHVNNSYECDIPIGAGICASYQTQTNSPGSASSVASQSIIAYTMSLGAENSVAYSNNSIAIPTNFTISVTTEILPVSMTKTSVDCTMYICGDSTECSNLLLQYGSFCTQLNRALTGIAVEQDKNTQEVFAQVKQIYKTPPIKDFGGFNFSQILPDPSKPSKRSFIEDLLFNKVTLADAGFIKQYGDCLGDIAARDLICAQKFNGLTVLPPLLTDEMIAQYTSALLAGTITSGWTFGAGAALQIPFAMQMAYRFNGIGVTQNVLYENQKLIANQFNSAIGKIQDSLSSTASALGKLQDVVNQNAQALNTLVKQLSSNFGAISSVLNDILSRLDPPEAEVQIDRLITGRLQSLQTYVTQQLIRAAEIRASANLAATKMSECVLGQSKRVDFCGKGYHLMSFPQSAPHGVVFLHVTYVPAQEKNFTTAPAICHDGKAHFPREGVFVSNGTHWFVTQRNFYEPQIITTDNTFVSGNCDVVIGIVNNTVYDPLQPELDSFKEELDKYFKNHTSPDVDLGDISGINASVVNIQKEIDRLNEVAKNLNESLIDLQELGKYEQYIKWPWYIWLGFIAGLIAIVMVTIMLCCMTSCCSCLKGCCSCGSCCKFDEDDSEPVLKGVKLHYT

SEQ ID NO: 91 - DNA, 1887 bp, synthetic construct
  misc_feature 1..1887: note = Description of Artificial Sequence: Synthetic polynucleotide
  source 1..1887: mol_type = other DNA
atggctggcgaggcccccttcctttacctgtacgcccttgtgtatttcctgcagagcatcaattttgtgagaatcatcatgaggctgtggctttgctggaaatgtaggagcaagaaccccctgttgtatgacgccaactactttctgtgttggcacaccaatctcgccgtgttccagagtgcctctaagatcattacactgaaaaagcggtggcagcttgcactttctaagggagtgcatttcgtttgcaacctgctcctggtgacactcaagcagggggaaatcaaagacgccacccctagcgacttcgttagagccactgccacaatcccaatccaggcttccctgcctttcggctggcttatcgtgggtgtggcactgttggctgtgcggagaccacagggactgcctaataatacagctagctggtttaccgctctgacacagcatggcaaagaagacctcaagttccctcgcggtcagggggtgcctattaacactaatagctctccagacgaccaaattgggtattacaggcgcgccacaagacggatcatggcctgcttagtggggctgatgtggctatcctattttattgctagctttcgcctgaagaaggacaagaagaagaaagctgatgagacccaggcactgccccagcgccaaaagaagcagcagacagtcacactgctccctgctgcagacctggatgacttcagcaagcagctgcaggggaactttggcgaccaggagctgattagacaggggactgactataagcattggcctcagattgctcagttcgccccaagtgcatccgccttcttcgggatgtcacgaataggaatggaagtgaccccttctgggacatggttgacatacaccggagcaatcaagattacctccggggacggtaccacgtctcctattagcgaacacgattatcagatagggggatatactgagaagtgggagtccggcgtcaaaaagatgagtgggaaaggccagcagcaacaaggccaaacagttactaaaaagtctgccgcagaagctagtaaaaagcctcgccagaagcggacagccaccaaagcttacaatgtgactcaggccttcggccgccgggggcctgaacagaccctcttgtggcccgttaccctcgcatgtttcgtgcttgcagctgtgtacaggatcaattggtttaaggatcaggttatcctgttgaacaaacatatagatgcctataagacattcccacccaccgagccaaagaaagataagaaaaagaaaactagtcctgcaaggatggccggcaatggaggagacgcagccttagccctgctcttactcgacaggctgaaccaacttgagtctaaaatgagcggtaaagggcagaagatgaaggatctgtccccaaggtggtatttctactatctgggcaccggccctgaggattgtgtcgtcctccactcatacttcactagcgattattaccagctgtatagtacacaattatctaccgacacaggcgtcgagcacgtgaccttctttatatacaataagatcgtggatgaaccagaggagcatgtgcagatccacactattgatggctctagcgggggcatcatctgggtggcaacagaaggagccctcaacaccccaaaggaccatatcggcaccaggaatccagccaacaatgccgccattgttctgcagctccctcagggcactactctccctaaaggcttctatgctgagggacccggaccaggcgccaaatttgttgctgcttggacactgaaagctgctgctgggcccggaccaggccagtacatcaaggccaactctaagtttatcggcatcaccgaattgggacctggacccggctag

SEQ ID NO: 92 - protein, 628 aa, synthetic construct
  REGION 1..628: note = Description of Artificial Sequence: Synthetic polypeptide
MAGEAPFLYLYALVYFLQSINFVRIIMRLWLCWKCRSKNPLLYDANYFLCWHTNLAVFQSASKIITLKKRWQLALSKGVHFVCNLLLVTLKQGEIKDATPSDFVRATATIPIQASLPFGWLIVGVALLAVRRPQGLPNNTASWFTALTQHGKEDLKFPRGQGVPINTNSSPDDQIGYYRRATRRIMACLVGLMWLSYFIASFRLKKDKKKKADETQALPQRQKKQQTVTLLPAADLDDFSKQLQGNFGDQELIRQGTDYKHWPQIAQFAPSASAFFGMSRIGMEVTPSGTWLTYTGAIKITSGDGTTSPISEHDYQIGGYTEKWESGVKKMSGKGQQQQGQTVTKKSAAEASKKPRQKRTATKAYNVTQAFGRRGPEQTLLWPVTLACFVLAAVYRINWFKDQVILLNKHIDAYKTFPPTEPKKDKKKKTSPARMAGNGGDAALALLLLDRLNQLESKMSGKGQKMKDLSPRWYFYYLGTGPEDCVVLHSYFTSDYYQLYSTQLSTDTGVEHVTFFIYNKIVDEPEEHVQIHTIDGSSGGIIWVATEGALNTPKDHIGTRNPANNAAIVLQLPQGTTLPKGFYAEGPGPGAKFVAAWTLKAAAGPGPGQYIKANSKFIGITELGPGPG

SEQ ID NO: 93 - DNA, 13746 bp, synthetic construct
  misc_feature 1..13746: note = Description of Artificial Sequence: Synthetic polynucleotide
  source 1..13746: mol_type = other DNA
taatacgactcactataatgggcggcgcatgagagaagcccagaccaattacctacccaaaatggagaaagttcacgttgacatcgaggaagacagcccattcctcagagctttgcagcggagcttcccgcagtttgaggtagaagccaagcaggtcactgataatgaccatgctaatgccagagcgttttcgcatctggcttcaaaactgatcgaaacggaggtggacccatccgacacgatccttgacattggaagtgcgcccgcccgcagaatgtattctaagcacaagtatcattgtatctgtccgatgagatgtgcggaagatccggacagattgtataagtatgcaactaagctgaagaaaaactgtaaggaaataactgataaggaattggacaagaaaatgaaggagctcgccgccgtcatgagcgaccctgacctggaaactgagactatgtgcctccacgacgacgagtcgtgtcgctacgaagggcaagtcgctgtttaccaggatgtatacgcggttgacggaccgacaagtctctatcaccaagccaataagggagttagagtcgcctactggataggctttgacaccaccccttttatgtttaagaacttggctggagcatatccatcatactctaccaactgggccgacgaaaccgtgttaacggctcgtaacataggcctatgcagctctgacgttatggagcggtcacgtagagggatgtccattcttagaaagaagtatttgaaaccatccaacaatgttctattctctgttggctcgaccatctaccacgagaagagggacttactgaggagctggcacctgccgtctgtatttcacttacgtggcaagcaaaattacacatgtcggtgtgagactatagttagttgcgacgggtacgtcgttaaaagaatagctatcagtccaggcctgtatgggaagccttcaggctatgctgctacgatgcaccgcgagggattcttgtgctgcaaagtgacagacacattgaacggggagagggtctcttttcccgtgtgcacgtatgtgccagctacattgtgtgaccaaatgactggcatactggcaacagatgtcagtgcggacgacgcgcaaaaactgctggttgggctcaaccagcgtatagtcgtcaacggtcgcacccagagaaacaccaataccatgaaaaattaccttttgcccgtagtggcccaggcatttgctaggtgggcaaaggaatataaggaagatcaagaagatgaaaggccactaggactacgagatagacagttagtcatggggtgttgttgggcttttagaaggcacaagataacatctatttataagcgcccggatacccaaaccatcatcaaagtgaacagcgatttccactcattcgtgctgcccaggataggcagtaacacattggagatcgggctgagaacaagaatcaggaaaatgttagaggagcacaaggagccgtcacctctcattaccgccgaggacgtacaagaagctaagtgcgcagccgatgaggctaaggaggtgcgtgaagccgaggagttgcgcgcagctctaccacctttggcagctgatgttgaggagcccactctggaagccgatgtcgacttgatgttacaagaggctggggccggctcagtggagacacctcgtggcttgataaaggttaccagctacgctggcgaggacaagatcggctcttacgctgtgctttctccgcaggctgtactcaagagtgaaaaattatcttgcatccaccctctcgctgaacaagtcatagtgataacacactctggccgaaaagggcgttatgccgtggaaccataccatggtaaagtagtggtgccagagggacatgcaatacccgtccaggactttcaagctctgagtgaaagtgccaccattgtgtacaacgaacgtgagttcgtaaacaggtacctgcaccatattgccacacatggaggagcgctgaacactgatgaagaatattacaaaactgtcaagcccagcgagcacgacggcgaatacctgtacgacatcgacaggaaacagtgcgtcaagaaagaactagtcactgggctagggctcacaggcgagctggtggatcctcccttccatgaattcgcctacgagagtctgagaacacgaccagccgctccttaccaagtaccaaccataggggtgtatggcgtgccaggatcaggcaagtctggcatcattaaaagcgcagtcaccaaaaaagatctagtggtgagcgccaagaaagaaaactgtgcagaaattataagggacgtcaagaaaatgaaagggctggacgtcaatgccagaactgtggactcagtgctcttgaatggatgcaaacaccccgtagagaccctgtatattgacgaagcttttgcttgtcatgcaggtactctcagagcgctcatagccattataagacctaaaaaggcagtgctctgcggggatcccaaacagtgcggtttttttaacatgatgtgcctgaaagtgcattttaaccacgagatttgcacacaagtcttccacaaaagcatctctcgccgttgcactaaatctgtgacttcggtcgtctcaaccttgttttacgacaaaaaaatgagaacgacgaatccgaaagagactaagattgtgattgacactaccggcagtaccaaacctaagcaggacgatctcattctcacttgtttcagagggtgggtgaagcagttgcaaatagattacaaaggcaacgaaataatgacggcagctgcctctcaagggctgacccgtaaaggtgtgtatgccgttcggtacaaggtgaatgaaaatcctctgtacgcacccacctcagaacatgtgaacgtcctactgacccgcacggaggaccgcatcgtgtggaaaacactagccggcgacccatggataaaaacactgactgccaagtaccctgggaatttcactgccacgatagaggagtggcaagcagagcatgatgccatcatgaggcacatcttggagagaccggaccctaccgacgtcttccagaataaggcaaacgtgtgttgggccaaggctttagtgccggtgctgaagaccgctggcatagacatgaccactgaacaatggaacactgtggattattttgaaacggacaaagctcactcagcagagatagtattgaaccaactatgcgtgaggttctttggactcgatctggactccggtctattttctgcacccactgttccgttatccattaggaataatcactgggataactccccgtcgcctaacatgtacgggctgaataaagaagtggtccgtcagctctctcgcaggtacccacaactgcctcgggcagttgccactggaagagtctatgacatgaacactggtacactgcgcaattatgatccgcgcataaacctagtacctgtaaacagaagactgcctcatgctttagtcctccaccataatgaacacccacagagtgacttttcttcattcgtcagcaaattgaagggcagaactgtcctggtggtcggggaaaagttgtccgtcccaggcaaaatggttgactggttgtcagaccggcctgaggctaccttcagagctcggctggatttaggcatcccaggtgatgtgcccaaatatgacataatatttgttaatgtgaggaccccatataaataccatcactatcagcagtgtgaagaccatgccattaagcttagcatgttgaccaagaaagcttgtctgcatctgaatcccggcggaacctgtgtcagcataggttatggttacgctgacagggccagcgaaagcatcattggtgctatagcgcggcagttcaagttttcccgggtatgcaaaccgaaatcctcacttgaagagacggaagttctgtttgtattcattgggtacgatcgcaaggcccgtacgcacaatccttacaagctttcatcaaccttgaccaacatttatacaggttccagactccacgaagccggatgtgcaccctcatatcatgtggtgcgaggggatattgccacggccaccgaaggagtgattataaatgctgctaacagcaaaggacaacctggcggaggggtgtgcggagcgctgtataagaaattcccggaaagcttcgatttacagccgatcgaagtaggaaaagcgcgactggtcaaaggtgcagctaaacatatcattcatgccgtaggaccaaacttcaacaaagtttcggaggttgaaggtgacaaacagttggcagaggcttatgagtccatcgctaagattgtcaacgataacaattacaagtcagtagcgattccactgttgtccaccggcatcttttccgggaacaaagatcgactaacccaatcattgaaccatttgctgacagctttagacaccactgatgcagatgtagccatatactgcagggacaagaaatgggaaatgactctcaaggaagcagtggctaggagagaagcagtggaggagatatgcatatccgacgactcttcagtgacagaacctgatgcagagctggtgagggtgcatccgaagagttctttggctggaaggaagggctacagcacaagcgatggcaaaactttctcatatttggaagggaccaagtttcaccaggcggccaaggatatagcagaaattaatgccatgtggcccgttgcaacggaggccaatgagcaggtatgcatgtatatcctcggagaaagcatgagcagtattaggtcgaaatgccccgtcgaagagtcggaagcctccacaccacctagcacgctgccttgcttgtgcatccatgccatgactccagaaagagtacagcgcctaaaagcctcacgtccagaacaaattactgtgtgctcatcctttccattgccgaagtatagaatcactggtgtgcagaagatccaatgctcccagcctatattgttctcaccgaaagtgcctgcgtatattcatccaaggaagtatctcgtggaaacaccaccggtagacgagactccggagccatcggcagagaaccaatccacagaggggacacctgaacaaccaccacttataaccgaggatgagaccaggactagaacgcctgagccgatcatcatcgaagaggaagaagaggatagcataagtttgctgtcagatggcccgacccaccaggtgctgcaagtcgaggcagacattcacgggccgccctctgtatctagctcatcctggtccattcctcatgcatccgactttgatgtggacagtttatccatacttgacaccctggagggagctagcgtgaccagcggggcaacgtcagccgagactaactcttacttcgcaaagagtatggagtttctggcgcgaccggtgcctgcgcctcgaacagtattcaggaaccctccacatcccgctccgcgcacaagaacaccgtcacttgcacccagcagggcctgctcgagaaccagcctagtttccaccccgccaggcgtgaatagggtgatcactagagaggagctcgaggcgcttaccccgtcacgcactcctagcaggtcggtctcgagaaccagcctggtctccaacccgccaggcgtaaatagggtgattacaagagaggagtttgaggcgttcgtagcacaacaacaatgacggtttgatgcgggtgcatacatcttttcctccgacaccggtcaagggcatttacaacaaaaatcagtaaggcaaacggtgctatccgaagtggtgttggagaggaccgaattggagatttcgtatgccccgcgcctcgaccaagaaaaagaagaattactacgcaagaaattacagttaaatcccacacctgctaacagaagcagataccagtccaggaaggtggagaacatgaaagccataacagctagacgtattctgcaaggcctagggcattatttgaaggcagaaggaaaagtggagtgctaccgaaccctgcatcctgttcctttgtattcatctagtgtgaaccgtgccttttcaagccccaaggtcgcagtggaagcctgtaacgccatgttgaaagagaactttccgactgtggcttcttactgtattattccagagtacgatgcctatttggacatggttgacggagcttcatgctgcttagacactgccagtttttgccctgcaaagctgcgcagctttccaaagaaacactcctatttggaacccacaatacgatcggcagtgccttcagcgatccagaacacgctccagaacgtcctggcagctgccacaaaaagaaattgcaatgtcacgcaaatgagagaattgcccgtattggattcggcggcctttaatgtggaatgcttcaagaaatatgcgtgtaataatgaatattgggaaacgtttaaagaaaaccccatcaggcttactgaagaaaacgtggtaaattacattaccaaattaaaaggaccaaaagctgctgctctttttgcgaagacacataatttgaatatgttgcaggacataccaatggacaggtttgtaatggacttaaagagagacgtgaaagtgactccaggaacaaaacatactgaagaacggcccaaggtacaggtgatccaggctgccgatccgctagcaacagcgtatctgtgcggaatccaccgagagctggttaggagattaaatgcggtcctgcttccgaacattcatacactgtttgatatgtcggctgaagactttgacgctattatagccgagcacttccagcctggggattgtgttctggaaactgacatcgcgtcgtttgataaaagtgaggacgacgccatggctctgaccgcgttaatgattctggaagacttaggtgtggacgcagagctgttgacgctgattgaggcggctttcggcgaaatttcatcaatacatttgcccactaaaactaaatttaaattcggagccatgatgaaatctggaatgttcctcacactgtttgtgaacacagtcattaacattgtaatcgcaagcagagtgttgagagaacggctaaccggatcaccatgtgcagcattcattggagatgacaatatcgtgaaaggagtcaaatcggacaaattaatggcagacaggtgcgccacctggttgaatatggaagtcaagattatagatgctgtggtgggcgagaaagcgccttatttctgtggagggtttattttgtgtgactccgtgaccggcacagcgtgccgtgtggcagaccccctaaaaaggctgtttaagcttggcaaacctctggcagcagacgatgaacatgatgatgacaggagaagggcattgcatgaagagtcaacacgctggaaccgagtgggtattctttcagagctgtgcaaggcagtagaatcaaggtatgaaaccgtaggaacttccatcatagttatggccatgactactctagctagcagtgttaaatcattcagctacctgagaggggcccctataactctctacggctaacctgaatggactacgactctagaatagtctttaattaagccaccatggctggcgaggcccccttcctttacctgtacgcccttgtgtatttcctgcagagcatcaattttgtgagaatcatcatgaggctgtggctttgctggaaatgtaggagcaagaaccccctgttgtatgacgccaactactttctgtgttggcacaccaatctcgccgtgttccagagtgcctctaagatcattacactgaaaaagcggtggcagcttgcactttctaagggagtgcatttcgtttgcaacctgctcctggtgacactcaagcagggggaaatcaaagacgccacccctagcgacttcgttagagccactgccacaatcccaatccaggcttccctgcctttcggctggcttatcgtgggtgtggcactgttggctgtgcggagaccacagggactgcctaataatacagctagctggtttaccgctctgacacagcatggcaaagaagacctcaagttccctcgcggtcagggggtgcctattaacactaatagctctccagacgaccaaattgggtattacaggcgcgccacaagacggatcatggcctgcttagtggggctgatgtggctatcctattttattgctagctttcgcctgaagaaggacaagaagaagaaagctgatgagacccaggcactgccccagcgccaaaagaagcagcagacagtcacactgctccctgctgcagacctggatgacttcagcaagcagctgcaggggaactttggcgaccaggagctgattagacaggggactgactataagcattggcctcagattgctcagttcgccccaagtgcatccgccttcttcgggatgtcacgaataggaatggaagtgaccccttctgggacatggttgacatacaccggagcaatcaagattacctccggggacggtaccacgtctcctattagcgaacacgattatcagatagggggatatactgagaagtgggagtccggcgtcaaaaagatgagtgggaaaggccagcagcaacaaggccaaacagttactaaaaagtctgccgcagaagctagtaaaaagcctcgccagaagcggacagccaccaaagcttacaatgtgactcaggccttcggccgccgggggcctgaacagaccctcttgtggcccgttaccctcgcatgtttcgtgcttgcagctgtgtacaggatcaattggtttaaggatcaggttatcctgttgaacaaacatatagatgcctataagacattcccacccaccgagccaaagaaagataagaaaaagaaaactagtcctgcaaggatggccggcaatggaggagacgcagccttagccctgctcttactcgacaggctgaaccaacttgagtctaaaatgagcggtaaagggcagaagatgaaggatctgtccccaaggtggtatttctactatctgggcaccggccctgaggattgtgtcgtcctccactcatacttcactagcgattattaccagctgtatagtacacaattatctaccgacacaggcgtcgagcacgtgaccttctttatatacaataagatcgtggatgaaccagaggagcatgtgcagatccacactattgatggctctagcgggggcatcatctgggtggcaacagaaggagccctcaacaccccaaaggaccatatcggcaccaggaatccagccaacaatgccgccattgttctgcagctccctcagggcactactctccctaaaggcttctatgctgagggacccggaccaggcgccaaatttgttgctgcttggacactgaaagctgctgctgggcccggaccaggccagtacatcaaggccaactctaagtttatcggcatcaccgaattgggacctggacccggctagtgattgggcccctataactctctacggctaacctgaatggactacgacatagtctagtccgccaaggccaccatgtttgtcttcctggtcttgctgccgctggtgagcagccagtgcgtgaatctcaccacccgcacccagcttccacctgcctacactaacagcttcacccgaggggtgtattaccctgacaaggtattccggtcctccgtcctccatagcacgcaggacctttttctgcccttcttctcaaatgtgacatggttccatgccattcacgtgagcggcacgaatggaacgaagcgctttgataaccccgtgctgcctttcaatgacggcgtctacttcgcctccactgaaaagtcaaacatcatccggggctggatctttggcaccactcttgattcaaagacccagtcactgctgattgtgaacaatgctacaaacgtggttatcaaggtgtgtgagtttcagttctgtaacgatccatttttgggagtgtactaccacaagaacaacaagtcctggatggagtctgagttcagagtgtatagctctgctaacaactgcaccttcgagtacgtgtcccagcctttccttatggacctggaaggcaaacagggcaatttcaaaaacctgagagagttcgtgtttaagaacattgacggatacttcaaaatttattctaagcacacaccaattaacttagtgcgggacctaccccaaggctttagcgccctagagcccctggttgacctgcccattgggatcaatataacaaggttccaaactctactggctctgcatagaagttatctgaccccaggagacagctctagtggttggaccgccggcgcagcagcctactatgtcgggtacttacagccacgcacgttccttctgaagtacaatgagaacgggacaatcactgacgcagtagactgtgcactggacccgctaagcgagactaagtgcacacttaaatccttcacggtggagaaaggcatttatcagacctctaacttcagggtgcagccaacagaaagcattgtgcgattcccaaatattactaatctttgccctttcggggaggtctttaatgcaactagattcgcatcagtctatgcgtggaaccgcaaacgcatttccaattgtgtcgcagactactcagtgctgtacaactctgcctctttcagtacgttcaagtgttacggagtgtcacccactaaactgaacgacctgtgctttacaaatgtctacgctgactccttcgtgattaggggagacgaggtgagacaaattgcccccggacagactgggaagattgccgactacaattataagcttcctgatgatttcactggctgtgttattgcctggaatagtaacaatctggatagcaaggtgggaggcaactataactacttatatcgactgtttaggaagagtaatctgaaaccatttgagcgggatatttccacagaaatttaccaggccgggagcacaccatgtaatggggtggagggatttaattgttacttcccactccagagctatggtttccaacccaccaatggagtgggttaccagccctatagagtcgtggtgcttagttttgagctgcttcacgccccagcaaccgtctgcggtcccaaaaagtcgaccaatctcgtgaaaaacaaatgcgtaaacttcaactttaacggcttaacaggaaccggcgtgctcaccgaaagcaacaagaaattccttccatttcagcaattcggaagggacatcgccgacacaacagacgcggtgagggacccacagactctggagatactggacatcactccttgttcgtttgggggcgtctcggtcatcacacccgggactaatactagtaatcaggtagcagttttatatcaaggcgtcaactgtaccgaagtacctgtggccatacacgctgatcagctaacgccaacatggcgagtctattccaccggctctaacgtttttcagaccagggctgggtgcctgataggggcagagcacgtcaataattcctatgagtgtgatatccccataggtgcggggatctgtgccagctatcaaacccaaaccaattcaccagggagcgcaagctctgtggcttctcagagcataattgcatatacaatgtcactgggcgctgagaatagcgttgcatactctaataacagcatagccattcccacgaactttactatcagtgtgacaaccgaaatattgccagtttcgatgaccaaaactagcgtggattgcacgatgtacatctgtggagactctaccgaatgcagcaatctgctattacaatatggcagcttctgtacacagttaaatcgagccttgacaggcatcgcagtggaacaggacaaaaatactcaagaggtgtttgcacaggtgaagcaaatctacaaaacgccccccattaaagattttggcgggttcaatttttcacaaattctccccgacccgtctaagccgagtaagcggtccttcatcgaagatctgctctttaacaaagtaaccctcgccgatgccggctttattaagcagtatggcgactgcctgggggatatagccgctcgtgacctgatttgcgcccagaagttcaatggtctgaccgtgttgcctcctttattgaccgatgaaatgattgcccagtacactagtgccctgctggccggcactatcacgtctgggtggaccttcggagctggtgccgccttgcagataccttttgcaatgcagatggcctataggtttaatggtatcggagtgactcagaacgtactgtacgagaaccagaagctcatcgctaatcaatttaactccgctatcggaaaaatccaggacagcctctcttctacagctagcgctctgggcaaactgcaggatgtcgttaatcagaatgcccaggccctgaacaccttggttaaacaactatcttccaacttcggggccatatccagtgtgttgaatgatattctctcccgcttggatccacctgaagctgaggtgcagatcgatcgcttgatcaccggcagactgcagtccctccagacatatgtaactcagcagctgattagagccgccgagataagggcaagtgcgaatctggctgccaccaagatgagcgaatgtgtattgggccagagcaaacgagttgatttttgcggtaaggggtatcatttaatgtctttccctcaatccgcacctcatggcgtagttttcctgcatgtgacttatgtcccggctcaggagaagaattttaccacagcccccgcgatctgccatgacggaaaggcccacttcccccgggaaggcgtgtttgtatccaatgggactcactggtttgtcactcagcgaaatttttatgaaccacagatcatcaccactgacaacacatttgttagtggaaactgcgatgtggtcatcggcatcgtgaataacactgtctatgatccactgcaacctgaactggattcttttaaagaggaactcgacaagtattttaaaaaccacactagccctgacgtggatctcggtgacatttctggcatcaacgctagcgtagtgaacattcagaaagagatagatagacttaatgaggtggccaagaacctcaacgaaagtctgatcgacctccaggaactggggaaatacgagcagtacattaaatggccttggtacatatggctggggttcattgctgggctgatcgcaatagtgatggtgaccataatgctctgttgcatgactagctgctgcagctgcctgaagggctgctgtagttgtgggtcatgttgtaagtttgacgaagatgatagcgagcctgtccttaaaggagtgaagctccactacacctagtaacgaacggccgtatcacgcccaaacatttacagccgcggtgtcaaaaaccgcgtggacgtggttaacatccctgctgggaggatcagccgtaattattataattggcttggtgctggctactattgtggccatgtacgtgctgaccaaccagaaacataattgaatacagcagcaattggcaagctgcttacatagaactcgcggcgattggcatgccgccttaaaatttttattttattttttcttttcttttccgaatcggattttgtttttaatatttcaaaaaaaaaaaaaaaaaaaaaaaaaaaaaaaaaaaaaaaaaaaaaaaaaaaaaaaaaaaaaaaaaaaaaaaaaaaaaaaatacgtagtttaaac

SEQ ID NO: 94 - protein, 51 aa, Severe acute respiratory syndrome coronavirus 2
EAPFLYLYALVYFLQSINFVRIIMRLWLCWKCRSKNPLLYDANYFLCWHTN

SEQ ID NO: 95 - protein, 33 aa, Severe acute respiratory syndrome coronavirus 2
LAVFQSASKIITLKKRWQLALSKGVHFVCNLLL

SEQ ID NO: 96 - protein, 43 aa, Severe acute respiratory syndrome coronavirus 2
VTLKQGEIKDATPSDFVRATATIPIQASLPFGWLIVGVALLAV

SEQ ID NO: 97 - protein, 55 aa, Severe acute respiratory syndrome coronavirus 2
RRPQGLPNNTASWFTALTQHGKEDLKFPRGQGVPINTNSSPDDQIGYYRRATRRI

SEQ ID NO: 98 - protein, 19 aa, Severe acute respiratory syndrome coronavirus 2
MACLVGLMWLSYFIASFRL

SEQ ID NO: 99 - protein, 40 aa, Severe acute respiratory syndrome coronavirus 2
KKDKKKKADETQALPQRQKKQQTVTLLPAADLDDFSKQLQ

SEQ ID NO: 100 - protein, 55 aa, Severe acute respiratory syndrome coronavirus 2
GNFGDQELIRQGTDYKHWPQIAQFAPSASAFFGMSRIGMEVTPSGTWLTYTGAIK

SEQ ID NO: 101 - protein, 30 aa, Severe acute respiratory syndrome coronavirus 2
ITSGDGTTSPISEHDYQIGGYTEKWESGVK

SEQ ID NO: 102 - protein, 50 aa, Severe acute respiratory syndrome coronavirus 2
KMSGKGQQQQGQTVTKKSAAEASKKPRQKRTATKAYNVTQAFGRRGPEQT

SEQ ID NO: 103 - protein, 20 aa, Severe acute respiratory syndrome coronavirus 2
LLWPVTLACFVLAAVYRINW

SEQ ID NO: 104 - protein, 30 aa, Severe acute respiratory syndrome coronavirus 2
FKDQVILLNKHIDAYKTFPPTEPKKDKKKK

SEQ ID NO: 105 - protein, 35 aa, Severe acute respiratory syndrome coronavirus 2
TSPARMAGNGGDAALALLLLDRLNQLESKMSGKGQ

SEQ ID NO: 106 - protein, 19 aa, Severe acute respiratory syndrome coronavirus 2
KMKDLSPRWYFYYLGTGPE

SEQ ID NO: 107 - protein, 56 aa, Severe acute respiratory syndrome coronavirus 2
DCVVLHSYFTSDYYQLYSTQLSTDTGVEHVTFFIYNKIVDEPEEHVQIHTIDGSSG

SEQ ID NO: 108 - protein, 46 aa, Severe acute respiratory syndrome coronavirus 2
GIIWVATEGALNTPKDHIGTRNPANNAAIVLQLPQGTTLPKGFYAE

SEQ ID NO: 109 - DNA, 8651 bp, synthetic construct
  misc_feature 1..8651: note = Description of Artificial Sequence: Synthetic polynucleotide
  source 1..8651: mol_type = other DNA
gacattgattattgactagttgttaatagtaatcaattacggggtcattagttcatagcccatatatggagttccgcgttacataacttacggtaaatggcccgcctggctgaccgcccaacgacccccgcccattgacgtcaataatgacgtatgttcccatagtaacgccaatagggactttccattgacgtcaatgggtggagtatttacggtaaactgcccacttggcagtacatcaagtgtatcatatgccaagtccgccccctattgacgtcaatgacggtaaatggcccgcctggcattatgcccagtacatgaccttacgggactttcctacttggcagtacatctacgtattagtcatcgctattaccatggtgatgcggttttggcagtacaccaatgggcgtggatagcggtttgactcacggggatttccaagtctccaccccattgacgtcaatgggagtttgttttggcaccaaaatcaacgggactttccaaaatgtcgtaataaccccgccccgttgacgcaaatgggcggtaggcgtgtacggtgggaggtctatataagcagagctcgtttagtgaaccgtcagatcgcctggaacgccatccacgctgttttgacctccatagaagacagcgatcgcgccaccatgtttgtcttcctggtcttgctgccgctggtgagcagccagtgcgtgaatctcaccacccgcacccagcttccacctgcctacactaacagcttcacccgaggggtgtattaccctgacaaggtattccggtcctccgtcctccatagcacgcaggacctttttctgcccttcttctcaaatgtgacatggttccatgccattcacgtgagcggcacgaatggaacgaagcgctttgataaccccgtgctgcctttcaatgacggcgtctacttcgcctccactgaaaagtcaaacatcatccggggctggatctttggcaccactcttgattcaaagacccagtcactgctgattgtgaacaatgctacaaacgtggttatcaaggtgtgtgagtttcagttctgtaacgatccatttttgggagtgtactaccacaagaacaacaagtcctggatggagtctgagttcagagtgtatagctctgctaacaactgcaccttcgagtacgtgtcccagcctttccttatggacctggaaggcaaacagggcaatttcaaaaacctgagagagttcgtgtttaagaacattgacggatacttcaaaatttattctaagcacacaccaattaacttagtgcgggacctaccccaaggctttagcgccctagagcccctggttgacctgcccattgggatcaatataacaaggttccaaactctactggctctgcatagaagttatctgaccccaggagacagctctagtggttggaccgccggcgcagcagcctactatgtcgggtacttacagccacgcacgttccttctgaagtacaatgagaacgggacaatcactgacgcagtagactgtgcactggacccgctaagcgagactaagtgcacacttaaatccttcacggtggagaaaggcatttatcagacctctaacttcagggtgcagccaacagaaagcattgtgcgattcccaaatattactaatctttgccctttcggggaggtctttaatgcaactagattcgcatcagtctatgcgtggaaccgcaaacgcatttccaattgtgtcgcagactactcagtgctgtacaactctgcctctttcagtacgttcaagtgttacggagtgtcacccactaaactgaacgacctgtgctttacaaatgtctacgctgactccttcgtgattaggggagacgaggtgagacaaattgcccccggacagactgggaagattgccgactacaattataagcttcctgatgatttcactggctgtgttattgcctggaatagtaacaatctggatagcaaggtgggaggcaactataactacttatatcgactgtttaggaagagtaatctgaaaccatttgagcgggatatttccacagaaatttaccaggccgggagcacaccatgtaatggggtggagggatttaattgttacttcccactccagagctatggtttccaacccaccaatggagtgggttaccagccctatagagtcgtggtgcttagttttgagctgcttcacgccccagcaaccgtctgcggtcccaaaaagtcgaccaatctcgtgaaaaacaaatgcgtaaacttcaactttaacggcttaacaggaaccggcgtgctcaccgaaagcaacaagaaattccttccatttcagcaattcggaagggacatcgccgacacaacagacgcggtgagggacccacagactctggagatactggacatcactccttgttcgtttgggggcgtctcggtcatcacacccgggactaatactagtaatcaggtagcagttttatatcaaggcgtcaactgtaccgaagtacctgtggccatacacgctgatcagctaacgccaacatggcgagtctattccaccggctctaacgtttttcagaccagggctgggtgcctgataggggcagagcacgtcaataattcctatgagtgtgatatccccataggtgcggggatctgtgccagctatcaaacccaaaccaattcaccagggagcgcaagctctgtggcttctcagagcataattgcatatacaatgtcactgggcgctgagaatagcgttgcatactctaataacagcatagccattcccacgaactttactatcagtgtgacaaccgaaatattgccagtttcgatgaccaaaactagcgtggattgcacgatgtacatctgtggagactctaccgaatgcagcaatctgctattacaatatggcagcttctgtacacagttaaatcgagccttgacaggcatcgcagtggaacaggacaaaaatactcaagaggtgtttgcacaggtgaagcaaatctacaaaacgccccccattaaagattttggcgggttcaatttttcacaaattctccccgacccgtctaagccgagtaagcggtccttcatcgaagatctgctctttaacaaagtaaccctcgccgatgccggctttattaagcagtatggcgactgcctgggggatatagccgctcgtgacctgatttgcgcccagaagttcaatggtctgaccgtgttgcctcctttattgaccgatgaaatgattgcccagtacactagtgccctgctggccggcactatcacgtctgggtggaccttcggagctggtgccgccttgcagataccttttgcaatgcagatggcctataggtttaatggtatcggagtgactcagaacgtactgtacgagaaccagaagctcatcgctaatcaatttaactccgctatcggaaaaatccaggacagcctctcttctacagctagcgctctgggcaaactgcaggatgtcgttaatcagaatgcccaggccctgaacaccttggttaaacaactatcttccaacttcggggccatatccagtgtgttgaatgatattctctcccgcttggatccacctgaagctgaggtgcagatcgatcgcttgatcaccggcagactgcagtccctccagacatatgtaactcagcagctgattagagccgccgagataagggcaagtgcgaatctggctgccaccaagatgagcgaatgtgtattgggccagagcaaacgagttgatttttgcggtaaggggtatcatttaatgtctttccctcaatccgcacctcatggcgtagttttcctgcatgtgacttatgtcccggctcaggagaagaattttaccacagcccccgcgatctgccatgacggaaaggcccacttcccccgggaaggcgtgtttgtatccaatgggactcactggtttgtcactcagcgaaatttttatgaaccacagatcatcaccactgacaacacatttgttagtggaaactgcgatgtggtcatcggcatcgtgaataacactgtctatgatccactgcaacctgaactggattcttttaaagaggaactcgacaagtattttaaaaaccacactagccctgacgtggatctcggtgacatttctggcatcaacgctagcgtagtgaacattcagaaagagatagatagacttaatgaggtggccaagaacctcaacgaaagtctgatcgacctccaggaactggggaaatacgagcagtacattaaatggccttggtacatatggctggggttcattgctgggctgatcgcaatagtgatggtgaccataatgctctgttgcatgactagctgctgcagctgcctgaagggctgctgtagttgtgggtcatgttgtaagtttgacgaagatgatagcgagcctgtccttaaaggagtgaagctccactacaccggtggaagcggtggggttcgggcagagggcagaggctcactgctcacgtgtggtgatgtagaagagaatccaggtcctatgtactcattcgtatccgaggagaccggcacgttgatcgttaattctgtattgttgtttctcgcttttgtggtatttctccttgttacgcttgcgattcttaccgcccttcgcctctgtgcttactgctgcaacattgtgaatgtctccctcgtgaagccctccttttatgtttactccagagtgaaaaacctcaatagctccagggttccagacctgctggtgggcggttctggaggtgtccgtgctgaaggacgcgggtcccttctcacctgcggcgacgttgaggaaaaccctggccctatggctgacagcaatggtactattacggtggaagaactgaaaaagctcttggaacagtggaaccttgtgatcggttttctgtttttgacctggatttgcttgctccagttcgcctatgctaatagaaacaggtttctctatataatcaagttgatttttctgtggctgctctggcccgttacgcttgcgtgttttgtcctggctgctgtgtaccggatcaattggatcactggtggcattgctatcgccatggcttgtcttgtcgggctgatgtggctttcctattttatcgcttcatttaggctgtttgctcgaaccagatcaatgtggtcatttaatccagagactaatattctcttgaatgttccgctgcacggaactatcctcacacgacccctgttggagtccgaattggttatcggtgccgtaattctcaggggccaccttagaatcgcgggccaccatttgggacggtgcgatattaaagacctgcccaaagagatcacagtggccacaagtagaacgctctcatactataaactgggagcttcccagagagtggccggggatagtggcttcgcggcatatagtcgctaccgcatcggtaactataaacttaatacggaccatagtagctctagcgataacattgccttgctggttcagtgataaatttaaatgtgagggttaatgcttcgagcagacatgataagatacattgatgagtttggacaaaccacaactagaatgcagtgaaaaaaatgctttatttgtgaaatttgtgatgctattgctttatttgtaaccattataagctgcaataaacaagttaacaacaacaattgcattcattttatgtttcaggttcagggggagatgtgggaggttttttaaagcaagtaaaacctctacaaatgtggtaaaagcgagacattgattattgactagttgttaatagtaatcaattacggggtcattagttcatagcccatatatggagttccgcgttacataacttacggtaaatggcccgcctggctgaccgcccaacgacccccgcccattgacgtcaataatgacgtatgttcccatagtaacgccaatagggactttccattgacgtcaatgggtggagtatttacggtaaactgcccacttggcagtacatcaagtgtatcatatgccaagtccgccccctattgacgtcaatgacggtaaatggcccgcctggcattatgcccagtacatgaccttacgggactttcctacttggcagtacatctacgtattagtcatcgctattaccatggtgatgcggttttggcagtacaccaatgggcgtggatagcggtttgactcacggggatttccaagtctccaccccattgacgtcaatgggagtttgttttggcaccaaaatcaacgggactttccaaaatgtcgtaataaccccgccccgttgacgcaaatgggcggtaggcgtgtacggtgggaggtctatataagcagagctcgtttagtgaaccgtcagatcgcctggaacgccatccacgctgttttgacctccatagaagacagcgatcgcgccaccatggctggcgaggcccccttcctttacctgtacgcccttgtgtatttcctgcagagcatcaattttgtgagaatcatcatgaggctgtggctttgctggaaatgtaggagcaagaaccccctgttgtatgacgccaactactttctgtgttggcacaccaatctcgccgtgttccagagtgcctctaagatcattacactgaaaaagcggtggcagcttgcactttctaagggagtgcatttcgtttgcaacctgctcctggtgacactcaagcagggggaaatcaaagacgccacccctagcgacttcgttagagccactgccacaatcccaatccaggcttccctgcctttcggctggcttatcgtgggtgtggcactgttggctgtgcggagaccacagggactgcctaataatacagctagctggtttaccgctctgacacagcatggcaaagaagacctcaagttccctcgcggtcagggggtgcctattaacactaatagctctccagacgaccaaattgggtattacaggcgcgccacaagacggatcatggcctgcttagtggggctgatgtggctatcctattttattgctagctttcgcctgaagaaggacaagaagaagaaagctgatgagacccaggcactgccccagcgccaaaagaagcagcagacagtcacactgctccctgctgcagacctggatgacttcagcaagcagctgcaggggaactttggcgaccaggagctgattagacaggggactgactataagcattggcctcagattgctcagttcgccccaagtgcatccgccttcttcgggatgtcacgaataggaatggaagtgaccccttctgggacatggttgacatacaccggagcaatcaagattacctccggggacggtaccacgtctcctattagcgaacacgattatcagatagggggatatactgagaagtgggagtccggcgtcaaaaagatgagtgggaaaggccagcagcaacaaggccaaacagttactaaaaagtctgccgcagaagctagtaaaaagcctcgccagaagcggacagccaccaaagcttacaatgtgactcaggccttcggccgccgggggcctgaacagaccctcttgtggcccgttaccctcgcatgtttcgtgcttgcagctgtgtacaggatcaattggtttaaggatcaggttatcctgttgaacaaacatatagatgcctataagacattcccacccaccgagccaaagaaagataagaaaaagaaaactagtcctgcaaggatggccggcaatggaggagacgcagccttagccctgctcttactcgacaggctgaaccaacttgagtctaaaatgagcggtaaagggcagaagatgaaggatctgtccccaaggtggtatttctactatctgggcaccggccctgaggattgtgtcgtcctccactcatacttcactagcgattattaccagctgtatagtacacaattatctaccgacacaggcgtcgagcacgtgaccttctttatatacaataagatcgtggatgaaccagaggagcatgtgcagatccacactattgatggctctagcgggggcatcatctgggtggcaacagaaggagccctcaacaccccaaaggaccatatcggcaccaggaatccagccaacaatgccgccattgttctgcagctccctcagggcactactctccctaaaggcttctatgctgagggacccggaccaggcgccaaatttgttgctgcttggacactgaaagctgctgctgggcccggaccaggccagtacatcaaggccaactctaagtttatcggcatcaccgaattgggacctggacccggctagtgagtttaaactcccatttaaatgtgagggttaatgcttcgagcagagctcgctgatcagcctcgactgtgccttctagttgccagccatctgttgtttgcccctcccccgtgccttccttgaccctggaaggtgccactcccactgtcctttcctaataaaatgaggaaattgcatcgcattgtctgagtaggtgtcattctattctggggggtggggtggggcaggacagcaagggggaggattgggaagacaatagcaggcatgctggggatgcggtgggctctatggcttctgaggcggaaagaacc

SEQ ID NO: 110 - protein, 1270 aa, synthetic construct
  REGION 1..1270: note = Description of Artificial Sequence: Synthetic polypeptide
MFVFLVLLPLVSSQCVNLTTRTQLPPAYTNSFTRGVYYPDKVFRSSVLHSTQDLFLPFFSNVTWFHAISGTNGTKRFDNPVLPFNDGVYFASTEKSNIIRGWIFGTTLDSKTQSLLIVNNATNVVIKVCEFQFCNDPFLGVYHKNNKSWMESEFRVYSSANNCTFEYVSQPFLMDLEGKQGNFKNLREFVFKNIDGYFKIYSKHTPINLVRDLPQGFSALEPLVDLPIGINITRFQTLLALHRSYLTPGDSSSGWTAGAAAYYVGYLQPRTFLLKYNENGTITDAVDCALDPLSETKCTLKSFTVEKGIYQTSNFRVQPTESIVRFPNITNLCPFGEVFNATRFASVYAWNRKRISNCVADYSVLYNSASFSTFKCYGVSPTKLNDLCFTNVYADSFVIRGDEVRQIAPGQTGKIADYNYKLPDDFTGCVIAWNSNNLDSKVGGNYNYLYRLFRKSNLKPFERDISTEIYQAGSTPCNGVEGFNCYFPLQSYGFQPTYGVGYQPYRVVVLSFELLHAPATVCGPKKSTNLVKNKCVNFNFNGLTGTGVLTESNKKFLPFQQFGRDIDDTTDAVRDPQTLEILDITPCSFGGVSVITPGTNTSNQVAVLYQGVNCTEVPVAIHADQLTPTWRVYSTGSNVFQTRAGCLIGAEHVNNSYECDIPIGAGICASYQTQTNSHGSASSVASQSIIAYTMSLGAENSVAYSNNSIAIPINFTISVTTEILPVSMTKTSVDCTMYICGDSTECSNLLLQYGSFCTQLNRALTGIAVEQDKNTQEVFAQVKQIYKTPPIKDFGGFNFSQILPDPSKPSKRSFIEDLLFNKVTLADAGFIKQYGDCLGDIAARDLICAQKFNGLTVLPPLLTDEMIAQYTSALLAGTITSGWTFGAGAALQIPFAMQMAYRFNGIGVTQNVLYENQKLIANQFNSAIGKIQDSLSSTASALGKLQDVVNQNAQALNTLVKQLSSNFGAISSVLNDILARLDPPEAEVQIDRLITGRLQSLQTYVTQQLIRAAEIRASANLAATKMSECVLGQSKRVDFCGKGYHLMSFPQSAPHGVVFLHVTYVPAQEKNFTTAPAICHDGKAHFPREGVFVSNGTHWFVTQRNFYEPQIITTHNTFVSGNCDVVIGIVNNTVYDPLQPELDSFKEELDKYFKNHTSPDVDLGDISGINASVVNIQKEIDRLNEVAKNLNESLIDLQELGKYEQYIKWPWYIWLGFIAGLIAIVMVTIMLCCMTSCCSCLKGCCSCGSCCKFDEDDSEPVLKGVKLHYT

SEQ ID NO: 111 - DNA, 7629 bp, synthetic construct
  misc_feature 1..7629: note = Description of Artificial Sequence: Synthetic polynucleotide
  source 1..7629: mol_type = other DNA
gacattgattattgactagttgttaatagtaatcaattacggggtcattagttcatagcccatatatggagttccgcgttacataacttacggtaaatggcccgcctggctgaccgcccaacgacccccgcccattgacgtcaataatgacgtatgttcccatagtaacgccaatagggactttccattgacgtcaatgggtggagtatttacggtaaactgcccacttggcagtacatcaagtgtatcatatgccaagtccgccccctattgacgtcaatgacggtaaatggcccgcctggcattatgcccagtacatgaccttacgggactttcctacttggcagtacatctacgtattagtcatcgctattaccatggtgatgcggttttggcagtacaccaatgggcgtggatagcggtttgactcacggggatttccaagtctccaccccattgacgtcaatgggagtttgttttggcaccaaaatcaacgggactttccaaaatgtcgtaataaccccgccccgttgacgcaaatgggcggtaggcgtgtacggtgggaggtctatataagcagagctcgtttagtgaaccgtcagatcgcctggaacgccatccacgctgttttgacctccatagaagacagcgatcgcgccaccatgtttgtcttcctggtcttgctgccgctggtgagcagccagtgcgtgaatctcaccacccgcacccagcttccacctgcctacactaacagcttcacccgaggggtgtattaccctgacaaggtattccggtcctccgtcctccatagcacgcaggacctttttctgcccttcttctcaaatgtgacatggttccatgccattagcggcacgaatggaacgaagcgctttgataaccccgtgctgcctttcaatgacggcgtctacttcgcctccactgaaaagtcaaacatcatccggggctggatctttggcaccactcttgattcaaagacccagtcactgctgattgtgaacaatgctacaaacgtggttatcaaggtgtgtgagtttcagttctgtaacgatccatttttgggagtgtaccacaagaacaacaagtcctggatggagtctgagttcagagtgtatagctctgctaacaactgcaccttcgagtacgtgtcccagcctttccttatggacctggaaggcaaacagggcaatttcaaaaacctgagagagttcgtgtttaagaacattgacggatacttcaaaatttattctaagcacacaccaattaacttagtgcgggacctaccccaaggctttagcgccctagagcccctggttgacctgcccattgggatcaatataacaaggttccaaactctactggctctgcatagaagttatctgaccccaggagacagctctagtggttggaccgccggcgcagcagcctactatgtcgggtacttacagccacgcacgttccttctgaagtacaatgagaacgggacaatcactgacgcagtagactgtgcactggacccgctaagcgagactaagtgcacacttaaatccttcacggtggagaaaggcatttatcagacctctaacttcagggtgcagccaacagaaagcattgtgcgattcccaaatattactaatctttgccctttcggggaggtctttaatgcaactagattcgcatcagtctatgcgtggaaccgcaaacgcatttccaattgtgtcgcagactactcagtgctgtacaactctgcctctttcagtacgttcaagtgttacggagtgtcacccactaaactgaacgacctgtgctttacaaatgtctacgctgactccttcgtgattaggggagacgaggtgagacaaattgcccccggacagactgggaagattgccgactacaattataagcttcctgatgatttcactggctgtgttattgcctggaatagtaacaatctggatagcaaggtgggaggcaactataactacttatatcgactgtttaggaagagtaatctgaaaccatttgagcgggatatttccacagaaatttaccaggccgggagcacaccatgtaatggggtggagggatttaattgttacttcccactccagagctatggtttccaacccacctatggagtgggttaccagccctatagagtcgtggtgcttagttttgagctgcttcacgccccagcaaccgtctgcggtcccaaaaagtcgaccaatctcgtgaaaaacaaatgcgtaaacttcaactttaacggcttaacaggaaccggcgtgctcaccgaaagcaacaagaaattccttccatttcagcaattcggaagggacatcgatgacacaacagacgcggtgagggacccacagactctggagatactggacatcactccttgttcgtttgggggcgtctcggtcatcacacccgggactaatactagtaatcaggtagcagttttatatcaaggcgtcaactgtaccgaagtacctgtggccatacacgctgatcagctaacgccaacatggcgagtctattccaccggctctaacgtttttcagaccagggctgggtgcctgataggggcagagcacgtcaataattcctatgagtgtgatatccccataggtgcggggatctgtgccagctatcaaacccaaaccaattcacatgggagcgcaagctctgtggcttctcagagcataattgcatatacaatgtcactgggcgctgagaatagcgttgcatactctaataacagcatagccattcccataaactttactatcagtgtgacaaccgaaatattgccagtttcgatgaccaaaactagcgtggattgcacgatgtacatctgtggagactctaccgaatgcagcaatctgctattacaatatggcagcttctgtacacagttaaatcgagccttgacaggcatcgcagtggaacaggacaaaaatactcaagaggtgtttgcacaggtgaagcaaatctacaaaacgccccccattaaagattttggcgggttcaatttttcacaaattctccccgacccgtctaagccgagtaagcggtccttcatcgaagatctgctctttaacaaagtaaccctcgccgatgccggctttattaagcagtatggcgactgcctgggggatatagccgctcgtgacctgatttgcgcccagaagttcaatggtctgaccgtgttgcctcctttattgaccgatgaaatgattgcccagtacactagtgccctgctggccggcactatcacgtctgggtggaccttcggagctggtgccgccttgcagataccttttgcaatgcagatggcctataggtttaatggtatcggagtgactcagaacgtactgtacgagaaccagaagctcatcgctaatcaatttaactccgctatcggaaaaatccaggacagcctctcttctacagctagcgctctgggcaaactgcaggatgtcgttaatcagaatgcccaggccctgaacaccttggttaaacaactatcttccaacttcggggccatatccagtgtgttgaatgatattctcgcacgcttggatccacctgaagctgaggtgcagatcgatcgcttgatcaccggcagactgcagtccctccagacatatgtaactcagcagctgattagagccgccgagataagggcaagtgcgaatctggctgccaccaagatgagcgaatgtgtattgggccagagcaaacgagttgatttttgcggtaaggggtatcatttaatgtctttccctcaatccgcacctcatggcgtagttttcctgcatgtgacttatgtcccggctcaggagaagaattttaccacagcccccgcgatctgccatgacggaaaggcccacttcccccgggaaggcgtgtttgtatccaatgggactcactggtttgtcactcagcgaaatttttatgaaccacagatcatcaccactcacaacacatttgttagtggaaactgcgatgtggtcatcggcatcgtgaataacactgtctatgatccactgcaacctgaactggattcttttaaagaggaactcgacaagtattttaaaaaccacactagccctgacgtggatctcggtgacatttctggcatcaacgctagcgtagtgaacattcagaaagagatagatagacttaatgaggtggccaagaacctcaacgaaagtctgatcgacctccaggaactggggaaatacgagcagtacattaaatggccttggtacatatggctggggttcattgctgggctgatcgcaatagtgatggtgaccataatgctctgttgcatgactagctgctgcagctgcctgaagggctgctgtagttgtgggtcatgttgtaagtttgacgaagatgatagcgagcctgtccttaaaggagtgaagctccactacacctagtgggtttaaactcccatttaaatgtgagggttaatgcttcgagcagacatgataagatacattgatgagtttggacaaaccacaactagaatgcagtgaaaaaaatgctttatttgtgaaatttgtgatgctattgctttatttgtaaccattataagctgcaataaacaagttaacaacaacaattgcattcattttatgtttcaggttcagggggagatgtgggaggttttttaaagcaagtaaaacctctacaaatgtggtaaaataactataacggtcctaaggtagcgagacattgattattgactagttgttaatagtaatcaattacggggtcattagttcatagcccatatatggagttccgcgttacataacttacggtaaatggcccgcctggctgaccgcccaacgacccccgcccattgacgtcaataatgacgtatgttcccatagtaacgccaatagggactttccattgacgtcaatgggtggagtatttacggtaaactgcccacttggcagtacatcaagtgtatcatatgccaagtccgccccctattgacgtcaatgacggtaaatggcccgcctggcattatgcccagtacatgaccttacgggactttcctacttggcagtacatctacgtattagtcatcgctattaccatggtgatgcggttttggcagtacaccaatgggcgtggatagcggtttgactcacggggatttccaagtctccaccccattgacgtcaatgggagtttgttttggcaccaaaatcaacgggactttccaaaatgtcgtaataaccccgccccgttgacgcaaatgggcggtaggcgtgtacggtgggaggtctatataagcagagctcgtttagtgaaccgtcagatcgcctggaacgccatccacgctgttttgacctccatagaagacagcgatcgcgccaccatggctggcgaggcccccttcctttacctgtacgcccttgtgtatttcctgcagagcatcaattttgtgagaatcatcatgaggctgtggctttgctggaaatgtaggagcaagaaccccctgttgtatgacgccaactactttctgtgttggcacaccaatctcgccgtgttccagagtgcctctaagatcattacactgaaaaagcggtggcagcttgcactttctaagggagtgcatttcgtttgcaacctgctcctggtgacactcaagcagggggaaatcaaagacgccacccctagcgacttcgttagagccactgccacaatcccaatccaggcttccctgcctttcggctggcttatcgtgggtgtggcactgttggctgtgcggagaccacagggactgcctaataatacagctagctggtttaccgctctgacacagcatggcaaagaagacctcaagttccctcgcggtcagggggtgcctattaacactaatagctctccagacgaccaaattgggtattacaggcgcgccacaagacggatcatggcctgcttagtggggctgatgtggctatcctattttattgctagctttcgcctgaagaaggacaagaagaagaaagctgatgagacccaggcactgccccagcgccaaaagaagcagcagacagtcacactgctccctgctgcagacctggatgacttcagcaagcagctgcaggggaactttggcgaccaggagctgattagacaggggactgactataagcattggcctcagattgctcagttcgccccaagtgcatccgccttcttcgggatgtcacgaataggaatggaagtgaccccttctgggacatggttgacatacaccggagcaatcaagattacctccggggacggtaccacgtctcctattagcgaacacgattatcagatagggggatatactgagaagtgggagtccggcgtcaaaaagatgagtgggaaaggccagcagcaacaaggccaaacagttactaaaaagtctgccgcagaagctagtaaaaagcctcgccagaagcggacagccaccaaagcttacaatgtgactcaggccttcggccgccgggggcctgaacagaccctcttgtggcccgttaccctcgcatgtttcgtgcttgcagctgtgtacaggatcaattggtttaaggatcaggttatcctgttgaacaaacatatagatgcctataagacattcccacccaccgagccaaagaaagataagaaaaagaaaactagtcctgcaaggatggccggcaatggaggagacgcagccttagccctgctcttactcgacaggctgaaccaacttgagtctaaaatgagcggtaaagggcagaagatgaaggatctgtccccaaggtggtatttctactatctgggcaccggccctgaggattgtgtcgtcctccactcatacttcactagcgattattaccagctgtatagtacacaattatctaccgacacaggcgtcgagcacgtgaccttctttatatacaataagatcgtggatgaaccagaggagcatgtgcagatccacactattgatggctctagcgggggcatcatctgggtggcaacagaaggagccctcaacaccccaaaggaccatatcggcaccaggaatccagccaacaatgccgccattgttctgcagctccctcagggcactactctccctaaaggcttctatgctgagggacccggaccaggcgccaaatttgttgctgcttggacactgaaagctgctgctgggcccggaccaggccagtacatcaaggccaactctaagtttatcggcatcaccgaattgggacctggacccggctagtgagtttaaactcccatttaaatgtgagggttaatgcttcgagcagagctcgctgatcagcctcgactgtgccttctagttgccagccatctgttgtttgcccctcccccgtgccttccttgaccctggaaggtgccactcccactgtcctttcctaataaaatgaggaaattgcatcgcattgtctgagtaggtgtcattctattctggggggtggggtggggcaggacagcaagggggaggattgggaagacaatagcaggcatgctggggatgcggtgggctctatggcttctgaggcggaaagaacc

SEQ ID NO: 112 - protein, 1270 aa, synthetic construct
  REGION 1..1270: note = Description of Artificial Sequence: Synthetic polypeptide
MFVFLVLLPLVSSQCVNFTTRTQLPPAYTNSFTRGVYYPDKVFRSSVLHSTQDLFLPFFSNVTWFHAIHVSGTNGTKRFANPVLPFNDGVYFASTEKSNIIRGWIFGTTLDSKTQSLLIVNNATNVVIKVCEFQFCNDPFLGVYYHKNNKSWMESEFRVYSSANNCTFEYVSQPFLMDLEGKQGNFKNLREFVFKNIDGYFKIYSKHTPINLVRGLPQGFSALEPLVDLPIGINITRFQTLHISYLTPGDSSSGWTAGAAAYYVGYLQPRTFLLKYNENGTITDAVDCALDPLSETKCTLKSFTVEKGIYQTSNFRVQPTESIVRFPNITNLCPFGEVFNATRFASVYAWNRKRISNCVADYSVLYNSASFSTFKCYGVSPTKLNDLCFTNVYADSFVIRGDEVRQIAPGQTGNIADYNYKLPDDFTGCVIAWNSNNLDSKVGGNYNYLYRLFRKSNLKPFERDISTEIYQAGSTPCNGVKGFNCYFPLQSYGFQPTYGVGYQPYRVVVLSFELLHAPATVCGPKKSTNLVKNKCVNFNFNGLTGTGVLTESNKKFLPFQQFGRDIADTTDAVRDPQTLEILDITPCSFGGVSVITPGTNTSNQVAVLYQGVNCTEVPVAIHADQLTPTWRVYSTGSNVFQTRAGCLIGAEHVNNSYECDIPIGAGICASYQTQTNSPGSASSVASQSIIAYTMSLGVENSVAYSNNSIAIPTNFTISVTTEILPVSMTKTSVDCTMYICGDSTECSNLLLQYGSFCTQLNRALTGIAVEQDKNTQEVFAQVKQIYKTPPIKDFGGFNFSQILPDPSKPSKRSFIEDLLFNKVTLADAGFIKQYGDCLGDIAARDLICAQKFNGLTVLPPLLTDEMIAQYTSALLAGTITSGWTFGAGAALQIPFAMQMAYRFNGIGVTQNVLYENQKLIANQFNSAIGKIQDSLSSTASALGKLQDVVNQNAQALNTLVKQLSSNFGAISSVLNDILSRLDPPEAEVQIDRLITGRLQSLQTYVTQQLIRAAEIRASANLAATKMSECVLGQSKRVDFCGKGYHLMSFPQSAPHGVVFLHVTYVPAQEKNFTTAPAICHDGKAHFPREGVFVSNGTHWFVTQRNFYEPQIITTDNTFVSGNCDVVIGIVNNTVYDPLQPELDSFKEELDKYFKNHTSPDVDLGDISGINASVVNIQKEIDRLNEVAKNLNESLIDLQELGKYEQYIKWPWYIWLGFIAGLIAIVMVTIMLCCMTSCCSCLKGCCSCGSCCKFDEDDSEPVLKGVKLHYT

SEQ ID NO: 113 - DNA, 7629 bp, synthetic construct
  misc_feature 1..7629: note = Description of Artificial Sequence: Synthetic polynucleotide
  source 1..7629: mol_type = other DNA
gacattgattattgactagttgttaatagtaatcaattacggggtcattagttcatagcccatatatggagttccgcgttacataacttacggtaaatggcccgcctggctgaccgcccaacgacccccgcccattgacgtcaataatgacgtatgttcccatagtaacgccaatagggactttccattgacgtcaatgggtggagtatttacggtaaactgcccacttggcagtacatcaagtgtatcatatgccaagtccgccccctattgacgtcaatgacggtaaatggcccgcctggcattatgcccagtacatgaccttacgggactttcctacttggcagtacatctacgtattagtcatcgctattaccatggtgatgcggttttggcagtacaccaatgggcgtggatagcggtttgactcacggggatttccaagtctccaccccattgacgtcaatgggagtttgttttggcaccaaaatcaacgggactttccaaaatgtcgtaataaccccgccccgttgacgcaaatgggcggtaggcgtgtacggtgggaggtctatataagcagagctcgtttagtgaaccgtcagatcgcctggaacgccatccacgctgttttgacctccatagaagacagcgatcgcgccaccatgtttgtcttcctggtcttgctgccgctggtgagcagccagtgcgtgaatttcaccacccgcacccagcttccacctgcctacactaacagcttcacccgaggggtgtattaccctgacaaggtattccggtcctccgtcctccatagcacgcaggacctttttctgcccttcttctcaaatgtgacatggttccatgccattcacgtgagcggcacgaatggaacgaagcgctttgctaaccccgtgctgcctttcaatgacggcgtctacttcgcctccactgaaaagtcaaacatcatccggggctggatctttggcaccactcttgattcaaagacccagtcactgctgattgtgaacaatgctacaaacgtggttatcaaggtgtgtgagtttcagttctgtaacgatccatttttgggagtgtactaccacaagaacaacaagtcctggatggagtctgagttcagagtgtatagctctgctaacaactgcaccttcgagtacgtgtcccagcctttccttatggacctggaaggcaaacagggcaatttcaaaaacctgagagagttcgtgtttaagaacattgacggatacttcaaaatttattctaagcacacaccaattaacttagtgcggggcctaccccaaggctttagcgccctagagcccctggttgacctgcccattgggatcaatataacaaggttccaaactctacatataagttatctgaccccaggagacagctctagtggttggaccgccggcgcagcagcctactatgtcgggtacttacagccacgcacgttccttctgaagtacaatgagaacgggacaatcactgacgcagtagactgtgcactggacccgctaagcgagactaagtgcacacttaaatccttcacggtggagaaaggcatttatcagacctctaacttcagggtgcagccaacagaaagcattgtgcgattcccaaatattactaatctttgccctttcggggaggtctttaatgcaactagattcgcatcagtctatgcgtggaaccgcaaacgcatttccaattgtgtcgcagactactcagtgctgtacaactctgcctctttcagtacgttcaagtgttacggagtgtcacccactaaactgaacgacctgtgctttacaaatgtctacgctgactccttcgtgattaggggagacgaggtgagacaaattgcccccggacagactgggaatattgccgactacaattataagcttcctgatgatttcactggctgtgttattgcctggaatagtaacaatctggatagcaaggtgggaggcaactataactacttatatcgactgtttaggaagagtaatctgaaaccatttgagcgggatatttccacagaaatttaccaggccgggagcacaccatgtaatggggtgaagggatttaattgttacttcccactccagagctatggtttccaacccacctatggagtgggttaccagccctatagagtcgtggtgcttagttttgagctgcttcacgccccagcaaccgtctgcggtcccaaaaagtcgaccaatctcgtgaaaaacaaatgcgtaaacttcaactttaacggcttaacaggaaccggcgtgctcaccgaaagcaacaagaaattccttccatttcagcaattcggaagggacatcgccgacacaacagacgcggtgagggacccacagactctggagatactggacatcactccttgttcgtttgggggcgtctcggtcatcacacccgggactaatactagtaatcaggtagcagttttatatcaaggcgtcaactgtaccgaagtacctgtggccatacacgctgatcagctaacgccaacatggcgagtctattccaccggctctaacgtttttcagaccagggctgggtgcctgataggggcagagcacgtcaataattcctatgagtgtgatatccccataggtgcggggatctgtgccagctatcaaacccaaaccaattcaccagggagcgcaagctctgtggcttctcagagcataattgcatatacaatgtcactgggcgttgagaatagcgttgcatactctaataacagcatagccattcccacgaactttactatcagtgtgacaaccgaaatattgccagtttcgatgaccaaaactagcgtggattgcacgatgtacatctgtggagactctaccgaatgcagcaatctgctattacaatatggcagcttctgtacacagttaaatcgagccttgacaggcatcgcagtggaacaggacaaaaatactcaagaggtgtttgcacaggtgaagcaaatctacaaaacgccccccattaaagattttggcgggttcaatttttcacaaattctccccgacccgtctaagccgagtaagcggtccttcatcgaagatctgctctttaacaaagtaaccctcgccgatgccggctttattaagcagtatggcgactgcctgggggatatagccgctcgtgacctgatttgcgcccagaagttcaatggtctgaccgtgttgcctcctttattgaccgatgaaatgattgcccagtacactagtgccctgctggccggcactatcacgtctgggtggaccttcggagctggtgccgccttgcagataccttttgcaatgcagatggcctataggtttaatggtatcggagtgactcagaacgtactgtacgagaaccagaagctcatcgctaatcaatttaactccgctatcggaaaaatccaggacagcctctcttctacagctagcgctctgggcaaactgcaggatgtcgttaatcagaatgcccaggccctgaacaccttggttaaacaactatcttccaacttcggggccatatccagtgtgttgaatgatattctctcccgcttggatccacctgaagctgaggtgcagatcgatcgcttgatcaccggcagactgcagtccctccagacatatgtaactcagcagctgattagagccgccgagataagggcaagtgcgaatctggctgccaccaagatgagcgaatgtgtattgggccagagcaaacgagttgatttttgcggtaaggggtatcatttaatgtctttccctcaatccgcacctcatggcgtagttttcctgcatgtgacttatgtcccggctcaggagaagaattttaccacagcccccgcgatctgccatgacggaaaggcccacttcccccgggaaggcgtgtttgtatccaatgggactcactggtttgtcactcagcgaaatttttatgaaccacagatcatcaccactgacaacacatttgttagtggaaactgcgatgtggtcatcggcatcgtgaataacactgtctatgatccactgcaacctgaactggattcttttaaagaggaactcgacaagtattttaaaaaccacactagccctgacgtggatctcggtgacatttctggcatcaacgctagcgtagtgaacattcagaaagagatagatagacttaatgaggtggccaagaacctcaacgaaagtctgatcgacctccaggaactggggaaatacgagcagtacattaaatggccttggtacatatggctggggttcattgctgggctgatcgcaatagtgatggtgaccataatgctctgttgcatgactagctgctgcagctgcctgaagggctgctgtagttgtgggtcatgttgtaagtttgacgaagatgatagcgagcctgtccttaaaggagtgaagctccactacacctagtgggtttaaactcccatttaaatgtgagggttaatgcttcgagcagacatgataagatacattgatgagtttggacaaaccacaactagaatgcagtgaaaaaaatgctttatttgtgaaatttgtgatgctattgctttatttgtaaccattataagctgcaataaacaagttaacaacaacaattgcattcattttatgtttcaggttcagggggagatgtgggaggttttttaaagcaagtaaaacctctacaaatgtggtaaaataactataacggtcctaaggtagcgagacattgattattgactagttgttaatagtaatcaattacggggtcattagttcatagcccatatatggagttccgcgttacataacttacggtaaatggcccgcctggctgaccgcccaacgacccccgcccattgacgtcaataatgacgtatgttcccatagtaacgccaatagggactttccattgacgtcaatgggtggagtatttacggtaaactgcccacttggcagtacatcaagtgtatcatatgccaagtccgccccctattgacgtcaatgacggtaaatggcccgcctggcattatgcccagtacatgaccttacgggactttcctacttggcagtacatctacgtattagtcatcgctattaccatggtgatgcggttttggcagtacaccaatgggcgtggatagcggtttgactcacggggatttccaagtctccaccccattgacgtcaatgggagtttgttttggcaccaaaatcaacgggactttccaaaatgtcgtaataaccccgccccgttgacgcaaatgggcggtaggcgtgtacggtgggaggtctatataagcagagctcgtttagtgaaccgtcagatcgcctggaacgccatccacgctgttttgacctccatagaagacagcgatcgcgccaccatggctggcgaggcccccttcctttacctgtacgcccttgtgtatttcctgcagagcatcaattttgtgagaatcatcatgaggctgtggctttgctggaaatgtaggagcaagaaccccctgttgtatgacgccaactactttctgtgttggcacaccaatctcgccgtgttccagagtgcctctaagatcattacactgaaaaagcggtggcagcttgcactttctaagggagtgcatttcgtttgcaacctgctcctggtgacactcaagcagggggaaatcaaagacgccacccctagcgacttcgttagagccactgccacaatcccaatccaggcttccctgcctttcggctggcttatcgtgggtgtggcactgttggctgtgcggagaccacagggactgcctaataatacagctagctggtttaccgctctgacacagcatggcaaagaagacctcaagttccctcgcggtcagggggtgcctattaacactaatagctctccagacgaccaaattgggtattacaggcgcgccacaagacggatcatggcctgcttagtggggctgatgtggctatcctattttattgctagctttcgcctgaagaaggacaagaagaagaaagctgatgagacccaggcactgccccagcgccaaaagaagcagcagacagtcacactgctccctgctgcagacctggatgacttcagcaagcagctgcaggggaactttggcgaccaggagctgattagacaggggactgactataagcattggcctcagattgctcagttcgccccaagtgcatccgccttcttcgggatgtcacgaataggaatggaagtgaccccttctgggacatggttgacatacaccggagcaatcaagattacctccggggacggtaccacgtctcctattagcgaacacgattatcagatagggggatatactgagaagtgggagtccggcgtcaaaaagatgagtgggaaaggccagcagcaacaaggccaaacagttactaaaaagtctgccgcagaagctagtaaaaagcctcgccagaagcggacagccaccaaagcttacaatgtgactcaggccttcggccgccgggggcctgaacagaccctcttgtggcccgttaccctcgcatgtttcgtgcttgcagctgtgtacaggatcaattggtttaaggatcaggttatcctgttgaacaaacatatagatgcctataagacattcccacccaccgagccaaagaaagataagaaaaagaaaactagtcctgcaaggatggccggcaatggaggagacgcagccttagccctgctcttactcgacaggctgaaccaacttgagtctaaaatgagcggtaaagggcagaagatgaaggatctgtccccaaggtggtatttctactatctgggcaccggccctgaggattgtgtcgtcctccactcatacttcactagcgattattaccagctgtatagtacacaattatctaccgacacaggcgtcgagcacgtgaccttctttatatacaataagatcgtggatgaaccagaggagcatgtgcagatccacactattgatggctctagcgggggcatcatctgggtggcaacagaaggagccctcaacaccccaaaggaccatatcggcaccaggaatccagccaacaatgccgccattgttctgcagctccctcagggcactactctccctaaaggcttctatgctgagggacccggaccaggcgccaaatttgttgctgcttggacactgaaagctgctgctgggcccggaccaggccagtacatcaaggccaactctaagtttatcggcatcaccgaattgggacctggacccggctagtgagtttaaactcccatttaaatgtgagggttaatgcttcgagcagagctcgctgatcagcctcgactgtgccttctagttgccagccatctgttgtttgcccctcccccgtgccttccttgaccctggaaggtgccactcccactgtcctttcctaataaaatgaggaaattgcatcgcattgtctgagtaggtgtcattctattctggggggtggggtggggcaggacagcaagggggaggattgggaagacaatagcaggcatgctggggatgcggtgggctctatggcttctgaggcggaaagaacc

SEQ ID NO: 114 - DNA, 7638 bp, synthetic construct
  misc_feature 1..7638: note = Description of Artificial Sequence: Synthetic polynucleotide
  source 1..7638: mol_type = other DNA
gacattgattattgactagttgttaatagtaatcaattacggggtcattagttcatagcccatatatggagttccgcgttacataacttacggtaaatggcccgcctggctgaccgcccaacgacccccgcccattgacgtcaataatgacgtatgttcccatagtaacgccaatagggactttccattgacgtcaatgggtggagtatttacggtaaactgcccacttggcagtacatcaagtgtatcatatgccaagtccgccccctattgacgtcaatgacggtaaatggcccgcctggcattatgcccagtacatgaccttacgggactttcctacttggcagtacatctacgtattagtcatcgctattaccatggtgatgcggttttggcagtacaccaatgggcgtggatagcggtttgactcacggggatttccaagtctccaccccattgacgtcaatgggagtttgttttggcaccaaaatcaacgggactttccaaaatgtcgtaataaccccgccccgttgacgcaaatgggcggtaggcgtgtacggtgggaggtctatataagcagagctcgtttagtgaaccgtcagatcgcctggaacgccatccacgctgttttgacctccatagaagacagcgatcgcgccaccatgtttgtcttcctggtcttgctgccgctggtgagcagccagtgcgtgaatctcaccacccgcacccagcttccacctgcctacactaacagcttcacccgaggggtgtattaccctgacaaggtattccggtcctccgtcctccatagcacgcaggacctttttctgcccttcttctcaaatgtgacatggttccatgccattcacgtgagcggcacgaatggaacgaagcgctttgataaccccgtgctgcctttcaatgacggcgtctacttcgcctccactgaaaagtcaaacatcatccggggctggatctttggcaccactcttgattcaaagacccagtcactgctgattgtgaacaatgctacaaacgtggttatcaaggtgtgtgagtttcagttctgtaacgatccatttttgggagtgtactaccacaagaacaacaagtcctggatggagtctgagttcagagtgtatagctctgctaacaactgcaccttcgagtacgtgtcccagcctttccttatggacctggaaggcaaacagggcaatttcaaaaacctgagagagttcgtgtttaagaacattgacggatacttcaaaatttattctaagcacacaccaattaacttagtgcgggacctaccccaaggctttagcgccctagagcccctggttgacctgcccattgggatcaatataacaaggttccaaactctactggctctgcatagaagttatctgaccccaggagacagctctagtggttggaccgccggcgcagcagcctactatgtcgggtacttacagccacgcacgttccttctgaagtacaatgagaacgggacaatcactgacgcagtagactgtgcactggacccgctaagcgagactaagtgcacacttaaatccttcacggtggagaaaggcatttatcagacctctaacttcagggtgcagccaacagaaagcattgtgcgattcccaaatattactaatctttgccctttcggggaggtctttaatgcaactagattcgcatcagtctatgcgtggaaccgcaaacgcatttccaattgtgtcgcagactactcagtgctgtacaactctgcctctttcagtacgttcaagtgttacggagtgtcacccactaaactgaacgacctgtgctttacaaatgtctacgctgactccttcgtgattaggggagacgaggtgagacaaattgcccccggacagactgggaagattgccgactacaattataagcttcctgatgatttcactggctgtgttattgcctggaatagtaacaatctggatagcaaggtgggaggcaactataactacttatatcgactgtttaggaagagtaatctgaaaccatttgagcgggatatttccacagaaatttaccaggccgggagcacaccatgtaatggggtggagggatttaattgttacttcccactccagagctatggtttccaacccaccaatggagtgggttaccagccctatagagtcgtggtgcttagttttgagctgcttcacgccccagcaaccgtctgcggtcccaaaaagtcgaccaatctcgtgaaaaacaaatgcgtaaacttcaactttaacggcttaacaggaaccggcgtgctcaccgaaagcaacaagaaattccttccatttcagcaattcggaagggacatcgccgacacaacagacgcggtgagggacccacagactctggagatactggacatcactccttgttcgtttgggggcgtctcggtcatcacacccgggactaatactagtaatcaggtagcagttttatatcaaggcgtcaactgtaccgaagtacctgtggccatacacgctgatcagctaacgccaacatggcgagtctattccaccggctctaacgtttttcagaccagggctgggtgcctgataggggcagagcacgtcaataattcctatgagtgtgatatccccataggtgcggggatctgtgccagctatcaaacccaaaccaattcaccagggagcgcaagctctgtggcttctcagagcataattgcatatacaatgtcactgggcgctgagaatagcgttgcatactctaataacagcatagccattcccacgaactttactatcagtgtgacaaccgaaatattgccagtttcgatgaccaaaactagcgtggattgcacgatgtacatctgtggagactctaccgaatgcagcaatctgctattacaatatggcagcttctgtacacagttaaatcgagccttgacaggcatcgcagtggaacaggacaaaaatactcaagaggtgtttgcacaggtgaagcaaatctacaaaacgccccccattaaagattttggcgggttcaatttttcacaaattctccccgacccgtctaagccgagtaagcggtccttcatcgaagatctgctctttaacaaagtaaccctcgccgatgccggctttattaagcagtatggcgactgcctgggggatatagccgctcgtgacctgatttgcgcccagaagttcaatggtctgaccgtgttgcctcctttattgaccgatgaaatgattgcccagtacactagtgccctgctggccggcactatcacgtctgggtggaccttcggagctggtgccgccttgcagataccttttgcaatgcagatggcctataggtttaatggtatcggagtgactcagaacgtactgtacgagaaccagaagctcatcgctaatcaatttaactccgctatcggaaaaatccaggacagcctctcttctacagctagcgctctgggcaaactgcaggatgtcgttaatcagaatgcccaggccctgaacaccttggttaaacaactatcttccaacttcggggccatatccagtgtgttgaatgatattctctcccgcttggatccacctgaagctgaggtgcagatcgatcgcttgatcaccggcagactgcagtccctccagacatatgtaactcagcagctgattagagccgccgagataagggcaagtgcgaatctggctgccaccaagatgagcgaatgtgtattgggccagagcaaacgagttgatttttgcggtaaggggtatcatttaatgtctttccctcaatccgcacctcatggcgtagttttcctgcatgtgacttatgtcccggctcaggagaagaattttaccacagcccccgcgatctgccatgacggaaaggcccacttcccccgggaaggcgtgtttgtatccaatgggactcactggtttgtcactcagcgaaatttttatgaaccacagatcatcaccactgacaacacatttgttagtggaaactgcgatgtggtcatcggcatcgtgaataacactgtctatgatccactgcaacctgaactggattcttttaaagaggaactcgacaagtattttaaaaaccacactagccctgacgtggatctcggtgacatttctggcatcaacgctagcgtagtgaacattcagaaagagatagatagacttaatgaggtggccaagaacctcaacgaaagtctgatcgacctccaggaactggggaaatacgagcagtacattaaatggccttggtacatatggctggggttcattgctgggctgatcgcaatagtgatggtgaccataatgctctgttgcatgactagctgctgcagctgcctgaagggctgctgtagttgtgggtcatgttgtaagtttgacgaagatgatagcgagcctgtccttaaaggagtgaagctccactacacctagtgggtttaaactcccatttaaatgtgagggttaatgcttcgagcagacatgataagatacattgatgagtttggacaaaccacaactagaatgcagtgaaaaaaatgctttatttgtgaaatttgtgatgctattgctttatttgtaaccattataagctgcaataaacaagttaacaacaacaattgcattcattttatgtttcaggttcagggggagatgtgggaggttttttaaagcaagtaaaacctctacaaatgtggtaaaataactataacggtcctaaggtagcgagacattgattattgactagttgttaatagtaatcaattacggggtcattagttcatagcccatatatggagttccgcgttacataacttacggtaaatggcccgcctggctgaccgcccaacgacccccgcccattgacgtcaataatgacgtatgttcccatagtaacgccaatagggactttccattgacgtcaatgggtggagtatttacggtaaactgcccacttggcagtacatcaagtgtatcatatgccaagtccgccccctattgacgtcaatgacggtaaatggcccgcctggcattatgcccagtacatgaccttacgggactttcctacttggcagtacatctacgtattagtcatcgctattaccatggtgatgcggttttggcagtacaccaatgggcgtggatagcggtttgactcacggggatttccaagtctccaccccattgacgtcaatgggagtttgttttggcaccaaaatcaacgggactttccaaaatgtcgtaataaccccgccccgttgacgcaaatgggcggtaggcgtgtacggtgggaggtctatataagcagagctcgtttagtgaaccgtcagatcgcctggaacgccatccacgctgttttgacctccatagaagacagcgatcgcgccaccatggctggcgaggcccccttcctttacctgtacgcccttgtgtatttcctgcagagcatcaattttgtgagaatcatcatgaggctgtggctttgctggaaatgtaggagcaagaaccccctgttgtatgacgccaactactttctgtgttggcacaccaatctcgccgtgttccagagtgcctctaagatcattacactgaaaaagcggtggcagcttgcactttctaagggagtgcatttcgtttgcaacctgctcctggtgacactcaagcagggggaaatcaaagacgccacccctagcgacttcgttagagccactgccacaatcccaatccaggcttccctgcctttcggctggcttatcgtgggtgtggcactgttggctgtgcggagaccacagggactgcctaataatacagctagctggtttaccgctctgacacagcatggcaaagaagacctcaagttccctcgcggtcagggggtgcctattaacactaatagctctccagacgaccaaattgggtattacaggcgcgccacaagacggatcatggcctgcttagtggggctgatgtggctatcctattttattgctagctttcgcctgaagaaggacaagaagaagaaagctgatgagacccaggcactgccccagcgccaaaagaagcagcagacagtcacactgctccctgctgcagacctggatgacttcagcaagcagctgcaggggaactttggcgaccaggagctgattagacaggggactgactataagcattggcctcagattgctcagttcgccccaagtgcatccgccttcttcgggatgtcacgaataggaatggaagtgaccccttctgggacatggttgacatacaccggagcaatcaagattacctccggggacggtaccacgtctcctattagcgaacacgattatcagatagggggatatactgagaagtgggagtccggcgtcaaaaagatgagtgggaaaggccagcagcaacaaggccaaacagttactaaaaagtctgccgcagaagctagtaaaaagcctcgccagaagcggacagccaccaaagcttacaatgtgactcaggccttcggccgccgggggcctgaacagaccctcttgtggcccgttaccctcgcatgtttcgtgcttgcagctgtgtacaggatcaattggtttaaggatcaggttatcctgttgaacaaacatatagatgcctataagacattcccacccaccgagccaaagaaagataagaaaaagaaaactagtcctgcaaggatggccggcaatggaggagacgcagccttagccctgctcttactcgacaggctgaaccaacttgagtctaaaatgagcggtaaagggcagaagatgaaggatctgtccccaaggtggtatttctactatctgggcaccggccctgaggattgtgtcgtcctccactcatacttcactagcgattattaccagctgtatagtacacaattatctaccgacacaggcgtcgagcacgtgaccttctttatatacaataagatcgtggatgaaccagaggagcatgtgcagatccacactattgatggctctagcgggggcatcatctgggtggcaacagaaggagccctcaacaccccaaaggaccatatcggcaccaggaatccagccaacaatgccgccattgttctgcagctccctcagggcactactctccctaaaggcttctatgctgagggacccggaccaggcgccaaatttgttgctgcttggacactgaaagctgctgctgggcccggaccaggccagtacatcaaggccaactctaagtttatcggcatcaccgaattgggacctggacccggctagtgagtttaaactcccatttaaatgtgagggttaatgcttcgagcagagctcgctgatcagcctcgactgtgccttctagttgccagccatctgttgtttgcccctcccccgtgccttccttgaccctggaaggtgccactcccactgtcctttcctaataaaatgaggaaattgcatcgcattgtctgagtaggtgtcattctattctggggggtggggtggggcaggacagcaagggggaggattgggaagacaatagcaggcatgctggggatgcggtgggctctatggcttctgaggcggaaagaacc

SEQ ID NO: 115 - protein, 100 aa, synthetic construct
  REGION 1..100: note = Description of Artificial Sequence: Synthetic polypeptide
VTNTEMFVTAPDNLGYMYEVQWPGQTQPQIANCSVYDFFVWLHYYSVRDTVTNTEMFVTAPDNLGYMYEVQWPGQTQPQIANCSVYDFFVWLHYYSVRDT

SEQ ID NO: 116 - protein, 25 aa, synthetic construct
  REGION 1..25: note = Description of Artificial Sequence: Synthetic peptide
VTNTEMFVTAPDNLGYMYEVQWPGQ

SEQ ID NO: 117 - protein, 25 aa, synthetic construct
  REGION 1..25: note = Description of Artificial Sequence: Synthetic peptide
TQPQIANCSVYDFFVWLHYYSVRDT

SEQ ID NO: 118 - DNA, 19 bp, synthetic construct
  misc_feature 1..19: note = Description of Artificial Sequence: Synthetic oligonucleotide
  source 1..19: mol_type = other DNA
taatacgactcactatagg

SEQ ID NO: 119 - DNA, 20 bp, synthetic construct
  misc_feature 1..20: note = Description of Artificial Sequence: Synthetic oligonucleotide
  source 1..20: mol_type = other DNA
taatacgactcactataggn

SEQ ID NO: 120 - DNA, 17 bp, synthetic construct
  misc_feature 1..17: note = Description of Artificial Sequence: Synthetic oligonucleotide
  source 1..17: mol_type = other DNA
taatacgactcactata

SEQ ID NO: 121 - DNA, 18 bp, synthetic construct
  misc_feature 1..18: note = Description of Artificial Sequence: Synthetic oligonucleotide
  source 1..18: mol_type = other DNA
taatacgactcactatan

SEQ ID NO: 122 - DNA, 17 bp, synthetic construct
  misc_feature 1..17: note = Description of Artificial Sequence: Synthetic oligonucleotide
  source 1..17: mol_type = other DNA
atttaggtgacactata

SEQ ID NO: 123 - DNA, 25 bp, synthetic construct
  misc_feature 1..25: note = Description of Artificial Sequence: Synthetic oligonucleotide
  source 1..25: mol_type = other DNA
cccccttcagcctgaacttgattcc

SEQ ID NO: 124 - DNA, 25 bp, synthetic construct
  misc_feature 1..25: note = Description of Artificial Sequence: Synthetic oligonucleotide
  source 1..25: mol_type = other DNA
tccactgcaacctgaacttgatagt

SEQ ID NO: 125 - protein, 4 aa, synthetic construct
  REGION 1..4: note = Description of Artificial Sequence: Synthetic peptide
RRAR

SEQ ID NO: 126 - protein, 4 aa, synthetic construct
  REGION 1..4: note = Description of Artificial Sequence: Synthetic peptide
GSAS

SEQ ID NO: 127 - protein, 8 aa, Severe acute respiratory syndrome coronavirus 2
MESLVPGF

SEQ ID NO: 128 - protein, 10 aa, Severe acute respiratory syndrome coronavirus 2
VELVAELEGI

SEQ ID NO: 129 - protein, 8 aa, synthetic construct
  REGION 1..8: note = Description of Artificial Sequence: Synthetic peptide
SIINFEKL

SEQ ID NO: 130 - protein, 8 aa, Severe acute respiratory syndrome coronavirus 2
  REGION 1..8: note = Table A: HLA-B*18:01M HLA-B*37:01M HLA-B*07:05H
MESLVPGF

SEQ ID NO: 131 - protein, 8 aa, Severe acute respiratory syndrome coronavirus 2
  REGION 1..8: note = Table A: HLA-B*44:05H HLA-B*08:01M HLA-B*18:01H HLA-B*14:02H HLA-B*14:01H HLA-B*37:01H HLA-B*40:02M HLA-B*07:05H HLA-B*41:02H
NEKTHVQL

SEQ ID NO: 132 - protein, 8 aa, Severe acute respiratory syndrome coronavirus 2
  REGION 1..8: note = Table A: HLA-B*57:03H
KTHVQLSL

SEQ ID NO: 133 - protein, 8 aa, Severe acute respiratory syndrome coronavirus 2
  REGION 1..8: note = Table A: HLA-B*39:06H
THVQLSLP

SEQ ID NO: 134 - protein, 8 aa, Severe acute respiratory syndrome coronavirus 2
  REGION 1..8: note = Table A: HLA-B*52:01M
VQLSLPVL

SEQ ID NO: 135 - protein, 8 aa, Severe acute respiratory syndrome coronavirus 2
  REGION 1..8: note = Table A: HLA-C*15:05H HLA-B*51:01H HLA-B*52:01H HLA-B*13:02H
LSLPVLQV

SEQ ID NO: 136 - protein, 8 aa, Severe acute respiratory syndrome coronavirus 2
  REGION 1..8: note = Table A: HLA-B*08:01H
VLQVRDVL

SEQ ID NO: 137 - protein, 8 aa, Severe acute respiratory syndrome coronavirus 2
  REGION 1..8: note = Table A: HLA-B*37:01H HLA-B*40:02H HLA-B*41:02H HLA-C*07:04H
RDVLVRGF

SEQ ID NO: 138 - protein, 8 aa, Severe acute respiratory syndrome coronavirus 2
  REGION 1..8: note = Table A: HLA-C*05:01H
FGDSVEEV

SEQ ID NO: 139 - protein, 8 aa, Severe acute respiratory syndrome coronavirus 2
  REGION 1..8: note = Table A: HLA-B*14:02H HLA-B*41:02M
VEVEKGVL

SEQ ID NO: 140 - protein, 8 aa, Severe acute respiratory syndrome coronavirus 2
  REGION 1..8: note = Table A: HLA-B*13:02H
PQLEQPYV

SEQ ID NO: 141 - protein, 8 aa, Severe acute respiratory syndrome coronavirus 2
  REGION 1..8: note = Table A: HLA-B*49:01H
LEQPYVFI

SEQ ID NO: 142 - protein, 8 aa, Severe acute respiratory syndrome coronavirus 2
  REGION 1..8: note = Table A: HLA-A*33:01H HLA-A*33:03H HLA-A*34:01M HLA-A*34:02H HLA-A*66:01H
QPYVFIKR

SEQ ID NO: 143 - protein, 8 aa, Severe acute respiratory syndrome coronavirus 2
  REGION 1..8: note = Table A: HLA-B*46:01H HLA-B*08:01H HLA-B*35:03H HLA-C*15:05H HLA-C*01:02M HLA-B*35:02H HLA-B*51:01H HLA-B*35:12H
TAPHGHVM

SEQ ID NO: 144 - protein, 8 aa, Severe acute respiratory syndrome coronavirus 2
  REGION 1..8: note = Table A: HLA-B*56:01H HLA-B*08:01H HLA-B*55:02H HLA-C*15:05H HLA-B*55:01H HLA-B*07:04H
APHGHVMV

SEQ ID NO: 145 - protein, 8 aa, Severe acute respiratory syndrome coronavirus 2
  REGION 1..8: note = Table A: HLA-B*08:01H
HGHVMVEL

SEQ ID NO: 146 - protein, 8 aa, Severe acute respiratory syndrome coronavirus 2
  REGION 1..8: note = Table A: HLA-B*39:06H
GHVMVELV

SEQ ID NO: 147 - protein, 8 aa, Severe acute respiratory syndrome coronavirus 2
  REGION 1..8: note = Table A: HLA-B*35:12H
MVELVAEL

SEQ ID NO: 148 - protein, 8 aa, Severe acute respiratory syndrome coronavirus 2
  REGION 1..8: note = Table A: HLA-B*44:02H HLA-B*44:05H HLA-C*16:04H HLA-B*46:01H HLA-B*44:03M HLA-B*18:01M HLA-B*07:05M
AELEGIQY

SEQ ID NO: 149 - protein, 8 aa, Severe acute respiratory syndrome coronavirus 2
  REGION 1..8: note = Table A: HLA-C*03:04H
YGRSGETL

SEQ ID NO: 150 - protein, 8 aa, Severe acute respiratory syndrome coronavirus 2
  REGION 1..8: note = Table A: HLA-C*15:05H HLA-C*15:02H
RSGETLGV

SEQ ID NO: 151 - protein, 8 aa, Severe acute respiratory syndrome coronavirus 2
  REGION 1..8: note = Table A: HLA-B*40:02H HLA-B*49:01M
GETLGVLV

SEQ ID NO: 152 - protein, 8 aa, Severe acute respiratory syndrome coronavirus 2
  REGION 1..8: note = Table A: HLA-B*51:01H HLA-B*52:01H
LGVLVPHV

SEQ ID NO: 153 - protein, 8 aa, Severe acute respiratory syndrome coronavirus 2
  REGION 1..8: note = Table A: HLA-B*55:01H HLA-B*39:06H HLA-B*54:01H
HVGEIPVA

SEQ ID NO: 154 - protein, 8 aa, Severe acute respiratory syndrome coronavirus 2
  REGION 1..8: note = Table A: HLA-B*18:01H HLA-B*39:01H
VGEIPVAY

SEQ ID NO: 155 - protein, 8 aa, Severe acute respiratory syndrome coronavirus 2
  REGION 1..8: note = Table A: HLA-B*49:01H
GEIPVAYR

SEQ ID NO: 156 - protein, 8 aa, Severe acute respiratory syndrome coronavirus 2
  REGION 1..8: note = Table A: HLA-B*51:01H
IPVAYRKV

SEQ ID NO: 157 - protein, 8 aa, Severe acute respiratory syndrome coronavirus 2
  REGION 1..8: note = Table A: HLA-B*07:04H
PVAYRKVL

SEQ ID NO: 158 - protein, 8 aa, Severe acute respiratory syndrome coronavirus 2
  REGION 1..8: note = Table A: HLA-B*58:02H HLA-B*08:01M HLA-C*17:01H
VAYRKVLL

SEQ ID NO: 159 - protein, 8 aa, Severe acute respiratory syndrome coronavirus 2
  REGION 1..8: note = Table A: HLA-A*30:02H
KGAGGHSY

SEQ ID NO: 160 - protein, 8 aa, Severe acute respiratory syndrome coronavirus 2
  REGION 1..8: note = Table A: HLA-B*39:01H HLA-B*15:10H
GHSYGADL

SEQ ID NO: 161 - protein, 8 aa, Severe acute respiratory syndrome coronavirus 2
  REGION 1..8: note = Table A: HLA-B*46:01H
YGADLKSF

SEQ ID NO: 162 - protein, 8 aa, Severe acute respiratory syndrome coronavirus 2
  REGION 1..8: note = Table A: HLA-B*37:01M HLA-B*40:02H HLA-B*41:02H HLA-C*07:04H
ADLKSFDL

SEQ ID NO: 163 - protein, 8 aa, Severe acute respiratory syndrome coronavirus 2
  REGION 1..8: note = Table A: HLA-C*04:01M HLA-C*04:03M HLA-C*08:02M HLA-B*39:01H
SFDLGDEL

SEQ ID NO: 164 - protein, 8 aa, Severe acute respiratory syndrome coronavirus 2
  REGION 1..8: note = Table A: HLA-B*18:01H HLA-B*07:05H
DELGTDPY

SEQ ID NO: 165 - protein, 8 aa, Severe acute respiratory syndrome coronavirus 2
  REGION 1..8: note = Table A: HLA-B*58:02M HLA-C*16:01M HLA-C*06:02H HLA-C*03:03H HLA-C*03:04M HLA-C*15:05M HLA-C*01:02H HLA-C*15:02H
SSGVTREL

SEQ ID NO: 166 - protein, 8 aa, Severe acute respiratory syndrome coronavirus 2
  REGION 1..8: note = Table A: HLA-B*38:02H
TRYVDNNF

SEQ ID NO: 167 - protein, 8 aa, Severe acute respiratory syndrome coronavirus 2
  REGION 1..8: note = Table A: HLA-C*15:05H HLA-B*51:01H
DGYPLECI

SEQ ID NO: 168 - protein, 8 aa, Severe acute respiratory syndrome coronavirus 2
  REGION 1..8: note = Table A: HLA-A*36:01H
QLDFIDTK

SEQ ID NO: 169 - protein, 8 aa, Severe acute respiratory syndrome coronavirus 2
  REGION 1..8: note = Table A: HLA-A*36:01H
IDTKRGVY

SEQ ID NO: 170 - protein, 8 aa, Severe acute respiratory syndrome coronavirus 2
  REGION 1..8: note = Table A: HLA-B*38:02H
EHEHEIAW

SEQ ID NO: 171 - protein, 8 aa, Severe acute respiratory syndrome coronavirus 2
  REGION 1..8: note = Table A: HLA-B*18:01M HLA-B*07:05H
HEHEIAWY

SEQ ID NO: 172 - protein, 8 aa, Severe acute respiratory syndrome coronavirus 2
  REGION 1..8: note = Table A: HLA-B*39:01H
EHEIAWYT

SEQ ID NO: 173 - protein, 8 aa, Severe acute respiratory syndrome coronavirus 2
  REGION 1..8: note = Table A: HLA-A*34:01H HLA-A*66:01H
EIAWYTER

SEQ ID NO: 174 - protein, 8 aa, Severe acute respiratory syndrome coronavirus 2
  REGION 1..8: note = Table A: HLA-B*56:01H HLA-B*55:02H HLA-B*55:01M HLA-B*39:06H HLA-B*54:01M
TPFEIKLA

SEQ ID NO: 175 - protein, 8 aa, Severe acute respiratory syndrome coronavirus 2
  REGION 1..8: note = Table A: HLA-B*57:03H
LAKKFDTF

SEQ ID NO: 176 - protein, 8 aa, Severe acute respiratory syndrome coronavirus 2
  REGION 1..8: note = Table A: HLA-A*74:01H HLA-A*33:03H
IIKTIQPR

SEQ ID NO: 177 - protein, 8 aa, Severe acute respiratory syndrome coronavirus 2
  REGION 1..8: note = Table A: HLA-B*58:02H
KTIQPRVE

SEQ ID NO: 178 - protein, 8 aa, Severe acute respiratory syndrome coronavirus 2
  REGION 1..8: note = Table A: HLA-A*34:01H
DGFMGRIR

SEQ ID NO: 179 - protein, 8 aa, Severe acute respiratory syndrome coronavirus 2
  REGION 1..8: note = Table A: HLA-A*02:11H HLA-A*02:02H HLA-A*02:03H
FMGRIRSV

SEQ ID NO: 180 - protein, 8 aa, Severe acute respiratory syndrome coronavirus 2
  REGION 1..8: note = Table A: HLA-B*15:02H
MGRIRSVY

SEQ ID NO: 181 - protein, 8 aa, Severe acute respiratory syndrome coronavirus 2
  REGION 1..8: note = Table A: HLA-C*15:05H
SPNECNQM

SEQ ID NO: 182 - protein, 8 aa, Severe acute respiratory syndrome coronavirus 2
  REGION 1..8: note = Table A: HLA-B*38:02H
DHCGETSW

SEQ ID NO: 183 - protein, 8 aa, Severe acute respiratory syndrome coronavirus 2
  REGION 1..8: note = Table A: HLA-B*46:01H HLA-B*08:01H HLA-B*15:02H
FVKATCEF

SEQ ID NO: 184 - protein, 8 aa, Severe acute respiratory syndrome coronavirus 2
  REGION 1..8: note = Table A: HLA-C*15:05H HLA-B*52:01H HLA-B*13:02H
PQNAVVKI

SEQ ID NO: 185 - protein, 8 aa, Severe acute respiratory syndrome coronavirus 2
  REGION 1..8: note = Table A: HLA-C*07:01H HLA-A*68:02H HLA-B*35:03H HLA-A*02:05H HLA-A*02:02H HLA-A*34:01H HLA-B*35:02H HLA-C*08:01H HLA-C*08:03H HLA-B*35:12M HLA-B*38:01H HLA-B*38:02H HLA-B*39:01M
EVGPEHSL

SEQ ID NO: 186 - protein, 8 aa, Severe acute respiratory syndrome coronavirus 2
  REGION 1..8: note = Table A: HLA-B*07:05H
PEHSLAEY

SEQ ID NO: 187 - protein, 8 aa, Severe acute respiratory syndrome coronavirus 2
  REGION 1..8: note = Table A: HLA-A*36:01H
YHNESGLK

SEQ ID NO: 188 - protein, 8 aa, Severe acute respiratory syndrome coronavirus 2
  REGION 1..8: note = Table A: HLA-B*49:01H
NESGLKTI

SEQ ID NO: 189 - protein, 8 aa, Severe acute respiratory syndrome coronavirus 2
  REGION 1..8: note = Table A: HLA-A*11:02H
SGLKTILR

SEQ ID NO: 190 - protein, 8 aa, Severe acute respiratory syndrome coronavirus 2
  REGION 1..8: note = Table A: HLA-B*57:03H HLA-C*07:04H
KGGRTIAF

SEQ ID NO: 191 - protein, 8 aa, Severe acute respiratory syndrome coronavirus 2
  REGION 1..8: note = Table A: HLA-B*54:01H
CAYWVPRA

SEQ ID NO: 192 - protein, 8 aa, Severe acute respiratory syndrome coronavirus 2
  REGION 1..8: note = Table A: HLA-B*51:01H
VPRASANI

SEQ ID NO: 193 - protein, 8 aa, Severe acute respiratory syndrome coronavirus 2
  REGION 1..8: note = Table A: HLA-B*39:01H
NHTGVVGE

SEQ ID NO: 194 - protein, 8 aa, Severe acute respiratory syndrome coronavirus 2
  REGION 1..8: note = Table A: HLA-A*34:02H
NLLEILQK

SEQ ID NO: 195 - protein, 8 aa, Severe acute respiratory syndrome coronavirus 2
  REGION 1..8: note = Table A: HLA-B*52:01H
LQKEKVNI

SEQ ID NO: 196 - protein, 8 aa, Severe acute respiratory syndrome coronavirus 2
  REGION 1..8: note = Table A: HLA-B*41:02H HLA-B*49:01H
KEKVNINI

SEQ ID NO: 197 - protein, 8 aa, Severe acute respiratory syndrome coronavirus 2
  REGION 1..8: note = Table A: HLA-A*36:01H
INIVGDFK

SEQ ID NO: 198 - protein, 8 aa, Severe acute respiratory syndrome coronavirus 2
  REGION 1..8: note = Table A: HLA-B*35:02M HLA-B*35:12H
NIVGDFKL

SEQ ID NO: 199 - protein, 8 aa, Severe acute respiratory syndrome coronavirus 2
  REGION 1..8: note = Table A: HLA-B*18:01H HLA-B*40:01H
NEEIAIIL

SEQ ID NO: 200 - protein, 8 aa, Severe acute respiratory syndrome coronavirus 2
  REGION 1..8: note = Table A: HLA-B*45:01H HLA-B*40:06H
EEIAIILA

SEQ ID NO: 201 - protein, 8 aa, Severe acute respiratory syndrome coronavirus 2
  REGION 1..8: note = Table A: HLA-B*46:01M HLA-C*03:02M HLA-C*15:05H
IAIILASF

SEQ ID NO: 202 - protein, 8 aa, Severe acute respiratory syndrome coronavirus 2
  REGION 1..8: note = Table A: HLA-B*46:01H HLA-C*15:05H HLA-B*15:01H
FSASTSAF

SEQ ID NO: 203 - protein, 8 aa, Severe acute respiratory syndrome coronavirus 2
  REGION 1..8: note = Table A: HLA-A*68:02H HLA-C*15:05H HLA-B*49:01H
TSAFVETV

SEQ ID NO: 204 - protein, 8 aa, Severe acute respiratory syndrome coronavirus 2
  REGION 1..8: note = Table A: HLA-A*36:01H HLA-A*26:01H HLA-B*38:02H HLA-B*39:01H
ETVKGLDY

SEQ ID NO: 205 - protein, 8 aa, Severe acute respiratory syndrome coronavirus 2
  REGION 1..8: note = Table A: HLA-B*39:06H
FKQIVESC

SEQ ID NO: 206 - protein, 8 aa, Severe acute respiratory syndrome coronavirus 2
  REGION 1..8: note = Table A: HLA-B*58:01M HLA-B*58:02M HLA-A*36:01H HLA-A*30:02H HLA-B*15:01H
KSILSPLY

SEQ ID NO: 207 - protein, 8 aa, Severe acute respiratory syndrome coronavirus 2
  REGION 1..8: note = Table A: HLA-A*02:04H HLA-B*37:01H
ILSPLYAF

SEQ ID NO: 208 - protein, 8 aa, Severe acute respiratory syndrome coronavirus 2
  REGION 1..8: note = Table A: HLA-B*39:06H HLA-B*54:01M
YAFASEAA

SEQ ID NO: 209 - protein, 8 aa, Severe acute respiratory syndrome coronavirus 2
  REGION 1..8: note = Table A: HLA-B*51:01H
FASEAARV

SEQ ID NO: 210 - protein, 8 aa, Severe acute respiratory syndrome coronavirus 2
  REGION 1..8: note = Table A: HLA-B*52:01H
ASEAARVV

SEQ ID NO: 211 - protein, 8 aa, Severe acute respiratory syndrome coronavirus 2
  REGION 1..8: note = Table A: HLA-B*58:02H HLA-B*52:01H
AARVVRSI

SEQ ID NO: 212 - protein, 8 aa, Severe acute respiratory syndrome coronavirus 2
  REGION 1..8: note = Table A: HLA-B*14:02H
ARVVRSIF

SEQ ID NO: 213 - protein, 8 aa, Severe acute respiratory syndrome coronavirus 2
  REGION 1..8: note = Table A: HLA-A*74:01M HLA-A*33:03H HLA-A*31:01H
VVRSIFSR

SEQ ID NO: 214 - protein, 8 aa, Severe acute respiratory syndrome coronavirus 2
  REGION 1..8: note = Table A: HLA-B*58:02H HLA-C*15:02H
RSIFSRTL

SEQ ID NO: 215 - protein, 8 aa, Severe acute respiratory syndrome coronavirus 2
  REGION 1..8: note = Table A: HLA-B*49:01H
LETAQNSV

SEQ ID NO: 216 - protein, 8 aa, Severe acute respiratory syndrome coronavirus 2
  REGION 1..8: note = Table A: HLA-A*33:03H HLA-A*26:03H HLA-A*34:01H HLA-A*66:01H
ETAQNSVR

SEQ ID NO: 217 - protein, 8 aa, Severe acute respiratory syndrome coronavirus 2
  REGION 1..8: note = Table A: HLA-B*48:01M HLA-B*58:02H HLA-B*52:01M HLA-B*15:01M HLA-B*15:03H HLA-B*41:02H
AQNSVRVL

SEQ ID NO: 218 - protein, 8 aa, Severe acute respiratory syndrome coronavirus 2
  REGION 1..8: note = Table A: HLA-A*34:02H
NSVRVLQK

SEQ ID NO: 219 - protein, 8 aa, Severe acute respiratory syndrome coronavirus 2
  REGION 1..8: note = Table A: HLA-B*55:01H
SVRVLQKA

SEQ ID NO: 220 - protein, 8 aa, Severe acute respiratory syndrome coronavirus 2
  REGION 1..8: note = Table A: HLA-B*52:01H HLA-B*13:02H
LQKAAITI

SEQ ID NO: 221 - protein, 8 aa, Severe acute respiratory syndrome coronavirus 2
  REGION 1..8: note = Table A: HLA-A*36:01H HLA-A*01:01H HLA-B*38:02H HLA-B*15:01H
ILDGISQY

SEQ ID NO: 222 - protein, 8 aa, Severe acute respiratory syndrome coronavirus 2
  REGION 1..8: note = Table A: HLA-B*35:02H
DGISQYSL

SEQ ID NO: 223 - protein, 8 aa, Severe acute respiratory syndrome coronavirus 2
  REGION 1..8: note = Table A: HLA-B*52:01H
SQYSLRLI

SEQ ID NO: 224 - protein, 8 aa, Severe acute respiratory syndrome coronavirus 2
  REGION 1..8: note = Table A: HLA-B*38:02H HLA-B*15:02M
SLRLIDAM

SEQ ID NO: 225 - protein, 8 aa, Severe acute respiratory syndrome coronavirus 2
  REGION 1..8: note = Table A: HLA-B*37:01M HLA-B*40:02H HLA-B*41:02H
SDLATNNL

SEQ ID NO: 226 - protein, 8 aa, Severe acute respiratory syndrome coronavirus 2
  REGION 1..8: note = Table A: HLA-C*15:05H
ATNNLVVM

SEQ ID NO: 227 - protein, 8 aa, Severe acute respiratory syndrome coronavirus 2
  REGION 1..8: note = Table A: HLA-B*18:01H HLA-B*15:02H HLA-B*07:05H
NNLVVMAY

SEQ ID NO: 228 - protein, 8 aa, Severe acute respiratory syndrome coronavirus 2
  REGION 1..8: note = Table A: HLA-B*51:01M HLA-B*52:01H
MAYITGGV

SEQ ID NO: 229 - protein, 8 aa, Severe acute respiratory syndrome coronavirus 2
  REGION 1..8: note = Table A: HLA-C*14:02H HLA-C*14:03H HLA-B*39:01H
AYITGGVV

SEQ ID NO: 230 - protein, 8 aa, Severe acute respiratory syndrome coronavirus 2
  REGION 1..8: note = Table A: HLA-B*58:01H HLA-C*04:03H HLA-C*07:01H HLA-A*68:02H HLA-C*15:05M HLA-C*15:02M HLA-A*02:04H HLA-C*17:01H HLA-C*08:01H HLA-B*57:03H HLA-C*07:04M
ITGGVVQL

SEQ ID NO: 231 - protein, 8 aa, Severe acute respiratory syndrome coronavirus 2
  REGION 1..8: note = Table A: HLA-B*52:01H HLA-B*15:03H
SQWLTNIF

SEQ ID NO: 232 - protein, 8 aa, Severe acute respiratory syndrome coronavirus 2
  REGION 1..8: note = Table A: HLA-B*15:02H
TNIFGTVY

SEQ ID NO: 233 - protein, 8 aa, Severe acute respiratory syndrome coronavirus 2
  REGION 1..8: note = Table A: HLA-A*36:01H
IFGTVYEK

SEQ ID NO: 234 - protein, 8 aa, Severe acute respiratory syndrome coronavirus 2
  REGION 1..8: note = Table A: HLA-B*08:01H HLA-B*40:02H HLA-B*41:02M
YEKLKPVL

SEQ ID NO: 235 - protein, 8 aa, Severe acute respiratory syndrome coronavirus 2
  REGION 1..8: note = Table A: HLA-C*14:02M HLA-C*14:03H HLA-B*46:01H HLA-A*24:07H
KFKEGVEF

SEQ ID NO: 236 - protein, 8 aa, Severe acute respiratory syndrome coronavirus 2
  REGION 1..8: note = Table A: HLA-B*18:01H HLA-B*51:01H HLA-B*15:02H HLA-B*07:05H
DGWEIVKF

SEQ ID NO: 237 - protein, 8 aa, Severe acute respiratory syndrome coronavirus 2
  REGION 1..8: note = Table A: HLA-B*44:05H HLA-B*41:02H HLA-B*49:01M
CEIVGGQI

SEQ ID NO: 238 - protein, 8 aa, Severe acute respiratory syndrome coronavirus 2
  REGION 1..8: note = Table A: HLA-C*15:05H
VGGQIVTC

SEQ ID NO: 239 - protein, 8 aa, Severe acute respiratory syndrome coronavirus 2
  REGION 1..8: note = Table A: HLA-B*37:01H
KESVQTFF

SEQ ID NO: 240 - protein, 8 aa, Severe acute respiratory syndrome coronavirus 2
  REGION 1..8: note = Table A: HLA-B*52:01H HLA-B*13:02H
VQTFFKLV

SEQ ID NO: 241 - protein, 8 aa, Severe acute respiratory syndrome coronavirus 2
  REGION 1..8: note = Table A: HLA-A*11:01H HLA-A*11:02H
TFFKLVNK

SEQ ID NO: 242 - protein, 8 aa, Severe acute respiratory syndrome coronavirus 2
  REGION 1..8: note = Table A: HLA-C*03:02H HLA-C*15:05H HLA-C*15:02H
LVNKFLAL

SEQ ID NO: 243 - protein, 8 aa, Severe acute respiratory syndrome coronavirus 2
  REGION 1..8: note = Table A: HLA-B*37:01H
ADSIIIGG

SEQ ID NO: 244 - protein, 8 aa, Severe acute respiratory syndrome coronavirus 2
  REGION 1..8: note = Table A: HLA-B*39:06H HLA-B*54:01H
DSIIIGGA

SEQ ID NO: 245 - protein, 8 aa, Severe acute respiratory syndrome coronavirus 2
  REGION 1..8: note = Table A: HLA-C*03:03H
SIIIGGAK

SEQ ID NO: 246 - protein, 8 aa, Severe acute respiratory syndrome coronavirus 2
  REGION 1..8: note = Table A: HLA-C*03:03H HLA-C*03:04H HLA-C*15:05H
IIIGGAKL

SEQ ID NO: 247 - protein, 8 aa, Severe acute respiratory syndrome coronavirus 2
  REGION 1..8: note = Table A: HLA-A*03:02H
IIGGAKLK

SEQ ID NO: 248 - protein, 8 aa, Severe acute respiratory syndrome coronavirus 2
  REGION 1..8: note = Table A: HLA-B*46:01H HLA-B*15:01H
ALNLGETF

SEQ ID NO: 249 - protein, 8 aa, Severe acute respiratory syndrome coronavirus 2
  REGION 1..8: note = Table A: HLA-A*33:03H HLA-A*68:01H HLA-A*34:01H HLA-A*34:02H HLA-A*66:01H
ETFVTHSK

SEQ ID NO: 250 - protein, 8 aa, Severe acute respiratory syndrome coronavirus 2
  REGION 1..8: note = Table A: HLA-A*30:02M
VTHSKGLY

SEQ ID NO: 251 - protein, 8 aa, Severe acute respiratory syndrome coronavirus 2
  REGION 1..8: note = Table A: HLA-B*45:01H
EETGLLMP

SEQ ID NO: 252 - protein, 8 aa, Severe acute respiratory syndrome coronavirus 2
  REGION 1..8: note = Table A: HLA-B*57:03H
KAPKEIIF

SEQ ID NO: 253 - protein, 8 aa, Severe acute respiratory syndrome coronavirus 2
  REGION 1..8: note = Table A: HLA-B*07:04H
APKEIIFL

SEQ ID NO: 254 - protein, 8 aa, Severe acute respiratory syndrome coronavirus 2
  REGION 1..8: note = Table A: HLA-C*14:02M HLA-C*14:03M
IFLEGETL

SEQ ID NO: 255 - protein, 8 aa, Severe acute respiratory syndrome coronavirus 2
  REGION 1..8: note = Table A: HLA-B*49:01H
GETLPTEV

SEQ ID NO: 256 - protein, 8 aa, Severe acute respiratory syndrome coronavirus 2
  REGION 1..8: note = Table A: HLA-B*18:01H HLA-B*07:05H HLA-B*49:01M
TEVLTEEV

SEQ ID NO: 257 - protein, 8 aa, Severe acute respiratory syndrome coronavirus 2
  REGION 1..8: note = Table A: HLA-A*36:01H
LTEEVVLK

SEQ ID NO: 258 - protein, 8 aa, Severe acute respiratory syndrome coronavirus 2
  REGION 1..8: note = Table A: HLA-B*45:01H HLA-B*50:01H
LEQPTSEA

SEQ ID NO: 259 - protein, 8 aa, Severe acute respiratory syndrome coronavirus 2
  REGION 1..8: note = Table A: HLA-B*51:01M
EAVEAPLV

SEQ ID NO: 260 - protein, 8 aa, Severe acute respiratory syndrome coronavirus 2
  REGION 1..8: note = Table A: HLA-B*55:02H HLA-C*15:05M HLA-B*55:01H HLA-B*07:05H
APLVGTPV

SEQ ID NO: 261 - protein, 8 aa, Severe acute respiratory syndrome coronavirus 2
  REGION 1..8: note = Table A: HLA-C*15:05H
TPVCINGL

SEQ ID NO: 262 - protein, 8 aa, Severe acute respiratory syndrome coronavirus 2
  REGION 1..8: note = Table A: HLA-B*51:01M
NGLMLLEI

SEQ ID NO: 263 - protein, 8 aa, Severe acute respiratory syndrome coronavirus 2
  REGION 1..8: note = Table A: HLA-B*38:02H HLA-B*13:02H
ALAPNMMV

SEQ ID NO: 264 - protein, 8 aa, Severe acute respiratory syndrome coronavirus 2
  REGION 1..8: note = Table A: HLA-B*38:02H HLA-B*15:02H
MMVTNNTF

SEQ ID NO: 265 - protein, 8 aa, Severe acute respiratory syndrome coronavirus 2
  REGION 1..8: note = Table A: HLA-B*58:01H HLA-C*03:03H HLA-C*03:04H HLA-C*15:05M HLA-C*15:02H HLA-C*08:01H HLA-C*07:04H
VTNNTFTL

SEQ ID NO: 266 - protein, 8 aa, Severe acute respiratory syndrome coronavirus 2
  REGION 1..8: note = Table A: HLA-A*03:01H HLA-A*03:02M HLA-A*11:01M HLA-A*11:02M HLA-A*34:02H
TNNTFTLK

SEQ ID NO: 267 - protein, 8 aa, Severe acute respiratory syndrome coronavirus 2
  REGION 1..8: note = Table A: HLA-B*57:03H
GAPTKVTF

SEQ ID NO: 268 - protein, 8 aa, Severe acute respiratory syndrome coronavirus 2
  REGION 1..8: note = Table A: HLA-B*40:02H
GDDTVIEV

SEQ ID NO: 269 - protein, 8 aa, Severe acute respiratory syndrome coronavirus 2
  REGION 1..8: note = Table A: HLA-A*25:01H HLA-B*46:01H HLA-A*26:01M HLA-A*26:02M HLA-A*26:03M HLA-B*18:01H HLA-B*35:01M HLA-B*38:02M HLA-B*15:01M HLA-B*15:02H HLA-B*39:01H HLA-B*07:05H
TVIEVQGY

SEQ ID NO: 270 - protein, 8 aa, Severe acute respiratory syndrome coronavirus 2
  REGION 1..8: note = Table A: HLA-B*51:01H HLA-B*52:01M
QGYKSVNI

SEQ ID NO: 271 - protein, 8 aa, Severe acute respiratory syndrome coronavirus 2
  REGION 1..8: note = Table A: HLA-B*15:03H
YKSVNITF

SEQ ID NO: 272 - protein, 8 aa, Severe acute respiratory syndrome coronavirus 2
  REGION 1..8: note = Table A: HLA-A*02:04H
SVNITFEL

SEQ ID NO: 273 - protein, 8 aa, Severe acute respiratory syndrome coronavirus 2
  REGION 1..8: note = Table A: HLA-B*18:01H HLA-B*07:05H
DERIDKVL

SEQ ID NO: 274 - protein, 8 aa, Severe acute respiratory syndrome coronavirus 2
  REGION 1..8: note = Table A: HLA-A*03:01H HLA-A*11:01H HLA-A*11:02H
IDKVLNEK

SEQ ID NO: 275 - protein, 8 aa, Severe acute respiratory syndrome coronavirus 2
  REGION 1..8: note = Table A: HLA-C*15:05H
CSAYTVEL

SEQ ID NO: 276 - protein, 8 aa, Severe acute respiratory syndrome coronavirus 2
  REGION 1..8: note = Table A: HLA-C*08:02H
TVELGTEV

SEQ ID NO: 277 - protein, 8 aa, Severe acute respiratory syndrome coronavirus 2
  REGION 1..8: note = Table A: HLA-A*03:02H HLA-A*11:02H
VVADAVIK

SEQ ID NO: 278 - protein, 8 aa, Severe acute respiratory syndrome coronavirus 2
  REGION 1..8: note = Table A: HLA-B*44:05H HLA-B*37:01M HLA-B*40:02M HLA-B*07:05H HLA-B*41:02H
ADAVIKTL

SEQ ID NO: 279 - protein, 8 aa, Severe acute respiratory syndrome coronavirus 2
  REGION 1..8: note = Table A: HLA-C*01:02H
LTPLGIDL

SEQ ID NO: 280 - protein, 8 aa, Severe acute respiratory syndrome coronavirus 2
  REGION 1..8: note = Table A: HLA-B*18:01H HLA-B*15:02H HLA-B*07:05H
DEWSMATY

SEQ ID NO: 281 - protein, 8 aa, Severe acute respiratory syndrome coronavirus 2
  REGION 1..8: note = Table A: HLA-C*14:02H HLA-C*14:03H HLA-B*46:01H HLA-C*04:01H HLA-C*04:03H HLA-C*15:05H HLA-C*08:02H HLA-B*39:01M HLA-C*05:01M
LFDESGEF

SEQ ID NO: 282 - protein, 8 aa, Severe acute respiratory syndrome coronavirus 2
  REGION 1..8: note = Table A: HLA-B*18:01H HLA-B*35:02H HLA-B*35:12H HLA-B*07:05H
DESGEFKL

SEQ ID NO: 283 - protein, 8 aa, Severe acute respiratory syndrome coronavirus 2
  REGION 1..8: note = Table A: HLA-B*15:03M
FKLASHMY

SEQ ID NO: 284 - protein, 8 aa, Severe acute respiratory syndrome coronavirus 2
  REGION 1..8: note = Table A: HLA-B*39:01H
EFEPSTQY

SEQ ID NO: 285 - protein, 8 aa, Severe acute respiratory syndrome coronavirus 2
  REGION 1..8: note = Table A: HLA-B*35:01M HLA-B*35:08H HLA-B*38:02H
EPSTQYEY

SEQ ID NO: 286 - protein, 8 aa, Severe acute respiratory syndrome coronavirus 2
  REGION 1..8: note = Table A: HLA-B*58:01H HLA-C*16:01H HLA-B*46:01H HLA-A*29:01H HLA-C*03:03H HLA-C*07:01H HLA-C*03:02H HLA-C*03:04H HLA-C*15:05M HLA-C*12:02H HLA-C*12:03H HLA-C*15:02M HLA-A*24:02H HLA-C*17:01M HLA-A*24:07H HLA-C*08:01H
  REGION 1..8: note = CONT. FROM ABOVE: HLA-A*23:01H HLA-B*38:02H HLA-B*15:01H HLA- B*15:02H HLA-B*15:03H HLA-B*39:01H HLA-B*07:05H HLA-B*57:03H HLA-C*02:02H HLA-B*13:01M HLA-B*13:02H HLA-C*07:04M
YQGKPLEF

SEQ ID NO: 287 - protein, 8 aa, Severe acute respiratory syndrome coronavirus 2
  REGION 1..8: note = Table A: HLA-B*18:01H HLA-B*40:06H HLA-B*07:05H HLA-B*50:01M
LEFGATSA

SEQ ID NO: 288 - protein, 8 aa, Severe acute respiratory syndrome coronavirus 2
  REGION 1..8: note = Table A: HLA-C*03:03H HLA-C*03:04H HLA-B*14:01H HLA-B*39:01H
FGATSAAL

SEQ ID NO: 289 - protein, 8 aa, Severe acute respiratory syndrome coronavirus 2
  REGION 1..8: note = Table A: HLA-B*58:02H HLA-C*15:05H
QTTTIQTI

SEQ ID NO: 290 - protein, 8 aa, Severe acute respiratory syndrome coronavirus 2
  REGION 1..8: note = Table A: HLA-C*15:05H HLA-B*35:02H HLA-B*35:12H
QPQLEMEL

SEQ ID NO: 291 - protein, 8 aa, Severe acute respiratory syndrome coronavirus 2
  REGION 1..8: note = Table A: HLA-B*51:01H HLA-B*52:01H HLA-B*57:03H
LTPVVQTI

SEQ ID NO: 292 - protein, 8 aa, Severe acute respiratory syndrome coronavirus 2
  REGION 1..8: note = Table A: HLA-C*15:05H
PVVQTIEV

SEQ ID NO: 293 - protein, 8 aa, Severe acute respiratory syndrome coronavirus 2
  REGION 1..8: note = Table A: HLA-A*25:01H
QTIEVNSF

SEQ ID NO: 294 - protein, 8 aa, Severe acute respiratory syndrome coronavirus 2
  REGION 1..8: note = Table A: HLA-A*26:03H
EVNSFSGY

SEQ ID NO: 295 - protein, 8 aa, Severe acute respiratory syndrome coronavirus 2
  REGION 1..8: note = Table A: HLA-A*11:01H HLA-A*11:02H HLA-A*36:01H HLA-A*34:02H
NSFSGYLK

SEQ ID NO: 296 - protein, 8 aa, Severe acute respiratory syndrome coronavirus 2
  REGION 1..8: note = Table A: HLA-A*36:01H
LTDNVYIK

SEQ ID NO: 297 - protein, 8 aa, Severe acute respiratory syndrome coronavirus 2
  REGION 1..8: note = Table A: HLA-B*08:01H HLA-B*55:01H HLA-B*07:04H
KVKPTVVV

SEQ ID NO: 298 - protein, 8 aa, Severe acute respiratory syndrome coronavirus 2
  REGION 1..8: note = Table A: HLA-B*56:01M HLA-B*55:02M HLA-C*15:05H HLA-B*55:01M HLA-B*39:06H HLA-B*54:01H HLA-B*07:05H
KPTVVVNA

SEQ ID NO: 299 - protein, 8 aa, Severe acute respiratory syndrome coronavirus 2
  REGION 1..8: note = Table A: HLA-B*15:01H HLA-B*15:02H
VVNAANVY

SEQ ID NO: 300 - protein, 8 aa, Severe acute respiratory syndrome coronavirus 2
  REGION 1..8: note = Table A: HLA-A*03:02H HLA-A*11:02H HLA-A*68:01H HLA-A*34:02H
NAANVYLK

SEQ ID NO: 301 - protein, 8 aa, Severe acute respiratory syndrome coronavirus 2
  REGION 1..8: note = Table A: HLA-C*15:05H HLA-B*14:01H HLA-C*08:03H HLA-B*39:01H
GGGVAGAL

SEQ ID NO: 302 - protein, 8 aa, Severe acute respiratory syndrome coronavirus 2
  REGION 1..8: note = Table A: HLA-A*03:02H
GVAGALNK

SEQ ID NO: 303 - protein, 8 aa, Severe acute respiratory syndrome coronavirus 2
  REGION 1..8: note = Table A: HLA-C*15:05H
ATNNAMQV

SEQ ID NO: 304 - protein, 8 aa, Severe acute respiratory syndrome coronavirus 2
  REGION 1..8: note = Table A: HLA-B*38:02H HLA-B*39:01H
MQVESDDY

SEQ ID NO: 305 - protein, 8 aa, Severe acute respiratory syndrome coronavirus 2
  REGION 1..8: note = Table A: HLA-C*03:04H
YIATNGPL

SEQ ID NO: 306 - protein, 8 aa, Severe acute respiratory syndrome coronavirus 2
  REGION 1..8: note = Table A: HLA-A*11:01H HLA-A*11:02H HLA-A*36:01H HLA-C*03:03H HLA-A*34:02H
IATNGPLK

SEQ ID NO: 307 - protein, 8 aa, Severe acute respiratory syndrome coronavirus 2
  REGION 1..8: note = Table A: HLA-A*29:01H HLA-C*15:05M HLA-C*15:02H HLA-B*13:02H
ATNGPLKV

SEQ ID NO: 308 - protein, 8 aa, Severe acute respiratory syndrome coronavirus 2
  REGION 1..8: note = Table A: HLA-B*08:01H
HNLAKHCL

SEQ ID NO: 309 - protein, 8 aa, Severe acute respiratory syndrome coronavirus 2
  REGION 1..8: note = Table A: HLA-B*14:01H HLA-B*38:01H HLA-B*38:02H HLA-B*39:06M HLA-B*39:01M HLA-B*15:10M
LHVVGPNV

SEQ ID NO: 310 - protein, 8 aa, Severe acute respiratory syndrome coronavirus 2
  REGION 1..8: note = Table A: HLA-A*11:303H HLA-A*03:01M HLA-A*03:02H HLA-A*11:01M HLA-A*11:02H HLA-A*36:01H HLA-A*30:02H HLA-A*68:01H HLA-A*34:02H HLA-C*07:27M
VVGPNVNK

SEQ ID NO: 311 - protein, 8 aa, Severe acute respiratory syndrome coronavirus 2
  REGION 1..8: note = Table A: HLA-B*38:02H HLA-B*15:01M HLA-B*15:02H HLA-B*15:03M
IQLLKSAY

SEQ ID NO: 312 - protein, 8 aa, Severe acute respiratory syndrome coronavirus 2
  REGION 1..8: note = Table A: HLA-A*68:02H
ENFNQHEV

SEQ ID NO: 313 - protein, 8 aa, Severe acute respiratory syndrome coronavirus 2
  REGION 1..8: note = Table A: HLA-C*14:02H HLA-B*08:01H HLA-B*14:02H
NFNQHEVL

SEQ ID NO: 314 - protein, 8 aa, Severe acute respiratory syndrome coronavirus 2
  REGION 1..8: note = Table A: HLA-B*39:06M
NQHEVLLA

SEQ ID NO: 315 - protein, 8 aa, Severe acute respiratory syndrome coronavirus 2
  REGION 1..8: note = Table A: HLA-B*38:02H
EVLLAPLL

SEQ ID NO: 316 - protein, 8 aa, Severe acute respiratory syndrome coronavirus 2
  REGION 1..8: note = Table A: HLA-A*02:03H
LLAPLLSA

SEQ ID NO: 317 - protein, 8 aa, Severe acute respiratory syndrome coronavirus 2
  REGION 1..8: note = Table A: HLA-C*15:05H HLA-B*07:05H
APLLSAGI

SEQ ID NO: 318 - protein, 8 aa, Severe acute respiratory syndrome coronavirus 2
  REGION 1..8: note = Table A: HLA-C*04:03H HLA-C*15:05H HLA-B*35:02H HLA-C*08:01H HLA-C*08:02H HLA-B*35:12H HLA-B*38:02H HLA-B*40:01H HLA-B*40:02H
GADPIHSL

SEQ ID NO: 319 - protein, 8 aa, Severe acute respiratory syndrome coronavirus 2
  REGION 1..8: note = Table A: HLA-C*15:05H HLA-B*51:01H HLA-B*54:01H
DPIHSLRV

SEQ ID NO: 320 - protein, 8 aa, Severe acute respiratory syndrome coronavirus 2
  REGION 1..8: note = Table A: HLA-B*37:01H
VDTVRTNV

SEQ ID NO: 321 - protein, 8 aa, Severe acute respiratory syndrome coronavirus 2
  REGION 1..8: note = Table A: HLA-B*18:01H HLA-B*35:01H HLA-B*38:02H HLA-B*15:02M
DTVRTNVY

SEQ ID NO: 322 - protein, 8 aa, Severe acute respiratory syndrome coronavirus 2
  REGION 1..8: note = Table A: HLA-C*15:02H
RTNVYLAV

SEQ ID NO: 323 - protein, 8 aa, Severe acute respiratory syndrome coronavirus 2
  REGION 1..8: note = Table A: HLA-B*46:01H HLA-B*18:01H HLA-B*37:01H HLA-B*40:02H HLA-B*15:01H HLA-B*07:05H HLA-B*41:02H
YDKLVSSF

SEQ ID NO: 324 - protein, 8 aa, Severe acute respiratory syndrome coronavirus 2
  REGION 1..8: note = Table A: HLA-C*15:05H
LVSSFLEM

SEQ ID NO: 325 - protein, 8 aa, Severe acute respiratory syndrome coronavirus 2
  REGION 1..8: note = Table A: HLA-A*36:01H
VSSFLEMK

SEQ ID NO: 326 - protein, 8 aa, Severe acute respiratory syndrome coronavirus 2
  REGION 1..8: note = Table A: HLA-B*44:05H HLA-B*18:01H HLA-B*52:01M HLA-B*37:01H HLA-B*40:02H HLA-B*07:05H HLA-B*41:02H HLA-B*49:01M
VEQKIAEI

SEQ ID NO: 327 - protein, 8 aa, Severe acute respiratory syndrome coronavirus 2
  REGION 1..8: note = Table A: HLA-B*45:01M HLA-B*40:02M HLA-B*41:02M HLA-B*49:01M HLA-B*50:01H
AEIPKEEV

SEQ ID NO: 328 - protein, 8 aa, Severe acute respiratory syndrome coronavirus 2
  REGION 1..8: note = Table A: HLA-B*18:01H HLA-B*37:01H HLA-B*40:01M HLA-B*40:02H HLA-B*07:05H HLA-B*41:02M HLA-B*49:01H
VEEVTTTL

SEQ ID NO: 329 - protein, 8 aa, Severe acute respiratory syndrome coronavirus 2
  REGION 1..8: note = Table A: HLA-A*36:01H
LTENLLLY

SEQ ID NO: 330 - protein, 8 aa, Severe acute respiratory syndrome coronavirus 2
  REGION 1..8: note = Table A: HLA-B*49:01H
TENLLLYI

SEQ ID NO: 331 - protein, 8 aa, Severe acute respiratory syndrome coronavirus 2
  REGION 1..8: note = Table A: HLA-C*04:03M HLA-C*08:02H HLA-C*05:01H
YIDINGNL

SEQ ID NO: 332 - protein, 8 aa, Severe acute respiratory syndrome coronavirus 2
  REGION 1..8: note = Table A: HLA-B*39:01H HLA-B*15:10H
LHPDSATL

SEQ ID NO: 333 - protein, 8 aa, Severe acute respiratory syndrome coronavirus 2
  REGION 1..8: note = Table A: HLA-C*15:05H HLA-B*51:01H
HPDSATLV

SEQ ID NO: 334 - protein, 8 aa, Severe acute respiratory syndrome coronavirus 2
  REGION 1..8: note = Table A: HLA-C*04:03H HLA-C*08:02H HLA-C*05:01H
VSDIDITF

SEQ ID NO: 335 - protein, 8 aa, Severe acute respiratory syndrome coronavirus 2
  REGION 1..8: note = Table A: HLA-B*44:05H HLA-B*40:01H HLA-B*40:02M HLA-B*41:02H
SDIDITFL

SEQ ID NO: 336 - protein, 8 aa, Severe acute respiratory syndrome coronavirus 2
  REGION 1..8: note = Table A: HLA-A*36:01M HLA-A*34:02H
DIDITFLK

SEQ ID NO: 337 - protein, 8 aa, Severe acute respiratory syndrome coronavirus 2
  REGION 1..8: note = Table A: HLA-A*36:01H
IDITFLKK

SEQ ID NO: 338 - protein, 8 aa, Severe acute respiratory syndrome coronavirus 2
  REGION 1..8: note = Table A: HLA-C*15:05H HLA-B*51:01H
APYIVGDV

SEQ ID NO: 339 - protein, 8 aa, Severe acute respiratory syndrome coronavirus 2
  REGION 1..8: note = Table A: HLA-B*39:01H
PYIVGDVV

SEQ ID NO: 340 - protein, 8 aa, Severe acute respiratory syndrome coronavirus 2
  REGION 1..8: note = Table A: HLA-B*35:02M HLA-B*35:12H
DVVQEGVL

SEQ ID NO: 341 - protein, 8 aa, Severe acute respiratory syndrome coronavirus 2
  REGION 1..8: note = Table A: HLA-B*07:05H HLA-B*49:01M
QEGVLTAV

SEQ ID NO: 342 - protein, 8 aa, Severe acute respiratory syndrome coronavirus 2
  REGION 1..8: note = Table A: HLA-A*11:01H HLA-A*11:02H HLA-A*34:02H HLA-B*51:01H HLA-B*54:01H
TAVVIPTK

SEQ ID NO: 343 - protein, 8 aa, Severe acute respiratory syndrome coronavirus 2
  REGION 1..8: note = Table A: HLA-A*11:303H HLA-A*03:02H HLA-A*11:01H HLA-A*11:02M HLA-C*07:27H
AVVIPTKK

SEQ ID NO: 344 - protein, 8 aa, Severe acute respiratory syndrome coronavirus 2
  REGION 1..8: note = Table A: HLA-C*15:05H
KAGGTTEM

SEQ ID NO: 345 - protein, 8 aa, Severe acute respiratory syndrome coronavirus 2
  REGION 1..8: note = Table A: HLA-A*03:01H HLA-A*11:01H HLA-A*11:02H HLA-A*36:01H HLA-A*34:02H HLA-C*07:27H
GTTEMLAK

SEQ ID NO: 346 - protein, 8 aa, Severe acute respiratory syndrome coronavirus 2
  REGION 1..8: note = Table A: HLA-B*44:02H HLA-B*44:05M HLA-B*44:03H HLA-B*18:01H HLA-B*37:01H HLA-B*40:01H HLA-B*40:02M HLA-B*07:05H HLA-B*41:02H HLA-B*49:01H
TEMLAKAL

SEQ ID NO: 347 - protein, 8 aa, Severe acute respiratory syndrome coronavirus 2
  REGION 1..8: note = Table A: HLA-B*15:03H
RKVPTDNY

SEQ ID NO: 348 - protein, 8 aa, Severe acute respiratory syndrome coronavirus 2
  REGION 1..8: note = Table A: HLA-B*18:01H HLA-B*07:05H
TDNYITTY

SEQ ID NO: 349 - protein, 8 aa, Severe acute respiratory syndrome coronavirus 2
  REGION 1..8: note = Table A: HLA-C*03:03H HLA-C*03:04H HLA-C*15:05H HLA-C*08:03H
TTYPGQGL

SEQ ID NO: 350 - protein, 8 aa, Severe acute respiratory syndrome coronavirus 2
  REGION 1..8: note = Table A: HLA-B*39:06H
NGYTVEEA

SEQ ID NO: 351 - protein, 8 aa, Severe acute respiratory syndrome coronavirus 2
  REGION 1..8: note = Table A: HLA-B*40:01H HLA-B*40:02H HLA-B*41:02M
VEEAKTVL

SEQ ID NO: 352 - protein, 8 aa, Severe acute respiratory syndrome coronavirus 2
  REGION 1..8: note = Table A: HLA-A*34:02H
EAKTVLKK

SEQ ID NO: 353 - protein, 8 aa, Severe acute respiratory syndrome coronavirus 2
  REGION 1..8: note = Table A: HLA-B*52:01M
AFYILPSI

SEQ ID NO: 354 - protein, 8 aa, Severe acute respiratory syndrome coronavirus 2
  REGION 1..8: note = Table A: HLA-B*58:02H HLA-C*16:01H
ISNEKQEI

SEQ ID NO: 355 - protein, 8 aa, Severe acute respiratory syndrome coronavirus 2
  REGION 1..8: note = Table A: HLA-B*58:02H HLA-C*03:02H
VSWNLREM

SEQ ID NO: 356 - protein, 8 aa, Severe acute respiratory syndrome coronavirus 2
  REGION 1..8: note = Table A: HLA-B*58:02H HLA-B*35:02H
HAEETRKL

SEQ ID NO: 357 - protein, 8 aa, Severe acute respiratory syndrome coronavirus 2
  REGION 1..8: note = Table A: HLA-B*41:02H
AEETRKLM

SEQ ID NO: 358 - protein, 8 aa, Severe acute respiratory syndrome coronavirus 2
  REGION 1..8: note = Table A: HLA-B*52:01H
TKAIVSTI

SEQ ID NO: 359 - protein, 8 aa, Severe acute respiratory syndrome coronavirus 2
  REGION 1..8: note = Table A: HLA-A*74:01H HLA-A*11:02H HLA-A*68:01H
AIVSTIQR

SEQ ID NO: 360 - protein, 8 aa, Severe acute respiratory syndrome coronavirus 2
  REGION 1..8: note = Table A: HLA-A*03:02H HLA-A*11:02H
IVSTIQRK

SEQ ID NO: 361 - protein, 8 aa, Severe acute respiratory syndrome coronavirus 2
  REGION 1..8: note = Table A: HLA-B*58:01H HLA-B*58:02M HLA-C*16:01H
VSTIQRKY

SEQ ID NO: 362 - protein, 8 aa, Severe acute respiratory syndrome coronavirus 2
  REGION 1..8: note = Table A: HLA-B*52:01H
IQRKYKGI

SEQ ID NO: 363 - protein, 8 aa, Severe acute respiratory syndrome coronavirus 2
  REGION 1..8: note = Table A: HLA-B*15:03H
RKYKGIKI

SEQ ID NO: 364 - protein, 8 aa, Severe acute respiratory syndrome coronavirus 2
  REGION 1..8: note = Table A: HLA-B*15:01H HLA-B*39:01H
IQEGVVDY

SEQ ID NO: 365 - protein, 8 aa, Severe acute respiratory syndrome coronavirus 2
  REGION 1..8: note = Table A: HLA-C*04:03M HLA-C*05:01H
VVDYGARF

SEQ ID NO: 366 - protein, 8 aa, Severe acute respiratory syndrome coronavirus 2
  REGION 1..8: note = Table A: HLA-C*14:03H HLA-B*52:01H
YFYTSKTT

SEQ ID NO: 367 - protein, 8 aa, Severe acute respiratory syndrome coronavirus 2
  REGION 1..8: note = Table A: HLA-B*48:01H
SKTTVASL

SEQ ID NO: 368 - protein, 8 aa, Severe acute respiratory syndrome coronavirus 2
  REGION 1..8: note = Table A: HLA-B*58:01M HLA-B*58:02M HLA-B*57:03H
KTTVASLI

SEQ ID NO: 369 - protein, 8 aa, Severe acute respiratory syndrome coronavirus 2
  REGION 1..8: note = Table A: HLA-C*15:05H
VASLINTL

SEQ ID NO: 370 - protein, 8 aa, Severe acute respiratory syndrome coronavirus 2
  REGION 1..8: note = Table A: HLA-C*08:02M
LNDLNETL

SEQ ID NO: 371 - protein, 8 aa, Severe acute respiratory syndrome coronavirus 2
  REGION 1..8: note = Table A: HLA-A*36:01H
LVTMPLGY

SEQ ID NO: 372 - protein, 8 aa, Severe acute respiratory syndrome coronavirus 2
  REGION 1..8: note = Table A: HLA-B*08:01H HLA-A*02:11H HLA-B*14:01H
LGYVTHGL

SEQ ID NO: 373 - protein, 8 aa, Severe acute respiratory syndrome coronavirus 2
  REGION 1..8: note = Table A: HLA-C*03:04H HLA-C*17:01H
YVTHGLNL

SEQ ID NO: 374 - protein, 8 aa, Severe acute respiratory syndrome coronavirus 2
  REGION 1..8: note = Table A: HLA-B*39:06H
HGLNLEEA

SEQ ID NO: 375 - protein, 8 aa, Severe acute respiratory syndrome coronavirus 2
  REGION 1..8: note = Table A: HLA-B*18:01H
LEEAARYM

SEQ ID NO: 376 - protein, 8 aa, Severe acute respiratory syndrome coronavirus 2
  REGION 1..8: note = Table A: HLA-B*07:04H
AARYMRSL

SEQ ID NO: 377 - protein, 8 aa, Severe acute respiratory syndrome coronavirus 2
  REGION 1..8: note = Table A: HLA-B*08:01H HLA-A*02:11H HLA-B*14:01H HLA-A*02:03M HLA-B*52:01H HLA-C*08:03H HLA-B*38:02M HLA-B*41:02H HLA-B*13:02H
SLKVPATV

SEQ ID NO: 378 - protein, 8 aa, Severe acute respiratory syndrome coronavirus 2
  REGION 1..8: note = Table A: HLA-B*18:01H HLA-C*15:05H HLA-B*35:01M HLA-B*35:08M HLA-B*35:07H HLA-B*38:02H HLA-B*07:05M
SPDAVTAY

SEQ ID NO: 379 - protein, 8 aa, Severe acute respiratory syndrome coronavirus 2
  REGION 1..8: note = Table A: HLA-B*18:01H HLA-B*07:05H HLA-B*49:01H
EEHFIETI

SEQ ID NO: 380 - protein, 8 aa, Severe acute respiratory syndrome coronavirus 2
  REGION 1..8: note = Table A: HLA-C*14:02M HLA-C*14:03M HLA-B*52:01H HLA-B*15:02H
HFIETISL

SEQ ID NO: 381 - protein, 8 aa, Severe acute respiratory syndrome coronavirus 2
  REGION 1..8: note = Table A: HLA-B*58:01H HLA-A*36:01H HLA-A*30:02H HLA-B*38:02H HLA-B*15:01H
GSYKDWSY

SEQ ID NO: 382 - protein, 8 aa, Severe acute respiratory syndrome coronavirus 2
  REGION 1..8: note = Table A: HLA-B*58:01H HLA-A*29:01H HLA-C*03:03H HLA-C*03:04H HLA-C*15:05M HLA-C*15:02H HLA-C*17:01H HLA-C*08:01H HLA-C*08:03H HLA-B*39:01H
YSGQSTQL

SEQ ID NO: 383 - protein, 8 aa, Severe acute respiratory syndrome coronavirus 2
  REGION 1..8: note = Table A: HLA-B*52:01H HLA-B*13:02M
GQSTQLGI

SEQ ID NO: 384 - protein, 8 aa, Severe acute respiratory syndrome coronavirus 2
  REGION 1..8: note = Table A: HLA-A*36:01H
QLGIEFLK

SEQ ID NO: 385 - protein, 8 aa, Severe acute respiratory syndrome coronavirus 2
  REGION 1..8: note = Table A: HLA-A*36:01M
RGDKSVYY

SEQ ID NO: 386 - protein, 8 aa, Severe acute respiratory syndrome coronavirus 2
  REGION 1..8: note = Table A: HLA-B*58:01H HLA-C*15:05M HLA-B*57:03H HLA-C*07:04H
YTSNPTTF

SEQ ID NO: 387 - protein, 8 aa, Severe acute respiratory syndrome coronavirus 2
  REGION 1..8: note = Table A: HLA-B*38:02H HLA-B*15:10H
FHLDGEVI

SEQ ID NO: 388 - protein, 8 aa, Severe acute respiratory syndrome coronavirus 2
  REGION 1..8: note = Table A: HLA-B*37:01H
LDGEVITF

SEQ ID NO: 389 - protein, 8 aa, Severe acute respiratory syndrome coronavirus 2
  REGION 1..8: note = Table A: HLA-A*68:02H
EVITFDNL

SEQ ID NO: 390 - protein, 8 aa, Severe acute respiratory syndrome coronavirus 2
  REGION 1..8: note = Table A: HLA-C*04:01H
TFDNLKTL

SEQ ID NO: 391 - protein, 8 aa, Severe acute respiratory syndrome coronavirus 2
  REGION 1..8: note = Table A: HLA-B*08:01H HLA-B*37:01M HLA-B*41:02H HLA-C*07:04H
FDNLKTLL

SEQ ID NO: 392 - protein, 8 aa, Severe acute respiratory syndrome coronavirus 2
  REGION 1..8: note = Table A: HLA-B*08:01H
NLKTLLSL

SEQ ID NO: 393 - protein, 8 aa, Severe acute respiratory syndrome coronavirus 2
  REGION 1..8: note = Table A: HLA-B*38:02H
TLLSLREV

SEQ ID NO: 394 - protein, 8 aa, Severe acute respiratory syndrome coronavirus 2
  REGION 1..8: note = Table A: HLA-A*02:03H HLA-B*52:01M HLA-B*38:02H
SLREVRTI

SEQ ID NO: 395 - protein, 8 aa, Severe acute respiratory syndrome coronavirus 2
  REGION 1..8: note = Table A: HLA-B*40:02H HLA-B*49:01M
REVRTIKV

SEQ ID NO: 396 - protein, 8 aa, Severe acute respiratory syndrome coronavirus 2
  REGION 1..8: note = Table A: HLA-B*15:02H
EVRTIKVF

SEQ ID NO: 397 - protein, 8 aa, Severe acute respiratory syndrome coronavirus 2
  REGION 1..8: note = Table A: HLA-B*08:01H HLA-A*02:03H HLA-B*52:01H HLA-B*38:02H HLA-B*41:02H
TIKVFTTV

SEQ ID NO: 398 - protein, 8 aa, Severe acute respiratory syndrome coronavirus 2
  REGION 1..8: note = Table A: HLA-B*08:01H
NINLHTQV

SEQ ID NO: 399 - protein, 8 aa, Severe acute respiratory syndrome coronavirus 2
  REGION 1..8: note = Table A: HLA-B*39:01H HLA-B*15:10H
LHTQVVDM

SEQ ID NO: 400 - protein, 8 aa, Severe acute respiratory syndrome coronavirus 2
  REGION 1..8: note = Table A: HLA-B*35:02H HLA-B*38:02H HLA-B*15:01H HLA-B*15:02H HLA-B*39:01H
TQVVDMSM

SEQ ID NO: 401 - protein, 8 aa, Severe acute respiratory syndrome coronavirus 2
  REGION 1..8: note = Table A: HLA-B*58:01H HLA-A*03:01H HLA-A*36:01M HLA-A*01:01M HLA-B*38:02H
VVDMSMTY

SEQ ID NO: 402 - protein, 8 aa, Severe acute respiratory syndrome coronavirus 2
  REGION 1..8: note = Table A: HLA-B*07:05H
SMTYGQQF

SEQ ID NO: 403 - protein, 8 aa, Severe acute respiratory syndrome coronavirus 2
  REGION 1..8: note = Table A: HLA-A*30:02H HLA-B*15:01M HLA-B*15:03M HLA-B*39:01H
GQQFGPTY

SEQ ID NO: 404 - protein, 8 aa, Severe acute respiratory syndrome coronavirus 2
  REGION 1..8: note = Table A: HLA-B*52:01H HLA-B*38:02H HLA-B*39:01H
QQFGPTYL

SEQ ID NO: 405 - protein, 8 aa, Severe acute respiratory syndrome coronavirus 2
  REGION 1..8: note = Table A: HLA-C*15:05H HLA-B*51:01H
DGADVTKI

SEQ ID NO: 406 - protein, 8 aa, Severe acute respiratory syndrome coronavirus 2
  REGION 1..8: note = Table A: HLA-B*49:01M
HEGKTFYV

SEQ ID NO: 407 - protein, 8 aa, Severe acute respiratory syndrome coronavirus 2
  REGION 1..8: note = Table A: HLA-B*08:01H
EGKTFYVL

SEQ ID NO: 408 - protein, 8 aa, Severe acute respiratory syndrome coronavirus 2
  REGION 1..8: note = Table A: HLA-C*15:05H
PNDDTLRV

SEQ ID NO: 409 - protein, 8 aa, Severe acute respiratory syndrome coronavirus 2
  REGION 1..8: note = Table A: HLA-A*25:01H HLA-B*18:01H HLA-B*38:02H HLA-B*15:02H HLA-B*07:05H
DTLRVEAF

SEQ ID NO: 410 - protein, 8 aa, Severe acute respiratory syndrome coronavirus 2
  REGION 1..8: note = Table A: HLA-A*36:01M
RVEAFEYY

SEQ ID NO: 411 - protein, 8 aa, Severe acute respiratory syndrome coronavirus 2
  REGION 1..8: note = Table A: HLA-B*38:01M HLA-B*38:02M HLA-B*39:06H HLA-B*39:01M HLA-B*15:10H
YHTTDPSF

SEQ ID NO: 412 - protein, 8 aa, Severe acute respiratory syndrome coronavirus 2
  REGION 1..8: note = Table A: HLA-C*15:05H HLA-C*15:02H HLA-C*17:01H HLA-C*08:03H
HTTDPSFL

SEQ ID NO: 413 - protein, 8 aa, Severe acute respiratory syndrome coronavirus 2
  REGION 1..8: note = Table A: HLA-A*36:01H
TTDPSFLG

SEQ ID NO: 414 - protein, 8 aa, Severe acute respiratory syndrome coronavirus 2
  REGION 1..8: note = Table A: HLA-B*58:02H HLA-C*15:05H
PSFLGRYM

SEQ ID NO: 415 - protein, 8 aa, Severe acute respiratory syndrome coronavirus 2
  REGION 1..8: note = Table A: HLA-C*04:03H HLA-C*08:02M HLA-C*05:01H
WADNNCYL

SEQ ID NO: 416 - protein, 8 aa, Severe acute respiratory syndrome coronavirus 2
  REGION 1..8: note = Table A: HLA-B*15:02H
NCYLATAL

SEQ ID NO: 417 - protein, 8 aa, Severe acute respiratory syndrome coronavirus 2
  REGION 1..8: note = Table A: HLA-C*03:02H HLA-C*15:05H
LATALLTL

SEQ ID NO: 418 - protein, 8 aa, Severe acute respiratory syndrome coronavirus 2
  REGION 1..8: note = Table A: HLA-A*02:04H
ALLTLQQI

SEQ ID NO: 419 - protein, 8 aa, Severe acute respiratory syndrome coronavirus 2
  REGION 1..8: note = Table A: HLA-B*45:01H HLA-B*40:06H HLA-B*50:01M
IELKFNPP

SEQ ID NO: 420 - protein, 8 aa, Severe acute respiratory syndrome coronavirus 2
  REGION 1..8: note = Table A: HLA-B*48:01H HLA-B*15:03H
LKFNPPAL

SEQ ID NO: 421 - protein, 8 aa, Severe acute respiratory syndrome coronavirus 2
  REGION 1..8: note = Table A: HLA-B*35:01H HLA-B*35:07H
PPALQDAY

SEQ ID NO: 422 - protein, 8 aa, Severe acute respiratory syndrome coronavirus 2
  REGION 1..8: note = Table A: HLA-B*58:01M HLA-B*58:02H HLA-C*15:05H HLA-B*57:03M
RAGEAANF

SEQ ID NO: 423 - protein, 8 aa, Severe acute respiratory syndrome coronavirus 2
  REGION 1..8: note = Table A: HLA-B*38:02H HLA-B*15:02H
FCALILAY

SEQ ID NO: 424 - protein, 8 aa, Severe acute respiratory syndrome coronavirus 2
  REGION 1..8: note = Table A: HLA-B*51:01H
LAYCNKTV

SEQ ID NO: 425 - protein, 8 aa, Severe acute respiratory syndrome coronavirus 2
  REGION 1..8: note = Table A: HLA-B*38:02M HLA-B*15:02H
DVRETMSY

SEQ ID NO: 426 - protein, 8 aa, Severe acute respiratory syndrome coronavirus 2
  REGION 1..8: note = Table A: HLA-B*37:01H
RETMSYLF

SEQ ID NO: 427 - protein, 8 aa, Severe acute respiratory syndrome coronavirus 2
  REGION 1..8: note = Table A: HLA-B*54:01H
MSYLFQHA

SEQ ID NO: 428 - protein, 8 aa, Severe acute respiratory syndrome coronavirus 2
  REGION 1..8: note = Table A: HLA-B*08:01H HLA-A*02:11M HLA-B*14:02H HLA-A*02:04H HLA-B*14:01H HLA-A*02:02M HLA-B*38:02H
YLFQHANL

SEQ ID NO: 429 - protein, 8 aa, Severe acute respiratory syndrome coronavirus 2
  REGION 1..8: note = Table A: HLA-B*39:06H
QHANLDSC

SEQ ID NO: 430 - protein, 8 aa, Severe acute respiratory syndrome coronavirus 2
  REGION 1..8: note = Table A: HLA-A*11:02H
RVLNVVCK

SEQ ID NO: 431 - protein, 8 aa, Severe acute respiratory syndrome coronavirus 2
  REGION 1..8: note = Table A: HLA-A*03:02H
GQQQTTLK

SEQ ID NO: 432 - protein, 8 aa, Severe acute respiratory syndrome coronavirus 2
  REGION 1..8: note = Table A: HLA-B*52:01H HLA-B*13:02H
QQTTLKGV

SEQ ID NO: 433 - protein, 8 aa, Severe acute respiratory syndrome coronavirus 2
  REGION 1..8: note = Table A: HLA-A*02:03H
TLKGVEAV

SEQ ID NO: 434 - protein, 8 aa, Severe acute respiratory syndrome coronavirus 2
  REGION 1..8: note = Table A: HLA-B*58:01H HLA-B*15:01H HLA-B*15:03H HLA-B*07:05H
KGVEAVMY

SEQ ID NO: 435 - protein, 8 aa, Severe acute respiratory syndrome coronavirus 2
  REGION 1..8: note = Table A: HLA-C*15:05H
AVMYMGTL

SEQ ID NO: 436 - protein, 8 aa, Severe acute respiratory syndrome coronavirus 2
  REGION 1..8: note = Table A: HLA-C*14:03H HLA-A*29:02H HLA-A*30:02H HLA-B*15:02H
MYMGTLSY

SEQ ID NO: 437 - protein, 8 aa, Severe acute respiratory syndrome coronavirus 2
  REGION 1..8: note = Table A: HLA-B*49:01H
YEQFKKGV

SEQ ID NO: 438 - protein, 8 aa, Severe acute respiratory syndrome coronavirus 2
  REGION 1..8: note = Table A: HLA-B*52:01H
QFKKGVQI

SEQ ID NO: 439 - protein, 8 aa, Severe acute respiratory syndrome coronavirus 2
  REGION 1..8: note = Table A: HLA-B*13:02M
KQATKYLV

SEQ ID NO: 440 - protein, 8 aa, Severe acute respiratory syndrome coronavirus 2
  REGION 1..8: note = Table A: HLA-B*52:01M HLA-B*13:02M
VQQESPFV

SEQ ID NO: 441 - protein, 8 aa, Severe acute respiratory syndrome coronavirus 2
  REGION 1..8: note = Table A: HLA-B*39:01H
QQESPFVM

SEQ ID NO: 442 - protein, 8 aa, Severe acute respiratory syndrome coronavirus 2
  REGION 1..8: note = Table A: HLA-B*44:05H HLA-B*45:01H HLA-B*18:01M HLA-B*37:01M HLA-B*40:01H HLA-B*40:02H HLA-B*07:05M HLA-B*41:02H HLA-B*49:01M HLA-B*50:01H
QESPFVMM

SEQ ID NO: 443 - protein, 8 aa, Severe acute respiratory syndrome coronavirus 2
  REGION 1..8: note = Table A: HLA-B*56:01M HLA-B*55:02M HLA-C*15:05H HLA-B*55:01M HLA-B*39:06M HLA-B*54:01M HLA-B*07:05H
SPFVMMSA

SEQ ID NO: 444 - protein, 8 aa, Severe acute respiratory syndrome coronavirus 2
  REGION 1..8: note = Table A: HLA-B*58:01M HLA-B*58:02H HLA-A*36:01H HLA-A*01:01H HLA-A*30:02H HLA-C*15:05H HLA-B*35:01H HLA-B*38:02H HLA-B*15:01H HLA-B*39:01H
MSAPPAQY

SEQ ID NO: 445 - protein, 8 aa, Severe acute respiratory syndrome coronavirus 2
  REGION 1..8: note = Table A: HLA-C*15:05M HLA-B*07:02H HLA-B*07:05H
APPAQYEL

SEQ ID NO: 446 - protein, 8 aa, Severe acute respiratory syndrome coronavirus 2
  REGION 1..8: note = Table A: HLA-B*14:02H HLA-B*37:01H
YELKHGTF

SEQ ID NO: 447 - protein, 8 aa, Severe acute respiratory syndrome coronavirus 2
  REGION 1..8: note = Table A: HLA-B*39:06H
KHGTFTCA

SEQ ID NO: 448 - protein, 8 aa, Severe acute respiratory syndrome coronavirus 2
  REGION 1..8: note = Table A: HLA-A*36:01H
ASEYTGNY

SEQ ID NO: 449 - protein, 8 aa, Severe acute respiratory syndrome coronavirus 2
  REGION 1..8: note = Table A: HLA-A*33:03H
HYKHITSK

SEQ ID NO: 450 - protein, 8 aa, Severe acute respiratory syndrome coronavirus 2
  REGION 1..8: note = Table A: HLA-B*08:01H
HITSKETL

SEQ ID NO: 451 - protein, 8 aa, Severe acute respiratory syndrome coronavirus 2
  REGION 1..8: note = Table A: HLA-B*58:01H HLA-A*36:01H
ITSKETLY

SEQ ID NO: 452 - protein, 8 aa, Severe acute respiratory syndrome coronavirus 2
  REGION 1..8: note = Table A: HLA-C*03:03H HLA-C*03:04H
YCIDGALL

SEQ ID NO: 453 - protein, 8 aa, Severe acute respiratory syndrome coronavirus 2
  REGION 1..8: note = Table A: HLA-A*03:01H HLA-A*03:02H HLA-A*11:01H HLA-A*11:02H HLA-A*36:01H HLA-A*34:02H
IDGALLTK

SEQ ID NO: 454 - protein, 8 aa, Severe acute respiratory syndrome coronavirus 2
  REGION 1..8: note = Table A: HLA-B*46:01H HLA-B*38:02H HLA-B*15:01H HLA-B*15:02H
LLTKSSEY

SEQ ID NO: 455 - protein, 8 aa, Severe acute respiratory syndrome coronavirus 2
  REGION 1..8: note = Table A: HLA-B*45:01H HLA-B*40:02H HLA-B*40:06H HLA-B*41:02H HLA-B*49:01H HLA-B*50:01H
SEYKGPIT

SEQ ID NO: 456 - protein, 8 aa, Severe acute respiratory syndrome coronavirus 2
  REGION 1..8: note = Table A: HLA-A*11:02H
PITDVFYK

SEQ ID NO: 457 - protein, 8 aa, Severe acute respiratory syndrome coronavirus 2
  REGION 1..8: note = Table A: HLA-C*14:03H
VFYKENSY

SEQ ID NO: 458 - protein, 8 aa, Severe acute respiratory syndrome coronavirus 2
  REGION 1..8: note = Table A: HLA-B*58:01M HLA-B*58:02M HLA-B*57:01M HLA-B*46:01H HLA-B*18:01H HLA-C*07:01H HLA-A*30:02H HLA-C*15:05M HLA-C*12:02H HLA-C*12:03H HLA-B*35:01H HLA-B*38:02H HLA-B*15:01H HLA-B*15:02H HLA-B*15:03H HLA-B*39:01H
  REGION 1..8: note = CONT. FROM ABOVE: HLA-B*07:05H HLA-B*57:03M HLA-C*02:02H
TTIKPVTY

SEQ ID NO: 459 - protein, 8 aa, Severe acute respiratory syndrome coronavirus 2
  REGION 1..8: note = Table A: HLA-A*02:11H
VTYKLDGV

SEQ ID NO: 460 - protein, 8 aa, Severe acute respiratory syndrome coronavirus 2
  REGION 1..8: note = Table A: HLA-B*51:01M
DGVVCTEI

SEQ ID NO: 461 - protein, 8 aa, Severe acute respiratory syndrome coronavirus 2
  REGION 1..8: note = Table A: HLA-B*38:02H HLA-B*15:02H
DPKLDNYY

SEQ ID NO: 462 - protein, 8 aa, Severe acute respiratory syndrome coronavirus 2
  REGION 1..8: note = Table A: HLA-C*04:03M HLA-C*03:03H HLA-C*03:04H HLA-C*05:01H
FTEQPIDL

SEQ ID NO: 463 - protein, 8 aa, Severe acute respiratory syndrome coronavirus 2
  REGION 1..8: note = Table A: HLA-B*49:01H
TEQPIDLV

SEQ ID NO: 464 - protein, 8 aa, Severe acute respiratory syndrome coronavirus 2
  REGION 1..8: note = Table A: HLA-C*15:05H HLA-B*38:02H HLA-B*07:05H
QPYPNASF

SEQ ID NO: 465 - protein, 8 aa, Severe acute respiratory syndrome coronavirus 2
  REGION 1..8: note = Table A: HLA-B*58:01H HLA-B*57:03H
ASFDNFKF

SEQ ID NO: 466 - protein, 8 aa, Severe acute respiratory syndrome coronavirus 2
  REGION 1..8: note = Table A: HLA-C*04:01H
SFDNFKFV

SEQ ID NO: 467 - protein, 8 aa, Severe acute respiratory syndrome coronavirus 2
  REGION 1..8: note = Table A: HLA-C*04:03H HLA-C*08:01H HLA-C*08:02H HLA-C*05:01H
FADDLNQL

SEQ ID NO: 468 - protein, 8 aa, Severe acute respiratory syndrome coronavirus 2
  REGION 1..8: note = Table A: HLA-B*38:02M HLA-B*15:02M
DLNQLTGY

SEQ ID NO: 469 - protein, 8 aa, Severe acute respiratory syndrome coronavirus 2
  REGION 1..8: note = Table A: HLA-A*33:03H
GYKKPASR

SEQ ID NO: 470 - protein, 8 aa, Severe acute respiratory syndrome coronavirus 2
  REGION 1..8: note = Table A: HLA-C*15:05H HLA-B*51:01H
PASRELKV

SEQ ID NO: 471 - protein, 8 aa, Severe acute respiratory syndrome coronavirus 2
  REGION 1..8: note = Table A: HLA-B*37:01H
RELKVTFF

SEQ ID NO: 472 - protein, 8 aa, Severe acute respiratory syndrome coronavirus 2
  REGION 1..8: note = Table A: HLA-B*18:01H HLA-B*07:05H
GDVVAIDY

SEQ ID NO: 473 - protein, 8 aa, Severe acute respiratory syndrome coronavirus 2
  REGION 1..8: note = Table A: HLA-B*15:03H
YKHYTPSF

SEQ ID NO: 474 - protein, 8 aa, Severe acute respiratory syndrome coronavirus 2
  REGION 1..8: note = Table A: HLA-A*03:01H
KHYTPSFK

SEQ ID NO: 475 - protein, 8 aa, Severe acute respiratory syndrome coronavirus 2
  REGION 1..8: note = Table A: HLA-A*36:01H
HYTPSFKK

SEQ ID NO: 476 - protein, 8 aa, Severe acute respiratory syndrome coronavirus 2
  REGION 1..8: note = Table A: HLA-B*58:01H HLA-B*57:03M HLA-B*13:01H
LLHKPIVW

SEQ ID NO: 477 - protein, 8 aa, Severe acute respiratory syndrome coronavirus 2
  REGION 1..8: note = Table A: HLA-B*52:01H
HKPIVWHV

SEQ ID NO: 478 - protein, 8 aa, Severe acute respiratory syndrome coronavirus 2
  REGION 1..8: note = Table A: HLA-A*03:02H HLA-A*34:02H
HVNNATNK

SEQ ID NO: 479 - protein, 8 aa, Severe acute respiratory syndrome coronavirus 2
  REGION 1..8: note = Table A: HLA-C*16:01H HLA-B*35:01H
NATNKATY

SEQ ID NO: 480 - protein, 8 aa, Severe acute respiratory syndrome coronavirus 2
  REGION 1..8: note = Table A: HLA-A*11:303H HLA-A*03:01H HLA-A*03:02M HLA-A*11:01H HLA-A*11:02H HLA-C*07:27H
ATNKATYK

SEQ ID NO: 481 - protein, 8 aa, Severe acute respiratory syndrome coronavirus 2
  REGION 1..8: note = Table A: HLA-B*58:01H HLA-B*58:02H HLA-B*57:01H HLA-A*32:01M HLA-B*57:03H
ATYKPNTW

SEQ ID NO: 482 - protein, 8 aa, Severe acute respiratory syndrome coronavirus 2
  REGION 1..8: note = Table A: HLA-B*35:02H
DAQGMDNL

SEQ ID NO: 483 - protein, 8 aa, Severe acute respiratory syndrome coronavirus 2
  REGION 1..8: note = Table A: HLA-B*51:01H HLA-B*38:02H HLA-B*39:01H
EVVENPTI

SEQ ID NO: 484 - protein, 8 aa, Severe acute respiratory syndrome coronavirus 2
  REGION 1..8: note = Table A: HLA-B*08:01H
NVKTTEVV

SEQ ID NO: 485 - protein, 8 aa, Severe acute respiratory syndrome coronavirus 2
  REGION 1..8: note = Table A: HLA-B*40:01H HLA-B*49:01M
TEVVGDII

SEQ ID NO: 486 - protein, 8 aa, Severe acute respiratory syndrome coronavirus 2
  REGION 1..8: note = Table A: HLA-B*35:02H
EVVGDIIL

SEQ ID NO: 487 - protein, 8 aa, Severe acute respiratory syndrome coronavirus 2
  REGION 1..8: note = Table A: HLA-A*03:02H HLA-A*11:01H HLA-A*11:02H HLA-A*34:02H
VVGDIILK

SEQ ID NO: 488 - protein, 8 aa, Severe acute respiratory syndrome coronavirus 2
  REGION 1..8: note = Table A: HLA-B*50:01H
GDIILKPA

SEQ ID NO: 489 - protein, 8 aa, Severe acute respiratory syndrome coronavirus 2
  REGION 1..8: note = Table A: HLA-C*15:05M HLA-B*51:01M
PANNSLKI

SEQ ID NO: 490 - protein, 8 aa, Severe acute respiratory syndrome coronavirus 2
  REGION 1..8: note = Table A: HLA-B*44:05H HLA-B*14:02H
EEVGHTDL

SEQ ID NO: 491 - protein, 8 aa, Severe acute respiratory syndrome coronavirus 2
  REGION 1..8: note = Table A: HLA-B*39:06M
GHTDLMAA

SEQ ID NO: 492 - protein, 8 aa, Severe acute respiratory syndrome coronavirus 2
  REGION 1..8: note = Table A: HLA-A*36:01M HLA-A*01:01H
HTDLMAAY

SEQ ID NO: 493 - protein, 8 aa, Severe acute respiratory syndrome coronavirus 2
  REGION 1..8: note = Table A: HLA-C*14:02M HLA-C*14:03H HLA-B*39:01H
AYVDNSSL

SEQ ID NO: 494 - protein, 8 aa, Severe acute respiratory syndrome coronavirus 2
  REGION 1..8: note = Table A: HLA-C*15:05H HLA-B*49:01H
VDNSSLTI

SEQ ID NO: 495 - protein, 8 aa, Severe acute respiratory syndrome coronavirus 2
  REGION 1..8: note = Table A: HLA-B*08:01M HLA-B*07:04H
TIKKPNEL

SEQ ID NO: 496 - protein, 8 aa, Severe acute respiratory syndrome coronavirus 2
  REGION 1..8: note = Table A: HLA-C*15:05H HLA-B*55:01H
KPNELSRV

SEQ ID NO: 497 - protein, 8 aa, Severe acute respiratory syndrome coronavirus 2
  REGION 1..8: note = Table A: HLA-B*07:04H
RVLGLKTL

SEQ ID NO: 498 - protein, 8 aa, Severe acute respiratory syndrome coronavirus 2
  REGION 1..8: note = Table A: HLA-B*58:02M HLA-A*02:11H HLA-B*57:03H
KTLATHGL

SEQ ID NO: 499 - protein, 8 aa, Severe acute respiratory syndrome coronavirus 2
  REGION 1..8: note = Table A: HLA-B*54:01H
LATHGLAA

SEQ ID NO: 500 - protein, 8 aa, Severe acute respiratory syndrome coronavirus 2
  REGION 1..8: note = Table A: HLA-A*02:03H
GLAAVNSV

SEQ ID NO: 501 - protein, 8 aa, Severe acute respiratory syndrome coronavirus 2
  REGION 1..8: note = Table A: HLA-B*58:01H
AAVNSVPW

SEQ ID NO: 502 - protein, 8 aa, Severe acute respiratory syndrome coronavirus 2
  REGION 1..8: note = Table A: HLA-A*34:02H
YAKPFLNK

SEQ ID NO: 503 - protein, 8 aa, Severe acute respiratory syndrome coronavirus 2
  REGION 1..8: note = Table A: HLA-B*56:01H HLA-B*08:01H HLA-B*55:02M HLA-C*15:05H HLA-B*55:01M HLA-B*51:01H HLA-B*52:01H HLA-B*54:01H HLA-B*07:02H HLA-B*07:04M
KPFLNKVV

SEQ ID NO: 504 - protein, 8 aa, Severe acute respiratory syndrome coronavirus 2
  REGION 1..8: note = Table A: HLA-A*74:01M HLA-A*03:02H HLA-A*11:01M HLA-A*11:02M HLA-B*57:01H HLA-A*33:01H HLA-A*33:03H HLA-A*26:03H HLA-A*68:01H HLA-A*68:02H HLA-A*34:01H HLA-A*34:02M HLA-C*07:27H HLA-A*31:01M HLA-A*66:01M
TTTNIVTR

SEQ ID NO: 505 - protein, 8 aa, Severe acute respiratory syndrome coronavirus 2
  REGION 1..8: note = Table A: HLA-C*15:05H HLA-B*51:01H
MPYFFTLL

SEQ ID NO: 506 - protein, 8 aa, Severe acute respiratory syndrome coronavirus 2
  REGION 1..8: note = Table A: HLA-A*24:07H
PYFFTLLL

SEQ ID NO: 507 - protein, 8 aa, Severe acute respiratory syndrome coronavirus 2
  REGION 1..8: note = Table A: HLA-B*08:01H
NSRIKASM

SEQ ID NO: 508 - protein, 8 aa, Severe acute respiratory syndrome coronavirus 2
  REGION 1..8: note = Table A: HLA-B*58:02H HLA-C*15:05H HLA-B*57:03H
KASMPTTI

SEQ ID NO: 509 - protein, 8 aa, Severe acute respiratory syndrome coronavirus 2
  REGION 1..8: note = Table A: HLA-A*03:01H HLA-A*03:02H HLA-A*11:01H HLA-A*11:02H
SMPTTIAK

SEQ ID NO: 510 - protein, 8 aa, Severe acute respiratory syndrome coronavirus 2
  REGION 1..8: note = Table A: HLA-B*51:01H HLA-B*54:01H
MPTTIAKN

SEQ ID NO: 511 - protein, 8 aa, Severe acute respiratory syndrome coronavirus 2
  REGION 1..8: note = Table A: HLA-A*26:01H HLA-A*26:02H HLA-A*26:03H
TVKSVGKF

SEQ ID NO: 512 - protein, 8 aa, Severe acute respiratory syndrome coronavirus 2
  REGION 1..8: note = Table A: HLA-B*18:01H HLA-B*49:01H
LEASFNYL

SEQ ID NO: 513 - protein, 8 aa, Severe acute respiratory syndrome coronavirus 2
  REGION 1..8: note = Table A: HLA-A*36:01H HLA-A*34:01H HLA-A*34:02H
EASFNYLK

SEQ ID NO: 514 - protein, 8 aa, Severe acute respiratory syndrome coronavirus 2
  REGION 1..8: note = Table A: HLA-C*14:02H HLA-C*14:03H HLA-A*24:02M HLA-A*24:07M HLA-A*23:01M
NYLKSPNF

SEQ ID NO: 515 - protein, 8 aa, Severe acute respiratory syndrome coronavirus 2
  REGION 1..8: note = Table A: HLA-C*15:05H
SPNFSKLI

SEQ ID NO: 516 - protein, 8 aa, Severe acute respiratory syndrome coronavirus 2
  REGION 1..8: note = Table A: HLA-B*13:02H
YSTAALGV

SEQ ID NO: 517 - protein, 8 aa, Severe acute respiratory syndrome coronavirus 2
  REGION 1..8: note = Table A: HLA-C*15:05H
STAALGVL

SEQ ID NO: 518 - protein, 8 aa, Severe acute respiratory syndrome coronavirus 2
  REGION 1..8: note = Table A: HLA-C*16:01H HLA-C*03:04H HLA-B*35:03H HLA-C*15:05H HLA-B*35:01H HLA-B*35:02H HLA-B*51:01H HLA-C*17:01H HLA-B*35:12H HLA-B*38:02H HLA-B*15:02H
TAALGVLM

SEQ ID NO: 519 - protein, 8 aa, Severe acute respiratory syndrome coronavirus 2
  REGION 1..8: note = Table A: HLA-B*35:01H
MPSYCTGY

SEQ ID NO: 520 - protein, 8 aa, Severe acute respiratory syndrome coronavirus 2
  REGION 1..8: note = Table A: HLA-B*18:01M HLA-C*07:01H HLA-A*30:02H HLA-B*35:01H HLA-B*38:02H HLA-B*15:01H HLA-B*15:02H HLA-B*39:01H HLA-B*07:05M
TNVTIATY

SEQ ID NO: 521 - protein, 8 aa, Severe acute respiratory syndrome coronavirus 2
  REGION 1..8: note = Table A: HLA-C*15:05H
TGSIPCSV

SEQ ID NO: 522 - protein, 8 aa, Severe acute respiratory syndrome coronavirus 2
  REGION 1..8: note = Table A: HLA-C*15:05H
PSLETIQI

SEQ ID NO: 523 - protein, 8 aa, Severe acute respiratory syndrome coronavirus 2
  REGION 1..8: note = Table A: HLA-B*49:01M
LETIQITI

SEQ ID NO: 524 - protein, 8 aa, Severe acute respiratory syndrome coronavirus 2
  REGION 1..8: note = Table A: HLA-B*46:01H HLA-B*52:01H HLA-B*38:02H HLA-B*15:01H HLA-B*15:02H HLA-B*15:03M
IQITISSF

SEQ ID NO: 525 - protein, 8 aa, Severe acute respiratory syndrome coronavirus 2
  REGION 1..8: note = Table A: HLA-B*58:01M HLA-B*58:02H HLA-B*57:01H HLA-B*57:03M
ITISSFKW

SEQ ID NO: 526 - protein, 8 aa, Severe acute respiratory syndrome coronavirus 2
  REGION 1..8: note = Table A: HLA-C*16:01H
ISSFKWDL

SEQ ID NO: 527 - protein, 8 aa, Severe acute respiratory syndrome coronavirus 2
  REGION 1..8: note = Table A: HLA-B*15:03H
FKWDLTAF

SEQ ID NO: 528 - protein, 8 aa, Severe acute respiratory syndrome coronavirus 2
  REGION 1..8: note = Table A: HLA-A*36:01H
VAEWFLAY

SEQ ID NO: 529 - protein, 8 aa, Severe acute respiratory syndrome coronavirus 2
  REGION 1..8: note = Table A: HLA-A*29:02H
ILFTRFFY

SEQ ID NO: 530 - protein, 8 aa, Severe acute respiratory syndrome coronavirus 2
  REGION 1..8: note = Table A: HLA-C*14:03H
FYVLGLAA

SEQ ID NO: 531 - protein, 8 aa, Severe acute respiratory syndrome coronavirus 2
  REGION 1..8: note = Table A: HLA-B*58:02H HLA-B*57:03H
FSYFAVHF

SEQ ID NO: 532 - protein, 8 aa, Severe acute respiratory syndrome coronavirus 2
  REGION 1..8: note = Table A: HLA-C*14:03H HLA-A*24:02H HLA-A*24:07H HLA-B*52:01H HLA-C*08:01H
SYFAVHFI

SEQ ID NO: 533 - protein, 8 aa, Severe acute respiratory syndrome coronavirus 2
  REGION 1..8: note = Table A: HLA-B*38:02M
VHFISNSW

SEQ ID NO: 534 - protein, 8 aa, Severe acute respiratory syndrome coronavirus 2
  REGION 1..8: note = Table A: HLA-A*02:11M HLA-A*02:04H
LMWLIINL

SEQ ID NO: 535 - protein, 8 aa, Severe acute respiratory syndrome coronavirus 2
  REGION 1..8: note = Table A: HLA-B*39:06M
VQMAPISA

SEQ ID NO: 536 - protein, 8 aa, Severe acute respiratory syndrome coronavirus 2
  REGION 1..8: note = Table A: HLA-C*15:05H HLA-B*38:02M HLA-B*15:01H HLA-B*15:02M HLA-B*07:05H
QMAPISAM

SEQ ID NO: 537 - protein, 8 aa, Severe acute respiratory syndrome coronavirus 2
  REGION 1..8: note = Table A: HLA-C*15:05H HLA-B*51:01H HLA-B*52:01H
MAPISAMV

SEQ ID NO: 538 - protein, 8 aa, Severe acute respiratory syndrome coronavirus 2
  REGION 1..8: note = Table A: HLA-A*34:01H HLA-A*66:01H
APISAMVR

SEQ ID NO: 539 - protein, 8 aa, Severe acute respiratory syndrome coronavirus 2
  REGION 1..8: note = Table A: HLA-C*15:05H
PISAMVRM

SEQ ID NO: 540 - protein, 8 aa, Severe acute respiratory syndrome coronavirus 2
  REGION 1..8: note = Table A: HLA-B*58:02H
ISAMVRMY

SEQ ID NO: 541 - protein, 8 aa, Severe acute respiratory syndrome coronavirus 2
  REGION 1..8: note = Table A: HLA-B*38:02H
YIFFASFY

SEQ ID NO: 542 - protein, 8 aa, Severe acute respiratory syndrome coronavirus 2
  REGION 1..8: note = Table A: HLA-C*14:03H HLA-A*29:02H
IFFASFYY

SEQ ID NO: 543 - protein, 8 aa, Severe acute respiratory syndrome coronavirus 2
  REGION 1..8: note = Table A: HLA-C*14:02H HLA-C*14:03M HLA-B*46:01H
FYYVWKSY

SEQ ID NO: 544 - protein, 8 aa, Severe acute respiratory syndrome coronavirus 2
  REGION 1..8: note = Table A: HLA-C*08:01H
YVHVVDGC

SEQ ID NO: 545 - protein, 8 aa, Severe acute respiratory syndrome coronavirus 2
  REGION 1..8: note = Table A: HLA-B*14:01H
NRATRVEC

SEQ ID NO: 546 - protein, 8 aa, Severe acute respiratory syndrome coronavirus 2
  REGION 1..8: note = Table A: HLA-A*34:01H HLA-A*66:01M
TTIVNGVR

SEQ ID NO: 547 - protein, 8 aa, Severe acute respiratory syndrome coronavirus 2
  REGION 1..8: note = Table A: HLA-B*46:01H HLA-C*03:04H
YANGGKGF

SEQ ID NO: 548 - protein, 8 aa, Severe acute respiratory syndrome coronavirus 2
  REGION 1..8: note = Table A: HLA-A*68:02H HLA-B*39:01H
STFISDEV

SEQ ID NO: 549 - protein, 8 aa, Severe acute respiratory syndrome coronavirus 2
  REGION 1..8: note = Table A: HLA-B*41:02H
SDEVARDL

SEQ ID NO: 550 - protein, 8 aa, Severe acute respiratory syndrome coronavirus 2
  REGION 1..8: note = Table A: HLA-B*35:02H
EVARDLSL

SEQ ID NO: 551 - protein, 8 aa, Severe acute respiratory syndrome coronavirus 2
  REGION 1..8: note = Table A: HLA-B*35:01H
NPTDQSSY

SEQ ID NO: 552 - protein, 8 aa, Severe acute respiratory syndrome coronavirus 2
  REGION 1..8: note = Table A: HLA-C*15:05H HLA-B*51:01H HLA-B*52:01M HLA-B*39:06H HLA-B*13:02H
SSYIVDSV

SEQ ID NO: 553 - protein, 8 aa, Severe acute respiratory syndrome coronavirus 2
  REGION 1..8: note = Table A: HLA-A*02:11H HLA-A*68:02H HLA-C*15:05H HLA-B*14:01H HLA-A*02:01H HLA-C*08:01H HLA-B*38:02H HLA-B*39:01H HLA-B*13:02H HLA-B*49:01H
YIVDSVTV

SEQ ID NO: 554 - protein, 8 aa, Severe acute respiratory syndrome coronavirus 2
  REGION 1..8: note = Table A: HLA-A*03:01H HLA-A*03:02M HLA-A*11:01H HLA-A*11:02H HLA-A*36:01H HLA-A*34:02H
IVDSVTVK

SEQ ID NO: 555 - protein, 8 aa, Severe acute respiratory syndrome coronavirus 2
  REGION 1..8: note = Table A: HLA-A*30:02H
KNGSIHLY

SEQ ID NO: 556 - protein, 8 aa, Severe acute respiratory syndrome coronavirus 2
  REGION 1..8: note = Table A: HLA-A*36:01H HLA-C*04:01H
YFDKAGQK

SEQ ID NO: 557 - protein, 8 aa, Severe acute respiratory syndrome coronavirus 2
  REGION 1..8: note = Table A: HLA-B*58:02H HLA-C*16:01H HLA-A*32:01H HLA-B*57:03H
KTYERHSL

SEQ ID NO: 558 - protein, 8 aa, Severe acute respiratory syndrome coronavirus 2
  REGION 1..8: note = Table A: HLA-A*02:02H
SLSHFVNL

SEQ ID NO: 559 - protein, 8 aa, Severe acute respiratory syndrome coronavirus 2
  REGION 1..8: note = Table A: HLA-B*52:01H
GSLPINVI

SEQ ID NO: 560 - protein, 8 aa, Severe acute respiratory syndrome coronavirus 2
  REGION 1..8: note = Table A: HLA-B*35:03H HLA-C*15:05H HLA-B*35:01M HLA-B*51:01H HLA-B*35:07M HLA-B*38:02H HLA-B*54:01H HLA-B*15:02H HLA-B*07:05H HLA-B*15:11H
LPINVIVF

SEQ ID NO: 561 - protein, 8 aa, Severe acute respiratory syndrome coronavirus 2
  REGION 1..8: note = Table A: HLA-A*11:02H
IVFDGKSK

SEQ ID NO: 562 - protein, 8 aa, Severe acute respiratory syndrome coronavirus 2
  REGION 1..8: note = Table A: HLA-B*46:01H HLA-C*12:02H HLA-B*38:02H HLA-B*15:01M HLA-B*15:02H HLA-B*15:11H
SAKSASVY

SEQ ID NO: 563 - protein, 8 aa, Severe acute respiratory syndrome coronavirus 2
  REGION 1..8: note = Table A: HLA-B*15:03H
AKSASVYY

SEQ ID NO: 564 - protein, 8 aa, Severe acute respiratory syndrome coronavirus 2
  REGION 1..8: note = Table A: HLA-B*15:02H
SVYYSQLM

SEQ ID NO: 565 - protein, 8 aa, Severe acute respiratory syndrome coronavirus 2
  REGION 1..8: note = Table A: HLA-B*14:01H HLA-B*51:01H HLA-B*38:02H
DQALVSDV

SEQ ID NO: 566 - protein, 8 aa, Severe acute respiratory syndrome coronavirus 2
  REGION 1..8: note = Table A: HLA-A*34:02H
DSAEVAVK

SEQ ID NO: 567 - protein, 8 aa, Severe acute respiratory syndrome coronavirus 2
  REGION 1..8: note = Table A: HLA-C*04:03H HLA-B*35:01H HLA-B*35:02H HLA-B*35:12H HLA-C*05:01H
SAEVAVKM

SEQ ID NO: 568 - protein, 8 aa, Severe acute respiratory syndrome coronavirus 2
  REGION 1..8: note = Table A: HLA-B*44:02H HLA-B*44:05M HLA-B*44:03H HLA-B*18:01H HLA-B*37:01H HLA-B*40:02H HLA-B*07:05H HLA-B*41:02M HLA-B*49:01H
AEVAVKMF

SEQ ID NO: 569 - protein, 8 aa, Severe acute respiratory syndrome coronavirus 2
  REGION 1..8: note = Table A: HLA-B*54:01H
VAVKMFDA

SEQ ID NO: 570 - protein, 8 aa, Severe acute respiratory syndrome coronavirus 2
  REGION 1..8: note = Table A: HLA-A*30:02H HLA-B*15:01H
AVKMFDAY

SEQ ID NO: 571 - protein, 8 aa, Severe acute respiratory syndrome coronavirus 2
  REGION 1..8: note = Table A: HLA-B*44:05H HLA-B*18:01H HLA-B*37:01H HLA-B*38:02H HLA-B*40:02H HLA-B*07:05H HLA-B*41:02H HLA-C*07:04H
FDAYVNTF

SEQ ID NO: 572 - protein, 8 aa, Severe acute respiratory syndrome coronavirus 2
  REGION 1..8: note = Table A: HLA-A*03:01H HLA-A*03:02H HLA-A*11:01H HLA-A*11:02H HLA-A*33:03H HLA-A*34:02H
TFNVPMEK

SEQ ID NO: 573 - protein, 8 aa, Severe acute respiratory syndrome coronavirus 2
  REGION 1..8: note = Table A: HLA-B*41:02H
MEKLKTLV

SEQ ID NO: 574 - protein, 8 aa, Severe acute respiratory syndrome coronavirus 2
  REGION 1..8: note = Table A: HLA-B*39:06H
EKLKTLVA

SEQ ID NO: 575 - protein, 8 aa, Severe acute respiratory syndrome coronavirus 2
  REGION 1..8: note = Table A: HLA-B*39:06H
LKTLVATA

SEQ ID NO: 576 - protein, 8 aa, Severe acute respiratory syndrome coronavirus 2
  REGION 1..8: note = Table A: HLA-B*39:06H
TLVATAEA

SEQ ID NO: 577 - protein, 8 aa, Severe acute respiratory syndrome coronavirus 2
  REGION 1..8: note = Table A: HLA-A*11:303H HLA-C*03:03H HLA-C*03:04H HLA-C*15:05H HLA-B*35:02M HLA-C*17:01H HLA-C*08:01H HLA-B*35:12H
VATAEAEL

SEQ ID NO: 578 - protein, 8 aa, Severe acute respiratory syndrome coronavirus 2
  REGION 1..8: note = Table A: HLA-B*08:01H HLA-B*14:01H
ELAKNVSL

SEQ ID NO: 579 - protein, 8 aa, Severe acute respiratory syndrome coronavirus 2
  REGION 1..8: note = Table A: HLA-B*35:03H HLA-B*35:02H HLA-B*35:12H
NVSLDNVL

SEQ ID NO: 580 - protein, 8 aa, Severe acute respiratory syndrome coronavirus 2
  REGION 1..8: note = Table A: HLA-B*37:01M
LDNVLSTF

SEQ ID NO: 581 - protein, 8 aa, Severe acute respiratory syndrome coronavirus 2
  REGION 1..8: note = Table A: HLA-B*51:01H
DNVLSTFI

SEQ ID NO: 582 - protein, 8 aa, Severe acute respiratory syndrome coronavirus 2
  REGION 1..8: note = Table A: HLA-B*39:06H HLA-B*54:01H
LSTFISAA

SEQ ID NO: 583 - protein, 8 aa, Severe acute respiratory syndrome coronavirus 2
  REGION 1..8: note = Table A: HLA-A*74:01H HLA-A*11:02H HLA-A*33:03H HLA-A*26:03H HLA-C*03:03H HLA-A*68:01H HLA-A*34:01M HLA-A*34:02H HLA-A*31:01H HLA-A*66:01M
STFISAAR

SEQ ID NO: 584 - protein, 8 aa, Severe acute respiratory syndrome coronavirus 2
  REGION 1..8: note = Table A: HLA-C*16:01H
ISAARQGF

SEQ ID NO: 585 - protein, 8 aa, Severe acute respiratory syndrome coronavirus 2
  REGION 1..8: note = Table A: HLA-B*35:02H
FVDSDVET

SEQ ID NO: 586 - protein, 8 aa, Severe acute respiratory syndrome coronavirus 2
  REGION 1..8: note = Table A: HLA-B*39:06H HLA-B*39:01H
SHQSDIEV

SEQ ID NO: 587 - protein, 8 aa, Severe acute respiratory syndrome coronavirus 2
  REGION 1..8: note = Table A: HLA-A*02:11H
YMLTYNKV

SEQ ID NO: 588 - protein, 8 aa, Severe acute respiratory syndrome coronavirus 2
  REGION 1..8: note = Table A: HLA-B*14:01H HLA-B*39:06H
ARHINAQV

SEQ ID NO: 589 - protein, 8 aa, Severe acute respiratory syndrome coronavirus 2
  REGION 1..8: note = Table A: HLA-B*39:06M
RHINAQVA

SEQ ID NO: 590 - protein, 8 aa, Severe acute respiratory syndrome coronavirus 2
  REGION 1..8: note = Table A: HLA-A*03:02H
HINAQVAK

SEQ ID NO: 591 - protein, 8 aa, Severe acute respiratory syndrome coronavirus 2
  REGION 1..8: note = Table A: HLA-B*58:02H HLA-B*57:03H
KSHNIALI

SEQ ID NO: 592 - protein, 8 aa, Severe acute respiratory syndrome coronavirus 2
  REGION 1..8: note = Table A: HLA-B*38:02H
SHNIALIW

SEQ ID NO: 593 - protein, 8 aa, Severe acute respiratory syndrome coronavirus 2
  REGION 1..8: note = Table A: HLA-A*02:11H
NIALIWNV

SEQ ID NO: 594 - protein, 8 aa, Severe acute respiratory syndrome coronavirus 2
  REGION 1..8: note = Table A: HLA-A*02:02H HLA-B*38:02H HLA-B*39:01H
FMSLSEQL

SEQ ID NO: 595 - protein, 8 aa, Severe acute respiratory syndrome coronavirus 2
  REGION 1..8: note = Table A: HLA-B*41:02M HLA-B*49:01H
SEQLRKQI

SEQ ID NO: 596 - protein, 8 aa, Severe acute respiratory syndrome coronavirus 2
  REGION 1..8: note = Table A: HLA-B*56:01M HLA-B*55:02M HLA-C*15:05H HLA-B*55:01M HLA-B*51:01H HLA-B*39:06H HLA-B*54:01H
LPFKLTCA

SEQ ID NO: 597 - protein, 8 aa, Severe acute respiratory syndrome coronavirus 2
  REGION 1..8: note = Table A: HLA-C*16:01H
CATTRQVV

SEQ ID NO: 598 - protein, 8 aa, Severe acute respiratory syndrome coronavirus 2
  REGION 1..8: note = Table A: HLA-B*52:01H
TTRQVVNV

SEQ ID NO: 599 - protein, 8 aa, Severe acute respiratory syndrome coronavirus 2
  REGION 1..8: note = Table A: HLA-B*14:01M HLA-B*39:06M HLA-B*39:01H
TRQVVNVV

SEQ ID NO: 600 - protein, 8 aa, Severe acute respiratory syndrome coronavirus 2
  REGION 1..8: note = Table A: HLA-A*03:01M HLA-A*03:02H HLA-A*11:01M HLA-A*11:02H HLA-A*30:02H HLA-A*34:02H HLA-C*07:27H
VVNVVTTK

SEQ ID NO: 601 - protein, 8 aa, Severe acute respiratory syndrome coronavirus 2
  REGION 1..8: note = Table A: HLA-C*15:05H HLA-B*52:01M
VNVVTTKI

SEQ ID NO: 602 - protein, 8 aa, Severe acute respiratory syndrome coronavirus 2
  REGION 1..8: note = Table A: HLA-C*16:01M HLA-B*08:01M HLA-C*15:05H HLA-B*14:02H HLA-B*14:01H HLA-B*07:02H HLA-B*07:04H HLA-C*07:04H
VVTTKIAL

SEQ ID NO: 603 - protein, 8 aa, Severe acute respiratory syndrome coronavirus 2
  REGION 1..8: note = Table A: HLA-A*11:303H HLA-A*03:01H HLA-A*03:02M HLA-A*11:01M HLA-A*11:02M HLA-A*36:01H HLA-A*30:02H HLA-A*34:02M HLA-C*07:27H
VTTKIALK

SEQ ID NO: 604 - protein, 8 aa, Severe acute respiratory syndrome coronavirus 2
  REGION 1..8: note = Table A: HLA-B*58:02H HLA-B*51:01H
IALKGGKI

SEQ ID NO: 605 - protein, 8 aa, Severe acute respiratory syndrome coronavirus 2
  REGION 1..8: note = Table A: HLA-A*11:02H HLA-A*36:01H
KIVNNWLK

SEQ ID NO: 606 - protein, 8 aa, Severe acute respiratory syndrome coronavirus 2
  REGION 1..8: note = Table A: HLA-B*48:01M HLA-B*08:01H
KQLIKVTL

SEQ ID NO: 607 - protein, 8 aa, Severe acute respiratory syndrome coronavirus 2
  REGION 1..8: note = Table A: HLA-A*02:03H HLA-B*52:01H HLA-B*38:02H HLA-B*13:02H
QLIKVTLV

SEQ ID NO: 608 - protein, 8 aa, Severe acute respiratory syndrome coronavirus 2
  REGION 1..8: note = Table A: HLA-B*08:01H
LIKVTLVF

SEQ ID NO: 609 - protein, 8 aa, Severe acute respiratory syndrome coronavirus 2
  REGION 1..8: note = Table A: HLA-B*58:01H HLA-B*58:02H HLA-B*57:03H
KVTLVFLF

SEQ ID NO: 610 - protein, 8 aa, Severe acute respiratory syndrome coronavirus 2
  REGION 1..8: note = Table A: HLA-B*54:01H
LVFLFVAA

SEQ ID NO: 611 - protein, 8 aa, Severe acute respiratory syndrome coronavirus 2
  REGION 1..8: note = Table A: HLA-B*15:02H
FLFVAAIF

SEQ ID NO: 612 - protein, 8 aa, Severe acute respiratory syndrome coronavirus 2
  REGION 1..8: note = Table A: HLA-A*02:04H
FVAAIFYL

SEQ ID NO: 613 - protein, 8 aa, Severe acute respiratory syndrome coronavirus 2
  REGION 1..8: note = Table A: HLA-C*14:03H
FYLITPVH

SEQ ID NO: 614 - protein, 8 aa, Severe acute respiratory syndrome coronavirus 2
  REGION 1..8: note = Table A: HLA-C*04:03H HLA-A*02:11M HLA-A*68:02H HLA-A*02:04H HLA-A*02:02H HLA-A*02:03H HLA-C*17:01H HLA-B*38:02H HLA-B*13:02H
YLITPVHV

SEQ ID NO: 615 - protein, 8 aa, Severe acute respiratory syndrome coronavirus 2
  REGION 1..8: note = Table A: HLA-C*03:02H HLA-B*15:02H HLA-C*07:04H
LITPVHVM

SEQ ID NO: 616 - protein, 8 aa, Severe acute respiratory syndrome coronavirus 2
  REGION 1..8: note = Table A: HLA-C*04:03H HLA-C*08:02M HLA-C*05:01H
HTDFSSEI

SEQ ID NO: 617 - protein, 8 aa, Severe acute respiratory syndrome coronavirus 2
  REGION 1..8: note = Table A: HLA-B*35:01H HLA-B*38:02H HLA-B*15:01H
FSSEIIGY

SEQ ID NO: 618 - protein, 8 aa, Severe acute respiratory syndrome coronavirus 2
  REGION 1..8: note = Table A: HLA-A*11:01H
SSEIIGYK

SEQ ID NO: 619 - protein, 8 aa, Severe acute respiratory syndrome coronavirus 2
  REGION 1..8: note = Table A: HLA-B*45:01H HLA-B*18:01H HLA-B*39:06H HLA-B*40:02H HLA-B*40:06M HLA-B*07:05H HLA-B*41:02H HLA-B*50:01M
SEIIGYKA

SEQ ID NO: 620 - protein, 8 aa, Severe acute respiratory syndrome coronavirus 2
  REGION 1..8: note = Table A: HLA-B*51:01H
DGGVTRDI

SEQ ID NO: 621 - protein, 8 aa, Severe acute respiratory syndrome coronavirus 2
  REGION 1..8: note = Table A: HLA-C*15:05H HLA-B*35:02H HLA-B*35:08H HLA-B*35:12H HLA-B*38:02H
IASTDTCF

SEQ ID NO: 622 - protein, 8 aa, Severe acute respiratory syndrome coronavirus 2
  REGION 1..8: note = Table A: HLA-C*16:01H HLA-B*46:01H HLA-B*08:01H HLA-C*03:02H HLA-C*03:04H HLA-C*12:02H HLA-C*12:03H HLA-C*02:02H
FANKHADF

SEQ ID NO: 623 - protein, 8 aa, Severe acute respiratory syndrome coronavirus 2
  REGION 1..8: note = Table A: HLA-B*38:02H
KHADFDTW

SEQ ID NO: 624 - protein, 8 aa, Severe acute respiratory syndrome coronavirus 2
  REGION 1..8: note = Table A: HLA-C*04:03M HLA-C*05:01H
HADFDTWF

SEQ ID NO: 625 - protein, 8 aa, Severe acute respiratory syndrome coronavirus 2
  REGION 1..8: note = Table A: HLA-A*66:01H
FDTWFSQR

SEQ ID NO: 626 - protein, 8 aa, Severe acute respiratory syndrome coronavirus 2
  REGION 1..8: note = Table A: HLA-C*16:01H HLA-B*46:01H HLA-A*30:02H
FSQRGGSY

SEQ ID NO: 627 - protein, 8 aa, Severe acute respiratory syndrome coronavirus 2
  REGION 1..8: note = Table A: HLA-C*15:05H HLA-B*51:01M HLA-B*07:05H
CPLIAAVI

SEQ ID NO: 628 - protein, 8 aa, Severe acute respiratory syndrome coronavirus 2
  REGION 1..8: note = Table A: HLA-C*16:01H HLA-C*03:02H HLA-B*52:01H
AAVITREV

SEQ ID NO: 629 - protein, 8 aa, Severe acute respiratory syndrome coronavirus 2
  REGION 1..8: note = Table A: HLA-B*40:06H HLA-B*50:01M
REVGFVVP

SEQ ID NO: 630 - protein, 8 aa, Severe acute respiratory syndrome coronavirus 2
  REGION 1..8: note = Table A: HLA-B*51:01H HLA-B*52:01H HLA-B*40:02H
VGFVVPGL

SEQ ID NO: 631 - protein, 8 aa, Severe acute respiratory syndrome coronavirus 2
  REGION 1..8: note = Table A: HLA-C*15:05M HLA-B*51:01H
VPGLPGTI

SEQ ID NO: 632 - protein, 8 aa, Severe acute respiratory syndrome coronavirus 2
  REGION 1..8: note = Table A: HLA-C*04:03H HLA-C*08:02H
NGDFLHFL

SEQ ID NO: 633 - protein, 8 aa, Severe acute respiratory syndrome coronavirus 2
  REGION 1..8: note = Table A: HLA-B*40:06H
GDFLHFLP

SEQ ID NO: 634 - protein, 8 aa, Severe acute respiratory syndrome coronavirus 2
  REGION 1..8: note = Table A: HLA-B*58:02H HLA-B*15:03H HLA-B*15:10H
LHFLPRVF

SEQ ID NO: 635 - protein, 8 aa, Severe acute respiratory syndrome coronavirus 2
  REGION 1..8: note = Table A: HLA-B*56:01H HLA-B*08:01H HLA-B*55:02H HLA-C*15:05H HLA-B*55:01M HLA-B*51:01M HLA-B*54:01M HLA-B*07:02H HLA-B*07:04H HLA-B*07:05H
LPRVFSAV

SEQ ID NO: 636 - protein, 8 aa, Severe acute respiratory syndrome coronavirus 2
  REGION 1..8: note = Table A: HLA-B*35:01H HLA-B*38:02H HLA-B*15:02H
SAVGNICY

SEQ ID NO: 637 - protein, 8 aa, Severe acute respiratory syndrome coronavirus 2
  REGION 1..8: note = Table A: HLA-B*18:01H HLA-C*15:05H HLA-B*35:01M HLA-B*35:08H HLA-B*35:07M HLA-B*38:02H HLA-B*15:02H HLA-B*07:05H HLA-B*15:11H
TPSKLIEY

SEQ ID NO: 638 - protein, 8 aa, Severe acute respiratory syndrome coronavirus 2
  REGION 1..8: note = Table A: HLA-B*39:06H HLA-B*50:01H
TDFATSAC

SEQ ID NO: 639 - protein, 8 aa, Severe acute respiratory syndrome coronavirus 2
  REGION 1..8: note = Table A: HLA-C*03:03H HLA-C*03:04H HLA-B*35:03H HLA-C*17:01H
FATSACVL

SEQ ID NO: 640 - protein, 8 aa, Severe acute respiratory syndrome coronavirus 2
  REGION 1..8: note = Table A: HLA-B*58:01H HLA-A*36:01H
ASGKPVPY

SEQ ID NO: 641 - protein, 8 aa, Severe acute respiratory syndrome coronavirus 2
  REGION 1..8: note = Table A: HLA-A*33:03H
ESLRPDTR

SEQ ID NO: 642 - protein, 8 aa, Severe acute respiratory syndrome coronavirus 2
  REGION 1..8: note = Table A: HLA-B*38:02H
SLRPDTRY

SEQ ID NO: 643 - protein, 8 aa, Severe acute respiratory syndrome coronavirus 2
  REGION 1..8: note = Table A: HLA-B*42:01M HLA-B*08:01H HLA-C*15:05M HLA-B*35:12H HLA-B*07:02M HLA-B*07:04M HLA-B*07:05H
RPDTRYVL

SEQ ID NO: 644 - protein, 8 aa, Severe acute respiratory syndrome coronavirus 2
  REGION 1..8: note = Table A: HLA-B*37:01H
MDGSIIQF

SEQ ID NO: 645 - protein, 8 aa, Severe acute respiratory syndrome coronavirus 2
  REGION 1..8: note = Table A: HLA-A*33:03H
TYLEGSVR

SEQ ID NO: 646 - protein, 8 aa, Severe acute respiratory syndrome coronavirus 2
  REGION 1..8: note = Table A: HLA-B*40:02H HLA-B*41:02H HLA-B*49:01M HLA-B*50:01H
LEGSVRVV

SEQ ID NO: 647 - protein, 8 aa, Severe acute respiratory syndrome coronavirus 2
  REGION 1..8: note = Table A: HLA-B*46:01H HLA-B*38:02H HLA-B*15:01H HLA-B*15:02M HLA-B*07:05H
SVRVVTTF

SEQ ID NO: 648 - protein, 8 aa, Severe acute respiratory syndrome coronavirus 2
  REGION 1..8: note = Table A: HLA-A*36:01H
VTTFDSEY

SEQ ID NO: 649 - protein, 8 aa, Severe acute respiratory syndrome coronavirus 2
  REGION 1..8: note = Table A: HLA-C*16:01H
STSGRWVL

SEQ ID NO: 650 - protein, 8 aa, Severe acute respiratory syndrome coronavirus 2
  REGION 1..8: note = Table A: HLA-B*38:02H
WVLNNDYY

SEQ ID NO: 651 - protein, 8 aa, Severe acute respiratory syndrome coronavirus 2
  REGION 1..8: note = Table A: HLA-A*74:01H
VLNNDYYR

SEQ ID NO: 652 - protein, 8 aa, Severe acute respiratory syndrome coronavirus 2
  REGION 1..8: note = Table A: HLA-C*15:05H
LPGVFCGV

SEQ ID NO: 653 - protein, 8 aa, Severe acute respiratory syndrome coronavirus 2
  REGION 1..8: note = Table A: HLA-C*04:03H
GVDAVNLL

SEQ ID NO: 654 - protein, 8 aa, Severe acute respiratory syndrome coronavirus 2
  REGION 1..8: note = Table A: HLA-C*15:05H HLA-B*51:01H
QPIGALDI

SEQ ID NO: 655 - protein, 8 aa, Severe acute respiratory syndrome coronavirus 2
  REGION 1..8: note = Table A: HLA-C*15:05H
VAGGIVAI

SEQ ID NO: 656 - protein, 8 aa, Severe acute respiratory syndrome coronavirus 2
  REGION 1..8: note = Table A: HLA-A*11:303H HLA-B*46:01H HLA-B*08:01H HLA-C*03:02H HLA-C*03:04H HLA-C*15:05H HLA-B*14:01H HLA-B*51:01H HLA-C*17:01H HLA-B*38:02H HLA-B*07:05H
VAIVVTCL

SEQ ID NO: 657 - protein, 8 aa, Severe acute respiratory syndrome coronavirus 2
  REGION 1..8: note = Table A: HLA-C*03:02H
LAYYFMRF

SEQ ID NO: 658 - protein, 8 aa, Severe acute respiratory syndrome coronavirus 2
  REGION 1..8: note = Table A: HLA-B*45:01M HLA-B*39:06H HLA-B*40:02H HLA-B*40:06M HLA-B*41:02H HLA-B*49:01H HLA-B*50:01H
GEYSHVVA

SEQ ID NO: 659 - protein, 8 aa, Severe acute respiratory syndrome coronavirus 2
  REGION 1..8: note = Table A: HLA-B*39:06H
SHVVAFNT

SEQ ID NO: 660 - protein, 8 aa, Severe acute respiratory syndrome coronavirus 2
  REGION 1..8: note = Table A: HLA-B*46:01H
YSFLPGVY

SEQ ID NO: 661 - protein, 8 aa, Severe acute respiratory syndrome coronavirus 2
  REGION 1..8: note = Table A: HLA-B*53:01H HLA-C*15:05H HLA-B*51:01M
LPGVYSVI

SEQ ID NO: 662 - protein, 8 aa, Severe acute respiratory syndrome coronavirus 2
  REGION 1..8: note = Table A: HLA-A*68:02H
DVSFLAHI

SEQ ID NO: 663 - protein, 8 aa, Severe acute respiratory syndrome coronavirus 2
  REGION 1..8: note = Table A: HLA-C*14:03H HLA-A*24:07H
SFLAHIQW

SEQ ID NO: 664 - protein, 8 aa, Severe acute respiratory syndrome coronavirus 2
  REGION 1..8: note = Table A: HLA-A*02:02H
FLAHIQWM

SEQ ID NO: 665 - protein, 8 aa, Severe acute respiratory syndrome coronavirus 2
  REGION 1..8: note = Table A: HLA-B*56:01H HLA-B*55:02H HLA-B*55:01H HLA-B*54:01H
VPFWITIA

SEQ ID NO: 666 - protein, 8 aa, Severe acute respiratory syndrome coronavirus 2
  REGION 1..8: note = Table A: HLA-B*58:01M HLA-B*58:02M HLA-B*57:01M HLA-A*24:07H HLA-B*57:03H
ISTKHFYW

SEQ ID NO: 667 - protein, 8 aa, Severe acute respiratory syndrome coronavirus 2
  REGION 1..8: note = Table A: HLA-C*14:03H
FYWFFSNY

SEQ ID NO: 668 - protein, 8 aa, Severe acute respiratory syndrome coronavirus 2
  REGION 1..8: note = Table A: HLA-B*08:01M
YLKRRVVF

SEQ ID NO: 669 - protein, 8 aa, Severe acute respiratory syndrome coronavirus 2
  REGION 1..8: note = Table A: HLA-C*14:02H HLA-C*14:03H HLA-B*46:01M HLA-C*03:02H HLA-C*03:04H HLA-C*15:05H HLA-C*12:02H HLA-B*38:02H HLA-B*15:01H HLA-B*07:05H HLA-B*57:03H
VVFNGVSF

SEQ ID NO: 670 - protein, 8 aa, Severe acute respiratory syndrome coronavirus 2
  REGION 1..8: note = Table A: HLA-B*18:01H
NGVSFSTF

SEQ ID NO: 671 - protein, 8 aa, Severe acute respiratory syndrome coronavirus 2
  REGION 1..8: note = Table A: HLA-A*68:02H HLA-B*38:02H HLA-B*39:01H
STFEEAAL

SEQ ID NO: 672 - protein, 8 aa, Severe acute respiratory syndrome coronavirus 2
  REGION 1..8: note = Table A: HLA-B*44:05H HLA-B*18:01M HLA-B*07:05H
EEAALCTF

SEQ ID NO: 673 - protein, 8 aa, Severe acute respiratory syndrome coronavirus 2
  REGION 1..8: note = Table A: HLA-C*14:02H HLA-C*14:03H HLA-B*15:02H
TFLLNKEM

SEQ ID NO: 674 - protein, 8 aa, Severe acute respiratory syndrome coronavirus 2
  REGION 1..8: note = Table A: HLA-B*38:02H
FLLNKEMY

SEQ ID NO: 675 - protein, 8 aa, Severe acute respiratory syndrome coronavirus 2
  REGION 1..8: note = Table A: HLA-A*02:11H HLA-A*02:04H HLA-A*02:02M HLA-C*17:01H
LLNKEMYL

SEQ ID NO: 676 - protein, 8 aa, Severe acute respiratory syndrome coronavirus 2
  REGION 1..8: note = Table A: HLA-B*40:02H HLA-B*40:06H
SDVLLPLT

SEQ ID NO: 677 - protein, 8 aa, Severe acute respiratory syndrome coronavirus 2
  REGION 1..8: note = Table A: HLA-B*46:01H HLA-B*38:02M HLA-B*15:01H HLA-B*15:02H HLA-B*15:03H
VLLPLTQY

SEQ ID NO: 678 - protein, 8 aa, Severe acute respiratory syndrome coronavirus 2
  REGION 1..8: note = Table A: HLA-B*58:02H
LTQYNRYL

SEQ ID NO: 679 - protein, 8 aa, Severe acute respiratory syndrome coronavirus 2
  REGION 1..8: note = Table A: HLA-B*46:01M HLA-A*30:02H HLA-B*35:01H HLA-B*38:02H HLA-B*15:01M HLA-B*15:02H HLA-B*15:03H HLA-B*07:05H HLA-B*15:11H
GAMDTTSY

SEQ ID NO: 680 - protein, 8 aa, Severe acute respiratory syndrome coronavirus 2
  REGION 1..8: note = Table A: HLA-A*36:01H
AMDTTSYR

SEQ ID NO: 681 - protein, 8 aa, Severe acute respiratory syndrome coronavirus 2
  REGION 1..8: note = Table A: HLA-B*46:01H
LAKALNDF

SEQ ID NO: 682 - protein, 8 aa, Severe acute respiratory syndrome coronavirus 2
  REGION 1..8: note = Table A: HLA-B*51:01H HLA-B*52:01M HLA-B*13:02H
YQPPQTSI

SEQ ID NO: 683 - protein, 8 aa, Severe acute respiratory syndrome coronavirus 2
  REGION 1..8: note = Table A: HLA-C*15:05H
TSITSAVL

SEQ ID NO: 684 - protein, 8 aa, Severe acute respiratory syndrome coronavirus 2
  REGION 1..8: note = Table A: HLA-C*15:05H
SAVLQSGF

SEQ ID NO: 685 - protein, 8 aa, Severe acute respiratory syndrome coronavirus 2
  REGION 1..8: note = Table A: HLA-A*34:01H HLA-A*66:01H
AVLQSGFR

SEQ ID NO: 686 - protein, 8 aa, Severe acute respiratory syndrome coronavirus 2
  REGION 1..8: note = Table A: HLA-A*03:02H HLA-A*11:02H
VLQSGFRK

SEQ ID NO: 687 - protein, 8 aa, Severe acute respiratory syndrome coronavirus 2
  REGION 1..8: note = Table A: HLA-C*15:05H HLA-B*51:01M HLA-B*52:01H HLA-B*54:01H
MAFPSGKV

SEQ ID NO: 688 - protein, 8 aa, Severe acute respiratory syndrome coronavirus 2
  REGION 1..8: note = Table A: HLA-B*49:01H
VEGCMVQV

SEQ ID NO: 689 - protein, 8 aa, Severe acute respiratory syndrome coronavirus 2
  REGION 1..8: note = Table A: HLA-B*58:01H
TTTLNGLW

SEQ ID NO: 690 - protein, 8 aa, Severe acute respiratory syndrome coronavirus 2
  REGION 1..8: note = Table A: HLA-B*07:05H
EDMLNPNY

SEQ ID NO: 691 - protein, 8 aa, Severe acute respiratory syndrome coronavirus 2
  REGION 1..8: note = Table A: HLA-B*35:02H HLA-B*35:12H
NPNYEDLL

SEQ ID NO: 692 - protein, 8 aa, Severe acute respiratory syndrome coronavirus 2
  REGION 1..8: note = Table A: HLA-B*58:02H HLA-C*15:02H
KSNHNFLV

SEQ ID NO: 693 - protein, 8 aa, Severe acute respiratory syndrome coronavirus 2
  REGION 1..8: note = Table A: HLA-B*39:06H
NHNFLVQA

SEQ ID NO: 694 - protein, 8 aa, Severe acute respiratory syndrome coronavirus 2
  REGION 1..8: note = Table A: HLA-B*48:01H HLA-A*02:05H HLA-B*39:01H
VQAGNVQL

SEQ ID NO: 695 - protein, 8 aa, Severe acute respiratory syndrome coronavirus 2
  REGION 1..8: note = Table A: HLA-A*33:03H HLA-A*68:01H
QAGNVQLR

SEQ ID NO: 696 - protein, 8 aa, Severe acute respiratory syndrome coronavirus 2
  REGION 1..8: note = Table A: HLA-C*15:02H
AGNVQLRV

SEQ ID NO: 697 - protein, 8 aa, Severe acute respiratory syndrome coronavirus 2
  REGION 1..8: note = Table A: HLA-B*52:01H HLA-B*15:01M
VQLRVIGH

SEQ ID NO: 698 - protein, 8 aa, Severe acute respiratory syndrome coronavirus 2
  REGION 1..8: note = Table A: HLA-B*14:02M HLA-B*14:01M
LRVIGHSM

SEQ ID NO: 699 - protein, 8 aa, Severe acute respiratory syndrome coronavirus 2
  REGION 1..8: note = Table A: HLA-B*52:01H
MQNCVLKL

SEQ ID NO: 700 - protein, 8 aa, Severe acute respiratory syndrome coronavirus 2
  REGION 1..8: note = Table A: HLA-B*39:06H
LKLKVDTA

SEQ ID NO: 701 - protein, 8 aa, Severe acute respiratory syndrome coronavirus 2
  REGION 1..8: note = Table A: HLA-A*03:02M HLA-A*11:01H HLA-A*36:01H
KVDTANPK

SEQ ID NO: 702 - protein, 8 aa, Severe acute respiratory syndrome coronavirus 2
  REGION 1..8: note = Table A: HLA-C*15:05H
QPGQTFSV

SEQ ID NO: 703 - protein, 8 aa, Severe acute respiratory syndrome coronavirus 2
  REGION 1..8: note = Table A: HLA-A*02:03H
YNGSPSGV

SEQ ID NO: 704 - protein, 8 aa, Severe acute respiratory syndrome coronavirus 2
  REGION 1..8: note = Table A: HLA-B*39:01M
NGSPSGVY

SEQ ID NO: 705 - protein, 8 aa, Severe acute respiratory syndrome coronavirus 2
  REGION 1..8: note = Table A: HLA-C*15:05H
SPSGVYQC

SEQ ID NO: 706 - protein, 8 aa, Severe acute respiratory syndrome coronavirus 2
  REGION 1..8: note = Table A: HLA-B*58:02H HLA-B*52:01M HLA-B*38:02H HLA-B*13:02H
AMRPNFTI

SEQ ID NO: 707 - protein, 8 aa, Severe acute respiratory syndrome coronavirus 2
  REGION 1..8: note = Table A: HLA-C*03:03M HLA-C*03:04M HLA-C*15:05H HLA-C*15:02H HLA-C*17:01M HLA-A*66:01H
FTIKGSFL

SEQ ID NO: 708 - protein, 8 aa, Severe acute respiratory syndrome coronavirus 2
  REGION 1..8: note = Table A: HLA-B*37:01H
IDYDCVSF

SEQ ID NO: 709 - protein, 8 aa, Severe acute respiratory syndrome coronavirus 2
  REGION 1..8: note = Table A: HLA-C*14:02M HLA-C*14:03M
CYMHHMEL

SEQ ID NO: 710 - protein, 8 aa, Severe acute respiratory syndrome coronavirus 2
  REGION 1..8: note = Table A: HLA-B*18:01H
MELPTGVH

SEQ ID NO: 711 - protein, 8 aa, Severe acute respiratory syndrome coronavirus 2
  REGION 1..8: note = Table A: HLA-B*07:05H
TDLEGNFY

SEQ ID NO: 712 - protein, 8 aa, Severe acute respiratory syndrome coronavirus 2
  REGION 1..8: note = Table A: HLA-A*11:02H HLA-A*33:01H HLA-A*33:03M HLA-C*06:02H HLA-C*03:03H HLA-A*34:02H HLA-A*31:01H
FYGPFVDR

SEQ ID NO: 713 - protein, 8 aa, Severe acute respiratory syndrome coronavirus 2
  REGION 1..8: note = Table A: HLA-B*14:01H
DRQTAQAA

SEQ ID NO: 714 - protein, 8 aa, Severe acute respiratory syndrome coronavirus 2
  REGION 1..8: note = Table A: HLA-C*15:05H
GTDTTITV

SEQ ID NO: 715 - protein, 8 aa, Severe acute respiratory syndrome coronavirus 2
  REGION 1..8: note = Table A: HLA-A*68:02H
DTTITVNV

SEQ ID NO: 716 - protein, 8 aa, Severe acute respiratory syndrome coronavirus 2
  REGION 1..8: note = Table A: HLA-C*15:05H
TTITVNVL

SEQ ID NO: 717 - protein, 8 aa, Severe acute respiratory syndrome coronavirus 2
  REGION 1..8: note = Table A: HLA-B*58:01H
ITVNVLAW

SEQ ID NO: 718 - protein, 8 aa, Severe acute respiratory syndrome coronavirus 2
  REGION 1..8: note = Table A: HLA-B*58:01H HLA-B*44:03H HLA-B*15:13H HLA-B*57:03H HLA-B*13:01H
AVINGDRW

SEQ ID NO: 719 - protein, 8 aa, Severe acute respiratory syndrome coronavirus 2
  REGION 1..8: note = Table A: HLA-B*18:01H HLA-B*40:02H HLA-B*07:05H
NDFNLVAM

SEQ ID NO: 720 - protein, 8 aa, Severe acute respiratory syndrome coronavirus 2
  REGION 1..8: note = Table A: HLA-A*36:01H HLA-A*29:02H HLA-B*15:02H
FNLVAMKY

SEQ ID NO: 721 - protein, 8 aa, Severe acute respiratory syndrome coronavirus 2
  REGION 1..8: note = Table A: HLA-B*51:01H
EPLTQDHV

SEQ ID NO: 722 - protein, 8 aa, Severe acute respiratory syndrome coronavirus 2
  REGION 1..8: note = Table A: HLA-B*39:06H HLA-B*39:01H
DHVDILGP

SEQ ID NO: 723 - protein, 8 aa, Severe acute respiratory syndrome coronavirus 2
  REGION 1..8: note = Table A: HLA-C*08:02H
HVDILGPL

SEQ ID NO: 724 - protein, 8 aa, Severe acute respiratory syndrome coronavirus 2
  REGION 1..8: note = Table A: HLA-B*48:01M HLA-B*52:01H HLA-B*15:01H HLA-B*39:01H
AQTGIAVL

SEQ ID NO: 725 - protein, 8 aa, Severe acute respiratory syndrome coronavirus 2
  REGION 1..8: note = Table A: HLA-C*16:01H
CASLKELL

SEQ ID NO: 726 - protein, 8 aa, Severe acute respiratory syndrome coronavirus 2
  REGION 1..8: note = Table A: HLA-B*37:01M HLA-B*40:02H HLA-B*41:02H
KELLQNGM

SEQ ID NO: 727 - protein, 8 aa, Severe acute respiratory syndrome coronavirus 2
  REGION 1..8: note = Table A: HLA-B*51:01H
NGMNGRTI

SEQ ID NO: 728 - protein, 8 aa, Severe acute respiratory syndrome coronavirus 2
  REGION 1..8: note = Table A: HLA-C*03:03H HLA-C*03:04H HLA-C*15:05H
RTILGSAL

SEQ ID NO: 729 - protein, 8 aa, Severe acute respiratory syndrome coronavirus 2
  REGION 1..8: note = Table A: HLA-B*18:01H
LEDEFTPF

SEQ ID NO: 730 - protein, 8 aa, Severe acute respiratory syndrome coronavirus 2
  REGION 1..8: note = Table A: HLA-B*18:01M HLA-B*07:05M
DEFTPFDV

SEQ ID NO: 731 - protein, 8 aa, Severe acute respiratory syndrome coronavirus 2
  REGION 1..8: note = Table A: HLA-B*39:06M HLA-B*50:01H
SGVTFQSA

SEQ ID NO: 732 - protein, 8 aa, Severe acute respiratory syndrome coronavirus 2
  REGION 1..8: note = Table A: HLA-A*03:02H HLA-A*11:01H HLA-A*11:02H HLA-C*03:03H HLA-A*34:02H
VTFQSAVK

SEQ ID NO: 733 - protein, 8 aa, Severe acute respiratory syndrome coronavirus 2
  REGION 1..8: note = Table A: HLA-A*33:03H
TFQSAVKR

SEQ ID NO: 734 - protein, 8 aa, Severe acute respiratory syndrome coronavirus 2
  REGION 1..8: note = Table A: HLA-B*58:02H HLA-B*52:01H
QSAVKRTI

SEQ ID NO: 735 - protein, 8 aa, Severe acute respiratory syndrome coronavirus 2
  REGION 1..8: note = Table A: HLA-A*32:01H
TIKGTHHW

SEQ ID NO: 736 - protein, 8 aa, Severe acute respiratory syndrome coronavirus 2
  REGION 1..8: note = Table A: HLA-B*58:02H
KGTHHWLL

SEQ ID NO: 737 - protein, 8 aa, Severe acute respiratory syndrome coronavirus 2
  REGION 1..8: note = Table A: HLA-B*52:01H HLA-B*38:02H
HHWLLLTI

SEQ ID NO: 738 - protein, 8 aa, Severe acute respiratory syndrome coronavirus 2
  REGION 1..8: note = Table A: HLA-B*58:01M HLA-B*15:13M HLA-B*38:02H
VLVQSTQW

SEQ ID NO: 739 - protein, 8 aa, Severe acute respiratory syndrome coronavirus 2
  REGION 1..8: note = Table A: HLA-C*14:02H HLA-C*14:03H
FFLYENAF

SEQ ID NO: 740 - protein, 8 aa, Severe acute respiratory syndrome coronavirus 2
  REGION 1..8: note = Table A: HLA-C*16:01H HLA-C*03:02H HLA-B*35:03M HLA-C*15:05H HLA-C*12:03H HLA-B*35:01M HLA-B*35:02H HLA-B*51:01H HLA-B*35:07M HLA-C*08:01H HLA-B*35:12H HLA-B*38:02H HLA-B*54:01H HLA-B*15:02H HLA-B*07:05H
NAFLPFAM

SEQ ID NO: 741 - protein, 8 aa, Severe acute respiratory syndrome coronavirus 2
  REGION 1..8: note = Table A: HLA-C*15:05M HLA-B*51:01H HLA-B*54:01H HLA-B*07:05H
LPFAMGII

SEQ ID NO: 742 - protein, 8 aa, Severe acute respiratory syndrome coronavirus 2
  REGION 1..8: note = Table A: HLA-C*03:02H HLA-B*35:01H HLA-B*35:07H HLA-B*15:02H
FAMGIIAM

SEQ ID NO: 743 - protein, 8 aa, Severe acute respiratory syndrome coronavirus 2
  REGION 1..8: note = Table A: HLA-B*39:06H
MGIIAMSA

SEQ ID NO: 744 - protein, 8 aa, Severe acute respiratory syndrome coronavirus 2
  REGION 1..8: note = Table A: HLA-B*35:01H
IAMSAFAM

SEQ ID NO: 745 - protein, 8 aa, Severe acute respiratory syndrome coronavirus 2
  REGION 1..8: note = Table A: HLA-B*58:01H
MSAFAMMF

SEQ ID NO: 746 - protein, 8 aa, Severe acute respiratory syndrome coronavirus 2
  REGION 1..8: note = Table A: HLA-C*15:05H HLA-B*51:01M HLA-B*52:01H
SAFAMMFV

SEQ ID NO: 747 - protein, 8 aa, Severe acute respiratory syndrome coronavirus 2
  REGION 1..8: note = Table A: HLA-C*03:02H
FAMMFVKH

SEQ ID NO: 748 - protein, 8 aa, Severe acute respiratory syndrome coronavirus 2
  REGION 1..8: note = Table A: HLA-A*11:02H
AMMFVKHK

SEQ ID NO: 749 - protein, 8 aa, Severe acute respiratory syndrome coronavirus 2
  REGION 1..8: note = Table A: HLA-B*08:01H
FVKHKHAF

SEQ ID NO: 750 - protein, 8 aa, Severe acute respiratory syndrome coronavirus 2
  REGION 1..8: note = Table A: HLA-A*02:07H
LLPSLATV

SEQ ID NO: 751 - protein, 8 aa, Severe acute respiratory syndrome coronavirus 2
  REGION 1..8: note = Table A: HLA-B*55:02H HLA-B*54:01H
LPSLATVA

SEQ ID NO: 752 - protein, 8 aa, Severe acute respiratory syndrome coronavirus 2
  REGION 1..8: note = Table A: HLA-B*38:02H
VAYFNMVY

SEQ ID NO: 753 - protein, 8 aa, Severe acute respiratory syndrome coronavirus 2
  REGION 1..8: note = Table A: HLA-C*14:03H
AYFNMVYM

SEQ ID NO: 754 - protein, 8 aa, Severe acute respiratory syndrome coronavirus 2
  REGION 1..8: note = Table A: HLA-B*58:01H HLA-B*57:01H HLA-A*25:01H HLA-B*53:01H HLA-B*38:02H HLA-A*32:01H HLA-B*57:03H
MVYMPASW

SEQ ID NO: 755 - protein, 8 aa, Severe acute respiratory syndrome coronavirus 2
  REGION 1..8: note = Table A: HLA-C*14:03H
VYMPASWV

SEQ ID NO: 756 - protein, 8 aa, Severe acute respiratory syndrome coronavirus 2
  REGION 1..8: note = Table A: HLA-A*34:01H
MPASWVMR

SEQ ID NO: 757 - protein, 8 aa, Severe acute respiratory syndrome coronavirus 2
  REGION 1..8: note = Table A: HLA-C*15:05H
PASWVMRI

SEQ ID NO: 758 - protein, 8 aa, Severe acute respiratory syndrome coronavirus 2
  REGION 1..8: note = Table A: HLA-B*35:02H HLA-B*37:01H HLA-B*40:02H HLA-B*41:02H
LDMVDTSL

SEQ ID NO: 759 - protein, 8 aa, Severe acute respiratory syndrome coronavirus 2
  REGION 1..8: note = Table A: HLA-B*37:01H
VDTSLSGF

SEQ ID NO: 760 - protein, 8 aa, Severe acute respiratory syndrome coronavirus 2
  REGION 1..8: note = Table A: HLA-B*58:02H HLA-C*15:05H HLA-C*08:01H HLA-B*57:03H
TSLSGFKL

SEQ ID NO: 761 - protein, 8 aa, Severe acute respiratory syndrome coronavirus 2
  REGION 1..8: note = Table A: HLA-B*52:01M
VMYASAVV

SEQ ID NO: 762 - protein, 8 aa, Severe acute respiratory syndrome coronavirus 2
  REGION 1..8: note = Table A: HLA-C*17:01M
YASAVVLL

SEQ ID NO: 763 - protein, 8 aa, Severe acute respiratory syndrome coronavirus 2
  REGION 1..8: note = Table A: HLA-C*15:05H HLA-C*15:02H HLA-B*52:01H HLA-B*13:02H
ASAVVLLI

SEQ ID NO: 764 - protein, 8 aa, Severe acute respiratory syndrome coronavirus 2
  REGION 1..8: note = Table A: HLA-C*03:02H HLA-C*15:05H
SAVVLLIL

SEQ ID NO: 765 - protein, 8 aa, Severe acute respiratory syndrome coronavirus 2
  REGION 1..8: note = Table A: HLA-B*14:01H HLA-B*52:01H HLA-B*38:02H
ILMTARTV

SEQ ID NO: 766 - protein, 8 aa, Severe acute respiratory syndrome coronavirus 2
  REGION 1..8: note = Table A: HLA-A*34:01H
TVYDDGAR

SEQ ID NO: 767 - protein, 8 aa, Severe acute respiratory syndrome coronavirus 2
  REGION 1..8: note = Table A: HLA-A*02:11H
RVWTLMNV

SEQ ID NO: 768 - protein, 8 aa, Severe acute respiratory syndrome coronavirus 2
  REGION 1..8: note = Table A: HLA-C*15:05H HLA-A*02:04H HLA-A*02:01H HLA-B*38:02H
TLMNVLTL

SEQ ID NO: 769 - protein, 8 aa, Severe acute respiratory syndrome coronavirus 2
  REGION 1..8: note = Table A: HLA-B*15:02H HLA-B*07:05H
MNVLTLVY

SEQ ID NO: 770 - protein, 8 aa, Severe acute respiratory syndrome coronavirus 2
  REGION 1..8: note = Table A: HLA-A*11:02H HLA-A*34:02H
NVLTLVYK

SEQ ID NO: 771 - protein, 8 aa, Severe acute respiratory syndrome coronavirus 2
  REGION 1..8: note = Table A: HLA-A*02:11H HLA-A*02:04H HLA-A*02:02H HLA-B*13:02H
VLTLVYKV

SEQ ID NO: 772 - protein, 8 aa, Severe acute respiratory syndrome coronavirus 2
  REGION 1..8: note = Table A: HLA-C*03:04H HLA-C*15:05H
KVYYGNAL

SEQ ID NO: 773 - protein, 8 aa, Severe acute respiratory syndrome coronavirus 2
  REGION 1..8: note = Table A: HLA-B*46:01H HLA-A*30:02H HLA-B*38:02H HLA-B*15:01M
IISVTSNY

SEQ ID NO: 774 - protein, 8 aa, Severe acute respiratory syndrome coronavirus 2
  REGION 1..8: note = Table A: HLA-A*02:11H HLA-A*68:02H HLA-C*15:05M HLA-C*12:03H HLA-C*15:02M HLA-A*02:06H HLA-B*14:01H HLA-A*02:01H HLA-A*02:03M HLA-B*51:01M HLA-B*52:01H HLA-C*08:01H HLA-B*38:02H HLA-B*39:06H HLA-B*39:01H HLA-B*07:05H
  REGION 1..8: note = CONT. FROM ABOVE: HLA-B*13:02H HLA-B*49:01M
YSGVVTTV

SEQ ID NO: 775 - protein, 8 aa, Severe acute respiratory syndrome coronavirus 2
  REGION 1..8: note = Table A: HLA-B*18:01H HLA-C*15:05H HLA-B*15:02H HLA-B*07:05H HLA-B*41:02H
SGVVTTVM

SEQ ID NO: 776 - protein, 8 aa, Severe acute respiratory syndrome coronavirus 2
  REGION 1..8: note = Table A: HLA-C*15:05M HLA-C*15:02H HLA-C*17:01H HLA-C*07:04H
VVTTVMFL

SEQ ID NO: 777 - protein, 8 aa, Severe acute respiratory syndrome coronavirus 2
  REGION 1..8: note = Table A: HLA-A*66:01H
TTVMFLAR

SEQ ID NO: 778 - protein, 8 aa, Severe acute respiratory syndrome coronavirus 2
  REGION 1..8: note = Table A: HLA-B*58:02H HLA-B*52:01M
VMFLARGI

SEQ ID NO: 779 - protein, 8 aa, Severe acute respiratory syndrome coronavirus 2
  REGION 1..8: note = Table A: HLA-B*15:02H
FLARGIVF

SEQ ID NO: 780 - protein, 8 aa, Severe acute respiratory syndrome coronavirus 2
  REGION 1..8: note = Table A: HLA-B*15:02H
IVFMCVEY

SEQ ID NO: 781 - protein, 8 aa, Severe acute respiratory syndrome coronavirus 2
  REGION 1..8: note = Table A: HLA-C*14:02H HLA-C*14:03H HLA-C*03:03H HLA-C*03:04H HLA-C*01:02M
FFITGNTL

SEQ ID NO: 782 - protein, 8 aa, Severe acute respiratory syndrome coronavirus 2
  REGION 1..8: note = Table A: HLA-B*14:02M HLA-B*14:01H
NRYFRLTL

SEQ ID NO: 783 - protein, 8 aa, Severe acute respiratory syndrome coronavirus 2
  REGION 1..8: note = Table A: HLA-A*02:02H
TLGVYDYL

SEQ ID NO: 784 - protein, 8 aa, Severe acute respiratory syndrome coronavirus 2
  REGION 1..8: note = Table A: HLA-B*46:01M HLA-B*38:02H HLA-B*15:01H HLA-B*15:02H
YLVSTQEF

SEQ ID NO: 785 - protein, 8 aa, Severe acute respiratory syndrome coronavirus 2
  REGION 1..8: note = Table A: HLA-B*58:01M HLA-A*36:01H HLA-A*30:02H
VSTQEFRY

SEQ ID NO: 786 - protein, 8 aa, Severe acute respiratory syndrome coronavirus 2
  REGION 1..8: note = Table A: HLA-C*14:02H
RYMNSQGL

SEQ ID NO: 787 - protein, 8 aa, Severe acute respiratory syndrome coronavirus 2
  REGION 1..8: note = Table A: HLA-A*03:01H HLA-A*03:02H HLA-A*11:01M HLA-A*11:02M
SQGLLPPK

SEQ ID NO: 788 - protein, 8 aa, Severe acute respiratory syndrome coronavirus 2
  REGION 1..8: note = Table A: HLA-C*08:01H
NSIDAFKL

SEQ ID NO: 789 - protein, 8 aa, Severe acute respiratory syndrome coronavirus 2
  REGION 1..8: note = Table A: HLA-A*34:02H HLA-B*51:01H
DAFKLNIK

SEQ ID NO: 790 - protein, 8 aa, Severe acute respiratory syndrome coronavirus 2
  REGION 1..8: note = Table A: HLA-C*15:05H
PCIKVATV

SEQ ID NO: 791 - protein, 8 aa, Severe acute respiratory syndrome coronavirus 2
  REGION 1..8: note = Table A: HLA-A*03:02H
KVATVQSK

SEQ ID NO: 792 - protein, 8 aa, Severe acute respiratory syndrome coronavirus 2
  REGION 1..8: note = Table A: HLA-C*16:01H HLA-C*15:05H HLA-B*51:01H
VATVQSKM

SEQ ID NO: 793 - protein, 8 aa, Severe acute respiratory syndrome coronavirus 2
  REGION 1..8: note = Table A: HLA-B*52:01M HLA-B*13:02H
VQSKMSDV

SEQ ID NO: 794 - protein, 8 aa, Severe acute respiratory syndrome coronavirus 2
  REGION 1..8: note = Table A: HLA-B*40:02H
SDVKCTSV

SEQ ID NO: 795 - protein, 8 aa, Severe acute respiratory syndrome coronavirus 2
  REGION 1..8: note = Table A: HLA-C*15:05H HLA-B*51:01H HLA-B*52:01H
TSVVLLSV

SEQ ID NO: 796 - protein, 8 aa, Severe acute respiratory syndrome coronavirus 2
  REGION 1..8: note = Table A: HLA-C*15:05H
SVVLLSVL

SEQ ID NO: 797 - protein, 8 aa, Severe acute respiratory syndrome coronavirus 2
  REGION 1..8: note = Table A: HLA-A*02:04M HLA-B*14:01H HLA-A*02:02H HLA-A*02:03H
LLSVLQQL

SEQ ID NO: 798 - protein, 8 aa, Severe acute respiratory syndrome coronavirus 2
  REGION 1..8: note = Table A: HLA-B*13:02H
SVLQQLRV

SEQ ID NO: 799 - protein, 8 aa, Severe acute respiratory syndrome coronavirus 2
  REGION 1..8: note = Table A: HLA-B*44:02H HLA-B*44:03M
VESSSKLW

SEQ ID NO: 800 - protein, 8 aa, Severe acute respiratory syndrome coronavirus 2
  REGION 1..8: note = Table A: HLA-B*39:06H
LHNDILLA

SEQ ID NO: 801 - protein, 8 aa, Severe acute respiratory syndrome coronavirus 2
  REGION 1..8: note = Table A: HLA-A*36:01H
HNDILLAK

SEQ ID NO: 802 - protein, 8 aa, Severe acute respiratory syndrome coronavirus 2
  REGION 1..8: note = Table A: HLA-A*34:02H
DTTEAFEK

SEQ ID NO: 803 - protein, 8 aa, Severe acute respiratory syndrome coronavirus 2
  REGION 1..8: note = Table A: HLA-B*49:01H
TEAFEKMV

SEQ ID NO: 804 - protein, 8 aa, Severe acute respiratory syndrome coronavirus 2
  REGION 1..8: note = Table A: HLA-B*40:02H HLA-B*41:02M
FEKMVSLL

SEQ ID NO: 805 - protein, 8 aa, Severe acute respiratory syndrome coronavirus 2
  REGION 1..8: note = Table A: HLA-B*52:01H
KMVSLLSV

SEQ ID NO: 806 - protein, 8 aa, Severe acute respiratory syndrome coronavirus 2
  REGION 1..8: note = Table A: HLA-C*15:05H HLA-C*17:01H HLA-B*40:02H
GAVDINKL

SEQ ID NO: 807 - protein, 8 aa, Severe acute respiratory syndrome coronavirus 2
  REGION 1..8: note = Table A: HLA-B*45:01H
EEMLDNRA

SEQ ID NO: 808 - protein, 8 aa, Severe acute respiratory syndrome coronavirus 2
  REGION 1..8: note = Table A: HLA-B*08:01H HLA-A*02:11H HLA-B*14:01H HLA-C*08:02H HLA-B*07:02H
MLDNRATL

SEQ ID NO: 809 - protein, 8 aa, Severe acute respiratory syndrome coronavirus 2
  REGION 1..8: note = Table A: HLA-B*14:02H HLA-B*14:01M
NRATLQAI

SEQ ID NO: 810 - protein, 8 aa, Severe acute respiratory syndrome coronavirus 2
  REGION 1..8: note = Table A: HLA-B*46:01H HLA-B*38:02H HLA-B*15:01M HLA-B*15:02M HLA-B*15:03H HLA-B*39:01H
LQAIASEF

SEQ ID NO: 811 - protein, 8 aa, Severe acute respiratory syndrome coronavirus 2
  REGION 1..8: note = Table A: HLA-C*03:03H HLA-C*03:02H HLA-C*03:04H HLA-C*15:05H HLA-C*08:01H HLA-B*38:02H HLA-B*07:05H
IASEFSSL

SEQ ID NO: 812 - protein, 8 aa, Severe acute respiratory syndrome coronavirus 2
  REGION 1..8: note = Table A: HLA-B*39:06H HLA-B*54:01H
SSLPSYAA

SEQ ID NO: 813 - protein, 8 aa, Severe acute respiratory syndrome coronavirus 2
  REGION 1..8: note = Table A: HLA-B*46:01H HLA-B*35:01M HLA-B*35:07H HLA-B*38:02H HLA-B*39:01H
FATAQEAY

SEQ ID NO: 814 - protein, 8 aa, Severe acute respiratory syndrome coronavirus 2
  REGION 1..8: note = Table A: HLA-B*49:01H
QEAYEQAV

SEQ ID NO: 815 - protein, 8 aa, Severe acute respiratory syndrome coronavirus 2
  REGION 1..8: note = Table A: HLA-B*39:06H HLA-B*54:01H
EAYEQAVA

SEQ ID NO: 816 - protein, 8 aa, Severe acute respiratory syndrome coronavirus 2
  REGION 1..8: note = Table A: HLA-C*04:03H HLA-B*35:02M HLA-C*08:01H HLA-C*08:02M HLA-B*35:12M HLA-B*39:01H HLA-C*05:01M
NGDSEVVL

SEQ ID NO: 817 - protein, 8 aa, Severe acute respiratory syndrome coronavirus 2
  REGION 1..8: note = Table A: HLA-A*03:02H HLA-A*11:01H HLA-A*11:02H HLA-A*36:01H HLA-B*27:02H HLA-B*37:01M
GDSEVVLK

SEQ ID NO: 818 - protein, 8 aa, Severe acute respiratory syndrome coronavirus 2
  REGION 1..8: note = Table A: HLA-A*36:01H
DSEVVLKK

SEQ ID NO: 819 - protein, 8 aa, Severe acute respiratory syndrome coronavirus 2
  REGION 1..8: note = Table A: HLA-B*44:05H HLA-B*44:03H HLA-B*18:01H HLA-B*40:01H HLA-B*40:02H HLA-B*40:06H HLA-B*07:05H HLA-B*41:02M HLA-B*49:01M
SEVVLKKL

SEQ ID NO: 820 - protein, 8 aa, Severe acute respiratory syndrome coronavirus 2
  REGION 1..8: note = Table A: HLA-B*45:01H HLA-B*50:01H
SEFDRDAA

SEQ ID NO: 821 - protein, 8 aa, Severe acute respiratory syndrome coronavirus 2
  REGION 1..8: note = Table A: HLA-C*04:01H HLA-B*35:02H
EFDRDAAM

SEQ ID NO: 822 - protein, 8 aa, Severe acute respiratory syndrome coronavirus 2
  REGION 1..8: note = Table A: HLA-B*51:01H
DAAMQRKL

SEQ ID NO: 823 - protein, 8 aa, Severe acute respiratory syndrome coronavirus 2
  REGION 1..8: note = Table A: HLA-B*52:01M HLA-B*38:02H HLA-B*15:01H HLA-B*15:02H
MQRKLEKM

SEQ ID NO: 824 - protein, 8 aa, Severe acute respiratory syndrome coronavirus 2
  REGION 1..8: note = Table A: HLA-B*45:01H HLA-B*18:01H HLA-B*50:01H
LEKMADQA

SEQ ID NO: 825 - protein, 8 aa, Severe acute respiratory syndrome coronavirus 2
  REGION 1..8: note = Table A: HLA-B*37:01M HLA-B*41:02H
ADQAMTQM

SEQ ID NO: 826 - protein, 8 aa, Severe acute respiratory syndrome coronavirus 2
  REGION 1..8: note = Table A: HLA-B*18:01H HLA-B*35:01H HLA-B*38:02H HLA-B*15:01M HLA-B*15:02H HLA-B*15:03H HLA-B*39:01H HLA-B*07:05H HLA-B*15:11H
DQAMTQMY

SEQ ID NO: 827 - protein, 8 aa, Severe acute respiratory syndrome coronavirus 2
  REGION 1..8: note = Table A: HLA-A*03:01H HLA-A*03:02H HLA-A*11:01H HLA-A*11:02H HLA-A*36:01H HLA-A*34:02H
QAMTQMYK

SEQ ID NO: 828 - protein, 8 aa, Severe acute respiratory syndrome coronavirus 2
  REGION 1..8: note = Table A: HLA-B*49:01H
SEDKRAKV

SEQ ID NO: 829 - protein, 8 aa, Severe acute respiratory syndrome coronavirus 2
  REGION 1..8: note = Table A: HLA-B*08:01H HLA-B*07:04H HLA-B*15:01H
RAKVTSAM

SEQ ID NO: 830 - protein, 8 aa, Severe acute respiratory syndrome coronavirus 2
  REGION 1..8: note = Table A: HLA-C*15:05H
VTSAMQTM

SEQ ID NO: 831 - protein, 8 aa, Severe acute respiratory syndrome coronavirus 2
  REGION 1..8: note = Table A: HLA-C*15:05H
SAMQTMLF

SEQ ID NO: 832 - protein, 8 aa, Severe acute respiratory syndrome coronavirus 2
  REGION 1..8: note = Table A: HLA-B*52:01H
MQTMLFTM

SEQ ID NO: 833 - protein, 8 aa, Severe acute respiratory syndrome coronavirus 2
  REGION 1..8: note = Table A: HLA-C*15:05H
QTMLFTML

SEQ ID NO: 834 - protein, 8 aa, Severe acute respiratory syndrome coronavirus 2
  REGION 1..8: note = Table A: HLA-B*51:01M
DGCVPLNI

SEQ ID NO: 835 - protein, 8 aa, Severe acute respiratory syndrome coronavirus 2
  REGION 1..8: note = Table A: HLA-C*15:05H
VPLNIIPL

SEQ ID NO: 836 - protein, 8 aa, Severe acute respiratory syndrome coronavirus 2
  REGION 1..8: note = Table A: HLA-B*39:06H HLA-B*54:01H
NIIPLTTA

SEQ ID NO: 837 - protein, 8 aa, Severe acute respiratory syndrome coronavirus 2
  REGION 1..8: note = Table A: HLA-C*15:05H HLA-B*51:01M HLA-B*52:01H
TAAKLMVV

SEQ ID NO: 838 - protein, 8 aa, Severe acute respiratory syndrome coronavirus 2
  REGION 1..8: note = Table A: HLA-B*08:01H HLA-B*52:01H
AAKLMVVI

SEQ ID NO: 839 - protein, 8 aa, Severe acute respiratory syndrome coronavirus 2
  REGION 1..8: note = Table A: HLA-B*46:01H HLA-B*15:02H HLA-B*07:05H
LMVVIPDY

SEQ ID NO: 840 - protein, 8 aa, Severe acute respiratory syndrome coronavirus 2
  REGION 1..8: note = Table A: HLA-C*14:02H HLA-C*14:03H
TFTYASAL

SEQ ID NO: 841 - protein, 8 aa, Severe acute respiratory syndrome coronavirus 2
  REGION 1..8: note = Table A: HLA-B*38:02H
YASALWEI

SEQ ID NO: 842 - protein, 8 aa, Severe acute respiratory syndrome coronavirus 2
  REGION 1..8: note = Table A: HLA-A*02:11M HLA-A*02:04M HLA-A*02:07H HLA-B*14:01H HLA-A*02:01H HLA-A*02:03H HLA-B*52:01H HLA-B*38:02H HLA-B*40:06H HLA-B*13:02H
ALWEIQQV

SEQ ID NO: 843 - protein, 8 aa, Severe acute respiratory syndrome coronavirus 2
  REGION 1..8: note = Table A: HLA-C*08:02H HLA-C*05:01H
VVDADSKI

SEQ ID NO: 844 - protein, 8 aa, Severe acute respiratory syndrome coronavirus 2
  REGION 1..8: note = Table A: HLA-B*48:01H HLA-B*44:05M HLA-B*45:01H HLA-C*15:05H HLA-A*02:02H HLA-B*37:01H HLA-B*40:01H HLA-B*40:02M HLA-B*07:05H HLA-B*41:02M HLA-C*07:04M
ADSKIVQL

SEQ ID NO: 845 - protein, 8 aa, Severe acute respiratory syndrome coronavirus 2
  REGION 1..8: note = Table A: HLA-C*15:05H
KIVQLSEI

SEQ ID NO: 846 - protein, 8 aa, Severe acute respiratory syndrome coronavirus 2
  REGION 1..8: note = Table A: HLA-C*04:03H HLA-C*08:02H
SMDNSPNL

SEQ ID NO: 847 - protein, 8 aa, Severe acute respiratory syndrome coronavirus 2
  REGION 1..8: note = Table A: HLA-B*08:01H HLA-B*35:03H HLA-C*15:05M HLA-B*51:01H HLA-B*35:07H HLA-B*38:02H HLA-B*15:02H HLA-B*07:05M
WPLIVTAL

SEQ ID NO: 848 - protein, 8 aa, Severe acute respiratory syndrome coronavirus 2
  REGION 1..8: note = Table A: HLA-A*34:01H HLA-A*66:01H
PLIVTALR

SEQ ID NO: 849 - protein, 8 aa, Severe acute respiratory syndrome coronavirus 2
  REGION 1..8: note = Table A: HLA-B*58:01H HLA-B*58:02M HLA-C*15:05M HLA-C*15:02H HLA-C*17:01H HLA-B*57:03H HLA-C*07:04H
RANSAVKL

SEQ ID NO: 850 - protein, 8 aa, Severe acute respiratory syndrome coronavirus 2
  REGION 1..8: note = Table A: HLA-B*44:05H HLA-B*18:01M HLA-B*14:01H HLA-B*40:01M HLA-B*40:02M HLA-B*39:01H HLA-B*07:05M HLA-B*41:02M
NELSPVAL

SEQ ID NO: 851 - protein, 8 aa, Severe acute respiratory syndrome coronavirus 2
  REGION 1..8: note = Table A: HLA-A*33:03H HLA-A*26:03H HLA-A*68:01H HLA-A*34:01M HLA-A*34:02H HLA-A*66:01H
ELSPVALR

SEQ ID NO: 852 - protein, 8 aa, Severe acute respiratory syndrome coronavirus 2
  REGION 1..8: note = Table A: HLA-C*15:05M HLA-B*55:01H HLA-B*07:02H HLA-B*07:04M HLA-B*07:05M
SPVALRQM

SEQ ID NO: 853 - protein, 8 aa, Severe acute respiratory syndrome coronavirus 2
  REGION 1..8: note = Table A: HLA-A*36:01M HLA-A*01:01H HLA-B*18:01H HLA-B*35:01H HLA-B*39:01H HLA-B*07:05H
TDDNALAY

SEQ ID NO: 854 - protein, 8 aa, Severe acute respiratory syndrome coronavirus 2
  REGION 1..8: note = Table A: HLA-B*07:05H
DDNALAYY

SEQ ID NO: 855 - protein, 8 aa, Severe acute respiratory syndrome coronavirus 2
  REGION 1..8: note = Table A: HLA-A*34:02H
LAYYNTTK

SEQ ID NO: 856 - protein, 8 aa, Severe acute respiratory syndrome coronavirus 2
  REGION 1..8: note = Table A: HLA-A*36:01H
LSDLQDLK

SEQ ID NO: 857 - protein, 8 aa, Severe acute respiratory syndrome coronavirus 2
  REGION 1..8: note = Table A: HLA-B*44:05H HLA-B*44:03H
SDLQDLKW

SEQ ID NO: 858 - protein, 8 aa, Severe acute respiratory syndrome coronavirus 2
  REGION 1..8: note = Table A: HLA-B*37:01H
QDLKWARF

SEQ ID NO: 859 - protein, 8 aa, Severe acute respiratory syndrome coronavirus 2
  REGION 1..8: note = Table A: HLA-B*51:01H
DTPKGPKV

SEQ ID NO: 860 - protein, 8 aa, Severe acute respiratory syndrome coronavirus 2
  REGION 1..8: note = Table A: HLA-B*08:01H
FIKGLNNL

SEQ ID NO: 861 - protein, 8 aa, Severe acute respiratory syndrome coronavirus 2
  REGION 1..8: note = Table A: HLA-B*08:01H
NLNRGMVL

SEQ ID NO: 862 - protein, 8 aa, Severe acute respiratory syndrome coronavirus 2
  REGION 1..8: note = Table A: HLA-C*15:05M HLA-B*07:05H
RGMVLGSL

SEQ ID NO: 863 - protein, 8 aa, Severe acute respiratory syndrome coronavirus 2
  REGION 1..8: note = Table A: HLA-B*54:01H
MVLGSLAA

SEQ ID NO: 864 - protein, 8 aa, Severe acute respiratory syndrome coronavirus 2
  REGION 1..8: note = Table A: HLA-A*02:02H HLA-C*17:01H
SLAATVRL

SEQ ID NO: 865 - protein, 8 aa, Severe acute respiratory syndrome coronavirus 2
  REGION 1..8: note = Table A: HLA-C*16:01H HLA-B*55:01H HLA-B*54:01H
AATVRLQA

SEQ ID NO: 866 - protein, 8 aa, Severe acute respiratory syndrome coronavirus 2
  REGION 1..8: note = Table A: HLA-C*15:05H
QAGNATEV

SEQ ID NO: 867 - protein, 8 aa, Severe acute respiratory syndrome coronavirus 2
  REGION 1..8: note = Table A: HLA-B*35:03M HLA-C*15:05M HLA-B*35:01H HLA-B*35:02H HLA-B*35:12H HLA-B*07:02H HLA-B*39:01H HLA-B*07:05M
VPANSTVL

SEQ ID NO: 868 - protein, 8 aa, Severe acute respiratory syndrome coronavirus 2
  REGION 1..8: note = Table A: HLA-B*54:01H
CAFAVDAA

SEQ ID NO: 869 - protein, 8 aa, Severe acute respiratory syndrome coronavirus 2
  REGION 1..8: note = Table A: HLA-B*54:01H
FAVDAAKA

SEQ ID NO: 870 - protein, 8 aa, Severe acute respiratory syndrome coronavirus 2
  REGION 1..8: note = Table A: HLA-B*15:01H HLA-B*07:05H
AVDAAKAY

SEQ ID NO: 871 - protein, 8 aa, Severe acute respiratory syndrome coronavirus 2
  REGION 1..8: note = Table A: HLA-A*02:11H
KAYKDYLA

SEQ ID NO: 872 - protein, 8 aa, Severe acute respiratory syndrome coronavirus 2
  REGION 1..8: note = Table A: HLA-B*52:01M HLA-B*13:02H
GQPITNCV

SEQ ID NO: 873 - protein, 8 aa, Severe acute respiratory syndrome coronavirus 2
  REGION 1..8: note = Table A: HLA-B*39:06H
THTGTGQA

SEQ ID NO: 874 - protein, 8 aa, Severe acute respiratory syndrome coronavirus 2
  REGION 1..8: note = Table A: HLA-C*15:05H HLA-B*38:02H
HTGTGQAI

SEQ ID NO: 875 - protein, 8 aa, Severe acute respiratory syndrome coronavirus 2
  REGION 1..8: note = Table A: HLA-B*45:01H HLA-B*55:01H HLA-B*39:06H HLA-B*54:01H
AITVTPEA

SEQ ID NO: 876 - protein, 8 aa, Severe acute respiratory syndrome coronavirus 2
  REGION 1..8: note = Table A: HLA-B*35:02H HLA-B*35:12H
TVTPEANM

SEQ ID NO: 877 - protein, 8 aa, Severe acute respiratory syndrome coronavirus 2
  REGION 1..8: note = Table A: HLA-A*03:02H HLA-A*36:01H
HIDHPNPK

SEQ ID NO: 878 - protein, 8 aa, Severe acute respiratory syndrome coronavirus 2
  REGION 1..8: note = Table A: HLA-B*39:06M
VQIPTTCA

SEQ ID NO: 879 - protein, 8 aa, Severe acute respiratory syndrome coronavirus 2
  REGION 1..8: note = Table A: HLA-B*44:05H HLA-C*15:05H HLA-C*01:02H HLA-C*08:01H HLA-C*08:03H HLA-B*37:01H HLA-B*40:02H HLA-B*39:01H HLA-B*07:05H HLA-B*41:02H HLA-C*07:04H
NDPVGFTL

SEQ ID NO: 880 - protein, 8 aa, Severe acute respiratory syndrome coronavirus 2
  REGION 1..8: note = Table A: HLA-A*34:01H HLA-A*34:02H
DPVGFTLK

SEQ ID NO: 881 - protein, 8 aa, Severe acute respiratory syndrome coronavirus 2
  REGION 1..8: note = Table A: HLA-A*02:11H
GMWKGYGC

SEQ ID NO: 882 - protein, 8 aa, Severe acute respiratory syndrome coronavirus 2
  REGION 1..8: note = Table A: HLA-B*14:01H HLA-B*35:02H HLA-B*52:01H HLA-B*38:01H HLA-B*38:02M HLA-B*39:06H HLA-B*15:02H
DQLREPML

SEQ ID NO: 883 - protein, 8 aa, Severe acute respiratory syndrome coronavirus 2
  REGION 1..8: note = Table A: HLA-B*50:01H
REPMLQSA

SEQ ID NO: 884 - protein, 8 aa, Severe acute respiratory syndrome coronavirus 2
  REGION 1..8: note = Table A: HLA-C*04:03M HLA-C*08:02M HLA-C*05:01M
SADAQSFL

SEQ ID NO: 885 - protein, 8 aa, Severe acute respiratory syndrome coronavirus 2
  REGION 1..8: note = Table A: HLA-A*33:01H HLA-A*33:03H HLA-A*68:01H HLA-A*34:01H HLA-A*34:02M HLA-A*66:01M
DAQSFLNR

SEQ ID NO: 886 - protein, 8 aa, Severe acute respiratory syndrome coronavirus 2
  REGION 1..8: note = Table A: HLA-B*52:01M HLA-B*13:02H
AQSFLNRV

SEQ ID NO: 887 - protein, 8 aa, Severe acute respiratory syndrome coronavirus 2
  REGION 1..8: note = Table A: HLA-A*02:11H HLA-A*02:03H
FLNRVCGV

SEQ ID NO: 888 - protein, 8 aa, Severe acute respiratory syndrome coronavirus 2
  REGION 1..8: note = Table A: HLA-B*39:06H
NRVCGVSA

SEQ ID NO: 889 - protein, 8 aa, Severe acute respiratory syndrome coronavirus 2
  REGION 1..8: note = Table A: HLA-A*33:01H HLA-A*33:03M HLA-A*68:01M HLA-A*34:01H HLA-A*34:02H HLA-A*66:01H
TSTDVVYR

SEQ ID NO: 890 - protein, 8 aa, Severe acute respiratory syndrome coronavirus 2
  REGION 1..8: note = Table A: HLA-B*37:01H
TDVVYRAF

SEQ ID NO: 891 - protein, 8 aa, Severe acute respiratory syndrome coronavirus 2
  REGION 1..8: note = Table A: HLA-A*68:02H HLA-B*38:02H HLA-B*40:02H HLA-B*39:01H HLA-B*13:02H HLA-B*49:01H
FDIYNDKV

SEQ ID NO: 892 - protein, 8 aa, Severe acute respiratory syndrome coronavirus 2
  REGION 1..8: note = Table A: HLA-C*04:03H HLA-C*05:01H
YNDKVAGF

SEQ ID NO: 893 - protein, 8 aa, Severe acute respiratory syndrome coronavirus 2
  REGION 1..8: note = Table A: HLA-B*58:02H HLA-C*03:04H HLA-C*15:02H HLA-C*17:01H
VAGFAKFL

SEQ ID NO: 894 - protein, 8 aa, Severe acute respiratory syndrome coronavirus 2
  REGION 1..8: note = Table A: HLA-A*11:02H
AGFAKFLK

SEQ ID NO: 895 - protein, 8 aa, Severe acute respiratory syndrome coronavirus 2
  REGION 1..8: note = Table A: HLA-B*18:01H HLA-B*35:01H HLA-B*07:05H
DDNLIDSY

SEQ ID NO: 896 - protein, 8 aa, Severe acute respiratory syndrome coronavirus 2
  REGION 1..8: note = Table A: HLA-A*11:01H HLA-A*11:02H HLA-A*36:01H
IDSYFVVK

SEQ ID NO: 897 - protein, 8 aa, Severe acute respiratory syndrome coronavirus 2
  REGION 1..8: note = Table A: HLA-A*33:01M HLA-A*33:03M HLA-A*68:01M HLA-A*34:01M HLA-A*34:02H HLA-B*51:01H HLA-A*66:01M
DSYFVVKR

SEQ ID NO: 898 - protein, 8 aa, Severe acute respiratory syndrome coronavirus 2
  REGION 1..8: note = Table A: HLA-B*08:01H HLA-B*57:03H
FVVKRHTF

SEQ ID NO: 899 - protein, 8 aa, Severe acute respiratory syndrome coronavirus 2
  REGION 1..8: note = Table A: HLA-B*35:08H HLA-B*38:02H HLA-B*15:01H HLA-B*15:02H HLA-B*15:03H
YQHEETIY

SEQ ID NO: 900 - protein, 8 aa, Severe acute respiratory syndrome coronavirus 2
  REGION 1..8: note = Table A: HLA-B*18:01H HLA-B*37:01H HLA-B*40:01H HLA-B*40:02H HLA-B*41:02H
HEETIYNL

SEQ ID NO: 901 - protein, 8 aa, Severe acute respiratory syndrome coronavirus 2
  REGION 1..8: note = Table A: HLA-B*44:05H
EETIYNLL

SEQ ID NO: 902 - protein, 8 aa, Severe acute respiratory syndrome coronavirus 2
  REGION 1..8: note = Table A: HLA-A*34:02H
ETIYNLLK

SEQ ID NO: 903 - protein, 8 aa, Severe acute respiratory syndrome coronavirus 2
  REGION 1..8: note = Table A: HLA-A*03:02H HLA-B*37:01H
KDCPAVAK

SEQ ID NO: 904 - protein, 8 aa, Severe acute respiratory syndrome coronavirus 2
  REGION 1..8: note = Table A: HLA-C*15:05H HLA-B*51:01M
DGDMVPHI

SEQ ID NO: 905 - protein, 8 aa, Severe acute respiratory syndrome coronavirus 2
  REGION 1..8: note = Table A: HLA-A*33:01M HLA-A*33:03H HLA-A*68:01H HLA-A*34:01H HLA-A*66:01H
DMVPHISR

SEQ ID NO: 906 - protein, 8 aa, Severe acute respiratory syndrome coronavirus 2
  REGION 1..8: note = Table A: HLA-B*08:01H HLA-B*14:02H HLA-B*14:01H
QRLTKYTM

SEQ ID NO: 907 - protein, 8 aa, Severe acute respiratory syndrome coronavirus 2
  REGION 1..8: note = Table A: HLA-B*38:02H
YTMADLVY

SEQ ID NO: 908 - protein, 8 aa, Severe acute respiratory syndrome coronavirus 2
  REGION 1..8: note = Table A: HLA-C*04:03M HLA-B*35:03M HLA-C*15:05H HLA-B*35:01H HLA-B*35:02M HLA-B*35:08H HLA-B*35:07H HLA-C*08:01H HLA-C*08:02M HLA-B*35:12H HLA-B*38:02M HLA-B*15:02H HLA-B*39:01H HLA-B*07:05H HLA-C*05:01H
MADLVYAL

SEQ ID NO: 909 - protein, 8 aa, Severe acute respiratory syndrome coronavirus 2
  REGION 1..8: note = Table A: HLA-C*04:03M
FVENPDIL

SEQ ID NO: 910 - protein, 8 aa, Severe acute respiratory syndrome coronavirus 2
  REGION 1..8: note = Table A: HLA-B*35:01H HLA-B*35:07H HLA-B*15:02H
NPDILRVY

SEQ ID NO: 911 - protein, 8 aa, Severe acute respiratory syndrome coronavirus 2
  REGION 1..8: note = Table A: HLA-B*51:01H
YANLGERV

SEQ ID NO: 912 - protein, 8 aa, Severe acute respiratory syndrome coronavirus 2
  REGION 1..8: note = Table A: HLA-B*40:02H HLA-B*41:02H
GERVRQAL

SEQ ID NO: 913 - protein, 8 aa, Severe acute respiratory syndrome coronavirus 2
  REGION 1..8: note = Table A: HLA-B*52:01H HLA-B*13:02H
RQALLKTV

SEQ ID NO: 914 - protein, 8 aa, Severe acute respiratory syndrome coronavirus 2
  REGION 1..8: note = Table A: HLA-A*02:03H
LLKTVQFC

SEQ ID NO: 915 - protein, 8 aa, Severe acute respiratory syndrome coronavirus 2
  REGION 1..8: note = Table A: HLA-C*15:05H HLA-B*51:01M
DAMRNAGI

SEQ ID NO: 916 - protein, 8 aa, Severe acute respiratory syndrome coronavirus 2
  REGION 1..8: note = Table A: HLA-B*35:03H HLA-C*15:05M HLA-B*14:02H HLA-C*12:03H HLA-B*35:01H HLA-B*35:02H HLA-B*51:01H HLA-C*17:01H HLA-C*08:01H HLA-C*08:03H HLA-B*39:01H
NAGIVGVL

SEQ ID NO: 917 - protein, 8 aa, Severe acute respiratory syndrome coronavirus 2
  REGION 1..8: note = Table A: HLA-C*08:02H
NQDLNGNW

SEQ ID NO: 918 - protein, 8 aa, Severe acute respiratory syndrome coronavirus 2
  REGION 1..8: note = Table A: HLA-B*40:06H HLA-B*50:01H
GDFIQTTP

SEQ ID NO: 919 - protein, 8 aa, Severe acute respiratory syndrome coronavirus 2
  REGION 1..8: note = Table A: HLA-C*15:05H
TPGSGVPV

SEQ ID NO: 920 - protein, 8 aa, Severe acute respiratory syndrome coronavirus 2
  REGION 1..8: note = Table A: HLA-B*35:01H HLA-B*38:02H
VPVVDSYY

SEQ ID NO: 921 - protein, 8 aa, Severe acute respiratory syndrome coronavirus 2
  REGION 1..8: note = Table A: HLA-C*04:03H
VVDSYYSL

SEQ ID NO: 922 - protein, 8 aa, Severe acute respiratory syndrome coronavirus 2
  REGION 1..8: note = Table A: HLA-C*03:02H HLA-B*52:01H
YSLLMPIL

SEQ ID NO: 923 - protein, 8 aa, Severe acute respiratory syndrome coronavirus 2
  REGION 1..8: note = Table A: HLA-A*02:11H HLA-A*02:04M HLA-A*02:01H HLA-A*02:02H HLA-A*02:03H HLA-B*38:02H
LLMPILTL

SEQ ID NO: 924 - protein, 8 aa, Severe acute respiratory syndrome coronavirus 2
  REGION 1..8: note = Table A: HLA-A*34:01M HLA-A*34:02H HLA-B*51:01H HLA-B*54:01H HLA-A*66:01H
MPILTLTR

SEQ ID NO: 925 - protein, 8 aa, Severe acute respiratory syndrome coronavirus 2
  REGION 1..8: note = Table A: HLA-B*35:02H
ESHVDTDL

SEQ ID NO: 926 - protein, 8 aa, Severe acute respiratory syndrome coronavirus 2
  REGION 1..8: note = Table A: HLA-B*39:01H
SHVDTDLT

SEQ ID NO: 927 - protein, 8 aa, Severe acute respiratory syndrome coronavirus 2
  REGION 1..8: note = Table A: HLA-A*36:01H
HVDTDLTK

SEQ ID NO: 928 - protein, 8 aa, Severe acute respiratory syndrome coronavirus 2
  REGION 1..8: note = Table A: HLA-B*58:02H HLA-B*57:01H HLA-B*57:03M
LTKPYIKW

SEQ ID NO: 929 - protein, 8 aa, Severe acute respiratory syndrome coronavirus 2
  REGION 1..8: note = Table A: HLA-B*08:01M
KPYIKWDL

SEQ ID NO: 930 - protein, 8 aa, Severe acute respiratory syndrome coronavirus 2
  REGION 1..8: note = Table A: HLA-A*24:07H
PYIKWDLL

SEQ ID NO: 931 - protein, 8 aa, Severe acute respiratory syndrome coronavirus 2
  REGION 1..8: note = Table A: HLA-A*36:01H
KYDFTEER

SEQ ID NO: 932 - protein, 8 aa, Severe acute respiratory syndrome coronavirus 2
  REGION 1..8: note = Table A: HLA-A*02:11H HLA-A*68:02H HLA-A*02:05H HLA-A*02:02H HLA-C*08:01H HLA-B*38:02H HLA-B*40:01H HLA-B*40:02H
YDFTEERL

SEQ ID NO: 933 - protein, 8 aa, Severe acute respiratory syndrome coronavirus 2
  REGION 1..8: note = Table A: HLA-A*30:02H
RLKLFDRY

SEQ ID NO: 934 - protein, 8 aa, Severe acute respiratory syndrome coronavirus 2
  REGION 1..8: note = Table A: HLA-A*36:01H
LFDRYFKY

SEQ ID NO: 935 - protein, 8 aa, Severe acute respiratory syndrome coronavirus 2
  REGION 1..8: note = Table A: HLA-B*15:03M
FKYWDQTY

SEQ ID NO: 936 - protein, 8 aa, Severe acute respiratory syndrome coronavirus 2
  REGION 1..8: note = Table A: HLA-B*14:02H
DQTYHPNC

SEQ ID NO: 937 - protein, 8 aa, Severe acute respiratory syndrome coronavirus 2
  REGION 1..8: note = Table A: HLA-B*39:06H
DRCILHCA

SEQ ID NO: 938 - protein, 8 aa, Severe acute respiratory syndrome coronavirus 2
  REGION 1..8: note = Table A: HLA-B*15:02H
NVLFSTVF

SEQ ID NO: 939 - protein, 8 aa, Severe acute respiratory syndrome coronavirus 2
  REGION 1..8: note = Table A: HLA-B*58:01H HLA-B*57:01H HLA-B*46:01H HLA-C*03:02H HLA-C*15:05H HLA-C*12:02H HLA-B*35:01H HLA-B*35:07H HLA-B*38:02M HLA-B*15:01H HLA-B*15:02M HLA-B*39:01H HLA-B*07:05H HLA-B*57:03H
TVFPPTSF

SEQ ID NO: 940 - protein, 8 aa, Severe acute respiratory syndrome coronavirus 2
  REGION 1..8: note = Table A: HLA-A*33:03H HLA-A*68:01H HLA-A*34:01H HLA-A*34:02H HLA-A*66:01H
TSFGPLVR

SEQ ID NO: 941 - protein, 8 aa, Severe acute respiratory syndrome coronavirus 2
  REGION 1..8: note = Table A: HLA-A*11:02H
SFGPLVRK

SEQ ID NO: 942 - protein, 8 aa, Severe acute respiratory syndrome coronavirus 2
  REGION 1..8: note = Table A: HLA-B*58:02H HLA-B*51:01H HLA-B*52:01H
FGPLVRKI

SEQ ID NO: 943 - protein, 8 aa, Severe acute respiratory syndrome coronavirus 2
  REGION 1..8: note = Table A: HLA-B*07:04H
GPLVRKIF

SEQ ID NO: 944 - protein, 8 aa, Severe acute respiratory syndrome coronavirus 2
  REGION 1..8: note = Table A: HLA-C*14:02H HLA-C*14:03H
IFVDGVPF

SEQ ID NO: 945 - protein, 8 aa, Severe acute respiratory syndrome coronavirus 2
  REGION 1..8: note = Table A: HLA-C*04:03H HLA-A*02:11H HLA-A*02:07H HLA-C*05:01H
FVDGVPFV

SEQ ID NO: 946 - protein, 8 aa, Severe acute respiratory syndrome coronavirus 2
  REGION 1..8: note = Table A: HLA-C*08:03H
VDGVPFVV

SEQ ID NO: 947 - protein, 8 aa, Severe acute respiratory syndrome coronavirus 2
  REGION 1..8: note = Table A: HLA-C*15:05H
VPFVVSTG

SEQ ID NO: 948 - protein, 8 aa, Severe acute respiratory syndrome coronavirus 2
  REGION 1..8: note = Table A: HLA-B*58:01H HLA-A*24:07H
VVSTGYHF

SEQ ID NO: 949 - protein, 8 aa, Severe acute respiratory syndrome coronavirus 2
  REGION 1..8: note = Table A: HLA-C*03:02H
TGYHFREL

SEQ ID NO: 950 - protein, 8 aa, Severe acute respiratory syndrome coronavirus 2
  REGION 1..8: note = Table A: HLA-B*38:02H HLA-B*39:06H
YHFRELGV

SEQ ID NO: 951 - protein, 8 aa, Severe acute respiratory syndrome coronavirus 2
  REGION 1..8: note = Table A: HLA-B*52:01H
HFRELGVV

SEQ ID NO: 952 - protein, 8 aa, Severe acute respiratory syndrome coronavirus 2
  REGION 1..8: note = Table A: HLA-B*38:01M HLA-B*38:02H HLA-B*39:01H
VHNQDVNL

SEQ ID NO: 953 - protein, 8 aa, Severe acute respiratory syndrome coronavirus 2
  REGION 1..8: note = Table A: HLA-A*33:01M HLA-A*33:03H HLA-A*34:01H HLA-A*66:01H
DVNLHSSR

SEQ ID NO: 954 - protein, 8 aa, Severe acute respiratory syndrome coronavirus 2
  REGION 1..8: note = Table A: HLA-C*15:02H HLA-B*13:02H
LSFKELLV

SEQ ID NO: 955 - protein, 8 aa, Severe acute respiratory syndrome coronavirus 2
  REGION 1..8: note = Table A: HLA-B*46:01H HLA-B*38:02H HLA-B*15:02H
SFKELLVY

SEQ ID NO: 956 - protein, 8 aa, Severe acute respiratory syndrome coronavirus 2
  REGION 1..8: note = Table A: HLA-B*45:01H HLA-B*18:01H HLA-B*39:06H HLA-B*40:06M HLA-B*50:01H
KELLVYAA

SEQ ID NO: 957 - protein, 8 aa, Severe acute respiratory syndrome coronavirus 2
  REGION 1..8: note = Table A: HLA-B*39:01H
VYAADPAM

SEQ ID NO: 958 - protein, 8 aa, Severe acute respiratory syndrome coronavirus 2
  REGION 1..8: note = Table A: HLA-C*15:05H HLA-C*08:01H HLA-C*08:02H
AADPAMHA

SEQ ID NO: 959 - protein, 8 aa, Severe acute respiratory syndrome coronavirus 2
  REGION 1..8: note = Table A: HLA-B*45:01H HLA-B*39:06H HLA-B*40:06H HLA-B*50:01H
ADPAMHAA

SEQ ID NO: 960 - protein, 8 aa, Severe acute respiratory syndrome coronavirus 2
  REGION 1..8: note = Table A: HLA-B*38:02H HLA-B*39:01M HLA-B*15:10H
MHAASGNL

SEQ ID NO: 961 - protein, 8 aa, Severe acute respiratory syndrome coronavirus 2
  REGION 1..8: note = Table A: HLA-C*03:04H HLA-B*35:03H HLA-C*15:05H HLA-C*17:01H HLA-B*38:02H
HAASGNLL

SEQ ID NO: 962 - protein, 8 aa, Severe acute respiratory syndrome coronavirus 2
  REGION 1..8: note = Table A: HLA-C*15:05H
AASGNLLL

SEQ ID NO: 963 - protein, 8 aa, Severe acute respiratory syndrome coronavirus 2
  REGION 1..8: note = Table A: HLA-B*51:01H
VAALTNNV

SEQ ID NO: 964 - protein, 8 aa, Severe acute respiratory syndrome coronavirus 2
  REGION 1..8: note = Table A: HLA-B*57:03H
QTVKPGNF

SEQ ID NO: 965 - protein, 8 aa, Severe acute respiratory syndrome coronavirus 2
  REGION 1..8: note = Table A: HLA-B*37:01H HLA-B*40:02H HLA-B*40:06H
KDFYDFAV

SEQ ID NO: 966 - protein, 8 aa, Severe acute respiratory syndrome coronavirus 2
  REGION 1..8: note = Table A: HLA-A*11:01H HLA-A*11:02H HLA-A*36:01M
FYDFAVSK

SEQ ID NO: 967 - protein, 8 aa, Severe acute respiratory syndrome coronavirus 2
  REGION 1..8: note = Table A: HLA-A*03:02H HLA-A*11:01H HLA-A*11:02M HLA-A*36:01H HLA-A*34:02H HLA-C*07:27H
AVSKGFFK

SEQ ID NO: 968 - protein, 8 aa, Severe acute respiratory syndrome coronavirus 2
  REGION 1..8: note = Table A: HLA-C*14:02H HLA-C*14:03H HLA-C*12:03H
FFKEGSSV

SEQ ID NO: 969 - protein, 8 aa, Severe acute respiratory syndrome coronavirus 2
  REGION 1..8: note = Table A: HLA-B*40:01M HLA-B*40:02H HLA-B*41:02H
KEGSSVEL

SEQ ID NO: 970 - protein, 8 aa, Severe acute respiratory syndrome coronavirus 2
  REGION 1..8: note = Table A: HLA-B*37:01H
VELKHFFF

SEQ ID NO: 971 - protein, 8 aa, Severe acute respiratory syndrome coronavirus 2
  REGION 1..8: note = Table A: HLA-C*08:02H
AQDGNAAI

SEQ ID NO: 972 - protein, 8 aa, Severe acute respiratory syndrome coronavirus 2
  REGION 1..8: note = Table A: HLA-A*36:01H
ISDYDYYR

SEQ ID NO: 973 - protein, 8 aa, Severe acute respiratory syndrome coronavirus 2
  REGION 1..8: note = Table A: HLA-B*37:01H
YDYYRYNL

SEQ ID NO: 974 - protein, 8 aa, Severe acute respiratory syndrome coronavirus 2
  REGION 1..8: note = Table A: HLA-B*14:01H
YRYNLPTM

SEQ ID NO: 975 - protein, 8 aa, Severe acute respiratory syndrome coronavirus 2
  REGION 1..8: note = Table A: HLA-A*02:11H HLA-B*38:02H
LLFVVEVV

SEQ ID NO: 976 - protein, 8 aa, Severe acute respiratory syndrome coronavirus 2
  REGION 1..8: note = Table A: HLA-A*34:02H
FVVEVVDK

SEQ ID NO: 977 - protein, 8 aa, Severe acute respiratory syndrome coronavirus 2
  REGION 1..8: note = Table A: HLA-A*36:01H HLA-A*01:01H HLA-B*39:01H
VVEVVDKY

SEQ ID NO: 978 - protein, 8 aa, Severe acute respiratory syndrome coronavirus 2
  REGION 1..8: note = Table A: HLA-B*14:02H HLA-A*02:05H HLA-B*14:01M HLA-B*52:01M HLA-B*38:02H HLA-B*39:01H
NQVIVNNL

SEQ ID NO: 979 - protein, 8 aa, Severe acute respiratory syndrome coronavirus 2
  REGION 1..8: note = Table A: HLA-A*36:01H
VIVNNLDK

SEQ ID NO: 980 - protein, 8 aa, Severe acute respiratory syndrome coronavirus 2
  REGION 1..8: note = Table A: HLA-C*05:01H
NLDKSAGF

SEQ ID NO: 981 - protein, 8 aa, Severe acute respiratory syndrome coronavirus 2
  REGION 1..8: note = Table A: HLA-A*11:303H HLA-A*03:02M HLA-A*11:01M HLA-A*11:02M HLA-A*36:01H HLA-A*33:03H HLA-A*68:01H HLA-A*34:02H HLA-C*07:27H
SAGFPFNK

SEQ ID NO: 982 - protein, 8 aa, Severe acute respiratory syndrome coronavirus 2
  REGION 1..8: note = Table A: HLA-B*58:01H HLA-B*57:03H
AGFPFNKW

SEQ ID NO: 983 - protein, 8 aa, Severe acute respiratory syndrome coronavirus 2
  REGION 1..8: note = Table A: HLA-C*14:02H HLA-C*14:03M HLA-A*30:02H
LYYDSMSY

SEQ ID NO: 984 - protein, 8 aa, Severe acute respiratory syndrome coronavirus 2
  REGION 1..8: note = Table A: HLA-B*38:02H HLA-B*15:02H
DQDALFAY

SEQ ID NO: 985 - protein, 8 aa, Severe acute respiratory syndrome coronavirus 2
  REGION 1..8: note = Table A: HLA-B*27:02H HLA-A*34:02H
DALFAYTK

SEQ ID NO: 986 - protein, 8 aa, Severe acute respiratory syndrome coronavirus 2
  REGION 1..8: note = Table A: HLA-A*74:01H
ALFAYTKR

SEQ ID NO: 987 - protein, 8 aa, Severe acute respiratory syndrome coronavirus 2
  REGION 1..8: note = Table A: HLA-B*08:01H HLA-B*51:01H
FAYTKRNV

SEQ ID NO: 988 - protein, 8 aa, Severe acute respiratory syndrome coronavirus 2
  REGION 1..8: note = Table A: HLA-C*15:05H
VIPTITQM

SEQ ID NO: 989 - protein, 8 aa, Severe acute respiratory syndrome coronavirus 2
  REGION 1..8: note = Table A: HLA-C*15:05H
PTITQMNL

SEQ ID NO: 990 - protein, 8 aa, Severe acute respiratory syndrome coronavirus 2
  REGION 1..8: note = Table A: HLA-B*58:01H HLA-A*36:01H HLA-A*30:02H
ITQMNLKY

SEQ ID NO: 991 - protein, 8 aa, Severe acute respiratory syndrome coronavirus 2
  REGION 1..8: note = Table A: HLA-B*08:01H
QMNLKYAI

SEQ ID NO: 992 - protein, 8 aa, Severe acute respiratory syndrome coronavirus 2
  REGION 1..8: note = Table A: HLA-A*33:01H HLA-A*33:03M HLA-A*26:03H HLA-A*68:01M HLA-A*34:01M HLA-A*34:02H HLA-A*66:01M
YAISAKNR

SEQ ID NO: 993 - protein, 8 aa, Severe acute respiratory syndrome coronavirus 2
  REGION 1..8: note = Table A: HLA-B*58:01H HLA-B*58:02H HLA-B*57:03H
RTVAGVSI

SEQ ID NO: 994 - protein, 8 aa, Severe acute respiratory syndrome coronavirus 2
  REGION 1..8: note = Table A: HLA-B*58:02M HLA-C*16:01H
STMTNRQF

SEQ ID NO: 995 - protein, 8 aa, Severe acute respiratory syndrome coronavirus 2
  REGION 1..8: note = Table A: HLA-B*14:02H HLA-B*14:01H
NRQFHQKL

SEQ ID NO: 996 - protein, 8 aa, Severe acute respiratory syndrome coronavirus 2
  REGION 1..8: note = Table A: HLA-B*58:02M HLA-B*52:01H
RQFHQKLL

SEQ ID NO: 997 - protein, 8 aa, Severe acute respiratory syndrome coronavirus 2
  REGION 1..8: note = Table A: HLA-B*52:01H HLA-B*15:01H HLA-B*13:02H
HQKLLKSI

SEQ ID NO: 998 - protein, 8 aa, Severe acute respiratory syndrome coronavirus 2
  REGION 1..8: note = Table A: HLA-C*03:03H
TVVIGTSK

SEQ ID NO: 999 - protein, 8 aa, Severe acute respiratory syndrome coronavirus 2
  REGION 1..8: note = Table A: HLA-B*15:01H
VVIGTSKF

SEQ ID NO: 1000 - protein, 8 aa, Severe acute respiratory syndrome coronavirus 2
  REGION 1..8: note = Table A: HLA-C*14:02H
FYGGWHNM

SEQ ID NO: 1001 - protein, 8 aa, Severe acute respiratory syndrome coronavirus 2
  REGION 1..8: note = Table A: HLA-C*06:02H HLA-B*08:01H HLA-C*03:04M HLA-B*14:02H HLA-C*15:02H HLA-A*02:02H HLA-C*17:01H HLA-C*08:01H
YGGWHNML

SEQ ID NO: 1002 - protein, 8 aa, Severe acute respiratory syndrome coronavirus 2
  REGION 1..8: note = Table A: HLA-B*39:06H
WHNMLKTV

SEQ ID NO: 1003 - protein, 8 aa, Severe acute respiratory syndrome coronavirus 2
  REGION 1..8: note = Table A: HLA-B*08:01H HLA-B*15:02M
HNMLKTVY

SEQ ID NO: 1004 - protein, 8 aa, Severe acute respiratory syndrome coronavirus 2
  REGION 1..8: note = Table A: HLA-B*44:05M HLA-B*37:01H HLA-B*40:01H HLA-B*40:02H HLA-B*41:02M
SDVENPHL

SEQ ID NO: 1005 - protein, 8 aa, Severe acute respiratory syndrome coronavirus 2
  REGION 1..8: note = Table A: HLA-B*35:02H HLA-B*35:12H
DVENPHLM

SEQ ID NO: 1006 - protein, 8 aa, Severe acute respiratory syndrome coronavirus 2
  REGION 1..8: note = Table A: HLA-B*14:02H HLA-B*14:01M HLA-B*39:01H
DRAMPNML

SEQ ID NO: 1007 - protein, 8 aa, Severe acute respiratory syndrome coronavirus 2
  REGION 1..8: note = Table A: HLA-A*74:01H
RAMPNMLR

SEQ ID NO: 1008 - protein, 8 aa, Severe acute respiratory syndrome coronavirus 2
  REGION 1..8: note = Table A: HLA-B*52:01H
AMPNMLRI

SEQ ID NO: 1009 - protein, 8 aa, Severe acute respiratory syndrome coronavirus 2
  REGION 1..8: note = Table A: HLA-B*08:01H HLA-B*35:03H HLA-C*15:05H HLA-B*35:07H HLA-B*07:04H
MPNMLRIM

SEQ ID NO: 1010 - protein, 8 aa, Severe acute respiratory syndrome coronavirus 2
  REGION 1..8: note = Table A: HLA-B*08:01H
MLRIMASL

SEQ ID NO: 1011 - protein, 8 aa, Severe acute respiratory syndrome coronavirus 2
  REGION 1..8: note = Table A: HLA-A*36:01H HLA-A*33:03H HLA-A*68:01H HLA-A*34:01H HLA-A*34:02H HLA-A*66:01H
MASLVLAR

SEQ ID NO: 1012 - protein, 8 aa, Severe acute respiratory syndrome coronavirus 2
  REGION 1..8: note = Table A: HLA-A*11:01H HLA-A*11:02H
ASLVLARK

SEQ ID NO: 1013 - protein, 8 aa, Severe acute respiratory syndrome coronavirus 2
  REGION 1..8: note = Table A: HLA-B*58:02H
CSLSHRFY

SEQ ID NO: 1014 - protein, 8 aa, Severe acute respiratory syndrome coronavirus 2
  REGION 1..8: note = Table A: HLA-A*74:01H
SLSHRFYR

SEQ ID NO: 1015 - protein, 8 aa, Severe acute respiratory syndrome coronavirus 2
  REGION 1..8: note = Table A: HLA-B*58:02H
LSHRFYRL

SEQ ID NO: 1016 - protein, 8 aa, Severe acute respiratory syndrome coronavirus 2
  REGION 1..8: note = Table A: HLA-A*11:303H HLA-B*46:01H HLA-C*03:02H
CAQVLSEM

SEQ ID NO: 1017 - protein, 8 aa, Severe acute respiratory syndrome coronavirus 2
  REGION 1..8: note = Table A: HLA-B*52:01M HLA-B*13:02M
AQVLSEMV

SEQ ID NO: 1018 - protein, 8 aa, Severe acute respiratory syndrome coronavirus 2
  REGION 1..8: note = Table A: HLA-B*35:02H
QVLSEMVM

SEQ ID NO: 1019 - protein, 8 aa, Severe acute respiratory syndrome coronavirus 2
  REGION 1..8: note = Table A: HLA-B*46:01H HLA-C*15:05H HLA-B*35:01H HLA-B*51:01H HLA-B*38:02H HLA-B*15:02M
TAYANSVF

SEQ ID NO: 1020 - protein, 8 aa, Severe acute respiratory syndrome coronavirus 2
  REGION 1..8: note = Table A: HLA-B*58:01H HLA-C*15:05H HLA-B*51:01M HLA-B*38:02H
YANSVFNI

SEQ ID NO: 1021 - protein, 8 aa, Severe acute respiratory syndrome coronavirus 2
  REGION 1..8: note = Table A: HLA-B*52:01M
CQAVTANV

SEQ ID NO: 1022 - protein, 8 aa, Severe acute respiratory syndrome coronavirus 2
  REGION 1..8: note = Table A: HLA-C*15:05H
VTANVNAL

SEQ ID NO: 1023 - protein, 8 aa, Severe acute respiratory syndrome coronavirus 2
  REGION 1..8: note = Table A: HLA-C*03:03H HLA-C*03:04H HLA-C*15:05H HLA-C*08:01H HLA-C*08:02H HLA-C*08:03H HLA-B*38:02H
TANVNALL

SEQ ID NO: 1024 - protein, 8 aa, Severe acute respiratory syndrome coronavirus 2
  REGION 1..8: note = Table A: HLA-A*30:02H
GNKIADKY

SEQ ID NO: 1025 - protein, 8 aa, Severe acute respiratory syndrome coronavirus 2
  REGION 1..8: note = Table A: HLA-A*74:01H
KIADKYVR

SEQ ID NO: 1026 - protein, 8 aa, Severe acute respiratory syndrome coronavirus 2
  REGION 1..8: note = Table A: HLA-B*37:01H HLA-B*40:02H HLA-B*41:02H
ADKYVRNL

SEQ ID NO: 1027 - protein, 8 aa, Severe acute respiratory syndrome coronavirus 2
  REGION 1..8: note = Table A: HLA-A*33:03H
YVRNLQHR

SEQ ID NO: 1028 - protein, 8 aa, Severe acute respiratory syndrome coronavirus 2
  REGION 1..8: note = Table A: HLA-C*03:02H HLA-B*35:07H HLA-B*38:02H
FVNEFYAY

SEQ ID NO: 1029 - protein, 8 aa, Severe acute respiratory syndrome coronavirus 2
  REGION 1..8: note = Table A: HLA-B*08:01H HLA-C*03:02H
YAYLRKHF

SEQ ID NO: 1030 - protein, 8 aa, Severe acute respiratory syndrome coronavirus 2
  REGION 1..8: note = Table A: HLA-B*08:01H
YLRKHFSM

SEQ ID NO: 1031 - protein, 8 aa, Severe acute respiratory syndrome coronavirus 2
  REGION 1..8: note = Table A: HLA-B*44:05H HLA-B*37:01M HLA-B*07:05H
SDDAVVCF

SEQ ID NO: 1032 - protein, 8 aa, Severe acute respiratory syndrome coronavirus 2
  REGION 1..8: note = Table A: HLA-C*15:05H
STYASQGL

SEQ ID NO: 1033 - protein, 8 aa, Severe acute respiratory syndrome coronavirus 2
  REGION 1..8: note = Table A: HLA-C*03:04H HLA-C*15:05H HLA-B*51:01H HLA-B*38:02H HLA-B*54:01H
YASQGLVA

SEQ ID NO: 1034 - protein, 8 aa, Severe acute respiratory syndrome coronavirus 2
  REGION 1..8: note = Table A: HLA-C*15:05H HLA-A*02:05H HLA-A*02:03H HLA-B*52:01H HLA-B*38:02H HLA-B*15:01H HLA-B*39:01H HLA-B*13:01H HLA-B*13:02M HLA-B*49:01H
SQGLVASI

SEQ ID NO: 1035 - protein, 8 aa, Severe acute respiratory syndrome coronavirus 2
  REGION 1..8: note = Table A: HLA-B*08:01H
IKNFKSVL

SEQ ID NO: 1036 - protein, 8 aa, Severe acute respiratory syndrome coronavirus 2
  REGION 1..8: note = Table A: HLA-B*58:01H HLA-B*15:03H
KNFKSVLY

SEQ ID NO: 1037 - protein, 8 aa, Severe acute respiratory syndrome coronavirus 2
  REGION 1..8: note = Table A: HLA-C*14:03H HLA-A*29:02H
NFKSVLYY

SEQ ID NO: 1038 - protein, 8 aa, Severe acute respiratory syndrome coronavirus 2
  REGION 1..8: note = Table A: HLA-C*14:02H
LYYQNNVF

SEQ ID NO: 1039 - protein, 8 aa, Severe acute respiratory syndrome coronavirus 2
  REGION 1..8: note = Table A: HLA-C*14:02M HLA-C*14:03M
YYQNNVFM

SEQ ID NO: 1040 - protein, 8 aa, Severe acute respiratory syndrome coronavirus 2
  REGION 1..8: note = Table A: HLA-C*03:03H
NVFMSEAK

SEQ ID NO: 1041 - protein, 8 aa, Severe acute respiratory syndrome coronavirus 2
  REGION 1..8: note = Table A: HLA-B*58:02M HLA-B*57:01H HLA-B*57:03M
LTKGPHEF

SEQ ID NO: 1042 - protein, 8 aa, Severe acute respiratory syndrome coronavirus 2
  REGION 1..8: note = Table A: HLA-A*03:01H HLA-A*11:01H HLA-A*11:02H HLA-A*30:02H HLA-B*52:01H HLA-B*13:02H
SQHTMLVK

SEQ ID NO: 1043 - protein, 8 aa, Severe acute respiratory syndrome coronavirus 2
  REGION 1..8: note = Table A: HLA-C*05:01H
QGDDYVYL

SEQ ID NO: 1044 - protein, 8 aa, Severe acute respiratory syndrome coronavirus 2
  REGION 1..8: note = Table A: HLA-B*53:01H HLA-C*03:04H HLA-B*35:03H HLA-C*15:05M HLA-B*35:01H HLA-B*35:02H HLA-B*35:08H HLA-B*51:01H HLA-B*35:07H HLA-C*08:02H HLA-B*35:12H HLA-B*07:02H HLA-B*15:10H
YPDPSRIL

SEQ ID NO: 1045 - protein, 8 aa, Severe acute respiratory syndrome coronavirus 2
  REGION 1..8: note = Table A: HLA-B*55:01H HLA-B*54:01H
DPSRILGA

SEQ ID NO: 1046 - protein, 8 aa, Severe acute respiratory syndrome coronavirus 2
  REGION 1..8: note = Table A: HLA-C*04:03M HLA-A*02:07H HLA-C*08:02H HLA-C*05:01H
FVDDIVKT

SEQ ID NO: 1047 - protein, 8 aa, Severe acute respiratory syndrome coronavirus 2
  REGION 1..8: note = Table A: HLA-C*04:03H HLA-C*08:01H
MIERFVSL

SEQ ID NO: 1048 - protein, 8 aa, Severe acute respiratory syndrome coronavirus 2
  REGION 1..8: note = Table A: HLA-B*35:03H
LAIDAYPL

SEQ ID NO: 1049 - protein, 8 aa, Severe acute respiratory syndrome coronavirus 2
  REGION 1..8: note = Table A: HLA-A*03:01H HLA-A*03:02H HLA-A*11:01M HLA-A*11:02H HLA-A*36:01M HLA-C*03:03H HLA-B*27:02H HLA-A*34:02H HLA-A*23:01H
IDAYPLTK

SEQ ID NO: 1050 - protein, 8 aa, Severe acute respiratory syndrome coronavirus 2
  REGION 1..8: note = Table A: HLA-B*51:01H
DAYPLTKH

SEQ ID NO: 1051 - protein, 8 aa, Severe acute respiratory syndrome coronavirus 2
  REGION 1..8: note = Table A: HLA-B*15:03M
TKHPNQEY

SEQ ID NO: 1052 - protein, 8 aa, Severe acute respiratory syndrome coronavirus 2
  REGION 1..8: note = Table A: HLA-B*58:01H HLA-A*36:01M HLA-A*01:01H HLA-C*04:03M HLA-C*03:02H HLA-B*35:01H HLA-B*35:08H HLA-B*35:07H HLA-B*38:02H
YADVFHLY

SEQ ID NO: 1053 - protein, 8 aa, Severe acute respiratory syndrome coronavirus 2
  REGION 1..8: note = Table A: HLA-B*37:01H HLA-B*40:02H
ADVFHLYL

SEQ ID NO: 1054 - protein, 8 aa, Severe acute respiratory syndrome coronavirus 2
  REGION 1..8: note = Table A: HLA-B*38:02H
FHLYLQYI

SEQ ID NO: 1055 - protein, 8 aa, Severe acute respiratory syndrome coronavirus 2
  REGION 1..8: note = Table A: HLA-A*02:04H
YLQYIRKL

SEQ ID NO: 1056 - protein, 8 aa, Severe acute respiratory syndrome coronavirus 2
  REGION 1..8: note = Table A: HLA-B*14:02H HLA-B*14:01H
IRKLHDEL

SEQ ID NO: 1057 - protein, 8 aa, Severe acute respiratory syndrome coronavirus 2
  REGION 1..8: note = Table A: HLA-B*44:05H HLA-B*18:01H HLA-B*14:02M HLA-B*14:01H HLA-B*40:01H HLA-B*40:02H HLA-B*07:05H HLA-B*41:02H
DELTGHML

SEQ ID NO: 1058 - protein, 8 aa, Severe acute respiratory syndrome coronavirus 2
  REGION 1..8: note = Table A: HLA-B*35:01H
TGHMLDMY

SEQ ID NO: 1059 - protein, 8 aa, Severe acute respiratory syndrome coronavirus 2
  REGION 1..8: note = Table A: HLA-A*02:11H HLA-B*52:01M HLA-B*38:02H HLA-B*13:02H
HMLDMYSV

SEQ ID NO: 1060 - protein, 8 aa, Severe acute respiratory syndrome coronavirus 2
  REGION 1..8: note = Table A: HLA-B*39:06H HLA-B*40:06H HLA-B*50:01H
WEPEFYEA

SEQ ID NO: 1061 - protein, 8 aa, Severe acute respiratory syndrome coronavirus 2
  REGION 1..8: note = Table A: HLA-A*02:11H HLA-B*14:01H HLA-A*02:01H HLA-A*02:02H HLA-A*02:03M HLA-B*52:01H HLA-B*38:02H HLA-B*13:02H HLA-B*49:01H
AMYTPHTV

SEQ ID NO: 1062 - protein, 8 aa, Severe acute respiratory syndrome coronavirus 2
  REGION 1..8: note = Table A: HLA-C*14:02H HLA-C*14:03H HLA-B*08:01H HLA-C*07:01H HLA-C*07:02H HLA-B*14:02M HLA-B*14:01H HLA-A*24:02H HLA-A*24:07H HLA-B*39:01H HLA-B*41:02H HLA-B*15:10H
MYTPHTVL

SEQ ID NO: 1063 - protein, 8 aa, Severe acute respiratory syndrome coronavirus 2
  REGION 1..8: note = Table A: HLA-B*56:01H HLA-B*55:02H HLA-C*15:05H HLA-B*55:01M HLA-B*39:06M HLA-B*54:01M
TPHTVLQA

SEQ ID NO: 1064 - protein, 8 aa, Severe acute respiratory syndrome coronavirus 2
  REGION 1..8: note = Table A: HLA-B*39:06M
PHTVLQAV

SEQ ID NO: 1065 - protein, 8 aa, Severe acute respiratory syndrome coronavirus 2
  REGION 1..8: note = Table A: HLA-B*38:02H
QAVGACVL

SEQ ID NO: 1066 - protein, 8 aa, Severe acute respiratory syndrome coronavirus 2
  REGION 1..8: note = Table A: HLA-B*50:01H
YDHVISTS

SEQ ID NO: 1067 - protein, 8 aa, Severe acute respiratory syndrome coronavirus 2
  REGION 1..8: note = Table A: HLA-B*38:02H HLA-B*39:06M HLA-B*15:02H HLA-B*39:01H HLA-B*15:10H
DHVISTSH

SEQ ID NO: 1068 - protein, 8 aa, Severe acute respiratory syndrome coronavirus 2
  REGION 1..8: note = Table A: HLA-A*34:02H
HVISTSHK

SEQ ID NO: 1069 - protein, 8 aa, Severe acute respiratory syndrome coronavirus 2
  REGION 1..8: note = Table A: HLA-A*02:02H
VISTSHKL

SEQ ID NO: 1070 - protein, 8 aa, Severe acute respiratory syndrome coronavirus 2
  REGION 1..8: note = Table A: HLA-C*16:01H HLA-C*15:05H HLA-C*15:02H
STSHKLVL

SEQ ID NO: 1071 - protein, 8 aa, Severe acute respiratory syndrome coronavirus 2
  REGION 1..8: note = Table A: HLA-B*52:01H HLA-B*39:06M
SHKLVLSV

SEQ ID NO: 1072 - protein, 8 aa, Severe acute respiratory syndrome coronavirus 2
  REGION 1..8: note = Table A: HLA-C*15:05H HLA-B*14:01H HLA-B*35:02H HLA-B*38:02H
DVTDVTQL

SEQ ID NO: 1073 - protein, 8 aa, Severe acute respiratory syndrome coronavirus 2
  REGION 1..8: note = Table A: HLA-B*58:01M HLA-A*36:01H HLA-A*01:01H HLA-C*04:03H
VTDVTQLY

SEQ ID NO: 1074 - protein, 8 aa, Severe acute respiratory syndrome coronavirus 2
  REGION 1..8: note = Table A: HLA-B*40:02H
TDVTQLYL

SEQ ID NO: 1075 - protein, 8 aa, Severe acute respiratory syndrome coronavirus 2
  REGION 1..8: note = Table A: HLA-C*14:02H HLA-C*14:03M
LYLGGMSY

SEQ ID NO: 1076 - protein, 8 aa, Severe acute respiratory syndrome coronavirus 2
  REGION 1..8: note = Table A: HLA-A*26:01H HLA-A*29:02H HLA-B*38:02M
YLGGMSYY

SEQ ID NO: 1077 - protein, 8 aa, Severe acute respiratory syndrome coronavirus 2
  REGION 1..8: note = Table A: HLA-B*38:02H HLA-B*15:03H
SHKPPISF

SEQ ID NO: 1078 - protein, 8 aa, Severe acute respiratory syndrome coronavirus 2
  REGION 1..8: note = Table A: HLA-C*15:05H
KPPISFPL

SEQ ID NO: 1079 - protein, 8 aa, Severe acute respiratory syndrome coronavirus 2
  REGION 1..8: note = Table A: HLA-B*56:01H HLA-C*15:05H HLA-B*55:01H
PPISFPLC

SEQ ID NO: 1080 - protein, 8 aa, Severe acute respiratory syndrome coronavirus 2
  REGION 1..8: note = Table A: HLA-A*30:02H HLA-B*39:01H
NGQVFGLY

SEQ ID NO: 1081 - protein, 8 aa, Severe acute respiratory syndrome coronavirus 2
  REGION 1..8: note = Table A: HLA-A*11:01H HLA-A*11:02H HLA-A*36:01H
GQVFGLYK

SEQ ID NO: 1082 - protein, 8 aa, Severe acute respiratory syndrome coronavirus 2
  REGION 1..8: note = Table A: HLA-B*35:03H HLA-B*35:02H HLA-B*35:12H
TNAGDYIL

SEQ ID NO: 1083 - protein, 8 aa, Severe acute respiratory syndrome coronavirus 2
  REGION 1..8: note = Table A: HLA-B*39:06M
ERLKLFAA

SEQ ID NO: 1084 - protein, 8 aa, Severe acute respiratory syndrome coronavirus 2
  REGION 1..8: note = Table A: HLA-A*02:11H HLA-A*02:02H HLA-C*08:03H HLA-B*38:02H HLA-B*13:01H
KLFAAETL

SEQ ID NO: 1085 - protein, 8 aa, Severe acute respiratory syndrome coronavirus 2
  REGION 1..8: note = Table A: HLA-B*51:01H HLA-B*54:01H
FAAETLKA

SEQ ID NO: 1086 - protein, 8 aa, Severe acute respiratory syndrome coronavirus 2
  REGION 1..8: note = Table A: HLA-C*04:03H
ATEETFKL

SEQ ID NO: 1087 - protein, 8 aa, Severe acute respiratory syndrome coronavirus 2
  REGION 1..8: note = Table A: HLA-B*44:03M HLA-B*18:01H HLA-B*07:05H
EETFKLSY

SEQ ID NO: 1088 - protein, 8 aa, Severe acute respiratory syndrome coronavirus 2
  REGION 1..8: note = Table A: HLA-B*51:01H HLA-B*52:01M HLA-B*49:01H
LSYGIATV

SEQ ID NO: 1089 - protein, 8 aa, Severe acute respiratory syndrome coronavirus 2
  REGION 1..8: note = Table A: HLA-A*33:03H
SYGIATVR

SEQ ID NO: 1090 - protein, 8 aa, Severe acute respiratory syndrome coronavirus 2
  REGION 1..8: note = Table A: HLA-B*14:01H HLA-A*02:03M HLA-B*38:02H
GIATVREV

SEQ ID NO: 1091 - protein, 8 aa, Severe acute respiratory syndrome coronavirus 2
  REGION 1..8: note = Table A: HLA-C*16:01H HLA-B*08:01M HLA-C*03:03H HLA-C*03:02H HLA-C*03:04H HLA-C*15:05H HLA-B*14:02M HLA-C*08:01H HLA-B*35:12H HLA-B*07:02H HLA-B*41:02H
IATVREVL

SEQ ID NO: 1092 - protein, 8 aa, Severe acute respiratory syndrome coronavirus 2
  REGION 1..8: note = Table A: HLA-C*04:03H HLA-C*15:02H HLA-C*17:01H HLA-C*08:02H HLA-C*05:01H
LSDRELHL

SEQ ID NO: 1093 - protein, 8 aa, Severe acute respiratory syndrome coronavirus 2
  REGION 1..8: note = Table A: HLA-B*38:02H
ELHLSWEV

SEQ ID NO: 1094 - protein, 8 aa, Severe acute respiratory syndrome coronavirus 2
  REGION 1..8: note = Table A: HLA-B*08:01H HLA-A*30:01H HLA-B*07:04H
VGKPRPPL

SEQ ID NO: 1095 - protein, 8 aa, Severe acute respiratory syndrome coronavirus 2
  REGION 1..8: note = Table A: HLA-A*74:01H
KPRPPLNR

SEQ ID NO: 1096 - protein, 8 aa, Severe acute respiratory syndrome coronavirus 2
  REGION 1..8: note = Table A: HLA-B*15:03H
RNYVFTGY

SEQ ID NO: 1097 - protein, 8 aa, Severe acute respiratory syndrome coronavirus 2
  REGION 1..8: note = Table A: HLA-A*02:11M HLA-A*68:02H HLA-B*38:02H HLA-B*54:01H HLA-B*13:02H HLA-A*66:01H
YVFTGYRV

SEQ ID NO: 1098 - protein, 8 aa, Severe acute respiratory syndrome coronavirus 2
  REGION 1..8: note = Table A: HLA-A*34:02H
FTGYRVTK

SEQ ID NO: 1099 - protein, 8 aa, Severe acute respiratory syndrome coronavirus 2
  REGION 1..8: note = Table A: HLA-B*15:03M HLA-B*39:01H
SKVQIGEY

SEQ ID NO: 1100 - protein, 8 aa, Severe acute respiratory syndrome coronavirus 2
  REGION 1..8: note = Table A: HLA-B*38:02H HLA-B*15:01H HLA-B*13:01H
VQIGEYTF

SEQ ID NO: 1101 - protein, 8 aa, Severe acute respiratory syndrome coronavirus 2
  REGION 1..8: note = Table A: HLA-A*36:01H
IGEYTFEK

SEQ ID NO: 1102 - protein, 8 aa, Severe acute respiratory syndrome coronavirus 2
  REGION 1..8: note = Table A: HLA-C*07:01H HLA-B*35:01H HLA-B*38:02H HLA-B*39:01H
DYGDAVVY

SEQ ID NO: 1103 - protein, 8 aa, Severe acute respiratory syndrome coronavirus 2
  REGION 1..8: note = Table A: HLA-A*33:03H HLA-A*68:01H
YGDAVVYR

SEQ ID NO: 1104 - protein, 8 aa, Severe acute respiratory syndrome coronavirus 2
  REGION 1..8: note = Table A: HLA-A*30:02H HLA-B*15:03H
VYRGTTTY

SEQ ID NO: 1105 - protein, 8 aa, Severe acute respiratory syndrome coronavirus 2
  REGION 1..8: note = Table A: HLA-B*58:01H
RGTTTYKL

SEQ ID NO: 1106 - protein, 8 aa, Severe acute respiratory syndrome coronavirus 2
  REGION 1..8: note = Table A: HLA-B*15:03H
YKLNVGDY

SEQ ID NO: 1107 - protein, 8 aa, Severe acute respiratory syndrome coronavirus 2
  REGION 1..8: note = Table A: HLA-B*35:03H HLA-B*35:02H HLA-C*08:01H
NVGDYFVL

SEQ ID NO: 1108 - protein, 8 aa, Severe acute respiratory syndrome coronavirus 2
  REGION 1..8: note = Table A: HLA-A*02:11M HLA-B*38:02H
FVLTSHTV

SEQ ID NO: 1109 - protein, 8 aa, Severe acute respiratory syndrome coronavirus 2
  REGION 1..8: note = Table A: HLA-B*08:01H HLA-B*14:02H
VLTSHTVM

SEQ ID NO: 1110 - protein, 8 aa, Severe acute respiratory syndrome coronavirus 2
  REGION 1..8: note = Table A: HLA-C*03:04H HLA-C*15:05H HLA-C*08:03H
TSHTVMPL

SEQ ID NO: 1111 - protein, 8 aa, Severe acute respiratory syndrome coronavirus 2
  REGION 1..8: note = Table A: HLA-B*39:06H
SHTVMPLS

SEQ ID NO: 1112 - protein, 8 aa, Severe acute respiratory syndrome coronavirus 2
  REGION 1..8: note = Table A: HLA-B*42:01H HLA-B*53:01H HLA-B*35:03M HLA-C*15:05M HLA-B*55:01H HLA-B*35:01M HLA-B*35:02H HLA-B*51:01M HLA-B*35:07M HLA-B*35:12H HLA-B*38:02H HLA-B*54:01H HLA-B*07:02H HLA-B*15:02H HLA-B*07:05M
MPLSAPTL

SEQ ID NO: 1113 - protein, 8 aa, Severe acute respiratory syndrome coronavirus 2
  REGION 1..8: note = Table A: HLA-B*15:02H
YVRITGLY

SEQ ID NO: 1114 - protein, 8 aa, Severe acute respiratory syndrome coronavirus 2
  REGION 1..8: note = Table A: HLA-B*58:01H HLA-C*15:05H HLA-C*15:02H HLA-B*57:03H
ITGLYPTL

SEQ ID NO: 1115 - protein, 8 aa, Severe acute respiratory syndrome coronavirus 2
  REGION 1..8: note = Table A: HLA-B*52:01H HLA-B*13:02H
GLYPTLNI

SEQ ID NO: 1116 - protein, 8 aa, Severe acute respiratory syndrome coronavirus 2
  REGION 1..8: note = Table A: HLA-B*18:01H HLA-B*07:05H HLA-B*50:01H
DEFSSNVA

SEQ ID NO: 1117 - protein, 8 aa, Severe acute respiratory syndrome coronavirus 2
  REGION 1..8: note = Table A: HLA-A*30:02H HLA-B*15:01H
FSSNVANY

SEQ ID NO: 1118 - protein, 8 aa, Severe acute respiratory syndrome coronavirus 2
  REGION 1..8: note = Table A: HLA-B*08:01H
ANYQKVGM

SEQ ID NO: 1119 - protein, 8 aa, Severe acute respiratory syndrome coronavirus 2
  REGION 1..8: note = Table A: HLA-A*03:01H HLA-A*11:01H HLA-A*11:02H HLA-A*30:01H HLA-A*34:02H
YQKVGMQK

SEQ ID NO: 1120 - protein, 8 aa, Severe acute respiratory syndrome coronavirus 2
  REGION 1..8: note = Table A: HLA-B*15:03H
QKVGMQKY

SEQ ID NO: 1121 - protein, 8 aa, Severe acute respiratory syndrome coronavirus 2
  REGION 1..8: note = Table A: HLA-B*39:01H
LQGPPGTG

SEQ ID NO: 1122 - protein, 8 aa, Severe acute respiratory syndrome coronavirus 2
  REGION 1..8: note = Table A: HLA-B*58:02M HLA-B*57:03H
KSHFAIGL

SEQ ID NO: 1123 - protein, 8 aa, Severe acute respiratory syndrome coronavirus 2
  REGION 1..8: note = Table A: HLA-B*39:06H
SHFAIGLA

SEQ ID NO: 1124 - protein, 8 aa, Severe acute respiratory syndrome coronavirus 2
  REGION 1..8: note = Table A: HLA-C*14:02H HLA-C*14:03H
HFAIGLAL

SEQ ID NO: 1125 - protein, 8 aa, Severe acute respiratory syndrome coronavirus 2
  REGION 1..8: note = Table A: HLA-C*03:02H HLA-B*38:02H
FAIGLALY

SEQ ID NO: 1126 - protein, 8 aa, Severe acute respiratory syndrome coronavirus 2
  REGION 1..8: note = Table A: HLA-B*54:01H
LALYYPSA

SEQ ID NO: 1127 - protein, 8 aa, Severe acute respiratory syndrome coronavirus 2
  REGION 1..8: note = Table A: HLA-A*74:01M HLA-A*03:01H HLA-A*11:02H HLA-A*33:03H HLA-A*34:01H HLA-A*31:01H HLA-A*66:01H
ALYYPSAR

SEQ ID NO: 1128 - protein, 8 aa, Severe acute respiratory syndrome coronavirus 2
  REGION 1..8: note = Table A: HLA-B*53:01H HLA-B*35:01M HLA-B*35:08H HLA-B*35:07H HLA-B*38:02H HLA-B*15:02H
YPSARIVY

SEQ ID NO: 1129 - protein, 8 aa, Severe acute respiratory syndrome coronavirus 2
  REGION 1..8: note = Table A: HLA-B*39:06H HLA-B*54:01H
SARIVYTA

SEQ ID NO: 1130 - protein, 8 aa, Severe acute respiratory syndrome coronavirus 2
  REGION 1..8: note = Table A: HLA-B*39:06H
ARIVYTAC

SEQ ID NO: 1131 - protein, 8 aa, Severe acute respiratory syndrome coronavirus 2
  REGION 1..8: note = Table A: HLA-B*14:01H HLA-B*38:01M HLA-B*38:02M HLA-B*39:06H HLA-B*39:01H HLA-B*15:10M
SHAAVDAL

SEQ ID NO: 1132 - protein, 8 aa, Severe acute respiratory syndrome coronavirus 2
  REGION 1..8: note = Table A: HLA-B*35:02H
HAAVDALC

SEQ ID NO: 1133 - protein, 8 aa, Severe acute respiratory syndrome coronavirus 2
  REGION 1..8: note = Table A: HLA-B*35:02H
DALCEKAL

SEQ ID NO: 1134 - protein, 8 aa, Severe acute respiratory syndrome coronavirus 2
  REGION 1..8: note = Table A: HLA-B*39:06H
SRIIPARA

SEQ ID NO: 1135 - protein, 8 aa, Severe acute respiratory syndrome coronavirus 2
  REGION 1..8: note = Table A: HLA-A*74:01H
RIIPARAR

SEQ ID NO: 1136 - protein, 8 aa, Severe acute respiratory syndrome coronavirus 2
  REGION 1..8: note = Table A: HLA-C*14:02H
KFKVNSTL

SEQ ID NO: 1137 - protein, 8 aa, Severe acute respiratory syndrome coronavirus 2
  REGION 1..8: note = Table A: HLA-B*58:01H HLA-B*57:03H
STLEQYVF

SEQ ID NO: 1138 - protein, 8 aa, Severe acute respiratory syndrome coronavirus 2
  REGION 1..8: note = Table A: HLA-B*51:01H HLA-B*52:01H HLA-B*38:02H HLA-B*39:06M HLA-B*13:02H HLA-B*49:01H
EQYVFCTV

SEQ ID NO: 1139 - protein, 8 aa, Severe acute respiratory syndrome coronavirus 2
  REGION 1..8: note = Table A: HLA-C*14:02H HLA-C*14:03H
VFCTVNAL

SEQ ID NO: 1140 - protein, 8 aa, Severe acute respiratory syndrome coronavirus 2
  REGION 1..8: note = Table A: HLA-A*68:02H HLA-B*51:01H HLA-C*08:01M HLA-B*38:02H
DIVVFDEI

SEQ ID NO: 1141 - protein, 8 aa, Severe acute respiratory syndrome coronavirus 2
  REGION 1..8: note = Table A: HLA-B*14:01H HLA-A*02:02H
SMATNYDL

SEQ ID NO: 1142 - protein, 8 aa, Severe acute respiratory syndrome coronavirus 2
  REGION 1..8: note = Table A: HLA-A*02:01H
YDLSVVNA

SEQ ID NO: 1143 - protein, 8 aa, Severe acute respiratory syndrome coronavirus 2
  REGION 1..8: note = Table A: HLA-A*33:01M HLA-A*33:03H HLA-A*68:01H HLA-A*34:01H
DLSVVNAR

SEQ ID NO: 1144 - protein, 8 aa, Severe acute respiratory syndrome coronavirus 2
  REGION 1..8: note = Table A: HLA-A*34:01M HLA-A*66:01H
SVVNARLR

SEQ ID NO: 1145 - protein, 8 aa, Severe acute respiratory syndrome coronavirus 2
  REGION 1..8: note = Table A: HLA-B*14:02H
LRAKHYVY

SEQ ID NO: 1146 - protein, 8 aa, Severe acute respiratory syndrome coronavirus 2
  REGION 1..8: note = Table A: HLA-B*58:02H
RAKHYVYI

SEQ ID NO: 1147 - protein, 8 aa, Severe acute respiratory syndrome coronavirus 2
  REGION 1..8: note = Table A: HLA-A*29:01H HLA-C*04:03M HLA-C*03:03H HLA-A*02:11H HLA-C*03:04H HLA-C*15:05H HLA-C*15:02H HLA-A*02:04H HLA-A*02:05H HLA-A*02:02H HLA-A*02:03H HLA-C*17:01M HLA-C*08:01H HLA-C*08:03H HLA-B*39:01H HLA-C*05:01H
  REGION 1..8: note = CONT. FROM ABOVE: HLA-C*07:04H
YIGDPAQL

SEQ ID NO: 1148 - protein, 8 aa, Severe acute respiratory syndrome coronavirus 2
  REGION 1..8: note = Table A: HLA-A*33:03H HLA-A*66:01H
PAQLPAPR

SEQ ID NO: 1149 - protein, 8 aa, Severe acute respiratory syndrome coronavirus 2
  REGION 1..8: note = Table A: HLA-B*08:01M HLA-C*15:05H HLA-B*07:02M HLA-B*07:04H
LPAPRTLL

SEQ ID NO: 1150 - protein, 8 aa, Severe acute respiratory syndrome coronavirus 2
  REGION 1..8: note = Table A: HLA-A*33:03M
EYFNSVCR

SEQ ID NO: 1151 - protein, 8 aa, Severe acute respiratory syndrome coronavirus 2
  REGION 1..8: note = Table A: HLA-B*58:01H HLA-B*58:02H HLA-B*57:03M
KTIGPDMF

SEQ ID NO: 1152 - protein, 8 aa, Severe acute respiratory syndrome coronavirus 2
  REGION 1..8: note = Table A: HLA-C*03:04H HLA-B*35:03H HLA-C*15:05H HLA-C*15:02H HLA-A*02:05H HLA-B*35:02H HLA-C*17:01H HLA-C*08:01H HLA-B*35:12H
TIGPDMFL

SEQ ID NO: 1153 - protein, 8 aa, Severe acute respiratory syndrome coronavirus 2
  REGION 1..8: note = Table A: HLA-A*33:01H HLA-A*34:01H
DMFLGTCR

SEQ ID NO: 1154 - protein, 8 aa, Severe acute respiratory syndrome coronavirus 2
  REGION 1..8: note = Table A: HLA-C*04:03M HLA-C*15:05H HLA-C*08:02M HLA-C*05:01H
IVDTVSAL

SEQ ID NO: 1155 - protein, 8 aa, Severe acute respiratory syndrome coronavirus 2
  REGION 1..8: note = Table A: HLA-B*35:01H HLA-B*38:02H HLA-B*15:02H HLA-B*07:05H
DTVSALVY

SEQ ID NO: 1156 - protein, 8 aa, Severe acute respiratory syndrome coronavirus 2
  REGION 1..8: note = Table A: HLA-A*11:02H HLA-A*34:02H
LVYDNKLK

SEQ ID NO: 1157 - protein, 8 aa, Severe acute respiratory syndrome coronavirus 2
  REGION 1..8: note = Table A: HLA-B*37:01H
KDKSAQCF

SEQ ID NO: 1158 - protein, 8 aa, Severe acute respiratory syndrome coronavirus 2
  REGION 1..8: note = Table A: HLA-B*38:01H HLA-B*38:02M HLA-B*39:01M HLA-B*15:10H
THDVSSAI

SEQ ID NO: 1159 - protein, 8 aa, Severe acute respiratory syndrome coronavirus 2
  REGION 1..8: note = Table A: HLA-A*33:01H HLA-A*33:03H HLA-A*68:01M HLA-A*34:01M HLA-A*66:01H
DVSSAINR

SEQ ID NO: 1160 - protein, 8 aa, Severe acute respiratory syndrome coronavirus 2
  REGION 1..8: note = Table A: HLA-B*58:02H HLA-C*16:01H HLA-B*51:01H HLA-B*07:04H
SAINRPQI

SEQ ID NO: 1161 - protein, 8 aa, Severe acute respiratory syndrome coronavirus 2
  REGION 1..8: note = Table A: HLA-A*74:01H
VVREFLTR

SEQ ID NO: 1162 - protein, 8 aa, Severe acute respiratory syndrome coronavirus 2
  REGION 1..8: note = Table A: HLA-B*58:01M HLA-B*57:01H HLA-B*53:01H HLA-B*15:13H HLA-B*38:02H HLA-A*32:01H HLA-B*57:03H HLA-B*13:01H
FLTRNPAW

SEQ ID NO: 1163 - protein, 8 aa, Severe acute respiratory syndrome coronavirus 2
  REGION 1..8: note = Table A: HLA-B*07:04H
NPAWRKAV

SEQ ID NO: 1164 - protein, 8 aa, Severe acute respiratory syndrome coronavirus 2
  REGION 1..8: note = Table A: HLA-B*35:07H HLA-B*07:04H
PAWRKAVF

SEQ ID NO: 1165 - protein, 8 aa, Severe acute respiratory syndrome coronavirus 2
  REGION 1..8: note = Table A: HLA-B*55:02H HLA-B*55:01H
SPYNSQNA

SEQ ID NO: 1166 - protein, 8 aa, Severe acute respiratory syndrome coronavirus 2
  REGION 1..8: note = Table A: HLA-C*03:04H
NAVASKIL

SEQ ID NO: 1167 - protein, 8 aa, Severe acute respiratory syndrome coronavirus 2
  REGION 1..8: note = Table A: HLA-C*15:05M HLA-C*15:02M HLA-C*17:01H HLA-B*07:05H HLA-C*07:04H
VASKILGL

SEQ ID NO: 1168 - protein, 8 aa, Severe acute respiratory syndrome coronavirus 2
  REGION 1..8: note = Table A: HLA-A*02:03H
ILGLPTQT

SEQ ID NO: 1169 - protein, 8 aa, Severe acute respiratory syndrome coronavirus 2
  REGION 1..8: note = Table A: HLA-B*51:01H HLA-B*52:01H
LGLPTQTV

SEQ ID NO: 1170 - protein, 8 aa, Severe acute respiratory syndrome coronavirus 2
  REGION 1..8: note = Table A: HLA-B*08:01H HLA-B*51:01H HLA-B*52:01H
VAITRAKV

SEQ ID NO: 1171 - protein, 8 aa, Severe acute respiratory syndrome coronavirus 2
  REGION 1..8: note = Table A: HLA-B*14:01H
TRAKVGIL

SEQ ID NO: 1172 - protein, 8 aa, Severe acute respiratory syndrome coronavirus 2
  REGION 1..8: note = Table A: HLA-A*36:01H
IMSDRDLY

SEQ ID NO: 1173 - protein, 8 aa, Severe acute respiratory syndrome coronavirus 2
  REGION 1..8: note = Table A: HLA-B*08:01H HLA-B*38:02H HLA-B*15:02H
DLYDKLQF

SEQ ID NO: 1174 - protein, 8 aa, Severe acute respiratory syndrome coronavirus 2
  REGION 1..8: note = Table A: HLA-B*14:02H
DKLQFTSL

SEQ ID NO: 1175 - protein, 8 aa, Severe acute respiratory syndrome coronavirus 2
  REGION 1..8: note = Table A: HLA-B*52:01M HLA-B*38:02H HLA-B*13:02M
LQFTSLEI

SEQ ID NO: 1176 - protein, 8 aa, Severe acute respiratory syndrome coronavirus 2
  REGION 1..8: note = Table A: HLA-B*44:05M HLA-B*37:01M HLA-B*07:05H HLA-B*41:02H
AENVTGLF

SEQ ID NO: 1177 - protein, 8 aa, Severe acute respiratory syndrome coronavirus 2
  REGION 1..8: note = Table A: HLA-A*34:02H
ENVTGLFK

SEQ ID NO: 1178 - protein, 8 aa, Severe acute respiratory syndrome coronavirus 2
  REGION 1..8: note = Table A: HLA-C*15:05H
PTQAPTHL

SEQ ID NO: 1179 - protein, 8 aa, Severe acute respiratory syndrome coronavirus 2
  REGION 1..8: note = Table A: HLA-B*51:01M HLA-B*52:01H
QAPTHLSV

SEQ ID NO: 1180 - protein, 8 aa, Severe acute respiratory syndrome coronavirus 2
  REGION 1..8: note = Table A: HLA-B*38:02H
HLSVDTKF

SEQ ID NO: 1181 - protein, 8 aa, Severe acute respiratory syndrome coronavirus 2
  REGION 1..8: note = Table A: HLA-B*48:01H
TKFKTEGL

SEQ ID NO: 1182 - protein, 8 aa, Severe acute respiratory syndrome coronavirus 2
  REGION 1..8: note = Table A: HLA-A*11:01H HLA-A*11:02H HLA-A*36:01H
VDIPGIPK

SEQ ID NO: 1183 - protein, 8 aa, Severe acute respiratory syndrome coronavirus 2
  REGION 1..8: note = Table A: HLA-C*15:05H
IPGIPKDM

SEQ ID NO: 1184 - protein, 8 aa, Severe acute respiratory syndrome coronavirus 2
  REGION 1..8: note = Table A: HLA-A*33:03H
IPKDMTYR

SEQ ID NO: 1185 - protein, 8 aa, Severe acute respiratory syndrome coronavirus 2
  REGION 1..8: note = Table A: HLA-B*58:01H HLA-B*58:02H HLA-C*15:05H HLA-B*57:03H
ISMMGFKM

SEQ ID NO: 1186 - protein, 8 aa, Severe acute respiratory syndrome coronavirus 2
  REGION 1..8: note = Table A: HLA-B*15:02H
MNYQVNGY

SEQ ID NO: 1187 - protein, 8 aa, Severe acute respiratory syndrome coronavirus 2
  REGION 1..8: note = Table A: HLA-B*51:01H HLA-B*52:01H
NGYPNMFI

SEQ ID NO: 1188 - protein, 8 aa, Severe acute respiratory syndrome coronavirus 2
  REGION 1..8: note = Table A: HLA-A*33:03H HLA-A*34:01H HLA-A*66:01H
YPNMFITR

SEQ ID NO: 1189 - protein, 8 aa, Severe acute respiratory syndrome coronavirus 2
  REGION 1..8: note = Table A: HLA-B*49:01H
REEAIRHV

SEQ ID NO: 1190 - protein, 8 aa, Severe acute respiratory syndrome coronavirus 2
  REGION 1..8: note = Table A: HLA-A*02:11H HLA-B*13:02H
RAWIGFDV

SEQ ID NO: 1191 - protein, 8 aa, Severe acute respiratory syndrome coronavirus 2
  REGION 1..8: note = Table A: HLA-B*37:01H HLA-B*40:01M HLA-B*40:02H HLA-B*41:02H
REAVGTNL

SEQ ID NO: 1192 - protein, 8 aa, Severe acute respiratory syndrome coronavirus 2
  REGION 1..8: note = Table A: HLA-C*15:05H
AVGTNLPL

SEQ ID NO: 1193 - protein, 8 aa, Severe acute respiratory syndrome coronavirus 2
  REGION 1..8: note = Table A: HLA-C*15:05M HLA-C*15:02M HLA-C*07:04H
GTNLPLQL

SEQ ID NO: 1194 - protein, 8 aa, Severe acute respiratory syndrome coronavirus 2
  REGION 1..8: note = Table A: HLA-A*02:01H HLA-A*02:03H
QLGFSTGV

SEQ ID NO: 1195 - protein, 8 aa, Severe acute respiratory syndrome coronavirus 2
  REGION 1..8: note = Table A: HLA-B*39:06H
TGVNLVAV

SEQ ID NO: 1196 - protein, 8 aa, Severe acute respiratory syndrome coronavirus 2
  REGION 1..8: note = Table A: HLA-B*38:02H HLA-B*15:01H HLA-B*15:02H HLA-B*39:01H
LVAVPTGY

SEQ ID NO: 1197 - protein, 8 aa, Severe acute respiratory syndrome coronavirus 2
  REGION 1..8: note = Table A: HLA-B*51:01H
VAVPTGYV

SEQ ID NO: 1198 - protein, 8 aa, Severe acute respiratory syndrome coronavirus 2
  REGION 1..8: note = Table A: HLA-B*39:06H HLA-B*50:01H
TDFSRVSA

SEQ ID NO: 1199 - protein, 8 aa, Severe acute respiratory syndrome coronavirus 2
  REGION 1..8: note = Table A: HLA-C*15:05H HLA-B*07:05H
KPPPGDQF

SEQ ID NO: 1200 - protein, 8 aa, Severe acute respiratory syndrome coronavirus 2
  REGION 1..8: note = Table A: HLA-A*36:01H HLA-B*38:02H HLA-B*15:03M
KHLIPLMY

SEQ ID NO: 1201 - protein, 8 aa, Severe acute respiratory syndrome coronavirus 2
  REGION 1..8: note = Table A: HLA-A*11:02H
HLIPLMYK

SEQ ID NO: 1202 - protein, 8 aa, Severe acute respiratory syndrome coronavirus 2
  REGION 1..8: note = Table A: HLA-A*02:11H HLA-B*53:01M HLA-C*15:05H HLA-B*51:01H HLA-B*35:07H HLA-B*52:01H HLA-C*08:01H HLA-B*54:01M HLA-B*07:05H
LPWNVVRI

SEQ ID NO: 1203 - protein, 8 aa, Severe acute respiratory syndrome coronavirus 2
  REGION 1..8: note = Table A: HLA-B*14:01H
VRIKIVQM

SEQ ID NO: 1204 - protein, 8 aa, Severe acute respiratory syndrome coronavirus 2
  REGION 1..8: note = Table A: HLA-B*08:01H HLA-B*07:04H
RIKIVQML

SEQ ID NO: 1205 - protein, 8 aa, Severe acute respiratory syndrome coronavirus 2
  REGION 1..8: note = Table A: HLA-B*14:01H HLA-B*15:01H HLA-B*39:01H
VQMLSDTL

SEQ ID NO: 1206 - protein, 8 aa, Severe acute respiratory syndrome coronavirus 2
  REGION 1..8: note = Table A: HLA-C*04:03H HLA-C*03:04H HLA-C*08:02H
LSDTLKNL

SEQ ID NO: 1207 - protein, 8 aa, Severe acute respiratory syndrome coronavirus 2
  REGION 1..8: note = Table A: HLA-C*04:03H HLA-C*15:02H HLA-C*05:01M
LSDRVVFV

SEQ ID NO: 1208 - protein, 8 aa, Severe acute respiratory syndrome coronavirus 2
  REGION 1..8: note = Table A: HLA-B*37:01H HLA-B*40:02H HLA-B*41:02M
SDRVVFVL

SEQ ID NO: 1209 - protein, 8 aa, Severe acute respiratory syndrome coronavirus 2
  REGION 1..8: note = Table A: HLA-B*38:02H
DRVVFVLW

SEQ ID NO: 1210 - protein, 8 aa, Severe acute respiratory syndrome coronavirus 2
  REGION 1..8: note = Table A: HLA-B*46:01H
VVFVLWAH

SEQ ID NO: 1211 - protein, 8 aa, Severe acute respiratory syndrome coronavirus 2
  REGION 1..8: note = Table A: HLA-C*03:04H HLA-C*08:01H
LWAHGFEL

SEQ ID NO: 1212 - protein, 8 aa, Severe acute respiratory syndrome coronavirus 2
  REGION 1..8: note = Table A: HLA-B*46:01H HLA-B*18:01H HLA-C*03:02H HLA-C*15:05H HLA-B*51:01H HLA-B*52:01M HLA-B*38:02H HLA-B*39:06H HLA-B*15:02M HLA-B*07:05H
HGFELTSM

SEQ ID NO: 1213 - protein, 8 aa, Severe acute respiratory syndrome coronavirus 2
  REGION 1..8: note = Table A: HLA-B*44:03H HLA-B*18:01M HLA-C*07:01H HLA-B*07:05H
FELTSMKY

SEQ ID NO: 1214 - protein, 8 aa, Severe acute respiratory syndrome coronavirus 2
  REGION 1..8: note = Table A: HLA-A*11:02H
TSMKYFVK

SEQ ID NO: 1215 - protein, 8 aa, Severe acute respiratory syndrome coronavirus 2
  REGION 1..8: note = Table A: HLA-B*52:01H
SMKYFVKI

SEQ ID NO: 1216 - protein, 8 aa, Severe acute respiratory syndrome coronavirus 2
  REGION 1..8: note = Table A: HLA-A*33:03H HLA-A*34:01H HLA-A*66:01H
FVKIGPER

SEQ ID NO: 1217 - protein, 8 aa, Severe acute respiratory syndrome coronavirus 2
  REGION 1..8: note = Table A: HLA-B*58:01H HLA-B*35:01H HLA-B*39:01H
FSTASDTY

SEQ ID NO: 1218 - protein, 8 aa, Severe acute respiratory syndrome coronavirus 2
  REGION 1..8: note = Table A: HLA-B*58:01H
ASDTYACW

SEQ ID NO: 1219 - protein, 8 aa, Severe acute respiratory syndrome coronavirus 2
  REGION 1..8: note = Table A: HLA-B*38:02H
HHSIGFDY

SEQ ID NO: 1220 - protein, 8 aa, Severe acute respiratory syndrome coronavirus 2
  REGION 1..8: note = Table A: HLA-B*37:01H
FDYVYNPF

SEQ ID NO: 1221 - protein, 8 aa, Severe acute respiratory syndrome coronavirus 2
  REGION 1..8: note = Table A: HLA-A*02:11H HLA-B*51:01H
YVYNPFMI

SEQ ID NO: 1222 - protein, 8 aa, Severe acute respiratory syndrome coronavirus 2
  REGION 1..8: note = Table A: HLA-B*38:02H
FMIDVQQW

SEQ ID NO: 1223 - protein, 8 aa, Severe acute respiratory syndrome coronavirus 2
  REGION 1..8: note = Table A: HLA-B*37:01H
IDVQQWGF

SEQ ID NO: 1224 - protein, 8 aa, Severe acute respiratory syndrome coronavirus 2
  REGION 1..8: note = Table A: HLA-A*30:02H HLA-B*15:01H HLA-B*39:01H
LQSNHDLY

SEQ ID NO: 1225 - protein, 8 aa, Severe acute respiratory syndrome coronavirus 2
  REGION 1..8: note = Table A: HLA-B*39:06M
VHGNAHVA

SEQ ID NO: 1226 - protein, 8 aa, Severe acute respiratory syndrome coronavirus 2
  REGION 1..8: note = Table A: HLA-B*39:06H
AHVASCDA

SEQ ID NO: 1227 - protein, 8 aa, Severe acute respiratory syndrome coronavirus 2
  REGION 1..8: note = Table A: HLA-B*08:01H HLA-C*15:05H HLA-B*14:02H HLA-B*14:01H HLA-B*35:02H HLA-B*51:01M HLA-B*35:12H HLA-B*38:02H HLA-B*15:02H HLA-B*07:05H
DAIMTRCL

SEQ ID NO: 1228 - protein, 8 aa, Severe acute respiratory syndrome coronavirus 2
  REGION 1..8: note = Table A: HLA-A*11:02H
AVHECFVK

SEQ ID NO: 1229 - protein, 8 aa, Severe acute respiratory syndrome coronavirus 2
  REGION 1..8: note = Table A: HLA-B*49:01H
HECFVKRV

SEQ ID NO: 1230 - protein, 8 aa, Severe acute respiratory syndrome coronavirus 2
  REGION 1..8: note = Table A: HLA-A*36:01M
RVDWTIEY

SEQ ID NO: 1231 - protein, 8 aa, Severe acute respiratory syndrome coronavirus 2
  REGION 1..8: note = Table A: HLA-B*42:01H HLA-B*08:01H HLA-C*03:03H HLA-B*53:01H HLA-C*03:02H HLA-C*03:04H HLA-B*35:03H HLA-C*15:05H HLA-B*14:02H HLA-B*14:01H HLA-A*34:01H HLA-B*35:01H HLA-B*35:02H HLA-B*35:08M HLA-B*51:01M HLA-B*35:07M
  REGION 1..8: note = CONT. FROM ABOVE: HLA-C*08:01M HLA-B*35:12H HLA-B*38:01H HLA- B*38:02M HLA-B*40:01H HLA-B*54:01H HLA-B*07:02H HLA-B*15:02H HLA-B*39:01M HLA-B*07:05M HLA-B*15:10H
YPIIGDEL

SEQ ID NO: 1232 - protein, 8 aa, Severe acute respiratory syndrome coronavirus 2
  REGION 1..8: note = Table A: HLA-C*15:02H
IIGDELKI

SEQ ID NO: 1233 - protein, 8 aa, Severe acute respiratory syndrome coronavirus 2
  REGION 1..8: note = Table A: HLA-B*45:01H HLA-B*18:01H HLA-B*39:06M HLA-B*40:06H HLA-B*54:01H HLA-B*07:05M HLA-B*50:01H
DELKINAA

SEQ ID NO: 1234 - protein, 8 aa, Severe acute respiratory syndrome coronavirus 2
  REGION 1..8: note = Table A: HLA-B*15:03H
RKVQHMVV

SEQ ID NO: 1235 - protein, 8 aa, Severe acute respiratory syndrome coronavirus 2
  REGION 1..8: note = Table A: HLA-A*03:02H HLA-A*11:01H HLA-A*11:02H HLA-A*30:02H
KVQHMVVK

SEQ ID NO: 1236 - protein, 8 aa, Severe acute respiratory syndrome coronavirus 2
  REGION 1..8: note = Table A: HLA-A*02:05H HLA-B*52:01M HLA-B*38:02H HLA-B*39:06H HLA-B*15:01M HLA-B*13:02H
VQHMVVKA

SEQ ID NO: 1237 - protein, 8 aa, Severe acute respiratory syndrome coronavirus 2
  REGION 1..8: note = Table A: HLA-B*45:01H HLA-B*39:06H HLA-B*15:10H HLA-B*50:01H
QHMVVKAA

SEQ ID NO: 1238 - protein, 8 aa, Severe acute respiratory syndrome coronavirus 2
  REGION 1..8: note = Table A: HLA-B*08:01M HLA-B*14:02H HLA-B*14:01H
HMVVKAAL

SEQ ID NO: 1239 - protein, 8 aa, Severe acute respiratory syndrome coronavirus 2
  REGION 1..8: note = Table A: HLA-A*68:02H HLA-C*15:05H HLA-B*38:02H
MVVKAALL

SEQ ID NO: 1240 - protein, 8 aa, Severe acute respiratory syndrome coronavirus 2
  REGION 1..8: note = Table A: HLA-C*04:03M HLA-C*03:02H HLA-C*15:05H HLA-C*08:01H HLA-C*08:02H HLA-B*35:12H HLA-C*05:01H
LADKFPVL

SEQ ID NO: 1241 - protein, 8 aa, Severe acute respiratory syndrome coronavirus 2
  REGION 1..8: note = Table A: HLA-B*45:01H HLA-B*40:02H HLA-B*40:06H
HDIGNPKA

SEQ ID NO: 1242 - protein, 8 aa, Severe acute respiratory syndrome coronavirus 2
  REGION 1..8: note = Table A: HLA-B*53:01H
VPQADVEW

SEQ ID NO: 1243 - protein, 8 aa, Severe acute respiratory syndrome coronavirus 2
  REGION 1..8: note = Table A: HLA-C*04:03M HLA-B*35:02H HLA-B*35:08H HLA-B*35:12H HLA-C*05:01H
QADVEWKF

SEQ ID NO: 1244 - protein, 8 aa, Severe acute respiratory syndrome coronavirus 2
  REGION 1..8: note = Table A: HLA-B*40:06M HLA-B*50:01H
VEWKFYDA

SEQ ID NO: 1245 - protein, 8 aa, Severe acute respiratory syndrome coronavirus 2
  REGION 1..8: note = Table A: HLA-A*02:11H HLA-C*15:05H HLA-B*57:03H
KAYKIEEL

SEQ ID NO: 1246 - protein, 8 aa, Severe acute respiratory syndrome coronavirus 2
  REGION 1..8: note = Table A: HLA-B*15:03H
YKIEELFY

SEQ ID NO: 1247 - protein, 8 aa, Severe acute respiratory syndrome coronavirus 2
  REGION 1..8: note = Table A: HLA-B*18:01M HLA-B*07:05M
IEELFYSY

SEQ ID NO: 1248 - protein, 8 aa, Severe acute respiratory syndrome coronavirus 2
  REGION 1..8: note = Table A: HLA-B*58:01H HLA-B*53:01H HLA-B*35:01H HLA-B*35:02H HLA-B*35:08H HLA-B*39:01H
YATHSDKF

SEQ ID NO: 1249 - protein, 8 aa, Severe acute respiratory syndrome coronavirus 2
  REGION 1..8: note = Table A: HLA-C*04:03M
FTDGVCLF

SEQ ID NO: 1250 - protein, 8 aa, Severe acute respiratory syndrome coronavirus 2
  REGION 1..8: note = Table A: HLA-B*14:02M HLA-B*14:01M HLA-B*51:01H HLA-B*38:02H HLA-B*39:01H
DRYPANSI

SEQ ID NO: 1251 - protein, 8 aa, Severe acute respiratory syndrome coronavirus 2
  REGION 1..8: note = Table A: HLA-B*56:01H HLA-B*55:02H HLA-B*35:03H HLA-C*15:05H HLA-B*35:01H HLA-B*35:02H HLA-B*51:01H HLA-B*54:01M
YPANSIVC

SEQ ID NO: 1252 - protein, 8 aa, Severe acute respiratory syndrome coronavirus 2
  REGION 1..8: note = Table A: HLA-A*11:01H HLA-A*11:02H HLA-A*33:01H HLA-A*33:03M HLA-A*68:01H
PANSIVCR

SEQ ID NO: 1253 - protein, 8 aa, Severe acute respiratory syndrome coronavirus 2
  REGION 1..8: note = Table A: HLA-C*15:05H
DTRVLSNL

SEQ ID NO: 1254 - protein, 8 aa, Severe acute respiratory syndrome coronavirus 2
  REGION 1..8: note = Table A: HLA-C*14:02H
LYVNKHAF

SEQ ID NO: 1255 - protein, 8 aa, Severe acute respiratory syndrome coronavirus 2
  REGION 1..8: note = Table A: HLA-B*58:02H HLA-B*46:01H HLA-B*53:01H HLA-C*03:02H HLA-B*35:01H HLA-B*51:01H HLA-B*35:07M HLA-B*38:02H HLA-B*54:01H HLA-B*15:02M HLA-B*57:03H
HAFHTPAF

SEQ ID NO: 1256 - protein, 8 aa, Severe acute respiratory syndrome coronavirus 2
  REGION 1..8: note = Table A: HLA-C*04:01H HLA-C*04:03H
AFDKSAFV

SEQ ID NO: 1257 - protein, 8 aa, Severe acute respiratory syndrome coronavirus 2
  REGION 1..8: note = Table A: HLA-B*58:02H HLA-A*36:01H HLA-A*30:02M HLA-B*15:01H HLA-B*15:03M
KQLPFFYY

SEQ ID NO: 1258 - protein, 8 aa, Severe acute respiratory syndrome coronavirus 2
  REGION 1..8: note = Table A: HLA-A*36:01H HLA-A*34:02H
DIDYVPLK

SEQ ID NO: 1259 - protein, 8 aa, Severe acute respiratory syndrome coronavirus 2
  REGION 1..8: note = Table A: HLA-B*39:06H HLA-B*54:01H
DYVPLKSA

SEQ ID NO: 1260 - protein, 8 aa, Severe acute respiratory syndrome coronavirus 2
  REGION 1..8: note = Table A: HLA-C*15:05H HLA-B*51:01H
VPLKSATC

SEQ ID NO: 1261 - protein, 8 aa, Severe acute respiratory syndrome coronavirus 2
  REGION 1..8: note = Table A: HLA-B*38:01M HLA-B*38:02M HLA-B*39:01H HLA-B*13:01H HLA-B*15:10H
HHANEYRL

SEQ ID NO: 1262 - protein, 8 aa, Severe acute respiratory syndrome coronavirus 2
  REGION 1..8: note = Table A: HLA-B*58:02H HLA-C*16:01H
HANEYRLY

SEQ ID NO: 1263 - protein, 8 aa, Severe acute respiratory syndrome coronavirus 2
  REGION 1..8: note = Table A: HLA-C*14:03H
LYLDAYNM

SEQ ID NO: 1264 - protein, 8 aa, Severe acute respiratory syndrome coronavirus 2
  REGION 1..8: note = Table A: HLA-B*18:01H HLA-B*38:02H HLA-B*15:02H HLA-B*07:05H
NMMISAGF

SEQ ID NO: 1265 - protein, 8 aa, Severe acute respiratory syndrome coronavirus 2
  REGION 1..8: note = Table A: HLA-B*58:01H HLA-B*57:01H HLA-B*57:03H
ISAGFSLW

SEQ ID NO: 1266 - protein, 8 aa, Severe acute respiratory syndrome coronavirus 2
  REGION 1..8: note = Table A: HLA-A*30:02M
VYKQFDTY

SEQ ID NO: 1267 - protein, 8 aa, Severe acute respiratory syndrome coronavirus 2
  REGION 1..8: note = Table A: HLA-B*48:01H HLA-A*02:11M HLA-A*02:05H HLA-A*02:02H HLA-B*13:02H
KQFDTYNL

SEQ ID NO: 1268 - protein, 8 aa, Severe acute respiratory syndrome coronavirus 2
  REGION 1..8: note = Table A: HLA-A*24:02H
TYNLWNTF

SEQ ID NO: 1269 - protein, 8 aa, Severe acute respiratory syndrome coronavirus 2
  REGION 1..8: note = Table A: HLA-B*18:01H HLA-B*49:01H
LENVAFNV

SEQ ID NO: 1270 - protein, 8 aa, Severe acute respiratory syndrome coronavirus 2
  REGION 1..8: note = Table A: HLA-A*03:01H HLA-A*03:02M HLA-A*11:01M HLA-A*11:02M HLA-A*68:01H HLA-A*34:02H HLA-C*07:27H
VAFNVVNK

SEQ ID NO: 1271 - protein, 8 aa, Severe acute respiratory syndrome coronavirus 2
  REGION 1..8: note = Table A: HLA-B*40:01H HLA-B*40:02M HLA-B*41:02H HLA-B*49:01M
GEVPVSII

SEQ ID NO: 1272 - protein, 8 aa, Severe acute respiratory syndrome coronavirus 2
  REGION 1..8: note = Table A: HLA-B*52:01H
VSIINNTV

SEQ ID NO: 1273 - protein, 8 aa, Severe acute respiratory syndrome coronavirus 2
  REGION 1..8: note = Table A: HLA-B*46:01H HLA-B*38:02H HLA-B*15:01H HLA-B*15:02H
SIINNTVY

SEQ ID NO: 1274 - protein, 8 aa, Severe acute respiratory syndrome coronavirus 2
  REGION 1..8: note = Table A: HLA-A*03:02H
INNTVYTK

SEQ ID NO: 1275 - protein, 8 aa, Severe acute respiratory syndrome coronavirus 2
  REGION 1..8: note = Table A: HLA-B*50:01H
FENKTTLP

SEQ ID NO: 1276 - protein, 8 aa, Severe acute respiratory syndrome coronavirus 2
  REGION 1..8: note = Table A: HLA-C*15:05H HLA-C*15:02H
KTTLPVNV

SEQ ID NO: 1277 - protein, 8 aa, Severe acute respiratory syndrome coronavirus 2
  REGION 1..8: note = Table A: HLA-B*38:02H
TLPVNVAF

SEQ ID NO: 1278 - protein, 8 aa, Severe acute respiratory syndrome coronavirus 2
  REGION 1..8: note = Table A: HLA-B*35:03H
PVNVAFEL

SEQ ID NO: 1279 - protein, 8 aa, Severe acute respiratory syndrome coronavirus 2
  REGION 1..8: note = Table A: HLA-A*11:02H
VAFELWAK

SEQ ID NO: 1280 - protein, 8 aa, Severe acute respiratory syndrome coronavirus 2
  REGION 1..8: note = Table A: HLA-B*08:01H HLA-B*55:01H HLA-A*02:03H HLA-B*51:01H HLA-B*52:01H HLA-B*38:02H HLA-B*54:01H
NIKPVPEV

SEQ ID NO: 1281 - protein, 8 aa, Severe acute respiratory syndrome coronavirus 2
  REGION 1..8: note = Table A: HLA-C*15:05H
KPVPEVKI

SEQ ID NO: 1282 - protein, 8 aa, Severe acute respiratory syndrome coronavirus 2
  REGION 1..8: note = Table A: HLA-B*40:02H HLA-B*41:02H HLA-B*49:01H
VDIAANTV

SEQ ID NO: 1283 - protein, 8 aa, Severe acute respiratory syndrome coronavirus 2
  REGION 1..8: note = Table A: HLA-B*58:01H
IAANTVIW

SEQ ID NO: 1284 - protein, 8 aa, Severe acute respiratory syndrome coronavirus 2
  REGION 1..8: note = Table A: HLA-B*51:01H
DAPAHIST

SEQ ID NO: 1285 - protein, 8 aa, Severe acute respiratory syndrome coronavirus 2
  REGION 1..8: note = Table A: HLA-B*56:01H HLA-B*55:02H HLA-C*15:05H HLA-B*55:01M HLA-B*51:01M HLA-B*07:02H HLA-B*07:04H HLA-B*07:05H
APAHISTI

SEQ ID NO: 1286 - protein, 8 aa, Severe acute respiratory syndrome coronavirus 2
  REGION 1..8: note = Table A: HLA-B*39:06M HLA-B*15:10H
AHISTIGV

SEQ ID NO: 1287 - protein, 8 aa, Severe acute respiratory syndrome coronavirus 2
  REGION 1..8: note = Table A: HLA-A*03:02H
SMTDIAKK

SEQ ID NO: 1288 - protein, 8 aa, Severe acute respiratory syndrome coronavirus 2
  REGION 1..8: note = Table A: HLA-B*56:01H HLA-B*55:02H HLA-B*55:01H
KPTETICA

SEQ ID NO: 1289 - protein, 8 aa, Severe acute respiratory syndrome coronavirus 2
  REGION 1..8: note = Table A: HLA-B*51:01H
DGRVDGQV

SEQ ID NO: 1290 - protein, 8 aa, Severe acute respiratory syndrome coronavirus 2
  REGION 1..8: note = Table A: HLA-C*04:03H HLA-C*08:02H HLA-C*05:01H
RVDGQVDL

SEQ ID NO: 1291 - protein, 8 aa, Severe acute respiratory syndrome coronavirus 2
  REGION 1..8: note = Table A: HLA-B*37:01H
VDGQVDLF

SEQ ID NO: 1292 - protein, 8 aa, Severe acute respiratory syndrome coronavirus 2
  REGION 1..8: note = Table A: HLA-B*51:01H
NARNGVLI

SEQ ID NO: 1293 - protein, 8 aa, Severe acute respiratory syndrome coronavirus 2
  REGION 1..8: note = Table A: HLA-C*03:03H
LITEGSVK

SEQ ID NO: 1294 - protein, 8 aa, Severe acute respiratory syndrome coronavirus 2
  REGION 1..8: note = Table A: HLA-B*44:05H HLA-B*40:02H HLA-B*41:02H
TEGSVKGL

SEQ ID NO: 1295 - protein, 8 aa, Severe acute respiratory syndrome coronavirus 2
  REGION 1..8: note = Table A: HLA-C*15:05H HLA-C*01:02H
VGPKQASL

SEQ ID NO: 1296 - protein, 8 aa, Severe acute respiratory syndrome coronavirus 2
  REGION 1..8: note = Table A: HLA-A*02:03H
SLNGVTLI

SEQ ID NO: 1297 - protein, 8 aa, Severe acute respiratory syndrome coronavirus 2
  REGION 1..8: note = Table A: HLA-B*44:05M HLA-B*44:03H HLA-B*18:01H HLA-B*37:01M HLA-B*40:02H HLA-B*07:05H HLA-B*41:02H
GEAVKTQF

SEQ ID NO: 1298 - protein, 8 aa, Severe acute respiratory syndrome coronavirus 2
  REGION 1..8: note = Table A: HLA-A*30:02H HLA-B*15:01H
AVKTQFNY

SEQ ID NO: 1299 - protein, 8 aa, Severe acute respiratory syndrome coronavirus 2
  REGION 1..8: note = Table A: HLA-B*15:03H
VKTQFNYY

SEQ ID NO: 1300 - protein, 8 aa, Severe acute respiratory syndrome coronavirus 2
  REGION 1..8: note = Table A: HLA-A*36:01H
KTQFNYYK

SEQ ID NO: 1301 - protein, 8 aa, Severe acute respiratory syndrome coronavirus 2
  REGION 1..8: note = Table A: HLA-A*11:02H
TQFNYYKK

SEQ ID NO: 1302 - protein, 8 aa, Severe acute respiratory syndrome coronavirus 2
  REGION 1..8: note = Table A: HLA-B*44:05H HLA-C*08:03H HLA-B*37:01M HLA-B*40:02H HLA-B*41:02H
VDGVVQQL

SEQ ID NO: 1303 - protein, 8 aa, Severe acute respiratory syndrome coronavirus 2
  REGION 1..8: note = Table A: HLA-B*15:01M HLA-B*15:03H
VQQLPETY

SEQ ID NO: 1304 - protein, 8 aa, Severe acute respiratory syndrome coronavirus 2
  REGION 1..8: note = Table A: HLA-A*33:03H HLA-A*34:01M HLA-A*34:02H HLA-A*66:01M
ETYFTQSR

SEQ ID NO: 1305 - protein, 8 aa, Severe acute respiratory syndrome coronavirus 2
  REGION 1..8: note = Table A: HLA-C*14:02H HLA-C*14:03H
YFTQSRNL

SEQ ID NO: 1306 - protein, 8 aa, Severe acute respiratory syndrome coronavirus 2
  REGION 1..8: note = Table A: HLA-B*46:01H
QSRNLQEF

SEQ ID NO: 1307 - protein, 8 aa, Severe acute respiratory syndrome coronavirus 2
  REGION 1..8: note = Table A: HLA-B*08:01H
EFKPRSQM

SEQ ID NO: 1308 - protein, 8 aa, Severe acute respiratory syndrome coronavirus 2
  REGION 1..8: note = Table A: HLA-B*18:01H HLA-B*38:02H HLA-B*40:01H HLA-B*40:02H HLA-B*07:05H HLA-B*41:02H HLA-B*49:01M HLA-B*50:01H
MEIDFLEL

SEQ ID NO: 1309 - protein, 8 aa, Severe acute respiratory syndrome coronavirus 2
  REGION 1..8: note = Table A: HLA-B*18:01H HLA-B*07:05H
LELAMDEF

SEQ ID NO: 1310 - protein, 8 aa, Severe acute respiratory syndrome coronavirus 2
  REGION 1..8: note = Table A: HLA-A*36:01H
AMDEFIER

SEQ ID NO: 1311 - protein, 8 aa, Severe acute respiratory syndrome coronavirus 2
  REGION 1..8: note = Table A: HLA-A*36:01H HLA-B*18:01H
MDEFIERY

SEQ ID NO: 1312 - protein, 8 aa, Severe acute respiratory syndrome coronavirus 2
  REGION 1..8: note = Table A: HLA-B*08:01H
EFIERYKL

SEQ ID NO: 1313 - protein, 8 aa, Severe acute respiratory syndrome coronavirus 2
  REGION 1..8: note = Table A: HLA-B*15:03H
YKLEGYAF

SEQ ID NO: 1314 - protein, 8 aa, Severe acute respiratory syndrome coronavirus 2
  REGION 1..8: note = Table A: HLA-B*18:01H
LEGYAFEH

SEQ ID NO: 1315 - protein, 8 aa, Severe acute respiratory syndrome coronavirus 2
  REGION 1..8: note = Table A: HLA-B*51:01H HLA-B*52:01H
EGYAFEHI

SEQ ID NO: 1316 - protein, 8 aa, Severe acute respiratory syndrome coronavirus 2
  REGION 1..8: note = Table A: HLA-C*14:02H HLA-C*14:03H HLA-C*16:01M HLA-C*16:04H HLA-B*46:01M HLA-C*06:02H HLA-B*08:01H HLA-C*07:01H HLA-C*03:02H HLA-C*03:04H HLA-C*12:02M HLA-C*12:03M HLA-B*35:01M HLA-B*35:08H HLA-B*35:07H HLA-B*38:02M
  REGION 1..8: note = CONT. FROM ABOVE: HLA-B*15:01H HLA-B*15:02H HLA-B*15:03H HLA- C*02:02H HLA-B*15:11H
YAFEHIVY

SEQ ID NO: 1317 - protein, 8 aa, Severe acute respiratory syndrome coronavirus 2
  REGION 1..8: note = Table A: HLA-B*38:02H HLA-B*39:01H
EHIVYGDF

SEQ ID NO: 1318 - protein, 8 aa, Severe acute respiratory syndrome coronavirus 2
  REGION 1..8: note = Table A: HLA-B*14:02H HLA-C*08:03H HLA-B*37:01M HLA-B*40:01H HLA-B*40:02M HLA-B*41:02M
GDFSHSQL

SEQ ID NO: 1319 - protein, 8 aa, Severe acute respiratory syndrome coronavirus 2
  REGION 1..8: note = Table A: HLA-A*02:04H HLA-A*02:02M
QLGGLHLL

SEQ ID NO: 1320 - protein, 8 aa, Severe acute respiratory syndrome coronavirus 2
  REGION 1..8: note = Table A: HLA-C*15:02H
LGGLHLLI

SEQ ID NO: 1321 - protein, 8 aa, Severe acute respiratory syndrome coronavirus 2
  REGION 1..8: note = Table A: HLA-A*36:01H HLA-A*34:02H
HLLIGLAK

SEQ ID NO: 1322 - protein, 8 aa, Severe acute respiratory syndrome coronavirus 2
  REGION 1..8: note = Table A: HLA-B*37:01H
MDSTVKNY

SEQ ID NO: 1323 - protein, 8 aa, Severe acute respiratory syndrome coronavirus 2
  REGION 1..8: note = Table A: HLA-B*58:01H HLA-B*58:02H HLA-B*57:03H
STVKNYFI

SEQ ID NO: 1324 - protein, 8 aa, Severe acute respiratory syndrome coronavirus 2
  REGION 1..8: note = Table A: HLA-C*04:03H HLA-A*02:07H HLA-C*08:02H HLA-C*05:01H
LLDDFVEI

SEQ ID NO: 1325 - protein, 8 aa, Severe acute respiratory syndrome coronavirus 2
  REGION 1..8: note = Table A: HLA-A*03:02H HLA-A*11:01M HLA-A*11:02H HLA-B*37:01H
QDLSVVSK

SEQ ID NO: 1326 - protein, 8 aa, Severe acute respiratory syndrome coronavirus 2
  REGION 1..8: note = Table A: HLA-B*14:01H HLA-A*02:03H HLA-B*51:01H HLA-B*38:02H HLA-B*07:05H
DLSVVSKV

SEQ ID NO: 1327 - protein, 8 aa, Severe acute respiratory syndrome coronavirus 2
  REGION 1..8: note = Table A: HLA-B*52:01H
LSVVSKVV

SEQ ID NO: 1328 - protein, 8 aa, Severe acute respiratory syndrome coronavirus 2
  REGION 1..8: note = Table A: HLA-A*02:11H HLA-C*15:05M HLA-C*15:02H HLA-A*02:05H HLA-A*02:06H HLA-A*02:08H HLA-A*02:01H HLA-A*02:02H HLA-A*02:03H HLA-B*52:01H HLA-B*37:01H HLA-B*38:02H HLA-B*07:05H HLA-B*13:02H HLA-C*07:04H
VVSKVVKV

SEQ ID NO: 1329 - protein, 8 aa, Severe acute respiratory syndrome coronavirus 2
  REGION 1..8: note = Table A: HLA-B*46:01M HLA-A*30:02H HLA-C*12:02H HLA-B*38:02H HLA-B*15:01M HLA-B*15:02H
VVKVTIDY

SEQ ID NO: 1330 - protein, 8 aa, Severe acute respiratory syndrome coronavirus 2
  REGION 1..8: note = Table A: HLA-B*37:01H
IDYTEISF

SEQ ID NO: 1331 - protein, 8 aa, Severe acute respiratory syndrome coronavirus 2
  REGION 1..8: note = Table A: HLA-B*44:03H
TEISFMLW

SEQ ID NO: 1332 - protein, 8 aa, Severe acute respiratory syndrome coronavirus 2
  REGION 1..8: note = Table A: HLA-B*37:01H
KDGHVETF

SEQ ID NO: 1333 - protein, 8 aa, Severe acute respiratory syndrome coronavirus 2
  REGION 1..8: note = Table A: HLA-B*38:02H
DGHVETFY

SEQ ID NO: 1334 - protein, 8 aa, Severe acute respiratory syndrome coronavirus 2
  REGION 1..8: note = Table A: HLA-A*36:01H
HVETFYPK

SEQ ID NO: 1335 - protein, 8 aa, Severe acute respiratory syndrome coronavirus 2
  REGION 1..8: note = Table A: HLA-B*18:01H HLA-B*40:02M HLA-B*07:05H HLA-B*49:01H
VETFYPKL

SEQ ID NO: 1336 - protein, 8 aa, Severe acute respiratory syndrome coronavirus 2
  REGION 1..8: note = Table A: HLA-B*52:01M HLA-B*13:02M
SQAWQPGV

SEQ ID NO: 1337 - protein, 8 aa, Severe acute respiratory syndrome coronavirus 2
  REGION 1..8: note = Table A: HLA-C*14:02H HLA-C*14:03H
AWQPGVAM

SEQ ID NO: 1338 - protein, 8 aa, Severe acute respiratory syndrome coronavirus 2
  REGION 1..8: note = Table A: HLA-A*11:01H HLA-A*11:02H HLA-A*36:01H HLA-A*34:02H
VAMPNLYK

SEQ ID NO: 1339 - protein, 8 aa, Severe acute respiratory syndrome coronavirus 2
  REGION 1..8: note = Table A: HLA-C*14:02H HLA-A*24:02H HLA-B*39:01H
NYGDSATL

SEQ ID NO: 1340 - protein, 8 aa, Severe acute respiratory syndrome coronavirus 2
  REGION 1..8: note = Table A: HLA-A*11:01H
GDSATLPK

SEQ ID NO: 1341 - protein, 8 aa, Severe acute respiratory syndrome coronavirus 2
  REGION 1..8: note = Table A: HLA-B*46:01H HLA-A*30:02H HLA-B*38:02M HLA-B*15:01M HLA-B*15:02H HLA-B*07:05H
IMMNVAKY

SEQ ID NO: 1342 - protein, 8 aa, Severe acute respiratory syndrome coronavirus 2
  REGION 1..8: note = Table A: HLA-C*15:05H
NVAKYTQL

SEQ ID NO: 1343 - protein, 8 aa, Severe acute respiratory syndrome coronavirus 2
  REGION 1..8: note = Table A: HLA-C*14:02H HLA-C*14:03H
QYLNTLTL

SEQ ID NO: 1344 - protein, 8 aa, Severe acute respiratory syndrome coronavirus 2
  REGION 1..8: note = Table A: HLA-B*38:02H
TLAVPYNM

SEQ ID NO: 1345 - protein, 8 aa, Severe acute respiratory syndrome coronavirus 2
  REGION 1..8: note = Table A: HLA-C*15:05M HLA-B*55:01M HLA-B*51:01H HLA-B*52:01H HLA-C*08:01H HLA-B*54:01H HLA-B*07:04H HLA-B*07:05H
VPYNMRVI

SEQ ID NO: 1346 - protein, 8 aa, Severe acute respiratory syndrome coronavirus 2
  REGION 1..8: note = Table A: HLA-B*14:02H HLA-B*39:06H
MRVIHFGA

SEQ ID NO: 1347 - protein, 8 aa, Severe acute respiratory syndrome coronavirus 2
  REGION 1..8: note = Table A: HLA-C*15:05H HLA-C*01:02H HLA-B*51:01H
VAPGTAVL

SEQ ID NO: 1348 - protein, 8 aa, Severe acute respiratory syndrome coronavirus 2
  REGION 1..8: note = Table A: HLA-A*68:01H HLA-A*34:01H
APGTAVLR

SEQ ID NO: 1349 - protein, 8 aa, Severe acute respiratory syndrome coronavirus 2
  REGION 1..8: note = Table A: HLA-B*58:02H HLA-B*57:01H HLA-B*57:03H
GTAVLRQW

SEQ ID NO: 1350 - protein, 8 aa, Severe acute respiratory syndrome coronavirus 2
  REGION 1..8: note = Table A: HLA-C*15:05H HLA-B*51:01M
LPTGTLLV

SEQ ID NO: 1351 - protein, 8 aa, Severe acute respiratory syndrome coronavirus 2
  REGION 1..8: note = Table A: HLA-C*08:02H HLA-C*05:01H
VSDADSTL

SEQ ID NO: 1352 - protein, 8 aa, Severe acute respiratory syndrome coronavirus 2
  REGION 1..8: note = Table A: HLA-B*58:01M HLA-B*57:01H HLA-B*53:01M HLA-B*15:13H HLA-B*57:03H
TVHTANKW

SEQ ID NO: 1353 - protein, 8 aa, Severe acute respiratory syndrome coronavirus 2
  REGION 1..8: note = Table A: HLA-B*35:01H HLA-B*38:02H HLA-B*15:02M
DLIISDMY

SEQ ID NO: 1354 - protein, 8 aa, Severe acute respiratory syndrome coronavirus 2
  REGION 1..8: note = Table A: HLA-A*36:01H
ISDMYDPK

SEQ ID NO: 1355 - protein, 8 aa, Severe acute respiratory syndrome coronavirus 2
  REGION 1..8: note = Table A: HLA-A*33:01H HLA-A*33:03H HLA-A*34:02H
DMYDPKTK

SEQ ID NO: 1356 - protein, 8 aa, Severe acute respiratory syndrome coronavirus 2
  REGION 1..8: note = Table A: HLA-A*02:11H HLA-B*37:01H
YDPKTKNV

SEQ ID NO: 1357 - protein, 8 aa, Severe acute respiratory syndrome coronavirus 2
  REGION 1..8: note = Table A: HLA-B*08:01H
DPKTKNVT

SEQ ID NO: 1358 - protein, 8 aa, Severe acute respiratory syndrome coronavirus 2
  REGION 1..8: note = Table A: HLA-B*49:01M
KEGFFTYI

SEQ ID NO: 1359 - protein, 8 aa, Severe acute respiratory syndrome coronavirus 2
  REGION 1..8: note = Table A: HLA-B*08:01M
FIQQKLAL

SEQ ID NO: 1360 - protein, 8 aa, Severe acute respiratory syndrome coronavirus 2
  REGION 1..8: note = Table A: HLA-B*38:02H
ALGGSVAI

SEQ ID NO: 1361 - protein, 8 aa, Severe acute respiratory syndrome coronavirus 2
  REGION 1..8: note = Table A: HLA-A*11:303H HLA-B*46:01M HLA-C*03:02H HLA-C*12:02H HLA-B*15:01H
VAIKITEH

SEQ ID NO: 1362 - protein, 8 aa, Severe acute respiratory syndrome coronavirus 2
  REGION 1..8: note = Table A: HLA-B*39:01H
EHSWNADL

SEQ ID NO: 1363 - protein, 8 aa, Severe acute respiratory syndrome coronavirus 2
  REGION 1..8: note = Table A: HLA-B*58:01H HLA-A*36:01H HLA-B*35:07H
HSWNADLY

SEQ ID NO: 1364 - protein, 8 aa, Severe acute respiratory syndrome coronavirus 2
  REGION 1..8: note = Table A: HLA-C*04:03H
NADLYKLM

SEQ ID NO: 1365 - protein, 8 aa, Severe acute respiratory syndrome coronavirus 2
  REGION 1..8: note = Table A: HLA-A*32:01H
KLMGHFAW

SEQ ID NO: 1366 - protein, 8 aa, Severe acute respiratory syndrome coronavirus 2
  REGION 1..8: note = Table A: HLA-B*39:06H
GHFAWWTA

SEQ ID NO: 1367 - protein, 8 aa, Severe acute respiratory syndrome coronavirus 2
  REGION 1..8: note = Table A: HLA-B*35:01H
NASSSEAF

SEQ ID NO: 1368 - protein, 8 aa, Severe acute respiratory syndrome coronavirus 2
  REGION 1..8: note = Table A: HLA-B*58:01H
SSSEAFLI

SEQ ID NO: 1369 - protein, 8 aa, Severe acute respiratory syndrome coronavirus 2
  REGION 1..8: note = Table A: HLA-B*45:01H HLA-B*50:01H
SEAFLIGC

SEQ ID NO: 1370 - protein, 8 aa, Severe acute respiratory syndrome coronavirus 2
  REGION 1..8: note = Table A: HLA-C*14:02H HLA-C*14:03M
AFLIGCNY

SEQ ID NO: 1371 - protein, 8 aa, Severe acute respiratory syndrome coronavirus 2
  REGION 1..8: note = Table A: HLA-B*38:02H HLA-B*15:02H HLA-B*39:01H
EQIDGYVM

SEQ ID NO: 1372 - protein, 8 aa, Severe acute respiratory syndrome coronavirus 2
  REGION 1..8: note = Table A: HLA-B*38:02H
MHANYIFW

SEQ ID NO: 1373 - protein, 8 aa, Severe acute respiratory syndrome coronavirus 2
  REGION 1..8: note = Table A: HLA-A*33:01H HLA-A*33:03H
HANYIFWR

SEQ ID NO: 1374 - protein, 8 aa, Severe acute respiratory syndrome coronavirus 2
  REGION 1..8: note = Table A: HLA-C*15:05H HLA-C*15:02H
RNTNPIQL

SEQ ID NO: 1375 - protein, 8 aa, Severe acute respiratory syndrome coronavirus 2
  REGION 1..8: note = Table A: HLA-B*18:01H HLA-C*15:05H HLA-B*35:01M HLA-B*35:08H HLA-B*35:07H HLA-B*38:02H HLA-B*15:02M HLA-B*07:05M HLA-B*15:11M
NPIQLSSY

SEQ ID NO: 1376 - protein, 8 aa, Severe acute respiratory syndrome coronavirus 2
  REGION 1..8: note = Table A: HLA-C*15:05H
SSYSLFDM

SEQ ID NO: 1377 - protein, 8 aa, Severe acute respiratory syndrome coronavirus 2
  REGION 1..8: note = Table A: HLA-A*34:02H
DMSKFPLK

SEQ ID NO: 1378 - protein, 8 aa, Severe acute respiratory syndrome coronavirus 2
  REGION 1..8: note = Table A: HLA-B*58:02M HLA-C*16:01H HLA-B*57:01H HLA-B*08:01H HLA-C*07:01H HLA-C*15:05H HLA-C*15:02H HLA-C*17:01H HLA-C*08:03H HLA-B*07:04H HLA-B*57:03H
MSKFPLKL

SEQ ID NO: 1379 - protein, 8 aa, Severe acute respiratory syndrome coronavirus 2
  REGION 1..8: note = Table A: HLA-C*15:05H
RGTAVMSL

SEQ ID NO: 1380 - protein, 8 aa, Severe acute respiratory syndrome coronavirus 2
  REGION 1..8: note = Table A: HLA-A*03:01H HLA-A*03:02H HLA-A*11:01H HLA-A*11:02H
GTAVMSLK

SEQ ID NO: 1381 - protein, 8 aa, Severe acute respiratory syndrome coronavirus 2
  REGION 1..8: note = Table A: HLA-A*11:02H HLA-A*34:02H
MILSLLSK

SEQ ID NO: 1382 - protein, 8 aa, Severe acute respiratory syndrome coronavirus 2
  REGION 1..8: note = Table A: HLA-B*58:02H
LLSKGRLI

SEQ ID NO: 1383 - protein, 8 aa, Severe acute respiratory syndrome coronavirus 2
  REGION 1..8: note = Table A: HLA-B*41:02H
RENNRVVI

SEQ ID NO: 1384 - protein, 8 aa, Severe acute respiratory syndrome coronavirus 2
  REGION 1..8: note = Table A: HLA-B*35:02H HLA-C*08:01H HLA-B*35:12H HLA-B*38:02H HLA-B*39:01H
VVISSDVL

SEQ ID NO: 1385 - protein, 9 aa, Severe acute respiratory syndrome coronavirus 2
  REGION 1..9: note = Table A: HLA-A*11:303H HLA-A*03:02H HLA-A*11:01H HLA-A*11:02H HLA-A*34:02H
SLVPGFNEK

SEQ ID NO: 1386 - protein, 9 aa, Severe acute respiratory syndrome coronavirus 2
  REGION 1..9: note = Table A: HLA-C*04:03H
FNEKTHVQL

SEQ ID NO: 1387 - protein, 9 aa, Severe acute respiratory syndrome coronavirus 2
  REGION 1..9: note = Table A: HLA-B*38:02H HLA-B*15:10H
THVQLSLPV

SEQ ID NO: 1388 - protein, 9 aa, Severe acute respiratory syndrome coronavirus 2
  REGION 1..9: note = Table A: HLA-B*35:03H HLA-C*15:05H HLA-A*02:04H HLA-B*38:02H HLA-B*15:02H
HVQLSLPVL

SEQ ID NO: 1389 - protein, 9 aa, Severe acute respiratory syndrome coronavirus 2
  REGION 1..9: note = Table A: HLA-A*02:04H HLA-A*02:03H HLA-B*38:02M HLA-B*13:02M
QLSLPVLQV

SEQ ID NO: 1390 - protein, 9 aa, Severe acute respiratory syndrome coronavirus 2
  REGION 1..9: note = Table A: HLA-A*74:01H HLA-A*31:01H
LSLPVLQVR

SEQ ID NO: 1391 - protein, 9 aa, Severe acute respiratory syndrome coronavirus 2
  REGION 1..9: note = Table A: HLA-B*56:01H HLA-B*55:02H HLA-C*15:05H HLA-B*51:01H HLA-B*54:01M
LPVLQVRDV

SEQ ID NO: 1392 - protein, 9 aa, Severe acute respiratory syndrome coronavirus 2
  REGION 1..9: note = Table A: HLA-B*27:05H
VRDVLVRGF

SEQ ID NO: 1393 - protein, 9 aa, Severe acute respiratory syndrome coronavirus 2
  REGION 1..9: note = Table A: HLA-B*38:02H
LVRGFGDSV

SEQ ID NO: 1394 - protein, 9 aa, Severe acute respiratory syndrome coronavirus 2
  REGION 1..9: note = Table A: HLA-C*04:03M HLA-B*35:03M HLA-A*02:07H HLA-B*35:02M HLA-B*35:08H HLA-C*08:01M HLA-C*08:02M HLA-B*35:12M HLA-B*38:02H HLA-B*39:01H HLA-C*05:01H
FGDSVEEVL

SEQ ID NO: 1395 - protein, 9 aa, Severe acute respiratory syndrome coronavirus 2
  REGION 1..9: note = Table A: HLA-A*02:05H
SVEEVLSEA

SEQ ID NO: 1396 - protein, 9 aa, Severe acute respiratory syndrome coronavirus 2
  REGION 1..9: note = Table A: HLA-A*34:02H
EVLSEARQH

SEQ ID NO: 1397 - protein, 9 aa, Severe acute respiratory syndrome coronavirus 2
  REGION 1..9: note = Table A: HLA-A*02:11M HLA-A*02:04H HLA-A*02:05H HLA-B*14:01H HLA-A*02:01H HLA-A*02:02H HLA-A*02:03M HLA-B*38:02M HLA-B*13:01H HLA-B*13:02H
VLSEARQHL

SEQ ID NO: 1398 - protein, 9 aa, Severe acute respiratory syndrome coronavirus 2
  REGION 1..9: note = Table A: HLA-A*26:03H HLA-B*08:01H HLA-A*02:02M HLA-A*02:03M HLA-B*38:02M
HLKDGTCGL

SEQ ID NO: 1399 - protein, 9 aa, Severe acute respiratory syndrome coronavirus 2
  REGION 1..9: note = Table A: HLA-A*02:02H HLA-B*13:02H
GLVEVEKGV

SEQ ID NO: 1400 - protein, 9 aa, Severe acute respiratory syndrome coronavirus 2
  REGION 1..9: note = Table A: HLA-B*45:01M HLA-B*40:02H HLA-B*40:06H HLA-B*41:02H HLA-B*49:01H HLA-B*50:01H
VEVEKGVLP

SEQ ID NO: 1401 - protein, 9 aa, Severe acute respiratory syndrome coronavirus 2
  REGION 1..9: note = Table A: HLA-B*44:05H HLA-B*45:01H HLA-B*40:01H HLA-B*40:02M HLA-B*40:06H HLA-B*41:02H HLA-B*49:01H HLA-B*50:01H
VEKGVLPQL

SEQ ID NO: 1402 - protein, 9 aa, Severe acute respiratory syndrome coronavirus 2
  REGION 1..9: note = Table A: HLA-B*56:01H HLA-B*55:02H HLA-C*15:05H HLA-B*51:01M HLA-B*54:01H
LPQLEQPYV

SEQ ID NO: 1403 - protein, 9 aa, Severe acute respiratory syndrome coronavirus 2
  REGION 1..9: note = Table A: HLA-A*24:02H HLA-A*24:07M HLA-A*23:01H
PQLEQPYVF

SEQ ID NO: 1404 - protein, 9 aa, Severe acute respiratory syndrome coronavirus 2
  REGION 1..9: note = Table A: HLA-A*33:01H HLA-A*33:03M HLA-A*26:03H HLA-A*68:01M HLA-A*34:01M HLA-A*34:02H HLA-A*66:01M
EQPYVFIKR

SEQ ID NO: 1405 - protein, 9 aa, Severe acute respiratory syndrome coronavirus 2
  REGION 1..9: note = Table A: HLA-B*58:01H HLA-B*58:02M HLA-C*16:01H HLA-C*03:04H HLA-A*30:02H HLA-C*15:05H HLA-C*15:02M HLA-A*02:08H HLA-A*02:02H HLA-B*07:04M HLA-B*15:01H HLA-B*57:03H HLA-C*07:04M
RTAPHGHVM

SEQ ID NO: 1406 - protein, 9 aa, Severe acute respiratory syndrome coronavirus 2
  REGION 1..9: note = Table A: HLA-B*51:01H
TAPHGHVMV

SEQ ID NO: 1407 - protein, 9 aa, Severe acute respiratory syndrome coronavirus 2
  REGION 1..9: note = Table A: HLA-B*38:02H
PHGHVMVEL

SEQ ID NO: 1408 - protein, 9 aa, Severe acute respiratory syndrome coronavirus 2
  REGION 1..9: note = Table A: HLA-B*39:06H
GHVMVELVA

SEQ ID NO: 1409 - protein, 9 aa, Severe acute respiratory syndrome coronavirus 2
  REGION 1..9: note = Table A: HLA-B*48:01H HLA-C*14:03H HLA-A*11:303M HLA-B*46:01H HLA-A*02:11H HLA-A*68:02H HLA-C*15:05H HLA-A*02:04M HLA-A*02:05M HLA-A*02:06M HLA-A*02:07M HLA-B*14:01M HLA-A*02:01H HLA-A*02:02H HLA-A*02:03M
  REGION 1..9: note = CONT. FROM ABOVE: HLA-A*24:02H HLA-C*08:01H HLA-B*38:02M HLA- B*15:01H HLA-B*39:01H HLA-B*07:05H
VMVELVAEL

SEQ ID NO: 1410 - protein, 9 aa, Severe acute respiratory syndrome coronavirus 2
  REGION 1..9: note = Table A: HLA-A*68:02H HLA-B*38:02H
ELVAELEGI

SEQ ID NO: 1411 - protein, 9 aa, Severe acute respiratory syndrome coronavirus 2
  REGION 1..9: note = Table A: HLA-A*36:01H HLA-A*01:01M HLA-B*35:01H HLA-B*35:08M HLA-B*38:02H HLA-B*15:01H HLA-B*39:01H
VAELEGIQY

SEQ ID NO: 1412 - protein, 9 aa, Severe acute respiratory syndrome coronavirus 2
  REGION 1..9: note = Table A: HLA-B*45:01M HLA-B*49:01H
AELEGIQYG

SEQ ID NO: 1413 - protein, 9 aa, Severe acute respiratory syndrome coronavirus 2
  REGION 1..9: note = Table A: HLA-A*33:01M HLA-A*33:03M HLA-A*26:03H HLA-A*68:01M HLA-A*34:01M HLA-A*66:01H
ELEGIQYGR

SEQ ID NO: 1414 - protein, 9 aa, Severe acute respiratory syndrome coronavirus 2
  REGION 1..9: note = Table A: HLA-B*45:01M HLA-B*40:06M HLA-B*50:01M
GETLGVLVP

SEQ ID NO: 1415 - protein, 9 aa, Severe acute respiratory syndrome coronavirus 2
  REGION 1..9: note = Table A: HLA-A*33:01H HLA-A*33:03M HLA-A*34:01H HLA-A*34:02H HLA-A*66:01H
ETLGVLVPH

SEQ ID NO: 1416 - protein, 9 aa, Severe acute respiratory syndrome coronavirus 2
  REGION 1..9: note = Table A: HLA-A*02:11M HLA-A*02:04M HLA-A*02:06H HLA-A*02:07H HLA-A*02:01M HLA-A*02:02M HLA-A*02:03M
TLGVLVPHV

SEQ ID NO: 1417 - protein, 9 aa, Severe acute respiratory syndrome coronavirus 2
  REGION 1..9: note = Table A: HLA-A*11:303H HLA-A*02:11H HLA-C*15:05H HLA-A*02:04H HLA-A*02:05H HLA-A*02:06H HLA-A*02:01H HLA-A*02:02M HLA-A*02:03M HLA-B*38:02M HLA-B*13:02H
VLVPHVGEI

SEQ ID NO: 1418 - protein, 9 aa, Severe acute respiratory syndrome coronavirus 2
  REGION 1..9: note = Table A: HLA-B*56:01M HLA-B*55:02M HLA-B*35:03H HLA-C*15:05H HLA-B*55:01H HLA-B*35:02M HLA-B*35:08H HLA-B*51:01H HLA-B*35:07H HLA-C*08:01H HLA-B*35:12H HLA-B*54:01H
VPHVGEIPV

SEQ ID NO: 1419 - protein, 9 aa, Severe acute respiratory syndrome coronavirus 2
  REGION 1..9: note = Table A: HLA-B*39:06H
PHVGEIPVA

SEQ ID NO: 1420 - protein, 9 aa, Severe acute respiratory syndrome coronavirus 2
  REGION 1..9: note = Table A: HLA-C*16:04H HLA-A*25:01H HLA-B*46:01H HLA-A*26:01M HLA-A*26:02M HLA-A*26:03H HLA-A*29:01M HLA-A*29:02M HLA-B*18:01M HLA-B*53:01H HLA-A*30:02M HLA-A*68:01H HLA-A*68:02H HLA-B*35:03H HLA-C*15:05H HLA-C*12:02H
  REGION 1..9: note = CONT. FROM ABOVE: HLA-A*34:01H HLA-A*34:02H HLA-B*35:01H HLA- B*35:02H HLA-B*35:08M HLA-B*35:07H HLA-B*35:12H HLA-B*38:02H HLA-B*15:01M HLA-B*15:02H HLA-B*39:01H HLA-B*07:05M HLA-B*57 :03H HLA-B*15:11H
HVGEIPVAY

SEQ ID NO: 1421 - protein, 9 aa, Severe acute respiratory syndrome coronavirus 2
  REGION 1..9: note = Table A: HLA-A*36:01H HLA-A*33:01H HLA-A*33:03H HLA-A*68:01H HLA-A*31:01H
VGEIPVAYR

SEQ ID NO: 1422 - protein, 9 aa, Severe acute respiratory syndrome coronavirus 2
  REGION 1..9: note = Table A: HLA-B*42:01H HLA-B*07:02H HLA-B*07:04H
IPVAYRKVL

SEQ ID NO: 1423 - protein, 9 aa, Severe acute respiratory syndrome coronavirus 2
  REGION 1..9: note = Table A: HLA-A*74:01M HLA-A*34:02H
VAYRKVLLR

SEQ ID NO: 1424 - protein, 9 aa, Severe acute respiratory syndrome coronavirus 2
  REGION 1..9: note = Table A: HLA-B*15:03H
NKGAGGHSY

SEQ ID NO: 1425 - protein, 9 aa, Severe acute respiratory syndrome coronavirus 2
  REGION 1..9: note = Table A: HLA-C*14:02H HLA-C*14:03H HLA-A*24:02H
SYGADLKSF

SEQ ID NO: 1426 - protein, 9 aa, Severe acute respiratory syndrome coronavirus 2
  REGION 1..9: note = Table A: HLA-C*04:03H HLA-B*35:02H HLA-C*08:01H HLA-C*08:02H HLA-C*05:01H
GADLKSFDL

SEQ ID NO: 1427 - protein, 9 aa, Severe acute respiratory syndrome coronavirus 2
  REGION 1..9: note = Table A: HLA-B*48:01H HLA-B*58:01H HLA-B*58:02H HLA-A*11:303H HLA-A*02:11H HLA-C*15:05H HLA-C*15:02H HLA-A*02:05H HLA-A*02:08M HLA-A*02:02H HLA-C*08:01M HLA-C*08:03H HLA-B*38:02H HLA-B*40:01H HLA-B*39:01H
  REGION 1..9: note = CONT. FROM ABOVE: HLA-B*57:03H HLA-B*13:01H
KSFDLGDEL

SEQ ID NO: 1428 - protein, 9 aa, Severe acute respiratory syndrome coronavirus 2
  REGION 1..9: note = Table A: HLA-A*24:02H HLA-A*24:07M HLA-A*23:01H
PYEDFQENW

SEQ ID NO: 1429 - protein, 9 aa, Severe acute respiratory syndrome coronavirus 2
  REGION 1..9: note = Table A: HLA-A*33:01H HLA-A*33:03H
DFQENWNTK

SEQ ID NO: 1430 - protein, 9 aa, Severe acute respiratory syndrome coronavirus 2
  REGION 1..9: note = Table A: HLA-B*45:01H
QENWNTKHS

SEQ ID NO: 1431 - protein, 9 aa, Severe acute respiratory syndrome coronavirus 2
  REGION 1..9: note = Table A: HLA-B*58:01H HLA-B*58:02H HLA-A*11:303H HLA-C*16:01M HLA-C*16:04M HLA-B*57:01H HLA-C*06:02H HLA-C*03:03M HLA-C*07:01H HLA-B*53:01H HLA-C*03:02H HLA-C*03:04M HLA-A*68:01H HLA-A*68:02M HLA-B*35:03M
  REGION 1..9: note = CONT. FROM ABOVE: HLA-C*15:05M HLA-C*01:02H HLA-C*12:02H HLA- C*12:03H HLA-C*15:02M HLA-A*02:05H HLA-A*02:02M HLA-A*02:03H HLA-A*34:01H HLA-A*34:02H HLA-C*07:27H HLA-B*35:01H HLA-C*08 :01H HLA-B*38:02M HLA-B*07:02H HLA-B*07:04M HLA-B*07:05H
  REGION 1..9: note = CONT. FROM ABOVE: HLA-B*57:03M HLA-C*02:02H HLA-B*13:02H HLA- B*15:10H HLA-C*07:04M HLA-A*66:01H
HSSGVTREL

SEQ ID NO: 1432 - protein, 9 aa, Severe acute respiratory syndrome coronavirus 2
  REGION 1..9: note = Table A: HLA-C*15:05H HLA-B*57:03H
SSGVTRELM

SEQ ID NO: 1433 - protein, 9 aa, Severe acute respiratory syndrome coronavirus 2
  REGION 1..9: note = Table A: HLA-B*58:02H HLA-C*16:01H HLA-A*30:01H HLA-C*15:02H HLA-B*07:04H HLA-B*57:03H
VTRELMREL

SEQ ID NO: 1434 - protein, 9 aa, Severe acute respiratory syndrome coronavirus 2
  REGION 1..9: note = Table A: HLA-B*38:02H HLA-B*39:01M
MRELNGGAY

SEQ ID NO: 1435 - protein, 9 aa, Severe acute respiratory syndrome coronavirus 2
  REGION 1..9: note = Table A: HLA-A*74:01M HLA-A*33:01H HLA-A*33:03H HLA-A*26:03H HLA-A*68:01H HLA-A*34:01H HLA-A*34:02M HLA-A*66:01M
ELNGGAYTR

SEQ ID NO: 1436 - protein, 9 aa, Severe acute respiratory syndrome coronavirus 2
  REGION 1..9: note = Table A: HLA-B*58:01H HLA-B*58:02H HLA-B*57:01M HLA-B*46:01H HLA-C*03:02H HLA-C*12:02H HLA-B*38:02H HLA-B*15:01H HLA-B*15:02H HLA-B*57:03H HLA-C*02:02H
YTRYVDNNF

SEQ ID NO: 1437 - protein, 9 aa, Severe acute respiratory syndrome coronavirus 2
  REGION 1..9: note = Table A: HLA-B*38:02H
TRYVDNNFC

SEQ ID NO: 1438 - protein, 9 aa, Severe acute respiratory syndrome coronavirus 2
  REGION 1..9: note = Table A: HLA-B*35:03H
FCGPDGYPL

SEQ ID NO: 1439 - protein, 9 aa, Severe acute respiratory syndrome coronavirus 2
  REGION 1..9: note = Table A: HLA-C*15:05M
GPDGYPLEC

SEQ ID NO: 1440 - protein, 9 aa, Severe acute respiratory syndrome coronavirus 2
  REGION 1..9: note = Table A: HLA-B*07:04H
YPLECIKDL

SEQ ID NO: 1441 - protein, 9 aa, Severe acute respiratory syndrome coronavirus 2
  REGION 1..9: note = Table A: HLA-A*33:01H HLA-A*33:03M HLA-A*26:03M HLA-A*68:01H HLA-A*34:01H HLA-A*34:02M HLA-A*66:01H
ECIKDLLAR

SEQ ID NO: 1442 - protein, 9 aa, Severe acute respiratory syndrome coronavirus 2
  REGION 1..9: note = Table A: HLA-A*02:03H
CIKDLLARA

SEQ ID NO: 1443 - protein, 9 aa, Severe acute respiratory syndrome coronavirus 2
  REGION 1..9: note = Table A: HLA-C*15:05H
RAGKASCTL

SEQ ID NO: 1444 - protein, 9 aa, Severe acute respiratory syndrome coronavirus 2
  REGION 1..9: note = Table A: HLA-A*02:04H HLA-A*02:05H HLA-A*02:01H HLA-A*02:02M HLA-B*38:02H
TLSEQLDFI

SEQ ID NO: 1445 - protein, 9 aa, Severe acute respiratory syndrome coronavirus 2
  REGION 1..9: note = Table A: HLA-B*45:01H
SEQLDFIDT

SEQ ID NO: 1446 - protein, 9 aa, Severe acute respiratory syndrome coronavirus 2
  REGION 1..9: note = Table A: HLA-B*27:02H HLA-A*68:02H HLA-A*34:02H HLA-B*39:01H
EQLDFIDTK

SEQ ID NO: 1447 - protein, 9 aa, Severe acute respiratory syndrome coronavirus 2
  REGION 1..9: note = Table A: HLA-A*34:01H
QLDFIDTKR

SEQ ID NO: 1448 - protein, 9 aa, Severe acute respiratory syndrome coronavirus 2
  REGION 1..9: note = Table A: HLA-A*36:01M HLA-A*01:01H HLA-B*38:02H HLA-B*15:02H
FIDTKRGVY

SEQ ID NO: 1449 - protein, 9 aa, Severe acute respiratory syndrome coronavirus 2
  REGION 1..9: note = Table A: HLA-B*37:01H
IDTKRGVYC

SEQ ID NO: 1450 - protein, 9 aa, Severe acute respiratory syndrome coronavirus 2
  REGION 1..9: note = Table A: HLA-B*58:01H HLA-B*44:02H HLA-B*44:05H HLA-B*45:01H HLA-B*44:03M HLA-B*37:01H HLA-A*32:01H HLA-B*40:01H HLA-B*40:02H HLA-B*40:06H HLA-B*41:02H HLA-B*57:03H HLA-B*13:01M
REHEHEIAW

SEQ ID NO: 1451 - protein, 9 aa, Severe acute respiratory syndrome coronavirus 2
  REGION 1..9: note = Table A: HLA-B*38:02H HLA-B*39:01M
EHEHEIAWY

SEQ ID NO: 1452 - protein, 9 aa, Severe acute respiratory syndrome coronavirus 2
  REGION 1..9: note = Table A: HLA-B*45:01H HLA-B*40:06M
HEHEIAWYT

SEQ ID NO: 1453 - protein, 9 aa, Severe acute respiratory syndrome coronavirus 2
  REGION 1..9: note = Table A: HLA-A*74:01H HLA-A*34:01H HLA-A*66:01H
HEIAWYTER

SEQ ID NO: 1454 - protein, 9 aa, Severe acute respiratory syndrome coronavirus 2
  REGION 1..9: note = Table A: HLA-B*58:01H HLA-A*36:01H HLA-A*01:01M
YTERSEKSY

SEQ ID NO: 1455 - protein, 9 aa, Severe acute respiratory syndrome coronavirus 2
  REGION 1..9: note = Table A: HLA-B*14:02H HLA-B*14:01H HLA-B*38:01H HLA-B*38:02M HLA-B*39:01M
ERSEKSYEL

SEQ ID NO: 1456 - protein, 9 aa, Severe acute respiratory syndrome coronavirus 2
  REGION 1..9: note = Table A: HLA-B*45:01H HLA-B*40:02H HLA-B*41:02H
SEKSYELQT

SEQ ID NO: 1457 - protein, 9 aa, Severe acute respiratory syndrome coronavirus 2
  REGION 1..9: note = Table A: HLA-B*58:01M HLA-B*58:02H HLA-B*57:01H HLA-C*15:05H HLA-C*12:02H HLA-B*15:01H HLA-B*15:03H HLA-B*57:03H
KSYELQTPF

SEQ ID NO: 1458 - protein, 9 aa, Severe acute respiratory syndrome coronavirus 2
  REGION 1..9: note = Table A: HLA-B*44:05H HLA-B*18:01H HLA-B*38:02H HLA-B*40:01H HLA-B*40:02H HLA-B*40:06H HLA-B*41:02H HLA-B*13:02H HLA-B*49:01H
YELQTPFEI

SEQ ID NO: 1459 - protein, 9 aa, Severe acute respiratory syndrome coronavirus 2
  REGION 1..9: note = Table A: HLA-A*34:02M
ELQTPFEIK

SEQ ID NO: 1460 - protein, 9 aa, Severe acute respiratory syndrome coronavirus 2
  REGION 1..9: note = Table A: HLA-B*48:01H HLA-A*11:303H HLA-C*06:02H HLA-A*02:11H HLA-C*03:04H HLA-A*68:02H HLA-C*15:02H HLA-A*02:04M HLA-A*02:05M HLA-A*02:06H HLA-A*02:07H HLA-A*02:08H HLA-A*02:01H HLA-A*02:02H HLA-C*17:01M
  REGION 1..9: note = CONT. FROM ABOVE: HLA-C*08:01H HLA-B*38:01H HLA-B*38:02M HLA- B*40:06H HLA-B*57:03H HLA-B*13:01H HLA-B*13:02M HLA-C*07:04H
LQTPFEIKL

SEQ ID NO: 1461 - protein, 9 aa, Severe acute respiratory syndrome coronavirus 2
  REGION 1..9: note = Table A: HLA-A*68:02H HLA-A*02:05H
QTPFEIKLA

SEQ ID NO: 1462 - protein, 9 aa, Severe acute respiratory syndrome coronavirus 2
  REGION 1..9: note = Table A: HLA-A*34:01H HLA-A*34:02M HLA-A*66:01H
TPFEIKLAK

SEQ ID NO: 1463 - protein, 9 aa, Severe acute respiratory syndrome coronavirus 2
  REGION 1..9: note = Table A: HLA-B*44:03H
FEIKLAKKF

SEQ ID NO: 1464 - protein, 9 aa, Severe acute respiratory syndrome coronavirus 2
  REGION 1..9: note = Table A: HLA-A*02:02H HLA-A*24:07H HLA-A*32:01H HLA-B*57:03H HLA-B*13:01M
KLAKKFDTF

SEQ ID NO: 1465 - protein, 9 aa, Severe acute respiratory syndrome coronavirus 2
  REGION 1..9: note = Table A: HLA-B*45:01H HLA-B*40:06H HLA-B*50:01M
GECPNFVFP

SEQ ID NO: 1466 - protein, 9 aa, Severe acute respiratory syndrome coronavirus 2
  REGION 1..9: note = Table A: HLA-B*38:02H
FVFPLNSII

SEQ ID NO: 1467 - protein, 9 aa, Severe acute respiratory syndrome coronavirus 2
  REGION 1..9: note = Table A: HLA-B*56:01H HLA-B*55:02H HLA-B*35:07H HLA-B*54:01M
FPLNSIIKT

SEQ ID NO: 1468 - protein, 9 aa, Severe acute respiratory syndrome coronavirus 2
  REGION 1..9: note = Table A: HLA-A*02:04H HLA-A*02:02H HLA-A*02:03H
PLNSIIKTI

SEQ ID NO: 1469 - protein, 9 aa, Severe acute respiratory syndrome coronavirus 2
  REGION 1..9: note = Table A: HLA-A*74:01H HLA-A*11:01H HLA-A*11:02M HLA-A*33:01H HLA-A*33:03M HLA-A*26:03M HLA-A*68:01M HLA-A*34:01H HLA-A*34:02H HLA-A*31:01H HLA-A*66:01H
SIIKTIQPR

SEQ ID NO: 1470 - protein, 9 aa, Severe acute respiratory syndrome coronavirus 2
  REGION 1..9: note = Table A: HLA-A*02:11H HLA-A*30:01H HLA-B*13:02H
IIKTIQPRV

SEQ ID NO: 1471 - protein, 9 aa, Severe acute respiratory syndrome coronavirus 2
  REGION 1..9: note = Table A: HLA-A*11:303M HLA-A*74:01M HLA-A*03:01M HLA-A*03:02M HLA-A*11:01H HLA-A*11:02H HLA-A*36:01H HLA-A*30:01M HLA-A*30:02H HLA-A*34:02M HLA-C*07:27M HLA-A*31:01H HLA-B*57:03H HLA-A*66:01H
KTIQPRVEK

SEQ ID NO: 1472 - protein, 9 aa, Severe acute respiratory syndrome coronavirus 2
  REGION 1..9: note = Table A: HLA-A*03:02H
TIQPRVEKK

SEQ ID NO: 1473 - protein, 9 aa, Severe acute respiratory syndrome coronavirus 2
  REGION 1..9: note = Table A: HLA-B*07:02H HLA-B*07:04M
QPRVEKKKL

SEQ ID NO: 1474 - protein, 9 aa, Severe acute respiratory syndrome coronavirus 2
  REGION 1..9: note = Table A: HLA-B*13:01H
KLDGFMGRI

SEQ ID NO: 1475 - protein, 9 aa, Severe acute respiratory syndrome coronavirus 2
  REGION 1..9: note = Table A: HLA-C*14:03H
GFMGRIRSV

SEQ ID NO: 1476 - protein, 9 aa, Severe acute respiratory syndrome coronavirus 2
  REGION 1..9: note = Table A: HLA-A*30:02H HLA-B*38:02H HLA-B*15:02H
FMGRIRSVY

SEQ ID NO: 1477 - protein, 9 aa, Severe acute respiratory syndrome coronavirus 2
  REGION 1..9: note = Table A: HLA-B*27:05H
GRIRSVYPV

SEQ ID NO: 1478 - protein, 9 aa, Severe acute respiratory syndrome coronavirus 2
  REGION 1..9: note = Table A: HLA-A*30:01H
RIRSVYPVA

SEQ ID NO: 1479 - protein, 9 aa, Severe acute respiratory syndrome coronavirus 2
  REGION 1..9: note = Table A: HLA-B*56:01M HLA-B*55:02M HLA-B*35:03M HLA-C*15:05M HLA-B*55:01H HLA-B*35:01H HLA-B*35:02H HLA-B*51:01H HLA-B*35:12H HLA-B*38:02H HLA-B*39:06H HLA-B*54:01H HLA-B*07:05H
YPVASPNEC

SEQ ID NO: 1480 - protein, 9 aa, Severe acute respiratory syndrome coronavirus 2
  REGION 1..9: note = Table A: HLA-C*15:05H
SPNECNQMC

SEQ ID NO: 1481 - protein, 9 aa, Severe acute respiratory syndrome coronavirus 2
  REGION 1..9: note = Table A: HLA-B*38:02H HLA-B*15:02H
NQMCLSTLM

SEQ ID NO: 1482 - protein, 9 aa, Severe acute respiratory syndrome coronavirus 2
  REGION 1..9: note = Table A: HLA-A*25:01H HLA-A*26:01H HLA-A*26:02H HLA-A*66:01H
ETSWQTGDF

SEQ ID NO: 1483 - protein, 9 aa, Severe acute respiratory syndrome coronavirus 2
  REGION 1..9: note = Table A: HLA-B*13:02H
TSWQTGDFV

SEQ ID NO: 1484 - protein, 9 aa, Severe acute respiratory syndrome coronavirus 2
  REGION 1..9: note = Table A: HLA-A*02:05H HLA-A*02:06H
WQTGDFVKA

SEQ ID NO: 1485 - protein, 9 aa, Severe acute respiratory syndrome coronavirus 2
  REGION 1..9: note = Table A: HLA-A*68:02H
QTGDFVKAT

SEQ ID NO: 1486 - protein, 9 aa, Severe acute respiratory syndrome coronavirus 2
  REGION 1..9: note = Table A: HLA-C*14:03H HLA-A*24:02H HLA-A*24:07H HLA-A*23:01H HLA-B*38:02H HLA-B*15:02H HLA-B*07:05H
DFVKATCEF

SEQ ID NO: 1487 - protein, 9 aa, Severe acute respiratory syndrome coronavirus 2
  REGION 1..9: note = Table A: HLA-B*44:05H HLA-B*40:01H HLA-B*40:02H HLA-B*41:02H HLA-B*49:01H
CEFCGTENL

SEQ ID NO: 1488 - protein, 9 aa, Severe acute respiratory syndrome coronavirus 2
  REGION 1..9: note = Table A: HLA-A*34:02H
FCGTENLTK

SEQ ID NO: 1489 - protein, 9 aa, Severe acute respiratory syndrome coronavirus 2
  REGION 1..9: note = Table A: HLA-B*45:01M HLA-B*50:01H
TENLTKEGA

SEQ ID NO: 1490 - protein, 9 aa, Severe acute respiratory syndrome coronavirus 2
  REGION 1..9: note = Table A: HLA-A*02:08H HLA-A*02:03H
LTKEGATTC

SEQ ID NO: 1491 - protein, 9 aa, Severe acute respiratory syndrome coronavirus 2
  REGION 1..9: note = Table A: HLA-B*44:03H
KEGATTCGY

SEQ ID NO: 1492 - protein, 9 aa, Severe acute respiratory syndrome coronavirus 2
  REGION 1..9: note = Table A: HLA-B*52:01H
CGYLPQNAV

SEQ ID NO: 1493 - protein, 9 aa, Severe acute respiratory syndrome coronavirus 2
  REGION 1..9: note = Table A: HLA-C*14:03H HLA-B*39:01H
GYLPQNAVV

SEQ ID NO: 1494 - protein, 9 aa, Severe acute respiratory syndrome coronavirus 2
  REGION 1..9: note = Table A: HLA-A*34:02H
YLPQNAVVK

SEQ ID NO: 1495 - protein, 9 aa, Severe acute respiratory syndrome coronavirus 2
  REGION 1..9: note = Table A: HLA-B*42:01H HLA-B*56:01H HLA-B*53:01H HLA-B*55:02H HLA-B*35:03H HLA-C*15:05M HLA-B*35:01H HLA-B*35:02H HLA-B*51:01H HLA-B*35:07H HLA-B*35:12H HLA-B*38:02H HLA-B*54:01H HLA-B*07:04H HLA-B*07:05H
LPQNAVVKI

SEQ ID NO: 1496 - protein, 9 aa, Severe acute respiratory syndrome coronavirus 2
  REGION 1..9: note = Table A: HLA-A*30:02H HLA-B*15:01H
PQNAVVKIY

SEQ ID NO: 1497 - protein, 9 aa, Severe acute respiratory syndrome coronavirus 2
  REGION 1..9: note = Table A: HLA-B*56:01H HLA-B*55:02H HLA-A*02:05H
AVVKIYCPA

SEQ ID NO: 1498 - protein, 9 aa, Severe acute respiratory syndrome coronavirus 2
  REGION 1..9: note = Table A: HLA-C*15:05H
CPACHNSEV

SEQ ID NO: 1499 - protein, 9 aa, Severe acute respiratory syndrome coronavirus 2
  REGION 1..9: note = Table A: HLA-B*35:01H HLA-B*07:05H
HNSEVGPEH

SEQ ID NO: 1500 - protein, 9 aa, Severe acute respiratory syndrome coronavirus 2
  REGION 1..9: note = Table A: HLA-B*48:01M HLA-A*11:303H HLA-B*44:02M HLA-B*44:05H HLA-C*16:04M HLA-B*45:01M HLA-B*44:03H HLA-B*18:01H HLA-B*27:02H HLA-A*68:02H HLA-B*35:03H HLA-A*02:05H HLA-B*14:01H HLA-B*35:02M HLA-C*08:01H
  REGION 1..9: note = CONT. FROM ABOVE: HLA-B*35:12M HLA-B*37:01M HLA-B*38:01H HLA- B*38:02H HLA-B*40:01H HLA-B*40:02H HLA-B*40:06H HLA-B*39:01H HLA-B*07:05H HLA-B*41:02H HLA-B*13:01H HLA-B*49:01M HLA-C*07 :04H HLA-B*50:01M
SEVGPEHSL

SEQ ID NO: 1501 - protein, 9 aa, Severe acute respiratory syndrome coronavirus 2
  REGION 1..9: note = Table A: HLA-A*26:03M HLA-A*68:02H HLA-A*34:01M
EVGPEHSLA

SEQ ID NO: 1502 - protein, 9 aa, Severe acute respiratory syndrome coronavirus 2
  REGION 1..9: note = Table A: HLA-B*35:01M HLA-B*35:08H HLA-B*35:07H HLA-B*07:05H
GPEHSLAEY

SEQ ID NO: 1503 - protein, 9 aa, Severe acute respiratory syndrome coronavirus 2
  REGION 1..9: note = Table A: HLA-A*02:02M
SLAEYHNES

SEQ ID NO: 1504 - protein, 9 aa, Severe acute respiratory syndrome coronavirus 2
  REGION 1..9: note = Table A: HLA-B*44:05M HLA-B*45:01M HLA-B*44:03H HLA-B*37:01H HLA-B*40:01H HLA-B*40:02M HLA-B*41:02M HLA-B*49:01H HLA-B*50:01M
AEYHNESGL

SEQ ID NO: 1505 - protein, 9 aa, Severe acute respiratory syndrome coronavirus 2
  REGION 1..9: note = Table A: HLA-A*33:03H HLA-A*34:02H
EYHNESGLK

SEQ ID NO: 1506 - protein, 9 aa, Severe acute respiratory syndrome coronavirus 2
  REGION 1..9: note = Table A: HLA-B*38:01H HLA-B*38:02M HLA-B*39:06H HLA-B*39:01M HLA-B*15:10M
YHNESGLKT

SEQ ID NO: 1507 - protein, 9 aa, Severe acute respiratory syndrome coronavirus 2
  REGION 1..9: note = Table A: HLA-B*44:02H HLA-B*44:05H HLA-B*45:01H HLA-B*44:03M HLA-B*18:01M HLA-B*40:01H HLA-B*40:02H HLA-B*39:01H HLA-B*07:05M HLA-B*41:02H HLA-B*49:01H
NESGLKTIL

SEQ ID NO: 1508 - protein, 9 aa, Severe acute respiratory syndrome coronavirus 2
  REGION 1..9: note = Table A: HLA-A*33:01H HLA-A*33:03H HLA-A*26:03H HLA-A*68:01M HLA-A*34:01H HLA-A*34:02M HLA-A*66:01M
ESGLKTILR

SEQ ID NO: 1509 - protein, 9 aa, Severe acute respiratory syndrome coronavirus 2
  REGION 1..9: note = Table A: HLA-A*11:303H HLA-A*03:01H HLA-A*11:01M HLA-A*11:02M HLA-A*34:02M HLA-C*07:27H
SGLKTILRK

SEQ ID NO: 1510 - protein, 9 aa, Severe acute respiratory syndrome coronavirus 2
  REGION 1..9: note = Table A: HLA-B*38:02H
ILRKGGRTI

SEQ ID NO: 1511 - protein, 9 aa, Severe acute respiratory syndrome coronavirus 2
  REGION 1..9: note = Table A: HLA-B*15:03M
RKGGRTIAF

SEQ ID NO: 1512 - protein, 9 aa, Severe acute respiratory syndrome coronavirus 2
  REGION 1..9: note = Table A: HLA-B*38:02H HLA-B*15:01H HLA-B*15:02M HLA-B*07:05H
TIAFGGCVF

SEQ ID NO: 1513 - protein, 9 aa, Severe acute respiratory syndrome coronavirus 2
  REGION 1..9: note = Table A: HLA-A*29:01H HLA-A*29:02H
AFGGCVFSY

SEQ ID NO: 1514 - protein, 9 aa, Severe acute respiratory syndrome coronavirus 2
  REGION 1..9: note = Table A: HLA-A*11:02H HLA-A*34:02M
FSYVGCHNK

SEQ ID NO: 1515 - protein, 9 aa, Severe acute respiratory syndrome coronavirus 2
  REGION 1..9: note = Table A: HLA-C*14:03H HLA-B*56:01H HLA-B*55:02H HLA-B*55:01H HLA-B*39:06H HLA-B*54:01H
AYWVPRASA

SEQ ID NO: 1516 - protein, 9 aa, Severe acute respiratory syndrome coronavirus 2
  REGION 1..9: note = Table A: HLA-B*39:01M
NHTGVVGEG

SEQ ID NO: 1517 - protein, 9 aa, Severe acute respiratory syndrome coronavirus 2
  REGION 1..9: note = Table A: HLA-A*02:05M HLA-A*02:08H HLA-A*02:02H
VVGEGSEGL

SEQ ID NO: 1518 - protein, 9 aa, Severe acute respiratory syndrome coronavirus 2
  REGION 1..9: note = Table A: HLA-B*44:05M HLA-B*40:01H HLA-B*40:02H HLA-B*41:02H
SEGLNDNLL

SEQ ID NO: 1519 - protein, 9 aa, Severe acute respiratory syndrome coronavirus 2
  REGION 1..9: note = Table A: HLA-A*02:04M HLA-A*02:01M HLA-A*02:02H HLA-A*02:03H HLA-B*38:02H HLA-B*13:02H
GLNDNLLEI

SEQ ID NO: 1520 - protein, 9 aa, Severe acute respiratory syndrome coronavirus 2
  REGION 1..9: note = Table A: HLA-B*40:02H HLA-B*41:02H HLA-B*49:01M
LEILQKEKV

SEQ ID NO: 1521 - protein, 9 aa, Severe acute respiratory syndrome coronavirus 2
  REGION 1..9: note = Table A: HLA-A*02:11H HLA-B*13:01H HLA-B*13:02H
ILQKEKVNI

SEQ ID NO: 1522 - protein, 9 aa, Severe acute respiratory syndrome coronavirus 2
  REGION 1..9: note = Table A: HLA-B*45:01M HLA-B*40:02M HLA-B*40:06M HLA-B*41:02M HLA-B*49:01M HLA-B*50:01H
KEKVNINIV

SEQ ID NO: 1523 - protein, 9 aa, Severe acute respiratory syndrome coronavirus 2
  REGION 1..9: note = Table A: HLA-A*26:01H
VNINIVGDF

SEQ ID NO: 1524 - protein, 9 aa, Severe acute respiratory syndrome coronavirus 2
  REGION 1..9: note = Table A: HLA-B*40:02H
GDFKLNEEI

SEQ ID NO: 1525 - protein, 9 aa, Severe acute respiratory syndrome coronavirus 2
  REGION 1..9: note = Table A: HLA-A*02:11M HLA-A*02:04H HLA-A*02:02M HLA-A*02:03H HLA-B*38:02H HLA-B*13:01H HLA-B*13:02H
KLNEEIAII

SEQ ID NO: 1526 - protein, 9 aa, Severe acute respiratory syndrome coronavirus 2
  REGION 1..9: note = Table A: HLA-B*45:01M
NEEIAIILA

SEQ ID NO: 1527 - protein, 9 aa, Severe acute respiratory syndrome coronavirus 2
  REGION 1..9: note = Table A: HLA-A*25:01H HLA-A*26:01H HLA-A*26:02H HLA-A*26:03H HLA-A*68:02M HLA-A*34:01M HLA-A*34:02H HLA-B*35:01H HLA-B*38:02H HLA-B*15:02H HLA-B*07:05H HLA-A*66:01H
EIAIILASF

SEQ ID NO: 1528 - protein, 9 aa, Severe acute respiratory syndrome coronavirus 2
  REGION 1..9: note = Table A: HLA-B*55:02H
AIILASFSA

SEQ ID NO: 1529 - protein, 9 aa, Severe acute respiratory syndrome coronavirus 2
  REGION 1..9: note = Table A: HLA-A*02:02H HLA-A*02:03H HLA-B*38:02H
ILASFSAST

SEQ ID NO: 1530 - protein, 9 aa, Severe acute respiratory syndrome coronavirus 2
  REGION 1..9: note = Table A: HLA-C*14:02H HLA-C*14:03H HLA-B*46:01H HLA-C*04:01H HLA-C*15:05H HLA-A*24:07H HLA-B*38:02H HLA-B*15:01H HLA-B*15:02M HLA-B*07:05M
SFSASTSAF

SEQ ID NO: 1531 - protein, 9 aa, Severe acute respiratory syndrome coronavirus 2
  REGION 1..9: note = Table A: HLA-A*68:02H
FSASTSAFV

SEQ ID NO: 1532 - protein, 9 aa, Severe acute respiratory syndrome coronavirus 2
  REGION 1..9: note = Table A: HLA-C*16:04H HLA-A*02:11H HLA-A*68:02H HLA-C*15:05M HLA-C*15:02H HLA-A*02:04H HLA-A*02:05M HLA-A*02:06H HLA-A*02:08M HLA-A*02:01M HLA-A*02:02H HLA-A*02:03H HLA-B*38:02M HLA-B*07:05H HLA-B*13:02H
STSAFVETV

SEQ ID NO: 1533 - protein, 9 aa, Severe acute respiratory syndrome coronavirus 2
  REGION 1..9: note = Table A: HLA-A*03:02H HLA-A*11:01M HLA-A*11:02H HLA-A*36:01H HLA-B*27:02H HLA-A*68:01M HLA-A*68:02H HLA-A*34:02M
TSAFVETVK

SEQ ID NO: 1534 - protein, 9 aa, Severe acute respiratory syndrome coronavirus 2
  REGION 1..9: note = Table A: HLA-C*14:02H HLA-C*14:03M
AFVETVKGL

SEQ ID NO: 1535 - protein, 9 aa, Severe acute respiratory syndrome coronavirus 2
  REGION 1..9: note = Table A: HLA-B*44:02H HLA-B*44:03M HLA-B*18:01H HLA-B*07:05H
VETVKGLDY

SEQ ID NO: 1536 - protein, 9 aa, Severe acute respiratory syndrome coronavirus 2
  REGION 1..9: note = Table A: HLA-A*36:01H HLA-A*33:03H HLA-A*26:03H HLA-A*68:01H HLA-A*68:02H HLA-A*34:01H HLA-A*34:02H HLA-A*66:01H
ETVKGLDYK

SEQ ID NO: 1537 - protein, 9 aa, Severe acute respiratory syndrome coronavirus 2
  REGION 1..9: note = Table A: HLA-A*11:02H HLA-A*36:01H HLA-A*30:01H HLA-A*30:02H
KGLDYKAFK

SEQ ID NO: 1538 - protein, 9 aa, Severe acute respiratory syndrome coronavirus 2
  REGION 1..9: note = Table A: HLA-B*57:03H
KAFKQIVES

SEQ ID NO: 1539 - protein, 9 aa, Severe acute respiratory syndrome coronavirus 2
  REGION 1..9: note = Table A: HLA-B*08:01H HLA-B*38:02H HLA-B*39:06H
AFKQIVESC

SEQ ID NO: 1540 - protein, 9 aa, Severe acute respiratory syndrome coronavirus 2
  REGION 1..9: note = Table A: HLA-A*26:02H HLA-B*15:02H
QIVESCGNF

SEQ ID NO: 1541 - protein, 9 aa, Severe acute respiratory syndrome coronavirus 2
  REGION 1..9: note = Table A: HLA-A*03:02H
IVESCGNFK

SEQ ID NO: 1542 - protein, 9 aa, Severe acute respiratory syndrome coronavirus 2
  REGION 1..9: note = Table A: HLA-B*49:01H
VESCGNFKV

SEQ ID NO: 1543 - protein, 9 aa, Severe acute respiratory syndrome coronavirus 2
  REGION 1..9: note = Table A: HLA-A*11:01H HLA-A*11:02H HLA-A*34:02H
SCGNFKVTK

SEQ ID NO: 1544 - protein, 9 aa, Severe acute respiratory syndrome coronavirus 2
  REGION 1..9: note = Table A: HLA-A*03:02H HLA-A*11:02H HLA-A*34:02H
GNFKVTKGK

SEQ ID NO: 1545 - protein, 9 aa, Severe acute respiratory syndrome coronavirus 2
  REGION 1..9: note = Table A: HLA-B*58:02H HLA-B*07:04H HLA-B*57:03M
KAKKGAWNI

SEQ ID NO: 1546 - protein, 9 aa, Severe acute respiratory syndrome coronavirus 2
  REGION 1..9: note = Table A: HLA-A*11:01H HLA-A*11:02H HLA-B*27:02H HLA-A*68:01H HLA-A*34:02M
GAWNIGEQK

SEQ ID NO: 1547 - protein, 9 aa, Severe acute respiratory syndrome coronavirus 2
  REGION 1..9: note = Table A: HLA-B*45:01H HLA-B*40:02H HLA-B*40:06M HLA-B*41:02H HLA-B*50:01M
GEQKSILSP

SEQ ID NO: 1548 - protein, 9 aa, Severe acute respiratory syndrome coronavirus 2
  REGION 1..9: note = Table A: HLA-B*15:03M
QKSILSPLY

SEQ ID NO: 1549 - protein, 9 aa, Severe acute respiratory syndrome coronavirus 2
  REGION 1..9: note = Table A: HLA-C*15:02H
KSILSPLYA

SEQ ID NO: 1550 - protein, 9 aa, Severe acute respiratory syndrome coronavirus 2
  REGION 1..9: note = Table A: HLA-A*11:303H HLA-A*29:02H HLA-A*02:04H HLA-B*38:02H HLA-B*15:02H
SILSPLYAF

SEQ ID NO: 1551 - protein, 9 aa, Severe acute respiratory syndrome coronavirus 2
  REGION 1..9: note = Table A: HLA-A*02:11H HLA-A*02:07H HLA-A*02:01H HLA-A*02:02M HLA-A*02:03H HLA-B*38:02H
ILSPLYAFA

SEQ ID NO: 1552 - protein, 9 aa, Severe acute respiratory syndrome coronavirus 2
  REGION 1..9: note = Table A: HLA-A*33:01H HLA-A*33:03H HLA-A*26:03H HLA-A*68:01M HLA-A*34:01M HLA-A*34:02H HLA-A*66:01M
YAFASEAAR

SEQ ID NO: 1553 - protein, 9 aa, Severe acute respiratory syndrome coronavirus 2
  REGION 1..9: note = Table A: HLA-B*58:02H HLA-A*11:303M HLA-C*16:01H HLA-C*16:04M HLA-B*46:01H HLA-C*06:02M HLA-C*03:03M HLA-C*12:05H HLA-B*53:01H HLA-C*03:02M HLA-C*03:04H HLA-A*68:02H HLA-B*35:03M HLA-C*15:05M HLA-C*12:02M
  REGION 1..9: note = CONT. FROM ABOVE: HLA-C*12:03H HLA-C*15:02M HLA-A*02:05H HLA- A*02:06H HLA-A*02:02H HLA-A*02:03H HLA-A*34:01H HLA-C*07:27H HLA-B*35:01H HLA-B*35:02H HLA-B*51:01M HLA-C*17:01H HLA-B*35 :07H HLA-C*08:01H HLA-B*38:02M HLA-B*07:04M HLA-C*02:02M
  REGION 1..9: note = CONT. FROM ABOVE: HLA-B*13:02H HLA-B*15:10H HLA-C*07:04H
FASEAARVV

SEQ ID NO: 1554 - protein, 9 aa, Severe acute respiratory syndrome coronavirus 2
  REGION 1..9: note = Table A: HLA-A*74:01H HLA-A*68:01H HLA-A*31:01H
ASEAARVVR

SEQ ID NO: 1555 - protein, 9 aa, Severe acute respiratory syndrome coronavirus 2
  REGION 1..9: note = Table A: HLA-B*45:01H
SEAARVVRS

SEQ ID NO: 1556 - protein, 9 aa, Severe acute respiratory syndrome coronavirus 2
  REGION 1..9: note = Table A: HLA-B*58:02H HLA-A*25:01H HLA-B*53:01H HLA-A*68:02M HLA-A*34:01H HLA-B*51:01H HLA-B*38:02H
EAARVVRSI

SEQ ID NO: 1557 - protein, 9 aa, Severe acute respiratory syndrome coronavirus 2
  REGION 1..9: note = Table A: HLA-B*46:01H HLA-C*03:02H HLA-C*12:02H HLA-B*07:02M HLA-B*07:04M HLA-B*57:03H
AARVVRSIF

SEQ ID NO: 1558 - protein, 9 aa, Severe acute respiratory syndrome coronavirus 2
  REGION 1..9: note = Table A: HLA-A*74:01H HLA-A*11:01H HLA-A*11:02H HLA-A*31:01M HLA-A*66:01H
RVVRSIFSR

SEQ ID NO: 1559 - protein, 9 aa, Severe acute respiratory syndrome coronavirus 2
  REGION 1..9: note = Table A: HLA-A*74:01H HLA-A*30:01H HLA-A*31:01H
VVRSIFSRT

SEQ ID NO: 1560 - protein, 9 aa, Severe acute respiratory syndrome coronavirus 2
  REGION 1..9: note = Table A: HLA-C*06:02H HLA-C*07:01H HLA-B*14:02H
VRSIFSRTL

SEQ ID NO: 1561 - protein, 9 aa, Severe acute respiratory syndrome coronavirus 2
  REGION 1..9: note = Table A: HLA-A*03:01H HLA-A*11:02H HLA-B*08:01H HLA-A*02:11H HLA-C*03:02H HLA-A*68:02H HLA-C*15:05H HLA-C*12:03H HLA-C*15:02H HLA-A*02:03H HLA-A*34:02H HLA-B*38:02H HLA-B*13:02H
SIFSRTLET

SEQ ID NO: 1562 - protein, 9 aa, Severe acute respiratory syndrome coronavirus 2
  REGION 1..9: note = Table A: HLA-B*38:02H HLA-B*39:01H
TLETAQNSV

SEQ ID NO: 1563 - protein, 9 aa, Severe acute respiratory syndrome coronavirus 2
  REGION 1..9: note = Table A: HLA-B*49:01H
LETAQNSVR

SEQ ID NO: 1564 - protein, 9 aa, Severe acute respiratory syndrome coronavirus 2
  REGION 1..9: note = Table A: HLA-A*33:03H HLA-A*26:01M HLA-A*26:02M HLA-A*26:03H HLA-A*68:01M HLA-A*68:02H HLA-A*34:01M HLA-A*34:02M HLA-A*66:01M
ETAQNSVRV

SEQ ID NO: 1565 - protein, 9 aa, Severe acute respiratory syndrome coronavirus 2
  REGION 1..9: note = Table A: HLA-B*42:01H HLA-B*58:02M HLA-C*14:03H HLA-A*11:303M HLA-C*16:01H HLA-C*16:04H HLA-B*46:01H HLA-C*06:02M HLA-C*03:03H HLA-C*12:05H HLA-B*53:01H HLA-C*03:02M HLA-C*03:04H HLA-B*35:03H HLA-C*15:05M
  REGION 1..9: note = CONT. FROM ABOVE: HLA-C*01:02H HLA-C*12:02M HLA-C*12:03H HLA- C*15:02H HLA-C*07:27M HLA-B*35:01H HLA-C*17:01M HLA-B*35:07H HLA-C*08:01M HLA-B*38:02M HLA-B*07:02H HLA-B*07:04H HLA-B*15 :02H HLA-B*39:01H HLA-B*41:02H HLA-C*02:02H HLA-B*15:10H
  REGION 1..9: note = CONT. FROM ABOVE: HLA-C*07:04M
TAQNSVRVL

SEQ ID NO: 1566 - protein, 9 aa, Severe acute respiratory syndrome coronavirus 2
  REGION 1..9: note = Table A: HLA-A*31:01H
AQNSVRVLQ

SEQ ID NO: 1567 - protein, 9 aa, Severe acute respiratory syndrome coronavirus 2
  REGION 1..9: note = Table A: HLA-A*34:02H
QNSVRVLQK

SEQ ID NO: 1568 - protein, 9 aa, Severe acute respiratory syndrome coronavirus 2
  REGION 1..9: note = Table A: HLA-A*02:05H
NSVRVLQKA

SEQ ID NO: 1569 - protein, 9 aa, Severe acute respiratory syndrome coronavirus 2
  REGION 1..9: note = Table A: HLA-B*55:02H HLA-B*55:01H
SVRVLQKAA

SEQ ID NO: 1570 - protein, 9 aa, Severe acute respiratory syndrome coronavirus 2
  REGION 1..9: note = Table A: HLA-B*14:02H HLA-B*14:01H
VRVLQKAAI

SEQ ID NO: 1571 - protein, 9 aa, Severe acute respiratory syndrome coronavirus 2
  REGION 1..9: note = Table A: HLA-B*52:01H HLA-B*13:02H
VLQKAAITI

SEQ ID NO: 1572 - protein, 9 aa, Severe acute respiratory syndrome coronavirus 2
  REGION 1..9: note = Table A: HLA-B*15:01H
LQKAAITIL

SEQ ID NO: 1573 - protein, 9 aa, Severe acute respiratory syndrome coronavirus 2
  REGION 1..9: note = Table A: HLA-C*12:05M HLA-A*02:11H HLA-A*68:02H HLA-A*02:05M HLA-A*02:06H HLA-A*02:08H HLA-C*08:01H HLA-B*38:02M HLA-B*13:02H
AAITILDGI

SEQ ID NO: 1574 - protein, 9 aa, Severe acute respiratory syndrome coronavirus 2
  REGION 1..9: note = Table A: HLA-C*14:03H HLA-A*11:303M HLA-A*25:01M HLA-B*46:01H HLA-A*26:01M HLA-A*26:02H HLA-A*26:03M HLA-A*29:01M HLA-A*29:02M HLA-B*44:03H HLA-B*18:01H HLA-C*07:01H HLA-B*27:02H HLA-C*03:02M HLA-A*30:02M
  REGION 1..9: note = CONT. FROM ABOVE: HLA-C*15:05H HLA-C*12:02M HLA-C*12:03H HLA- A*02:03H HLA-A*34:01H HLA-A*34:02H HLA-B*35:01H HLA-B*35:08H HLA-B*35:07M HLA-B*15:13H HLA-B*38:02H HLA-B*15:01H HLA-B*15 :02H HLA-B*15:03H HLA-B*39:01M HLA-B*07:05M HLA-C*02:02H
  REGION 1..9: note = CONT. FROM ABOVE: HLA-B*15:11M
TILDGISQY

SEQ ID NO: 1575 - protein, 9 aa, Severe acute respiratory syndrome coronavirus 2
  REGION 1..9: note = Table A: HLA-A*33:01M HLA-A*33:03H HLA-A*26:03M HLA-A*68:01H HLA-A*34:01M HLA-A*66:01M
DGISQYSLR

SEQ ID NO: 1576 - protein, 9 aa, Severe acute respiratory syndrome coronavirus 2
  REGION 1..9: note = Table A: HLA-B*58:02M HLA-C*15:02H
ISQYSLRLI

SEQ ID NO: 1577 - protein, 9 aa, Severe acute respiratory syndrome coronavirus 2
  REGION 1..9: note = Table A: HLA-C*08:01H HLA-B*57:03H
YSLRLIDAM

SEQ ID NO: 1578 - protein, 9 aa, Severe acute respiratory syndrome coronavirus 2
  REGION 1..9: note = Table A: HLA-B*38:02H HLA-B*15:02M
SLRLIDAMM

SEQ ID NO: 1579 - protein, 9 aa, Severe acute respiratory syndrome coronavirus 2
  REGION 1..9: note = Table A: HLA-B*13:02H
RLIDAMMFT

SEQ ID NO: 1580 - protein, 9 aa, Severe acute respiratory syndrome coronavirus 2
  REGION 1..9: note = Table A: HLA-A*68:02H HLA-B*35:03H HLA-C*15:05M HLA-A*34:01H HLA-B*35:01H HLA-B*51:01M HLA-B*38:02H HLA-B*07:05M
DAMMFTSDL

SEQ ID NO: 1581 - protein, 9 aa, Severe acute respiratory syndrome coronavirus 2
  REGION 1..9: note = Table A: HLA-B*38:02H
MMFTSDLAT

SEQ ID NO: 1582 - protein, 9 aa, Severe acute respiratory syndrome coronavirus 2
  REGION 1..9: note = Table A: HLA-C*04:03M HLA-C*15:05H HLA-C*08:02H HLA-B*38:02H HLA-B*39:01H HLA-C*05:01M
TSDLATNNL

SEQ ID NO: 1583 - protein, 9 aa, Severe acute respiratory syndrome coronavirus 2
  REGION 1..9: note = Table A: HLA-B*38:02H
DLATNNLVV

SEQ ID NO: 1584 - protein, 9 aa, Severe acute respiratory syndrome coronavirus 2
  REGION 1..9: note = Table A: HLA-A*11:303H HLA-C*03:03H HLA-C*12:05H HLA-C*03:02H HLA-C*03:04H
LATNNLVVM

SEQ ID NO: 1585 - protein, 9 aa, Severe acute respiratory syndrome coronavirus 2
  REGION 1..9: note = Table A: HLA-A*68:02H HLA-A*02:08H
ATNNLVVMA

SEQ ID NO: 1586 - protein, 9 aa, Severe acute respiratory syndrome coronavirus 2
  REGION 1..9: note = Table A: HLA-B*18:01H HLA-B*35:01H HLA-B*38:02H HLA-B*15:01H HLA-B*15:02H HLA-B*07:05H
TNNLVVMAY

SEQ ID NO: 1587 - protein, 9 aa, Severe acute respiratory syndrome coronavirus 2
  REGION 1..9: note = Table A: HLA-A*02:11H HLA-A*02:02H HLA-A*02:03M
VMAYITGGV

SEQ ID NO: 1588 - protein, 9 aa, Severe acute respiratory syndrome coronavirus 2
  REGION 1..9: note = Table A: HLA-C*15:05H HLA-B*51:01H HLA-B*38:02H
MAYITGGVV

SEQ ID NO: 1589 - protein, 9 aa, Severe acute respiratory syndrome coronavirus 2
  REGION 1..9: note = Table A: HLA-A*11:303H HLA-C*04:03H HLA-C*03:03H HLA-A*02:11H HLA-C*03:04M HLA-A*68:02H HLA-B*35:03H HLA-C*15:05H HLA-C*15:02H HLA-A*02:04M HLA-A*02:05M HLA-A*02:06H HLA-A*02:07H HLA-A*02:08H HLA-B*14:01H
  REGION 1..9: note = CONT. FROM ABOVE: HLA-A*02:01H HLA-A*02:02M HLA-A*02:03H HLA- C*17:01H HLA-C*08:01H HLA-B*38:02M HLA-B*39:01H HLA-C*02:02H HLA-C*07:04M
YITGGVVQL

SEQ ID NO: 1590 - protein, 9 aa, Severe acute respiratory syndrome coronavirus 2
  REGION 1..9: note = Table A: HLA-A*68:02H
ITGGVVQLT

SEQ ID NO: 1591 - protein, 9 aa, Severe acute respiratory syndrome coronavirus 2
  REGION 1..9: note = Table A: HLA-B*58:01H HLA-B*57:01H HLA-A*25:01M HLA-B*44:03H HLA-B*27:02H HLA-B*53:01H HLA-B*15:13H HLA-B*38:02H HLA-B*15:01H HLA-B*57:03M HLA-B*13:01H
GVVQLTSQW

SEQ ID NO: 1592 - protein, 9 aa, Severe acute respiratory syndrome coronavirus 2
  REGION 1..9: note = Table A: HLA-A*02:03H HLA-B*38:02H
WLTNIFGTV

SEQ ID NO: 1593 - protein, 9 aa, Severe acute respiratory syndrome coronavirus 2
  REGION 1..9: note = Table A: HLA-B*58:01H HLA-A*36:01H HLA-B*46:01M HLA-A*29:02H HLA-C*03:02H HLA-A*30:02M HLA-B*38:02H HLA-B*15:01H HLA-B*15:02H HLA-B*15:03H HLA-B*07:05H
LTNIFGTVY

SEQ ID NO: 1594 - protein, 9 aa, Severe acute respiratory syndrome coronavirus 2
  REGION 1..9: note = Table A: HLA-A*03:02H HLA-A*11:01H HLA-A*11:02M HLA-A*68:01H HLA-A*34:01H HLA-A*34:02M
NIFGTVYEK

SEQ ID NO: 1595 - protein, 9 aa, Severe acute respiratory syndrome coronavirus 2
  REGION 1..9: note = Table A: HLA-A*02:02H HLA-A*24:02H HLA-A*24:07H HLA-A*23:01H
IFGTVYEKL

SEQ ID NO: 1596 - protein, 9 aa, Severe acute respiratory syndrome coronavirus 2
  REGION 1..9: note = Table A: HLA-A*02:11H HLA-A*68:02H HLA-A*02:03H HLA-B*38:02H
TVYEKLKPV

SEQ ID NO: 1597 - protein, 9 aa, Severe acute respiratory syndrome coronavirus 2
  REGION 1..9: note = Table A: HLA-A*24:07M HLA-A*23:01H
VYEKLKPVL

SEQ ID NO: 1598 - protein, 9 aa, Severe acute respiratory syndrome coronavirus 2
  REGION 1..9: note = Table A: HLA-A*02:11H HLA-A*02:04M HLA-A*02:05H HLA-A*02:08H HLA-A*02:02H HLA-A*02:03H
KLKPVLDWL

SEQ ID NO: 1599 - protein, 9 aa, Severe acute respiratory syndrome coronavirus 2
  REGION 1..9: note = Table A: HLA-C*04:03H HLA-A*02:07M HLA-B*13:01H
VLDWLEEKF

SEQ ID NO: 1600 - protein, 9 aa, Severe acute respiratory syndrome coronavirus 2
  REGION 1..9: note = Table A: HLA-B*49:01H
LEEKFKEGV

SEQ ID NO: 1601 - protein, 9 aa, Severe acute respiratory syndrome coronavirus 2
  REGION 1..9: note = Table A: HLA-B*38:02H HLA-B*15:03H
EKFKEGVEF

SEQ ID NO: 1602 - protein, 9 aa, Severe acute respiratory syndrome coronavirus 2
  REGION 1..9: note = Table A: HLA-B*58:02H HLA-C*14:02H HLA-C*14:03H HLA-A*02:11H HLA-A*30:01M HLA-A*02:05H HLA-A*02:08H HLA-A*02:02M HLA-A*02:03H HLA-A*24:02H HLA-A*24:07M HLA-A*23:01H HLA-B*38:02H HLA-B*57:03H
KFKEGVEFL

SEQ ID NO: 1603 - protein, 9 aa, Severe acute respiratory syndrome coronavirus 2
  REGION 1..9: note = Table A: HLA-A*24:07H
EFLRDGWEI

SEQ ID NO: 1604 - protein, 9 aa, Severe acute respiratory syndrome coronavirus 2
  REGION 1..9: note = Table A: HLA-B*51:01M
DGWEIVKFI

SEQ ID NO: 1605 - protein, 9 aa, Severe acute respiratory syndrome coronavirus 2
  REGION 1..9: note = Table A: HLA-B*45:01H HLA-B*40:02H HLA-B*40:06M HLA-B*49:01H HLA-B*50:01M
WEIVKFIST

SEQ ID NO: 1606 - protein, 9 aa, Severe acute respiratory syndrome coronavirus 2
  REGION 1..9: note = Table A: HLA-A*26:01H HLA-A*26:02H HLA-A*26:03H HLA-A*68:02H HLA-A*02:05H HLA-B*38:02H
EIVKFISTC

SEQ ID NO: 1607 - protein, 9 aa, Severe acute respiratory syndrome coronavirus 2
  REGION 1..9: note = Table A: HLA-B*44:05H HLA-B*45:01H HLA-B*40:01H HLA-B*40:02M HLA-B*41:02M HLA-B*49:01H HLA-B*50:01M
CEIVGGQIV

SEQ ID NO: 1608 - protein, 9 aa, Severe acute respiratory syndrome coronavirus 2
  REGION 1..9: note = Table A: HLA-A*68:02H HLA-C*15:05H HLA-A*02:05H HLA-A*02:08M HLA-A*02:03H HLA-B*38:02H
IVGGQIVTC

SEQ ID NO: 1609 - protein, 9 aa, Severe acute respiratory syndrome coronavirus 2
  REGION 1..9: note = Table A: HLA-B*40:01H HLA-B*40:02M HLA-B*40:06H HLA-B*41:02H HLA-B*49:01H
KEIKESVQT

SEQ ID NO: 1610 - protein, 9 aa, Severe acute respiratory syndrome coronavirus 2
  REGION 1..9: note = Table A: HLA-A*25:01H HLA-B*46:01H HLA-A*26:01H HLA-A*26:02H HLA-A*26:03H HLA-B*08:01H HLA-A*68:02H HLA-C*12:02H HLA-A*34:01M HLA-B*38:02M HLA-B*15:01M HLA-B*15:02M
EIKESVQTF

SEQ ID NO: 1611 - protein, 9 aa, Severe acute respiratory syndrome coronavirus 2
  REGION 1..9: note = Table A: HLA-B*15:03H
IKESVQTFF

SEQ ID NO: 1612 - protein, 9 aa, Severe acute respiratory syndrome coronavirus 2
  REGION 1..9: note = Table A: HLA-A*68:02M HLA-A*34:02H
ESVQTFFKL

SEQ ID NO: 1613 - protein, 9 aa, Severe acute respiratory syndrome coronavirus 2
  REGION 1..9: note = Table A: HLA-A*68:02H HLA-C*15:02H HLA-A*02:04H HLA-A*02:06H HLA-A*02:07H
SVQTFFKLV

SEQ ID NO: 1614 - protein, 9 aa, Severe acute respiratory syndrome coronavirus 2
  REGION 1..9: note = Table A: HLA-A*11:303H HLA-A*74:01H HLA-A*03:01H HLA-A*03:02H HLA-A*11:01M HLA-A*11:02H HLA-A*36:01H HLA-A*33:03H HLA-A*30:01H HLA-A*68:01H HLA-A*68:02H HLA-A*34:01H HLA-A*34:02H HLA-C*07:27H HLA-A*66:01H
QTFFKLVNK

SEQ ID NO: 1615 - protein, 9 aa, Severe acute respiratory syndrome coronavirus 2
  REGION 1..9: note = Table A: HLA-A*24:07M HLA-A*23:01H
TFFKLVNKF

SEQ ID NO: 1616 - protein, 9 aa, Severe acute respiratory syndrome coronavirus 2
  REGION 1..9: note = Table A: HLA-A*11:303H HLA-A*74:01H HLA-A*03:01H HLA-B*08:01H HLA-A*02:11M HLA-C*03:02H HLA-C*03:04H HLA-C*15:02M HLA-A*02:04M HLA-A*02:06H HLA-A*02:07H HLA-A*02:01H HLA-A*02:02M HLA-A*02:03H HLA-C*08:01H
  REGION 1..9: note = CONT. FROM ABOVE: HLA-B*38:02H HLA-A*32:01H HLA-B*40:06M HLA- B*07:04H HLA-B*13:01H HLA-B*13:02H
KLVNKFLAL

SEQ ID NO: 1617 - protein, 9 aa, Severe acute respiratory syndrome coronavirus 2
  REGION 1..9: note = Table A: HLA-B*38:02H
FLALCADSI

SEQ ID NO: 1618 - protein, 9 aa, Severe acute respiratory syndrome coronavirus 2
  REGION 1..9: note = Table A: HLA-B*45:01H HLA-B*50:01H
ADSIIIGGA

SEQ ID NO: 1619 - protein, 9 aa, Severe acute respiratory syndrome coronavirus 2
  REGION 1..9: note = Table A: HLA-A*26:03H HLA-A*68:01H HLA-A*34:01M HLA-A*34:02H HLA-A*66:01H
DSIIIGGAK

SEQ ID NO: 1620 - protein, 9 aa, Severe acute respiratory syndrome coronavirus 2
  REGION 1..9: note = Table A: HLA-A*11:303M HLA-B*44:05H HLA-C*03:03H HLA-C*03:04H HLA-C*15:05H HLA-A*02:05M HLA-A*02:08M HLA-A*02:02H HLA-A*34:01H HLA-C*08:01H HLA-B*38:02H HLA-B*15:01H
SIIIGGAKL

SEQ ID NO: 1621 - protein, 9 aa, Severe acute respiratory syndrome coronavirus 2
  REGION 1..9: note = Table A: HLA-A*03:01H HLA-A*03:02H HLA-A*11:01H HLA-A*11:02H HLA-A*30:01H HLA-A*34:01H HLA-A*34:02M HLA-A*66:01H
IIIGGAKLK

SEQ ID NO: 1622 - protein, 9 aa, Severe acute respiratory syndrome coronavirus 2
  REGION 1..9: note = Table A: HLA-B*08:01H HLA-B*07:04H
GAKLKALNL

SEQ ID NO: 1623 - protein, 9 aa, Severe acute respiratory syndrome coronavirus 2
  REGION 1..9: note = Table A: HLA-B*58:01H HLA-B*58:02M HLA-A*11:303H HLA-B*57:01M HLA-C*15:05H HLA-C*12:02H HLA-B*35:01H HLA-A*24:07H HLA-C*08:01H HLA-A*23:01H HLA-B*38:02H HLA-B*15:01H HLA-B*15:03M HLA-B*07:05H HLA-B*57:03H
  REGION 1..9: note = CONT. FROM ABOVE: HLA-B*13:01H
KALNLGETF

SEQ ID NO: 1624 - protein, 9 aa, Severe acute respiratory syndrome coronavirus 2
  REGION 1..9: note = Table A: HLA-A*02:02H HLA-A*02:03H HLA-B*38:02H
ALNLGETFV

SEQ ID NO: 1625 - protein, 9 aa, Severe acute respiratory syndrome coronavirus 2
  REGION 1..9: note = Table A: HLA-A*11:303H HLA-B*38:02H HLA-B*15:02H HLA-B*07:05H
NLGETFVTH

SEQ ID NO: 1626 - protein, 9 aa, Severe acute respiratory syndrome coronavirus 2
  REGION 1..9: note = Table A: HLA-A*11:01H HLA-A*11:02H HLA-B*45:01H HLA-B*44:03H HLA-B*27:02H HLA-A*30:02H HLA-B*40:02H HLA-B*40:06H HLA-B*49:01M HLA-B*50:01H
GETFVTHSK

SEQ ID NO: 1627 - protein, 9 aa, Severe acute respiratory syndrome coronavirus 2
  REGION 1..9: note = Table A: HLA-A*34:01H HLA-A*34:02H HLA-A*66:01H
ETFVTHSKG

SEQ ID NO: 1628 - protein, 9 aa, Severe acute respiratory syndrome coronavirus 2
  REGION 1..9: note = Table A: HLA-A*36:01H HLA-A*26:01H HLA-A*29:02M HLA-A*30:02H HLA-A*34:02H HLA-B*38:02H HLA-B*15:02H
FVTHSKGLY

SEQ ID NO: 1629 - protein, 9 aa, Severe acute respiratory syndrome coronavirus 2
  REGION 1..9: note = Table A: HLA-A*11:303H HLA-A*74:01H HLA-A*03:01M HLA-A*11:01H HLA-A*11:02M HLA-A*36:01H HLA-A*33:01H HLA-A*33:03M HLA-A*26:03H HLA-A*68:01H HLA-A*34:01M HLA-A*34:02H HLA-A*31:01H HLA-A*66:01H
VTHSKGLYR

SEQ ID NO: 1630 - protein, 9 aa, Severe acute respiratory syndrome coronavirus 2
  REGION 1..9: note = Table A: HLA-B*58:02H HLA-B*57:03M
KSREETGLL

SEQ ID NO: 1631 - protein, 9 aa, Severe acute respiratory syndrome coronavirus 2
  REGION 1..9: note = Table A: HLA-B*38:01H HLA-B*38:02H HLA-B*39:01H
SREETGLLM

SEQ ID NO: 1632 - protein, 9 aa, Severe acute respiratory syndrome coronavirus 2
  REGION 1..9: note = Table A: HLA-B*45:01H HLA-B*50:01H
REETGLLMP

SEQ ID NO: 1633 - protein, 9 aa, Severe acute respiratory syndrome coronavirus 2
  REGION 1..9: note = Table A: HLA-A*11:01H HLA-A*11:02H HLA-A*34:02H
ETGLLMPLK

SEQ ID NO: 1634 - protein, 9 aa, Severe acute respiratory syndrome coronavirus 2
  REGION 1..9: note = Table A: HLA-B*39:06H HLA-B*54:01H
TGLLMPLKA

SEQ ID NO: 1635 - protein, 9 aa, Severe acute respiratory syndrome coronavirus 2
  REGION 1..9: note = Table A: HLA-A*74:01H HLA-A*11:02H HLA-A*34:02H
LLMPLKAPK

SEQ ID NO: 1636 - protein, 9 aa, Severe acute respiratory syndrome coronavirus 2
  REGION 1..9: note = Table A: HLA-B*42:01H HLA-B*53:01H HLA-C*15:05H HLA-B*51:01M HLA-B*54:01H HLA-B*07:04M HLA-B*07:05H
MPLKAPKEI

SEQ ID NO: 1637 - protein, 9 aa, Severe acute respiratory syndrome coronavirus 2
  REGION 1..9: note = Table A: HLA-B*15:03H
LKAPKEIIF

SEQ ID NO: 1638 - protein, 9 aa, Severe acute respiratory syndrome coronavirus 2
  REGION 1..9: note = Table A: HLA-B*58:02H HLA-C*04:03M HLA-A*02:11M HLA-C*01:02H HLA-C*15:02H HLA-A*02:04H HLA-A*02:05H HLA-A*02:06H HLA-A*02:07H HLA-A*02:08H HLA-A*02:02H HLA-C*17:01M HLA-C*08:01H HLA-B*57:03M HLA-C*07:04M
KAPKEIIFL

SEQ ID NO: 1639 - protein, 9 aa, Severe acute respiratory syndrome coronavirus 2
  REGION 1..9: note = Table A: HLA-A*11:303H HLA-A*02:11H HLA-C*03:04H HLA-C*15:05H HLA-A*02:05H HLA-A*02:02H HLA-C*08:01M HLA-B*38:01H HLA-B*38:02H HLA-B*15:01H HLA-B*13:01H
IIFLEGETL

SEQ ID NO: 1640 - protein, 9 aa, Severe acute respiratory syndrome coronavirus 2
  REGION 1..9: note = Table A: HLA-B*48:01H HLA-B*44:05M HLA-B*45:01H HLA-B*40:01H HLA-B*40:02H HLA-B*41:02H HLA-B*49:01M HLA-B*50:01H
GETLPTEVL

SEQ ID NO: 1641 - protein, 9 aa, Severe acute respiratory syndrome coronavirus 2
  REGION 1..9: note = Table A: HLA-B*49:01H
TEVLTEEVV

SEQ ID NO: 1642 - protein, 9 aa, Severe acute respiratory syndrome coronavirus 2
  REGION 1..9: note = Table A: HLA-B*35:02H HLA-B*35:12H
EVLTEEVVL

SEQ ID NO: 1643 - protein, 9 aa, Severe acute respiratory syndrome coronavirus 2
  REGION 1..9: note = Table A: HLA-A*11:303H HLA-A*03:01H HLA-A*03:02H HLA-A*11:01H HLA-A*11:02H HLA-A*36:01H HLA-B*27:02H HLA-A*34:02H HLA-A*23:01H
VLTEEVVLK

SEQ ID NO: 1644 - protein, 9 aa, Severe acute respiratory syndrome coronavirus 2
  REGION 1..9: note = Table A: HLA-A*01:01H
LTEEVVLKT

SEQ ID NO: 1645 - protein, 9 aa, Severe acute respiratory syndrome coronavirus 2
  REGION 1..9: note = Table A: HLA-A*25:01H HLA-A*26:01H HLA-A*26:02H HLA-A*26:03H HLA-A*34:01M HLA-A*66:01H
EVVLKTGDL

SEQ ID NO: 1646 - protein, 9 aa, Severe acute respiratory syndrome coronavirus 2
  REGION 1..9: note = Table A: HLA-B*45:01H HLA-B*41:02H HLA-B*49:01M HLA-B*50:01H
LEQPTSEAV

SEQ ID NO: 1647 - protein, 9 aa, Severe acute respiratory syndrome coronavirus 2
  REGION 1..9: note = Table A: HLA-B*56:01H HLA-B*55:02H HLA-B*35:02H
QPTSEAVEA

SEQ ID NO: 1648 - protein, 9 aa, Severe acute respiratory syndrome coronavirus 2
  REGION 1..9: note = Table A: HLA-B*35:02H HLA-B*35:12H
TSEAVEAPL

SEQ ID NO: 1649 - protein, 9 aa, Severe acute respiratory syndrome coronavirus 2
  REGION 1..9: note = Table A: HLA-B*44:05H HLA-B*45:01M HLA-B*40:01H HLA-B*40:02H HLA-B*41:02H HLA-B*49:01H
SEAVEAPLV

SEQ ID NO: 1650 - protein, 9 aa, Severe acute respiratory syndrome coronavirus 2
  REGION 1..9: note = Table A: HLA-B*45:01M HLA-B*40:06H HLA-B*49:01H HLA-B*50:01H
VEAPLVGTP

SEQ ID NO: 1651 - protein, 9 aa, Severe acute respiratory syndrome coronavirus 2
  REGION 1..9: note = Table A: HLA-A*68:01H HLA-A*68:02M HLA-C*15:05H HLA-A*34:01H HLA-A*34:02H HLA-B*51:01M HLA-B*54:01H HLA-A*66:01H
EAPLVGTPV

SEQ ID NO: 1652 - protein, 9 aa, Severe acute respiratory syndrome coronavirus 2
  REGION 1..9: note = Table A: HLA-B*56:01M HLA-B*55:02M HLA-C*15:05M HLA-B*55:01M HLA-B*54:01H HLA-B*07:05H
APLVGTPVC

SEQ ID NO: 1653 - protein, 9 aa, Severe acute respiratory syndrome coronavirus 2
  REGION 1..9: note = Table A: HLA-B*13:02H
PLVGTPVCI

SEQ ID NO: 1654 - protein, 9 aa, Severe acute respiratory syndrome coronavirus 2
  REGION 1..9: note = Table A: HLA-B*58:01M HLA-B*44:02H HLA-B*44:05M HLA-C*16:04H HLA-B*46:01H HLA-B*44:03H HLA-B*18:01H HLA-C*07:01H HLA-A*30:02H HLA-B*35:01H HLA-B*38:02H HLA-B*40:01H HLA-B*40:02H HLA-B*15:01M HLA-B*15:03H HLA-B*39:01H
  REGION 1..9: note = CONT. FROM ABOVE: HLA-B*07:05M HLA-B*49:01H
LEIKDTEKY

SEQ ID NO: 1655 - protein, 9 aa, Severe acute respiratory syndrome coronavirus 2
  REGION 1..9: note = Table A: HLA-B*37:01H
KDTEKYCAL

SEQ ID NO: 1656 - protein, 9 aa, Severe acute respiratory syndrome coronavirus 2
  REGION 1..9: note = Table A: HLA-C*15:05H
CALAPNMMV

SEQ ID NO: 1657 - protein, 9 aa, Severe acute respiratory syndrome coronavirus 2
  REGION 1..9: note = Table A: HLA-B*38:02H
ALAPNMMVT

SEQ ID NO: 1658 - protein, 9 aa, Severe acute respiratory syndrome coronavirus 2
  REGION 1..9: note = Table A: HLA-B*46:01H HLA-C*15:05H HLA-A*24:02H HLA-B*35:01H HLA-B*15:13H HLA-B*38:02M HLA-B*15:01H HLA-B*15:02H HLA-B*07:05M
NMMVTNNTF

SEQ ID NO: 1659 - protein, 9 aa, Severe acute respiratory syndrome coronavirus 2
  REGION 1..9: note = Table A: HLA-A*68:02H HLA-B*35:03M HLA-C*15:05H HLA-A*02:04H HLA-A*02:05H HLA-A*02:06H HLA-A*02:08H HLA-A*02:02H HLA-A*34:02H HLA-B*35:01H HLA-B*35:02H HLA-C*08:01H HLA-B*35:12H HLA-B*38:02H HLA-B*40:06H HLA-B*39:01H
  REGION 1..9: note = CONT. FROM ABOVE: HLA-B*07:05H HLA-B*13:02H HLA-C*07:04H
MVTNNTFTL

SEQ ID NO: 1660 - protein, 9 aa, Severe acute respiratory syndrome coronavirus 2
  REGION 1..9: note = Table A: HLA-A*11:303M HLA-A*74:01H HLA-A*03:01H HLA-A*03:02H HLA-A*11:01H HLA-A*11:02H HLA-A*36:01M HLA-A*33:03H HLA-A*30:01H HLA-A*30:02M HLA-A*68:01H HLA-A*34:02H HLA-C*07:27H HLA-A*23:01H HLA-A*31:01H
  REGION 1..9: note = CONT. FROM ABOVE: HLA-A*66:01H
VTNNTFTLK

SEQ ID NO: 1661 - protein, 9 aa, Severe acute respiratory syndrome coronavirus 2
  REGION 1..9: note = Table A: HLA-A*03:01H HLA-A*03:02H HLA-A*30:01H HLA-A*34:02H
TLKGGAPTK

SEQ ID NO: 1662 - protein, 9 aa, Severe acute respiratory syndrome coronavirus 2
  REGION 1..9: note = Table A: HLA-B*48:01H HLA-B*58:01M HLA-A*11:303H HLA-B*44:05M HLA-B*46:01H HLA-C*15:05H HLA-B*35:01H HLA-B*38:02H HLA-B*40:02H HLA-B*07:02H HLA-B*15:01H HLA-B*15:02H HLA-B*15:03M HLA-B*07:05H HLA-B*41:02H
  REGION 1..9: note = CONT. FROM ABOVE: HLA-B*57:03M HLA-C*07:04H
GGAPTKVTF

SEQ ID NO: 1663 - protein, 9 aa, Severe acute respiratory syndrome coronavirus 2
  REGION 1..9: note = Table A: HLA-A*11:303M HLA-C*04:01H HLA-C*04:03M HLA-C*03:03H HLA-C*12:05H HLA-C*03:04H HLA-A*68:02H HLA-B*35:03M HLA-C*15:05H HLA-C*15:02H HLA-A*02:05H HLA-A*02:06H HLA-A*02:07M HLA-A*02:01H HLA-B*35:01H
  REGION 1..9: note = CONT. FROM ABOVE: HLA-B*35:02H HLA-C*08:01M HLA-C*08:02M HLA- B*38:02M HLA-B*39:01M HLA-C*05:01M HLA-B*13:02H HLA-C*07:04H
FGDDTVIEV

SEQ ID NO: 1664 - protein, 9 aa, Severe acute respiratory syndrome coronavirus 2
  REGION 1..9: note = Table A: HLA-A*25:01H HLA-A*26:01H HLA-A*26:02H HLA-A*26:03H HLA-B*18:01H HLA-A*68:01H HLA-A*34:02H HLA-B*35:01H HLA-B*38:02H HLA-B*15:02H HLA-B*07:05H
DTVIEVQGY

SEQ ID NO: 1665 - protein, 9 aa, Severe acute respiratory syndrome coronavirus 2
  REGION 1..9: note = Table A: HLA-A*03:01H HLA-A*03:02H HLA-A*11:01H HLA-A*11:02M HLA-A*30:02H HLA-A*68:01H HLA-A*34:01H HLA-A*34:02H HLA-C*07:27H HLA-A*66:01M
TVIEVQGYK

SEQ ID NO: 1666 - protein, 9 aa, Severe acute respiratory syndrome coronavirus 2
  REGION 1..9: note = Table A: HLA-B*45:01H HLA-B*40:02M HLA-B*40:06H HLA-B*41:02M HLA-B*49:01H HLA-B*50:01M
IEVQGYKSV

SEQ ID NO: 1667 - protein, 9 aa, Severe acute respiratory syndrome coronavirus 2
  REGION 1..9: note = Table A: HLA-C*14:03H HLA-A*24:02M HLA-A*24:07M HLA-A*23:01M HLA-B*15:01H
GYKSVNITF

SEQ ID NO: 1668 - protein, 9 aa, Severe acute respiratory syndrome coronavirus 2
  REGION 1..9: note = Table A: HLA-B*48:01H HLA-B*58:01H HLA-B*58:02H HLA-C*16:04H HLA-B*57:01H HLA-C*07:01H HLA-A*02:11H HLA-C*03:04H HLA-A*68:02M HLA-C*15:05H HLA-C*12:03H HLA-C*15:02H HLA-A*02:05H HLA-A*02:06H HLA-A*02:08M HLA-A*02:02H
  REGION 1..9: note = CONT. FROM ABOVE: HLA-C*08:01H HLA-A*32:01H HLA-B*40:06H HLA- B*57:03H HLA-B*13:02H HLA-C*07:04H
KSVNITFEL

SEQ ID NO: 1669 - protein, 9 aa, Severe acute respiratory syndrome coronavirus 2
  REGION 1..9: note = Table A: HLA-A*02:11M HLA-A*68:02H HLA-A*02:05H HLA-A*02:02H HLA-B*57:03M
ITFELDERI

SEQ ID NO: 1670 - protein, 9 aa, Severe acute respiratory syndrome coronavirus 2
  REGION 1..9: note = Table A: HLA-A*02:11H HLA-A*02:07H HLA-B*38:02H
ELDERIDKV

SEQ ID NO: 1671 - protein, 9 aa, Severe acute respiratory syndrome coronavirus 2
  REGION 1..9: note = Table A: HLA-A*03:01M HLA-A*03:02M HLA-A*11:01H HLA-A*11:02H HLA-A*36:01H
RIDKVLNEK

SEQ ID NO: 1672 - protein, 9 aa, Severe acute respiratory syndrome coronavirus 2
  REGION 1..9: note = Table A: HLA-A*11:303H HLA-A*03:01H HLA-B*46:01M HLA-A*30:02H HLA-B*38:02M HLA-B*15:01H HLA-B*15:02M
VLNEKCSAY

SEQ ID NO: 1673 - protein, 9 aa, Severe acute respiratory syndrome coronavirus 2
  REGION 1..9: note = Table A: HLA-A*11:303H HLA-C*16:04M HLA-B*46:01H HLA-A*26:01H HLA-C*03:03H HLA-C*12:05H HLA-A*02:11H HLA-C*03:02H HLA-C*03:04H HLA-A*68:02H HLA-C*15:05H HLA-C*12:03H HLA-C*15:02H HLA-A*02:05M HLA-A*02:06M
  REGION 1..9: note = CONT. FROM ABOVE: HLA-A*02:07H HLA-A*02:08H HLA-A*02:01H HLA- A*02:02H HLA-A*02:03H HLA-C*08:01H HLA-B*38:02M HLA-B*39:01H HLA-B*13:02H HLA-B*49:01H HLA-A*66:01H
YTVELGTEV

SEQ ID NO: 1674 - protein, 9 aa, Severe acute respiratory syndrome coronavirus 2
  REGION 1..9: note = Table A: HLA-A*26:02M HLA-A*26:03H HLA-B*38:02H HLA-B*15:02H
ELGTEVNEF

SEQ ID NO: 1675 - protein, 9 aa, Severe acute respiratory syndrome coronavirus 2
  REGION 1..9: note = Table A: HLA-B*44:05H HLA-B*45:01H HLA-B*40:01H HLA-B*40:02M HLA-B*40:06H HLA-B*41:02H HLA-B*49:01H HLA-B*50:01M
TEVNEFACV

SEQ ID NO: 1676 - protein, 9 aa, Severe acute respiratory syndrome coronavirus 2
  REGION 1..9: note = Table A: HLA-A*68:02M HLA-B*38:02H
EVNEFACVV

SEQ ID NO: 1677 - protein, 9 aa, Severe acute respiratory syndrome coronavirus 2
  REGION 1..9: note = Table A: HLA-A*11:01H
CVVADAVIK

SEQ ID NO: 1678 - protein, 9 aa, Severe acute respiratory syndrome coronavirus 2
  REGION 1..9: note = Table A: HLA-A*68:01H HLA-A*68:02H HLA-A*02:05M HLA-A*02:06H HLA-A*02:08M HLA-A*02:03H
VVADAVIKT

SEQ ID NO: 1679 - protein, 9 aa, Severe acute respiratory syndrome coronavirus 2
  REGION 1..9: note = Table A: HLA-B*58:01H HLA-B*58:02H HLA-A*11:303H HLA-C*16:01H HLA-C*16:04H HLA-C*04:03H HLA-C*03:03H HLA-C*12:05H HLA-A*02:11H HLA-B*53:01M HLA-C*03:02H HLA-C*03:04H HLA-A*68:02H HLA-B*35:03M HLA-C*15:05M
  REGION 1..9: note = CONT. FROM ABOVE: HLA-C*12:02H HLA-C*12:03M HLA-C*15:02M HLA- A*02:06H HLA-A*02:07H HLA-C*07:27M HLA-B*35:01H HLA-B*35:02M HLA-B*51:01H HLA-C*17:01H HLA-C*08:01H HLA-C*08:02H HLA-B*35 :12H HLA-B*38:01H HLA-B*38:02M HLA-B*07:04H HLA-B*07:05H
  REGION 1..9: note = CONT. FROM ABOVE: HLA-B*57:03H HLA-C*02:02H HLA-C*05:01M HLA- C*07:04H
VADAVIKTL

SEQ ID NO: 1680 - protein, 9 aa, Severe acute respiratory syndrome coronavirus 2
  REGION 1..9: note = Table A: HLA-A*11:303H HLA-B*46:01H HLA-A*26:03H HLA-A*02:11M HLA-A*68:02M HLA-C*15:05H HLA-A*02:04H HLA-A*02:05H HLA-A*02:06M HLA-A*02:07H HLA-A*02:08H HLA-B*14:01H HLA-A*02:01M HLA-A*02:02H HLA-A*02:03M
  REGION 1..9: note = CONT. FROM ABOVE: HLA-C*08:01H HLA-C*08:03H HLA-B*38:02M HLA- B*40:06H HLA-B*13:02H
AVIKTLQPV

SEQ ID NO: 1681 - protein, 9 aa, Severe acute respiratory syndrome coronavirus 2
  REGION 1..9: note = Table A: HLA-B*58:01H HLA-B*58:02H HLA-A*11:303H HLA-A*02:11H HLA-C*15:05H HLA-C*15:02H HLA-A*02:08H HLA-B*57:03H
KTLQPVSEL

SEQ ID NO: 1682 - protein, 9 aa, Severe acute respiratory syndrome coronavirus 2
  REGION 1..9: note = Table A: HLA-A*02:11H HLA-A*02:04H HLA-A*02:01H HLA-A*02:02M HLA-B*38:02H
TLQPVSELL

SEQ ID NO: 1683 - protein, 9 aa, Severe acute respiratory syndrome coronavirus 2
  REGION 1..9: note = Table A: HLA-B*44:05M HLA-B*44:03H HLA-B*40:02H HLA-B*13:02H HLA-B*49:01M
SELLTPLGI

SEQ ID NO: 1684 - protein, 9 aa, Severe acute respiratory syndrome coronavirus 2
  REGION 1..9: note = Table A: HLA-A*02:02H
LLTPLGIDL

SEQ ID NO: 1685 - protein, 9 aa, Severe acute respiratory syndrome coronavirus 2
  REGION 1..9: note = Table A: HLA-B*18:01H HLA-B*07:05H
DEWSMATYY

SEQ ID NO: 1686 - protein, 9 aa, Severe acute respiratory syndrome coronavirus 2
  REGION 1..9: note = Table A: HLA-C*14:02H HLA-C*14:03H HLA-A*11:303M HLA-A*25:01H HLA-B*46:01H HLA-A*26:01H HLA-A*26:02H HLA-A*26:03H HLA-A*29:01H HLA-A*29:02H HLA-C*03:03H HLA-B*53:01H HLA-C*03:02M HLA-C*03:04H HLA-B*35:03H
  REGION 1..9: note = CONT. FROM ABOVE: HLA-C*15:05H HLA-C*12:02H HLA-A*02:07H HLA- A*02:02H HLA-A*02:03H HLA-A*34:01H HLA-C*07:27H HLA-B*35:01M HLA-B*35:02H HLA-B*35:08H HLA-B*35:07M HLA-C*08:01H HLA-C*08 :02H HLA-B*38:01H HLA-B*38:02H HLA-B*15:01M HLA-B*15:02H
  REGION 1..9: note = CONT. FROM ABOVE: HLA-B*15:03H HLA-B*39:01M HLA-B*07:05H HLA- C*02:02H HLA-B*13:01H HLA-A*66:01H
YLFDESGEF

SEQ ID NO: 1687 - protein, 9 aa, Severe acute respiratory syndrome coronavirus 2
  REGION 1..9: note = Table A: HLA-A*36:01H
LFDESGEFK

SEQ ID NO: 1688 - protein, 9 aa, Severe acute respiratory syndrome coronavirus 2
  REGION 1..9: note = Table A: HLA-B*35:03H HLA-B*35:02H HLA-B*35:12H HLA-B*38:02H
FDESGEFKL

SEQ ID NO: 1689 - protein, 9 aa, Severe acute respiratory syndrome coronavirus 2
  REGION 1..9: note = Table A: HLA-B*45:01M HLA-B*50:01H
DESGEFKLA

SEQ ID NO: 1690 - protein, 9 aa, Severe acute respiratory syndrome coronavirus 2
  REGION 1..9: note = Table A: HLA-B*44:05H HLA-B*40:01M HLA-B*40:02M HLA-B*07:05H HLA-B*49:01H
GEFKLASHM

SEQ ID NO: 1691 - protein, 9 aa, Severe acute respiratory syndrome coronavirus 2
  REGION 1..9: note = Table A: HLA-A*30:02H HLA-B*15:02H
EFKLASHMY

SEQ ID NO: 1692 - protein, 9 aa, Severe acute respiratory syndrome coronavirus 2
  REGION 1..9: note = Table A: HLA-A*30:02H
ASHMYCSFY

SEQ ID NO: 1693 - protein, 9 aa, Severe acute respiratory syndrome coronavirus 2
  REGION 1..9: note = Table A: HLA-B*45:01H
EEEEFEPST

SEQ ID NO: 1694 - protein, 9 aa, Severe acute respiratory syndrome coronavirus 2
  REGION 1..9: note = Table A: HLA-B*44:02M HLA-B*44:05M HLA-C*16:04H HLA-B*45:01H HLA-B*44:03H HLA-B*18:01H HLA-B*27:02H HLA-B*35:01H HLA-B*38:02M HLA-B*15:01H HLA-B*15:02M HLA-B*15:03H HLA-B*07:05H HLA-B*15:11M HLA-B*50:01H
EEFEPSTQY

SEQ ID NO: 1695 - protein, 9 aa, Severe acute respiratory syndrome coronavirus 2
  REGION 1..9: note = Table A: HLA-B*46:01H HLA-A*29:01H HLA-A*29:02H HLA-B*18:01H HLA-C*07:01H HLA-B*07:05H
FEPSTQYEY

SEQ ID NO: 1696 - protein, 9 aa, Severe acute respiratory syndrome coronavirus 2
  REGION 1..9: note = Table A: HLA-B*18:01H HLA-B*27:02H HLA-B*39:01H HLA-B*07:05H
YEYGTEDDY

SEQ ID NO: 1697 - protein, 9 aa, Severe acute respiratory syndrome coronavirus 2
  REGION 1..9: note = Table A: HLA-A*11:01H
GTEDDYQGK

SEQ ID NO: 1698 - protein, 9 aa, Severe acute respiratory syndrome coronavirus 2
  REGION 1..9: note = Table A: HLA-B*45:01H HLA-B*50:01H
TEDDYQGKP

SEQ ID NO: 1699 - protein, 9 aa, Severe acute respiratory syndrome coronavirus 2
  REGION 1..9: note = Table A: HLA-C*14:02M HLA-C*14:03M HLA-A*33:01H HLA-A*33:03H HLA-A*29:01H HLA-C*07:01H HLA-C*07:02H HLA-C*15:05H HLA-A*24:02H HLA-A*24:07H HLA-C*08:01H HLA-A*23:01M HLA-B*38:02H HLA-B*39:01H HLA-B*07:05H
DYQGKPLEF

SEQ ID NO: 1700 - protein, 9 aa, Severe acute respiratory syndrome coronavirus 2
  REGION 1..9: note = Table A: HLA-B*39:06H
QGKPLEFGA

SEQ ID NO: 1701 - protein, 9 aa, Severe acute respiratory syndrome coronavirus 2
  REGION 1..9: note = Table A: HLA-B*56:01H HLA-B*55:02M HLA-C*15:05H HLA-B*55:01H HLA-B*54:01H HLA-B*07:05H
KPLEFGATS

SEQ ID NO: 1702 - protein, 9 aa, Severe acute respiratory syndrome coronavirus 2
  REGION 1..9: note = Table A: HLA-B*45:01H HLA-B*40:06H HLA-B*50:01H
LEFGATSAA

SEQ ID NO: 1703 - protein, 9 aa, Severe acute respiratory syndrome coronavirus 2
  REGION 1..9: note = Table A: HLA-B*44:05H HLA-B*45:01H HLA-B*44:03H HLA-B*38:02H HLA-B*40:01M HLA-B*40:02H HLA-B*41:02H HLA-B*49:01H
SEDNQTTTI

SEQ ID NO: 1704 - protein, 9 aa, Severe acute respiratory syndrome coronavirus 2
  REGION 1..9: note = Table A: HLA-C*15:05H HLA-A*02:05M HLA-A*02:06H HLA-B*52:01H HLA-B*38:01M HLA-B*38:02H HLA-B*39:01H HLA-B*13:01H HLA-B*13:02H
NQTTTIQTI

SEQ ID NO: 1705 - protein, 9 aa, Severe acute respiratory syndrome coronavirus 2
  REGION 1..9: note = Table A: HLA-A*68:02M HLA-C*15:02H
QTTTIQTIV

SEQ ID NO: 1706 - protein, 9 aa, Severe acute respiratory syndrome coronavirus 2
  REGION 1..9: note = Table A: HLA-A*11:303H HLA-C*16:04H HLA-A*11:01H HLA-A*26:01H HLA-A*26:02H HLA-A*26:03H HLA-C*12:05H HLA-A*02:11H HLA-A*68:01H HLA-A*68:02H HLA-C*15:05M HLA-C*12:03H HLA-C*15:02M HLA-A*02:04M HLA-A*02:05H
  REGION 1..9: note = CONT. FROM ABOVE: HLA-A*02:06H HLA-A*02:07H HLA-A*02:08H HLA- A*02:01M HLA-A*02:02H HLA-A*02:03M HLA-A*34:02H HLA-C*08:01H HLA-B*38:02M HLA-B*40:06H HLA-B*39:01H HLA-B*07:05H HLA-B*13 :02M
TTIQTIVEV

SEQ ID NO: 1707 - protein, 9 aa, Severe acute respiratory syndrome coronavirus 2
  REGION 1..9: note = Table A: HLA-B*48:01H HLA-B*58:01H HLA-A*11:303M HLA-B*44:05H HLA-C*03:03H HLA-A*02:11M HLA-C*03:04M HLA-A*68:02M HLA-B*35:03M HLA-C*15:05H HLA-A*02:04M HLA-A*02:05M HLA-A*02:06M HLA-A*02:07M HLA-A*02:08H
  REGION 1..9: note = CONT. FROM ABOVE: HLA-B*14:01H HLA-A*02:01H HLA-A*02:02M HLA- B*35:01M HLA-B*35:02M HLA-C*08:01M HLA-B*35:12M HLA-B*38:01H HLA-B*38:02M HLA-B*40:02H HLA-B*40:06H HLA-B*15:02H HLA-B*39 :01H HLA-B*07:05H HLA-B*41:02H HLA-B*57:03H HLA-B*13:02H
  REGION 1..9: note = CONT. FROM ABOVE: HLA-C*07:04H
TIVEVQPQL

SEQ ID NO: 1708 - protein, 9 aa, Severe acute respiratory syndrome coronavirus 2
  REGION 1..9: note = Table A: HLA-B*44:05M HLA-B*44:03H HLA-B*18:01H HLA-B*40:01M HLA-B*40:02M HLA-B*07:05H HLA-B*41:02M HLA-B*49:01M
VEVQPQLEM

SEQ ID NO: 1709 - protein, 9 aa, Severe acute respiratory syndrome coronavirus 2
  REGION 1..9: note = Table A: HLA-B*45:01H HLA-B*18:01H HLA-B*40:02H HLA-B*40:06H HLA-B*07:05H HLA-B*41:02H HLA-B*49:01M HLA-B*50:01M
LEMELTPVV

SEQ ID NO: 1710 - protein, 9 aa, Severe acute respiratory syndrome coronavirus 2
  REGION 1..9: note = Table A: HLA-B*44:05H HLA-A*25:01H HLA-A*68:02H HLA-A*02:04H HLA-A*02:05H HLA-A*02:02M HLA-A*02:03H HLA-A*24:02H HLA-B*38:01H HLA-B*38:02H HLA-B*13:02H
ELTPVVQTI

SEQ ID NO: 1711 - protein, 9 aa, Severe acute respiratory syndrome coronavirus 2
  REGION 1..9: note = Table A: HLA-B*42:01H HLA-B*56:01M HLA-B*53:01H HLA-B*55:02H HLA-B*35:03M HLA-C*15:05H HLA-B*55:01M HLA-B*35:01M HLA-B*35:02H HLA-B*51:01M HLA-B*35:07H HLA-C*08:01H HLA-B*35:12H HLA-B*38:02H HLA-B*39:06H HLA-B*54:01H
  REGION 1..9: note = CONT. FROM ABOVE: HLA-B*07:02H HLA-B*39:01H HLA-B*07:05M
TPVVQTIEV

SEQ ID NO: 1712 - protein, 9 aa, Severe acute respiratory syndrome coronavirus 2
  REGION 1..9: note = Table A: HLA-B*44:05H HLA-B*27:02H HLA-A*24:02H HLA-B*38:01H HLA-B*38:02H HLA-B*15:01H HLA-B*15:03H HLA-B*39:01H HLA-B*13:01H
VQTIEVNSF

SEQ ID NO: 1713 - protein, 9 aa, Severe acute respiratory syndrome coronavirus 2
  REGION 1..9: note = Table A: HLA-B*44:03H HLA-B*18:01M HLA-B*27:02H HLA-B*07:05H HLA-B*49:01H HLA-B*50:01H
IEVNSFSGY

SEQ ID NO: 1714 - protein, 9 aa, Severe acute respiratory syndrome coronavirus 2
  REGION 1..9: note = Table A: HLA-A*33:03H HLA-A*26:01H HLA-A*26:02H HLA-A*26:03H HLA-A*68:02M HLA-A*34:01M HLA-A*34:02H HLA-A*66:01M
EVNSFSGYL

SEQ ID NO: 1715 - protein, 9 aa, Severe acute respiratory syndrome coronavirus 2
  REGION 1..9: note = Table A: HLA-A*11:01H HLA-A*11:02H HLA-A*36:01H HLA-A*34:02H
VNSFSGYLK

SEQ ID NO: 1716 - protein, 9 aa, Severe acute respiratory syndrome coronavirus 2
  REGION 1..9: note = Table A: HLA-B*53:01H HLA-A*68:01H HLA-A*68:02H HLA-C*15:05H HLA-C*12:03H HLA-C*15:02M HLA-A*34:02H HLA-C*17:01H HLA-C*08:01H HLA-B*38:02H HLA-B*57:03H HLA-A*66:01H
NSFSGYLKL

SEQ ID NO: 1717 - protein, 9 aa, Severe acute respiratory syndrome coronavirus 2
  REGION 1..9: note = Table A: HLA-B*46:01H HLA-B*38:02M HLA-B*15:01M HLA-B*15:02H HLA-B*15:11H
YLKLTDNVY

SEQ ID NO: 1718 - protein, 9 aa, Severe acute respiratory syndrome coronavirus 2
  REGION 1..9: note = Table A: HLA-A*74:01H HLA-A*03:01H HLA-A*03:02M HLA-A*11:01H HLA-A*11:02H HLA-A*36:01H HLA-A*30:02H
KLTDNVYIK

SEQ ID NO: 1719 - protein, 9 aa, Severe acute respiratory syndrome coronavirus 2
  REGION 1..9: note = Table A: HLA-A*68:02H HLA-A*02:05H HLA-A*02:08M HLA-A*02:01H HLA-A*02:02H
KNADIVEEA

SEQ ID NO: 1720 - protein, 9 aa, Severe acute respiratory syndrome coronavirus 2
  REGION 1..9: note = Table A: HLA-B*35:02H HLA-B*35:12H
NADIVEEAK

SEQ ID NO: 1721 - protein, 9 aa, Severe acute respiratory syndrome coronavirus 2
  REGION 1..9: note = Table A: HLA-A*68:02H
DIVEEAKKV

SEQ ID NO: 1722 - protein, 9 aa, Severe acute respiratory syndrome coronavirus 2
  REGION 1..9: note = Table A: HLA-A*34:02H
IVEEAKKVK

SEQ ID NO: 1723 - protein, 9 aa, Severe acute respiratory syndrome coronavirus 2
  REGION 1..9: note = Table A: HLA-B*45:01H
VEEAKKVKP

SEQ ID NO: 1724 - protein, 9 aa, Severe acute respiratory syndrome coronavirus 2
  REGION 1..9: note = Table A: HLA-B*51:01H
EAKKVKPTV

SEQ ID NO: 1725 - protein, 9 aa, Severe acute respiratory syndrome coronavirus 2
  REGION 1..9: note = Table A: HLA-B*48:01H HLA-B*15:03M
KKVKPTVVV

SEQ ID NO: 1726 - protein, 9 aa, Severe acute respiratory syndrome coronavirus 2
  REGION 1..9: note = Table A: HLA-B*56:01H HLA-B*55:02H HLA-C*15:05M HLA-B*55:01H HLA-B*39:06M HLA-B*40:06H HLA-B*54:01M HLA-B*07:02H HLA-B*07:05H HLA-B*50:01H
KPTVVVNAA

SEQ ID NO: 1727 - protein, 9 aa, Severe acute respiratory syndrome coronavirus 2
  REGION 1..9: note = Table A: HLA-A*68:02H
TVVVNAANV

SEQ ID NO: 1728 - protein, 9 aa, Severe acute respiratory syndrome coronavirus 2
  REGION 1..9: note = Table A: HLA-A*30:02H HLA-B*35:01H HLA-B*38:02M HLA-B*15:01M HLA-B*15:02M HLA-B*07:05H
VVVNAANVY

SEQ ID NO: 1729 - protein, 9 aa, Severe acute respiratory syndrome coronavirus 2
  REGION 1..9: note = Table A: HLA-C*15:05H HLA-C*07:04H
VVNAANVYL

SEQ ID NO: 1730 - protein, 9 aa, Severe acute respiratory syndrome coronavirus 2
  REGION 1..9: note = Table A: HLA-A*03:02H HLA-A*11:01H HLA-A*11:02H HLA-A*34:02H
VNAANVYLK

SEQ ID NO: 1731 - protein, 9 aa, Severe acute respiratory syndrome coronavirus 2
  REGION 1..9: note = Table A: HLA-C*16:04M HLA-A*29:01H HLA-A*29:02H HLA-B*53:01M HLA-C*03:02H HLA-A*68:01M HLA-C*15:05H HLA-C*12:02H HLA-C*12:03H HLA-A*34:01H HLA-A*34:02H HLA-B*35:01M HLA-B*35:07M HLA-B*38:02H HLA-B*07:05H HLA-C*02:02H
NAANVYLKH

SEQ ID NO: 1732 - protein, 9 aa, Severe acute respiratory syndrome coronavirus 2
  REGION 1..9: note = Table A: HLA-B*55:01H HLA-A*02:03H HLA-B*38:02H
YLKHGGGVA

SEQ ID NO: 1733 - protein, 9 aa, Severe acute respiratory syndrome coronavirus 2
  REGION 1..9: note = Table A: HLA-B*35:03H HLA-C*15:05H HLA-B*35:01H HLA-B*35:02H HLA-C*08:03H HLA-B*38:02H HLA-B*39:01M HLA-B*07:05H
HGGGVAGAL

SEQ ID NO: 1734 - protein, 9 aa, Severe acute respiratory syndrome coronavirus 2
  REGION 1..9: note = Table A: HLA-A*11:01H
GGVAGALNK

SEQ ID NO: 1735 - protein, 9 aa, Severe acute respiratory syndrome coronavirus 2
  REGION 1..9: note = Table A: HLA-A*02:05H HLA-A*02:06H HLA-A*02:08H HLA-A*02:02M HLA-A*02:03M HLA-B*38:02H
GVAGALNKA

SEQ ID NO: 1736 - protein, 9 aa, Severe acute respiratory syndrome coronavirus 2
  REGION 1..9: note = Table A: HLA-A*02:02M HLA-A*02:03M HLA-B*38:02H
ALNKATNNA

SEQ ID NO: 1737 - protein, 9 aa, Severe acute respiratory syndrome coronavirus 2
  REGION 1..9: note = Table A: HLA-C*12:05H HLA-C*15:05H HLA-C*15:02H HLA-B*13:02H
KATNNAMQV

SEQ ID NO: 1738 - protein, 9 aa, Severe acute respiratory syndrome coronavirus 2
  REGION 1..9: note = Table A: HLA-A*30:02H HLA-B*15:01H HLA-B*39:01H
AMQVESDDY

SEQ ID NO: 1739 - protein, 9 aa, Severe acute respiratory syndrome coronavirus 2
  REGION 1..9: note = Table A: HLA-A*02:05H HLA-B*38:01M HLA-B*38:02M HLA-B*39:01H HLA-B*13:01M HLA-B*13:02H
MQVESDDYI

SEQ ID NO: 1740 - protein, 9 aa, Severe acute respiratory syndrome coronavirus 2
  REGION 1..9: note = Table A: HLA-B*35:02H
QVESDDYIA

SEQ ID NO: 1741 - protein, 9 aa, Severe acute respiratory syndrome coronavirus 2
  REGION 1..9: note = Table A: HLA-B*39:01H
DYIATNGPL

SEQ ID NO: 1742 - protein, 9 aa, Severe acute respiratory syndrome coronavirus 2
  REGION 1..9: note = Table A: HLA-A*11:303H HLA-A*03:01M HLA-A*03:02M HLA-A*11:01M HLA-A*11:02M HLA-A*36:01H HLA-A*68:01H HLA-A*34:01H HLA-A*34:02H HLA-C*07:27H HLA-A*66:01H
YIATNGPLK

SEQ ID NO: 1743 - protein, 9 aa, Severe acute respiratory syndrome coronavirus 2
  REGION 1..9: note = Table A: HLA-C*16:01H HLA-A*29:01H HLA-C*12:05H HLA-C*15:05M HLA-C*12:03H HLA-C*15:02H HLA-A*02:03H HLA-B*51:01M HLA-C*17:01H HLA-B*38:02H HLA-B*13:02M HLA-B*49:01H
IATNGPLKV

SEQ ID NO: 1744 - protein, 9 aa, Severe acute respiratory syndrome coronavirus 2
  REGION 1..9: note = Table A: HLA-C*15:05M HLA-B*07:02H HLA-B*07:05M
GPLKVGGSC

SEQ ID NO: 1745 - protein, 9 aa, Severe acute respiratory syndrome coronavirus 2
  REGION 1..9: note = Table A: HLA-A*11:303H HLA-C*03:04H HLA-C*08:01H
SCVLSGHNL

SEQ ID NO: 1746 - protein, 9 aa, Severe acute respiratory syndrome coronavirus 2
  REGION 1..9: note = Table A: HLA-A*03:01M HLA-A*03:02H HLA-A*11:01H HLA-A*11:02H HLA-A*36:01H HLA-A*34:02H
VLSGHNLAK

SEQ ID NO: 1747 - protein, 9 aa, Severe acute respiratory syndrome coronavirus 2
  REGION 1..9: note = Table A: HLA-B*38:02H HLA-B*15:10M
GHNLAKHCL

SEQ ID NO: 1748 - protein, 9 aa, Severe acute respiratory syndrome coronavirus 2
  REGION 1..9: note = Table A: HLA-A*02:02H
NLAKHCLHV

SEQ ID NO: 1749 - protein, 9 aa, Severe acute respiratory syndrome coronavirus 2
  REGION 1..9: note = Table A: HLA-A*02:11M HLA-A*02:04H HLA-A*02:07H HLA-A*02:01H HLA-A*02:02M HLA-A*02:03H HLA-B*38:02H HLA-B*13:02H
CLHVVGPNV

SEQ ID NO: 1750 - protein, 9 aa, Severe acute respiratory syndrome coronavirus 2
  REGION 1..9: note = Table A: HLA-B*39:01H
LHVVGPNVN

SEQ ID NO: 1751 - protein, 9 aa, Severe acute respiratory syndrome coronavirus 2
  REGION 1..9: note = Table A: HLA-A*11:303M HLA-A*74:01H HLA-A*03:01M HLA-A*03:02H HLA-A*11:01H HLA-A*11:02H HLA-A*36:01H HLA-A*33:01H HLA-A*33:03M HLA-A*26:03M HLA-B*27:05H HLA-A*30:01H HLA-A*30:02H HLA-A*68:01H HLA-A*68:02H
  REGION 1..9: note = CONT. FROM ABOVE: HLA-A*34:01H HLA-A*34:02H HLA-C*07:27M HLA- A*31:01H HLA-A*66:01H
HVVGPNVNK

SEQ ID NO: 1752 - protein, 9 aa, Severe acute respiratory syndrome coronavirus 2
  REGION 1..9: note = Table A: HLA-A*03:02H HLA-A*11:01H HLA-A*36:01M
KGEDIQLLK

SEQ ID NO: 1753 - protein, 9 aa, Severe acute respiratory syndrome coronavirus 2
  REGION 1..9: note = Table A: HLA-B*45:01H HLA-B*39:06H HLA-B*50:01H
EDIQLLKSA

SEQ ID NO: 1754 - protein, 9 aa, Severe acute respiratory syndrome coronavirus 2
  REGION 1..9: note = Table A: HLA-B*18:01H HLA-B*38:02H HLA-B*15:02M HLA-B*07:05H
DIQLLKSAY

SEQ ID NO: 1755 - protein, 9 aa, Severe acute respiratory syndrome coronavirus 2
  REGION 1..9: note = Table A: HLA-B*38:02H HLA-B*15:01H
LLKSAYENF

SEQ ID NO: 1756 - protein, 9 aa, Severe acute respiratory syndrome coronavirus 2
  REGION 1..9: note = Table A: HLA-A*11:303M HLA-C*16:04M HLA-A*03:01H HLA-A*11:01M HLA-A*11:02M HLA-B*46:01H HLA-C*03:02M HLA-A*68:01H HLA-C*15:05H HLA-C*12:02H HLA-C*12:03H HLA-A*34:02M HLA-C*07:27H HLA-B*35:01H HLA-C*08:01H
  REGION 1..9: note = CONT. FROM ABOVE: HLA-B*38:02H HLA-B*07:05H HLA-A*66:01H
SAYENFNQH

SEQ ID NO: 1757 - protein, 9 aa, Severe acute respiratory syndrome coronavirus 2
  REGION 1..9: note = Table A: HLA-B*44:02H HLA-B*44:05M HLA-C*16:04H HLA-B*45:01H HLA-B*44:03H HLA-B*18:01H HLA-A*02:11H HLA-A*68:02M HLA-C*15:02H HLA-A*02:05H HLA-A*02:02H HLA-C*08:01H HLA-B*37:01H HLA-B*38:02H HLA-B*40:01H HLA-B*40:02H
  REGION 1..9: note = CONT. FROM ABOVE: HLA-B*40:06M HLA-B*54:01H HLA-B*07:05H HLA- B*41:02H HLA-B*13:02H HLA-B*49:01H HLA-B*50:01M
YENFNQHEV

SEQ ID NO: 1758 - protein, 9 aa, Severe acute respiratory syndrome coronavirus 2
  REGION 1..9: note = Table A: HLA-A*68:02M HLA-B*14:02H
ENFNQHEVL

SEQ ID NO: 1759 - protein, 9 aa, Severe acute respiratory syndrome coronavirus 2
  REGION 1..9: note = Table A: HLA-C*04:03H HLA-A*02:02H HLA-A*24:07H
NFNQHEVLL

SEQ ID NO: 1760 - protein, 9 aa, Severe acute respiratory syndrome coronavirus 2
  REGION 1..9: note = Table A: HLA-B*39:06H
NQHEVLLAP

SEQ ID NO: 1761 - protein, 9 aa, Severe acute respiratory syndrome coronavirus 2
  REGION 1..9: note = Table A: HLA-B*38:02M HLA-B*39:01H
QHEVLLAPL

SEQ ID NO: 1762 - protein, 9 aa, Severe acute respiratory syndrome coronavirus 2
  REGION 1..9: note = Table A: HLA-B*44:05H HLA-B*44:03H HLA-B*40:01M HLA-B*40:02M HLA-B*40:06M HLA-B*41:02H HLA-B*49:01H
HEVLLAPLL

SEQ ID NO: 1763 - protein, 9 aa, Severe acute respiratory syndrome coronavirus 2
  REGION 1..9: note = Table A: HLA-A*11:303H HLA-A*02:01H HLA-A*02:03H HLA-B*38:02H HLA-B*54:01H
VLLAPLLSA

SEQ ID NO: 1764 - protein, 9 aa, Severe acute respiratory syndrome coronavirus 2
  REGION 1..9: note = Table A: HLA-C*15:05M HLA-B*35:01H HLA-B*07:02H HLA-B*07:05M
APLLSAGIF

SEQ ID NO: 1765 - protein, 9 aa, Severe acute respiratory syndrome coronavirus 2
  REGION 1..9: note = Table A: HLA-A*02:01H HLA-A*02:03H
LLSAGIFGA

SEQ ID NO: 1766 - protein, 9 aa, Severe acute respiratory syndrome coronavirus 2
  REGION 1..9: note = Table A: HLA-B*38:02H
AGIFGADPI

SEQ ID NO: 1767 - protein, 9 aa, Severe acute respiratory syndrome coronavirus 2
  REGION 1..9: note = Table A: HLA-B*48:01H HLA-A*11:303H HLA-C*16:01M HLA-C*16:04M HLA-B*46:01M HLA-C*06:02H HLA-B*08:01H HLA-C*04:03H HLA-C*03:03H HLA-C*12:05M HLA-A*02:11M HLA-C*03:02M HLA-C*03:04H HLA-A*68:02M HLA-B*35:03M
  REGION 1..9: note = CONT. FROM ABOVE: HLA-C*15:05H HLA-C*12:02M HLA-C*12:03M HLA- C*15:02H HLA-A*02:04M HLA-A*02:05H HLA-A*02:06H HLA-A*02:07H HLA-A*02:08H HLA-B*14:01H HLA-A*02:01H HLA-A*02:02H HLA-A*02 :03H HLA-A*34:01H HLA-C*07:27M HLA-B*35:01M HLA-B*35:02M
  REGION 1..9: note = CONT. FROM ABOVE: HLA-B*35:08H HLA-C*17:01M HLA-B*35:07H HLA- C*08:01H HLA-C*08:02M HLA-C*08:03H HLA-B*35:12H HLA-B*38:01H HLA-B*38:02M HLA-B*40:01H HLA-B*40:02H HLA-B*07:04H HLA-B*39 :01M HLA-B*41:02H HLA-B*57:03H HLA-C*02:02H HLA-B*15:10H
  REGION 1..9: note = CONT. FROM ABOVE: HLA-C*07:04M HLA-A*66:01H
FGADPIHSL

SEQ ID NO: 1768 - protein, 9 aa, Severe acute respiratory syndrome coronavirus 2
  REGION 1..9: note = Table A: HLA-A*33:03H HLA-A*68:01H HLA-A*34:01H HLA-A*34:02H HLA-A*66:01H
GADPIHSLR

SEQ ID NO: 1769 - protein, 9 aa, Severe acute respiratory syndrome coronavirus 2
  REGION 1..9: note = Table A: HLA-B*54:01H
DPIHSLRVC

SEQ ID NO: 1770 - protein, 9 aa, Severe acute respiratory syndrome coronavirus 2
  REGION 1..9: note = Table A: HLA-A*02:03H HLA-B*38:02M
SLRVCVDTV

SEQ ID NO: 1771 - protein, 9 aa, Severe acute respiratory syndrome coronavirus 2
  REGION 1..9: note = Table A: HLA-C*04:03H HLA-A*02:11M HLA-A*02:06H HLA-A*02:07M HLA-A*02:01H
CVDTVRTNV

SEQ ID NO: 1772 - protein, 9 aa, Severe acute respiratory syndrome coronavirus 2
  REGION 1..9: note = Table A: HLA-C*16:01H HLA-B*18:01H HLA-B*37:01H
VDTVRTNVY

SEQ ID NO: 1773 - protein, 9 aa, Severe acute respiratory syndrome coronavirus 2
  REGION 1..9: note = Table A: HLA-A*26:01H HLA-A*68:02M HLA-A*34:01H HLA-A*34:02H HLA-B*57:03H HLA-A*66:01M
DTVRTNVYL

SEQ ID NO: 1774 - protein, 9 aa, Severe acute respiratory syndrome coronavirus 2
  REGION 1..9: note = Table A: HLA-C*06:02H HLA-B*27:05H HLA-B*13:02H
VRTNVYLAV

SEQ ID NO: 1775 - protein, 9 aa, Severe acute respiratory syndrome coronavirus 2
  REGION 1..9: note = Table A: HLA-B*58:01M HLA-B*58:02M HLA-A*74:01H HLA-A*36:01H HLA-B*57:01M HLA-C*07:01H HLA-A*30:02H HLA-C*15:05H HLA-C*15:02M HLA-A*32:01H HLA-B*57:03H
RTNVYLAVF

SEQ ID NO: 1776 - protein, 9 aa, Severe acute respiratory syndrome coronavirus 2
  REGION 1..9: note = Table A: HLA-A*34:02M
NVYLAVFDK

SEQ ID NO: 1777 - protein, 9 aa, Severe acute respiratory syndrome coronavirus 2
  REGION 1..9: note = Table A: HLA-A*02:11H HLA-A*02:04H HLA-A*02:02H HLA-A*02:03H
YLAVFDKNL

SEQ ID NO: 1778 - protein, 9 aa, Severe acute respiratory syndrome coronavirus 2
  REGION 1..9: note = Table A: HLA-A*36:01H HLA-B*35:01H HLA-B*35:08H HLA-B*35:07M
LAVFDKNLY

SEQ ID NO: 1779 - protein, 9 aa, Severe acute respiratory syndrome coronavirus 2
  REGION 1..9: note = Table A: HLA-A*36:01H HLA-C*04:03H
VFDKNLYDK

SEQ ID NO: 1780 - protein, 9 aa, Severe acute respiratory syndrome coronavirus 2
  REGION 1..9: note = Table A: HLA-A*02:02H HLA-B*40:02H
FDKNLYDKL

SEQ ID NO: 1781 - protein, 9 aa, Severe acute respiratory syndrome coronavirus 2
  REGION 1..9: note = Table A: HLA-C*14:02H HLA-C*14:03H HLA-C*04:01M HLA-C*04:03H HLA-C*07:02H HLA-A*02:07H HLA-A*24:02M HLA-A*24:07M HLA-C*08:01H HLA-A*23:01H
LYDKLVSSF

SEQ ID NO: 1782 - protein, 9 aa, Severe acute respiratory syndrome coronavirus 2
  REGION 1..9: note = Table A: HLA-B*37:01H HLA-B*41:02H
YDKLVSSFL

SEQ ID NO: 1783 - protein, 9 aa, Severe acute respiratory syndrome coronavirus 2
  REGION 1..9: note = Table A: HLA-A*11:303H HLA-C*15:05H HLA-C*15:02H HLA-A*02:06H HLA-A*02:07H HLA-C*08:01H HLA-B*38:02H HLA-B*40:06H HLA-B*15:01H HLA-B*13:01H HLA-B*13:02H
KLVSSFLEM

SEQ ID NO: 1784 - protein, 9 aa, Severe acute respiratory syndrome coronavirus 2
  REGION 1..9: note = Table A: HLA-A*03:02H HLA-A*11:01H HLA-A*11:02M HLA-A*36:01H HLA-A*34:02M
LVSSFLEMK

SEQ ID NO: 1785 - protein, 9 aa, Severe acute respiratory syndrome coronavirus 2
  REGION 1..9: note = Table A: HLA-C*14:03H
SFLEMKSEK

SEQ ID NO: 1786 - protein, 9 aa, Severe acute respiratory syndrome coronavirus 2
  REGION 1..9: note = Table A: HLA-B*41:02H HLA-B*49:01M
LEMKSEKQV

SEQ ID NO: 1787 - protein, 9 aa, Severe acute respiratory syndrome coronavirus 2
  REGION 1..9: note = Table A: HLA-B*44:02M HLA-B*44:05H HLA-B*45:01H HLA-B*44:03M HLA-B*38:02H HLA-B*40:01H HLA-B*40:02H HLA-B*41:02H HLA-B*13:02M HLA-B*49:01H
SEKQVEQKI

SEQ ID NO: 1788 - protein, 9 aa, Severe acute respiratory syndrome coronavirus 2
  REGION 1..9: note = Table A: HLA-A*68:02H HLA-A*02:05H HLA-A*02:08H HLA-B*38:02H
QVEQKIAEI

SEQ ID NO: 1789 - protein, 9 aa, Severe acute respiratory syndrome coronavirus 2
  REGION 1..9: note = Table A: HLA-B*45:01M HLA-B*40:06H
VEQKIAEIP

SEQ ID NO: 1790 - protein, 9 aa, Severe acute respiratory syndrome coronavirus 2
  REGION 1..9: note = Table A: HLA-C*04:03H HLA-C*08:01H HLA-C*08:02H HLA-C*05:01H
IAEIPKEEV

SEQ ID NO: 1791 - protein, 9 aa, Severe acute respiratory syndrome coronavirus 2
  REGION 1..9: note = Table A: HLA-B*45:01H
AEIPKEEVK

SEQ ID NO: 1792 - protein, 9 aa, Severe acute respiratory syndrome coronavirus 2
  REGION 1..9: note = Table A: HLA-B*42:01H HLA-B*35:07H HLA-B*07:04M
IPKEEVKPF

SEQ ID NO: 1793 - protein, 9 aa, Severe acute respiratory syndrome coronavirus 2
  REGION 1..9: note = Table A: HLA-A*26:01H HLA-A*26:03H
EVKPFITES

SEQ ID NO: 1794 - protein, 9 aa, Severe acute respiratory syndrome coronavirus 2
  REGION 1..9: note = Table A: HLA-A*11:303H HLA-C*16:01H HLA-C*03:03H HLA-A*02:11M HLA-C*03:02H HLA-C*03:04H HLA-A*02:04H HLA-A*02:06M HLA-A*02:07H HLA-B*14:01H HLA-A*02:01H HLA-A*02:02H HLA-A*02:03H HLA-C*08:01H HLA-B*38:02H
  REGION 1..9: note = CONT. FROM ABOVE: HLA-B*13:02H
FITESKPSV

SEQ ID NO: 1795 - protein, 9 aa, Severe acute respiratory syndrome coronavirus 2
  REGION 1..9: note = Table A: HLA-A*33:01M HLA-A*33:03H HLA-A*26:03H HLA-A*68:01M HLA-A*68:02H HLA-A*34:01M HLA-A*34:02H HLA-A*31:01H HLA-A*66:01M
ESKPSVEQR

SEQ ID NO: 1796 - protein, 9 aa, Severe acute respiratory syndrome coronavirus 2
  REGION 1..9: note = Table A: HLA-B*13:01H
KQDDKKIKA

SEQ ID NO: 1797 - protein, 9 aa, Severe acute respiratory syndrome coronavirus 2
  REGION 1..9: note = Table A: HLA-A*02:08H HLA-A*02:03H
KIKACVEEV

SEQ ID NO: 1798 - protein, 9 aa, Severe acute respiratory syndrome coronavirus 2
  REGION 1..9: note = Table A: HLA-A*11:303M HLA-C*04:03M HLA-A*02:11H HLA-A*68:02H HLA-B*35:03H HLA-C*15:05H HLA-A*02:05M HLA-A*02:06H HLA-A*02:07M HLA-A*02:08H HLA-A*02:01H HLA-A*02:02H HLA-B*35:02H HLA-C*08:01H HLA-C*08:02M
  REGION 1..9: note = CONT. FROM ABOVE: HLA-B*35:12H HLA-B*38:02H HLA-B*39:01H HLA- B*07:05H HLA-C*05:01H
CVEEVTTTL

SEQ ID NO: 1799 - protein, 9 aa, Severe acute respiratory syndrome coronavirus 2
  REGION 1..9: note = Table A: HLA-A*11:01H
VTTTLEETK

SEQ ID NO: 1800 - protein, 9 aa, Severe acute respiratory syndrome coronavirus 2
  REGION 1..9: note = Table A: HLA-B*58:01H HLA-B*35:02H HLA-B*35:08H HLA-B*57:03H
TTTLEETKF

SEQ ID NO: 1801 - protein, 9 aa, Severe acute respiratory syndrome coronavirus 2
  REGION 1..9: note = Table A: HLA-A*68:02H
TTLEETKFL

SEQ ID NO: 1802 - protein, 9 aa, Severe acute respiratory syndrome coronavirus 2
  REGION 1..9: note = Table A: HLA-B*45:01H
EETKFLTEN

SEQ ID NO: 1803 - protein, 9 aa, Severe acute respiratory syndrome coronavirus 2
  REGION 1..9: note = Table A: HLA-A*33:03H HLA-A*68:02M
ETKFLTENL

SEQ ID NO: 1804 - protein, 9 aa, Severe acute respiratory syndrome coronavirus 2
  REGION 1..9: note = Table A: HLA-A*24:07M HLA-A*23:01H
KFLTENLLL

SEQ ID NO: 1805 - protein, 9 aa, Severe acute respiratory syndrome coronavirus 2
  REGION 1..9: note = Table A: HLA-A*29:01H HLA-A*29:02M HLA-B*38:02H
FLTENLLLY

SEQ ID NO: 1806 - protein, 9 aa, Severe acute respiratory syndrome coronavirus 2
  REGION 1..9: note = Table A: HLA-C*14:02H HLA-C*14:03M HLA-A*29:02H HLA-A*30:02H HLA-A*24:02M HLA-A*24:07H HLA-C*08:01H HLA-A*23:01M HLA-B*39:01H
LYIDINGNL

SEQ ID NO: 1807 - protein, 9 aa, Severe acute respiratory syndrome coronavirus 2
  REGION 1..9: note = Table A: HLA-C*04:03H
YIDINGNLH

SEQ ID NO: 1808 - protein, 9 aa, Severe acute respiratory syndrome coronavirus 2
  REGION 1..9: note = Table A: HLA-B*50:01H
IDINGNLHP

SEQ ID NO: 1809 - protein, 9 aa, Severe acute respiratory syndrome coronavirus 2
  REGION 1..9: note = Table A: HLA-B*39:06H
NGNLHPDSA

SEQ ID NO: 1810 - protein, 9 aa, Severe acute respiratory syndrome coronavirus 2
  REGION 1..9: note = Table A: HLA-A*11:303H HLA-B*35:03H HLA-A*02:05H HLA-B*14:01H HLA-A*02:02H HLA-A*02:03H HLA-B*35:02H HLA-C*08:01H HLA-B*35:12H HLA-B*38:01H HLA-B*38:02M HLA-B*15:02H HLA-B*39:01H HLA-B*15:10H
NLHPDSATL

SEQ ID NO: 1811 - protein, 9 aa, Severe acute respiratory syndrome coronavirus 2
  REGION 1..9: note = Table A: HLA-B*38:02H
LHPDSATLV

SEQ ID NO: 1812 - protein, 9 aa, Severe acute respiratory syndrome coronavirus 2
  REGION 1..9: note = Table A: HLA-B*58:01H HLA-C*16:04H HLA-B*53:01H HLA-A*68:02H HLA-B*35:03M HLA-A*02:05H HLA-A*02:06H HLA-A*02:07H HLA-A*02:08H HLA-A*02:02H HLA-B*35:01M HLA-B*35:02M HLA-B*35:08H HLA-B*35:07H HLA-B*35:12M HLA-B*38:01H
  REGION 1..9: note = CONT. FROM ABOVE: HLA-B*38:02H HLA-B*15:01H HLA-B*15:02H HLA- B*57:03M HLA-B*13:01H
LVSDIDITF

SEQ ID NO: 1813 - protein, 9 aa, Severe acute respiratory syndrome coronavirus 2
  REGION 1..9: note = Table A: HLA-C*04:03H HLA-A*02:07H HLA-C*17:01H HLA-C*08:01H HLA-C*08:02M HLA-C*05:01M
VSDIDITFL

SEQ ID NO: 1814 - protein, 9 aa, Severe acute respiratory syndrome coronavirus 2
  REGION 1..9: note = Table A: HLA-B*27:02H
SDIDITFLK

SEQ ID NO: 1815 - protein, 9 aa, Severe acute respiratory syndrome coronavirus 2
  REGION 1..9: note = Table A: HLA-A*36:01H HLA-A*34:02M
DIDITFLKK

SEQ ID NO: 1816 - protein, 9 aa, Severe acute respiratory syndrome coronavirus 2
  REGION 1..9: note = Table A: HLA-B*08:01H HLA-A*02:11H HLA-A*02:04H HLA-A*02:02M HLA-A*02:03H HLA-B*38:02H
FLKKDAPYI

SEQ ID NO: 1817 - protein, 9 aa, Severe acute respiratory syndrome coronavirus 2
  REGION 1..9: note = Table A: HLA-A*26:01H HLA-A*68:02H HLA-B*51:01M
DAPYIVGDV

SEQ ID NO: 1818 - protein, 9 aa, Severe acute respiratory syndrome coronavirus 2
  REGION 1..9: note = Table A: HLA-B*42:01H HLA-B*56:01M HLA-B*55:02H HLA-B*35:03H HLA-C*15:05H HLA-B*55:01M HLA-B*35:02H HLA-B*51:01M HLA-C*08:01H HLA-B*38:02H HLA-B*39:06H HLA-B*54:01M HLA-B*07:02M HLA-B*07:04H HLA-B*07:05M
APYIVGDVV

SEQ ID NO: 1819 - protein, 9 aa, Severe acute respiratory syndrome coronavirus 2
  REGION 1..9: note = Table A: HLA-A*02:07H
VGDVVQEGV

SEQ ID NO: 1820 - protein, 9 aa, Severe acute respiratory syndrome coronavirus 2
  REGION 1..9: note = Table A: HLA-B*40:01H HLA-B*40:02H HLA-B*41:02H
GDVVQEGVL

SEQ ID NO: 1821 - protein, 9 aa, Severe acute respiratory syndrome coronavirus 2
  REGION 1..9: note = Table A: HLA-A*11:303H HLA-B*55:02H HLA-B*55:01H HLA-A*02:05H HLA-A*02:06H HLA-A*02:08H HLA-A*02:01H HLA-A*02:03H HLA-B*38:02H
VVQEGVLTA

SEQ ID NO: 1822 - protein, 9 aa, Severe acute respiratory syndrome coronavirus 2
  REGION 1..9: note = Table A: HLA-A*02:05H HLA-A*02:06H HLA-A*02:01H HLA-B*52:01H HLA-B*38:02H HLA-B*39:01H HLA-B*13:02M
VQEGVLTAV

SEQ ID NO: 1823 - protein, 9 aa, Severe acute respiratory syndrome coronavirus 2
  REGION 1..9: note = Table A: HLA-B*49:01H
QEGVLTAVV

SEQ ID NO: 1824 - protein, 9 aa, Severe acute respiratory syndrome coronavirus 2
  REGION 1..9: note = Table A: HLA-A*02:01H
VLTAVVIPT

SEQ ID NO: 1825 - protein, 9 aa, Severe acute respiratory syndrome coronavirus 2
  REGION 1..9: note = Table A: HLA-A*11:303M HLA-A*74:01H HLA-A*03:01M HLA-A*03:02M HLA-A*11:01H HLA-A*11:02M HLA-A*36:01H HLA-B*57:01H HLA-A*30:01H HLA-A*30:02H HLA-A*68:01M HLA-A*68:02H HLA-A*34:02H HLA-C*07:27H HLA-B*57:03H
LTAVVIPTK

SEQ ID NO: 1826 - protein, 9 aa, Severe acute respiratory syndrome coronavirus 2
  REGION 1..9: note = Table A: HLA-A*68:01M HLA-A*34:01H HLA-A*34:02M HLA-A*66:01H
TAVVIPTKK

SEQ ID NO: 1827 - protein, 9 aa, Severe acute respiratory syndrome coronavirus 2
  REGION 1..9: note = Table A: HLA-A*02:08H
AVVIPTKKA

SEQ ID NO: 1828 - protein, 9 aa, Severe acute respiratory syndrome coronavirus 2
  REGION 1..9: note = Table A: HLA-B*15:03M
KKAGGTTEM

SEQ ID NO: 1829 - protein, 9 aa, Severe acute respiratory syndrome coronavirus 2
  REGION 1..9: note = Table A: HLA-C*15:05H
KAGGTTEML

SEQ ID NO: 1830 - protein, 9 aa, Severe acute respiratory syndrome coronavirus 2
  REGION 1..9: note = Table A: HLA-A*11:01H HLA-A*36:01H
GGTTEMLAK

SEQ ID NO: 1831 - protein, 9 aa, Severe acute respiratory syndrome coronavirus 2
  REGION 1..9: note = Table A: HLA-A*02:05M HLA-A*02:06H HLA-A*02:08M HLA-A*02:02H
GTTEMLAKA

SEQ ID NO: 1832 - protein, 9 aa, Severe acute respiratory syndrome coronavirus 2
  REGION 1..9: note = Table A: HLA-A*34:02M
EMLAKALRK

SEQ ID NO: 1833 - protein, 9 aa, Severe acute respiratory syndrome coronavirus 2
  REGION 1..9: note = Table A: HLA-A*02:11H HLA-A*02:02M HLA-A*02:03M HLA-B*38:02H
MLAKALRKV

SEQ ID NO: 1834 - protein, 9 aa, Severe acute respiratory syndrome coronavirus 2
  REGION 1..9: note = Table A: HLA-B*27:05H HLA-C*07:02H HLA-B*27:02H HLA-A*30:02H HLA-B*38:02H
LRKVPTDNY

SEQ ID NO: 1835 - protein, 9 aa, Severe acute respiratory syndrome coronavirus 2
  REGION 1..9: note = Table A: HLA-B*38:02H HLA-B*15:03H
RKVPTDNYI

SEQ ID NO: 1836 - protein, 9 aa, Severe acute respiratory syndrome coronavirus 2
  REGION 1..9: note = Table A: HLA-B*56:01H HLA-B*55:02M HLA-C*15:05H HLA-B*54:01H
VPTDNYITT

SEQ ID NO: 1837 - protein, 9 aa, Severe acute respiratory syndrome coronavirus 2
  REGION 1..9: note = Table A: HLA-B*58:01H HLA-A*36:01M HLA-A*01:01H
PTDNYITTY

SEQ ID NO: 1838 - protein, 9 aa, Severe acute respiratory syndrome coronavirus 2
  REGION 1..9: note = Table A: HLA-A*11:303H HLA-C*03:03M HLA-C*03:04M HLA-A*68:02H HLA-C*15:05H HLA-C*08:01H HLA-C*08:03H HLA-A*66:01H
ITTYPGQGL

SEQ ID NO: 1839 - protein, 9 aa, Severe acute respiratory syndrome coronavirus 2
  REGION 1..9: note = Table A: HLA-B*35:01M HLA-B*35:08H HLA-B*35:07M HLA-B*38:02H HLA-B*07:05H HLA-B*15:11H
YPGQGLNGY

SEQ ID NO: 1840 - protein, 9 aa, Severe acute respiratory syndrome coronavirus 2
  REGION 1..9: note = Table A: HLA-B*13:02M
GQGLNGYTV

SEQ ID NO: 1841 - protein, 9 aa, Severe acute respiratory syndrome coronavirus 2
  REGION 1..9: note = Table A: HLA-A*11:303H HLA-C*12:05H HLA-A*02:11H HLA-C*03:04H HLA-A*68:02M HLA-C*15:05H HLA-C*12:03H HLA-C*15:02H HLA-A*02:05M HLA-A*02:06M HLA-A*02:08H HLA-A*02:02H HLA-A*02:03H HLA-C*08:01H HLA-B*38:02H
YTVEEAKTV

SEQ ID NO: 1842 - protein, 9 aa, Severe acute respiratory syndrome coronavirus 2
  REGION 1..9: note = Table A: HLA-A*11:303H HLA-C*04:03H HLA-C*03:04H HLA-B*35:03H HLA-C*15:05M HLA-C*01:02H HLA-A*02:05H HLA-B*14:01H HLA-B*35:01H HLA-B*35:02H HLA-B*35:08H HLA-C*08:01H HLA-C*08:02M HLA-B*35:12H HLA-B*38:01H
  REGION 1..9: note = CONT. FROM ABOVE: HLA-B*38:02M HLA-B*40:01H HLA-B*07:02H HLA- B*07:04H HLA-B*15:02M HLA-B*39:01M HLA-B*07:05H HLA-B*41:02H HLA-C*05:01H HLA-B*15:10H HLA-C*07:04H
TVEEAKTVL

SEQ ID NO: 1843 - protein, 9 aa, Severe acute respiratory syndrome coronavirus 2
  REGION 1..9: note = Table A: HLA-B*49:01H
VEEAKTVLK

SEQ ID NO: 1844 - protein, 9 aa, Severe acute respiratory syndrome coronavirus 2
  REGION 1..9: note = Table A: HLA-A*68:01H HLA-A*34:01H HLA-A*34:02M
EEAKTVLKK

SEQ ID NO: 1845 - protein, 9 aa, Severe acute respiratory syndrome coronavirus 2
  REGION 1..9: note = Table A: HLA-C*12:05H HLA-A*02:11H HLA-C*03:02H HLA-A*68:02H HLA-C*12:03H HLA-A*02:04H HLA-B*51:01H HLA-C*08:01H HLA-B*38:02H HLA-B*54:01H HLA-B*57:03H
SAFYILPSI

SEQ ID NO: 1846 - protein, 9 aa, Severe acute respiratory syndrome coronavirus 2
  REGION 1..9: note = Table A: HLA-C*14:03H HLA-B*52:01H
AFYILPSII

SEQ ID NO: 1847 - protein, 9 aa, Severe acute respiratory syndrome coronavirus 2
  REGION 1..9: note = Table A: HLA-A*34:02H
LPSIISNEK

SEQ ID NO: 1848 - protein, 9 aa, Severe acute respiratory syndrome coronavirus 2
  REGION 1..9: note = Table A: HLA-B*13:01H HLA-B*13:02H
IISNEKQEI

SEQ ID NO: 1849 - protein, 9 aa, Severe acute respiratory syndrome coronavirus 2
  REGION 1..9: note = Table A: HLA-B*58:01H HLA-B*58:02H HLA-C*16:01H HLA-C*03:04H HLA-C*15:05H HLA-C*15:02H HLA-B*57:03M
ISNEKQEIL

SEQ ID NO: 1850 - protein, 9 aa, Severe acute respiratory syndrome coronavirus 2
  REGION 1..9: note = Table A: HLA-B*45:01H
NEKQEILGT

SEQ ID NO: 1851 - protein, 9 aa, Severe acute respiratory syndrome coronavirus 2
  REGION 1..9: note = Table A: HLA-B*58:01H HLA-B*44:02H HLA-B*44:05H HLA-C*16:04M HLA-B*45:01M HLA-B*44:03H HLA-B*18:01H HLA-B*27:02H HLA-B*15:13H HLA-B*38:02H HLA-B*40:01H HLA-B*40:02H HLA-B*07:05H HLA-B*41:02H HLA-B*49:01H HLA-B*50:01H
QEILGTVSW

SEQ ID NO: 1852 - protein, 9 aa, Severe acute respiratory syndrome coronavirus 2
  REGION 1..9: note = Table A: HLA-A*02:11M HLA-A*02:04M HLA-A*02:07H HLA-A*02:01M HLA-A*02:02H HLA-B*38:02H
ILGTVSWNL

SEQ ID NO: 1853 - protein, 9 aa, Severe acute respiratory syndrome coronavirus 2
  REGION 1..9: note = Table A: HLA-C*16:01H HLA-B*07:04H
TVSWNLREM

SEQ ID NO: 1854 - protein, 9 aa, Severe acute respiratory syndrome coronavirus 2
  REGION 1..9: note = Table A: HLA-A*02:11M HLA-B*57:03M
VSWNLREML

SEQ ID NO: 1855 - protein, 9 aa, Severe acute respiratory syndrome coronavirus 2
  REGION 1..9: note = Table A: HLA-A*02:02H HLA-A*02:03M HLA-B*38:02H
NLREMLAHA

SEQ ID NO: 1856 - protein, 9 aa, Severe acute respiratory syndrome coronavirus 2
  REGION 1..9: note = Table A: HLA-A*34:01H
MLAHAEETR

SEQ ID NO: 1857 - protein, 9 aa, Severe acute respiratory syndrome coronavirus 2
  REGION 1..9: note = Table A: HLA-B*38:01M HLA-B*38:02H HLA-B*39:01M HLA-B*15:10H
AHAEETRKL

SEQ ID NO: 1858 - protein, 9 aa, Severe acute respiratory syndrome coronavirus 2
  REGION 1..9: note = Table A: HLA-B*53:01M HLA-B*35:03H HLA-B*35:01H HLA-B*35:02H HLA-B*35:07H HLA-B*35:12H HLA-B*38:02H
HAEETRKLM

SEQ ID NO: 1859 - protein, 9 aa, Severe acute respiratory syndrome coronavirus 2
  REGION 1..9: note = Table A: HLA-B*45:01H HLA-B*50:01H
AEETRKLMP

SEQ ID NO: 1860 - protein, 9 aa, Severe acute respiratory syndrome coronavirus 2
  REGION 1..9: note = Table A: HLA-A*02:11M HLA-A*02:01M
KLMPVCVET

SEQ ID NO: 1861 - protein, 9 aa, Severe acute respiratory syndrome coronavirus 2
  REGION 1..9: note = Table A: HLA-B*56:01H HLA-B*55:02H HLA-B*35:02H HLA-B*35:12H HLA-B*54:01H
MPVCVETKA

SEQ ID NO: 1862 - protein, 9 aa, Severe acute respiratory syndrome coronavirus 2
  REGION 1..9: note = Table A: HLA-B*40:02H HLA-B*40:06H
VETKAIVST

SEQ ID NO: 1863 - protein, 9 aa, Severe acute respiratory syndrome coronavirus 2
  REGION 1..9: note = Table A: HLA-B*57:01H HLA-A*25:01M HLA-A*26:01M HLA-A*26:02H HLA-A*26:03H HLA-A*68:02H HLA-B*38:02H HLA-B*57:03H
ETKAIVSTI

SEQ ID NO: 1864 - protein, 9 aa, Severe acute respiratory syndrome coronavirus 2
  REGION 1..9: note = Table A: HLA-B*58:02H HLA-A*74:01H HLA-A*03:01H HLA-A*11:01H HLA-A*11:02H HLA-B*57:01H HLA-A*33:03H HLA-A*30:02H HLA-A*68:01M HLA-A*34:01M HLA-A*34:02H HLA-A*31:01M HLA-B*57:03H HLA-A*66:01M
KAIVSTIQR

SEQ ID NO: 1865 - protein, 9 aa, Severe acute respiratory syndrome coronavirus 2
  REGION 1..9: note = Table A: HLA-A*11:303H HLA-A*03:01H HLA-A*03:02H HLA-A*11:01H HLA-A*11:02H HLA-A*30:02H HLA-A*34:02H HLA-C*07:27M HLA-B*13:02H
AIVSTIQRK

SEQ ID NO: 1866 - protein, 9 aa, Severe acute respiratory syndrome coronavirus 2
  REGION 1..9: note = Table A: HLA-B*58:01M HLA-B*58:02M HLA-C*16:01M HLA-A*03:01H HLA-B*57:01M HLA-A*26:01H HLA-A*29:01M HLA-A*29:02H HLA-A*30:02H HLA-C*15:05H HLA-C*12:02H HLA-C*12:03H HLA-A*34:02H HLA-B*35:01H HLA-B*35:07H HLA-B*38:02M
  REGION 1..9: note = CONT. FROM ABOVE: HLA-A*32:01H HLA-B*15:01M HLA-B*15:02H HLA- B*07:05H HLA-B*57:03H HLA-C*02:02H
IVSTIQRKY

SEQ ID NO: 1867 - protein, 9 aa, Severe acute respiratory syndrome coronavirus 2
  REGION 1..9: note = Table A: HLA-A*02:11M HLA-A*02:05H HLA-A*02:08M HLA-A*02:01H HLA-A*02:02H HLA-B*13:02M
KGIKIQEGV

SEQ ID NO: 1868 - protein, 9 aa, Severe acute respiratory syndrome coronavirus 2
  REGION 1..9: note = Table A: HLA-B*58:01H HLA-C*14:03H HLA-A*11:303H HLA-A*03:02H HLA-A*36:01H HLA-B*46:01M HLA-A*30:02M HLA-C*12:02H HLA-B*38:02H HLA-B*15:01H HLA-B*15:02H HLA-B*15:03H HLA-B*39:01H HLA-B*07:05H
KIQEGVVDY

SEQ ID NO: 1869 - protein, 9 aa, Severe acute respiratory syndrome coronavirus 2
  REGION 1..9: note = Table A: HLA-B*45:01H
QEGVVDYGA

SEQ ID NO: 1870 - protein, 9 aa, Severe acute respiratory syndrome coronavirus 2
  REGION 1..9: note = Table A: HLA-A*26:03H HLA-A*34:01H HLA-A*66:01H
EGVVDYGAR

SEQ ID NO: 1871 - protein, 9 aa, Severe acute respiratory syndrome coronavirus 2
  REGION 1..9: note = Table A: HLA-A*26:02H HLA-A*34:01H HLA-B*15:01H HLA-A*66:01H
GVVDYGARF

SEQ ID NO: 1872 - protein, 9 aa, Severe acute respiratory syndrome coronavirus 2
  REGION 1..9: note = Table A: HLA-A*36:01M HLA-A*29:02H HLA-A*01:01H HLA-C*04:03H HLA-A*30:02H
VVDYGARFY

SEQ ID NO: 1873 - protein, 9 aa, Severe acute respiratory syndrome coronavirus 2
  REGION 1..9: note = Table A: HLA-A*33:01H
DYGARFYFY

SEQ ID NO: 1874 - protein, 9 aa, Severe acute respiratory syndrome coronavirus 2
  REGION 1..9: note = Table A: HLA-B*27:05M
ARFYFYTSK

SEQ ID NO: 1875 - protein, 9 aa, Severe acute respiratory syndrome coronavirus 2
  REGION 1..9: note = Table A: HLA-C*14:03H
FYFYTSKTT

SEQ ID NO: 1876 - protein, 9 aa, Severe acute respiratory syndrome coronavirus 2
  REGION 1..9: note = Table A: HLA-C*14:02M HLA-C*14:03H HLA-B*08:01H HLA-A*02:11H HLA-C*15:05H HLA-A*02:03H HLA-B*51:01M HLA-B*52:01H HLA-B*38:02H HLA-B*54:01H HLA-B*15:02H HLA-B*07:05H HLA-B*49:01H
YFYTSKTTV

SEQ ID NO: 1877 - protein, 9 aa, Severe acute respiratory syndrome coronavirus 2
  REGION 1..9: note = Table A: HLA-C*14:02H HLA-C*14:03H
FYTSKTTVA

SEQ ID NO: 1878 - protein, 9 aa, Severe acute respiratory syndrome coronavirus 2
  REGION 1..9: note = Table A: HLA-B*46:01H HLA-B*08:01M HLA-C*15:05H HLA-A*02:08H HLA-A*02:03H HLA-B*38:02H HLA-B*07:04H HLA-B*41:02H
TSKTTVASL

SEQ ID NO: 1879 - protein, 9 aa, Severe acute respiratory syndrome coronavirus 2
  REGION 1..9: note = Table A: HLA-A*11:303H HLA-C*16:04H HLA-A*25:01H HLA-A*26:01H HLA-A*26:02M HLA-A*26:03H HLA-A*02:11H HLA-A*68:01H HLA-A*68:02H HLA-B*35:03M HLA-C*15:05M HLA-A*02:04M HLA-A*02:05H HLA-A*02:06M HLA-A*02:07H
  REGION 1..9: note = CONT. FROM ABOVE: HLA-A*02:08H HLA-B*14:01H HLA-A*02:01H HLA- A*02:02H HLA-A*02:03M HLA-A*34:01H HLA-B*35:01M HLA-B*35:02H HLA-C*08:01M HLA-B*35:12H HLA-B*38:01H HLA-B*38:02H HLA-B*40 :06H HLA-B*07:02H HLA-B*15:01H HLA-B*15:02M HLA-B*39:01M
  REGION 1..9: note = CONT. FROM ABOVE: HLA-B*07:05M HLA-B*57:03H HLA-B*13:02H HLA- C*07:04H
TVASLINTL

SEQ ID NO: 1880 - protein, 9 aa, Severe acute respiratory syndrome coronavirus 2
  REGION 1..9: note = Table A: HLA-A*11:303H HLA-A*02:04M HLA-A*02:05M HLA-A*02:01H HLA-A*02:02M HLA-A*02:03M HLA-B*38:02H
SLINTLNDL

SEQ ID NO: 1881 - protein, 9 aa, Severe acute respiratory syndrome coronavirus 2
  REGION 1..9: note = Table A: HLA-A*11:303H HLA-A*02:11H HLA-B*35:03H HLA-A*02:04M HLA-A*02:05M HLA-A*02:07H HLA-B*14:01H HLA-A*02:01M HLA-A*02:02H HLA-A*02:03H HLA-B*38:01H HLA-B*38:02M HLA-B*39:01H
TLNDLNETL

SEQ ID NO: 1882 - protein, 9 aa, Severe acute respiratory syndrome coronavirus 2
  REGION 1..9: note = Table A: HLA-A*26:02H HLA-B*35:03H HLA-C*15:05H HLA-A*02:04M HLA-B*14:01H HLA-A*02:01H HLA-B*35:01H HLA-B*35:02H HLA-B*35:12H HLA-B*38:02M HLA-B*15:02H HLA-B*39:01H HLA-B*07:05H
DLNETLVTM

SEQ ID NO: 1883 - protein, 9 aa, Severe acute respiratory syndrome coronavirus 2
  REGION 1..9: note = Table A: HLA-B*44:05H HLA-B*18:01H HLA-B*40:01H HLA-B*40:02H HLA-B*07:05H
NETLVTMPL

SEQ ID NO: 1884 - protein, 9 aa, Severe acute respiratory syndrome coronavirus 2
  REGION 1..9: note = Table A: HLA-A*29:01M HLA-A*29:02M HLA-B*27:02H HLA-C*15:05H HLA-B*35:01H HLA-B*38:02M HLA-B*15:01H HLA-B*15:02M HLA-B*07:05M
TLVTMPLGY

SEQ ID NO: 1885 - protein, 9 aa, Severe acute respiratory syndrome coronavirus 2
  REGION 1..9: note = Table A: HLA-A*68:02H
LVTMPLGYV

SEQ ID NO: 1886 - protein, 9 aa, Severe acute respiratory syndrome coronavirus 2
  REGION 1..9: note = Table A: HLA-B*54:01H
MPLGYVTHG

SEQ ID NO: 1887 - protein, 9 aa, Severe acute respiratory syndrome coronavirus 2
  REGION 1..9: note = Table A: HLA-A*02:04H HLA-A*02:02H
PLGYVTHGL

SEQ ID NO: 1888 - protein, 9 aa, Severe acute respiratory syndrome coronavirus 2
  REGION 1..9: note = Table A: HLA-C*14:03H HLA-A*24:07H HLA-A*23:01H
GYVTHGLNL

SEQ ID NO: 1889 - protein, 9 aa, Severe acute respiratory syndrome coronavirus 2
  REGION 1..9: note = Table A: HLA-B*39:06M
THGLNLEEA

SEQ ID NO: 1890 - protein, 9 aa, Severe acute respiratory syndrome coronavirus 2
  REGION 1..9: note = Table A: HLA-B*39:06H
HGLNLEEAA

SEQ ID NO: 1891 - protein, 9 aa, Severe acute respiratory syndrome coronavirus 2
  REGION 1..9: note = Table A: HLA-A*29:01H HLA-A*29:02H
LNLEEAARY

SEQ ID NO: 1892 - protein, 9 aa, Severe acute respiratory syndrome coronavirus 2
  REGION 1..9: note = Table A: HLA-B*15:02H
NLEEAARYM

SEQ ID NO: 1893 - protein, 9 aa, Severe acute respiratory syndrome coronavirus 2
  REGION 1..9: note = Table A: HLA-A*25:01H HLA-A*34:01M HLA-A*34:02H HLA-A*66:01H
EAARYMRSL

SEQ ID NO: 1894 - protein, 9 aa, Severe acute respiratory syndrome coronavirus 2
  REGION 1..9: note = Table A: HLA-C*06:02H HLA-B*14:02H
ARYMRSLKV

SEQ ID NO: 1895 - protein, 9 aa, Severe acute respiratory syndrome coronavirus 2
  REGION 1..9: note = Table A: HLA-B*54:01H
YMRSLKVPA

SEQ ID NO: 1896 - protein, 9 aa, Severe acute respiratory syndrome coronavirus 2
  REGION 1..9: note = Table A: HLA-B*14:01H
MRSLKVPAT

SEQ ID NO: 1897 - protein, 9 aa, Severe acute respiratory syndrome coronavirus 2
  REGION 1..9: note = Table A: HLA-B*58:01H HLA-B*58:02M HLA-A*02:11M HLA-C*15:05M HLA-C*15:02M HLA-A*02:06H HLA-A*02:01H HLA-B*52:01M HLA-B*57:03M HLA-B*13:02M HLA-B*49:01H
RSLKVPATV

SEQ ID NO: 1898 - protein, 9 aa, Severe acute respiratory syndrome coronavirus 2
  REGION 1..9: note = Table A: HLA-B*38:02H
SLKVPATVS

SEQ ID NO: 1899 - protein, 9 aa, Severe acute respiratory syndrome coronavirus 2
  REGION 1..9: note = Table A: HLA-B*38:02H HLA-B*15:03H
LKVPATVSV

SEQ ID NO: 1900 - protein, 9 aa, Severe acute respiratory syndrome coronavirus 2
  REGION 1..9: note = Table A: HLA-B*56:01H HLA-B*55:02H HLA-C*15:05H HLA-B*07:05H
VPATVSVSS

SEQ ID NO: 1901 - protein, 9 aa, Severe acute respiratory syndrome coronavirus 2
  REGION 1..9: note = Table A: HLA-C*14:02H HLA-C*14:03H HLA-A*25:01H HLA-B*46:01M HLA-A*26:01M HLA-A*26:02H HLA-A*26:03H HLA-A*30:02H HLA-A*68:01H HLA-C*01:02H HLA-C*12:02M HLA-A*34:02H HLA-B*35:01H HLA-B*35:08H HLA-B*38:02M HLA-B*15:01M
  REGION 1..9: note = CONT. FROM ABOVE: HLA-B*15:02M HLA-B*15:03H HLA-B*39:01H HLA- B*07:05H HLA-B*15:11H
SSPDAVTAY

SEQ ID NO: 1902 - protein, 9 aa, Severe acute respiratory syndrome coronavirus 2
  REGION 1..9: note = Table A: HLA-A*25:01M HLA-A*26:01M HLA-A*26:02H HLA-A*26:03H HLA-B*35:01M HLA-B*35:07H HLA-B*38:02H
DAVTAYNGY

SEQ ID NO: 1903 - protein, 9 aa, Severe acute respiratory syndrome coronavirus 2
  REGION 1..9: note = Table A: HLA-C*15:05H HLA-B*54:01H
TAYNGYLTS

SEQ ID NO: 1904 - protein, 9 aa, Severe acute respiratory syndrome coronavirus 2
  REGION 1..9: note = Table A: HLA-A*03:01H HLA-A*34:02H
NGYLTSSSK

SEQ ID NO: 1905 - protein, 9 aa, Severe acute respiratory syndrome coronavirus 2
  REGION 1..9: note = Table A: HLA-B*58:02H HLA-B*57:01H HLA-B*46:01H HLA-C*12:02H HLA-B*15:01H HLA-B*57:03M HLA-C*02:02H
SSKTPEEHF

SEQ ID NO: 1906 - protein, 9 aa, Severe acute respiratory syndrome coronavirus 2
  REGION 1..9: note = Table A: HLA-B*38:01H HLA-B*38:02H
SKTPEEHFI

SEQ ID NO: 1907 - protein, 9 aa, Severe acute respiratory syndrome coronavirus 2
  REGION 1..9: note = Table A: HLA-B*35:12H
TPEEHFIET

SEQ ID NO: 1908 - protein, 9 aa, Severe acute respiratory syndrome coronavirus 2
  REGION 1..9: note = Table A: HLA-B*49:01H
PEEHFIETI

SEQ ID NO: 1909 - protein, 9 aa, Severe acute respiratory syndrome coronavirus 2
  REGION 1..9: note = Table A: HLA-B*14:02H HLA-B*38:01H HLA-B*38:02H HLA-B*39:06M HLA-B*39:01H HLA-B*15:10H
EHFIETISL

SEQ ID NO: 1910 - protein, 9 aa, Severe acute respiratory syndrome coronavirus 2
  REGION 1..9: note = Table A: HLA-A*25:01H HLA-A*26:01H HLA-A*26:02H HLA-A*26:03H HLA-A*30:02H HLA-A*68:01H HLA-A*34:01H HLA-A*34:02M HLA-B*35:01H HLA-B*38:02H HLA-B*15:02H HLA-B*39:01H HLA-A*66:01H
ETISLAGSY

SEQ ID NO: 1911 - protein, 9 aa, Severe acute respiratory syndrome coronavirus 2
  REGION 1..9: note = Table A: HLA-A*34:02H
TISLAGSYK

SEQ ID NO: 1912 - protein, 9 aa, Severe acute respiratory syndrome coronavirus 2
  REGION 1..9: note = Table A: HLA-C*16:01M HLA-A*36:01H HLA-A*30:02M
AGSYKDWSY

SEQ ID NO: 1913 - protein, 9 aa, Severe acute respiratory syndrome coronavirus 2
  REGION 1..9: note = Table A: HLA-A*33:03H
SYKDWSYSG

SEQ ID NO: 1914 - protein, 9 aa, Severe acute respiratory syndrome coronavirus 2
  REGION 1..9: note = Table A: HLA-C*14:02M HLA-C*14:03M HLA-C*07:02H HLA-C*15:05H HLA-A*24:02M HLA-A*24:07H HLA-A*23:01H HLA-B*38:02H HLA-B*39:01M HLA-B*07:05H
SYSGQSTQL

SEQ ID NO: 1915 - protein, 9 aa, Severe acute respiratory syndrome coronavirus 2
  REGION 1..9: note = Table A: HLA-B*13:02H
SGQSTQLGI

SEQ ID NO: 1916 - protein, 9 aa, Severe acute respiratory syndrome coronavirus 2
  REGION 1..9: note = Table A: HLA-B*58:01H HLA-C*15:05H HLA-B*57:03M
QSTQLGIEF

SEQ ID NO: 1917 - protein, 9 aa, Severe acute respiratory syndrome coronavirus 2
  REGION 1..9: note = Table A: HLA-A*68:02H HLA-A*02:04H
STQLGIEFL

SEQ ID NO: 1918 - protein, 9 aa, Severe acute respiratory syndrome coronavirus 2
  REGION 1..9: note = Table A: HLA-A*11:02H HLA-B*27:02H
TQLGIEFLK

SEQ ID NO: 1919 - protein, 9 aa, Severe acute respiratory syndrome coronavirus 2
  REGION 1..9: note = Table A: HLA-B*15:03M
LKRGDKSVY

SEQ ID NO: 1920 - protein, 9 aa, Severe acute respiratory syndrome coronavirus 2
  REGION 1..9: note = Table A: HLA-C*06:02H HLA-C*07:01H HLA-C*07:02H
KRGDKSVYY

SEQ ID NO: 1921 - protein, 9 aa, Severe acute respiratory syndrome coronavirus 2
  REGION 1..9: note = Table A: HLA-C*14:02M HLA-C*14:03M HLA-C*07:02H HLA-B*27:02H HLA-C*15:05H HLA-A*24:02H HLA-A*24:07H HLA-C*08:01H HLA-A*23:01H HLA-B*39:01H
YYTSNPTTF

SEQ ID NO: 1922 - protein, 9 aa, Severe acute respiratory syndrome coronavirus 2
  REGION 1..9: note = Table A: HLA-C*12:02H HLA-A*34:01H HLA-A*34:02H HLA-A*66:01M
YTSNPTTFH

SEQ ID NO: 1923 - protein, 9 aa, Severe acute respiratory syndrome coronavirus 2
  REGION 1..9: note = Table A: HLA-B*58:01H HLA-B*58:02H HLA-A*11:303H HLA-B*44:05H HLA-C*16:01H HLA-C*16:04H HLA-A*11:01H HLA-A*11:02H HLA-B*57:01H HLA-C*03:03H HLA-C*07:01M HLA-A*02:11H HLA-B*53:01M HLA-C*03:02H HLA-C*03:04M
  REGION 1..9: note = CONT. FROM ABOVE: HLA-A*30:02H HLA-A*68:02M HLA-B*35:03M HLA- C*15:05M HLA-C*12:02H HLA-C*12:03H HLA-C*15:02H HLA-A*02:04M HLA-A*02:05H HLA-A*02:06H HLA-A*02:08H HLA-A*02:02M HLA-A*34 :02H HLA-C*07:27H HLA-B*35:01H HLA-C*17:01H HLA-B*35:07H
  REGION 1..9: note = CONT. FROM ABOVE: HLA-C*08:01M HLA-B*38:02M HLA-A*32:01H HLA- B*07:05H HLA-B*57:03H HLA-C*02:02H HLA-B*13:02H HLA-C*07:04H HLA-A*66:01H
TSNPTTFHL

SEQ ID NO: 1924 - protein, 9 aa, Severe acute respiratory syndrome coronavirus 2
  REGION 1..9: note = Table A: HLA-A*11:303H HLA-C*04:01H HLA-C*04:03M HLA-B*53:01H HLA-A*02:07M HLA-B*35:01H HLA-B*35:02H HLA-B*35:08M HLA-B*35:07H HLA-C*08:01H HLA-C*08:02H HLA-B*35:12H HLA-B*38:01M HLA-B*38:02M HLA-B*15:01H
  REGION 1..9: note = CONT. FROM ABOVE: HLA-B*15:02M HLA-B*39:01H HLA-B*57:03H HLA- C*05:01H HLA-B*13:01H
HLDGEVITF

SEQ ID NO: 1925 - protein, 9 aa, Severe acute respiratory syndrome coronavirus 2
  REGION 1..9: note = Table A: HLA-B*44:05M HLA-B*44:03H HLA-B*40:01H HLA-B*40:02M HLA-B*40:06H HLA-B*41:02H HLA-B*49:01M
GEVITFDNL

SEQ ID NO: 1926 - protein, 9 aa, Severe acute respiratory syndrome coronavirus 2
  REGION 1..9: note = Table A: HLA-A*33:03H HLA-A*26:03H HLA-A*68:01M HLA-A*68:02H HLA-A*34:01M HLA-A*34:02H HLA-A*66:01M
EVITFDNLK

SEQ ID NO: 1927 - protein, 9 aa, Severe acute respiratory syndrome coronavirus 2
  REGION 1..9: note = Table A: HLA-B*58:02H HLA-A*02:11H HLA-C*03:04H HLA-A*68:02M HLA-C*15:02H HLA-A*02:04H HLA-A*02:05H HLA-A*02:08H HLA-A*02:02H HLA-A*02:03H HLA-B*57:03H
ITFDNLKTL

SEQ ID NO: 1928 - protein, 9 aa, Severe acute respiratory syndrome coronavirus 2
  REGION 1..9: note = Table A: HLA-C*04:01H HLA-C*04:03H HLA-A*02:07M HLA-A*24:07H HLA-C*08:02H HLA-B*38:02H
TFDNLKTLL

SEQ ID NO: 1929 - protein, 9 aa, Severe acute respiratory syndrome coronavirus 2
  REGION 1..9: note = Table A: HLA-C*15:05H
DNLKTLLSL

SEQ ID NO: 1930 - protein, 9 aa, Severe acute respiratory syndrome coronavirus 2
  REGION 1..9: note = Table A: HLA-A*74:01H HLA-A*33:01H HLA-A*33:03H HLA-A*34:01H
NLKTLLSLR

SEQ ID NO: 1931 - protein, 9 aa, Severe acute respiratory syndrome coronavirus 2
  REGION 1..9: note = Table A: HLA-B*58:02M HLA-A*02:11H HLA-C*15:02M HLA-A*02:06H HLA-A*02:01H HLA-B*57:03H
KTLLSLREV

SEQ ID NO: 1932 - protein, 9 aa, Severe acute respiratory syndrome coronavirus 2
  REGION 1..9: note = Table A: HLA-B*58:02H HLA-B*57:01H HLA-B*57:03M
LSLREVRTI

SEQ ID NO: 1933 - protein, 9 aa, Severe acute respiratory syndrome coronavirus 2
  REGION 1..9: note = Table A: HLA-B*44:03H HLA-B*40:02H HLA-B*40:06M
REVRTIKVF

SEQ ID NO: 1934 - protein, 9 aa, Severe acute respiratory syndrome coronavirus 2
  REGION 1..9: note = Table A: HLA-A*68:02H
EVRTIKVFT

SEQ ID NO: 1935 - protein, 9 aa, Severe acute respiratory syndrome coronavirus 2
  REGION 1..9: note = Table A: HLA-B*58:01H HLA-B*58:02M HLA-A*02:11H HLA-A*68:02M HLA-C*15:05H HLA-C*15:02H HLA-A*02:04H HLA-A*02:05M HLA-A*02:06M HLA-A*02:07H HLA-A*02:08M HLA-A*02:01H HLA-A*02:02H HLA-A*02:03H HLA-C*08:01H HLA-B*38:02H
  REGION 1..9: note = CONT. FROM ABOVE: HLA-B*40:06M HLA-B*57:03M HLA-B*13:02M
RTIKVFTTV

SEQ ID NO: 1936 - protein, 9 aa, Severe acute respiratory syndrome coronavirus 2
  REGION 1..9: note = Table A: HLA-B*58:01H HLA-B*58:02H HLA-A*02:11H HLA-A*68:02H HLA-A*02:05M HLA-A*02:06H HLA-A*02:08H HLA-A*02:02H HLA-B*38:02H HLA-A*32:01H HLA-B*57:03M HLA-B*13:01H HLA-B*13:02H
KVFTTVDNI

SEQ ID NO: 1937 - protein, 9 aa, Severe acute respiratory syndrome coronavirus 2
  REGION 1..9: note = Table A: HLA-C*03:04H HLA-A*68:02H HLA-C*17:01H HLA-C*08:01H
FTTVDNINL

SEQ ID NO: 1938 - protein, 9 aa, Severe acute respiratory syndrome coronavirus 2
  REGION 1..9: note = Table A: HLA-A*11:01H HLA-A*11:02H HLA-A*68:01H HLA-A*34:02M
TTVDNINLH

SEQ ID NO: 1939 - protein, 9 aa, Severe acute respiratory syndrome coronavirus 2
  REGION 1..9: note = Table A: HLA-A*02:07M HLA-B*13:02H
TVDNINLHT

SEQ ID NO: 1940 - protein, 9 aa, Severe acute respiratory syndrome coronavirus 2
  REGION 1..9: note = Table A: HLA-A*68:02M HLA-C*15:05H
DNINLHTQV

SEQ ID NO: 1941 - protein, 9 aa, Severe acute respiratory syndrome coronavirus 2
  REGION 1..9: note = Table A: HLA-B*08:01H HLA-C*15:05H HLA-C*15:02H HLA-B*38:02H
NINLHTQVV

SEQ ID NO: 1942 - protein, 9 aa, Severe acute respiratory syndrome coronavirus 2
  REGION 1..9: note = Table A: HLA-A*11:303H HLA-B*14:01H HLA-B*38:02M HLA-B*15:02M HLA-B*39:01H
NLHTQVVDM

SEQ ID NO: 1943 - protein, 9 aa, Severe acute respiratory syndrome coronavirus 2
  REGION 1..9: note = Table A: HLA-A*11:303H HLA-B*35:03H HLA-C*15:05H HLA-B*35:02H HLA-B*35:12H HLA-B*38:02H HLA-B*57:03H
HTQVVDMSM

SEQ ID NO: 1944 - protein, 9 aa, Severe acute respiratory syndrome coronavirus 2
  REGION 1..9: note = Table A: HLA-B*58:01M HLA-A*11:303H HLA-C*16:04H HLA-A*03:01H HLA-A*11:01H HLA-A*11:02H HLA-A*36:01H HLA-A*25:01M HLA-B*46:01H HLA-A*26:01H HLA-A*26:02M HLA-A*26:03M HLA-A*29:01H HLA-A*29:02M HLA-B*44:03H
  REGION 1..9: note = CONT. FROM ABOVE: HLA-B*18:01H HLA-B*27:02H HLA-B*53:01H HLA- C*03:02H HLA-A*30:02M HLA-A*68:01H HLA-C*15:05H HLA-A*34:01H HLA-A*34:02M HLA-C*07:27H HLA-B*35:01H HLA-B*35:08M HLA-B*35 :07H HLA-B*15:13M HLA-B*38:01H HLA-B*38:02H HLA-B*15:01H
  REGION 1..9: note = CONT. FROM ABOVE: HLA-B*15:02H HLA-B*15:03H HLA-B*39:01M HLA- B*07:05H HLA-B*15:11M HLA-A*66:01H
QVVDMSMTY

SEQ ID NO: 1945 - protein, 9 aa, Severe acute respiratory syndrome coronavirus 2
  REGION 1..9: note = Table A: HLA-B*58:01M HLA-A*11:303H HLA-C*16:01H HLA-B*57:01H HLA-B*46:01H HLA-C*03:02H HLA-C*15:05H HLA-C*12:02H HLA-B*38:02H HLA-B*15:01H HLA-B*07:05H HLA-B*57:03M
MSMTYGQQF

SEQ ID NO: 1946 - protein, 9 aa, Severe acute respiratory syndrome coronavirus 2
  REGION 1..9: note = Table A: HLA-A*68:02H
MTYGQQFGP

SEQ ID NO: 1947 - protein, 9 aa, Severe acute respiratory syndrome coronavirus 2
  REGION 1..9: note = Table A: HLA-C*16:04H HLA-C*03:02H HLA-A*30:02H HLA-B*35:01H HLA-B*38:02H HLA-B*15:02H HLA-B*15:03H HLA-B*39:01H
YGQQFGPTY

SEQ ID NO: 1948 - protein, 9 aa, Severe acute respiratory syndrome coronavirus 2
  REGION 1..9: note = Table A: HLA-B*48:01M HLA-A*02:04H HLA-A*02:03H HLA-C*17:01H HLA-C*08:03H HLA-B*38:02H HLA-B*15:01M HLA-B*15:03H HLA-B*39:01M HLA-B*13:01H HLA-B*13:02H
GQQFGPTYL

SEQ ID NO: 1949 - protein, 9 aa, Severe acute respiratory syndrome coronavirus 2
  REGION 1..9: note = Table A: HLA-A*34:02H
DGADVTKIK

SEQ ID NO: 1950 - protein, 9 aa, Severe acute respiratory syndrome coronavirus 2
  REGION 1..9: note = Table A: HLA-B*15:03H
TKIKPHNSH

SEQ ID NO: 1951 - protein, 9 aa, Severe acute respiratory syndrome coronavirus 2
  REGION 1..9: note = Table A: HLA-B*46:01H HLA-B*15:02H
NSHEGKTFY

SEQ ID NO: 1952 - protein, 9 aa, Severe acute respiratory syndrome coronavirus 2
  REGION 1..9: note = Table A: HLA-B*38:01H HLA-B*38:02H HLA-B*39:01H HLA-B*15:10H
SHEGKTFYV

SEQ ID NO: 1953 - protein, 9 aa, Severe acute respiratory syndrome coronavirus 2
  REGION 1..9: note = Table A: HLA-B*40:01M HLA-B*40:02M HLA-B*40:06H
HEGKTFYVL

SEQ ID NO: 1954 - protein, 9 aa, Severe acute respiratory syndrome coronavirus 2
  REGION 1..9: note = Table A: HLA-A*11:303H HLA-A*02:11H HLA-C*03:04H HLA-B*35:03M HLA-C*15:05H HLA-A*02:04H HLA-A*02:05M HLA-A*02:06M HLA-A*02:07H HLA-A*02:08H HLA-A*02:01H HLA-A*02:02H HLA-B*35:01H HLA-B*35:02H HLA-B*35:08H
  REGION 1..9: note = CONT. FROM ABOVE: HLA-C*08:01M HLA-B*35:12M HLA-B*38:01H HLA- B*38:02M HLA-B*39:01M HLA-B*13:01H
YVLPNDDTL

SEQ ID NO: 1955 - protein, 9 aa, Severe acute respiratory syndrome coronavirus 2
  REGION 1..9: note = Table A: HLA-B*56:01H HLA-B*53:01M HLA-B*35:03M HLA-C*15:05M HLA-B*35:01H HLA-B*35:02M HLA-B*35:08H HLA-B*51:01H HLA-B*35:07H HLA-B*35:12H HLA-B*54:01H
LPNDDTLRV

SEQ ID NO: 1956 - protein, 9 aa, Severe acute respiratory syndrome coronavirus 2
  REGION 1..9: note = Table A: HLA-B*18:01M HLA-B*14:02M HLA-B*37:01M HLA-B*07:05H
DDTLRVEAF

SEQ ID NO: 1957 - protein, 9 aa, Severe acute respiratory syndrome coronavirus 2
  REGION 1..9: note = Table A: HLA-B*46:01H HLA-A*29:02H HLA-A*30:02H HLA-B*35:07H HLA-B*38:02M HLA-B*15:01H HLA-B*15:02H HLA-B*15:03H
TLRVEAFEY

SEQ ID NO: 1958 - protein, 9 aa, Severe acute respiratory syndrome coronavirus 2
  REGION 1..9: note = Table A: HLA-B*27:02H HLA-B*38:02H
LRVEAFEYY

SEQ ID NO: 1959 - protein, 9 aa, Severe acute respiratory syndrome coronavirus 2
  REGION 1..9: note = Table A: HLA-A*68:02M HLA-B*54:01H
EAFEYYHTT

SEQ ID NO: 1960 - protein, 9 aa, Severe acute respiratory syndrome coronavirus 2
  REGION 1..9: note = Table A: HLA-B*45:01H HLA-B*40:06H HLA-B*50:01M
FEYYHTTDP

SEQ ID NO: 1961 - protein, 9 aa, Severe acute respiratory syndrome coronavirus 2
  REGION 1..9: note = Table A: HLA-C*14:02M HLA-C*14:03M HLA-C*04:01H HLA-C*07:02H HLA-B*35:03H HLA-A*24:02M HLA-A*24:07H HLA-C*08:01M HLA-A*23:01M HLA-B*38:02H HLA-B*39:01H
YYHTTDPSF

SEQ ID NO: 1962 - protein, 9 aa, Severe acute respiratory syndrome coronavirus 2
  REGION 1..9: note = Table A: HLA-B*38:01H HLA-B*38:02H HLA-B*39:01M HLA-B*15:10M
YHTTDPSFL

SEQ ID NO: 1963 - protein, 9 aa, Severe acute respiratory syndrome coronavirus 2
  REGION 1..9: note = Table A: HLA-A*34:02H
HTTDPSFLG

SEQ ID NO: 1964 - protein, 9 aa, Severe acute respiratory syndrome coronavirus 2
  REGION 1..9: note = Table A: HLA-A*11:303M HLA-A*74:01H HLA-A*03:01M HLA-A*03:02H HLA-A*11:01H HLA-A*11:02H HLA-A*36:01M HLA-A*33:01H HLA-A*33:03M HLA-A*26:03M HLA-A*01:01H HLA-C*03:03H HLA-A*68:01H HLA-A*34:01M HLA-A*34:02H
  REGION 1..9: note = CONT. FROM ABOVE: HLA-C*07:27M HLA-A*31:01M HLA-A*66:01H
TTDPSFLGR

SEQ ID NO: 1965 - protein, 9 aa, Severe acute respiratory syndrome coronavirus 2
  REGION 1..9: note = Table A: HLA-A*34:01M HLA-A*66:01H
DPSFLGRYM

SEQ ID NO: 1966 - protein, 9 aa, Severe acute respiratory syndrome coronavirus 2
  REGION 1..9: note = Table A: HLA-A*02:02H
FLGRYMSAL

SEQ ID NO: 1967 - protein, 9 aa, Severe acute respiratory syndrome coronavirus 2
  REGION 1..9: note = Table A: HLA-B*27:05M HLA-B*27:02H
GRYMSALNH

SEQ ID NO: 1968 - protein, 9 aa, Severe acute respiratory syndrome coronavirus 2
  REGION 1..9: note = Table A: HLA-A*74:01H HLA-A*03:02H HLA-A*36:01H HLA-A*30:02H HLA-A*02:02H HLA-A*34:02H HLA-B*38:02H
YMSALNHTK

SEQ ID NO: 1969 - protein, 9 aa, Severe acute respiratory syndrome coronavirus 2
  REGION 1..9: note = Table A: HLA-A*34:02H
MSALNHTKK

SEQ ID NO: 1970 - protein, 9 aa, Severe acute respiratory syndrome coronavirus 2
  REGION 1..9: note = Table A: HLA-B*58:01H HLA-B*58:02H HLA-B*57:01H HLA-B*53:01H HLA-B*57:03M
SALNHTKKW

SEQ ID NO: 1971 - protein, 9 aa, Severe acute respiratory syndrome coronavirus 2
  REGION 1..9: note = Table A: HLA-B*48:01H HLA-B*38:02H HLA-B*15:03H
WKYPQVNGL

SEQ ID NO: 1972 - protein, 9 aa, Severe acute respiratory syndrome coronavirus 2
  REGION 1..9: note = Table A: HLA-B*54:01H
YPQVNGLTS

SEQ ID NO: 1973 - protein, 9 aa, Severe acute respiratory syndrome coronavirus 2
  REGION 1..9: note = Table A: HLA-B*13:02H
PQVNGLTSI

SEQ ID NO: 1974 - protein, 9 aa, Severe acute respiratory syndrome coronavirus 2
  REGION 1..9: note = Table A: HLA-A*03:02H HLA-A*11:01H HLA-A*34:02M
QVNGLTSIK

SEQ ID NO: 1975 - protein, 9 aa, Severe acute respiratory syndrome coronavirus 2
  REGION 1..9: note = Table A: HLA-B*15:03M
IKWADNNCY

SEQ ID NO: 1976 - protein, 9 aa, Severe acute respiratory syndrome coronavirus 2
  REGION 1..9: note = Table A: HLA-A*02:02H
KWADNNCYL

SEQ ID NO: 1977 - protein, 9 aa, Severe acute respiratory syndrome coronavirus 2
  REGION 1..9: note = Table A: HLA-A*02:11H HLA-C*15:05H HLA-A*02:04M HLA-A*02:05H HLA-A*02:07H HLA-B*14:01H HLA-A*02:01M HLA-A*02:02M HLA-A*02:03M HLA-B*38:02M HLA-B*13:02H
YLATALLTL

SEQ ID NO: 1978 - protein, 9 aa, Severe acute respiratory syndrome coronavirus 2
  REGION 1..9: note = Table A: HLA-B*53:01H HLA-C*15:05H HLA-B*51:01H HLA-C*08:01H HLA-B*38:02M HLA-B*13:02H
TALLTLQQI

SEQ ID NO: 1979 - protein, 9 aa, Severe acute respiratory syndrome coronavirus 2
  REGION 1..9: note = Table A: HLA-A*02:04H HLA-A*02:01H HLA-A*02:02H
LLTLQQIEL

SEQ ID NO: 1980 - protein, 9 aa, Severe acute respiratory syndrome coronavirus 2
  REGION 1..9: note = Table A: HLA-A*11:01H HLA-A*11:02H HLA-A*36:01H HLA-A*34:02M
LTLQQIELK

SEQ ID NO: 1981 - protein, 9 aa, Severe acute respiratory syndrome coronavirus 2
  REGION 1..9: note = Table A: HLA-A*24:07H HLA-B*38:02M HLA-B*15:01H HLA-B*15:02H HLA-B*13:01H
TLQQIELKF

SEQ ID NO: 1982 - protein, 9 aa, Severe acute respiratory syndrome coronavirus 2
  REGION 1..9: note = Table A: HLA-B*45:01M HLA-B*39:06H HLA-B*40:06M HLA-B*54:01H HLA-B*50:01H
IELKFNPPA

SEQ ID NO: 1983 - protein, 9 aa, Severe acute respiratory syndrome coronavirus 2
  REGION 1..9: note = Table A: HLA-A*25:01H HLA-A*26:03H HLA-B*08:01M HLA-A*68:02H HLA-A*02:04H HLA-A*02:02H HLA-A*02:03H HLA-B*38:02H HLA-B*07:04H
ELKFNPPAL

SEQ ID NO: 1984 - protein, 9 aa, Severe acute respiratory syndrome coronavirus 2
  REGION 1..9: note = Table A: HLA-B*35:01H HLA-B*35:08M HLA-B*35:07M HLA-B*39:01H HLA-B*07:05M
NPPALQDAY

SEQ ID NO: 1985 - protein, 9 aa, Severe acute respiratory syndrome coronavirus 2
  REGION 1..9: note = Table A: HLA-A*02:02H
ALQDAYYRA

SEQ ID NO: 1986 - protein, 9 aa, Severe acute respiratory syndrome coronavirus 2
  REGION 1..9: note = Table A: HLA-A*74:01H
LQDAYYRAR

SEQ ID NO: 1987 - protein, 9 aa, Severe acute respiratory syndrome coronavirus 2
  REGION 1..9: note = Table A: HLA-B*38:02H HLA-B*39:06H
YRARAGEAA

SEQ ID NO: 1988 - protein, 9 aa, Severe acute respiratory syndrome coronavirus 2
  REGION 1..9: note = Table A: HLA-B*27:05H HLA-B*27:02M HLA-B*38:01H HLA-B*38:02H HLA-B*39:01M
ARAGEAANF

SEQ ID NO: 1989 - protein, 9 aa, Severe acute respiratory syndrome coronavirus 2
  REGION 1..9: note = Table A: HLA-B*44:05M HLA-B*45:01H HLA-B*18:01H HLA-B*40:01H HLA-B*40:02H HLA-B*07:05H HLA-B*41:02M HLA-B*49:01M HLA-B*50:01M
GEAANFCAL

SEQ ID NO: 1990 - protein, 9 aa, Severe acute respiratory syndrome coronavirus 2
  REGION 1..9: note = Table A: HLA-A*68:02M
EAANFCALI

SEQ ID NO: 1991 - protein, 9 aa, Severe acute respiratory syndrome coronavirus 2
  REGION 1..9: note = Table A: HLA-C*15:05H HLA-C*15:02H
AANFCALIL

SEQ ID NO: 1992 - protein, 9 aa, Severe acute respiratory syndrome coronavirus 2
  REGION 1..9: note = Table A: HLA-C*14:03H HLA-A*29:01M HLA-A*29:02H HLA-B*35:01H HLA-B*38:02H HLA-B*15:02H HLA-B*07:05H
NFCALILAY

SEQ ID NO: 1993 - protein, 9 aa, Severe acute respiratory syndrome coronavirus 2
  REGION 1..9: note = Table A: HLA-C*15:05H HLA-B*38:02H
YCNKTVGEL

SEQ ID NO: 1994 - protein, 9 aa, Severe acute respiratory syndrome coronavirus 2
  REGION 1..9: note = Table A: HLA-A*02:08H
KTVGELGDV

SEQ ID NO: 1995 - protein, 9 aa, Severe acute respiratory syndrome coronavirus 2
  REGION 1..9: note = Table A: HLA-A*68:01H HLA-A*34:01H HLA-A*66:01H
TVGELGDVR

SEQ ID NO: 1996 - protein, 9 aa, Severe acute respiratory syndrome coronavirus 2
  REGION 1..9: note = Table A: HLA-B*40:02M HLA-B*40:06H HLA-B*41:02H HLA-B*49:01H HLA-B*50:01H
GELGDVRET

SEQ ID NO: 1997 - protein, 9 aa, Severe acute respiratory syndrome coronavirus 2
  REGION 1..9: note = Table A: HLA-A*02:11H HLA-A*68:02H HLA-A*02:02M HLA-A*34:01H HLA-B*38:02H HLA-B*15:02H HLA-B*39:01H
ELGDVRETM

SEQ ID NO: 1998 - protein, 9 aa, Severe acute respiratory syndrome coronavirus 2
  REGION 1..9: note = Table A: HLA-A*33:01H HLA-A*26:01H HLA-A*26:02H HLA-A*26:03H HLA-A*34:01M HLA-A*34:02H HLA-B*38:02H HLA-A*66:01H
DVRETMSYL

SEQ ID NO: 1999 - protein, 9 aa, Severe acute respiratory syndrome coronavirus 2
  REGION 1..9: note = Table A: HLA-A*11:01H HLA-A*11:02H HLA-A*33:03M HLA-A*68:01H HLA-A*68:02H HLA-A*34:02H HLA-A*66:01H
ETMSYLFQH

SEQ ID NO: 2000 - protein, 9 aa, Severe acute respiratory syndrome coronavirus 2
  REGION 1..9: note = Table A: HLA-A*02:02H
TMSYLFQHA

SEQ ID NO: 2001 - protein, 9 aa, Severe acute respiratory syndrome coronavirus 2
  REGION 1..9: note = Table A: HLA-C*14:02M HLA-C*14:03M HLA-A*24:02H HLA-A*24:07H HLA-C*08:01H HLA-A*23:01M
SYLFQHANL

SEQ ID NO: 2002 - protein, 9 aa, Severe acute respiratory syndrome coronavirus 2
  REGION 1..9: note = Table A: HLA-A*02:05H HLA-C*08:01H HLA-B*38:02M HLA-B*39:06H HLA-B*39:01H
FQHANLDSC

SEQ ID NO: 2003 - protein, 9 aa, Severe acute respiratory syndrome coronavirus 2
  REGION 1..9: note = Table A: HLA-A*33:03H
HANLDSCKR

SEQ ID NO: 2004 - protein, 9 aa, Severe acute respiratory syndrome coronavirus 2
  REGION 1..9: note = Table A: HLA-B*51:01H
DSCKRVLNV

SEQ ID NO: 2005 - protein, 9 aa, Severe acute respiratory syndrome coronavirus 2
  REGION 1..9: note = Table A: HLA-B*27:05M
KRVLNVVCK

SEQ ID NO: 2006 - protein, 9 aa, Severe acute respiratory syndrome coronavirus 2
  REGION 1..9: note = Table A: HLA-A*02:11H HLA-A*02:06H HLA-B*13:02H
RVLNVVCKT

SEQ ID NO: 2007 - protein, 9 aa, Severe acute respiratory syndrome coronavirus 2
  REGION 1..9: note = Table A: HLA-C*15:05H
TCGQQQTTL

SEQ ID NO: 2008 - protein, 9 aa, Severe acute respiratory syndrome coronavirus 2
  REGION 1..9: note = Table A: HLA-A*03:02H HLA-A*11:01H
CGQQQTTLK

SEQ ID NO: 2009 - protein, 9 aa, Severe acute respiratory syndrome coronavirus 2
  REGION 1..9: note = Table A: HLA-B*13:02M
GQQQTTLKG

SEQ ID NO: 2010 - protein, 9 aa, Severe acute respiratory syndrome coronavirus 2
  REGION 1..9: note = Table A: HLA-A*02:05H HLA-A*02:06H HLA-A*02:08H HLA-A*02:03H HLA-B*52:01H HLA-B*38:02H HLA-B*13:02H
QQQTTLKGV

SEQ ID NO: 2011 - protein, 9 aa, Severe acute respiratory syndrome coronavirus 2
  REGION 1..9: note = Table A: HLA-A*02:11M HLA-A*68:02M HLA-C*15:05H HLA-A*02:06M HLA-A*02:08M HLA-A*02:01M HLA-A*02:03H HLA-B*38:02H HLA-B*13:02H
TTLKGVEAV

SEQ ID NO: 2012 - protein, 9 aa, Severe acute respiratory syndrome coronavirus 2
  REGION 1..9: note = Table A: HLA-A*11:303H HLA-B*46:01H HLA-B*08:01H HLA-A*30:02H HLA-A*02:02M HLA-A*02:03H HLA-B*38:02H HLA-B*15:01M HLA-B*15:02H
TLKGVEAVM

SEQ ID NO: 2013 - protein, 9 aa, Severe acute respiratory syndrome coronavirus 2
  REGION 1..9: note = Table A: HLA-C*15:02H HLA-C*07:04H
KGVEAVMYM

SEQ ID NO: 2014 - protein, 9 aa, Severe acute respiratory syndrome coronavirus 2
  REGION 1..9: note = Table A: HLA-A*25:01M HLA-A*26:01H HLA-A*26:02H HLA-A*26:03H HLA-A*68:02H HLA-B*35:03H HLA-A*34:01H
EAVMYMGTL

SEQ ID NO: 2015 - protein, 9 aa, Severe acute respiratory syndrome coronavirus 2
  REGION 1..9: note = Table A: HLA-C*14:03H HLA-A*11:303H HLA-A*03:01M HLA-A*36:01H HLA-B*46:01M HLA-A*29:01H HLA-A*29:02H HLA-C*03:02H HLA-A*30:02M HLA-C*15:05H HLA-B*38:02H HLA-B*15:01H HLA-B*15:02H HLA-B*15:03M HLA-B*07:05M
  REGION 1..9: note = CONT. FROM ABOVE: HLA-B*15:11H
VMYMGTLSY

SEQ ID NO: 2016 - protein, 9 aa, Severe acute respiratory syndrome coronavirus 2
  REGION 1..9: note = Table A: HLA-B*35:03H HLA-B*35:01H HLA-B*35:08H HLA-B*38:02H HLA-B*39:01H
MGTLSYEQF

SEQ ID NO: 2017 - protein, 9 aa, Severe acute respiratory syndrome coronavirus 2
  REGION 1..9: note = Table A: HLA-A*11:303H HLA-A*03:01H HLA-A*03:02H HLA-A*11:01H HLA-A*11:02H HLA-A*36:01H HLA-A*30:02H HLA-A*34:02M HLA-C*07:27M
GTLSYEQFK

SEQ ID NO: 2018 - protein, 9 aa, Severe acute respiratory syndrome coronavirus 2
  REGION 1..9: note = Table A: HLA-A*68:02H HLA-B*52:01M HLA-B*38:01H HLA-B*38:02M HLA-B*13:01H HLA-B*13:02M
EQFKKGVQI

SEQ ID NO: 2019 - protein, 9 aa, Severe acute respiratory syndrome coronavirus 2
  REGION 1..9: note = Table A: HLA-A*11:02H
VQIPCTCGK

SEQ ID NO: 2020 - protein, 9 aa, Severe acute respiratory syndrome coronavirus 2
  REGION 1..9: note = Table A: HLA-B*46:01H HLA-B*38:02M HLA-B*15:01H HLA-B*15:02M
YLVQQESPF

SEQ ID NO: 2021 - protein, 9 aa, Severe acute respiratory syndrome coronavirus 2
  REGION 1..9: note = Table A: HLA-A*02:11H HLA-A*68:02H HLA-A*02:04H HLA-A*02:05H HLA-A*02:06H HLA-A*02:07H HLA-A*02:01H HLA-B*38:02H HLA-B*39:01H HLA-B*13:02H
LVQQESPFV

SEQ ID NO: 2022 - protein, 9 aa, Severe acute respiratory syndrome coronavirus 2
  REGION 1..9: note = Table A: HLA-B*48:01H HLA-A*11:303H HLA-C*16:04H HLA-C*12:03H HLA-A*02:04H HLA-C*08:01H HLA-B*38:02M HLA-B*15:01M HLA-B*15:02H HLA-B*15:03H HLA-B*39:01M HLA-B*07:05H HLA-B*13:01H HLA-B*13:02H HLA-C*07:04H
VQQESPFVM

SEQ ID NO: 2023 - protein, 9 aa, Severe acute respiratory syndrome coronavirus 2
  REGION 1..9: note = Table A: HLA-B*38:02H HLA-B*13:01H
QQESPFVMM

SEQ ID NO: 2024 - protein, 9 aa, Severe acute respiratory syndrome coronavirus 2
  REGION 1..9: note = Table A: HLA-B*45:01M
QESPFVMMS

SEQ ID NO: 2025 - protein, 9 aa, Severe acute respiratory syndrome coronavirus 2
  REGION 1..9: note = Table A: HLA-A*11:303H HLA-A*03:02H HLA-A*36:01H HLA-B*46:01H HLA-A*29:01M HLA-A*29:02M HLA-B*18:01H HLA-A*30:02M HLA-B*35:01H HLA-B*38:02M HLA-B*15:01H HLA-B*15:02M HLA-B*39:01H HLA-B*07:05M HLA-B*15:11H
MMSAPPAQY

SEQ ID NO: 2026 - protein, 9 aa, Severe acute respiratory syndrome coronavirus 2
  REGION 1..9: note = Table A: HLA-B*42:01H HLA-B*48:01H HLA-B*58:01H HLA-C*14:03H HLA-A*11:303H HLA-C*16:01H HLA-B*46:01H HLA-C*06:02H HLA-C*04:03M HLA-C*03:03H HLA-C*07:01H HLA-C*07:02H HLA-A*02:11H HLA-B*53:01H HLA-C*03:02H HLA-C*03:04H
  REGION 1..9: note = CONT. FROM ABOVE: HLA-A*68:01H HLA-A*68:02H HLA-B*35:03M HLA- C*15:05M HLA-C*01:02H HLA-C*12:02H HLA-A*02:05M HLA-A*02:06H HLA-A*02:07M HLA-A*02:02H HLA-B*35:01H HLA-B*35:02M HLA-C*17 :01H HLA-C*08:01M HLA-B*35:12M HLA-B*37:01H HLA-B*38:02H
  REGION 1..9: note = CONT. FROM ABOVE: HLA-B*40:02H HLA-B*39:01H HLA-B*07:05H HLA- B*57:03M HLA-C*07:04H
SAPPAQYEL

SEQ ID NO: 2027 - protein, 9 aa, Severe acute respiratory syndrome coronavirus 2
  REGION 1..9: note = Table A: HLA-A*02:11H
AQYELKHGT

SEQ ID NO: 2028 - protein, 9 aa, Severe acute respiratory syndrome coronavirus 2
  REGION 1..9: note = Table A: HLA-A*24:07H
QYELKHGTF

SEQ ID NO: 2029 - protein, 9 aa, Severe acute respiratory syndrome coronavirus 2
  REGION 1..9: note = Table A: HLA-B*49:01H
YELKHGTFT

SEQ ID NO: 2030 - protein, 9 aa, Severe acute respiratory syndrome coronavirus 2
  REGION 1..9: note = Table A: HLA-B*15:01H
GTFTCASEY

SEQ ID NO: 2031 - protein, 9 aa, Severe acute respiratory syndrome coronavirus 2
  REGION 1..9: note = Table A: HLA-B*46:01H HLA-A*30:02H HLA-B*35:01H
CASEYTGNY

SEQ ID NO: 2032 - protein, 9 aa, Severe acute respiratory syndrome coronavirus 2
  REGION 1..9: note = Table A: HLA-B*44:05H HLA-C*16:04H HLA-B*45:01H HLA-B*44:03H HLA-B*18:01H HLA-A*68:02H HLA-A*02:01H HLA-B*39:06H HLA-B*40:01H HLA-B*40:02M HLA-B*40:06H HLA-B*07:05H HLA-B*41:02M HLA-B*49:01H HLA-B*50:01H
SEYTGNYQC

SEQ ID NO: 2033 - protein, 9 aa, Severe acute respiratory syndrome coronavirus 2
  REGION 1..9: note = Table A: HLA-A*33:03H HLA-A*26:03H
EYTGNYQCG

SEQ ID NO: 2034 - protein, 9 aa, Severe acute respiratory syndrome coronavirus 2
  REGION 1..9: note = Table A: HLA-A*30:02H
TGNYQCGHY

SEQ ID NO: 2035 - protein, 9 aa, Severe acute respiratory syndrome coronavirus 2
  REGION 1..9: note = Table A: HLA-A*03:01H HLA-A*11:01H HLA-A*11:02H HLA-B*15:03H
GHYKHITSK

SEQ ID NO: 2036 - protein, 9 aa, Severe acute respiratory syndrome coronavirus 2
  REGION 1..9: note = Table A: HLA-B*48:01H HLA-B*38:01M HLA-B*38:02M HLA-B*15:03H HLA-B*39:01H HLA-B*15:10M
KHITSKETL

SEQ ID NO: 2037 - protein, 9 aa, Severe acute respiratory syndrome coronavirus 2
  REGION 1..9: note = Table A: HLA-A*36:01H HLA-B*38:02M HLA-B*15:01H HLA-B*15:02H
HITSKETLY

SEQ ID NO: 2038 - protein, 9 aa, Severe acute respiratory syndrome coronavirus 2
  REGION 1..9: note = Table A: HLA-A*11:303H HLA-A*03:01M HLA-A*03:02M HLA-A*11:01M HLA-A*11:02M HLA-A*36:01H HLA-A*34:02M HLA-C*07:27H
CIDGALLTK

SEQ ID NO: 2039 - protein, 9 aa, Severe acute respiratory syndrome coronavirus 2
  REGION 1..9: note = Table A: HLA-C*14:03H HLA-A*11:303M HLA-A*03:01H HLA-B*46:01M HLA-A*29:01H HLA-A*29:02H HLA-C*03:02H HLA-A*30:02M HLA-C*07:27H HLA-B*38:02H HLA-B*15:01H HLA-B*15:02H HLA-B*15:03M HLA-B*07:05H
ALLTKSSEY

SEQ ID NO: 2040 - protein, 9 aa, Severe acute respiratory syndrome coronavirus 2
  REGION 1..9: note = Table A: HLA-C*07:02H HLA-B*38:01H HLA-B*38:02M HLA-B*15:03H HLA-B*39:01H
YKGPITDVF

SEQ ID NO: 2041 - protein, 9 aa, Severe acute respiratory syndrome coronavirus 2
  REGION 1..9: note = Table A: HLA-A*36:01H HLA-A*30:02H
KGPITDVFY

SEQ ID NO: 2042 - protein, 9 aa, Severe acute respiratory syndrome coronavirus 2
  REGION 1..9: note = Table A: HLA-B*27:02H HLA-A*34:02H
GPITDVFYK

SEQ ID NO: 2043 - protein, 9 aa, Severe acute respiratory syndrome coronavirus 2
  REGION 1..9: note = Table A: HLA-A*26:01M HLA-A*26:02H HLA-A*26:03H HLA-A*34:01H HLA-B*35:01H HLA-B*35:07H HLA-B*38:02M HLA-B*15:02H
DVFYKENSY

SEQ ID NO: 2044 - protein, 9 aa, Severe acute respiratory syndrome coronavirus 2
  REGION 1..9: note = Table A: HLA-A*33:03H HLA-C*07:02H
FYKENSYTT

SEQ ID NO: 2045 - protein, 9 aa, Severe acute respiratory syndrome coronavirus 2
  REGION 1..9: note = Table A: HLA-B*44:02H HLA-B*44:05M HLA-B*45:01M HLA-B*44:03M HLA-B*52:01H HLA-B*37:01H HLA-B*40:01M HLA-B*40:02M HLA-B*40:06H HLA-B*41:02H HLA-B*13:02H HLA-B*49:01H HLA-B*50:01M
KENSYTTTI

SEQ ID NO: 2046 - protein, 9 aa, Severe acute respiratory syndrome coronavirus 2
  REGION 1..9: note = Table A: HLA-A*34:02M
ENSYTTTIK

SEQ ID NO: 2047 - protein, 9 aa, Severe acute respiratory syndrome coronavirus 2
  REGION 1..9: note = Table A: HLA-C*14:03H
SYTTTIKPV

SEQ ID NO: 2048 - protein, 9 aa, Severe acute respiratory syndrome coronavirus 2
  REGION 1..9: note = Table A: HLA-B*58:01H HLA-C*16:01H HLA-A*68:02H HLA-B*57:03H
YTTTIKPVT

SEQ ID NO: 2049 - protein, 9 aa, Severe acute respiratory syndrome coronavirus 2
  REGION 1..9: note = Table A: HLA-B*58:01H HLA-B*58:02H HLA-C*16:01M HLA-A*36:01H HLA-B*57:01M HLA-A*29:02H HLA-B*18:01H HLA-C*07:01H HLA-A*30:02H HLA-C*15:05H HLA-A*34:02H HLA-B*35:01M HLA-B*38:02H HLA-B*15:01H HLA-B*15:02H HLA-B*39:01H
  REGION 1..9: note = CONT. FROM ABOVE: HLA-B*07:05M HLA-B*57:03M
TTTIKPVTY

SEQ ID NO: 2050 - protein, 9 aa, Severe acute respiratory syndrome coronavirus 2
  REGION 1..9: note = Table A: HLA-A*11:303M HLA-A*74:01H HLA-A*03:01H HLA-A*03:02M HLA-A*11:01H HLA-A*11:02H HLA-A*36:01H HLA-A*33:03H HLA-A*26:03H HLA-A*30:01H HLA-A*68:01M HLA-A*34:01M HLA-A*34:02H HLA-C*07:27M HLA-A*31:01H
  REGION 1..9: note = CONT. FROM ABOVE: HLA-A*66:01H
TTIKPVTYK

SEQ ID NO: 2051 - protein, 9 aa, Severe acute respiratory syndrome coronavirus 2
  REGION 1..9: note = Table A: HLA-B*42:01H HLA-B*08:01H HLA-A*02:11H HLA-A*30:02H HLA-A*02:04H HLA-A*02:05H HLA-A*02:02M HLA-A*02:03H HLA-B*07:04M HLA-B*57:03H
TIKPVTYKL

SEQ ID NO: 2052 - protein, 9 aa, Severe acute respiratory syndrome coronavirus 2
  REGION 1..9: note = Table A: HLA-A*11:303H HLA-A*02:11H HLA-C*03:04H HLA-B*35:03H HLA-A*02:05H HLA-A*02:06M HLA-A*02:01H HLA-A*02:02H HLA-B*35:02M HLA-C*08:01M HLA-B*35:12M HLA-B*38:02M HLA-B*57:03H
VCTEIDPKL

SEQ ID NO: 2053 - protein, 9 aa, Severe acute respiratory syndrome coronavirus 2
  REGION 1..9: note = Table A: HLA-A*36:01M HLA-A*01:01H HLA-B*35:08H HLA-B*39:01H
EIDPKLDNY

SEQ ID NO: 2054 - protein, 9 aa, Severe acute respiratory syndrome coronavirus 2
  REGION 1..9: note = Table A: HLA-A*36:01H
IDPKLDNYY

SEQ ID NO: 2055 - protein, 9 aa, Severe acute respiratory syndrome coronavirus 2
  REGION 1..9: note = Table A: HLA-A*33:01H
DPKLDNYYK

SEQ ID NO: 2056 - protein, 9 aa, Severe acute respiratory syndrome coronavirus 2
  REGION 1..9: note = Table A: HLA-C*14:02H HLA-C*14:03H HLA-B*15:02H
NYYKKDNSY

SEQ ID NO: 2057 - protein, 9 aa, Severe acute respiratory syndrome coronavirus 2
  REGION 1..9: note = Table A: HLA-C*14:02M HLA-C*14:03M HLA-A*33:03H HLA-A*29:02H HLA-A*24:02M HLA-A*24:07H HLA-C*08:01H HLA-A*23:01M
YYKKDNSYF

SEQ ID NO: 2058 - protein, 9 aa, Severe acute respiratory syndrome coronavirus 2
  REGION 1..9: note = Table A: HLA-A*68:02H HLA-C*08:03H
NSYFTEQPI

SEQ ID NO: 2059 - protein, 9 aa, Severe acute respiratory syndrome coronavirus 2
  REGION 1..9: note = Table A: HLA-C*14:02H HLA-C*14:03M HLA-C*04:01H HLA-C*04:03H HLA-A*24:07H HLA-B*39:01H
YFTEQPIDL

SEQ ID NO: 2060 - protein, 9 aa, Severe acute respiratory syndrome coronavirus 2
  REGION 1..9: note = Table A: HLA-A*01:01H HLA-C*04:03M HLA-A*68:02H
FTEQPIDLV

SEQ ID NO: 2061 - protein, 9 aa, Severe acute respiratory syndrome coronavirus 2
  REGION 1..9: note = Table A: HLA-B*45:01M HLA-B*40:06H HLA-B*50:01H
TEQPIDLVP

SEQ ID NO: 2062 - protein, 9 aa, Severe acute respiratory syndrome coronavirus 2
  REGION 1..9: note = Table A: HLA-B*56:01H HLA-B*55:02H HLA-C*15:05H HLA-B*55:01H HLA-B*51:01H HLA-B*54:01H
VPNQPYPNA

SEQ ID NO: 2063 - protein, 9 aa, Severe acute respiratory syndrome coronavirus 2
  REGION 1..9: note = Table A: HLA-C*14:03H HLA-B*38:02H HLA-B*15:01M HLA-B*15:02M HLA-B*15:03H HLA-B*07:05H
NQPYPNASF

SEQ ID NO: 2064 - protein, 9 aa, Severe acute respiratory syndrome coronavirus 2
  REGION 1..9: note = Table A: HLA-B*53:01M HLA-B*35:03M HLA-C*15:05H HLA-B*35:01M HLA-B*35:02H HLA-B*35:08M HLA-B*35:07M HLA-B*35:12M HLA-B*38:01H HLA-B*38:02H HLA-B*07:05H
YPNASFDNF

SEQ ID NO: 2065 - protein, 9 aa, Severe acute respiratory syndrome coronavirus 2
  REGION 1..9: note = Table A: HLA-B*53:01H HLA-B*35:01H HLA-B*35:02H HLA-B*35:08H HLA-B*35:07H
NASFDNFKF

SEQ ID NO: 2066 - protein, 9 aa, Severe acute respiratory syndrome coronavirus 2
  REGION 1..9: note = Table A: HLA-C*06:02H HLA-A*02:11H HLA-A*68:02H HLA-C*12:03H HLA-C*15:02M HLA-A*02:06H HLA-B*40:06H
ASFDNFKFV

SEQ ID NO: 2067 - protein, 9 aa, Severe acute respiratory syndrome coronavirus 2
  REGION 1..9: note = Table A: HLA-A*24:07M
KFVCDNIKF

SEQ ID NO: 2068 - protein, 9 aa, Severe acute respiratory syndrome coronavirus 2
  REGION 1..9: note = Table A: HLA-C*14:02H HLA-C*14:03H HLA-A*02:05H HLA-A*02:08H HLA-A*02:02H HLA-A*24:02H HLA-A*24:07H HLA-C*08:01H HLA-A*23:01H HLA-B*38:02H
KFADDLNQL

SEQ ID NO: 2069 - protein, 9 aa, Severe acute respiratory syndrome coronavirus 2
  REGION 1..9: note = Table A: HLA-B*18:01H HLA-B*38:02H HLA-B*07:05H
DDLNQLTGY

SEQ ID NO: 2070 - protein, 9 aa, Severe acute respiratory syndrome coronavirus 2
  REGION 1..9: note = Table A: HLA-A*34:01H HLA-A*34:02M HLA-A*66:01H
DLNQLTGYK

SEQ ID NO: 2071 - protein, 9 aa, Severe acute respiratory syndrome coronavirus 2
  REGION 1..9: note = Table A: HLA-A*74:01M HLA-A*03:01H HLA-A*33:01H HLA-A*33:03M HLA-B*08:01H HLA-A*68:01H HLA-A*34:01H HLA-A*34:02H HLA-A*31:01H HLA-A*66:01H
TGYKKPASR

SEQ ID NO: 2072 - protein, 9 aa, Severe acute respiratory syndrome coronavirus 2
  REGION 1..9: note = Table A: HLA-B*07:04M HLA-B*15:03M
YKKPASREL

SEQ ID NO: 2073 - protein, 9 aa, Severe acute respiratory syndrome coronavirus 2
  REGION 1..9: note = Table A: HLA-C*15:05H HLA-B*07:02H HLA-B*07:04M
KPASRELKV

SEQ ID NO: 2074 - protein, 9 aa, Severe acute respiratory syndrome coronavirus 2
  REGION 1..9: note = Table A: HLA-B*58:02H HLA-B*57:01H HLA-B*57:03H
ASRELKVTF

SEQ ID NO: 2075 - protein, 9 aa, Severe acute respiratory syndrome coronavirus 2
  REGION 1..9: note = Table A: HLA-B*40:06H
RELKVTFFP

SEQ ID NO: 2076 - protein, 9 aa, Severe acute respiratory syndrome coronavirus 2
  REGION 1..9: note = Table A: HLA-B*55:02H HLA-B*35:03M HLA-C*15:05M HLA-B*35:01H HLA-B*35:02H HLA-B*35:08M HLA-B*51:01H HLA-B*35:07H HLA-C*08:01H HLA-B*35:12H HLA-B*38:02M HLA-B*54:01H HLA-B*39:01M HLA-B*07:05H
FPDLNGDVV

SEQ ID NO: 2077 - protein, 9 aa, Severe acute respiratory syndrome coronavirus 2
  REGION 1..9: note = Table A: HLA-B*38:02H
DLNGDVVAI

SEQ ID NO: 2078 - protein, 9 aa, Severe acute respiratory syndrome coronavirus 2
  REGION 1..9: note = Table A: HLA-A*01:01H HLA-B*35:01H HLA-B*39:01H
NGDVVAIDY

SEQ ID NO: 2079 - protein, 9 aa, Severe acute respiratory syndrome coronavirus 2
  REGION 1..9: note = Table A: HLA-B*27:02H
GDVVAIDYK

SEQ ID NO: 2080 - protein, 9 aa, Severe acute respiratory syndrome coronavirus 2
  REGION 1..9: note = Table A: HLA-A*30:02H
VVAIDYKHY

SEQ ID NO: 2081 - protein, 9 aa, Severe acute respiratory syndrome coronavirus 2
  REGION 1..9: note = Table A: HLA-A*33:01H HLA-A*33:03H HLA-A*26:01H HLA-B*08:01H HLA-C*07:01H HLA-A*24:02M HLA-A*24:07M HLA-A*23:01M
DYKHYTPSF

SEQ ID NO: 2082 - protein, 9 aa, Severe acute respiratory syndrome coronavirus 2
  REGION 1..9: note = Table A: HLA-B*58:01M HLA-B*58:02M HLA-A*74:01H HLA-B*57:01H HLA-A*24:07M HLA-A*23:01H HLA-A*32:01H HLA-B*57:03H HLA-B*13:01M
KLLHKPIVW

SEQ ID NO: 2083 - protein, 9 aa, Severe acute respiratory syndrome coronavirus 2
  REGION 1..9: note = Table A: HLA-A*02:11H HLA-A*30:01H HLA-A*02:02H HLA-B*38:02M
LHKPIVWHV

SEQ ID NO: 2084 - protein, 9 aa, Severe acute respiratory syndrome coronavirus 2
  REGION 1..9: note = Table A: HLA-A*02:05H
PIVWHVNNA

SEQ ID NO: 2085 - protein, 9 aa, Severe acute respiratory syndrome coronavirus 2
  REGION 1..9: note = Table A: HLA-A*02:11H
IVWHVNNAT

SEQ ID NO: 2086 - protein, 9 aa, Severe acute respiratory syndrome coronavirus 2
  REGION 1..9: note = Table A: HLA-A*02:08H HLA-B*38:02H
HVNNATNKA

SEQ ID NO: 2087 - protein, 9 aa, Severe acute respiratory syndrome coronavirus 2
  REGION 1..9: note = Table A: HLA-B*35:01H HLA-B*38:02H HLA-B*15:02H HLA-B*07:05H
NNATNKATY

SEQ ID NO: 2088 - protein, 9 aa, Severe acute respiratory syndrome coronavirus 2
  REGION 1..9: note = Table A: HLA-A*34:02M
NATNKATYK

SEQ ID NO: 2089 - protein, 9 aa, Severe acute respiratory syndrome coronavirus 2
  REGION 1..9: note = Table A: HLA-B*58:01H HLA-B*58:02M HLA-C*16:01H HLA-B*57:01M HLA-B*53:01H HLA-A*32:01H HLA-B*57:03H
KATYKPNTW

SEQ ID NO: 2090 - protein, 9 aa, Severe acute respiratory syndrome coronavirus 2
  REGION 1..9: note = Table A: HLA-A*24:02M HLA-A*24:07H HLA-A*23:01M
TYKPNTWCI

SEQ ID NO: 2091 - protein, 9 aa, Severe acute respiratory syndrome coronavirus 2
  REGION 1..9: note = Table A: HLA-B*42:01H HLA-B*58:01H HLA-B*44:05H HLA-B*56:01H HLA-B*27:02H HLA-B*53:01M HLA-B*55:02H HLA-B*35:03M HLA-C*15:05H HLA-B*35:01H HLA-B*35:02H HLA-B*35:08H HLA-B*35:07M HLA-C*08:01H HLA-B*15:13H HLA-B*35:12H
  REGION 1..9: note = CONT. FROM ABOVE: HLA-B*38:01H HLA-B*38:02M HLA-B*07:02M HLA- B*07:04H HLA-B*15:01H HLA-B*15:02M HLA-B*15:03H HLA-B*07:05H HLA-B*57:03H HLA-B*15:11H
KPVETSNSF

SEQ ID NO: 2092 - protein, 9 aa, Severe acute respiratory syndrome coronavirus 2
  REGION 1..9: note = Table A: HLA-A*68:02M HLA-B*39:01H
ETSNSFDVL

SEQ ID NO: 2093 - protein, 9 aa, Severe acute respiratory syndrome coronavirus 2
  REGION 1..9: note = Table A: HLA-A*11:303H HLA-A*03:02H HLA-A*11:01M HLA-A*11:02M HLA-A*36:01H HLA-A*30:02H HLA-A*68:01H HLA-A*34:02M HLA-C*07:27H
TSNSFDVLK

SEQ ID NO: 2094 - protein, 9 aa, Severe acute respiratory syndrome coronavirus 2
  REGION 1..9: note = Table A: HLA-B*35:02H
DAQGMDNLA

SEQ ID NO: 2095 - protein, 9 aa, Severe acute respiratory syndrome coronavirus 2
  REGION 1..9: note = Table A: HLA-B*08:01H HLA-A*02:11H HLA-A*68:02M HLA-A*02:05H HLA-B*14:01H HLA-A*02:02M HLA-A*02:03H HLA-B*38:02H HLA-B*15:02H HLA-B*13:02H
DLKPVSEEV

SEQ ID NO: 2096 - protein, 9 aa, Severe acute respiratory syndrome coronavirus 2
  REGION 1..9: note = Table A: HLA-B*44:02H HLA-B*44:05H HLA-B*45:01M HLA-B*44:03M HLA-B*38:01H HLA-B*38:02H HLA-B*40:01H HLA-B*40:02M HLA-B*41:02H HLA-B*49:01H
EEVVENPTI

SEQ ID NO: 2097 - protein, 9 aa, Severe acute respiratory syndrome coronavirus 2
  REGION 1..9: note = Table A: HLA-A*11:303M HLA-A*03:01M HLA-A*03:02H HLA-A*11:01H HLA-A*11:02H HLA-A*36:01H HLA-A*30:02H HLA-A*68:01M HLA-A*34:01H HLA-A*34:02H HLA-C*07:27M HLA-A*66:01H
VVENPTIQK

SEQ ID NO: 2098 - protein, 9 aa, Severe acute respiratory syndrome coronavirus 2
  REGION 1..9: note = Table A: HLA-B*35:03M HLA-C*15:05H HLA-B*35:01H HLA-B*35:02M HLA-B*35:12H HLA-B*07:02H HLA-B*07:05H
NPTIQKDVL

SEQ ID NO: 2099 - protein, 9 aa, Severe acute respiratory syndrome coronavirus 2
  REGION 1..9: note = Table A: HLA-B*58:01H HLA-B*58:02H HLA-A*02:08H HLA-B*57:03M
KTTEVVGDI

SEQ ID NO: 2100 - protein, 9 aa, Severe acute respiratory syndrome coronavirus 2
  REGION 1..9: note = Table A: HLA-B*44:05H HLA-B*35:03H HLA-B*40:01H HLA-B*40:02M HLA-B*41:02M HLA-B*49:01H
TEVVGDIIL

SEQ ID NO: 2101 - protein, 9 aa, Severe acute respiratory syndrome coronavirus 2
  REGION 1..9: note = Table A: HLA-A*11:01H HLA-A*11:02H HLA-A*33:03H HLA-A*26:03M HLA-A*68:01H HLA-A*68:02M HLA-A*34:01H HLA-A*34:02H HLA-A*66:01M
EVVGDIILK

SEQ ID NO: 2102 - protein, 9 aa, Severe acute respiratory syndrome coronavirus 2
  REGION 1..9: note = Table A: HLA-A*11:01H HLA-A*34:02H
VVGDIILKP

SEQ ID NO: 2103 - protein, 9 aa, Severe acute respiratory syndrome coronavirus 2
  REGION 1..9: note = Table A: HLA-A*11:303H HLA-B*46:01H HLA-B*08:01M HLA-C*01:02H HLA-A*02:05H HLA-B*14:01H HLA-A*02:02H HLA-A*02:03M HLA-B*38:02M HLA-B*07:02H HLA-B*07:04M HLA-B*15:01M HLA-B*15:02M HLA-B*41:02H
ILKPANNSL

SEQ ID NO: 2104 - protein, 9 aa, Severe acute respiratory syndrome coronavirus 2
  REGION 1..9: note = Table A: HLA-B*53:01H HLA-C*15:05M HLA-B*51:01H HLA-B*07:02H HLA-B*07:04H HLA-B*07:05H
KPANNSLKI

SEQ ID NO: 2105 - protein, 9 aa, Severe acute respiratory syndrome coronavirus 2
  REGION 1..9: note = Table A: HLA-A*02:11H HLA-A*68:02H HLA-C*15:05H HLA-A*02:06H
NSLKITEEV

SEQ ID NO: 2106 - protein, 9 aa, Severe acute respiratory syndrome coronavirus 2
  REGION 1..9: note = Table A: HLA-B*44:05H HLA-B*40:01H HLA-B*40:02H HLA-B*39:01H HLA-B*41:02M
TEEVGHTDL

SEQ ID NO: 2107 - protein, 9 aa, Severe acute respiratory syndrome coronavirus 2
  REGION 1..9: note = Table A: HLA-B*44:02H HLA-B*44:05M HLA-B*44:03M HLA-B*18:01H HLA-A*68:02H HLA-B*40:01H HLA-B*40:02H HLA-B*39:01H HLA-B*49:01H
EEVGHTDLM

SEQ ID NO: 2108 - protein, 9 aa, Severe acute respiratory syndrome coronavirus 2
  REGION 1..9: note = Table A: HLA-B*27:02H HLA-A*30:02H HLA-B*38:02H HLA-B*15:03H HLA-B*39:01H
GHTDLMAAY

SEQ ID NO: 2109 - protein, 9 aa, Severe acute respiratory syndrome coronavirus 2
  REGION 1..9: note = Table A: HLA-A*36:01H HLA-C*04:01H HLA-C*04:03M HLA-A*68:02H
HTDLMAAYV

SEQ ID NO: 2110 - protein, 9 aa, Severe acute respiratory syndrome coronavirus 2
  REGION 1..9: note = Table A: HLA-B*48:01M HLA-C*14:02H HLA-C*14:03H HLA-A*11:303H HLA-C*16:01H HLA-C*16:04H HLA-B*46:01M HLA-C*03:03H HLA-C*12:05H HLA-C*03:02M HLA-C*03:04H HLA-B*35:03M HLA-C*15:05H HLA-C*01:02M HLA-C*12:02M
  REGION 1..9: note = CONT. FROM ABOVE: HLA-C*12:03H HLA-A*02:05H HLA-A*02:08H HLA- B*14:01H HLA-C*07:27M HLA-B*35:01H HLA-B*35:02H HLA-C*17:01M HLA-C*08:01H HLA-C*08:02M HLA-C*08:03H HLA-B*35:12H HLA-B*38 :02M HLA-B*40:01H HLA-B*40:02H HLA-B*07:02M HLA-B*15:01H
  REGION 1..9: note = CONT. FROM ABOVE: HLA-B*15:02H HLA-B*15:03H HLA-B*39:01H HLA- B*07:05H HLA-B*41:02H HLA-B*57:03H HLA-B*15:10H
AAYVDNSSL

SEQ ID NO: 2111 - protein, 9 aa, Severe acute respiratory syndrome coronavirus 2
  REGION 1..9: note = Table A: HLA-A*11:303H HLA-A*01:01H HLA-C*04:03H HLA-C*03:03H HLA-B*53:01H HLA-C*03:04H HLA-A*68:02H HLA-B*35:03H HLA-C*15:05M HLA-C*15:02H HLA-A*02:06M HLA-A*02:07H HLA-A*02:01H HLA-B*35:02H HLA-B*51:01H
  REGION 1..9: note = CONT. FROM ABOVE: HLA-C*08:01M HLA-C*08:02M HLA-B*38:01M HLA- B*38:02H HLA-B*39:01H HLA-C*05:01H HLA-B*13:01M HLA-B*13:02H HLA-B*49:01H
YVDNSSLTI

SEQ ID NO: 2112 - protein, 9 aa, Severe acute respiratory syndrome coronavirus 2
  REGION 1..9: note = Table A: HLA-A*11:01H HLA-A*34:02H
VDNSSLTIK

SEQ ID NO: 2113 - protein, 9 aa, Severe acute respiratory syndrome coronavirus 2
  REGION 1..9: note = Table A: HLA-A*33:01H HLA-A*68:01H HLA-A*34:02M
DNSSLTIKK

SEQ ID NO: 2114 - protein, 9 aa, Severe acute respiratory syndrome coronavirus 2
  REGION 1..9: note = Table A: HLA-B*58:02H HLA-C*03:03H HLA-C*03:04H HLA-C*15:05H HLA-C*15:02H HLA-A*02:05H HLA-A*02:08H HLA-A*02:02H HLA-C*17:01H HLA-B*57:03M
LTIKKPNEL

SEQ ID NO: 2115 - protein, 9 aa, Severe acute respiratory syndrome coronavirus 2
  REGION 1..9: note = Table A: HLA-B*42:01M HLA-B*58:02H HLA-B*56:01H HLA-B*08:01H HLA-C*07:01H HLA-B*53:01H HLA-B*55:02H HLA-B*35:03H HLA-C*15:05M HLA-B*55:01M HLA-B*07:02H HLA-B*07:04H HLA-B*07:05M
KPNELSRVL

SEQ ID NO: 2116 - protein, 9 aa, Severe acute respiratory syndrome coronavirus 2
  REGION 1..9: note = Table A: HLA-B*44:05H HLA-B*44:03H HLA-B*14:02H HLA-B*14:01H HLA-B*37:01M HLA-B*40:02H HLA-B*41:02H HLA-C*07:04H
NELSRVLGL

SEQ ID NO: 2117 - protein, 9 aa, Severe acute respiratory syndrome coronavirus 2
  REGION 1..9: note = Table A: HLA-A*34:01H HLA-A*34:02M
ELSRVLGLK

SEQ ID NO: 2118 - protein, 9 aa, Severe acute respiratory syndrome coronavirus 2
  REGION 1..9: note = Table A: HLA-C*06:02H HLA-B*27:05H HLA-B*14:02H HLA-B*14:01H
SRVLGLKTL

SEQ ID NO: 2119 - protein, 9 aa, Severe acute respiratory syndrome coronavirus 2
  REGION 1..9: note = Table A: HLA-B*08:01H
VLGLKTLAT

SEQ ID NO: 2120 - protein, 9 aa, Severe acute respiratory syndrome coronavirus 2
  REGION 1..9: note = Table A: HLA-C*15:05H HLA-A*02:02H HLA-A*02:03M HLA-B*38:02M HLA-B*39:06H HLA-B*15:02M HLA-B*13:02H
TLATHGLAA

SEQ ID NO: 2121 - protein, 9 aa, Severe acute respiratory syndrome coronavirus 2
  REGION 1..9: note = Table A: HLA-A*11:303H HLA-C*03:02H HLA-A*68:02H HLA-A*02:06H
LATHGLAAV

SEQ ID NO: 2122 - protein, 9 aa, Severe acute respiratory syndrome coronavirus 2
  REGION 1..9: note = Table A: HLA-C*15:05H HLA-A*02:06H HLA-B*14:01H HLA-B*51:01M HLA-B*52:01M HLA-B*38:02H HLA-B*39:06H HLA-B*54:01H HLA-B*13:02H
HGLAAVNSV

SEQ ID NO: 2123 - protein, 9 aa, Severe acute respiratory syndrome coronavirus 2
  REGION 1..9: note = Table A: HLA-B*58:01H HLA-B*53:01H
LAAVNSVPW

SEQ ID NO: 2124 - protein, 9 aa, Severe acute respiratory syndrome coronavirus 2
  REGION 1..9: note = Table A: HLA-B*56:01H HLA-A*29:01M HLA-A*29:02M HLA-B*18:01H HLA-B*53:01M HLA-B*55:02H HLA-A*30:02M HLA-B*35:03H HLA-C*15:05H HLA-A*34:02H HLA-B*35:01H HLA-B*35:08M HLA-B*51:01H HLA-B*35:07H HLA-B*38:02M HLA-B*54:01H
  REGION 1..9: note = CONT. FROM ABOVE: HLA-B*15:02M HLA-B*15:03H HLA-B*39:01H HLA- B*07:05M HLA-B*15:11M
VPWDTIANY

SEQ ID NO: 2125 - protein, 9 aa, Severe acute respiratory syndrome coronavirus 2
  REGION 1..9: note = Table A: HLA-A*26:01H HLA-A*26:03M HLA-A*68:01H HLA-A*68:02H HLA-A*66:01M
DTIANYAKP

SEQ ID NO: 2126 - protein, 9 aa, Severe acute respiratory syndrome coronavirus 2
  REGION 1..9: note = Table A: HLA-B*58:02H HLA-C*16:01M HLA-C*03:03H HLA-C*03:04H HLA-C*15:02H HLA-C*08:01H HLA-B*07:04H HLA-B*57:03H
IANYAKPFL

SEQ ID NO: 2127 - protein, 9 aa, Severe acute respiratory syndrome coronavirus 2
  REGION 1..9: note = Table A: HLA-A*03:01H HLA-A*11:01H HLA-A*11:02H HLA-A*36:01H HLA-A*33:01M HLA-A*33:03M HLA-A*34:02M HLA-A*23:01H HLA-A*31:01H
NYAKPFLNK

SEQ ID NO: 2128 - protein, 9 aa, Severe acute respiratory syndrome coronavirus 2
  REGION 1..9: note = Table A: HLA-C*16:01H HLA-B*46:01H HLA-C*06:02H HLA-B*08:01H HLA-C*12:05H HLA-A*02:11H HLA-C*03:02H HLA-A*68:02H HLA-B*55:01H HLA-C*12:02H HLA-C*12:03M HLA-C*15:02H HLA-A*02:04H HLA-A*02:05M HLA-A*02:06H HLA-A*02:02M
  REGION 1..9: note = CONT. FROM ABOVE: HLA-A*02:03M HLA-B*51:01M HLA-B*52:01H HLA- B*38:02H HLA-B*54:01H HLA-B*07:04H HLA-C*02:02M
YAKPFLNKV

SEQ ID NO: 2129 - protein, 9 aa, Severe acute respiratory syndrome coronavirus 2
  REGION 1..9: note = Table A: HLA-B*56:01M HLA-B*55:02M HLA-B*55:01H HLA-B*54:01H
KPFLNKVVS

SEQ ID NO: 2130 - protein, 9 aa, Severe acute respiratory syndrome coronavirus 2
  REGION 1..9: note = Table A: HLA-A*02:11M HLA-A*02:02M HLA-A*02:03M HLA-B*38:02H
FLNKVVSTT

SEQ ID NO: 2131 - protein, 9 aa, Severe acute respiratory syndrome coronavirus 2
  REGION 1..9: note = Table A: HLA-B*58:01H HLA-B*58:02H HLA-A*02:11H HLA-C*15:05H HLA-A*02:05M HLA-A*02:06H HLA-A*02:08H HLA-A*02:03H HLA-B*38:02H HLA-B*57:03M HLA-B*13:02M
KVVSTTTNI

SEQ ID NO: 2132 - protein, 9 aa, Severe acute respiratory syndrome coronavirus 2
  REGION 1..9: note = Table A: HLA-A*02:05H HLA-A*02:08H HLA-A*02:03H HLA-B*38:02H
VVSTTTNIV

SEQ ID NO: 2133 - protein, 9 aa, Severe acute respiratory syndrome coronavirus 2
  REGION 1..9: note = Table A: HLA-A*11:303H HLA-A*74:01H HLA-A*03:01M HLA-A*03:02M HLA-A*11:01H HLA-A*11:02H HLA-A*36:01H HLA-B*57:01H HLA-A*33:01H HLA-A*33:03H HLA-A*26:03M HLA-A*30:02H HLA-A*68:01H HLA-A*68:02M HLA-A*34:01M
  REGION 1..9: note = CONT. FROM ABOVE: HLA-A*34:02H HLA-C*07:27H HLA-A*31:01H HLA- A*66:01H
STTTNIVTR

SEQ ID NO: 2134 - protein, 9 aa, Severe acute respiratory syndrome coronavirus 2
  REGION 1..9: note = Table A: HLA-A*68:01H HLA-A*68:02H HLA-A*02:05H HLA-A*02:06H HLA-A*02:08M HLA-A*34:02H
TTTNIVTRC

SEQ ID NO: 2135 - protein, 9 aa, Severe acute respiratory syndrome coronavirus 2
  REGION 1..9: note = Table A: HLA-B*58:02H HLA-C*15:05H HLA-C*15:02H
TTNIVTRCL

SEQ ID NO: 2136 - protein, 9 aa, Severe acute respiratory syndrome coronavirus 2
  REGION 1..9: note = Table A: HLA-C*14:02H HLA-C*14:03M HLA-A*29:02H HLA-C*07:01H HLA-C*07:02M HLA-A*02:04M HLA-A*24:02H HLA-A*24:07H HLA-C*08:01M HLA-A*23:01H HLA-B*40:06M HLA-C*07:04H
NYMPYFFTL

SEQ ID NO: 2137 - protein, 9 aa, Severe acute respiratory syndrome coronavirus 2
  REGION 1..9: note = Table A: HLA-C*04:03H HLA-A*02:07H HLA-A*02:02H HLA-A*24:07H HLA-C*08:01H
YMPYFFTLL

SEQ ID NO: 2138 - protein, 9 aa, Severe acute respiratory syndrome coronavirus 2
  REGION 1..9: note = Table A: HLA-B*53:01H HLA-B*35:03H HLA-C*15:05H HLA-A*34:02H HLA-B*51:01M HLA-B*35:07H HLA-B*38:02H HLA-B*54:01H
MPYFFTLLL

SEQ ID NO: 2139 - protein, 9 aa, Severe acute respiratory syndrome coronavirus 2
  REGION 1..9: note = Table A: HLA-C*14:03H
YFFTLLLQL

SEQ ID NO: 2140 - protein, 9 aa, Severe acute respiratory syndrome coronavirus 2
  REGION 1..9: note = Table A: HLA-B*38:02H HLA-B*15:02H
TLLLQLCTF

SEQ ID NO: 2141 - protein, 9 aa, Severe acute respiratory syndrome coronavirus 2
  REGION 1..9: note = Table A: HLA-A*74:01H
LLQLCTFTR

SEQ ID NO: 2142 - protein, 9 aa, Severe acute respiratory syndrome coronavirus 2
  REGION 1..9: note = Table A: HLA-A*33:03H
TFTRSTNSR

SEQ ID NO: 2143 - protein, 9 aa, Severe acute respiratory syndrome coronavirus 2
  REGION 1..9: note = Table A: HLA-B*07:05H
TNSRIKASM

SEQ ID NO: 2144 - protein, 9 aa, Severe acute respiratory syndrome coronavirus 2
  REGION 1..9: note = Table A: HLA-B*07:04H
RIKASMPTT

SEQ ID NO: 2145 - protein, 9 aa, Severe acute respiratory syndrome coronavirus 2
  REGION 1..9: note = Table A: HLA-B*38:02H HLA-B*15:03H
IKASMPTTI

SEQ ID NO: 2146 - protein, 9 aa, Severe acute respiratory syndrome coronavirus 2
  REGION 1..9: note = Table A: HLA-B*56:01H HLA-B*55:02H HLA-B*55:01H
KASMPTTIA

SEQ ID NO: 2147 - protein, 9 aa, Severe acute respiratory syndrome coronavirus 2
  REGION 1..9: note = Table A: HLA-A*11:303H HLA-A*74:01H HLA-A*03:01H HLA-A*03:02H HLA-A*11:01H HLA-A*11:02H HLA-A*36:01H HLA-B*46:01H HLA-B*27:05H HLA-A*30:01M HLA-A*30:02M HLA-A*68:01M HLA-C*15:05H HLA-A*34:01H HLA-A*34:02H
  REGION 1..9: note = CONT. FROM ABOVE: HLA-C*07:27H HLA-B*37:01H HLA-A*31:01H HLA- B*57:03H HLA-A*66:01M
ASMPTTIAK

SEQ ID NO: 2148 - protein, 9 aa, Severe acute respiratory syndrome coronavirus 2
  REGION 1..9: note = Table A: HLA-B*54:01H
MPTTIAKNT

SEQ ID NO: 2149 - protein, 9 aa, Severe acute respiratory syndrome coronavirus 2
  REGION 1..9: note = Table A: HLA-A*11:303H HLA-A*03:01H HLA-A*03:02H HLA-A*11:01M HLA-A*11:02M HLA-A*33:03H HLA-A*26:03H HLA-A*68:01H HLA-A*34:01H HLA-A*34:02H HLA-C*07:27H HLA-A*66:01M
TTIAKNTVK

SEQ ID NO: 2150 - protein, 9 aa, Severe acute respiratory syndrome coronavirus 2
  REGION 1..9: note = Table A: HLA-C*16:01H HLA-B*08:01H HLA-C*12:05H HLA-C*12:03H HLA-A*02:03M HLA-B*51:01H HLA-B*38:02H HLA-B*07:04M HLA-C*02:02H
IAKNTVKSV

SEQ ID NO: 2151 - protein, 9 aa, Severe acute respiratory syndrome coronavirus 2
  REGION 1..9: note = Table A: HLA-B*58:01H HLA-A*25:01M HLA-A*26:01M HLA-A*26:02H HLA-A*26:03H HLA-A*68:01H HLA-A*34:01H HLA-A*34:02M HLA-B*57:03H HLA-A*66:01M
NTVKSVGKF

SEQ ID NO: 2152 - protein, 9 aa, Severe acute respiratory syndrome coronavirus 2
  REGION 1..9: note = Table A: HLA-B*07:04H
TVKSVGKFC

SEQ ID NO: 2153 - protein, 9 aa, Severe acute respiratory syndrome coronavirus 2
  REGION 1..9: note = Table A: HLA-B*15:03M
GKFCLEASF

SEQ ID NO: 2154 - protein, 9 aa, Severe acute respiratory syndrome coronavirus 2
  REGION 1..9: note = Table A: HLA-A*29:02H
FCLEASFNY

SEQ ID NO: 2155 - protein, 9 aa, Severe acute respiratory syndrome coronavirus 2
  REGION 1..9: note = Table A: HLA-C*03:02H HLA-C*03:04H HLA-C*15:02H HLA-B*38:02H
FNYLKSPNF

SEQ ID NO: 2156 - protein, 9 aa, Severe acute respiratory syndrome coronavirus 2
  REGION 1..9: note = Table A: HLA-A*74:01H HLA-A*34:02H HLA-A*66:01H
YLKSPNFSK

SEQ ID NO: 2157 - protein, 9 aa, Severe acute respiratory syndrome coronavirus 2
  REGION 1..9: note = Table A: HLA-B*15:03H
LKSPNFSKL

SEQ ID NO: 2158 - protein, 9 aa, Severe acute respiratory syndrome coronavirus 2
  REGION 1..9: note = Table A: HLA-B*58:02M HLA-B*57:03M
KSPNFSKLI

SEQ ID NO: 2159 - protein, 9 aa, Severe acute respiratory syndrome coronavirus 2
  REGION 1..9: note = Table A: HLA-B*57:03H
KLINIIIWF

SEQ ID NO: 2160 - protein, 9 aa, Severe acute respiratory syndrome coronavirus 2
  REGION 1..9: note = Table A: HLA-A*02:04M
LINIIIWFL

SEQ ID NO: 2161 - protein, 9 aa, Severe acute respiratory syndrome coronavirus 2
  REGION 1..9: note = Table A: HLA-C*15:02H HLA-A*02:04H
NIIIWFLLL

SEQ ID NO: 2162 - protein, 9 aa, Severe acute respiratory syndrome coronavirus 2
  REGION 1..9: note = Table A: HLA-A*02:11H
IIWFLLLSV

SEQ ID NO: 2163 - protein, 9 aa, Severe acute respiratory syndrome coronavirus 2
  REGION 1..9: note = Table A: HLA-B*15:02H
SVCLGSLIY

SEQ ID NO: 2164 - protein, 9 aa, Severe acute respiratory syndrome coronavirus 2
  REGION 1..9: note = Table A: HLA-B*56:01H HLA-B*55:02H HLA-B*54:01H
LGSLIYSTA

SEQ ID NO: 2165 - protein, 9 aa, Severe acute respiratory syndrome coronavirus 2
  REGION 1..9: note = Table A: HLA-B*39:06M HLA-B*50:01H
GSLIYSTAA

SEQ ID NO: 2166 - protein, 9 aa, Severe acute respiratory syndrome coronavirus 2
  REGION 1..9: note = Table A: HLA-C*14:03H HLA-A*11:303M HLA-B*46:01M HLA-A*26:03M HLA-C*03:03H HLA-A*02:11H HLA-C*03:04H HLA-C*15:05H HLA-C*01:02M HLA-A*02:04M HLA-A*02:05H HLA-B*14:01H HLA-A*02:01H HLA-A*02:02M HLA-A*02:03M
  REGION 1..9: note = CONT. FROM ABOVE: HLA-A*34:01H HLA-C*08:01H HLA-B*38:02M HLA- B*15:01H HLA-B*15:02M HLA-B*07:05H HLA-B*15:10H
SLIYSTAAL

SEQ ID NO: 2167 - protein, 9 aa, Severe acute respiratory syndrome coronavirus 2
  REGION 1..9: note = Table A: HLA-C*14:03H
IYSTAALGV

SEQ ID NO: 2168 - protein, 9 aa, Severe acute respiratory syndrome coronavirus 2
  REGION 1..9: note = Table A: HLA-A*68:02H HLA-C*15:05H HLA-B*57:03H
STAALGVLM

SEQ ID NO: 2169 - protein, 9 aa, Severe acute respiratory syndrome coronavirus 2
  REGION 1..9: note = Table A: HLA-A*02:02M HLA-A*02:03H
ALGVLMSNL

SEQ ID NO: 2170 - protein, 9 aa, Severe acute respiratory syndrome coronavirus 2
  REGION 1..9: note = Table A: HLA-B*58:01H HLA-A*36:01H HLA-B*46:01H HLA-A*01:01H HLA-A*30:02M HLA-B*35:01H HLA-B*15:01H
MSNLGMPSY

SEQ ID NO: 2171 - protein, 9 aa, Severe acute respiratory syndrome coronavirus 2
  REGION 1..9: note = Table A: HLA-B*15:01H
GMPSYCTGY

SEQ ID NO: 2172 - protein, 9 aa, Severe acute respiratory syndrome coronavirus 2
  REGION 1..9: note = Table A: HLA-A*34:01M HLA-A*34:02H HLA-A*66:01H
MPSYCTGYR

SEQ ID NO: 2173 - protein, 9 aa, Severe acute respiratory syndrome coronavirus 2
  REGION 1..9: note = Table A: HLA-A*68:02H HLA-C*15:05H HLA-B*51:01M HLA-B*52:01H HLA-B*39:01H
EGYLNSTNV

SEQ ID NO: 2174 - protein, 9 aa, Severe acute respiratory syndrome coronavirus 2
  REGION 1..9: note = Table A: HLA-A*02:11H HLA-C*15:05H HLA-A*02:04M HLA-B*14:01H HLA-A*02:01M HLA-A*02:02M HLA-A*02:03M HLA-B*38:01H HLA-B*38:02H HLA-B*13:02M
YLNSTNVTI

SEQ ID NO: 2175 - protein, 9 aa, Severe acute respiratory syndrome coronavirus 2
  REGION 1..9: note = Table A: HLA-A*68:02H
NSTNVTIAT

SEQ ID NO: 2176 - protein, 9 aa, Severe acute respiratory syndrome coronavirus 2
  REGION 1..9: note = Table A: HLA-B*58:01H HLA-B*58:02H HLA-C*14:03H HLA-A*11:303H HLA-B*44:02H HLA-C*16:01H HLA-C*16:04H HLA-A*03:01H HLA-A*03:02H HLA-A*11:01M HLA-A*11:02H HLA-A*36:01H HLA-B*57:01M HLA-A*25:01M HLA-B*46:01M
  REGION 1..9: note = CONT. FROM ABOVE: HLA-A*26:01M HLA-A*26:02M HLA-A*26:03H HLA- A*29:01M HLA-A*29:02M HLA-B*44:03H HLA-B*18:01H HLA-C*07:01H HLA-C*03:02H HLA-A*30:02H HLA-A*68:01H HLA-C*15:05M HLA-C*12 :02H HLA-A*02:03H HLA-A*34:02M HLA-C*07:27H HLA-B*35:01H
  REGION 1..9: note = CONT. FROM ABOVE: HLA-B*35:08H HLA-B*35:07H HLA-B*38:02M HLA- A*32:01H HLA-B*15:01H HLA-B*15:02M HLA-B*15:03H HLA-B*39:01H HLA-A*31:01H HLA-B*07:05H HLA-B*57:03H HLA-C*02:02H HLA-B*15 :11H
STNVTIATY

SEQ ID NO: 2177 - protein, 9 aa, Severe acute respiratory syndrome coronavirus 2
  REGION 1..9: note = Table A: HLA-A*68:02H
TNVTIATYC

SEQ ID NO: 2178 - protein, 9 aa, Severe acute respiratory syndrome coronavirus 2
  REGION 1..9: note = Table A: HLA-A*68:02H HLA-C*15:05H HLA-A*02:03H
CTGSIPCSV

SEQ ID NO: 2179 - protein, 9 aa, Severe acute respiratory syndrome coronavirus 2
  REGION 1..9: note = Table A: HLA-C*15:05H
GSIPCSVCL

SEQ ID NO: 2180 - protein, 9 aa, Severe acute respiratory syndrome coronavirus 2
  REGION 1..9: note = Table A: HLA-B*35:01H HLA-B*39:01H
SGLDSLDTY

SEQ ID NO: 2181 - protein, 9 aa, Severe acute respiratory syndrome coronavirus 2
  REGION 1..9: note = Table A: HLA-A*25:01H HLA-A*68:02H HLA-B*35:03H HLA-C*15:05H HLA-B*35:01H HLA-C*08:01H HLA-B*38:02H HLA-B*39:01H HLA-B*07:05H
DSLDTYPSL

SEQ ID NO: 2182 - protein, 9 aa, Severe acute respiratory syndrome coronavirus 2
  REGION 1..9: note = Table A: HLA-A*25:01M HLA-A*26:02H HLA-A*68:02H HLA-C*15:05M HLA-A*02:05H HLA-B*51:01H HLA-C*08:01H HLA-B*38:02M
DTYPSLETI

SEQ ID NO: 2183 - protein, 9 aa, Severe acute respiratory syndrome coronavirus 2
  REGION 1..9: note = Table A: HLA-B*53:01M HLA-B*35:03H HLA-C*15:05H HLA-B*35:02H HLA-B*51:01M HLA-B*35:12H HLA-B*38:02H HLA-B*54:01H
YPSLETIQI

SEQ ID NO: 2184 - protein, 9 aa, Severe acute respiratory syndrome coronavirus 2
  REGION 1..9: note = Table A: HLA-A*26:03H
ETIQITISS

SEQ ID NO: 2185 - protein, 9 aa, Severe acute respiratory syndrome coronavirus 2
  REGION 1..9: note = Table A: HLA-A*25:01H HLA-B*46:01H HLA-A*26:02H HLA-B*38:02H HLA-B*15:01M HLA-B*15:02M HLA-B*07:05H
TIQITISSF

SEQ ID NO: 2186 - protein, 9 aa, Severe acute respiratory syndrome coronavirus 2
  REGION 1..9: note = Table A: HLA-B*58:01H HLA-B*53:01H HLA-B*15:13H HLA-B*57:03H
QITISSFKW

SEQ ID NO: 2187 - protein, 9 aa, Severe acute respiratory syndrome coronavirus 2
  REGION 1..9: note = Table A: HLA-C*14:02M HLA-C*14:03M HLA-B*46:01M HLA-A*24:02H HLA-A*24:07H HLA-A*23:01H HLA-B*15:02H
SFKWDLTAF

SEQ ID NO: 2188 - protein, 9 aa, Severe acute respiratory syndrome coronavirus 2
  REGION 1..9: note = Table A: HLA-C*04:03H
KWDLTAFGL

SEQ ID NO: 2189 - protein, 9 aa, Severe acute respiratory syndrome coronavirus 2
  REGION 1..9: note = Table A: HLA-B*58:01M HLA-C*16:04H HLA-B*57:01M HLA-A*25:01H HLA-B*53:01H HLA-A*68:02H HLA-B*35:03H HLA-C*12:03H HLA-B*35:01M HLA-B*35:07H HLA-B*38:02M HLA-B*57:03M
TAFGLVAEW

SEQ ID NO: 2190 - protein, 9 aa, Severe acute respiratory syndrome coronavirus 2
  REGION 1..9: note = Table A: HLA-A*36:01H HLA-A*29:01H HLA-A*29:02M HLA-C*03:02H HLA-A*34:02H
LVAEWFLAY

SEQ ID NO: 2191 - protein, 9 aa, Severe acute respiratory syndrome coronavirus 2
  REGION 1..9: note = Table A: HLA-C*04:03H
VAEWFLAYI

SEQ ID NO: 2192 - protein, 9 aa, Severe acute respiratory syndrome coronavirus 2
  REGION 1..9: note = Table A: HLA-A*74:01M HLA-A*34:01H HLA-A*66:01H
FLAYILFTR

SEQ ID NO: 2193 - protein, 9 aa, Severe acute respiratory syndrome coronavirus 2
  REGION 1..9: note = Table A: HLA-B*57:03H
LAYILFTRF

SEQ ID NO: 2194 - protein, 9 aa, Severe acute respiratory syndrome coronavirus 2
  REGION 1..9: note = Table A: HLA-C*14:02H HLA-C*14:03H HLA-C*06:02H HLA-A*24:02H HLA-A*24:07M HLA-A*23:01H
AYILFTRFF

SEQ ID NO: 2195 - protein, 9 aa, Severe acute respiratory syndrome coronavirus 2
  REGION 1..9: note = Table A: HLA-A*29:02M
YILFTRFFY

SEQ ID NO: 2196 - protein, 9 aa, Severe acute respiratory syndrome coronavirus 2
  REGION 1..9: note = Table A: HLA-A*02:11H HLA-A*68:02H HLA-C*15:02H HLA-A*02:04H HLA-A*02:06H HLA-A*02:07M HLA-A*02:02M HLA-A*02:03H HLA-C*08:01H HLA-B*40:06H
ILFTRFFYV

SEQ ID NO: 2197 - protein, 9 aa, Severe acute respiratory syndrome coronavirus 2
  REGION 1..9: note = Table A: HLA-A*24:07M
LFTRFFYVL

SEQ ID NO: 2198 - protein, 9 aa, Severe acute respiratory syndrome coronavirus 2
  REGION 1..9: note = Table A: HLA-C*06:02M HLA-B*27:05M HLA-C*07:01H HLA-C*07:02H HLA-B*27:02H HLA-B*14:02H HLA-B*14:01H HLA-B*38:02H
TRFFYVLGL

SEQ ID NO: 2199 - protein, 9 aa, Severe acute respiratory syndrome coronavirus 2
  REGION 1..9: note = Table A: HLA-C*14:03H
FFYVLGLAA

SEQ ID NO: 2200 - protein, 9 aa, Severe acute respiratory syndrome coronavirus 2
  REGION 1..9: note = Table A: HLA-C*14:03H HLA-A*24:02H
FYVLGLAAI

SEQ ID NO: 2201 - protein, 9 aa, Severe acute respiratory syndrome coronavirus 2
  REGION 1..9: note = Table A: HLA-B*35:03H HLA-B*35:01H HLA-B*38:02H HLA-B*15:02H
YVLGLAAIM

SEQ ID NO: 2202 - protein, 9 aa, Severe acute respiratory syndrome coronavirus 2
  REGION 1..9: note = Table A: HLA-A*02:02H HLA-B*38:02H HLA-B*15:01H HLA-B*13:02H
GLAAIMQLF

SEQ ID NO: 2203 - protein, 9 aa, Severe acute respiratory syndrome coronavirus 2
  REGION 1..9: note = Table A: HLA-B*58:01H HLA-B*57:03H
LAAIMQLFF

SEQ ID NO: 2204 - protein, 9 aa, Severe acute respiratory syndrome coronavirus 2
  REGION 1..9: note = Table A: HLA-A*11:01H HLA-A*11:02H HLA-A*29:01H HLA-A*29:02M HLA-A*30:02M
AIMQLFFSY

SEQ ID NO: 2205 - protein, 9 aa, Severe acute respiratory syndrome coronavirus 2
  REGION 1..9: note = Table A: HLA-C*14:02M HLA-C*14:03M HLA-A*29:02H HLA-C*04:03H HLA-A*24:07M HLA-A*23:01H
FFSYFAVHF

SEQ ID NO: 2206 - protein, 9 aa, Severe acute respiratory syndrome coronavirus 2
  REGION 1..9: note = Table A: HLA-B*58:02M HLA-A*02:11M HLA-A*68:02M HLA-C*15:02M HLA-A*02:02H HLA-C*17:01H HLA-C*08:01H HLA-B*38:02H HLA-B*57:03M
FSYFAVHFI

SEQ ID NO: 2207 - protein, 9 aa, Severe acute respiratory syndrome coronavirus 2
  REGION 1..9: note = Table A: HLA-B*58:01H HLA-B*57:01M HLA-A*25:01M HLA-B*44:03H HLA-B*53:01H HLA-B*15:13M HLA-B*38:02H HLA-A*32:01H HLA-B*57:03H HLA-B*13:01M
AVHFISNSW

SEQ ID NO: 2208 - protein, 9 aa, Severe acute respiratory syndrome coronavirus 2
  REGION 1..9: note = Table A: HLA-B*38:02H HLA-B*15:10H
VHFISNSWL

SEQ ID NO: 2209 - protein, 9 aa, Severe acute respiratory syndrome coronavirus 2
  REGION 1..9: note = Table A: HLA-C*14:03H HLA-A*29:02H HLA-A*24:07M
HFISNSWLM

SEQ ID NO: 2210 - protein, 9 aa, Severe acute respiratory syndrome coronavirus 2
  REGION 1..9: note = Table A: HLA-C*15:02H
ISNSWLMWL

SEQ ID NO: 2211 - protein, 9 aa, Severe acute respiratory syndrome coronavirus 2
  REGION 1..9: note = Table A: HLA-A*02:11H HLA-A*02:04M HLA-A*02:02H
WLMWLIINL

SEQ ID NO: 2212 - protein, 9 aa, Severe acute respiratory syndrome coronavirus 2
  REGION 1..9: note = Table A: HLA-A*02:11H HLA-A*02:04H HLA-A*02:07H
LMWLIINLV

SEQ ID NO: 2213 - protein, 9 aa, Severe acute respiratory syndrome coronavirus 2
  REGION 1..9: note = Table A: HLA-A*02:04H
WLIINLVQM

SEQ ID NO: 2214 - protein, 9 aa, Severe acute respiratory syndrome coronavirus 2
  REGION 1..9: note = Table A: HLA-B*54:01H
LVQMAPISA

SEQ ID NO: 2215 - protein, 9 aa, Severe acute respiratory syndrome coronavirus 2
  REGION 1..9: note = Table A: HLA-B*48:01M HLA-C*14:03H HLA-A*11:303M HLA-B*46:01M HLA-C*03:02H HLA-C*03:04H HLA-C*15:05M HLA-C*12:02H HLA-B*14:01H HLA-C*07:27H HLA-B*52:01H HLA-B*37:01H HLA-B*38:02M HLA-B*40:02H HLA-B*15:01H
  REGION 1..9: note = CONT. FROM ABOVE: HLA-B*15:02H HLA-B*15:03H HLA-B*39:01H HLA- B*07:05M HLA-B*41:02H HLA-B*13:01H HLA-B*13:02M HLA-B*15:11H
VQMAPISAM

SEQ ID NO: 2216 - protein, 9 aa, Severe acute respiratory syndrome coronavirus 2
  REGION 1..9: note = Table A: HLA-A*02:11H HLA-A*68:02M HLA-C*15:05H HLA-A*02:04H HLA-A*02:05M HLA-A*02:06H HLA-A*02:07H HLA-A*02:08M HLA-A*02:01M HLA-A*02:02H HLA-A*02:03H HLA-B*52:01M HLA-B*38:02H HLA-B*39:01H HLA-B*07:05H HLA-B*13:02M
QMAPISAMV

SEQ ID NO: 2217 - protein, 9 aa, Severe acute respiratory syndrome coronavirus 2
  REGION 1..9: note = Table A: HLA-A*34:01H
MAPISAMVR

SEQ ID NO: 2218 - protein, 9 aa, Severe acute respiratory syndrome coronavirus 2
  REGION 1..9: note = Table A: HLA-B*42:01H HLA-B*56:01H HLA-B*53:01M HLA-B*55:02H HLA-B*35:03M HLA-C*15:05H HLA-B*55:01H HLA-A*34:01H HLA-B*35:01M HLA-B*35:02H HLA-B*35:07M HLA-B*35:12H HLA-B*07:02M HLA-B*07:04M HLA-B*07:05H
APISAMVRM

SEQ ID NO: 2219 - protein, 9 aa, Severe acute respiratory syndrome coronavirus 2
  REGION 1..9: note = Table A: HLA-C*16:01H
SAMVRMYIF

SEQ ID NO: 2220 - protein, 9 aa, Severe acute respiratory syndrome coronavirus 2
  REGION 1..9: note = Table A: HLA-A*32:01H HLA-B*15:03H
RMYIFFASF

SEQ ID NO: 2221 - protein, 9 aa, Severe acute respiratory syndrome coronavirus 2
  REGION 1..9: note = Table A: HLA-C*14:03H HLA-A*29:02M
MYIFFASFY

SEQ ID NO: 2222 - protein, 9 aa, Severe acute respiratory syndrome coronavirus 2
  REGION 1..9: note = Table A: HLA-A*29:02M
YIFFASFYY

SEQ ID NO: 2223 - protein, 9 aa, Severe acute respiratory syndrome coronavirus 2
  REGION 1..9: note = Table A: HLA-A*24:07H
FFASFYYVW

SEQ ID NO: 2224 - protein, 9 aa, Severe acute respiratory syndrome coronavirus 2
  REGION 1..9: note = Table A: HLA-A*34:02H
FASFYYVWK

SEQ ID NO: 2225 - protein, 9 aa, Severe acute respiratory syndrome coronavirus 2
  REGION 1..9: note = Table A: HLA-C*14:02H HLA-C*14:03M HLA-A*29:02H HLA-A*30:02H
SFYYVWKSY

SEQ ID NO: 2226 - protein, 9 aa, Severe acute respiratory syndrome coronavirus 2
  REGION 1..9: note = Table A: HLA-C*14:03H HLA-C*06:02H
FYYVWKSYV

SEQ ID NO: 2227 - protein, 9 aa, Severe acute respiratory syndrome coronavirus 2
  REGION 1..9: note = Table A: HLA-C*14:03H
YYVWKSYVH

SEQ ID NO: 2228 - protein, 9 aa, Severe acute respiratory syndrome coronavirus 2
  REGION 1..9: note = Table A: HLA-A*02:11H HLA-A*68:02H HLA-A*02:04H HLA-A*02:06M HLA-A*02:07M HLA-A*02:02H HLA-C*08:01H HLA-B*40:06H HLA-B*13:02H
YVWKSYVHV

SEQ ID NO: 2229 - protein, 9 aa, Severe acute respiratory syndrome coronavirus 2
  REGION 1..9: note = Table A: HLA-A*24:07H
VWKSYVHVV

SEQ ID NO: 2230 - protein, 9 aa, Severe acute respiratory syndrome coronavirus 2
  REGION 1..9: note = Table A: HLA-B*57:03H
KSYVHVVDG

SEQ ID NO: 2231 - protein, 9 aa, Severe acute respiratory syndrome coronavirus 2
  REGION 1..9: note = Table A: HLA-C*15:05H HLA-B*57:03H
ATRVECTTI

SEQ ID NO: 2232 - protein, 9 aa, Severe acute respiratory syndrome coronavirus 2
  REGION 1..9: note = Table A: HLA-A*68:02M HLA-B*38:02H
ECTTIVNGV

SEQ ID NO: 2233 - protein, 9 aa, Severe acute respiratory syndrome coronavirus 2
  REGION 1..9: note = Table A: HLA-A*34:02H HLA-A*66:01H
CTTIVNGVR

SEQ ID NO: 2234 - protein, 9 aa, Severe acute respiratory syndrome coronavirus 2
  REGION 1..9: note = Table A: HLA-A*74:01M HLA-A*11:01H HLA-A*33:01H HLA-A*33:03M HLA-A*26:03H HLA-A*68:01H HLA-A*34:01H HLA-A*34:02M HLA-A*31:01H HLA-A*66:01H
TTIVNGVRR

SEQ ID NO: 2235 - protein, 9 aa, Severe acute respiratory syndrome coronavirus 2
  REGION 1..9: note = Table A: HLA-A*32:01H HLA-B*07:04H
IVNGVRRSF

SEQ ID NO: 2236 - protein, 9 aa, Severe acute respiratory syndrome coronavirus 2
  REGION 1..9: note = Table A: HLA-A*30:01H HLA-A*30:02H HLA-B*38:02H
GVRRSFYVY

SEQ ID NO: 2237 - protein, 9 aa, Severe acute respiratory syndrome coronavirus 2
  REGION 1..9: note = Table A: HLA-C*14:03H
SFYVYANGG

SEQ ID NO: 2238 - protein, 9 aa, Severe acute respiratory syndrome coronavirus 2
  REGION 1..9: note = Table A: HLA-A*66:01H
YVYANGGKG

SEQ ID NO: 2239 - protein, 9 aa, Severe acute respiratory syndrome coronavirus 2
  REGION 1..9: note = Table A: HLA-C*14:02M HLA-C*14:03M HLA-A*24:02H HLA-A*24:07M HLA-A*23:01H
VYANGGKGF

SEQ ID NO: 2240 - protein, 9 aa, Severe acute respiratory syndrome coronavirus 2
  REGION 1..9: note = Table A: HLA-B*58:02H HLA-B*57:03M
KGFCKLHNW

SEQ ID NO: 2241 - protein, 9 aa, Severe acute respiratory syndrome coronavirus 2
  REGION 1..9: note = Table A: HLA-A*25:01M HLA-A*26:01H HLA-A*26:02H HLA-A*34:01H HLA-B*38:02H HLA-B*15:02M HLA-B*07:05H HLA-A*66:01H
DTFCAGSTF

SEQ ID NO: 2242 - protein, 9 aa, Severe acute respiratory syndrome coronavirus 2
  REGION 1..9: note = Table A: HLA-A*68:02H HLA-C*08:03H HLA-B*13:02M
GSTFISDEV

SEQ ID NO: 2243 - protein, 9 aa, Severe acute respiratory syndrome coronavirus 2
  REGION 1..9: note = Table A: HLA-A*33:03H HLA-A*68:01H HLA-A*34:01H HLA-A*66:01H
TFISDEVAR

SEQ ID NO: 2244 - protein, 9 aa, Severe acute respiratory syndrome coronavirus 2
  REGION 1..9: note = Table A: HLA-B*58:02H HLA-A*11:303M HLA-C*04:01H HLA-C*04:03H HLA-C*03:03M HLA-C*03:04M HLA-C*15:05M HLA-C*15:02H HLA-A*02:07M HLA-B*35:02H HLA-C*08:01H HLA-C*08:02H HLA-B*38:02H HLA-C*05:01M
ISDEVARDL

SEQ ID NO: 2245 - protein, 9 aa, Severe acute respiratory syndrome coronavirus 2
  REGION 1..9: note = Table A: HLA-B*44:05H HLA-B*44:03H HLA-B*18:01M HLA-B*14:02H HLA-B*14:01M HLA-B*40:01H HLA-B*40:02H HLA-B*07:05M HLA-B*41:02H
DEVARDLSL

SEQ ID NO: 2246 - protein, 9 aa, Severe acute respiratory syndrome coronavirus 2
  REGION 1..9: note = Table A: HLA-A*11:303H HLA-C*16:01H HLA-B*57:01H HLA-B*46:01M HLA-C*03:02M HLA-C*15:05H HLA-C*12:02M HLA-B*35:07H HLA-B*38:02H HLA-B*15:01H HLA-B*15:02H HLA-B*15:03H HLA-B*57:03M HLA-C*02:02H
VARDLSLQF

SEQ ID NO: 2247 - protein, 9 aa, Severe acute respiratory syndrome coronavirus 2
  REGION 1..9: note = Table A: HLA-B*58:02M
LSLQFKRPI

SEQ ID NO: 2248 - protein, 9 aa, Severe acute respiratory syndrome coronavirus 2
  REGION 1..9: note = Table A: HLA-A*02:11H
LQFKRPINP

SEQ ID NO: 2249 - protein, 9 aa, Severe acute respiratory syndrome coronavirus 2
  REGION 1..9: note = Table A: HLA-B*55:02H HLA-C*15:05H HLA-B*07:05H
RPINPTDQS

SEQ ID NO: 2250 - protein, 9 aa, Severe acute respiratory syndrome coronavirus 2
  REGION 1..9: note = Table A: HLA-B*53:01H HLA-B*51:01H
NPTDQSSYI

SEQ ID NO: 2251 - protein, 9 aa, Severe acute respiratory syndrome coronavirus 2
  REGION 1..9: note = Table A: HLA-A*68:02M HLA-A*02:08H HLA-B*38:02H HLA-B*13:02H
QSSYIVDSV

SEQ ID NO: 2252 - protein, 9 aa, Severe acute respiratory syndrome coronavirus 2
  REGION 1..9: note = Table A: HLA-C*14:02H HLA-C*14:03M HLA-C*04:01H HLA-A*68:02H HLA-C*15:05H HLA-A*24:02H HLA-A*24:07H HLA-C*08:01M HLA-A*23:01M HLA-B*38:02H HLA-B*39:01M HLA-B*49:01H
SYIVDSVTV

SEQ ID NO: 2253 - protein, 9 aa, Severe acute respiratory syndrome coronavirus 2
  REGION 1..9: note = Table A: HLA-A*11:303H HLA-A*03:01H HLA-A*03:02H HLA-A*11:01H HLA-A*11:02H HLA-A*36:01H HLA-B*46:01H HLA-A*26:03H HLA-C*03:03H HLA-B*27:02H HLA-A*68:01M HLA-A*68:02H HLA-A*02:03H HLA-A*34:01M HLA-A*34:02H
  REGION 1..9: note = CONT. FROM ABOVE: HLA-C*07:27H HLA-C*17:01H HLA-B*38:02M HLA- B*15:02H HLA-A*66:01M
YIVDSVTVK

SEQ ID NO: 2254 - protein, 9 aa, Severe acute respiratory syndrome coronavirus 2
  REGION 1..9: note = Table A: HLA-C*04:03H HLA-A*02:07H
IVDSVTVKN

SEQ ID NO: 2255 - protein, 9 aa, Severe acute respiratory syndrome coronavirus 2
  REGION 1..9: note = Table A: HLA-B*42:01H HLA-A*02:05H HLA-A*02:08M HLA-A*02:02H HLA-A*02:03H HLA-A*34:01H HLA-B*38:02H HLA-B*07:04M HLA-B*15:01H HLA-B*15:02H HLA-A*66:01H
TVKNGSIHL

SEQ ID NO: 2256 - protein, 9 aa, Severe acute respiratory syndrome coronavirus 2
  REGION 1..9: note = Table A: HLA-A*30:02H HLA-B*15:03M
VKNGSIHLY

SEQ ID NO: 2257 - protein, 9 aa, Severe acute respiratory syndrome coronavirus 2
  REGION 1..9: note = Table A: HLA-B*57:03H
KNGSIHLYF

SEQ ID NO: 2258 - protein, 9 aa, Severe acute respiratory syndrome coronavirus 2
  REGION 1..9: note = Table A: HLA-A*11:01H HLA-A*11:02H HLA-A*36:01H
GSIHLYFDK

SEQ ID NO: 2259 - protein, 9 aa, Severe acute respiratory syndrome coronavirus 2
  REGION 1..9: note = Table A: HLA-A*33:03H HLA-A*34:02H
LYFDKAGQK

SEQ ID NO: 2260 - protein, 9 aa, Severe acute respiratory syndrome coronavirus 2
  REGION 1..9: note = Table A: HLA-B*46:01H HLA-B*38:02H HLA-B*15:11H
FDKAGQKTY

SEQ ID NO: 2261 - protein, 9 aa, Severe acute respiratory syndrome coronavirus 2
  REGION 1..9: note = Table A: HLA-A*74:01H
KAGQKTYER

SEQ ID NO: 2262 - protein, 9 aa, Severe acute respiratory syndrome coronavirus 2
  REGION 1..9: note = Table A: HLA-A*68:02H
ERHSLSHFV

SEQ ID NO: 2263 - protein, 9 aa, Severe acute respiratory syndrome coronavirus 2
  REGION 1..9: note = Table A: HLA-B*58:02M HLA-C*03:03H HLA-A*02:11H HLA-C*03:04H HLA-A*68:02H HLA-C*15:05H HLA-C*15:02H HLA-A*02:04H HLA-A*02:06H HLA-A*34:02H HLA-C*17:01H HLA-C*08:01H HLA-B*38:02H HLA-B*57:03M HLA-C*07:04M
HSLSHFVNL

SEQ ID NO: 2264 - protein, 9 aa, Severe acute respiratory syndrome coronavirus 2
  REGION 1..9: note = Table A: HLA-B*48:01H HLA-C*08:01H HLA-B*38:01H HLA-B*38:02H HLA-B*39:06H HLA-B*39:01H HLA-B*15:10M
SHFVNLDNL

SEQ ID NO: 2265 - protein, 9 aa, Severe acute respiratory syndrome coronavirus 2
  REGION 1..9: note = Table A: HLA-A*33:03H
HFVNLDNLR

SEQ ID NO: 2266 - protein, 9 aa, Severe acute respiratory syndrome coronavirus 2
  REGION 1..9: note = Table A: HLA-B*54:01H
FVNLDNLRA

SEQ ID NO: 2267 - protein, 9 aa, Severe acute respiratory syndrome coronavirus 2
  REGION 1..9: note = Table A: HLA-B*37:01H
LDNLRANNT

SEQ ID NO: 2268 - protein, 9 aa, Severe acute respiratory syndrome coronavirus 2
  REGION 1..9: note = Table A: HLA-C*03:04H HLA-C*15:05H HLA-B*07:02M HLA-B*07:04M
RANNTKGSL

SEQ ID NO: 2269 - protein, 9 aa, Severe acute respiratory syndrome coronavirus 2
  REGION 1..9: note = Table A: HLA-B*13:02H
GSLPINVIV

SEQ ID NO: 2270 - protein, 9 aa, Severe acute respiratory syndrome coronavirus 2
  REGION 1..9: note = Table A: HLA-A*24:07H HLA-B*15:02H
SLPINVIVF

SEQ ID NO: 2271 - protein, 9 aa, Severe acute respiratory syndrome coronavirus 2
  REGION 1..9: note = Table A: HLA-B*45:01M HLA-B*50:01M
CEESSAKSA

SEQ ID NO: 2272 - protein, 9 aa, Severe acute respiratory syndrome coronavirus 2
  REGION 1..9: note = Table A: HLA-B*58:01H HLA-A*30:02H HLA-B*38:02H HLA-B*15:01M HLA-B*15:02H HLA-B*15:03H
SSAKSASVY

SEQ ID NO: 2273 - protein, 9 aa, Severe acute respiratory syndrome coronavirus 2
  REGION 1..9: note = Table A: HLA-B*58:02H HLA-A*11:303H HLA-C*16:01H HLA-C*16:04H HLA-B*57:01H HLA-B*46:01H HLA-A*26:01H HLA-C*03:02H HLA-A*30:02M HLA-C*12:02H HLA-C*12:03M HLA-A*34:01H HLA-C*07:27H HLA-B*35:01H HLA-B*35:07M
  REGION 1..9: note = CONT. FROM ABOVE: HLA-B*38:02M HLA-B*15:01H HLA-B*15:02M HLA- B*15:03H HLA-B*57:03H HLA-C*02:02H HLA-B*15:11H
SAKSASVYY

SEQ ID NO: 2274 - protein, 9 aa, Severe acute respiratory syndrome coronavirus 2
  REGION 1..9: note = Table A: HLA-A*11:303H HLA-C*16:01H HLA-B*53:01H HLA-C*03:04H HLA-B*35:03M HLA-C*15:05M HLA-C*17:01H HLA-C*08:01H HLA-B*38:02H HLA-C*07:04H
SASVYYSQL

SEQ ID NO: 2275 - protein, 9 aa, Severe acute respiratory syndrome coronavirus 2
  REGION 1..9: note = Table A: HLA-C*15:02H
ASVYYSQLM

SEQ ID NO: 2276 - protein, 9 aa, Severe acute respiratory syndrome coronavirus 2
  REGION 1..9: note = Table A: HLA-B*48:01H HLA-B*15:10H
SQLMCQPIL

SEQ ID NO: 2277 - protein, 9 aa, Severe acute respiratory syndrome coronavirus 2
  REGION 1..9: note = Table A: HLA-A*02:01H HLA-B*38:02H
QLMCQPILL

SEQ ID NO: 2278 - protein, 9 aa, Severe acute respiratory syndrome coronavirus 2
  REGION 1..9: note = Table A: HLA-B*56:01M HLA-B*55:02H HLA-B*55:01H HLA-B*39:06H HLA-B*54:01M
QPILLLDQA

SEQ ID NO: 2279 - protein, 9 aa, Severe acute respiratory syndrome coronavirus 2
  REGION 1..9: note = Table A: HLA-B*39:01H
DQALVSDVG

SEQ ID NO: 2280 - protein, 9 aa, Severe acute respiratory syndrome coronavirus 2
  REGION 1..9: note = Table A: HLA-A*68:02H HLA-A*02:05H HLA-A*02:08H HLA-C*08:01H HLA-B*38:02H HLA-B*39:01H
LVSDVGDSA

SEQ ID NO: 2281 - protein, 9 aa, Severe acute respiratory syndrome coronavirus 2
  REGION 1..9: note = Table A: HLA-B*35:02H HLA-C*08:02M HLA-B*39:01H HLA-C*05:01H
VGDSAEVAV

SEQ ID NO: 2282 - protein, 9 aa, Severe acute respiratory syndrome coronavirus 2
  REGION 1..9: note = Table A: HLA-A*26:01H HLA-A*26:02M HLA-A*68:01M HLA-A*68:02M HLA-B*35:03H HLA-C*15:05H HLA-A*34:01H HLA-A*34:02H HLA-B*35:01M HLA-B*35:02H HLA-B*51:01H HLA-B*35:12H HLA-B*38:02H HLA-B*15:02H HLA-B*07:05M HLA-A*66:01H
DSAEVAVKM

SEQ ID NO: 2283 - protein, 9 aa, Severe acute respiratory syndrome coronavirus 2
  REGION 1..9: note = Table A: HLA-C*04:03H HLA-B*35:01H
SAEVAVKMF

SEQ ID NO: 2284 - protein, 9 aa, Severe acute respiratory syndrome coronavirus 2
  REGION 1..9: note = Table A: HLA-B*58:01H HLA-C*16:04H HLA-A*36:01H HLA-C*03:02H HLA-B*35:01M HLA-B*35:08H HLA-B*35:07M HLA-C*08:01H HLA-B*38:02H HLA-B*07:05H
VAVKMFDAY

SEQ ID NO: 2285 - protein, 9 aa, Severe acute respiratory syndrome coronavirus 2
  REGION 1..9: note = Table A: HLA-A*68:02H HLA-B*38:02H
AVKMFDAYV

SEQ ID NO: 2286 - protein, 9 aa, Severe acute respiratory syndrome coronavirus 2
  REGION 1..9: note = Table A: HLA-A*02:11M HLA-A*02:02H
KMFDAYVNT

SEQ ID NO: 2287 - protein, 9 aa, Severe acute respiratory syndrome coronavirus 2
  REGION 1..9: note = Table A: HLA-C*14:02H HLA-C*14:03M HLA-C*04:01H HLA-C*04:03H HLA-B*18:01H HLA-A*02:07H HLA-A*24:02H HLA-B*35:01H HLA-B*35:08H HLA-A*24:07H HLA-C*08:02H HLA-A*23:01H HLA-B*38:01H HLA-B*38:02M HLA-B*15:02H HLA-B*39:01H
  REGION 1..9: note = CONT. FROM ABOVE: HLA-B*07:05H HLA-C*05:01H
MFDAYVNTF

SEQ ID NO: 2288 - protein, 9 aa, Severe acute respiratory syndrome coronavirus 2
  REGION 1..9: note = Table A: HLA-B*58:01H HLA-A*11:303H HLA-A*25:01M HLA-B*46:01M HLA-A*26:01M HLA-A*26:02H HLA-A*26:03H HLA-B*53:01H HLA-C*03:02M HLA-C*03:04H HLA-C*15:05M HLA-C*12:02M HLA-A*34:01H HLA-B*35:01M HLA-B*35:07H
  REGION 1..9: note = CONT. FROM ABOVE: HLA-B*15:13H HLA-B*38:02M HLA-B*15:01M HLA- B*15:02H HLA-B*15:03H HLA-B*07:05H HLA-B*57:03H HLA-C*02:02H HLA-B*15:11H HLA-C*07:04H HLA-A*66:01H
YVNTFSSTF

SEQ ID NO: 2289 - protein, 9 aa, Severe acute respiratory syndrome coronavirus 2
  REGION 1..9: note = Table A: HLA-A*02:11H HLA-A*68:02H HLA-A*02:06H
NTFSSTFNV

SEQ ID NO: 2290 - protein, 9 aa, Severe acute respiratory syndrome coronavirus 2
  REGION 1..9: note = Table A: HLA-C*07:04H
FSSTFNVPM

SEQ ID NO: 2291 - protein, 9 aa, Severe acute respiratory syndrome coronavirus 2
  REGION 1..9: note = Table A: HLA-A*11:303H HLA-A*74:01H HLA-A*03:01H HLA-A*03:02H HLA-A*11:01H HLA-A*11:02H HLA-A*36:01H HLA-B*57:01H HLA-A*33:03H HLA-A*30:01H HLA-A*30:02H HLA-A*68:01M HLA-A*68:02H HLA-A*34:02H HLA-C*07:27H
  REGION 1..9: note = CONT. FROM ABOVE: HLA-A*31:01H HLA-B*13:02H HLA-A*66:01M
STFNVPMEK

SEQ ID NO: 2292 - protein, 9 aa, Severe acute respiratory syndrome coronavirus 2
  REGION 1..9: note = Table A: HLA-B*07:05H
TFNVPMEKL

SEQ ID NO: 2293 - protein, 9 aa, Severe acute respiratory syndrome coronavirus 2
  REGION 1..9: note = Table A: HLA-B*42:01H HLA-B*56:01H HLA-B*08:01H HLA-B*53:01H HLA-B*55:02M HLA-B*35:03H HLA-C*15:05H HLA-B*14:02H HLA-B*55:01M HLA-B*51:01M HLA-C*08:01H HLA-B*38:02H HLA-B*54:01H HLA-B*07:02H HLA-B*07:04H HLA-B*07:05M
VPMEKLKTL

SEQ ID NO: 2294 - protein, 9 aa, Severe acute respiratory syndrome coronavirus 2
  REGION 1..9: note = Table A: HLA-B*45:01M HLA-B*40:06H HLA-B*50:01M
MEKLKTLVA

SEQ ID NO: 2295 - protein, 9 aa, Severe acute respiratory syndrome coronavirus 2
  REGION 1..9: note = Table A: HLA-A*02:11H HLA-A*02:05H HLA-A*02:08H HLA-A*02:02M HLA-A*02:03M HLA-B*38:02H
KLKTLVATA

SEQ ID NO: 2296 - protein, 9 aa, Severe acute respiratory syndrome coronavirus 2
  REGION 1..9: note = Table A: HLA-A*02:11H HLA-C*15:05H HLA-A*02:06H HLA-A*02:08H
KTLVATAEA

SEQ ID NO: 2297 - protein, 9 aa, Severe acute respiratory syndrome coronavirus 2
  REGION 1..9: note = Table A: HLA-B*35:03H HLA-C*15:05H HLA-A*02:05M HLA-A*02:08H HLA-A*02:02H HLA-B*35:02M HLA-B*35:12M HLA-B*38:02H HLA-B*39:01H
LVATAEAEL

SEQ ID NO: 2298 - protein, 9 aa, Severe acute respiratory syndrome coronavirus 2
  REGION 1..9: note = Table A: HLA-A*11:303H HLA-A*03:02H HLA-A*11:01M HLA-A*11:02H HLA-A*36:01H HLA-A*34:02H HLA-C*07:27H
ATAEAELAK

SEQ ID NO: 2299 - protein, 9 aa, Severe acute respiratory syndrome coronavirus 2
  REGION 1..9: note = Table A: HLA-B*44:02M HLA-B*44:05M HLA-C*16:04M HLA-B*45:01H HLA-B*44:03H HLA-A*68:02H HLA-A*02:05H HLA-B*37:01H HLA-B*40:02M HLA-B*40:06H HLA-B*41:02H HLA-B*49:01H HLA-B*50:01M
AEAELAKNV

SEQ ID NO: 2300 - protein, 9 aa, Severe acute respiratory syndrome coronavirus 2
  REGION 1..9: note = Table A: HLA-B*48:01H HLA-B*44:02M HLA-B*44:05H HLA-C*16:04H HLA-B*45:01M HLA-B*44:03M HLA-B*14:02H HLA-B*14:01H HLA-B*37:01H HLA-B*40:01H HLA-B*40:02H HLA-B*40:06H HLA-B*07:05H HLA-B*41:02H HLA-B*49:01M HLA-C*07:04H
  REGION 1..9: note = CONT. FROM ABOVE: HLA-B*50:01H
AELAKNVSL

SEQ ID NO: 2301 - protein, 9 aa, Severe acute respiratory syndrome coronavirus 2
  REGION 1..9: note = Table A: HLA-A*11:303H HLA-B*46:01H HLA-C*04:03H HLA-A*02:07H HLA-C*08:02H HLA-B*38:02M HLA-B*15:01H HLA-B*15:02H HLA-B*07:05H HLA-C*05:01H
SLDNVLSTF

SEQ ID NO: 2302 - protein, 9 aa, Severe acute respiratory syndrome coronavirus 2
  REGION 1..9: note = Table A: HLA-B*56:01H HLA-B*55:02M HLA-A*68:02H HLA-B*55:01H HLA-A*02:06M HLA-A*02:07H HLA-A*02:01H HLA-C*08:01H HLA-B*38:02H HLA-B*39:06H HLA-B*40:06H HLA-B*54:01H HLA-B*07:05H
NVLSTFISA

SEQ ID NO: 2303 - protein, 9 aa, Severe acute respiratory syndrome coronavirus 2
  REGION 1..9: note = Table A: HLA-A*02:11H HLA-B*55:02H HLA-A*02:04H HLA-A*02:05H HLA-B*14:01H HLA-A*02:01M HLA-A*02:02M HLA-A*02:03M HLA-B*38:02M HLA-B*39:06H
VLSTFISAA

SEQ ID NO: 2304 - protein, 9 aa, Severe acute respiratory syndrome coronavirus 2
  REGION 1..9: note = Table A: HLA-A*74:01M HLA-A*36:01H HLA-A*33:03H HLA-A*26:03H HLA-A*68:01M HLA-A*68:02H HLA-A*34:01M HLA-A*34:02M HLA-A*31:01H HLA-A*66:01H
LSTFISAAR

SEQ ID NO: 2305 - protein, 9 aa, Severe acute respiratory syndrome coronavirus 2
  REGION 1..9: note = Table A: HLA-B*38:02H HLA-B*15:02H
FISAARQGF

SEQ ID NO: 2306 - protein, 9 aa, Severe acute respiratory syndrome coronavirus 2
  REGION 1..9: note = Table A: HLA-B*13:01H HLA-B*13:02H
RQGFVDSDV

SEQ ID NO: 2307 - protein, 9 aa, Severe acute respiratory syndrome coronavirus 2
  REGION 1..9: note = Table A: HLA-A*03:02H HLA-A*36:01H HLA-C*04:03H HLA-A*02:07H HLA-A*34:02H
FVDSDVETK

SEQ ID NO: 2308 - protein, 9 aa, Severe acute respiratory syndrome coronavirus 2
  REGION 1..9: note = Table A: HLA-B*40:02H HLA-B*41:02H
SDVETKDVV

SEQ ID NO: 2309 - protein, 9 aa, Severe acute respiratory syndrome coronavirus 2
  REGION 1..9: note = Table A: HLA-B*45:01H HLA-B*49:01H HLA-B*50:01H
VETKDVVEC

SEQ ID NO: 2310 - protein, 9 aa, Severe acute respiratory syndrome coronavirus 2
  REGION 1..9: note = Table A: HLA-A*25:01M HLA-A*26:01M HLA-A*26:02M HLA-A*26:03H HLA-A*68:02H HLA-A*02:05H HLA-A*02:02H HLA-B*38:02H
ETKDVVECL

SEQ ID NO: 2311 - protein, 9 aa, Severe acute respiratory syndrome coronavirus 2
  REGION 1..9: note = Table A: HLA-B*39:06H HLA-B*39:01H
SHQSDIEVT

SEQ ID NO: 2312 - protein, 9 aa, Severe acute respiratory syndrome coronavirus 2
  REGION 1..9: note = Table A: HLA-B*38:01H HLA-B*38:02H HLA-B*39:01H HLA-B*13:01H HLA-B*13:02H
HQSDIEVTG

SEQ ID NO: 2313 - protein, 9 aa, Severe acute respiratory syndrome coronavirus 2
  REGION 1..9: note = Table A: HLA-A*03:01H HLA-A*11:01H HLA-A*29:01H HLA-A*29:02H HLA-B*35:01H HLA-B*38:02H HLA-B*07:05H
SCNNYMLTY

SEQ ID NO: 2314 - protein, 9 aa, Severe acute respiratory syndrome coronavirus 2
  REGION 1..9: note = Table A: HLA-A*24:02H
NYMLTYNKV

SEQ ID NO: 2315 - protein, 9 aa, Severe acute respiratory syndrome coronavirus 2
  REGION 1..9: note = Table A: HLA-A*02:11M HLA-A*68:02H HLA-A*02:05H HLA-A*02:08H HLA-A*02:02H HLA-B*57:03H
LTYNKVENM

SEQ ID NO: 2316 - protein, 9 aa, Severe acute respiratory syndrome coronavirus 2
  REGION 1..9: note = Table A: HLA-A*34:01H
NKVENMTPR

SEQ ID NO: 2317 - protein, 9 aa, Severe acute respiratory syndrome coronavirus 2
  REGION 1..9: note = Table A: HLA-B*44:05M HLA-B*44:03H HLA-B*40:02H HLA-B*41:02M
VENMTPRDL

SEQ ID NO: 2318 - protein, 9 aa, Severe acute respiratory syndrome coronavirus 2
  REGION 1..9: note = Table A: HLA-C*15:05M HLA-B*51:01H HLA-B*07:02H HLA-B*07:04H
TPRDLGACI

SEQ ID NO: 2319 - protein, 9 aa, Severe acute respiratory syndrome coronavirus 2
  REGION 1..9: note = Table A: HLA-C*12:05H HLA-A*02:11H HLA-A*30:01H HLA-A*68:02H HLA-C*15:05M HLA-B*55:01H HLA-A*02:03H HLA-B*51:01H HLA-B*38:02H HLA-B*07:02H HLA-B*07:04M
SARHINAQV

SEQ ID NO: 2320 - protein, 9 aa, Severe acute respiratory syndrome coronavirus 2
  REGION 1..9: note = Table A: HLA-B*45:01H HLA-B*39:06M
ARHINAQVA

SEQ ID NO: 2321 - protein, 9 aa, Severe acute respiratory syndrome coronavirus 2
  REGION 1..9: note = Table A: HLA-B*27:05H HLA-B*15:10H
RHINAQVAK

SEQ ID NO: 2322 - protein, 9 aa, Severe acute respiratory syndrome coronavirus 2
  REGION 1..9: note = Table A: HLA-A*02:05M HLA-A*02:06H HLA-A*02:08H HLA-B*52:01H HLA-B*38:01H HLA-B*38:02M HLA-B*13:01H HLA-B*13:02H HLA-B*49:01H
AQVAKSHNI

SEQ ID NO: 2323 - protein, 9 aa, Severe acute respiratory syndrome coronavirus 2
  REGION 1..9: note = Table A: HLA-B*42:01H HLA-A*11:303M HLA-C*16:01M HLA-B*46:01M HLA-B*08:01M HLA-C*03:03H HLA-C*12:05H HLA-C*03:02H HLA-C*03:04M HLA-C*15:05H HLA-C*12:02M HLA-C*12:03H HLA-C*07:27H HLA-C*17:01H HLA-C*08:01H
  REGION 1..9: note = CONT. FROM ABOVE: HLA-B*38:02H HLA-B*07:02H HLA-B*07:04H HLA- B*15:01H HLA-B*41:02H HLA-B*57:03H HLA-C*02:02H HLA-C*07:04H
VAKSHNIAL

SEQ ID NO: 2324 - protein, 9 aa, Severe acute respiratory syndrome coronavirus 2
  REGION 1..9: note = Table A: HLA-B*58:01H HLA-B*58:02H HLA-B*57:01H HLA-B*53:01H HLA-C*15:02H HLA-A*32:01M HLA-B*57:03H HLA-B*13:01H
KSHNIALIW

SEQ ID NO: 2325 - protein, 9 aa, Severe acute respiratory syndrome coronavirus 2
  REGION 1..9: note = Table A: HLA-A*02:11H HLA-A*68:02H HLA-C*15:02H HLA-A*02:04H HLA-A*02:07H HLA-B*40:06H HLA-B*13:02H
HNIALIWNV

SEQ ID NO: 2326 - protein, 9 aa, Severe acute respiratory syndrome coronavirus 2
  REGION 1..9: note = Table A: HLA-A*02:11M HLA-A*02:07H
LIWNVKDFM

SEQ ID NO: 2327 - protein, 9 aa, Severe acute respiratory syndrome coronavirus 2
  REGION 1..9: note = Table A: HLA-B*38:02H HLA-B*39:01H HLA-B*07:05H
DFMSLSEQL

SEQ ID NO: 2328 - protein, 9 aa, Severe acute respiratory syndrome coronavirus 2
  REGION 1..9: note = Table A: HLA-A*11:02H HLA-A*34:02M
MSLSEQLRK

SEQ ID NO: 2329 - protein, 9 aa, Severe acute respiratory syndrome coronavirus 2
  REGION 1..9: note = Table A: HLA-B*08:01H HLA-B*55:01H HLA-A*02:03M HLA-B*38:02H HLA-B*07:04H
QLRKQIRSA

SEQ ID NO: 2330 - protein, 9 aa, Severe acute respiratory syndrome coronavirus 2
  REGION 1..9: note = Table A: HLA-B*42:01H HLA-B*46:01M HLA-C*03:02H HLA-C*15:05H HLA-C*12:02H HLA-B*07:04M HLA-B*15:01H HLA-B*57:03H HLA-C*02:02H
AAKKNNLPF

SEQ ID NO: 2331 - protein, 9 aa, Severe acute respiratory syndrome coronavirus 2
  REGION 1..9: note = Table A: HLA-B*48:01H HLA-C*07:01H HLA-C*07:02H HLA-B*15:03H
KKNNLPFKL

SEQ ID NO: 2332 - protein, 9 aa, Severe acute respiratory syndrome coronavirus 2
  REGION 1..9: note = Table A: HLA-A*02:03H
NLPFKLTCA

SEQ ID NO: 2333 - protein, 9 aa, Severe acute respiratory syndrome coronavirus 2
  REGION 1..9: note = Table A: HLA-B*56:01H HLA-B*55:02H HLA-B*54:01H
LPFKLTCAT

SEQ ID NO: 2334 - protein, 9 aa, Severe acute respiratory syndrome coronavirus 2
  REGION 1..9: note = Table A: HLA-A*02:11H HLA-A*68:02M HLA-C*15:05H HLA-C*15:02M HLA-A*02:05H HLA-A*02:06H HLA-A*02:08M HLA-B*57:03H HLA-B*13:02H
ATTRQVVNV

SEQ ID NO: 2335 - protein, 9 aa, Severe acute respiratory syndrome coronavirus 2
  REGION 1..9: note = Table A: HLA-A*30:01H HLA-A*68:02M HLA-C*15:05H HLA-C*15:02H HLA-A*02:03H HLA-B*51:01H HLA-B*52:01H HLA-B*38:02M HLA-B*07:04H HLA-B*57:03H HLA-B*13:02H
TTRQVVNVV

SEQ ID NO: 2336 - protein, 9 aa, Severe acute respiratory syndrome coronavirus 2
  REGION 1..9: note = Table A: HLA-B*39:06H HLA-B*39:01H
TRQVVNVVT

SEQ ID NO: 2337 - protein, 9 aa, Severe acute respiratory syndrome coronavirus 2
  REGION 1..9: note = Table A: HLA-B*48:01H HLA-A*02:08H HLA-B*15:01H HLA-B*13:02H
RQVVNVVTT

SEQ ID NO: 2338 - protein, 9 aa, Severe acute respiratory syndrome coronavirus 2
  REGION 1..9: note = Table A: HLA-A*11:303H HLA-A*74:01H HLA-A*03:01H HLA-A*03:02H HLA-A*11:01H HLA-A*11:02H HLA-B*57:01H HLA-A*33:03H HLA-A*26:03M HLA-B*27:02M HLA-A*30:02H HLA-A*68:01H HLA-A*68:02M HLA-A*02:05H HLA-A*34:01M
  REGION 1..9: note = CONT. FROM ABOVE: HLA-A*34:02H HLA-C*07:27H HLA-B*35:01H HLA- A*23:01H HLA-B*38:02H HLA-A*66:01M
QVVNVVTTK

SEQ ID NO: 2339 - protein, 9 aa, Severe acute respiratory syndrome coronavirus 2
  REGION 1..9: note = Table A: HLA-B*58:01M HLA-B*58:02H HLA-A*03:01H HLA-B*57:01H HLA-A*02:11M HLA-A*68:02H HLA-C*15:05M HLA-C*15:02H HLA-A*02:05H HLA-A*02:06H HLA-A*02:07H HLA-A*02:08H HLA-A*02:02H HLA-A*02:03H HLA-A*24:02H HLA-B*51:01H
  REGION 1..9: note = CONT. FROM ABOVE: HLA-B*52:01H HLA-C*08:01H HLA-A*23:01H HLA- B*38:02M HLA-B*07:05M HLA-B*57:03M HLA-B*13:02M
VVNVVTTKI

SEQ ID NO: 2340 - protein, 9 aa, Severe acute respiratory syndrome coronavirus 2
  REGION 1..9: note = Table A: HLA-A*11:303H HLA-C*03:04H HLA-A*68:02H HLA-B*35:03M HLA-C*15:05H HLA-B*14:02H HLA-A*02:05H HLA-A*02:06H HLA-A*02:08H HLA-B*14:01H HLA-B*35:01H HLA-B*35:02H HLA-C*08:01M HLA-B*35:12H HLA-B*38:02H
  REGION 1..9: note = CONT. FROM ABOVE: HLA-B*15:02M HLA-B*39:01H HLA-B*07:05H HLA- C*07:04H
NVVTTKIAL

SEQ ID NO: 2341 - protein, 9 aa, Severe acute respiratory syndrome coronavirus 2
  REGION 1..9: note = Table A: HLA-A*11:303M HLA-A*74:01M HLA-A*03:01H HLA-A*03:02M HLA-A*11:01H HLA-A*11:02H HLA-A*36:01H HLA-A*33:03H HLA-A*26:03H HLA-A*30:01M HLA-A*30:02M HLA-A*68:01H HLA-A*68:02H HLA-A*34:01H HLA-A*34:02H
  REGION 1..9: note = CONT. FROM ABOVE: HLA-C*07:27M HLA-A*23:01H HLA-A*31:01H HLA- A*66:01H
VVTTKIALK

SEQ ID NO: 2342 - protein, 9 aa, Severe acute respiratory syndrome coronavirus 2
  REGION 1..9: note = Table A: HLA-B*58:01H HLA-B*57:03H
VTTKIALKG

SEQ ID NO: 2343 - protein, 9 aa, Severe acute respiratory syndrome coronavirus 2
  REGION 1..9: note = Table A: HLA-B*58:01M HLA-B*58:02H HLA-B*57:01H HLA-B*57:03H
KGGKIVNNW

SEQ ID NO: 2344 - protein, 9 aa, Severe acute respiratory syndrome coronavirus 2
  REGION 1..9: note = Table A: HLA-C*15:02H HLA-A*02:04H HLA-A*02:02H HLA-B*07:04H
IVNNWLKQL

SEQ ID NO: 2345 - protein, 9 aa, Severe acute respiratory syndrome coronavirus 2
  REGION 1..9: note = Table A: HLA-C*15:02H
VNNWLKQLI

SEQ ID NO: 2346 - protein, 9 aa, Severe acute respiratory syndrome coronavirus 2
  REGION 1..9: note = Table A: HLA-A*02:11H HLA-A*02:06H HLA-A*02:08H HLA-B*52:01H HLA-B*13:02M
KQLIKVTLV

SEQ ID NO: 2347 - protein, 9 aa, Severe acute respiratory syndrome coronavirus 2
  REGION 1..9: note = Table A: HLA-A*24:07H HLA-B*38:02M HLA-B*15:01H HLA-B*15:02M HLA-B*57:03H
QLIKVTLVF

SEQ ID NO: 2348 - protein, 9 aa, Severe acute respiratory syndrome coronavirus 2
  REGION 1..9: note = Table A: HLA-B*08:01H HLA-A*02:04H
LIKVTLVFL

SEQ ID NO: 2349 - protein, 9 aa, Severe acute respiratory syndrome coronavirus 2
  REGION 1..9: note = Table A: HLA-A*36:01H HLA-A*02:11H HLA-A*68:02H HLA-C*15:02H HLA-A*02:06M HLA-A*02:07H HLA-C*08:01H HLA-B*40:06H HLA-B*13:02M
KVTLVFLFV

SEQ ID NO: 2350 - protein, 9 aa, Severe acute respiratory syndrome coronavirus 2
  REGION 1..9: note = Table A: HLA-B*54:01H
TLVFLFVAA

SEQ ID NO: 2351 - protein, 9 aa, Severe acute respiratory syndrome coronavirus 2
  REGION 1..9: note = Table A: HLA-A*68:02H
LVFLFVAAI

SEQ ID NO: 2352 - protein, 9 aa, Severe acute respiratory syndrome coronavirus 2
  REGION 1..9: note = Table A: HLA-C*14:02H HLA-C*14:03H HLA-A*29:02H HLA-A*24:02H HLA-A*24:07M HLA-A*23:01H
VFLFVAAIF

SEQ ID NO: 2353 - protein, 9 aa, Severe acute respiratory syndrome coronavirus 2
  REGION 1..9: note = Table A: HLA-A*29:02H HLA-B*38:02H HLA-B*15:02H
FLFVAAIFY

SEQ ID NO: 2354 - protein, 9 aa, Severe acute respiratory syndrome coronavirus 2
  REGION 1..9: note = Table A: HLA-A*02:11H HLA-A*68:02M HLA-A*02:02H HLA-C*08:01H HLA-B*38:02H HLA-B*13:02H
FVAAIFYLI

SEQ ID NO: 2355 - protein, 9 aa, Severe acute respiratory syndrome coronavirus 2
  REGION 1..9: note = Table A: HLA-A*02:11H HLA-A*68:02H
AIFYLITPV

SEQ ID NO: 2356 - protein, 9 aa, Severe acute respiratory syndrome coronavirus 2
  REGION 1..9: note = Table A: HLA-C*14:03H
IFYLITPVH

SEQ ID NO: 2357 - protein, 9 aa, Severe acute respiratory syndrome coronavirus 2
  REGION 1..9: note = Table A: HLA-C*14:02H HLA-C*14:03M HLA-A*29:02H HLA-C*04:01H HLA-C*04:03M HLA-A*02:11H HLA-A*24:02H HLA-A*24:07M HLA-C*08:01H HLA-A*23:01H
FYLITPVHV

SEQ ID NO: 2358 - protein, 9 aa, Severe acute respiratory syndrome coronavirus 2
  REGION 1..9: note = Table A: HLA-C*14:02H HLA-C*14:03M HLA-A*11:303M HLA-C*16:01H HLA-B*46:01M HLA-A*26:01H HLA-A*26:03M HLA-B*08:01H HLA-C*03:03M HLA-A*02:11H HLA-C*03:02M HLA-C*03:04M HLA-A*68:02H HLA-B*35:03H HLA-C*12:02M
  REGION 1..9: note = CONT. FROM ABOVE: HLA-C*12:03H HLA-A*02:04M HLA-A*02:05H HLA- A*02:06H HLA-A*02:07H HLA-B*14:01H HLA-A*02:01H HLA-A*02:02H HLA-A*02:03M HLA-A*34:01H HLA-C*07:27H HLA-B*35:01H HLA-C*17 :01H HLA-B*35:07H HLA-C*08:01H HLA-B*38:02M HLA-B*07:04H
  REGION 1..9: note = CONT. FROM ABOVE: HLA-B*15:01M HLA-B*15:02H HLA-C*02:02H HLA- C*07:04H HLA-A*66:01H
YLITPVHVM

SEQ ID NO: 2359 - protein, 9 aa, Severe acute respiratory syndrome coronavirus 2
  REGION 1..9: note = Table A: HLA-A*03:01H HLA-A*11:01H HLA-A*11:02H HLA-A*36:01H HLA-A*34:02M
ITPVHVMSK

SEQ ID NO: 2360 - protein, 9 aa, Severe acute respiratory syndrome coronavirus 2
  REGION 1..9: note = Table A: HLA-A*34:01H HLA-B*38:02H HLA-B*15:02M
HVMSKHTDF

SEQ ID NO: 2361 - protein, 9 aa, Severe acute respiratory syndrome coronavirus 2
  REGION 1..9: note = Table A: HLA-B*38:01H HLA-B*38:02M HLA-B*39:01H HLA-B*15:10H
KHTDFSSEI

SEQ ID NO: 2362 - protein, 9 aa, Severe acute respiratory syndrome coronavirus 2
  REGION 1..9: note = Table A: HLA-C*08:02H
HTDFSSEII

SEQ ID NO: 2363 - protein, 9 aa, Severe acute respiratory syndrome coronavirus 2
  REGION 1..9: note = Table A: HLA-B*38:02H HLA-B*39:01H HLA-B*07:05H
DFSSEIIGY

SEQ ID NO: 2364 - protein, 9 aa, Severe acute respiratory syndrome coronavirus 2
  REGION 1..9: note = Table A: HLA-A*11:01H HLA-A*11:02H HLA-A*36:01H HLA-A*33:03H HLA-A*30:02H HLA-A*68:01H HLA-A*68:02H HLA-A*34:01H HLA-A*34:02H HLA-A*66:01M
FSSEIIGYK

SEQ ID NO: 2365 - protein, 9 aa, Severe acute respiratory syndrome coronavirus 2
  REGION 1..9: note = Table A: HLA-B*44:02M HLA-B*44:05H HLA-B*45:01M HLA-B*44:03H HLA-B*40:01H HLA-B*40:02M HLA-B*40:06H HLA-B*41:02M HLA-B*49:01H HLA-B*50:01M
SEIIGYKAI

SEQ ID NO: 2366 - protein, 9 aa, Severe acute respiratory syndrome coronavirus 2
  REGION 1..9: note = Table A: HLA-B*58:01H HLA-A*11:303H HLA-A*74:01M HLA-A*11:01H HLA-A*11:02H HLA-B*57:01H HLA-A*33:03H HLA-B*46:01H HLA-A*26:03H HLA-C*03:03H HLA-A*30:02H HLA-A*68:01M HLA-C*12:02H HLA-A*34:01M HLA-A*34:02H
  REGION 1..9: note = CONT. FROM ABOVE: HLA-C*07:27H HLA-B*38:02H HLA-A*31:01H HLA- B*57:03H HLA-A*66:01H
KAIDGGVTR

SEQ ID NO: 2367 - protein, 9 aa, Severe acute respiratory syndrome coronavirus 2
  REGION 1..9: note = Table A: HLA-A*02:08H
GVTRDIAST

SEQ ID NO: 2368 - protein, 9 aa, Severe acute respiratory syndrome coronavirus 2
  REGION 1..9: note = Table A: HLA-A*26:01H HLA-A*26:02M HLA-B*35:03H HLA-B*35:01H HLA-B*35:02M HLA-B*35:08H HLA-B*35:12H HLA-B*38:01H HLA-B*38:02M HLA-B*15:02H HLA-B*39:01H HLA-B*07:05H
DIASTDTCF

SEQ ID NO: 2369 - protein, 9 aa, Severe acute respiratory syndrome coronavirus 2
  REGION 1..9: note = Table A: HLA-A*11:303M HLA-A*03:01M HLA-A*03:02H HLA-A*11:01H HLA-A*11:02M HLA-A*36:01H HLA-A*34:02H HLA-C*07:27M
STDTCFANK

SEQ ID NO: 2370 - protein, 9 aa, Severe acute respiratory syndrome coronavirus 2
  REGION 1..9: note = Table A: HLA-B*38:02H
NKHADFDTW

SEQ ID NO: 2371 - protein, 9 aa, Severe acute respiratory syndrome coronavirus 2
  REGION 1..9: note = Table A: HLA-B*38:01H HLA-B*38:02M HLA-B*15:03H
KHADFDTWF

SEQ ID NO: 2372 - protein, 9 aa, Severe acute respiratory syndrome coronavirus 2
  REGION 1..9: note = Table A: HLA-A*36:01H HLA-A*33:01H HLA-A*33:03H HLA-A*34:02H HLA-A*66:01H
DFDTWFSQR

SEQ ID NO: 2373 - protein, 9 aa, Severe acute respiratory syndrome coronavirus 2
  REGION 1..9: note = Table A: HLA-C*03:03H HLA-C*03:04M HLA-A*68:02H HLA-A*02:02H
YTNDKACPL

SEQ ID NO: 2374 - protein, 9 aa, Severe acute respiratory syndrome coronavirus 2
  REGION 1..9: note = Table A: HLA-B*39:06H
DKACPLIAA

SEQ ID NO: 2375 - protein, 9 aa, Severe acute respiratory syndrome coronavirus 2
  REGION 1..9: note = Table A: HLA-A*02:11M HLA-B*55:02H HLA-A*68:02H HLA-C*15:05H HLA-A*02:06H HLA-B*13:02H
KACPLIAAV

SEQ ID NO: 2376 - protein, 9 aa, Severe acute respiratory syndrome coronavirus 2
  REGION 1..9: note = Table A: HLA-A*74:01H HLA-A*26:03H HLA-A*68:01H HLA-A*34:01H HLA-A*66:01H
PLIAAVITR

SEQ ID NO: 2377 - protein, 9 aa, Severe acute respiratory syndrome coronavirus 2
  REGION 1..9: note = Table A: HLA-B*58:02H HLA-A*11:303H HLA-C*16:01M HLA-C*16:04H HLA-B*46:01H HLA-C*06:02H HLA-C*12:05M HLA-A*02:11M HLA-C*03:02H HLA-C*03:04H HLA-A*68:02H HLA-C*15:05H HLA-C*12:03M HLA-C*15:02H HLA-A*02:05H
  REGION 1..9: note = CONT. FROM ABOVE: HLA-A*02:06H HLA-A*02:02H HLA-A*02:03H HLA- B*51:01M HLA-C*08:01H HLA-B*38:02H HLA-B*07:04H HLA-C*02:02H
IAAVITREV

SEQ ID NO: 2378 - protein, 9 aa, Severe acute respiratory syndrome coronavirus 2
  REGION 1..9: note = Table A: HLA-B*58:01H HLA-A*25:01H HLA-A*26:01H HLA-A*26:02H HLA-B*38:02H HLA-B*15:01M HLA-B*15:02H HLA-B*57:03M HLA-B*13:01H HLA-C*07:04H
AVITREVGF

SEQ ID NO: 2379 - protein, 9 aa, Severe acute respiratory syndrome coronavirus 2
  REGION 1..9: note = Table A: HLA-A*30:01H HLA-A*68:02H HLA-C*15:02H HLA-B*57:03H
ITREVGFVV

SEQ ID NO: 2380 - protein, 9 aa, Severe acute respiratory syndrome coronavirus 2
  REGION 1..9: note = Table A: HLA-A*25:01H HLA-A*26:01H HLA-A*26:02M HLA-A*26:03M HLA-A*68:01H HLA-A*68:02M HLA-A*34:01M
EVGFVVPGL

SEQ ID NO: 2381 - protein, 9 aa, Severe acute respiratory syndrome coronavirus 2
  REGION 1..9: note = Table A: HLA-A*02:05H HLA-A*02:06M
FVVPGLPGT

SEQ ID NO: 2382 - protein, 9 aa, Severe acute respiratory syndrome coronavirus 2
  REGION 1..9: note = Table A: HLA-B*42:01H HLA-B*35:03H HLA-C*15:05H HLA-B*07:02M HLA-B*07:04M HLA-B*07:05H
VPGLPGTIL

SEQ ID NO: 2383 - protein, 9 aa, Severe acute respiratory syndrome coronavirus 2
  REGION 1..9: note = Table A: HLA-B*13:02H
GLPGTILRT

SEQ ID NO: 2384 - protein, 9 aa, Severe acute respiratory syndrome coronavirus 2
  REGION 1..9: note = Table A: HLA-B*39:01H
LRTTNGDFL

SEQ ID NO: 2385 - protein, 9 aa, Severe acute respiratory syndrome coronavirus 2
  REGION 1..9: note = Table A: HLA-B*58:01M HLA-B*57:01H HLA-A*25:01H HLA-A*33:03H HLA-A*29:02H HLA-B*53:01H HLA-C*15:05H HLA-C*15:02H HLA-A*34:02M HLA-A*24:07H HLA-B*57:03M HLA-A*66:01H
TTNGDFLHF

SEQ ID NO: 2386 - protein, 9 aa, Severe acute respiratory syndrome coronavirus 2
  REGION 1..9: note = Table A: HLA-C*16:01H HLA-A*02:11H HLA-C*03:02H HLA-A*24:07H HLA-B*38:02H
FLHFLPRVF

SEQ ID NO: 2387 - protein, 9 aa, Severe acute respiratory syndrome coronavirus 2
  REGION 1..9: note = Table A: HLA-C*14:02H HLA-C*14:03M HLA-B*08:01H HLA-A*02:11H HLA-B*39:06H HLA-B*40:06H HLA-B*54:01H
HFLPRVFSA

SEQ ID NO: 2388 - protein, 9 aa, Severe acute respiratory syndrome coronavirus 2
  REGION 1..9: note = Table A: HLA-A*02:11M HLA-A*68:02H HLA-C*01:02H HLA-A*02:04H HLA-A*02:06H HLA-A*02:07M HLA-A*02:01H HLA-A*02:02H HLA-A*02:03H HLA-B*38:02H HLA-B*13:02H
FLPRVFSAV

SEQ ID NO: 2389 - protein, 9 aa, Severe acute respiratory syndrome coronavirus 2
  REGION 1..9: note = Table A: HLA-A*02:11H HLA-A*02:08H
RVFSAVGNI

SEQ ID NO: 2390 - protein, 9 aa, Severe acute respiratory syndrome coronavirus 2
  REGION 1..9: note = Table A: HLA-A*01:01H HLA-B*38:02H HLA-B*15:01H HLA-B*15:02H
FSAVGNICY

SEQ ID NO: 2391 - protein, 9 aa, Severe acute respiratory syndrome coronavirus 2
  REGION 1..9: note = Table A: HLA-A*68:02H
SAVGNICYT

SEQ ID NO: 2392 - protein, 9 aa, Severe acute respiratory syndrome coronavirus 2
  REGION 1..9: note = Table A: HLA-C*14:02H HLA-C*14:03M HLA-C*16:01H HLA-A*36:01H HLA-B*46:01M HLA-C*06:02H HLA-A*26:01H HLA-A*29:02H HLA-C*03:02M HLA-C*12:02H HLA-C*12:03H HLA-A*34:02H HLA-C*02:02H
YTPSKLIEY

SEQ ID NO: 2393 - protein, 9 aa, Severe acute respiratory syndrome coronavirus 2
  REGION 1..9: note = Table A: HLA-B*15:03M
SKLIEYTDF

SEQ ID NO: 2394 - protein, 9 aa, Severe acute respiratory syndrome coronavirus 2
  REGION 1..9: note = Table A: HLA-A*02:11M HLA-A*02:05M HLA-A*02:08H HLA-A*02:01H HLA-A*02:02M HLA-A*02:03H HLA-B*38:02H
KLIEYTDFA

SEQ ID NO: 2395 - protein, 9 aa, Severe acute respiratory syndrome coronavirus 2
  REGION 1..9: note = Table A: HLA-B*49:01M HLA-B*50:01H
IEYTDFATS

SEQ ID NO: 2396 - protein, 9 aa, Severe acute respiratory syndrome coronavirus 2
  REGION 1..9: note = Table A: HLA-B*38:02H
TDFATSACV

SEQ ID NO: 2397 - protein, 9 aa, Severe acute respiratory syndrome coronavirus 2
  REGION 1..9: note = Table A: HLA-C*15:05H
ATSACVLAA

SEQ ID NO: 2398 - protein, 9 aa, Severe acute respiratory syndrome coronavirus 2
  REGION 1..9: note = Table A: HLA-B*15:01H
VLAAECTIF

SEQ ID NO: 2399 - protein, 9 aa, Severe acute respiratory syndrome coronavirus 2
  REGION 1..9: note = Table A: HLA-A*11:01H HLA-A*11:02H HLA-A*34:02M
LAAECTIFK

SEQ ID NO: 2400 - protein, 9 aa, Severe acute respiratory syndrome coronavirus 2
  REGION 1..9: note = Table A: HLA-B*45:01H HLA-B*40:06M HLA-B*50:01H
AECTIFKDA

SEQ ID NO: 2401 - protein, 9 aa, Severe acute respiratory syndrome coronavirus 2
  REGION 1..9: note = Table A: HLA-A*03:02H HLA-A*34:02H
TIFKDASGK

SEQ ID NO: 2402 - protein, 9 aa, Severe acute respiratory syndrome coronavirus 2
  REGION 1..9: note = Table A: HLA-A*68:01H HLA-A*34:01H HLA-B*35:01M HLA-B*35:02H HLA-B*35:08H HLA-B*35:07H HLA-B*38:02H HLA-A*66:01H
DASGKPVPY

SEQ ID NO: 2403 - protein, 9 aa, Severe acute respiratory syndrome coronavirus 2
  REGION 1..9: note = Table A: HLA-A*30:02M
SGKPVPYCY

SEQ ID NO: 2404 - protein, 9 aa, Severe acute respiratory syndrome coronavirus 2
  REGION 1..9: note = Table A: HLA-B*51:01H
VPYCYDTNV

SEQ ID NO: 2405 - protein, 9 aa, Severe acute respiratory syndrome coronavirus 2
  REGION 1..9: note = Table A: HLA-C*14:03H HLA-A*11:303M HLA-A*25:01H HLA-B*46:01M HLA-A*26:01H HLA-A*26:02H HLA-A*26:03H HLA-A*29:01M HLA-A*29:02H HLA-B*18:01H HLA-C*03:02H HLA-A*34:01H HLA-A*34:02H HLA-B*35:01H HLA-B*35:08H
  REGION 1..9: note = CONT. FROM ABOVE: HLA-B*35:07H HLA-B*15:13H HLA-B*38:02H HLA- B*15:01M HLA-B*15:02H HLA-B*15:03H HLA-B*39:01M HLA-B*07:05H HLA-B*15:11H
NVLEGSVAY

SEQ ID NO: 2406 - protein, 9 aa, Severe acute respiratory syndrome coronavirus 2
  REGION 1..9: note = Table A: HLA-B*35:03H HLA-B*38:02H HLA-B*39:01H
EGSVAYESL

SEQ ID NO: 2407 - protein, 9 aa, Severe acute respiratory syndrome coronavirus 2
  REGION 1..9: note = Table A: HLA-A*34:02H
ESLRPDTRY

SEQ ID NO: 2408 - protein, 9 aa, Severe acute respiratory syndrome coronavirus 2
  REGION 1..9: note = Table A: HLA-A*02:02H HLA-A*02:03M HLA-B*38:02M HLA-B*07:04H
SLRPDTRYV

SEQ ID NO: 2409 - protein, 9 aa, Severe acute respiratory syndrome coronavirus 2
  REGION 1..9: note = Table A: HLA-C*06:02H HLA-C*07:01M HLA-C*07:02M HLA-B*14:02H
LRPDTRYVL

SEQ ID NO: 2410 - protein, 9 aa, Severe acute respiratory syndrome coronavirus 2
  REGION 1..9: note = Table A: HLA-B*42:01H HLA-C*04:01H HLA-C*04:03H HLA-B*53:01H HLA-B*35:03H HLA-C*15:05M HLA-B*35:02H HLA-B*35:07H HLA-B*35:12M HLA-B*07:02M HLA-B*07:04M HLA-B*07:05H
RPDTRYVLM

SEQ ID NO: 2411 - protein, 9 aa, Severe acute respiratory syndrome coronavirus 2
  REGION 1..9: note = Table A: HLA-C*04:01H HLA-C*04:03M HLA-A*02:07M HLA-B*38:02H HLA-B*13:01H
LMDGSIIQF

SEQ ID NO: 2412 - protein, 9 aa, Severe acute respiratory syndrome coronavirus 2
  REGION 1..9: note = Table A: HLA-C*16:04H HLA-B*46:01H HLA-A*29:02H HLA-C*03:02H HLA-A*30:02M HLA-C*12:02H HLA-B*35:01H HLA-B*38:02M HLA-B*15:01M HLA-B*15:02M HLA-B*15:03H HLA-B*07:05M HLA-C*02:02H
SIIQFPNTY

SEQ ID NO: 2413 - protein, 9 aa, Severe acute respiratory syndrome coronavirus 2
  REGION 1..9: note = Table A: HLA-A*11:303H HLA-C*04:03H HLA-C*03:03H HLA-C*03:04H HLA-C*08:01H HLA-C*08:02H
IIQFPNTYL

SEQ ID NO: 2414 - protein, 9 aa, Severe acute respiratory syndrome coronavirus 2
  REGION 1..9: note = Table A: HLA-A*33:03H HLA-A*68:01M HLA-A*34:01M HLA-A*34:02M HLA-A*66:01M
NTYLEGSVR

SEQ ID NO: 2415 - protein, 9 aa, Severe acute respiratory syndrome coronavirus 2
  REGION 1..9: note = Table A: HLA-C*14:03H HLA-A*33:03H HLA-A*24:02M HLA-A*24:07H HLA-C*08:01H HLA-A*23:01M HLA-B*39:01H
TYLEGSVRV

SEQ ID NO: 2416 - protein, 9 aa, Severe acute respiratory syndrome coronavirus 2
  REGION 1..9: note = Table A: HLA-A*11:303H HLA-A*02:11M HLA-C*03:02H HLA-C*03:04H HLA-C*15:02H HLA-A*02:04M HLA-A*02:05H HLA-A*02:06H HLA-A*02:07H HLA-B*14:01H HLA-A*02:01H HLA-A*02:02M HLA-A*02:03M HLA-B*38:02M HLA-B*15:02H
  REGION 1..9: note = CONT. FROM ABOVE: HLA-B*15:10H HLA-B*49:01H
YLEGSVRVV

SEQ ID NO: 2417 - protein, 9 aa, Severe acute respiratory syndrome coronavirus 2
  REGION 1..9: note = Table A: HLA-B*41:02H
LEGSVRVVT

SEQ ID NO: 2418 - protein, 9 aa, Severe acute respiratory syndrome coronavirus 2
  REGION 1..9: note = Table A: HLA-B*58:01H HLA-B*58:02M HLA-B*57:01M HLA-C*15:05H HLA-C*12:02H HLA-B*15:01H HLA-B*15:03H HLA-B*07:05H HLA-B*57:03H
GSVRVVTTF

SEQ ID NO: 2419 - protein, 9 aa, Severe acute respiratory syndrome coronavirus 2
  REGION 1..9: note = Table A: HLA-B*46:01H HLA-A*29:01H HLA-A*29:02H HLA-B*27:02H HLA-A*30:02H HLA-B*35:01H HLA-B*38:02H HLA-B*15:01H HLA-B*15:02H HLA-B*07:05H
VVTTFDSEY

SEQ ID NO: 2420 - protein, 9 aa, Severe acute respiratory syndrome coronavirus 2
  REGION 1..9: note = Table A: HLA-A*74:01H HLA-A*11:01H HLA-A*11:02H HLA-A*33:03H HLA-A*68:01M HLA-A*68:02H HLA-A*34:01H HLA-A*34:02H HLA-A*66:01H
TTFDSEYCR

SEQ ID NO: 2421 - protein, 9 aa, Severe acute respiratory syndrome coronavirus 2
  REGION 1..9: note = Table A: HLA-B*38:02H HLA-B*39:01M
ERSEAGVCV

SEQ ID NO: 2422 - protein, 9 aa, Severe acute respiratory syndrome coronavirus 2
  REGION 1..9: note = Table A: HLA-B*45:01H HLA-B*40:02H HLA-B*41:02H
SEAGVCVST

SEQ ID NO: 2423 - protein, 9 aa, Severe acute respiratory syndrome coronavirus 2
  REGION 1..9: note = Table A: HLA-B*58:02H HLA-C*16:01M HLA-C*15:02H HLA-B*57:03H
VSTSGRWVL

SEQ ID NO: 2424 - protein, 9 aa, Severe acute respiratory syndrome coronavirus 2
  REGION 1..9: note = Table A: HLA-B*27:05H HLA-B*27:02M
GRWVLNNDY

SEQ ID NO: 2425 - protein, 9 aa, Severe acute respiratory syndrome coronavirus 2
  REGION 1..9: note = Table A: HLA-A*34:01H HLA-A*66:01H
WVLNNDYYR

SEQ ID NO: 2426 - protein, 9 aa, Severe acute respiratory syndrome coronavirus 2
  REGION 1..9: note = Table A: HLA-C*14:02H HLA-C*14:03H HLA-C*07:02H HLA-A*24:07M
YYRSLPGVF

SEQ ID NO: 2427 - protein, 9 aa, Severe acute respiratory syndrome coronavirus 2
  REGION 1..9: note = Table A: HLA-A*02:11M HLA-A*68:02H HLA-A*02:04H HLA-A*02:05H HLA-A*02:06M HLA-A*02:07H HLA-A*02:01H HLA-A*02:02H HLA-A*02:03H HLA-B*38:02H HLA-B*13:02H
SLPGVFCGV

SEQ ID NO: 2428 - protein, 9 aa, Severe acute respiratory syndrome coronavirus 2
  REGION 1..9: note = Table A: HLA-A*02:11H HLA-A*68:02H HLA-A*02:05H HLA-A*02:06H HLA-A*02:08H HLA-B*38:02H
GVFCGVDAV

SEQ ID NO: 2429 - protein, 9 aa, Severe acute respiratory syndrome coronavirus 2
  REGION 1..9: note = Table A: HLA-B*13:02H
GVDAVNLLT

SEQ ID NO: 2430 - protein, 9 aa, Severe acute respiratory syndrome coronavirus 2
  REGION 1..9: note = Table A: HLA-A*26:02M HLA-A*26:03H HLA-A*68:02H HLA-B*35:03H HLA-C*15:05H HLA-A*34:01H HLA-B*35:01M HLA-B*35:02H HLA-B*51:01H HLA-B*35:07H HLA-B*38:02H HLA-A*66:01H
DAVNLLTNM

SEQ ID NO: 2431 - protein, 9 aa, Severe acute respiratory syndrome coronavirus 2
  REGION 1..9: note = Table A: HLA-C*15:05H HLA-B*15:01H HLA-B*07:05H
AVNLLTNMF

SEQ ID NO: 2432 - protein, 9 aa, Severe acute respiratory syndrome coronavirus 2
  REGION 1..9: note = Table A: HLA-A*02:04H HLA-B*57:03H
LTNMFTPLI

SEQ ID NO: 2433 - protein, 9 aa, Severe acute respiratory syndrome coronavirus 2
  REGION 1..9: note = Table A: HLA-A*68:02H
MFTPLIQPI

SEQ ID NO: 2434 - protein, 9 aa, Severe acute respiratory syndrome coronavirus 2
  REGION 1..9: note = Table A: HLA-B*56:01H HLA-B*55:02H HLA-C*15:05H HLA-B*55:01M HLA-B*39:06M HLA-B*54:01H HLA-B*07:05H
TPLIQPIGA

SEQ ID NO: 2435 - protein, 9 aa, Severe acute respiratory syndrome coronavirus 2
  REGION 1..9: note = Table A: HLA-B*13:02H
IQPIGALDI

SEQ ID NO: 2436 - protein, 9 aa, Severe acute respiratory syndrome coronavirus 2
  REGION 1..9: note = Table A: HLA-A*11:303H HLA-C*15:05H HLA-B*38:02H HLA-B*13:02H
GALDISASI

SEQ ID NO: 2437 - protein, 9 aa, Severe acute respiratory syndrome coronavirus 2
  REGION 1..9: note = Table A: HLA-B*50:01H
LDISASIVA

SEQ ID NO: 2438 - protein, 9 aa, Severe acute respiratory syndrome coronavirus 2
  REGION 1..9: note = Table A: HLA-C*15:05H
ASIVAGGIV

SEQ ID NO: 2439 - protein, 9 aa, Severe acute respiratory syndrome coronavirus 2
  REGION 1..9: note = Table A: HLA-A*25:01H HLA-A*02:11H HLA-A*68:02M HLA-C*15:05M HLA-A*02:04H HLA-A*02:05M HLA-A*02:06M HLA-A*02:08H HLA-B*14:01H HLA-A*02:01H HLA-A*02:02H HLA-A*02:03M HLA-C*08:01H HLA-B*38:02M HLA-B*15:01H HLA-B*07:05H
  REGION 1..9: note = CONT. FROM ABOVE: HLA-B*57:03H HLA-B*13:02H
IVAGGIVAI

SEQ ID NO: 2440 - protein, 9 aa, Severe acute respiratory syndrome coronavirus 2
  REGION 1..9: note = Table A: HLA-C*12:05H HLA-A*68:02H HLA-C*15:05H HLA-C*12:03H
VAGGIVAIV

SEQ ID NO: 2441 - protein, 9 aa, Severe acute respiratory syndrome coronavirus 2
  REGION 1..9: note = Table A: HLA-A*02:05H HLA-A*02:08H HLA-A*02:01H HLA-A*02:03H HLA-B*40:06H
GIVAIVVTC

SEQ ID NO: 2442 - protein, 9 aa, Severe acute respiratory syndrome coronavirus 2
  REGION 1..9: note = Table A: HLA-A*68:02H HLA-C*15:05H HLA-A*02:05M HLA-A*02:06H HLA-A*02:08M HLA-A*02:02H HLA-A*02:03H HLA-B*38:02H HLA-B*07:05H
IVAIVVTCL

SEQ ID NO: 2443 - protein, 9 aa, Severe acute respiratory syndrome coronavirus 2
  REGION 1..9: note = Table A: HLA-B*15:02H
AIVVTCLAY

SEQ ID NO: 2444 - protein, 9 aa, Severe acute respiratory syndrome coronavirus 2
  REGION 1..9: note = Table A: HLA-A*74:01H HLA-A*66:01H
LAYYFMRFR

SEQ ID NO: 2445 - protein, 9 aa, Severe acute respiratory syndrome coronavirus 2
  REGION 1..9: note = Table A: HLA-C*14:02H HLA-A*24:07H
YFMRFRRAF

SEQ ID NO: 2446 - protein, 9 aa, Severe acute respiratory syndrome coronavirus 2
  REGION 1..9: note = Table A: HLA-A*30:02H
RFRRAFGEY

SEQ ID NO: 2447 - protein, 9 aa, Severe acute respiratory syndrome coronavirus 2
  REGION 1..9: note = Table A: HLA-C*16:04M HLA-C*06:02H HLA-C*12:05H HLA-A*02:11M HLA-A*68:02H HLA-C*15:05H HLA-C*12:03M HLA-C*15:02M HLA-A*02:05M HLA-A*02:06H HLA-A*02:08H HLA-A*02:02H HLA-A*02:03H HLA-C*17:01H HLA-C*08:01M HLA-B*38:02H
  REGION 1..9: note = CONT. FROM ABOVE: HLA-B*57:03H HLA-C*02:02H HLA-B*13:02M HLA- B*49:01H
RAFGEYSHV

SEQ ID NO: 2448 - protein, 9 aa, Severe acute respiratory syndrome coronavirus 2
  REGION 1..9: note = Table A: HLA-C*14:03H HLA-A*02:02H
AFGEYSHVV

SEQ ID NO: 2449 - protein, 9 aa, Severe acute respiratory syndrome coronavirus 2
  REGION 1..9: note = Table A: HLA-B*48:01H HLA-B*44:02M HLA-B*44:05H HLA-C*16:04M HLA-B*46:01H HLA-B*45:01M HLA-B*44:03H HLA-B*18:01H HLA-B*27:05H HLA-C*07:01H HLA-B*27:02H HLA-C*15:05H HLA-B*14:02H HLA-B*37:01H HLA-B*38:02H HLA-B*40:01H
  REGION 1..9: note = CONT. FROM ABOVE: HLA-B*40:02H HLA-B*40:06M HLA-B*15:01M HLA- B*15:02H HLA-B*15:03M HLA-B*07:05H HLA-B*41:02H HLA-B*49:01H HLA-C*07:04M HLA-B*50:01H
GEYSHVVAF

SEQ ID NO: 2450 - protein, 9 aa, Severe acute respiratory syndrome coronavirus 2
  REGION 1..9: note = Table A: HLA-B*48:01H HLA-B*38:01H HLA-B*38:02H HLA-B*39:01H HLA-B*15:10H
SHVVAFNTL

SEQ ID NO: 2451 - protein, 9 aa, Severe acute respiratory syndrome coronavirus 2
  REGION 1..9: note = Table A: HLA-A*68:02M HLA-C*15:05H HLA-C*15:02H HLA-A*02:05H HLA-A*02:06H HLA-A*02:08H HLA-A*02:02H HLA-C*17:01H HLA-C*08:01H HLA-B*38:02M HLA-B*57:03H
HVVAFNTLL

SEQ ID NO: 2452 - protein, 9 aa, Severe acute respiratory syndrome coronavirus 2
  REGION 1..9: note = Table A: HLA-C*03:03H HLA-C*12:05M HLA-C*03:02H HLA-C*03:04H HLA-A*68:02H HLA-C*12:03H HLA-C*15:02H HLA-A*02:04H HLA-C*17:01M HLA-C*08:01H HLA-B*38:02H
VAFNTLLFL

SEQ ID NO: 2453 - protein, 9 aa, Severe acute respiratory syndrome coronavirus 2
  REGION 1..9: note = Table A: HLA-A*02:11H
LLFLMSFTV

SEQ ID NO: 2454 - protein, 9 aa, Severe acute respiratory syndrome coronavirus 2
  REGION 1..9: note = Table A: HLA-C*14:03H
LFLMSFTVL

SEQ ID NO: 2455 - protein, 9 aa, Severe acute respiratory syndrome coronavirus 2
  REGION 1..9: note = Table A: HLA-A*29:01H HLA-B*35:01M HLA-B*35:07H HLA-B*38:02H HLA-B*15:02H HLA-B*07:05H
TVLCLTPVY

SEQ ID NO: 2456 - protein, 9 aa, Severe acute respiratory syndrome coronavirus 2
  REGION 1..9: note = Table A: HLA-A*02:04H HLA-A*02:01H HLA-A*02:02H HLA-A*02:03H HLA-B*38:02H
CLTPVYSFL

SEQ ID NO: 2457 - protein, 9 aa, Severe acute respiratory syndrome coronavirus 2
  REGION 1..9: note = Table A: HLA-A*29:02H HLA-A*30:02H
VYSFLPGVY

SEQ ID NO: 2458 - protein, 9 aa, Severe acute respiratory syndrome coronavirus 2
  REGION 1..9: note = Table A: HLA-C*14:02H HLA-C*14:03M HLA-A*02:11H HLA-A*02:04H HLA-A*02:01H HLA-B*38:02H
SFLPGVYSV

SEQ ID NO: 2459 - protein, 9 aa, Severe acute respiratory syndrome coronavirus 2
  REGION 1..9: note = Table A: HLA-A*02:11H HLA-A*02:07H HLA-A*02:02H HLA-B*38:02H
FLPGVYSVI

SEQ ID NO: 2460 - protein, 9 aa, Severe acute respiratory syndrome coronavirus 2
  REGION 1..9: note = Table A: HLA-B*35:01H HLA-B*35:07H
LPGVYSVIY

SEQ ID NO: 2461 - protein, 9 aa, Severe acute respiratory syndrome coronavirus 2
  REGION 1..9: note = Table A: HLA-A*29:01H HLA-A*29:02M HLA-A*30:02H
GVYSVIYLY

SEQ ID NO: 2462 - protein, 9 aa, Severe acute respiratory syndrome coronavirus 2
  REGION 1..9: note = Table A: HLA-A*24:02M HLA-A*24:07M HLA-C*08:01H HLA-A*23:01H
VYSVIYLYL

SEQ ID NO: 2463 - protein, 9 aa, Severe acute respiratory syndrome coronavirus 2
  REGION 1..9: note = Table A: HLA-A*25:01H HLA-A*26:01H HLA-A*29:02H
SVIYLYLTF

SEQ ID NO: 2464 - protein, 9 aa, Severe acute respiratory syndrome coronavirus 2
  REGION 1..9: note = Table A: HLA-A*24:02H HLA-A*24:07M HLA-A*23:01H
IYLYLTFYL

SEQ ID NO: 2465 - protein, 9 aa, Severe acute respiratory syndrome coronavirus 2
  REGION 1..9: note = Table A: HLA-A*68:02H
LTFYLTNDV

SEQ ID NO: 2466 - protein, 9 aa, Severe acute respiratory syndrome coronavirus 2
  REGION 1..9: note = Table A: HLA-C*14:02M HLA-C*14:03H HLA-A*29:02H HLA-C*07:02H HLA-A*24:02M HLA-A*24:07M HLA-C*08:01H HLA-A*23:01M
FYLTNDVSF

SEQ ID NO: 2467 - protein, 9 aa, Severe acute respiratory syndrome coronavirus 2
  REGION 1..9: note = Table A: HLA-A*11:303H HLA-A*02:11H HLA-A*02:04H HLA-A*02:05M HLA-A*02:06H HLA-A*02:07H HLA-A*02:01M HLA-A*02:02H HLA-A*02:03M HLA-C*17:01M HLA-C*08:01H HLA-B*38:02M
YLTNDVSFL

SEQ ID NO: 2468 - protein, 9 aa, Severe acute respiratory syndrome coronavirus 2
  REGION 1..9: note = Table A: HLA-A*68:02H
LTNDVSFLA

SEQ ID NO: 2469 - protein, 9 aa, Severe acute respiratory syndrome coronavirus 2
  REGION 1..9: note = Table A: HLA-A*68:02H
NDVSFLAHI

SEQ ID NO: 2470 - protein, 9 aa, Severe acute respiratory syndrome coronavirus 2
  REGION 1..9: note = Table A: HLA-B*58:01M HLA-B*58:02M HLA-B*57:01M HLA-B*57:03H
VSFLAHIQW

SEQ ID NO: 2471 - protein, 9 aa, Severe acute respiratory syndrome coronavirus 2
  REGION 1..9: note = Table A: HLA-C*14:02H HLA-C*14:03M
SFLAHIQWM

SEQ ID NO: 2472 - protein, 9 aa, Severe acute respiratory syndrome coronavirus 2
  REGION 1..9: note = Table A: HLA-A*02:11H HLA-A*68:02M HLA-A*02:04M HLA-A*02:07H HLA-A*02:01H HLA-A*02:02H HLA-A*02:03H HLA-B*38:02H HLA-B*13:02H
FLAHIQWMV

SEQ ID NO: 2473 - protein, 9 aa, Severe acute respiratory syndrome coronavirus 2
  REGION 1..9: note = Table A: HLA-B*38:01H HLA-B*38:02M HLA-B*15:03H HLA-B*15:10H
AHIQWMVMF

SEQ ID NO: 2474 - protein, 9 aa, Severe acute respiratory syndrome coronavirus 2
  REGION 1..9: note = Table A: HLA-B*46:01H
VMFTPLVPF

SEQ ID NO: 2475 - protein, 9 aa, Severe acute respiratory syndrome coronavirus 2
  REGION 1..9: note = Table A: HLA-A*24:02H HLA-A*24:07M HLA-A*23:01H
MFTPLVPFW

SEQ ID NO: 2476 - protein, 9 aa, Severe acute respiratory syndrome coronavirus 2
  REGION 1..9: note = Table A: HLA-C*04:03M HLA-A*68:02H
FTPLVPFWI

SEQ ID NO: 2477 - protein, 9 aa, Severe acute respiratory syndrome coronavirus 2
  REGION 1..9: note = Table A: HLA-A*29:02H HLA-B*55:02H HLA-B*35:01M HLA-B*35:07H HLA-B*38:02H HLA-B*15:02H HLA-B*15:11M
VPFWITIAY

SEQ ID NO: 2478 - protein, 9 aa, Severe acute respiratory syndrome coronavirus 2
  REGION 1..9: note = Table A: HLA-B*58:02H HLA-A*68:02H HLA-C*15:05H HLA-C*15:02H HLA-B*57:03H HLA-B*13:02H
ITIAYIICI

SEQ ID NO: 2479 - protein, 9 aa, Severe acute respiratory syndrome coronavirus 2
  REGION 1..9: note = Table A: HLA-B*58:01H HLA-B*58:02M HLA-B*57:03M
ISTKHFYWF

SEQ ID NO: 2480 - protein, 9 aa, Severe acute respiratory syndrome coronavirus 2
  REGION 1..9: note = Table A: HLA-B*58:02H HLA-B*57:01H HLA-A*24:07H HLA-B*57:03M
STKHFYWFF

SEQ ID NO: 2481 - protein, 9 aa, Severe acute respiratory syndrome coronavirus 2
  REGION 1..9: note = Table A: HLA-C*14:02H HLA-C*14:03M HLA-A*29:02M HLA-A*30:02H
HFYWFFSNY

SEQ ID NO: 2482 - protein, 9 aa, Severe acute respiratory syndrome coronavirus 2
  REGION 1..9: note = Table A: HLA-C*14:02H HLA-C*14:03M HLA-C*06:02H HLA-A*29:02H HLA-A*24:07H HLA-C*08:01H
FYWFFSNYL

SEQ ID NO: 2483 - protein, 9 aa, Severe acute respiratory syndrome coronavirus 2
  REGION 1..9: note = Table A: HLA-A*24:07M HLA-A*23:01H
NYLKRRVVF

SEQ ID NO: 2484 - protein, 9 aa, Severe acute respiratory syndrome coronavirus 2
  REGION 1..9: note = Table A: HLA-B*58:01M HLA-A*11:303H HLA-B*57:01H HLA-B*46:01H HLA-C*15:05M HLA-A*24:07H HLA-C*08:01H HLA-B*38:02H HLA-A*32:01H HLA-B*07:04H HLA-B*15:01M HLA-B*15:02H HLA-B*15:03M HLA-B*07:05H HLA-B*57:03H
  REGION 1..9: note = CONT. FROM ABOVE: HLA-B*13:01H
RVVFNGVSF

SEQ ID NO: 2485 - protein, 9 aa, Severe acute respiratory syndrome coronavirus 2
  REGION 1..9: note = Table A: HLA-A*29:01H HLA-A*29:02H
VFNGVSFST

SEQ ID NO: 2486 - protein, 9 aa, Severe acute respiratory syndrome coronavirus 2
  REGION 1..9: note = Table A: HLA-C*16:04H HLA-A*68:02H HLA-A*02:05H HLA-C*08:01H HLA-B*54:01H
VSFSTFEEA

SEQ ID NO: 2487 - protein, 9 aa, Severe acute respiratory syndrome coronavirus 2
  REGION 1..9: note = Table A: HLA-A*11:303H HLA-C*03:03H HLA-C*03:04H HLA-B*35:03H HLA-B*35:02H HLA-B*35:12H
FSTFEEAAL

SEQ ID NO: 2488 - protein, 9 aa, Severe acute respiratory syndrome coronavirus 2
  REGION 1..9: note = Table A: HLA-A*68:02M HLA-A*02:05H HLA-A*02:08H
STFEEAALC

SEQ ID NO: 2489 - protein, 9 aa, Severe acute respiratory syndrome coronavirus 2
  REGION 1..9: note = Table A: HLA-B*44:05H HLA-B*18:01H HLA-B*40:01H
FEEAALCTF

SEQ ID NO: 2490 - protein, 9 aa, Severe acute respiratory syndrome coronavirus 2
  REGION 1..9: note = Table A: HLA-B*44:05H
EEAALCTFL

SEQ ID NO: 2491 - protein, 9 aa, Severe acute respiratory syndrome coronavirus 2
  REGION 1..9: note = Table A: HLA-A*68:02H
EAALCTFLL

SEQ ID NO: 2492 - protein, 9 aa, Severe acute respiratory syndrome coronavirus 2
  REGION 1..9: note = Table A: HLA-A*03:01H HLA-A*11:01H HLA-A*11:02H
ALCTFLLNK

SEQ ID NO: 2493 - protein, 9 aa, Severe acute respiratory syndrome coronavirus 2
  REGION 1..9: note = Table A: HLA-C*14:03H HLA-A*29:02H HLA-B*15:02M
TFLLNKEMY

SEQ ID NO: 2494 - protein, 9 aa, Severe acute respiratory syndrome coronavirus 2
  REGION 1..9: note = Table A: HLA-A*11:303H HLA-B*08:01H HLA-A*02:11H HLA-C*03:04H HLA-A*02:04H HLA-A*02:06H HLA-A*02:07M HLA-A*02:01H HLA-A*02:02H HLA-A*02:03H HLA-C*17:01M HLA-C*08:01H HLA-B*38:02M HLA-B*13:01H
FLLNKEMYL

SEQ ID NO: 2495 - protein, 9 aa, Severe acute respiratory syndrome coronavirus 2
  REGION 1..9: note = Table A: HLA-A*74:01H HLA-A*03:02H
LLNKEMYLK

SEQ ID NO: 2496 - protein, 9 aa, Severe acute respiratory syndrome coronavirus 2
  REGION 1..9: note = Table A: HLA-B*08:01M HLA-A*02:02M
YLKLRSDVL

SEQ ID NO: 2497 - protein, 9 aa, Severe acute respiratory syndrome coronavirus 2
  REGION 1..9: note = Table A: HLA-A*36:01H
RSDVLLPLT

SEQ ID NO: 2498 - protein, 9 aa, Severe acute respiratory syndrome coronavirus 2
  REGION 1..9: note = Table A: HLA-A*25:01M HLA-A*26:01M HLA-A*26:02H HLA-A*26:03M HLA-B*18:01H HLA-C*15:05H HLA-A*34:01M HLA-A*34:02M HLA-B*35:01H HLA-B*35:08H HLA-B*35:07H HLA-B*38:02H HLA-B*15:02H HLA-B*39:01H HLA-B*07:05M HLA-B*15:11H
  REGION 1..9: note = CONT. FROM ABOVE: HLA-A*66:01H
DVLLPLTQY

SEQ ID NO: 2499 - protein, 9 aa, Severe acute respiratory syndrome coronavirus 2
  REGION 1..9: note = Table A: HLA-A*74:01H
LLPLTQYNR

SEQ ID NO: 2500 - protein, 9 aa, Severe acute respiratory syndrome coronavirus 2
  REGION 1..9: note = Table A: HLA-B*53:01M HLA-B*35:01M HLA-B*35:07M
LPLTQYNRY

SEQ ID NO: 2501 - protein, 9 aa, Severe acute respiratory syndrome coronavirus 2
  REGION 1..9: note = Table A: HLA-B*48:01H HLA-C*14:03H HLA-A*11:303H HLA-C*16:01H HLA-B*08:01M HLA-C*03:03H HLA-A*02:11H HLA-C*03:02H HLA-C*03:04H HLA-C*15:05H HLA-B*14:02H HLA-C*15:02H HLA-A*02:04H HLA-A*02:05H HLA-A*02:06H
  REGION 1..9: note = CONT. FROM ABOVE: HLA-B*14:01M HLA-A*02:03H HLA-B*52:01H HLA- C*08:01H HLA-B*38:02M HLA-B*15:01H HLA-B*15:02M HLA-B*15:03M HLA-B*13:01H HLA-B*13:02M HLA-B*15:10M
TQYNRYLAL

SEQ ID NO: 2502 - protein, 9 aa, Severe acute respiratory syndrome coronavirus 2
  REGION 1..9: note = Table A: HLA-A*29:02H HLA-A*30:02M
QYNRYLALY

SEQ ID NO: 2503 - protein, 9 aa, Severe acute respiratory syndrome coronavirus 2
  REGION 1..9: note = Table A: HLA-B*27:05H
NRYLALYNK

SEQ ID NO: 2504 - protein, 9 aa, Severe acute respiratory syndrome coronavirus 2
  REGION 1..9: note = Table A: HLA-C*14:02H HLA-C*14:03M HLA-A*36:01H HLA-A*29:02H HLA-C*07:02H HLA-A*30:02H HLA-A*24:02H HLA-A*24:07H HLA-A*23:01H
RYLALYNKY

SEQ ID NO: 2505 - protein, 9 aa, Severe acute respiratory syndrome coronavirus 2
  REGION 1..9: note = Table A: HLA-A*29:02H
LALYNKYKY

SEQ ID NO: 2506 - protein, 9 aa, Severe acute respiratory syndrome coronavirus 2
  REGION 1..9: note = Table A: HLA-A*74:01H HLA-A*03:01H HLA-A*02:11H HLA-A*02:02H
ALYNKYKYF

SEQ ID NO: 2507 - protein, 9 aa, Severe acute respiratory syndrome coronavirus 2
  REGION 1..9: note = Table A: HLA-A*11:303H HLA-B*46:01M HLA-A*30:02H HLA-C*07:27H HLA-B*35:01M HLA-B*35:08M HLA-B*38:02M HLA-B*15:01H HLA-B*15:02M HLA-B*15:03H HLA-B*39:01M HLA-B*07:05M HLA-B*15:11M
SGAMDTTSY

SEQ ID NO: 2508 - protein, 9 aa, Severe acute respiratory syndrome coronavirus 2
  REGION 1..9: note = Table A: HLA-A*11:303H HLA-A*74:01H HLA-A*03:02H HLA-A*11:01M HLA-A*11:02M HLA-A*33:01H HLA-A*33:03M HLA-A*26:03M HLA-A*30:02H HLA-A*68:01M HLA-A*34:01H HLA-A*34:02M HLA-C*07:27H HLA-A*31:01H HLA-A*66:01H
GAMDTTSYR

SEQ ID NO: 2509 - protein, 9 aa, Severe acute respiratory syndrome coronavirus 2
  REGION 1..9: note = Table A: HLA-B*55:02H HLA-B*54:01H HLA-B*50:01H
MDTTSYREA

SEQ ID NO: 2510 - protein, 9 aa, Severe acute respiratory syndrome coronavirus 2
  REGION 1..9: note = Table A: HLA-A*34:02H
EAACCHLAK

SEQ ID NO: 2511 - protein, 9 aa, Severe acute respiratory syndrome coronavirus 2
  REGION 1..9: note = Table A: HLA-A*02:02H HLA-B*38:02M HLA-B*15:01H HLA-B*15:02M HLA-B*13:01H
HLAKALNDF

SEQ ID NO: 2512 - protein, 9 aa, Severe acute respiratory syndrome coronavirus 2
  REGION 1..9: note = Table A: HLA-C*03:04H HLA-B*35:03H HLA-C*08:01H HLA-B*38:02H HLA-B*39:01H
FSNSGSDVL

SEQ ID NO: 2513 - protein, 9 aa, Severe acute respiratory syndrome coronavirus 2
  REGION 1..9: note = Table A: HLA-B*38:02H
VLYQPPQTS

SEQ ID NO: 2514 - protein, 9 aa, Severe acute respiratory syndrome coronavirus 2
  REGION 1..9: note = Table A: HLA-C*14:02H HLA-C*14:03M HLA-A*24:02M HLA-A*24:07M HLA-C*08:01H HLA-A*23:01H
LYQPPQTSI

SEQ ID NO: 2515 - protein, 9 aa, Severe acute respiratory syndrome coronavirus 2
  REGION 1..9: note = Table A: HLA-B*56:01H HLA-B*55:02H HLA-C*15:05H HLA-B*55:01H
PPQTSITSA

SEQ ID NO: 2516 - protein, 9 aa, Severe acute respiratory syndrome coronavirus 2
  REGION 1..9: note = Table A: HLA-B*58:01H HLA-B*44:05H HLA-B*57:01M HLA-C*15:05H HLA-B*35:01H HLA-B*38:02H HLA-B*15:01H HLA-B*07:05M HLA-B*57:03H
TSAVLQSGF

SEQ ID NO: 2517 - protein, 9 aa, Severe acute respiratory syndrome coronavirus 2
  REGION 1..9: note = Table A: HLA-A*68:01H HLA-A*34:01H HLA-A*34:02H HLA-A*66:01H
SAVLQSGFR

SEQ ID NO: 2518 - protein, 9 aa, Severe acute respiratory syndrome coronavirus 2
  REGION 1..9: note = Table A: HLA-A*11:303M HLA-A*74:01H HLA-A*03:01H HLA-A*03:02H HLA-A*11:01H HLA-A*11:02H HLA-A*30:02H HLA-A*34:02M HLA-C*07:27M
AVLQSGFRK

SEQ ID NO: 2519 - protein, 9 aa, Severe acute respiratory syndrome coronavirus 2
  REGION 1..9: note = Table A: HLA-C*16:01H
QSGFRKMAF

SEQ ID NO: 2520 - protein, 9 aa, Severe acute respiratory syndrome coronavirus 2
  REGION 1..9: note = Table A: HLA-A*02:11H HLA-A*02:02H HLA-B*38:02H HLA-B*13:02H
KMAFPSGKV

SEQ ID NO: 2521 - protein, 9 aa, Severe acute respiratory syndrome coronavirus 2
  REGION 1..9: note = Table A: HLA-B*58:01H HLA-B*57:01M HLA-B*57:03M
GTTTLNGLW

SEQ ID NO: 2522 - protein, 9 aa, Severe acute respiratory syndrome coronavirus 2
  REGION 1..9: note = Table A: HLA-B*15:01H HLA-B*15:02H
GLWLDDVVY

SEQ ID NO: 2523 - protein, 9 aa, Severe acute respiratory syndrome coronavirus 2
  REGION 1..9: note = Table A: HLA-A*02:01H
LWLDDVVYC

SEQ ID NO: 2524 - protein, 9 aa, Severe acute respiratory syndrome coronavirus 2
  REGION 1..9: note = Table A: HLA-B*38:02H HLA-B*15:02M
HVICTSEDM

SEQ ID NO: 2525 - protein, 9 aa, Severe acute respiratory syndrome coronavirus 2
  REGION 1..9: note = Table A: HLA-B*44:02H HLA-B*44:05M HLA-B*44:03M HLA-B*18:01H HLA-B*07:05M
SEDMLNPNY

SEQ ID NO: 2526 - protein, 9 aa, Severe acute respiratory syndrome coronavirus 2
  REGION 1..9: note = Table A: HLA-A*11:303H HLA-B*35:03H HLA-C*01:02H HLA-A*02:04H HLA-A*02:02M HLA-A*02:03H HLA-B*38:02M HLA-B*39:01H
MLNPNYEDL

SEQ ID NO: 2527 - protein, 9 aa, Severe acute respiratory syndrome coronavirus 2
  REGION 1..9: note = Table A: HLA-B*53:01M HLA-B*35:03H HLA-C*15:05H HLA-B*35:02H HLA-B*51:01H
NPNYEDLLI

SEQ ID NO: 2528 - protein, 9 aa, Severe acute respiratory syndrome coronavirus 2
  REGION 1..9: note = Table A: HLA-B*50:01H
YEDLLIRKS

SEQ ID NO: 2529 - protein, 9 aa, Severe acute respiratory syndrome coronavirus 2
  REGION 1..9: note = Table A: HLA-B*57:03H
LIRKSNHNF

SEQ ID NO: 2530 - protein, 9 aa, Severe acute respiratory syndrome coronavirus 2
  REGION 1..9: note = Table A: HLA-C*06:02H
IRKSNHNFL

SEQ ID NO: 2531 - protein, 9 aa, Severe acute respiratory syndrome coronavirus 2
  REGION 1..9: note = Table A: HLA-B*45:01H HLA-B*55:02H HLA-A*68:02H HLA-B*39:06M HLA-B*40:06H HLA-B*54:01H HLA-B*50:01H
SNHNFLVQA

SEQ ID NO: 2532 - protein, 9 aa, Severe acute respiratory syndrome coronavirus 2
  REGION 1..9: note = Table A: HLA-B*38:02H HLA-B*39:06M HLA-B*39:01M
NHNFLVQAG

SEQ ID NO: 2533 - protein, 9 aa, Severe acute respiratory syndrome coronavirus 2
  REGION 1..9: note = Table A: HLA-A*02:08H
LVQAGNVQL

SEQ ID NO: 2534 - protein, 9 aa, Severe acute respiratory syndrome coronavirus 2
  REGION 1..9: note = Table A: HLA-A*74:01H HLA-B*27:02H HLA-A*68:01H HLA-A*34:01H HLA-A*31:01M
VQAGNVQLR

SEQ ID NO: 2535 - protein, 9 aa, Severe acute respiratory syndrome coronavirus 2
  REGION 1..9: note = Table A: HLA-C*12:05H HLA-A*68:02H HLA-C*15:05H HLA-C*15:02H HLA-B*51:01H HLA-B*38:02H HLA-B*13:02H
QAGNVQLRV

SEQ ID NO: 2536 - protein, 9 aa, Severe acute respiratory syndrome coronavirus 2
  REGION 1..9: note = Table A: HLA-B*58:02H
AGNVQLRVI

SEQ ID NO: 2537 - protein, 9 aa, Severe acute respiratory syndrome coronavirus 2
  REGION 1..9: note = Table A: HLA-B*08:01H HLA-A*02:02H HLA-B*38:02M HLA-B*07:02H HLA-B*07:04H HLA-B*15:01H HLA-B*15:02M
QLRVIGHSM

SEQ ID NO: 2538 - protein, 9 aa, Severe acute respiratory syndrome coronavirus 2
  REGION 1..9: note = Table A: HLA-B*48:01H HLA-B*38:01H HLA-B*38:02M HLA-B*39:01M HLA-B*15:10H
GHSMQNCVL

SEQ ID NO: 2539 - protein, 9 aa, Severe acute respiratory syndrome coronavirus 2
  REGION 1..9: note = Table A: HLA-A*03:02H HLA-A*11:01M HLA-A*11:02M HLA-A*34:02M HLA-C*07:27H
HSMQNCVLK

SEQ ID NO: 2540 - protein, 9 aa, Severe acute respiratory syndrome coronavirus 2
  REGION 1..9: note = Table A: HLA-C*15:05H HLA-B*38:02H
SMQNCVLKL

SEQ ID NO: 2541 - protein, 9 aa, Severe acute respiratory syndrome coronavirus 2
  REGION 1..9: note = Table A: HLA-B*08:01M HLA-A*02:05H HLA-A*02:02M HLA-A*02:03M HLA-B*38:02H
VLKLKVDTA

SEQ ID NO: 2542 - protein, 9 aa, Severe acute respiratory syndrome coronavirus 2
  REGION 1..9: note = Table A: HLA-A*02:01H
KVDTANPKT

SEQ ID NO: 2543 - protein, 9 aa, Severe acute respiratory syndrome coronavirus 2
  REGION 1..9: note = Table A: HLA-B*50:01H
VDTANPKTP

SEQ ID NO: 2544 - protein, 9 aa, Severe acute respiratory syndrome coronavirus 2
  REGION 1..9: note = Table A: HLA-A*33:01M HLA-A*33:03M HLA-A*26:03H HLA-A*68:01M HLA-A*34:01H HLA-A*34:02H HLA-A*66:01H
DTANPKTPK

SEQ ID NO: 2545 - protein, 9 aa, Severe acute respiratory syndrome coronavirus 2
  REGION 1..9: note = Table A: HLA-B*58:01H HLA-B*58:02H HLA-A*11:303H HLA-C*16:01M HLA-A*03:01H HLA-A*11:01H HLA-A*11:02H HLA-A*36:01H HLA-B*57:01H HLA-B*46:01M HLA-A*26:01H HLA-A*29:02H HLA-B*53:01H HLA-C*03:02M HLA-A*30:02M
  REGION 1..9: note = CONT. FROM ABOVE: HLA-B*35:03H HLA-C*15:05H HLA-C*12:02M HLA- C*12:03H HLA-A*34:02M HLA-C*07:27H HLA-B*35:01H HLA-B*35:08M HLA-B*35:07H HLA-B*38:02M HLA-B*15:01M HLA-B*15:02M HLA-B*15 :03H HLA-B*07:05H HLA-B*57:03H HLA-C*02:02H HLA-B*15:11M
TANPKTPKY

SEQ ID NO: 2546 - protein, 9 aa, Severe acute respiratory syndrome coronavirus 2
  REGION 1..9: note = Table A: HLA-B*42:01H HLA-B*07:04M
NPKTPKYKF

SEQ ID NO: 2547 - protein, 9 aa, Severe acute respiratory syndrome coronavirus 2
  REGION 1..9: note = Table A: HLA-A*74:01M
KTPKYKFVR

SEQ ID NO: 2548 - protein, 9 aa, Severe acute respiratory syndrome coronavirus 2
  REGION 1..9: note = Table A: HLA-B*42:01H HLA-B*08:01H HLA-B*55:01H HLA-B*07:04M
TPKYKFVRI

SEQ ID NO: 2549 - protein, 9 aa, Severe acute respiratory syndrome coronavirus 2
  REGION 1..9: note = Table A: HLA-B*44:05H HLA-C*16:04M HLA-B*46:01H HLA-C*06:02H HLA-B*27:05M HLA-C*07:01H HLA-C*07:02H HLA-B*27:02H HLA-C*15:05H HLA-B*14:02H HLA-B*14:01H HLA-A*24:02H HLA-A*23:01H HLA-B*38:01M HLA-B*38:02H HLA-B*15:01M
  REGION 1..9: note = CONT. FROM ABOVE: HLA-B*15:02H HLA-B*15:03M HLA-B*39:01M HLA- B*07:05H HLA-B*15:10H
VRIQPGQTF

SEQ ID NO: 2550 - protein, 9 aa, Severe acute respiratory syndrome coronavirus 2
  REGION 1..9: note = Table A: HLA-A*02:11H HLA-A*02:06H HLA-A*02:07H HLA-B*13:02M
IQPGQTFSV

SEQ ID NO: 2551 - protein, 9 aa, Severe acute respiratory syndrome coronavirus 2
  REGION 1..9: note = Table A: HLA-B*42:01H HLA-B*35:03M HLA-C*15:05M HLA-B*35:01H HLA-B*38:02H HLA-B*07:02M HLA-B*07:04H HLA-B*07:05M
QPGQTFSVL

SEQ ID NO: 2552 - protein, 9 aa, Severe acute respiratory syndrome coronavirus 2
  REGION 1..9: note = Table A: HLA-B*13:02M
GQTFSVLAC

SEQ ID NO: 2553 - protein, 9 aa, Severe acute respiratory syndrome coronavirus 2
  REGION 1..9: note = Table A: HLA-A*29:02H HLA-A*30:02M HLA-B*38:02H
QTFSVLACY

SEQ ID NO: 2554 - protein, 9 aa, Severe acute respiratory syndrome coronavirus 2
  REGION 1..9: note = Table A: HLA-A*29:02H HLA-B*39:01H HLA-B*15:11H
YNGSPSGVY

SEQ ID NO: 2555 - protein, 9 aa, Severe acute respiratory syndrome coronavirus 2
  REGION 1..9: note = Table A: HLA-B*39:01H
NGSPSGVYQ

SEQ ID NO: 2556 - protein, 9 aa, Severe acute respiratory syndrome coronavirus 2
  REGION 1..9: note = Table A: HLA-B*56:01M HLA-B*55:02H HLA-C*15:05M HLA-B*55:01M HLA-B*54:01H HLA-B*07:05H
SPSGVYQCA

SEQ ID NO: 2557 - protein, 9 aa, Severe acute respiratory syndrome coronavirus 2
  REGION 1..9: note = Table A: HLA-B*58:02H HLA-C*15:05H HLA-B*51:01H HLA-B*57:03H
CAMRPNFTI

SEQ ID NO: 2558 - protein, 9 aa, Severe acute respiratory syndrome coronavirus 2
  REGION 1..9: note = Table A: HLA-A*74:01H HLA-A*03:01M HLA-A*11:01H HLA-A*11:02H HLA-A*30:01M HLA-A*34:02H
AMRPNFTIK

SEQ ID NO: 2559 - protein, 9 aa, Severe acute respiratory syndrome coronavirus 2
  REGION 1..9: note = Table A: HLA-B*56:01H HLA-B*55:02H HLA-B*55:01H
RPNFTIKGS

SEQ ID NO: 2560 - protein, 9 aa, Severe acute respiratory syndrome coronavirus 2
  REGION 1..9: note = Table A: HLA-A*24:07H
NFTIKGSFL

SEQ ID NO: 2561 - protein, 9 aa, Severe acute respiratory syndrome coronavirus 2
  REGION 1..9: note = Table A: HLA-C*15:05H
GSFLNGSCG

SEQ ID NO: 2562 - protein, 9 aa, Severe acute respiratory syndrome coronavirus 2
  REGION 1..9: note = Table A: HLA-A*02:03H HLA-B*38:02H
FLNGSCGSV

SEQ ID NO: 2563 - protein, 9 aa, Severe acute respiratory syndrome coronavirus 2
  REGION 1..9: note = Table A: HLA-A*30:02H
GSVGFNIDY

SEQ ID NO: 2564 - protein, 9 aa, Severe acute respiratory syndrome coronavirus 2
  REGION 1..9: note = Table A: HLA-C*04:03M HLA-B*35:02H HLA-B*35:08H HLA-C*08:02H HLA-B*35:12H HLA-C*05:01H
NIDYDCVSF

SEQ ID NO: 2565 - protein, 9 aa, Severe acute respiratory syndrome coronavirus 2
  REGION 1..9: note = Table A: HLA-C*03:04H
FCYMHHMEL

SEQ ID NO: 2566 - protein, 9 aa, Severe acute respiratory syndrome coronavirus 2
  REGION 1..9: note = Table A: HLA-B*38:02H
MHHMELPTG

SEQ ID NO: 2567 - protein, 9 aa, Severe acute respiratory syndrome coronavirus 2
  REGION 1..9: note = Table A: HLA-A*02:11H HLA-B*38:01M HLA-B*38:02H HLA-B*39:06H HLA-B*39:01M HLA-B*13:02H HLA-B*15:10H
HHMELPTGV

SEQ ID NO: 2568 - protein, 9 aa, Severe acute respiratory syndrome coronavirus 2
  REGION 1..9: note = Table A: HLA-B*15:02H
HMELPTGVH

SEQ ID NO: 2569 - protein, 9 aa, Severe acute respiratory syndrome coronavirus 2
  REGION 1..9: note = Table A: HLA-B*44:05H HLA-B*45:01H HLA-B*18:01H HLA-B*55:02H HLA-B*38:02H HLA-B*39:06M HLA-B*40:02H HLA-B*40:06M HLA-B*54:01H HLA-B*39:01H HLA-B*07:05H HLA-B*41:02M HLA-B*49:01M HLA-B*50:01H
MELPTGVHA

SEQ ID NO: 2570 - protein, 9 aa, Severe acute respiratory syndrome coronavirus 2
  REGION 1..9: note = Table A: HLA-A*26:03H HLA-A*34:01H
ELPTGVHAG

SEQ ID NO: 2571 - protein, 9 aa, Severe acute respiratory syndrome coronavirus 2
  REGION 1..9: note = Table A: HLA-B*56:01H HLA-B*55:02H HLA-B*54:01H
LPTGVHAGT

SEQ ID NO: 2572 - protein, 9 aa, Severe acute respiratory syndrome coronavirus 2
  REGION 1..9: note = Table A: HLA-B*58:01H HLA-A*36:01H HLA-A*01:01H HLA-A*30:02H
GTDLEGNFY

SEQ ID NO: 2573 - protein, 9 aa, Severe acute respiratory syndrome coronavirus 2
  REGION 1..9: note = Table A: HLA-A*33:01M HLA-A*33:03H HLA-A*68:01H HLA-A*34:01H HLA-A*34:02H HLA-A*31:01H HLA-A*66:01H
NFYGPFVDR

SEQ ID NO: 2574 - protein, 9 aa, Severe acute respiratory syndrome coronavirus 2
  REGION 1..9: note = Table A: HLA-B*56:01M HLA-B*55:02M HLA-C*15:05M HLA-B*55:01M HLA-B*39:06H HLA-B*54:01M HLA-B*07:02H HLA-B*07:05H HLA-B*50:01H
GPFVDRQTA

SEQ ID NO: 2575 - protein, 9 aa, Severe acute respiratory syndrome coronavirus 2
  REGION 1..9: note = Table A: HLA-A*02:11H HLA-C*15:05H HLA-A*02:05H HLA-A*02:06H HLA-A*02:07H HLA-A*02:08H HLA-A*02:01H HLA-C*08:02H HLA-B*38:02H HLA-B*54:01H
FVDRQTAQA

SEQ ID NO: 2576 - protein, 9 aa, Severe acute respiratory syndrome coronavirus 2
  REGION 1..9: note = Table A: HLA-B*53:01H HLA-B*35:03H HLA-C*15:05H HLA-B*35:02H HLA-B*51:01H HLA-B*38:01H HLA-B*38:02M HLA-B*13:02H
QAAGTDTTI

SEQ ID NO: 2577 - protein, 9 aa, Severe acute respiratory syndrome coronavirus 2
  REGION 1..9: note = Table A: HLA-A*11:303H HLA-C*16:04H HLA-C*12:05H HLA-C*15:05H HLA-C*15:02H HLA-A*02:06H HLA-A*02:01H HLA-B*38:02H HLA-B*39:01H HLA-B*13:02M HLA-B*49:01H HLA-C*07:04H
AGTDTTITV

SEQ ID NO: 2578 - protein, 9 aa, Severe acute respiratory syndrome coronavirus 2
  REGION 1..9: note = Table A: HLA-A*68:02M HLA-B*37:01H HLA-B*38:02H
TDTTITVNV

SEQ ID NO: 2579 - protein, 9 aa, Severe acute respiratory syndrome coronavirus 2
  REGION 1..9: note = Table A: HLA-A*25:01H HLA-A*68:02M
DTTITVNVL

SEQ ID NO: 2580 - protein, 9 aa, Severe acute respiratory syndrome coronavirus 2
  REGION 1..9: note = Table A: HLA-A*68:02H
TTITVNVLA

SEQ ID NO: 2581 - protein, 9 aa, Severe acute respiratory syndrome coronavirus 2
  REGION 1..9: note = Table A: HLA-B*58:01H HLA-A*25:01H HLA-B*15:13H
TITVNVLAW

SEQ ID NO: 2582 - protein, 9 aa, Severe acute respiratory syndrome coronavirus 2
  REGION 1..9: note = Table A: HLA-A*68:02H
ITVNVLAWL

SEQ ID NO: 2583 - protein, 9 aa, Severe acute respiratory syndrome coronavirus 2
  REGION 1..9: note = Table A: HLA-A*36:01H HLA-A*29:01M HLA-A*29:02M HLA-A*30:02H HLA-B*35:01H HLA-B*38:02H
TVNVLAWLY

SEQ ID NO: 2584 - protein, 9 aa, Severe acute respiratory syndrome coronavirus 2
  REGION 1..9: note = Table A: HLA-A*02:04H
NVLAWLYAA

SEQ ID NO: 2585 - protein, 9 aa, Severe acute respiratory syndrome coronavirus 2
  REGION 1..9: note = Table A: HLA-A*02:11H HLA-A*02:04H HLA-A*02:02H
VLAWLYAAV

SEQ ID NO: 2586 - protein, 9 aa, Severe acute respiratory syndrome coronavirus 2
  REGION 1..9: note = Table A: HLA-B*51:01H
LAWLYAAVI

SEQ ID NO: 2587 - protein, 9 aa, Severe acute respiratory syndrome coronavirus 2
  REGION 1..9: note = Table A: HLA-A*34:01H HLA-A*66:01H
YAAVINGDR

SEQ ID NO: 2588 - protein, 9 aa, Severe acute respiratory syndrome coronavirus 2
  REGION 1..9: note = Table A: HLA-B*58:01H HLA-B*44:05H HLA-B*57:01H HLA-B*44:03H HLA-B*53:01M HLA-B*15:13H HLA-B*38:02H HLA-B*57:03M HLA-B*13:01M
AAVINGDRW

SEQ ID NO: 2589 - protein, 9 aa, Severe acute respiratory syndrome coronavirus 2
  REGION 1..9: note = Table A: HLA-A*74:01H HLA-C*07:01H HLA-A*02:11H HLA-A*30:02H HLA-C*15:02H HLA-A*02:04M HLA-A*02:02M HLA-A*24:07H HLA-C*08:01M HLA-A*32:01H HLA-C*02:02H
VINGDRWFL

SEQ ID NO: 2590 - protein, 9 aa, Severe acute respiratory syndrome coronavirus 2
  REGION 1..9: note = Table A: HLA-C*14:03H HLA-A*11:303H HLA-B*46:01H HLA-B*08:01M HLA-C*03:03H HLA-A*02:11H HLA-C*03:02H HLA-C*03:04H HLA-A*68:02H HLA-B*35:03H HLA-C*15:05H HLA-C*01:02H HLA-C*12:02H HLA-C*15:02H HLA-A*02:04H
  REGION 1..9: note = CONT. FROM ABOVE: HLA-A*02:05H HLA-A*02:06H HLA-A*02:07H HLA- B*14:01H HLA-A*02:01M HLA-A*02:02H HLA-A*02:03H HLA-C*17:01H HLA-C*08:01H HLA-B*38:02M HLA-A*32:01H HLA-B*07:04H HLA-B*15 :01H HLA-B*15:02M HLA-B*15:03H HLA-B*13:01H HLA-B*13:02H
FLNRFTTTL

SEQ ID NO: 2591 - protein, 9 aa, Severe acute respiratory syndrome coronavirus 2
  REGION 1..9: note = Table A: HLA-C*14:03H HLA-A*24:02H HLA-A*24:07H HLA-A*23:01H
RFTTTLNDF

SEQ ID NO: 2592 - protein, 9 aa, Severe acute respiratory syndrome coronavirus 2
  REGION 1..9: note = Table A: HLA-A*68:02H
TTTLNDFNL

SEQ ID NO: 2593 - protein, 9 aa, Severe acute respiratory syndrome coronavirus 2
  REGION 1..9: note = Table A: HLA-A*68:02H HLA-A*02:06H
TTLNDFNLV

SEQ ID NO: 2594 - protein, 9 aa, Severe acute respiratory syndrome coronavirus 2
  REGION 1..9: note = Table A: HLA-A*02:03H HLA-B*38:02M HLA-B*39:06H
TLNDFNLVA

SEQ ID NO: 2595 - protein, 9 aa, Severe acute respiratory syndrome coronavirus 2
  REGION 1..9: note = Table A: HLA-B*27:02H HLA-A*34:02H
NDFNLVAMK

SEQ ID NO: 2596 - protein, 9 aa, Severe acute respiratory syndrome coronavirus 2
  REGION 1..9: note = Table A: HLA-A*29:01H HLA-A*29:02M HLA-B*18:01M HLA-A*30:02H HLA-B*35:01H HLA-B*38:02H HLA-B*15:02M HLA-B*07:05M
DFNLVAMKY

SEQ ID NO: 2597 - protein, 9 aa, Severe acute respiratory syndrome coronavirus 2
  REGION 1..9: note = Table A: HLA-B*49:01H
YEPLTQDHV

SEQ ID NO: 2598 - protein, 9 aa, Severe acute respiratory syndrome coronavirus 2
  REGION 1..9: note = Table A: HLA-B*38:01H HLA-B*38:02M HLA-B*39:01M HLA-B*15:10H
DHVDILGPL

SEQ ID NO: 2599 - protein, 9 aa, Severe acute respiratory syndrome coronavirus 2
  REGION 1..9: note = Table A: HLA-B*39:06H HLA-B*40:02H HLA-B*40:06H HLA-B*54:01H HLA-B*50:01M
VDILGPLSA

SEQ ID NO: 2600 - protein, 9 aa, Severe acute respiratory syndrome coronavirus 2
  REGION 1..9: note = Table A: HLA-A*02:11H HLA-A*02:04H HLA-A*02:05H HLA-A*02:01H HLA-A*02:02M HLA-A*02:03H
ILGPLSAQT

SEQ ID NO: 2601 - protein, 9 aa, Severe acute respiratory syndrome coronavirus 2
  REGION 1..9: note = Table A: HLA-C*15:05M HLA-B*07:05M
GPLSAQTGI

SEQ ID NO: 2602 - protein, 9 aa, Severe acute respiratory syndrome coronavirus 2
  REGION 1..9: note = Table A: HLA-A*11:303M HLA-C*03:03H HLA-C*12:05H HLA-C*03:04M HLA-B*35:03M HLA-C*15:05H HLA-C*12:03H HLA-C*07:27H HLA-B*35:02H HLA-C*17:01H HLA-C*08:01H HLA-B*35:12H HLA-B*38:02H HLA-B*39:01H HLA-C*07:04H
SAQTGIAVL

SEQ ID NO: 2603 - protein, 9 aa, Severe acute respiratory syndrome coronavirus 2
  REGION 1..9: note = Table A: HLA-A*11:303H HLA-A*02:11H HLA-C*15:05H HLA-A*02:06H HLA-A*02:01H HLA-B*38:02H HLA-B*07:05H
AVLDMCASL

SEQ ID NO: 2604 - protein, 9 aa, Severe acute respiratory syndrome coronavirus 2
  REGION 1..9: note = Table A: HLA-A*02:05H HLA-A*02:02H HLA-A*02:03H
SLKELLQNG

SEQ ID NO: 2605 - protein, 9 aa, Severe acute respiratory syndrome coronavirus 2
  REGION 1..9: note = Table A: HLA-A*74:01H
LLQNGMNGR

SEQ ID NO: 2606 - protein, 9 aa, Severe acute respiratory syndrome coronavirus 2
  REGION 1..9: note = Table A: HLA-B*07:02H HLA-B*07:04H
NGMNGRTIL

SEQ ID NO: 2607 - protein, 9 aa, Severe acute respiratory syndrome coronavirus 2
  REGION 1..9: note = Table A: HLA-B*27:05H HLA-B*27:02H HLA-B*14:01H
GRTILGSAL

SEQ ID NO: 2608 - protein, 9 aa, Severe acute respiratory syndrome coronavirus 2
  REGION 1..9: note = Table A: HLA-B*58:02H HLA-C*15:02H HLA-B*57:03M
RTILGSALL

SEQ ID NO: 2609 - protein, 9 aa, Severe acute respiratory syndrome coronavirus 2
  REGION 1..9: note = Table A: HLA-B*45:01H HLA-B*18:01M HLA-A*68:02H HLA-B*40:02H HLA-B*40:06H HLA-B*07:05M HLA-B*49:01M HLA-B*50:01H
DEFTPFDVV

SEQ ID NO: 2610 - protein, 9 aa, Severe acute respiratory syndrome coronavirus 2
  REGION 1..9: note = Table A: HLA-A*33:01H HLA-A*33:03M HLA-A*68:01H HLA-A*34:01H HLA-A*34:02H HLA-A*66:01H
EFTPFDVVR

SEQ ID NO: 2611 - protein, 9 aa, Severe acute respiratory syndrome coronavirus 2
  REGION 1..9: note = Table A: HLA-B*56:01M HLA-B*55:02M HLA-A*68:02H HLA-C*15:05M HLA-B*55:01M HLA-B*38:02H HLA-B*54:01M HLA-B*07:02H HLA-B*07:04H HLA-B*07:05H
TPFDVVRQC

SEQ ID NO: 2612 - protein, 9 aa, Severe acute respiratory syndrome coronavirus 2
  REGION 1..9: note = Table A: HLA-A*68:02H HLA-C*15:05H HLA-B*14:01H HLA-B*52:01H HLA-C*08:03H HLA-B*38:02H HLA-B*39:06H HLA-B*39:01H HLA-B*07:05H HLA-B*13:02H HLA-B*49:01H
SGVTFQSAV

SEQ ID NO: 2613 - protein, 9 aa, Severe acute respiratory syndrome coronavirus 2
  REGION 1..9: note = Table A: HLA-A*11:303H HLA-A*03:01H HLA-A*03:02M HLA-A*11:01M HLA-A*11:02M HLA-A*36:01M HLA-B*27:02H HLA-A*30:02H HLA-A*68:01H HLA-A*34:01H HLA-A*34:02M HLA-C*07:27M HLA-A*66:01H
GVTFQSAVK

SEQ ID NO: 2614 - protein, 9 aa, Severe acute respiratory syndrome coronavirus 2
  REGION 1..9: note = Table A: HLA-A*11:303H HLA-A*74:01H HLA-A*03:01H HLA-A*03:02H HLA-A*11:01M HLA-A*11:02H HLA-B*57:01H HLA-A*33:01H HLA-A*33:03M HLA-A*26:03H HLA-A*30:02H HLA-A*68:01H HLA-A*34:01M HLA-A*34:02H HLA-C*07:27M
  REGION 1..9: note = CONT. FROM ABOVE: HLA-A*31:01M HLA-B*57:03H HLA-A*66:01H
VTFQSAVKR

SEQ ID NO: 2615 - protein, 9 aa, Severe acute respiratory syndrome coronavirus 2
  REGION 1..9: note = Table A: HLA-B*58:02M HLA-A*02:05H HLA-B*52:01M HLA-B*38:02M HLA-B*13:01H HLA-B*13:02H
FQSAVKRTI

SEQ ID NO: 2616 - protein, 9 aa, Severe acute respiratory syndrome coronavirus 2
  REGION 1..9: note = Table A: HLA-B*58:01H HLA-B*58:02H HLA-B*57:01M HLA-A*32:01H HLA-B*57:03H HLA-B*13:01H
RTIKGTHHW

SEQ ID NO: 2617 - protein, 9 aa, Severe acute respiratory syndrome coronavirus 2
  REGION 1..9: note = Table A: HLA-C*15:02M
KGTHHWLLL

SEQ ID NO: 2618 - protein, 9 aa, Severe acute respiratory syndrome coronavirus 2
  REGION 1..9: note = Table A: HLA-B*38:01H HLA-B*38:02H HLA-B*15:10H
THHWLLLTI

SEQ ID NO: 2619 - protein, 9 aa, Severe acute respiratory syndrome coronavirus 2
  REGION 1..9: note = Table A: HLA-B*38:02H HLA-B*15:10H
HHWLLLTIL

SEQ ID NO: 2620 - protein, 9 aa, Severe acute respiratory syndrome coronavirus 2
  REGION 1..9: note = Table A: HLA-A*11:303H HLA-A*02:11M HLA-A*02:04H HLA-A*02:07H HLA-B*14:01H HLA-A*02:01M HLA-A*02:02H HLA-A*02:03H HLA-B*38:02H
LLLTILTSL

SEQ ID NO: 2621 - protein, 9 aa, Severe acute respiratory syndrome coronavirus 2
  REGION 1..9: note = Table A: HLA-A*02:02H
LLTILTSLL

SEQ ID NO: 2622 - protein, 9 aa, Severe acute respiratory syndrome coronavirus 2
  REGION 1..9: note = Table A: HLA-C*15:05H HLA-A*02:04H HLA-C*08:01H HLA-B*38:02H
TILTSLLVL

SEQ ID NO: 2623 - protein, 9 aa, Severe acute respiratory syndrome coronavirus 2
  REGION 1..9: note = Table A: HLA-A*02:11H HLA-A*68:02H HLA-A*02:04M HLA-A*02:06H HLA-A*02:07H HLA-A*02:01M HLA-A*02:02H HLA-A*02:03H HLA-B*38:02H HLA-B*13:02H
ILTSLLVLV

SEQ ID NO: 2624 - protein, 9 aa, Severe acute respiratory syndrome coronavirus 2
  REGION 1..9: note = Table A: HLA-B*58:01M HLA-B*57:01M HLA-A*25:01H HLA-B*53:01M HLA-A*24:02H HLA-B*15:13H HLA-B*38:02H HLA-B*57:03M
LVLVQSTQW

SEQ ID NO: 2625 - protein, 9 aa, Severe acute respiratory syndrome coronavirus 2
  REGION 1..9: note = Table A: HLA-C*15:02H
QSTQWSLFF

SEQ ID NO: 2626 - protein, 9 aa, Severe acute respiratory syndrome coronavirus 2
  REGION 1..9: note = Table A: HLA-A*02:11H HLA-A*02:04M HLA-C*08:01H HLA-B*40:06M HLA-B*13:02H
TQWSLFFFL

SEQ ID NO: 2627 - protein, 9 aa, Severe acute respiratory syndrome coronavirus 2
  REGION 1..9: note = Table A: HLA-A*29:02H
QWSLFFFLY

SEQ ID NO: 2628 - protein, 9 aa, Severe acute respiratory syndrome coronavirus 2
  REGION 1..9: note = Table A: HLA-C*14:02M HLA-C*14:03H HLA-B*46:01H HLA-A*29:02H HLA-C*04:01H HLA-C*04:03H HLA-A*24:07H
FFFLYENAF

SEQ ID NO: 2629 - protein, 9 aa, Severe acute respiratory syndrome coronavirus 2
  REGION 1..9: note = Table A: HLA-C*14:03H
FFLYENAFL

SEQ ID NO: 2630 - protein, 9 aa, Severe acute respiratory syndrome coronavirus 2
  REGION 1..9: note = Table A: HLA-B*45:01H HLA-B*40:06H HLA-B*49:01H HLA-B*50:01M
YENAFLPFA

SEQ ID NO: 2631 - protein, 9 aa, Severe acute respiratory syndrome coronavirus 2
  REGION 1..9: note = Table A: HLA-A*68:02H
ENAFLPFAM

SEQ ID NO: 2632 - protein, 9 aa, Severe acute respiratory syndrome coronavirus 2
  REGION 1..9: note = Table A: HLA-C*14:03H
AFLPFAMGI

SEQ ID NO: 2633 - protein, 9 aa, Severe acute respiratory syndrome coronavirus 2
  REGION 1..9: note = Table A: HLA-B*56:01H HLA-B*55:02H HLA-B*35:03H HLA-C*15:05H HLA-B*55:01M HLA-B*35:07H HLA-B*54:01H HLA-B*07:05H
LPFAMGIIA

SEQ ID NO: 2634 - protein, 9 aa, Severe acute respiratory syndrome coronavirus 2
  REGION 1..9: note = Table A: HLA-B*46:01H HLA-B*38:02H HLA-B*07:05H HLA-B*15:11H
MGIIAMSAF

SEQ ID NO: 2635 - protein, 9 aa, Severe acute respiratory syndrome coronavirus 2
  REGION 1..9: note = Table A: HLA-C*03:02H HLA-C*03:04H HLA-C*15:05H HLA-B*07:05H
IAMSAFAMM

SEQ ID NO: 2636 - protein, 9 aa, Severe acute respiratory syndrome coronavirus 2
  REGION 1..9: note = Table A: HLA-B*38:02H HLA-B*07:05H
AMSAFAMMF

SEQ ID NO: 2637 - protein, 9 aa, Severe acute respiratory syndrome coronavirus 2
  REGION 1..9: note = Table A: HLA-A*68:02H HLA-C*15:02H
MSAFAMMFV

SEQ ID NO: 2638 - protein, 9 aa, Severe acute respiratory syndrome coronavirus 2
  REGION 1..9: note = Table A: HLA-A*11:01M HLA-A*11:02M HLA-A*34:02M
SAFAMMFVK

SEQ ID NO: 2639 - protein, 9 aa, Severe acute respiratory syndrome coronavirus 2
  REGION 1..9: note = Table A: HLA-A*33:03H HLA-A*34:02M HLA-A*66:01H
FAMMFVKHK

SEQ ID NO: 2640 - protein, 9 aa, Severe acute respiratory syndrome coronavirus 2
  REGION 1..9: note = Table A: HLA-A*30:02H
AMMFVKHKH

SEQ ID NO: 2641 - protein, 9 aa, Severe acute respiratory syndrome coronavirus 2
  REGION 1..9: note = Table A: HLA-A*02:11H
MMFVKHKHA

SEQ ID NO: 2642 - protein, 9 aa, Severe acute respiratory syndrome coronavirus 2
  REGION 1..9: note = Table A: HLA-A*24:07M HLA-A*23:01H
MFVKHKHAF

SEQ ID NO: 2643 - protein, 9 aa, Severe acute respiratory syndrome coronavirus 2
  REGION 1..9: note = Table A: HLA-B*08:01M HLA-A*02:02H HLA-B*07:04H HLA-C*02:02H HLA-A*66:01H
FVKHKHAFL

SEQ ID NO: 2644 - protein, 9 aa, Severe acute respiratory syndrome coronavirus 2
  REGION 1..9: note = Table A: HLA-A*11:303M HLA-B*46:01H HLA-A*02:11H HLA-C*03:02H HLA-A*68:02H HLA-C*15:05H HLA-A*02:04H HLA-A*02:05M HLA-A*02:06H HLA-A*02:07H HLA-B*14:01M HLA-A*02:01H HLA-A*02:02H HLA-A*02:03H HLA-C*08:01H
  REGION 1..9: note = CONT. FROM ABOVE: HLA-B*38:02H HLA-B*40:06H HLA-B*54:01H HLA- B*13:02M HLA-B*49:01H
FLLPSLATV

SEQ ID NO: 2645 - protein, 9 aa, Severe acute respiratory syndrome coronavirus 2
  REGION 1..9: note = Table A: HLA-B*53:01H HLA-B*55:02H HLA-B*35:03H HLA-C*15:05H HLA-B*35:01H HLA-B*35:08H HLA-B*35:07H HLA-B*38:02H HLA-B*54:01H HLA-B*15:01H HLA-B*15:02H HLA-B*07:05M HLA-B*15:11H
LPSLATVAY

SEQ ID NO: 2646 - protein, 9 aa, Severe acute respiratory syndrome coronavirus 2
  REGION 1..9: note = Table A: HLA-A*68:02H HLA-C*15:02H HLA-A*02:05H HLA-A*02:06H HLA-B*40:06H
ATVAYFNMV

SEQ ID NO: 2647 - protein, 9 aa, Severe acute respiratory syndrome coronavirus 2
  REGION 1..9: note = Table A: HLA-A*36:01H HLA-A*26:01H HLA-A*29:01H HLA-A*29:02M HLA-A*30:02H HLA-A*34:02H HLA-B*35:01H HLA-B*35:07H HLA-B*38:02M HLA-B*15:01H HLA-B*15:02H HLA-B*07:05H
TVAYFNMVY

SEQ ID NO: 2648 - protein, 9 aa, Severe acute respiratory syndrome coronavirus 2
  REGION 1..9: note = Table A: HLA-C*03:04H HLA-C*12:03H HLA-C*17:01M HLA-C*08:01H
VAYFNMVYM

SEQ ID NO: 2649 - protein, 9 aa, Severe acute respiratory syndrome coronavirus 2
  REGION 1..9: note = Table A: HLA-B*15:13H HLA-B*38:02H
NMVYMPASW

SEQ ID NO: 2650 - protein, 9 aa, Severe acute respiratory syndrome coronavirus 2
  REGION 1..9: note = Table A: HLA-C*14:02H HLA-C*14:03H HLA-A*29:02H HLA-C*04:01H HLA-C*07:01H HLA-C*07:02M HLA-A*30:02H HLA-A*24:02H HLA-A*24:07H HLA-C*08:01H HLA-A*23:01H HLA-C*07:04H
VYMPASWVM

SEQ ID NO: 2651 - protein, 9 aa, Severe acute respiratory syndrome coronavirus 2
  REGION 1..9: note = Table A: HLA-B*53:01H HLA-A*68:02H HLA-B*35:03H HLA-C*15:05H HLA-A*34:01H HLA-A*34:02H HLA-B*51:01H HLA-B*35:07H HLA-B*38:02H HLA-B*54:01H HLA-B*07:04H
MPASWVMRI

SEQ ID NO: 2652 - protein, 9 aa, Severe acute respiratory syndrome coronavirus 2
  REGION 1..9: note = Table A: HLA-B*07:04H
PASWVMRIM

SEQ ID NO: 2653 - protein, 9 aa, Severe acute respiratory syndrome coronavirus 2
  REGION 1..9: note = Table A: HLA-A*24:02H HLA-A*24:07H
SWVMRIMTW

SEQ ID NO: 2654 - protein, 9 aa, Severe acute respiratory syndrome coronavirus 2
  REGION 1..9: note = Table A: HLA-A*02:11M HLA-C*15:02H HLA-A*02:04M HLA-A*02:06H
RIMTWLDMV

SEQ ID NO: 2655 - protein, 9 aa, Severe acute respiratory syndrome coronavirus 2
  REGION 1..9: note = Table A: HLA-A*02:07M HLA-A*02:01H HLA-C*08:02H HLA-B*38:02H HLA-B*13:01H
WLDMVDTSL

SEQ ID NO: 2656 - protein, 9 aa, Severe acute respiratory syndrome coronavirus 2
  REGION 1..9: note = Table A: HLA-A*11:303H HLA-A*26:02H HLA-C*04:03M HLA-C*15:05H HLA-A*02:07M HLA-A*34:02H HLA-B*35:08H HLA-C*08:02H HLA-B*38:02M HLA-B*15:02H HLA-B*39:01H HLA-C*05:01H
MVDTSLSGF

SEQ ID NO: 2657 - protein, 9 aa, Severe acute respiratory syndrome coronavirus 2
  REGION 1..9: note = Table A: HLA-A*36:01H
VDTSLSGFK

SEQ ID NO: 2658 - protein, 9 aa, Severe acute respiratory syndrome coronavirus 2
  REGION 1..9: note = Table A: HLA-A*68:01H HLA-A*68:02H HLA-A*34:01H HLA-A*34:02H HLA-A*66:01M
DTSLSGFKL

SEQ ID NO: 2659 - protein, 9 aa, Severe acute respiratory syndrome coronavirus 2
  REGION 1..9: note = Table A: HLA-A*11:01H HLA-A*11:02H HLA-A*34:02M
TSLSGFKLK

SEQ ID NO: 2660 - protein, 9 aa, Severe acute respiratory syndrome coronavirus 2
  REGION 1..9: note = Table A: HLA-B*08:01H
GFKLKDCVM

SEQ ID NO: 2661 - protein, 9 aa, Severe acute respiratory syndrome coronavirus 2
  REGION 1..9: note = Table A: HLA-B*15:03M
FKLKDCVMY

SEQ ID NO: 2662 - protein, 9 aa, Severe acute respiratory syndrome coronavirus 2
  REGION 1..9: note = Table A: HLA-A*02:03M HLA-B*38:02H
KLKDCVMYA

SEQ ID NO: 2663 - protein, 9 aa, Severe acute respiratory syndrome coronavirus 2
  REGION 1..9: note = Table A: HLA-C*15:05H HLA-B*38:02H
VMYASAVVL

SEQ ID NO: 2664 - protein, 9 aa, Severe acute respiratory syndrome coronavirus 2
  REGION 1..9: note = Table A: HLA-A*24:02H HLA-A*24:07H HLA-A*23:01H
MYASAVVLL

SEQ ID NO: 2665 - protein, 9 aa, Severe acute respiratory syndrome coronavirus 2
  REGION 1..9: note = Table A: HLA-C*16:04H HLA-C*12:05M HLA-B*53:01M HLA-A*68:02M HLA-B*35:03H HLA-C*15:05H HLA-C*12:03H HLA-C*15:02M HLA-B*51:01M HLA-C*17:01H HLA-C*08:01H HLA-B*38:02M HLA-B*13:02M
YASAVVLLI

SEQ ID NO: 2666 - protein, 9 aa, Severe acute respiratory syndrome coronavirus 2
  REGION 1..9: note = Table A: HLA-C*15:05H HLA-C*15:02M HLA-B*57:03H
ASAVVLLIL

SEQ ID NO: 2667 - protein, 9 aa, Severe acute respiratory syndrome coronavirus 2
  REGION 1..9: note = Table A: HLA-C*12:05H HLA-C*12:03H HLA-B*35:01H HLA-C*17:01H HLA-C*08:01H HLA-B*57:03H HLA-C*07:04H
SAVVLLILM

SEQ ID NO: 2668 - protein, 9 aa, Severe acute respiratory syndrome coronavirus 2
  REGION 1..9: note = Table A: HLA-B*40:06H HLA-B*13:02H
AVVLLILMT

SEQ ID NO: 2669 - protein, 9 aa, Severe acute respiratory syndrome coronavirus 2
  REGION 1..9: note = Table A: HLA-B*56:01H HLA-A*02:11H HLA-B*55:02H HLA-C*08:01H HLA-B*54:01H
VVLLILMTA

SEQ ID NO: 2670 - protein, 9 aa, Severe acute respiratory syndrome coronavirus 2
  REGION 1..9: note = Table A: HLA-A*74:01H
VLLILMTAR

SEQ ID NO: 2671 - protein, 9 aa, Severe acute respiratory syndrome coronavirus 2
  REGION 1..9: note = Table A: HLA-B*46:01M HLA-A*30:02H HLA-C*12:02H HLA-B*38:02M HLA-B*15:01M HLA-B*15:02H HLA-B*15:03H HLA-B*07:05H
ILMTARTVY

SEQ ID NO: 2672 - protein, 9 aa, Severe acute respiratory syndrome coronavirus 2
  REGION 1..9: note = Table A: HLA-A*36:01H
RTVYDDGAR

SEQ ID NO: 2673 - protein, 9 aa, Severe acute respiratory syndrome coronavirus 2
  REGION 1..9: note = Table A: HLA-A*74:01M HLA-A*11:01H HLA-A*11:02H HLA-A*33:01H HLA-A*33:03M HLA-A*26:03M HLA-A*68:01M HLA-A*34:01H HLA-A*34:02M HLA-A*66:01H
TVYDDGARR

SEQ ID NO: 2674 - protein, 9 aa, Severe acute respiratory syndrome coronavirus 2
  REGION 1..9: note = Table A: HLA-C*04:01H HLA-C*04:03H
VYDDGARRV

SEQ ID NO: 2675 - protein, 9 aa, Severe acute respiratory syndrome coronavirus 2
  REGION 1..9: note = Table A: HLA-B*08:01M HLA-B*14:02M
DGARRVWTL

SEQ ID NO: 2676 - protein, 9 aa, Severe acute respiratory syndrome coronavirus 2
  REGION 1..9: note = Table A: HLA-B*27:05H
RRVWTLMNV

SEQ ID NO: 2677 - protein, 9 aa, Severe acute respiratory syndrome coronavirus 2
  REGION 1..9: note = Table A: HLA-A*02:11H HLA-B*57:03H
RVWTLMNVL

SEQ ID NO: 2678 - protein, 9 aa, Severe acute respiratory syndrome coronavirus 2
  REGION 1..9: note = Table A: HLA-A*02:11H HLA-A*68:02H HLA-A*02:04M HLA-A*02:07H HLA-A*02:01M HLA-A*02:02H HLA-A*02:03M HLA-B*38:02M HLA-B*13:02H
TLMNVLTLV

SEQ ID NO: 2679 - protein, 9 aa, Severe acute respiratory syndrome coronavirus 2
  REGION 1..9: note = Table A: HLA-A*29:01M HLA-A*29:02M HLA-A*30:02H HLA-B*38:02H HLA-B*15:01H HLA-B*15:02H HLA-B*07:05H
LMNVLTLVY

SEQ ID NO: 2680 - protein, 9 aa, Severe acute respiratory syndrome coronavirus 2
  REGION 1..9: note = Table A: HLA-A*34:02H
MNVLTLVYK

SEQ ID NO: 2681 - protein, 9 aa, Severe acute respiratory syndrome coronavirus 2
  REGION 1..9: note = Table A: HLA-A*02:11H HLA-A*68:02M HLA-A*02:04M HLA-A*02:06M HLA-A*02:07H HLA-A*02:01H HLA-A*02:02H
NVLTLVYKV

SEQ ID NO: 2682 - protein, 9 aa, Severe acute respiratory syndrome coronavirus 2
  REGION 1..9: note = Table A: HLA-B*58:01H HLA-A*36:01H HLA-B*57:01H HLA-A*29:02H HLA-A*30:02H HLA-B*57:03H
LTLVYKVYY

SEQ ID NO: 2683 - protein, 9 aa, Severe acute respiratory syndrome coronavirus 2
  REGION 1..9: note = Table A: HLA-B*15:03H HLA-B*15:10H
YKVYYGNAL

SEQ ID NO: 2684 - protein, 9 aa, Severe acute respiratory syndrome coronavirus 2
  REGION 1..9: note = Table A: HLA-B*38:02H HLA-B*39:01H HLA-B*13:02M
YGNALDQAI

SEQ ID NO: 2685 - protein, 9 aa, Severe acute respiratory syndrome coronavirus 2
  REGION 1..9: note = Table A: HLA-A*11:303M HLA-C*16:01H HLA-C*16:04H HLA-C*03:03H HLA-B*53:01H HLA-C*03:02H HLA-C*03:04H HLA-B*35:03H HLA-C*15:05H HLA-C*12:03H HLA-B*35:01H HLA-B*35:02M HLA-B*35:08M HLA-B*51:01H HLA-B*35:07H
  REGION 1..9: note = CONT. FROM ABOVE: HLA-C*08:01M HLA-B*35:12M HLA-B*38:02M HLA- B*15:02M HLA-B*39:01H HLA-B*07:05M HLA-C*07:04H
NALDQAISM

SEQ ID NO: 2686 - protein, 9 aa, Severe acute respiratory syndrome coronavirus 2
  REGION 1..9: note = Table A: HLA-B*58:01H HLA-B*44:05H HLA-A*02:07H HLA-B*38:02H HLA-B*13:01M
ALDQAISMW

SEQ ID NO: 2687 - protein, 9 aa, Severe acute respiratory syndrome coronavirus 2
  REGION 1..9: note = Table A: HLA-B*38:02H HLA-B*39:01H
DQAISMWAL

SEQ ID NO: 2688 - protein, 9 aa, Severe acute respiratory syndrome coronavirus 2
  REGION 1..9: note = Table A: HLA-A*02:11H HLA-A*02:04M HLA-A*02:06H HLA-A*02:07M HLA-A*02:01M HLA-A*02:03H HLA-B*52:01H HLA-B*38:02H HLA-B*40:06H HLA-B*13:02H
SMWALIISV

SEQ ID NO: 2689 - protein, 9 aa, Severe acute respiratory syndrome coronavirus 2
  REGION 1..9: note = Table A: HLA-B*58:01H HLA-A*11:303M HLA-B*46:01H HLA-A*26:01M HLA-A*26:02H HLA-A*26:03M HLA-A*29:01M HLA-A*29:02M HLA-C*03:02M HLA-A*30:02H HLA-C*15:05H HLA-C*12:02M HLA-A*02:03H HLA-A*34:01H HLA-A*34:02H
  REGION 1..9: note = CONT. FROM ABOVE: HLA-C*07:27H HLA-B*35:01H HLA-B*38:02H HLA- B*15:01H HLA-B*15:02M HLA-B*15:03H HLA-B*07:05H HLA-C*02:02M HLA-B*15:11H
LIISVTSNY

SEQ ID NO: 2690 - protein, 9 aa, Severe acute respiratory syndrome coronavirus 2
  REGION 1..9: note = Table A: HLA-B*39:01H
SNYSGVVTT

SEQ ID NO: 2691 - protein, 9 aa, Severe acute respiratory syndrome coronavirus 2
  REGION 1..9: note = Table A: HLA-C*14:02H HLA-C*14:03M HLA-A*33:03H HLA-C*06:02H HLA-C*04:01H HLA-C*07:02H HLA-A*02:11H HLA-A*68:02M HLA-C*15:05H HLA-A*02:04H HLA-A*02:05H HLA-A*02:06H HLA-B*14:01H HLA-A*02:01M HLA-A*02:02M HLA-A*02:03M
  REGION 1..9: note = CONT. FROM ABOVE: HLA-A*24:02M HLA-B*51:01H HLA-A*24:07H HLA- C*08:01M HLA-A*23:01M HLA-B*38:02M HLA-B*39:01M HLA-B*07:05H HLA-B*13:02H
NYSGVVTTV

SEQ ID NO: 2692 - protein, 9 aa, Severe acute respiratory syndrome coronavirus 2
  REGION 1..9: note = Table A: HLA-A*11:303H HLA-B*46:01H HLA-C*03:04H HLA-B*35:03H HLA-C*15:05M HLA-C*12:02H HLA-B*35:01H HLA-B*38:02H HLA-B*15:02H HLA-B*07:05H HLA-C*07:04H
YSGVVTTVM

SEQ ID NO: 2693 - protein, 9 aa, Severe acute respiratory syndrome coronavirus 2
  REGION 1..9: note = Table A: HLA-A*68:02H HLA-C*15:05H HLA-C*15:02H HLA-A*02:04H HLA-A*02:05H HLA-A*02:06M HLA-A*02:08H HLA-A*02:01H HLA-A*02:03H HLA-C*17:01H HLA-C*08:01H HLA-B*38:02H HLA-B*40:06H HLA-B*13:02H HLA-C*07:04H
GVVTTVMFL

SEQ ID NO: 2694 - protein, 9 aa, Severe acute respiratory syndrome coronavirus 2
  REGION 1..9: note = Table A: HLA-A*68:02H HLA-A*02:06H
VVTTVMFLA

SEQ ID NO: 2695 - protein, 9 aa, Severe acute respiratory syndrome coronavirus 2
  REGION 1..9: note = Table A: HLA-A*36:01H HLA-A*34:02H HLA-A*66:01H
VTTVMFLAR

SEQ ID NO: 2696 - protein, 9 aa, Severe acute respiratory syndrome coronavirus 2
  REGION 1..9: note = Table A: HLA-C*14:02M HLA-C*14:03M HLA-A*24:07M HLA-A*23:01H HLA-B*15:02H
MFLARGIVF

SEQ ID NO: 2697 - protein, 9 aa, Severe acute respiratory syndrome coronavirus 2
  REGION 1..9: note = Table A: HLA-A*02:11M HLA-A*02:04M HLA-A*02:05H HLA-A*02:01H HLA-A*02:02H HLA-A*02:03H HLA-C*17:01M HLA-B*38:02H
FLARGIVFM

SEQ ID NO: 2698 - protein, 9 aa, Severe acute respiratory syndrome coronavirus 2
  REGION 1..9: note = Table A: HLA-A*29:02H
GIVFMCVEY

SEQ ID NO: 2699 - protein, 9 aa, Severe acute respiratory syndrome coronavirus 2
  REGION 1..9: note = Table A: HLA-C*04:03H
CVEYCPIFF

SEQ ID NO: 2700 - protein, 9 aa, Severe acute respiratory syndrome coronavirus 2
  REGION 1..9: note = Table A: HLA-B*49:01H
VEYCPIFFI

SEQ ID NO: 2701 - protein, 9 aa, Severe acute respiratory syndrome coronavirus 2
  REGION 1..9: note = Table A: HLA-C*14:02M HLA-C*14:03H HLA-A*24:02H HLA-A*24:07M HLA-A*23:01H HLA-B*07:05H
IFFITGNTL

SEQ ID NO: 2702 - protein, 9 aa, Severe acute respiratory syndrome coronavirus 2
  REGION 1..9: note = Table A: HLA-B*38:02H HLA-B*15:02M
TLQCIMLVY

SEQ ID NO: 2703 - protein, 9 aa, Severe acute respiratory syndrome coronavirus 2
  REGION 1..9: note = Table A: HLA-A*02:04H
CLLNRYFRL

SEQ ID NO: 2704 - protein, 9 aa, Severe acute respiratory syndrome coronavirus 2
  REGION 1..9: note = Table A: HLA-A*02:11H HLA-A*68:02H HLA-A*02:04H HLA-C*08:01H
LTLGVYDYL

SEQ ID NO: 2705 - protein, 9 aa, Severe acute respiratory syndrome coronavirus 2
  REGION 1..9: note = Table A: HLA-A*02:04H
TLGVYDYLV

SEQ ID NO: 2706 - protein, 9 aa, Severe acute respiratory syndrome coronavirus 2
  REGION 1..9: note = Table A: HLA-A*68:02H HLA-A*02:04H HLA-A*02:05H HLA-A*02:06H HLA-A*02:01H HLA-B*40:06H
GVYDYLVST

SEQ ID NO: 2707 - protein, 9 aa, Severe acute respiratory syndrome coronavirus 2
  REGION 1..9: note = Table A: HLA-C*14:02H HLA-C*14:03M HLA-A*33:03H HLA-B*18:01H HLA-A*24:02H HLA-A*24:07M HLA-A*23:01H HLA-B*38:02H HLA-B*15:02H HLA-B*39:01H HLA-B*07:05H
DYLVSTQEF

SEQ ID NO: 2708 - protein, 9 aa, Severe acute respiratory syndrome coronavirus 2
  REGION 1..9: note = Table A: HLA-A*34:01H HLA-A*66:01H
YLVSTQEFR

SEQ ID NO: 2709 - protein, 9 aa, Severe acute respiratory syndrome coronavirus 2
  REGION 1..9: note = Table A: HLA-B*58:01H HLA-A*36:01M HLA-A*29:01M HLA-A*29:02M HLA-A*30:02M HLA-C*15:05H HLA-B*38:02H
LVSTQEFRY

SEQ ID NO: 2710 - protein, 9 aa, Severe acute respiratory syndrome coronavirus 2
  REGION 1..9: note = Table A: HLA-B*58:02M HLA-C*16:01H HLA-C*15:02H
VSTQEFRYM

SEQ ID NO: 2711 - protein, 9 aa, Severe acute respiratory syndrome coronavirus 2
  REGION 1..9: note = Table A: HLA-C*06:02H HLA-B*27:02H HLA-B*14:02M HLA-B*14:01M HLA-B*38:02H HLA-B*39:01H
FRYMNSQGL

SEQ ID NO: 2712 - protein, 9 aa, Severe acute respiratory syndrome coronavirus 2
  REGION 1..9: note = Table A: HLA-A*24:02H HLA-A*24:07H
RYMNSQGLL

SEQ ID NO: 2713 - protein, 9 aa, Severe acute respiratory syndrome coronavirus 2
  REGION 1..9: note = Table A: HLA-A*11:303H HLA-A*03:02M HLA-A*11:01M HLA-A*11:02M HLA-A*33:03H HLA-A*68:01H HLA-A*34:02M HLA-C*07:27H
NSQGLLPPK

SEQ ID NO: 2714 - protein, 9 aa, Severe acute respiratory syndrome coronavirus 2
  REGION 1..9: note = Table A: HLA-A*02:11H HLA-B*38:02H HLA-B*13:02H
GLLPPKNSI

SEQ ID NO: 2715 - protein, 9 aa, Severe acute respiratory syndrome coronavirus 2
  REGION 1..9: note = Table A: HLA-B*54:01H
LPPKNSIDA

SEQ ID NO: 2716 - protein, 9 aa, Severe acute respiratory syndrome coronavirus 2
  REGION 1..9: note = Table A: HLA-B*07:04H
PPKNSIDAF

SEQ ID NO: 2717 - protein, 9 aa, Severe acute respiratory syndrome coronavirus 2
  REGION 1..9: note = Table A: HLA-A*02:07H HLA-B*13:02H
SIDAFKLNI

SEQ ID NO: 2718 - protein, 9 aa, Severe acute respiratory syndrome coronavirus 2
  REGION 1..9: note = Table A: HLA-A*33:01H HLA-B*53:01H HLA-A*68:01H HLA-A*68:02M HLA-B*35:03H HLA-C*15:05H HLA-A*34:02H HLA-B*51:01H HLA-B*35:07H HLA-B*38:02H HLA-B*57:03H
DAFKLNIKL

SEQ ID NO: 2719 - protein, 9 aa, Severe acute respiratory syndrome coronavirus 2
  REGION 1..9: note = Table A: HLA-B*07:04H
AFKLNIKLL

SEQ ID NO: 2720 - protein, 9 aa, Severe acute respiratory syndrome coronavirus 2
  REGION 1..9: note = Table A: HLA-A*74:01H HLA-B*08:01H HLA-A*02:11H HLA-C*15:02M HLA-A*02:04M HLA-A*02:06H HLA-A*02:07H HLA-A*02:08H HLA-A*02:01H HLA-A*02:02H HLA-A*02:03H HLA-B*38:02H HLA-B*40:06H HLA-B*13:02M
KLNIKLLGV

SEQ ID NO: 2721 - protein, 9 aa, Severe acute respiratory syndrome coronavirus 2
  REGION 1..9: note = Table A: HLA-B*56:01H HLA-B*55:02H HLA-C*15:05H HLA-B*55:01H HLA-B*07:04H
KPCIKVATV

SEQ ID NO: 2722 - protein, 9 aa, Severe acute respiratory syndrome coronavirus 2
  REGION 1..9: note = Table A: HLA-B*58:01H HLA-A*02:11H HLA-A*30:02H HLA-C*15:05H HLA-A*02:05H HLA-A*02:08M HLA-A*02:02M HLA-B*07:05H HLA-B*57:03M HLA-B*13:02H
KVATVQSKM

SEQ ID NO: 2723 - protein, 9 aa, Severe acute respiratory syndrome coronavirus 2
  REGION 1..9: note = Table A: HLA-A*02:03H
TVQSKMSDV

SEQ ID NO: 2724 - protein, 9 aa, Severe acute respiratory syndrome coronavirus 2
  REGION 1..9: note = Table A: HLA-C*08:02H HLA-C*05:01H
MSDVKCTSV

SEQ ID NO: 2725 - protein, 9 aa, Severe acute respiratory syndrome coronavirus 2
  REGION 1..9: note = Table A: HLA-B*15:02H
DVKCTSVVL

SEQ ID NO: 2726 - protein, 9 aa, Severe acute respiratory syndrome coronavirus 2
  REGION 1..9: note = Table A: HLA-A*68:02H HLA-C*15:05H HLA-C*15:02H HLA-B*13:02H
CTSVVLLSV

SEQ ID NO: 2727 - protein, 9 aa, Severe acute respiratory syndrome coronavirus 2
  REGION 1..9: note = Table A: HLA-C*15:05H HLA-B*38:02H
TSVVLLSVL

SEQ ID NO: 2728 - protein, 9 aa, Severe acute respiratory syndrome coronavirus 2
  REGION 1..9: note = Table A: HLA-A*11:303H HLA-A*02:11H HLA-A*02:04H HLA-A*02:06H HLA-A*02:07M HLA-B*14:01M HLA-A*02:01H HLA-A*02:02M HLA-A*02:03H HLA-C*08:01H HLA-B*38:02H HLA-B*13:02H
VLLSVLQQL

SEQ ID NO: 2729 - protein, 9 aa, Severe acute respiratory syndrome coronavirus 2
  REGION 1..9: note = Table A: HLA-B*14:02H HLA-B*14:01H HLA-B*38:02H HLA-B*39:01H
LRVESSSKL

SEQ ID NO: 2730 - protein, 9 aa, Severe acute respiratory syndrome coronavirus 2
  REGION 1..9: note = Table A: HLA-B*58:01H HLA-B*58:02H HLA-B*57:01H HLA-B*53:01H HLA-A*32:01H HLA-B*57:03M HLA-B*13:01M
RVESSSKLW

SEQ ID NO: 2731 - protein, 9 aa, Severe acute respiratory syndrome coronavirus 2
  REGION 1..9: note = Table A: HLA-B*45:01H HLA-B*49:01H HLA-B*50:01H
VESSSKLWA

SEQ ID NO: 2732 - protein, 9 aa, Severe acute respiratory syndrome coronavirus 2
  REGION 1..9: note = Table A: HLA-A*02:11H HLA-A*02:04H HLA-A*02:07H HLA-A*02:01M HLA-A*02:02H HLA-B*13:02H
KLWAQCVQL

SEQ ID NO: 2733 - protein, 9 aa, Severe acute respiratory syndrome coronavirus 2
  REGION 1..9: note = Table A: HLA-A*02:04H HLA-A*02:06M HLA-A*02:01H HLA-C*08:01H HLA-B*38:02H HLA-B*13:01M HLA-B*13:02H
VQLHNDILL

SEQ ID NO: 2734 - protein, 9 aa, Severe acute respiratory syndrome coronavirus 2
  REGION 1..9: note = Table A: HLA-A*02:05H HLA-A*02:01H HLA-A*02:02H HLA-A*02:03H HLA-B*38:02M
QLHNDILLA

SEQ ID NO: 2735 - protein, 9 aa, Severe acute respiratory syndrome coronavirus 2
  REGION 1..9: note = Table A: HLA-A*11:01H HLA-A*11:02H HLA-A*34:02H
LHNDILLAK

SEQ ID NO: 2736 - protein, 9 aa, Severe acute respiratory syndrome coronavirus 2
  REGION 1..9: note = Table A: HLA-A*02:05H HLA-A*02:01H HLA-A*02:02M HLA-A*02:03H HLA-B*38:02H
LLAKDTTEA

SEQ ID NO: 2737 - protein, 9 aa, Severe acute respiratory syndrome coronavirus 2
  REGION 1..9: note = Table A: HLA-A*11:303M HLA-C*16:04H HLA-B*57:01H HLA-A*25:01H HLA-B*46:01H HLA-B*08:01H HLA-B*53:01H HLA-C*03:02M HLA-C*12:02H HLA-C*07:27H HLA-B*35:01M HLA-B*35:07M HLA-C*08:01H HLA-B*38:02M HLA-B*07:04H
  REGION 1..9: note = CONT. FROM ABOVE: HLA-B*15:01M HLA-B*15:02M HLA-B*15:03H HLA- B*57:03M HLA-C*02:02M HLA-B*15:11M
LAKDTTEAF

SEQ ID NO: 2738 - protein, 9 aa, Severe acute respiratory syndrome coronavirus 2
  REGION 1..9: note = Table A: HLA-A*25:01H HLA-A*26:01H HLA-A*26:02M HLA-A*26:03H HLA-A*68:01H HLA-A*68:02M HLA-C*15:05H HLA-A*34:01H HLA-A*34:02H HLA-B*35:02H HLA-A*66:01M
DTTEAFEKM

SEQ ID NO: 2739 - protein, 9 aa, Severe acute respiratory syndrome coronavirus 2
  REGION 1..9: note = Table A: HLA-A*68:02H
TTEAFEKMV

SEQ ID NO: 2740 - protein, 9 aa, Severe acute respiratory syndrome coronavirus 2
  REGION 1..9: note = Table A: HLA-B*45:01H HLA-B*50:01H
TEAFEKMVS

SEQ ID NO: 2741 - protein, 9 aa, Severe acute respiratory syndrome coronavirus 2
  REGION 1..9: note = Table A: HLA-A*11:303H HLA-A*25:01M HLA-B*46:01H HLA-A*26:01H HLA-A*26:02H HLA-A*26:03H HLA-B*08:01H HLA-C*03:03H HLA-C*12:05H HLA-B*53:01M HLA-C*03:02H HLA-C*03:04H HLA-A*68:02H HLA-B*35:03M HLA-C*15:05H
  REGION 1..9: note = CONT. FROM ABOVE: HLA-B*14:02M HLA-C*12:02H HLA-C*12:03M HLA- A*02:05H HLA-A*34:01M HLA-A*34:02H HLA-B*35:01M HLA-B*35:02H HLA-B*51:01H HLA-C*17:01H HLA-B*35:07M HLA-C*08:01H HLA-B*35 :12H HLA-B*38:02M HLA-B*54:01H HLA-B*15:02M HLA-B*39:01H
  REGION 1..9: note = CONT. FROM ABOVE: HLA-B*07:05H HLA-A*66:01H
EAFEKMVSL

SEQ ID NO: 2742 - protein, 9 aa, Severe acute respiratory syndrome coronavirus 2
  REGION 1..9: note = Table A: HLA-C*04:01H HLA-C*04:03M
AFEKMVSLL

SEQ ID NO: 2743 - protein, 9 aa, Severe acute respiratory syndrome coronavirus 2
  REGION 1..9: note = Table A: HLA-A*02:11H HLA-A*02:02H
KMVSLLSVL

SEQ ID NO: 2744 - protein, 9 aa, Severe acute respiratory syndrome coronavirus 2
  REGION 1..9: note = Table A: HLA-A*68:02H
MVSLLSVLL

SEQ ID NO: 2745 - protein, 9 aa, Severe acute respiratory syndrome coronavirus 2
  REGION 1..9: note = Table A: HLA-A*29:02H HLA-A*02:11H HLA-C*15:05H HLA-A*02:04M HLA-A*02:01H HLA-B*38:02H HLA-B*15:02H HLA-B*13:02H
SLLSVLLSM

SEQ ID NO: 2746 - protein, 9 aa, Severe acute respiratory syndrome coronavirus 2
  REGION 1..9: note = Table A: HLA-A*02:06H
SVLLSMQGA

SEQ ID NO: 2747 - protein, 9 aa, Severe acute respiratory syndrome coronavirus 2
  REGION 1..9: note = Table A: HLA-A*03:02H HLA-A*11:01H HLA-A*11:02H HLA-B*27:02H HLA-A*34:02H
MQGAVDINK

SEQ ID NO: 2748 - protein, 9 aa, Severe acute respiratory syndrome coronavirus 2
  REGION 1..9: note = Table A: HLA-A*02:05M HLA-A*02:02H HLA-B*35:02H HLA-B*38:02H HLA-B*39:01H
QGAVDINKL

SEQ ID NO: 2749 - protein, 9 aa, Severe acute respiratory syndrome coronavirus 2
  REGION 1..9: note = Table A: HLA-B*45:01H
CEEMLDNRA

SEQ ID NO: 2750 - protein, 9 aa, Severe acute respiratory syndrome coronavirus 2
  REGION 1..9: note = Table A: HLA-B*45:01H
EEMLDNRAT

SEQ ID NO: 2751 - protein, 9 aa, Severe acute respiratory syndrome coronavirus 2
  REGION 1..9: note = Table A: HLA-B*44:05H HLA-A*33:03H HLA-A*26:03H HLA-B*08:01M HLA-A*02:11H HLA-A*68:02H HLA-C*15:05H HLA-B*14:02H HLA-B*14:01H HLA-A*02:02H HLA-A*34:01H HLA-B*38:02M HLA-B*15:02H HLA-B*39:01H HLA-B*07:05H
EMLDNRATL

SEQ ID NO: 2752 - protein, 9 aa, Severe acute respiratory syndrome coronavirus 2
  REGION 1..9: note = Table A: HLA-B*14:01H HLA-B*39:06M HLA-B*39:01H
NRATLQAIA

SEQ ID NO: 2753 - protein, 9 aa, Severe acute respiratory syndrome coronavirus 2
  REGION 1..9: note = Table A: HLA-C*14:03H HLA-A*11:303H HLA-B*44:05H HLA-B*46:01M HLA-B*27:02H HLA-B*35:01H HLA-B*15:13H HLA-B*38:02M HLA-B*15:01H HLA-B*15:02H HLA-B*39:01H HLA-B*07:05M
TLQAIASEF

SEQ ID NO: 2754 - protein, 9 aa, Severe acute respiratory syndrome coronavirus 2
  REGION 1..9: note = Table A: HLA-A*11:303M HLA-A*25:01H HLA-B*46:01H HLA-C*03:03H HLA-C*03:04H HLA-C*15:05M HLA-C*01:02M HLA-A*02:05H HLA-A*02:06H HLA-A*02:08H HLA-A*02:03H HLA-C*08:01M HLA-B*38:02M HLA-B*15:01H HLA-B*39:01H
  REGION 1..9: note = CONT. FROM ABOVE: HLA-B*13:01H
AIASEFSSL

SEQ ID NO: 2755 - protein, 9 aa, Severe acute respiratory syndrome coronavirus 2
  REGION 1..9: note = Table A: HLA-B*44:02M HLA-B*44:05M HLA-C*16:04H HLA-B*46:01M HLA-B*45:01H HLA-B*44:03H HLA-B*18:01H HLA-C*07:01H HLA-B*27:02H HLA-A*30:02H HLA-B*35:01H HLA-B*38:02H HLA-B*40:01H HLA-B*40:02M HLA-B*40:06H HLA-B*15:01H
  REGION 1..9: note = CONT. FROM ABOVE: HLA-B*15:02H HLA-B*15:03H HLA-B*39:01H HLA- B*07:05H HLA-B*41:02H HLA-B*49:01M HLA-B*50:01M
SEFSSLPSY

SEQ ID NO: 2756 - protein, 9 aa, Severe acute respiratory syndrome coronavirus 2
  REGION 1..9: note = Table A: HLA-B*54:01M
FSSLPSYAA

SEQ ID NO: 2757 - protein, 9 aa, Severe acute respiratory syndrome coronavirus 2
  REGION 1..9: note = Table A: HLA-B*58:01M HLA-B*58:02H HLA-C*14:03H HLA-A*11:303M HLA-B*44:05H HLA-B*57:01H HLA-A*25:01M HLA-B*46:01M HLA-A*26:01H HLA-A*26:02H HLA-A*26:03M HLA-C*03:03H HLA-C*03:02M HLA-C*03:04H HLA-A*30:02H
  REGION 1..9: note = CONT. FROM ABOVE: HLA-C*15:05M HLA-C*12:02H HLA-A*34:02H HLA- C*07:27H HLA-A*24:02H HLA-B*35:01H HLA-B*35:07H HLA-C*08:01H HLA-A*23:01H HLA-B*37:01H HLA-B*38:02M HLA-B*15:01M HLA-B*15 :02H HLA-B*15:03H HLA-B*39:01H HLA-B*07:05M HLA-B*57:03H
  REGION 1..9: note = CONT. FROM ABOVE: HLA-C*07:04H HLA-A*66:01H
SSLPSYAAF

SEQ ID NO: 2758 - protein, 9 aa, Severe acute respiratory syndrome coronavirus 2
  REGION 1..9: note = Table A: HLA-A*02:07H
SLPSYAAFA

SEQ ID NO: 2759 - protein, 9 aa, Severe acute respiratory syndrome coronavirus 2
  REGION 1..9: note = Table A: HLA-B*54:01H
LPSYAAFAT

SEQ ID NO: 2760 - protein, 9 aa, Severe acute respiratory syndrome coronavirus 2
  REGION 1..9: note = Table A: HLA-B*55:02H
PSYAAFATA

SEQ ID NO: 2761 - protein, 9 aa, Severe acute respiratory syndrome coronavirus 2
  REGION 1..9: note = Table A: HLA-A*11:303H HLA-C*16:04M HLA-B*46:01H HLA-B*55:02H HLA-C*12:03H HLA-A*02:05H HLA-B*38:02H HLA-B*54:01H
AAFATAQEA

SEQ ID NO: 2762 - protein, 9 aa, Severe acute respiratory syndrome coronavirus 2
  REGION 1..9: note = Table A: HLA-C*14:02M HLA-C*14:03H HLA-B*46:01H HLA-A*29:01H HLA-A*29:02H HLA-B*38:02H HLA-B*15:01M HLA-B*15:02H HLA-B*15:03H HLA-B*39:01H HLA-B*07:05H
AFATAQEAY

SEQ ID NO: 2763 - protein, 9 aa, Severe acute respiratory syndrome coronavirus 2
  REGION 1..9: note = Table A: HLA-B*54:01H HLA-B*39:01H
TAQEAYEQA

SEQ ID NO: 2764 - protein, 9 aa, Severe acute respiratory syndrome coronavirus 2
  REGION 1..9: note = Table A: HLA-B*38:02H HLA-B*39:01M HLA-B*13:01H HLA-B*13:02M
AQEAYEQAV

SEQ ID NO: 2765 - protein, 9 aa, Severe acute respiratory syndrome coronavirus 2
  REGION 1..9: note = Table A: HLA-B*45:01H HLA-B*40:06H HLA-B*50:01M
QEAYEQAVA

SEQ ID NO: 2766 - protein, 9 aa, Severe acute respiratory syndrome coronavirus 2
  REGION 1..9: note = Table A: HLA-A*02:05H HLA-B*38:02H
AVANGDSEV

SEQ ID NO: 2767 - protein, 9 aa, Severe acute respiratory syndrome coronavirus 2
  REGION 1..9: note = Table A: HLA-C*08:01H
VANGDSEVV

SEQ ID NO: 2768 - protein, 9 aa, Severe acute respiratory syndrome coronavirus 2
  REGION 1..9: note = Table A: HLA-A*36:01H HLA-A*34:02H
NGDSEVVLK

SEQ ID NO: 2769 - protein, 9 aa, Severe acute respiratory syndrome coronavirus 2
  REGION 1..9: note = Table A: HLA-A*11:303H HLA-A*03:01H HLA-A*03:02H HLA-A*11:01M HLA-A*11:02H HLA-A*36:01H HLA-B*27:02H HLA-A*68:01H HLA-A*34:02H HLA-C*07:27H HLA-B*37:01H HLA-B*13:02H
GDSEVVLKK

SEQ ID NO: 2770 - protein, 9 aa, Severe acute respiratory syndrome coronavirus 2
  REGION 1..9: note = Table A: HLA-A*68:01H HLA-A*34:01H HLA-A*34:02M HLA-A*66:01H
EVVLKKLKK

SEQ ID NO: 2771 - protein, 9 aa, Severe acute respiratory syndrome coronavirus 2
  REGION 1..9: note = Table A: HLA-B*08:01H HLA-B*07:04H
VLKKLKKSL

SEQ ID NO: 2772 - protein, 9 aa, Severe acute respiratory syndrome coronavirus 2
  REGION 1..9: note = Table A: HLA-A*02:05H HLA-A*02:08H HLA-A*02:02M HLA-A*02:03H HLA-B*38:02H
KLKKSLNVA

SEQ ID NO: 2773 - protein, 9 aa, Severe acute respiratory syndrome coronavirus 2
  REGION 1..9: note = Table A: HLA-C*14:03H HLA-A*11:303H HLA-B*44:05H HLA-B*46:01M HLA-C*15:05H HLA-C*01:02H HLA-C*12:02H HLA-B*37:01H HLA-B*38:02M HLA-B*07:02H HLA-B*15:01H HLA-B*15:02H HLA-B*15:03H HLA-B*07:05H
SLNVAKSEF

SEQ ID NO: 2774 - protein, 9 aa, Severe acute respiratory syndrome coronavirus 2
  REGION 1..9: note = Table A: HLA-A*68:01H
NVAKSEFDR

SEQ ID NO: 2775 - protein, 9 aa, Severe acute respiratory syndrome coronavirus 2
  REGION 1..9: note = Table A: HLA-A*11:303H HLA-B*44:02M HLA-B*44:05H HLA-C*16:04H HLA-B*46:01H HLA-B*45:01M HLA-B*08:01H HLA-B*44:03M HLA-B*18:01H HLA-C*07:01H HLA-A*68:02H HLA-B*35:03H HLA-C*15:05H HLA-B*14:02H HLA-A*02:05H
  REGION 1..9: note = CONT. FROM ABOVE: HLA-B*14:01M HLA-A*02:02H HLA-B*35:01H HLA- B*35:02H HLA-C*08:01H HLA-B*35:12H HLA-B*37:01H HLA-B*38:02H HLA-B*40:01H HLA-B*40:02H HLA-B*40:06M HLA-B*07:02M HLA-B*07 :04H HLA-B*15:01H HLA-B*15:02H HLA-B*39:01H HLA-B*07:05H
  REGION 1..9: note = CONT. FROM ABOVE: HLA-B*41:02H HLA-B*15:10H HLA-B*49:01H HLA- C*07:04H HLA-B*50:01H
SEFDRDAAM

SEQ ID NO: 2776 - protein, 9 aa, Severe acute respiratory syndrome coronavirus 2
  REGION 1..9: note = Table A: HLA-A*33:03H HLA-A*34:01H HLA-A*34:02H HLA-A*66:01H
FDRDAAMQR

SEQ ID NO: 2777 - protein, 9 aa, Severe acute respiratory syndrome coronavirus 2
  REGION 1..9: note = Table A: HLA-B*40:02H
RDAAMQRKL

SEQ ID NO: 2778 - protein, 9 aa, Severe acute respiratory syndrome coronavirus 2
  REGION 1..9: note = Table A: HLA-A*02:11H HLA-A*02:02H
AMQRKLEKM

SEQ ID NO: 2779 - protein, 9 aa, Severe acute respiratory syndrome coronavirus 2
  REGION 1..9: note = Table A: HLA-B*44:05H HLA-B*18:01M HLA-B*40:01H HLA-B*40:02M HLA-B*15:01H HLA-B*15:02H HLA-B*07:05H HLA-B*41:02H HLA-B*49:01H
LEKMADQAM

SEQ ID NO: 2780 - protein, 9 aa, Severe acute respiratory syndrome coronavirus 2
  REGION 1..9: note = Table A: HLA-A*11:303H HLA-C*04:03M HLA-B*53:01H HLA-C*03:04H HLA-B*35:03M HLA-C*15:05M HLA-A*02:07H HLA-B*35:01M HLA-B*35:02H HLA-B*35:08H HLA-B*35:07H HLA-C*08:01H HLA-C*08:02M HLA-B*35:12H HLA-B*38:02M
  REGION 1..9: note = CONT. FROM ABOVE: HLA-B*15:02H HLA-B*39:01H HLA-B*07:05H HLA- C*05:01M
MADQAMTQM

SEQ ID NO: 2781 - protein, 9 aa, Severe acute respiratory syndrome coronavirus 2
  REGION 1..9: note = Table A: HLA-B*44:02H HLA-B*44:03H HLA-B*07:05H
ADQAMTQMY

SEQ ID NO: 2782 - protein, 9 aa, Severe acute respiratory syndrome coronavirus 2
  REGION 1..9: note = Table A: HLA-A*34:01H HLA-A*34:02M
DQAMTQMYK

SEQ ID NO: 2783 - protein, 9 aa, Severe acute respiratory syndrome coronavirus 2
  REGION 1..9: note = Table A: HLA-A*02:02H
AMTQMYKQA

SEQ ID NO: 2784 - protein, 9 aa, Severe acute respiratory syndrome coronavirus 2
  REGION 1..9: note = Table A: HLA-A*74:01M HLA-A*11:01H HLA-A*33:01M HLA-A*33:03H HLA-A*68:01H HLA-A*34:01H HLA-A*34:02H HLA-A*31:01M HLA-A*66:01M
MTQMYKQAR

SEQ ID NO: 2785 - protein, 9 aa, Severe acute respiratory syndrome coronavirus 2
  REGION 1..9: note = Table A: HLA-B*45:01H HLA-B*41:02H
SEDKRAKVT

SEQ ID NO: 2786 - protein, 9 aa, Severe acute respiratory syndrome coronavirus 2
  REGION 1..9: note = Table A: HLA-B*27:05H
KRAKVTSAM

SEQ ID NO: 2787 - protein, 9 aa, Severe acute respiratory syndrome coronavirus 2
  REGION 1..9: note = Table A: HLA-C*15:05M HLA-A*02:08M HLA-B*07:05H HLA-B*57:03H
KVTSAMQTM

SEQ ID NO: 2788 - protein, 9 aa, Severe acute respiratory syndrome coronavirus 2
  REGION 1..9: note = Table A: HLA-C*15:05H
VTSAMQTML

SEQ ID NO: 2789 - protein, 9 aa, Severe acute respiratory syndrome coronavirus 2
  REGION 1..9: note = Table A: HLA-B*58:01H HLA-C*15:05H HLA-B*57:03H
TSAMQTMLF

SEQ ID NO: 2790 - protein, 9 aa, Severe acute respiratory syndrome coronavirus 2
  REGION 1..9: note = Table A: HLA-A*02:04H
AMQTMLFTM

SEQ ID NO: 2791 - protein, 9 aa, Severe acute respiratory syndrome coronavirus 2
  REGION 1..9: note = Table A: HLA-A*02:05H HLA-A*02:06H HLA-C*08:01H HLA-B*38:02M HLA-B*40:06H HLA-B*13:02H
MQTMLFTML

SEQ ID NO: 2792 - protein, 9 aa, Severe acute respiratory syndrome coronavirus 2
  REGION 1..9: note = Table A: HLA-A*74:01H HLA-A*11:01H HLA-A*11:02M HLA-A*36:01H HLA-A*33:03H HLA-A*34:01H HLA-A*34:02M HLA-A*31:01H HLA-A*66:01H
QTMLFTMLR

SEQ ID NO: 2793 - protein, 9 aa, Severe acute respiratory syndrome coronavirus 2
  REGION 1..9: note = Table A: HLA-A*02:11H HLA-A*02:04H HLA-A*02:02H
MLFTMLRKL

SEQ ID NO: 2794 - protein, 9 aa, Severe acute respiratory syndrome coronavirus 2
  REGION 1..9: note = Table A: HLA-B*14:02H HLA-B*14:01H HLA-B*38:02H HLA-B*39:01H
LRKLDNDAL

SEQ ID NO: 2795 - protein, 9 aa, Severe acute respiratory syndrome coronavirus 2
  REGION 1..9: note = Table A: HLA-A*33:01H
DALNNIINN

SEQ ID NO: 2796 - protein, 9 aa, Severe acute respiratory syndrome coronavirus 2
  REGION 1..9: note = Table A: HLA-A*02:11M HLA-A*02:04M HLA-A*02:05M HLA-A*02:07H HLA-A*02:08H HLA-B*14:01H HLA-A*02:01M HLA-A*02:02H HLA-A*02:03H HLA-B*38:02M
ALNNIINNA

SEQ ID NO: 2797 - protein, 9 aa, Severe acute respiratory syndrome coronavirus 2
  REGION 1..9: note = Table A: HLA-A*33:01H HLA-A*33:03M
LNNIINNAR

SEQ ID NO: 2798 - protein, 9 aa, Severe acute respiratory syndrome coronavirus 2
  REGION 1..9: note = Table A: HLA-B*51:01H
DGCVPLNII

SEQ ID NO: 2799 - protein, 9 aa, Severe acute respiratory syndrome coronavirus 2
  REGION 1..9: note = Table A: HLA-B*56:01H HLA-B*55:02M HLA-B*55:01H HLA-B*51:01H HLA-B*54:01H
VPLNIIPLT

SEQ ID NO: 2800 - protein, 9 aa, Severe acute respiratory syndrome coronavirus 2
  REGION 1..9: note = Table A: HLA-B*56:01H HLA-B*55:02H HLA-A*02:05H HLA-B*38:02H HLA-B*39:06H HLA-B*54:01H
NIIPLTTAA

SEQ ID NO: 2801 - protein, 9 aa, Severe acute respiratory syndrome coronavirus 2
  REGION 1..9: note = Table A: HLA-A*03:02H HLA-A*34:02H
IIPLTTAAK

SEQ ID NO: 2802 - protein, 9 aa, Severe acute respiratory syndrome coronavirus 2
  REGION 1..9: note = Table A: HLA-B*53:01H HLA-B*35:03M HLA-C*15:05M HLA-B*35:01H HLA-B*07:02H HLA-B*07:05M
IPLTTAAKL

SEQ ID NO: 2803 - protein, 9 aa, Severe acute respiratory syndrome coronavirus 2
  REGION 1..9: note = Table A: HLA-A*68:02H HLA-C*15:05H HLA-C*15:02H HLA-A*02:03H
TTAAKLMVV

SEQ ID NO: 2804 - protein, 9 aa, Severe acute respiratory syndrome coronavirus 2
  REGION 1..9: note = Table A: HLA-B*53:01H HLA-C*15:05H HLA-B*51:01M HLA-B*38:02H HLA-B*57:03H
TAAKLMVVI

SEQ ID NO: 2805 - protein, 9 aa, Severe acute respiratory syndrome coronavirus 2
  REGION 1..9: note = Table A: HLA-B*58:01H HLA-A*36:01H HLA-A*29:02H HLA-A*02:11H HLA-A*30:02M HLA-B*38:02H HLA-B*15:01H HLA-B*15:03H
KLMVVIPDY

SEQ ID NO: 2806 - protein, 9 aa, Severe acute respiratory syndrome coronavirus 2
  REGION 1..9: note = Table A: HLA-B*35:02H
MVVIPDYNT

SEQ ID NO: 2807 - protein, 9 aa, Severe acute respiratory syndrome coronavirus 2
  REGION 1..9: note = Table A: HLA-B*58:01M HLA-B*58:02H HLA-A*11:303M HLA-A*36:01H HLA-B*57:01H HLA-A*25:01M HLA-B*46:01H HLA-A*26:01M HLA-A*26:02M HLA-A*26:03M HLA-A*29:01M HLA-A*29:02M HLA-C*03:02M HLA-A*30:02H HLA-C*15:05H
  REGION 1..9: note = CONT. FROM ABOVE: HLA-C*12:02M HLA-A*02:05H HLA-A*34:01H HLA- C*07:27H HLA-B*35:01H HLA-B*35:08M HLA-B*35:07M HLA-C*08:01H HLA-B*15:13M HLA-B*38:02H HLA-B*15:01H HLA-B*15:02M HLA-B*15 :03H HLA-B*39:01H HLA-B*07:05M HLA-B*57:03M HLA-C*02:02H
  REGION 1..9: note = CONT. FROM ABOVE: HLA-B*15:11M
VVIPDYNTY

SEQ ID NO: 2808 - protein, 9 aa, Severe acute respiratory syndrome coronavirus 2
  REGION 1..9: note = Table A: HLA-A*03:01H HLA-A*03:02H HLA-A*11:01H HLA-A*11:02M HLA-A*36:01H HLA-A*34:02H
VIPDYNTYK

SEQ ID NO: 2809 - protein, 9 aa, Severe acute respiratory syndrome coronavirus 2
  REGION 1..9: note = Table A: HLA-B*58:01H HLA-A*36:01H HLA-A*01:01M HLA-B*35:01M HLA-B*35:08H HLA-B*38:02M HLA-B*15:02H HLA-B*39:01H HLA-B*07:05H
TCDGTTFTY

SEQ ID NO: 2810 - protein, 9 aa, Severe acute respiratory syndrome coronavirus 2
  REGION 1..9: note = Table A: HLA-A*68:02H
TTFTYASAL

SEQ ID NO: 2811 - protein, 9 aa, Severe acute respiratory syndrome coronavirus 2
  REGION 1..9: note = Table A: HLA-A*24:02H HLA-A*24:07M
TFTYASALW

SEQ ID NO: 2812 - protein, 9 aa, Severe acute respiratory syndrome coronavirus 2
  REGION 1..9: note = Table A: HLA-C*06:02H HLA-A*24:02M HLA-A*24:07H HLA-C*08:01H HLA-A*23:01M HLA-B*38:02H
TYASALWEI

SEQ ID NO: 2813 - protein, 9 aa, Severe acute respiratory syndrome coronavirus 2
  REGION 1..9: note = Table A: HLA-A*11:303H HLA-C*06:02H HLA-C*12:05M HLA-A*02:11H HLA-A*68:02M HLA-C*15:05H HLA-C*15:02H HLA-A*02:04M HLA-A*02:05H HLA-A*02:06M HLA-A*02:07H HLA-A*02:01H HLA-A*02:03H HLA-C*08:01H HLA-B*38:02M
  REGION 1..9: note = CONT. FROM ABOVE: HLA-B*40:06H HLA-B*13:02H
SALWEIQQV

SEQ ID NO: 2814 - protein, 9 aa, Severe acute respiratory syndrome coronavirus 2
  REGION 1..9: note = Table A: HLA-A*02:11H HLA-A*02:04M HLA-A*02:07M HLA-B*14:01H HLA-A*02:01M HLA-A*02:02M HLA-A*02:03H HLA-B*52:01H HLA-B*38:02M HLA-B*40:06H HLA-B*13:02H
ALWEIQQVV

SEQ ID NO: 2815 - protein, 9 aa, Severe acute respiratory syndrome coronavirus 2
  REGION 1..9: note = Table A: HLA-B*45:01M HLA-B*39:06H HLA-B*40:02H HLA-B*40:06M HLA-B*50:01M
WEIQQVVDA

SEQ ID NO: 2816 - protein, 9 aa, Severe acute respiratory syndrome coronavirus 2
  REGION 1..9: note = Table A: HLA-A*02:05H HLA-A*02:08H HLA-B*35:02H HLA-B*15:13H HLA-B*38:02M HLA-B*13:01H HLA-B*13:02H
QVVDADSKI

SEQ ID NO: 2817 - protein, 9 aa, Severe acute respiratory syndrome coronavirus 2
  REGION 1..9: note = Table A: HLA-A*02:07H HLA-C*08:02H
VVDADSKIV

SEQ ID NO: 2818 - protein, 9 aa, Severe acute respiratory syndrome coronavirus 2
  REGION 1..9: note = Table A: HLA-A*11:303H HLA-B*08:01H HLA-C*04:03H HLA-B*53:01M HLA-A*68:02H HLA-B*35:03M HLA-C*15:05M HLA-A*02:07H HLA-B*35:01M HLA-B*35:02H HLA-B*35:08M HLA-B*51:01H HLA-C*17:01H HLA-B*35:07H HLA-C*08:01M
  REGION 1..9: note = CONT. FROM ABOVE: HLA-C*08:02M HLA-B*35:12H HLA-B*38:01H HLA- B*38:02M HLA-B*39:01H HLA-B*07:05H HLA-C*05:01M
DADSKIVQL

SEQ ID NO: 2819 - protein, 9 aa, Severe acute respiratory syndrome coronavirus 2
  REGION 1..9: note = Table A: HLA-B*38:02M HLA-B*15:03M
SKIVQLSEI

SEQ ID NO: 2820 - protein, 9 aa, Severe acute respiratory syndrome coronavirus 2
  REGION 1..9: note = Table A: HLA-C*15:05H HLA-B*35:02H HLA-B*15:02H HLA-C*07:04H
IVQLSEISM

SEQ ID NO: 2821 - protein, 9 aa, Severe acute respiratory syndrome coronavirus 2
  REGION 1..9: note = Table A: HLA-B*45:01M HLA-B*40:06H HLA-B*50:01M
SEISMDNSP

SEQ ID NO: 2822 - protein, 9 aa, Severe acute respiratory syndrome coronavirus 2
  REGION 1..9: note = Table A: HLA-B*58:01M HLA-B*58:02H HLA-A*11:303H HLA-B*57:01H HLA-B*46:01H HLA-C*03:03M HLA-A*02:11H HLA-C*03:02H HLA-C*03:04H HLA-A*68:02H HLA-B*35:03H HLA-C*15:05M HLA-C*15:02M HLA-A*02:04H HLA-A*02:05H
  REGION 1..9: note = CONT. FROM ABOVE: HLA-A*02:06H HLA-A*02:01M HLA-A*02:02H HLA- C*07:27M HLA-A*24:02H HLA-C*17:01H HLA-C*08:01M HLA-A*23:01H HLA-B*38:02H HLA-B*39:01H HLA-B*07:05H HLA-B*57:03M HLA-C*07 :04H
ISMDNSPNL

SEQ ID NO: 2823 - protein, 9 aa, Severe acute respiratory syndrome coronavirus 2
  REGION 1..9: note = Table A: HLA-B*44:03H HLA-B*38:02H
MDNSPNLAW

SEQ ID NO: 2824 - protein, 9 aa, Severe acute respiratory syndrome coronavirus 2
  REGION 1..9: note = Table A: HLA-C*15:05H
SPNLAWPLI

SEQ ID NO: 2825 - protein, 9 aa, Severe acute respiratory syndrome coronavirus 2
  REGION 1..9: note = Table A: HLA-B*56:01H HLA-A*02:11H HLA-B*55:02H HLA-B*54:01M
LAWPLIVTA

SEQ ID NO: 2826 - protein, 9 aa, Severe acute respiratory syndrome coronavirus 2
  REGION 1..9: note = Table A: HLA-C*14:02M HLA-C*14:03H HLA-C*04:01H HLA-C*04:03M HLA-C*15:05H HLA-C*01:02M HLA-A*02:07H HLA-A*24:02H HLA-A*24:07M HLA-A*23:01H HLA-B*07:05H
AWPLIVTAL

SEQ ID NO: 2827 - protein, 9 aa, Severe acute respiratory syndrome coronavirus 2
  REGION 1..9: note = Table A: HLA-A*34:01H
WPLIVTALR

SEQ ID NO: 2828 - protein, 9 aa, Severe acute respiratory syndrome coronavirus 2
  REGION 1..9: note = Table A: HLA-C*15:05H HLA-B*51:01M HLA-B*38:02H HLA-B*07:05H
TALRANSAV

SEQ ID NO: 2829 - protein, 9 aa, Severe acute respiratory syndrome coronavirus 2
  REGION 1..9: note = Table A: HLA-A*03:01H
ALRANSAVK

SEQ ID NO: 2830 - protein, 9 aa, Severe acute respiratory syndrome coronavirus 2
  REGION 1..9: note = Table A: HLA-C*06:02H HLA-B*27:05H HLA-B*14:02H HLA-B*14:01H HLA-B*38:02H HLA-B*39:01H
LRANSAVKL

SEQ ID NO: 2831 - protein, 9 aa, Severe acute respiratory syndrome coronavirus 2
  REGION 1..9: note = Table A: HLA-B*42:01M HLA-A*11:303H HLA-B*46:01H HLA-B*08:01M HLA-A*30:01H HLA-C*15:05M HLA-C*01:02H HLA-A*02:05M HLA-A*02:08M HLA-B*14:01H HLA-A*02:02H HLA-A*02:03H HLA-C*08:01H HLA-B*38:02M HLA-B*07:02M
  REGION 1..9: note = CONT. FROM ABOVE: HLA-B*07:04H HLA-B*15:01M HLA-B*15:02H HLA- B*07:05H HLA-B*41:02H
AVKLQNNEL

SEQ ID NO: 2832 - protein, 9 aa, Severe acute respiratory syndrome coronavirus 2
  REGION 1..9: note = Table A: HLA-B*39:06H
QNNELSPVA

SEQ ID NO: 2833 - protein, 9 aa, Severe acute respiratory syndrome coronavirus 2
  REGION 1..9: note = Table A: HLA-C*04:03H HLA-B*35:03H HLA-B*35:02H HLA-C*08:02H HLA-B*35:12M HLA-B*39:01M
NNELSPVAL

SEQ ID NO: 2834 - protein, 9 aa, Severe acute respiratory syndrome coronavirus 2
  REGION 1..9: note = Table A: HLA-A*33:01H HLA-A*33:03H HLA-A*68:01H HLA-A*34:01H HLA-A*34:02H
NELSPVALR

SEQ ID NO: 2835 - protein, 9 aa, Severe acute respiratory syndrome coronavirus 2
  REGION 1..9: note = Table A: HLA-A*34:01H
ELSPVALRQ

SEQ ID NO: 2836 - protein, 9 aa, Severe acute respiratory syndrome coronavirus 2
  REGION 1..9: note = Table A: HLA-C*14:03H HLA-C*01:02M
LSPVALRQM

SEQ ID NO: 2837 - protein, 9 aa, Severe acute respiratory syndrome coronavirus 2
  REGION 1..9: note = Table A: HLA-B*38:02H
CAAGTTQTA

SEQ ID NO: 2838 - protein, 9 aa, Severe acute respiratory syndrome coronavirus 2
  REGION 1..9: note = Table A: HLA-C*15:05H
AAGTTQTAC

SEQ ID NO: 2839 - protein, 9 aa, Severe acute respiratory syndrome coronavirus 2
  REGION 1..9: note = Table A: HLA-A*11:303H HLA-B*35:03H HLA-B*35:01H HLA-B*35:02H HLA-B*35:08H HLA-C*08:01H HLA-B*35:12H HLA-B*38:02H
TACTDDNAL

SEQ ID NO: 2840 - protein, 9 aa, Severe acute respiratory syndrome coronavirus 2
  REGION 1..9: note = Table A: HLA-B*58:01M HLA-A*11:303H HLA-A*03:01M HLA-A*11:01M HLA-A*11:02H HLA-A*36:01H HLA-A*29:01H HLA-A*29:02M HLA-A*01:01H HLA-A*30:02H HLA-C*15:05H HLA-A*34:02M HLA-C*07:27H HLA-B*35:01H HLA-B*35:08H
  REGION 1..9: note = CONT. FROM ABOVE: HLA-B*38:02H HLA-B*15:01H HLA-B*39:01H HLA- B*07:05H
CTDDNALAY

SEQ ID NO: 2841 - protein, 9 aa, Severe acute respiratory syndrome coronavirus 2
  REGION 1..9: note = Table A: HLA-A*36:01H
TDDNALAYY

SEQ ID NO: 2842 - protein, 9 aa, Severe acute respiratory syndrome coronavirus 2
  REGION 1..9: note = Table A: HLA-A*11:303H HLA-A*74:01H HLA-A*03:01M HLA-A*03:02M HLA-A*11:01H HLA-A*11:02H HLA-A*36:01H HLA-B*27:02H HLA-A*34:02H
ALAYYNTTK

SEQ ID NO: 2843 - protein, 9 aa, Severe acute respiratory syndrome coronavirus 2
  REGION 1..9: note = Table A: HLA-A*33:03M
YYNTTKGGR

SEQ ID NO: 2844 - protein, 9 aa, Severe acute respiratory syndrome coronavirus 2
  REGION 1..9: note = Table A: HLA-B*42:01H HLA-B*08:01H HLA-C*07:01H HLA-A*30:01H HLA-A*68:02H HLA-B*07:04H HLA-B*57:03H
TTKGGRFVL

SEQ ID NO: 2845 - protein, 9 aa, Severe acute respiratory syndrome coronavirus 2
  REGION 1..9: note = Table A: HLA-A*02:04H
FVLALLSDL

SEQ ID NO: 2846 - protein, 9 aa, Severe acute respiratory syndrome coronavirus 2
  REGION 1..9: note = Table A: HLA-A*02:04M HLA-A*02:01H
ALLSDLQDL

SEQ ID NO: 2847 - protein, 9 aa, Severe acute respiratory syndrome coronavirus 2
  REGION 1..9: note = Table A: HLA-B*58:01H HLA-A*36:01M HLA-B*57:01M HLA-A*01:01H HLA-C*04:03H HLA-B*53:01M HLA-C*08:02H HLA-B*38:02H HLA-B*57:03H HLA-B*13:01M
LSDLQDLKW

SEQ ID NO: 2848 - protein, 9 aa, Severe acute respiratory syndrome coronavirus 2
  REGION 1..9: note = Table A: HLA-A*33:01H HLA-A*33:03H
DLQDLKWAR

SEQ ID NO: 2849 - protein, 9 aa, Severe acute respiratory syndrome coronavirus 2
  REGION 1..9: note = Table A: HLA-A*33:01H
DLKWARFPK

SEQ ID NO: 2850 - protein, 9 aa, Severe acute respiratory syndrome coronavirus 2
  REGION 1..9: note = Table A: HLA-B*58:01H HLA-A*36:01H HLA-A*01:01H
KSDGTGTIY

SEQ ID NO: 2851 - protein, 9 aa, Severe acute respiratory syndrome coronavirus 2
  REGION 1..9: note = Table A: HLA-A*11:01H HLA-A*68:02H HLA-C*15:05H HLA-A*02:05H HLA-A*02:08H HLA-A*02:02H HLA-B*57:03H
GTGTIYTEL

SEQ ID NO: 2852 - protein, 9 aa, Severe acute respiratory syndrome coronavirus 2
  REGION 1..9: note = Table A: HLA-B*44:05M HLA-B*44:03H HLA-B*18:01H HLA-B*37:01H HLA-B*40:02H HLA-B*07:05H HLA-B*41:02H HLA-B*49:01H
TELEPPCRF

SEQ ID NO: 2853 - protein, 9 aa, Severe acute respiratory syndrome coronavirus 2
  REGION 1..9: note = Table A: HLA-A*11:303H HLA-A*03:01M HLA-A*03:02M HLA-A*11:01M HLA-A*11:02M HLA-A*36:01M HLA-A*30:02H HLA-A*34:02H HLA-C*07:27H HLA-A*66:01H
VTDTPKGPK

SEQ ID NO: 2854 - protein, 9 aa, Severe acute respiratory syndrome coronavirus 2
  REGION 1..9: note = Table A: HLA-A*34:02H
DTPKGPKVK

SEQ ID NO: 2855 - protein, 9 aa, Severe acute respiratory syndrome coronavirus 2
  REGION 1..9: note = Table A: HLA-A*30:02H HLA-B*35:01H HLA-B*35:07M HLA-B*38:02H HLA-B*07:04M HLA-B*15:02H HLA-B*15:11M
TPKGPKVKY

SEQ ID NO: 2856 - protein, 9 aa, Severe acute respiratory syndrome coronavirus 2
  REGION 1..9: note = Table A: HLA-B*08:01H HLA-B*07:04M
GPKVKYLYF

SEQ ID NO: 2857 - protein, 9 aa, Severe acute respiratory syndrome coronavirus 2
  REGION 1..9: note = Table A: HLA-A*23:01H
KYLYFIKGL

SEQ ID NO: 2858 - protein, 9 aa, Severe acute respiratory syndrome coronavirus 2
  REGION 1..9: note = Table A: HLA-C*14:02H HLA-C*14:03H HLA-C*04:03H HLA-A*02:11H HLA-C*01:02H HLA-A*02:04H HLA-A*02:05H HLA-A*02:02H HLA-A*24:02M HLA-C*17:01H HLA-A*24:07M HLA-A*23:01M HLA-B*38:02H
YFIKGLNNL

SEQ ID NO: 2859 - protein, 9 aa, Severe acute respiratory syndrome coronavirus 2
  REGION 1..9: note = Table A: HLA-A*02:02H
GLNNLNRGM

SEQ ID NO: 2860 - protein, 9 aa, Severe acute respiratory syndrome coronavirus 2
  REGION 1..9: note = Table A: HLA-B*08:01H HLA-B*14:02H HLA-B*14:01H
NNLNRGMVL

SEQ ID NO: 2861 - protein, 9 aa, Severe acute respiratory syndrome coronavirus 2
  REGION 1..9: note = Table A: HLA-C*07:01H HLA-B*14:02H HLA-B*14:01H HLA-B*39:01H
NRGMVLGSL

SEQ ID NO: 2862 - protein, 9 aa, Severe acute respiratory syndrome coronavirus 2
  REGION 1..9: note = Table A: HLA-B*50:01H
GMVLGSLAA

SEQ ID NO: 2863 - protein, 9 aa, Severe acute respiratory syndrome coronavirus 2
  REGION 1..9: note = Table A: HLA-A*02:01H HLA-B*38:02H HLA-B*54:01H
MVLGSLAAT

SEQ ID NO: 2864 - protein, 9 aa, Severe acute respiratory syndrome coronavirus 2
  REGION 1..9: note = Table A: HLA-A*02:11H HLA-A*02:01M HLA-A*02:02H HLA-A*02:03M HLA-B*38:02H HLA-B*13:02H
VLGSLAATV

SEQ ID NO: 2865 - protein, 9 aa, Severe acute respiratory syndrome coronavirus 2
  REGION 1..9: note = Table A: HLA-B*48:01H HLA-A*11:303H HLA-A*11:01H HLA-A*11:02H HLA-C*15:05M HLA-C*15:02H HLA-C*17:01H HLA-B*40:02H HLA-B*57:03M HLA-B*13:02H
GSLAATVRL

SEQ ID NO: 2866 - protein, 9 aa, Severe acute respiratory syndrome coronavirus 2
  REGION 1..9: note = Table A: HLA-B*56:01H HLA-C*12:05H HLA-A*02:11H HLA-B*55:02H HLA-A*68:02H HLA-B*38:02H HLA-B*54:01M HLA-B*13:02H
LAATVRLQA

SEQ ID NO: 2867 - protein, 9 aa, Severe acute respiratory syndrome coronavirus 2
  REGION 1..9: note = Table A: HLA-B*55:01H
TVRLQAGNA

SEQ ID NO: 2868 - protein, 9 aa, Severe acute respiratory syndrome coronavirus 2
  REGION 1..9: note = Table A: HLA-B*14:01M HLA-B*39:01H
VRLQAGNAT

SEQ ID NO: 2869 - protein, 9 aa, Severe acute respiratory syndrome coronavirus 2
  REGION 1..9: note = Table A: HLA-A*02:05M HLA-A*02:08H HLA-A*02:03H HLA-B*38:02H HLA-B*39:01H HLA-B*13:02H
LQAGNATEV

SEQ ID NO: 2870 - protein, 9 aa, Severe acute respiratory syndrome coronavirus 2
  REGION 1..9: note = Table A: HLA-B*44:05H HLA-B*45:01H HLA-B*40:02M HLA-B*07:05H HLA-B*41:02M HLA-B*49:01H HLA-B*50:01M
TEVPANSTV

SEQ ID NO: 2871 - protein, 9 aa, Severe acute respiratory syndrome coronavirus 2
  REGION 1..9: note = Table A: HLA-A*25:01H HLA-A*26:01H HLA-A*26:02H HLA-A*26:03M HLA-A*68:01H HLA-A*68:02H HLA-C*15:05H HLA-A*34:01H HLA-A*34:02H HLA-B*39:01H HLA-A*66:01H
EVPANSTVL

SEQ ID NO: 2872 - protein, 9 aa, Severe acute respiratory syndrome coronavirus 2
  REGION 1..9: note = Table A: HLA-C*15:05H HLA-B*35:01H
PANSTVLSF

SEQ ID NO: 2873 - protein, 9 aa, Severe acute respiratory syndrome coronavirus 2
  REGION 1..9: note = Table A: HLA-A*25:01H
STVLSFCAF

SEQ ID NO: 2874 - protein, 9 aa, Severe acute respiratory syndrome coronavirus 2
  REGION 1..9: note = Table A: HLA-A*03:02H HLA-A*34:02H
CAFAVDAAK

SEQ ID NO: 2875 - protein, 9 aa, Severe acute respiratory syndrome coronavirus 2
  REGION 1..9: note = Table A: HLA-A*11:303H HLA-C*16:01H HLA-C*16:04H HLA-B*46:01H HLA-A*26:01H HLA-A*26:03H HLA-C*03:03M HLA-C*12:05H HLA-B*53:01H HLA-C*03:02H HLA-C*03:04M HLA-B*35:03H HLA-C*12:02H HLA-C*12:03H HLA-A*34:01M
  REGION 1..9: note = CONT. FROM ABOVE: HLA-A*34:02H HLA-C*07:27M HLA-B*35:01H HLA- B*35:08M HLA-B*35:07H HLA-B*38:02H HLA-B*15:01M HLA-B*15:02H HLA-B*15:03H HLA-B*07:05H HLA-C*02:02M HLA-B*15:11M HLA-A*66 :01H
FAVDAAKAY

SEQ ID NO: 2876 - protein, 9 aa, Severe acute respiratory syndrome coronavirus 2
  REGION 1..9: note = Table A: HLA-A*11:303M HLA-A*74:01H HLA-A*03:01M HLA-A*03:02H HLA-A*11:01H HLA-A*11:02H HLA-A*36:01H HLA-A*30:02H HLA-A*34:02M HLA-C*07:27M HLA-A*31:01H
AVDAAKAYK

SEQ ID NO: 2877 - protein, 9 aa, Severe acute respiratory syndrome coronavirus 2
  REGION 1..9: note = Table A: HLA-A*26:01H HLA-B*35:01H
DAAKAYKDY

SEQ ID NO: 2878 - protein, 9 aa, Severe acute respiratory syndrome coronavirus 2
  REGION 1..9: note = Table A: HLA-B*42:01H HLA-B*58:02H HLA-C*16:01H HLA-B*08:01H HLA-A*02:11H HLA-A*30:02H HLA-A*68:02H HLA-A*02:05H HLA-A*02:02H HLA-C*08:01H HLA-B*38:02H HLA-B*07:04H HLA-B*41:02H HLA-B*57:03H HLA-C*02:02H
AAKAYKDYL

SEQ ID NO: 2879 - protein, 9 aa, Severe acute respiratory syndrome coronavirus 2
  REGION 1..9: note = Table A: HLA-A*02:03H HLA-B*38:02M
YLASGGQPI

SEQ ID NO: 2880 - protein, 9 aa, Severe acute respiratory syndrome coronavirus 2
  REGION 1..9: note = Table A: HLA-B*13:02H
GGQPITNCV

SEQ ID NO: 2881 - protein, 9 aa, Severe acute respiratory syndrome coronavirus 2
  REGION 1..9: note = Table A: HLA-B*35:03H HLA-C*15:05M HLA-B*35:01H HLA-B*35:07H HLA-B*07:05H
QPITNCVKM

SEQ ID NO: 2882 - protein, 9 aa, Severe acute respiratory syndrome coronavirus 2
  REGION 1..9: note = Table A: HLA-B*38:01H HLA-B*38:02H HLA-B*39:01H HLA-B*13:02H HLA-B*15:10H
THTGTGQAI

SEQ ID NO: 2883 - protein, 9 aa, Severe acute respiratory syndrome coronavirus 2
  REGION 1..9: note = Table A: HLA-C*15:05H HLA-B*51:01H
TGTGQAITV

SEQ ID NO: 2884 - protein, 9 aa, Severe acute respiratory syndrome coronavirus 2
  REGION 1..9: note = Table A: HLA-A*11:303H HLA-C*16:04H HLA-B*56:01H HLA-C*12:05H HLA-B*55:02M HLA-A*68:02H HLA-B*35:03H HLA-B*55:01H HLA-A*02:05M HLA-A*02:06H HLA-B*35:01H HLA-C*08:01H HLA-B*38:02H HLA-B*39:06H HLA-B*54:01M
QAITVTPEA

SEQ ID NO: 2885 - protein, 9 aa, Severe acute respiratory syndrome coronavirus 2
  REGION 1..9: note = Table A: HLA-B*53:01H HLA-B*35:03H HLA-B*35:01M HLA-B*35:02M HLA-B*35:08M HLA-B*35:07H HLA-B*35:12M HLA-B*38:02H HLA-B*39:01H
EANMDQESF

SEQ ID NO: 2886 - protein, 9 aa, Severe acute respiratory syndrome coronavirus 2
  REGION 1..9: note = Table A: HLA-B*45:01M HLA-B*49:01H HLA-B*50:01M
QESFGGASC

SEQ ID NO: 2887 - protein, 9 aa, Severe acute respiratory syndrome coronavirus 2
  REGION 1..9: note = Table A: HLA-A*11:01H HLA-A*11:02H HLA-A*34:02H
CHIDHPNPK

SEQ ID NO: 2888 - protein, 9 aa, Severe acute respiratory syndrome coronavirus 2
  REGION 1..9: note = Table A: HLA-B*44:05H HLA-B*18:01H HLA-B*37:01M HLA-B*40:02H HLA-B*07:05H HLA-B*41:02H HLA-C*07:04H
IDHPNPKGF

SEQ ID NO: 2889 - protein, 9 aa, Severe acute respiratory syndrome coronavirus 2
  REGION 1..9: note = Table A: HLA-A*29:02H HLA-A*30:02H
GFCDLKGKY

SEQ ID NO: 2890 - protein, 9 aa, Severe acute respiratory syndrome coronavirus 2
  REGION 1..9: note = Table A: HLA-B*08:01M HLA-B*38:02H
DLKGKYVQI

SEQ ID NO: 2891 - protein, 9 aa, Severe acute respiratory syndrome coronavirus 2
  REGION 1..9: note = Table A: HLA-B*48:01H HLA-B*39:06H HLA-B*15:03H
GKYVQIPTT

SEQ ID NO: 2892 - protein, 9 aa, Severe acute respiratory syndrome coronavirus 2
  REGION 1..9: note = Table A: HLA-A*24:02H HLA-A*23:01H HLA-B*40:06H
KYVQIPTTC

SEQ ID NO: 2893 - protein, 9 aa, Severe acute respiratory syndrome coronavirus 2
  REGION 1..9: note = Table A: HLA-B*38:02H HLA-B*54:01H
YVQIPTTCA

SEQ ID NO: 2894 - protein, 9 aa, Severe acute respiratory syndrome coronavirus 2
  REGION 1..9: note = Table A: HLA-B*58:01H HLA-A*11:303M HLA-B*44:05H HLA-C*04:03M HLA-C*03:03H HLA-A*02:11H HLA-C*03:04H HLA-A*68:02H HLA-B*35:03H HLA-C*15:05M HLA-C*15:02M HLA-A*02:04H HLA-A*02:06H HLA-A*02:07H HLA-A*02:01H
  REGION 1..9: note = CONT. FROM ABOVE: HLA-B*35:02M HLA-C*08:01M HLA-C*08:02H HLA- B*35:12H HLA-B*38:01H HLA-B*38:02M HLA-B*40:01M HLA-B*40:02H HLA-B*39:01H HLA-B*07:05H HLA-B*41:02H HLA-B*57:03H HLA-C*05 :01M HLA-B*13:01H HLA-C*07:04H
ANDPVGFTL

SEQ ID NO: 2895 - protein, 9 aa, Severe acute respiratory syndrome coronavirus 2
  REGION 1..9: note = Table A: HLA-A*34:02H
NDPVGFTLK

SEQ ID NO: 2896 - protein, 9 aa, Severe acute respiratory syndrome coronavirus 2
  REGION 1..9: note = Table A: HLA-B*51:01H HLA-B*52:01M
VGFTLKNTV

SEQ ID NO: 2897 - protein, 9 aa, Severe acute respiratory syndrome coronavirus 2
  REGION 1..9: note = Table A: HLA-B*08:01M HLA-A*02:11H HLA-A*02:04H HLA-A*02:05H HLA-B*14:01H HLA-A*02:01M HLA-A*02:02M HLA-A*02:03H HLA-B*38:02H HLA-B*13:02H
TLKNTVCTV

SEQ ID NO: 2898 - protein, 9 aa, Severe acute respiratory syndrome coronavirus 2
  REGION 1..9: note = Table A: HLA-B*37:01H HLA-B*41:02H
CDQLREPML

SEQ ID NO: 2899 - protein, 9 aa, Severe acute respiratory syndrome coronavirus 2
  REGION 1..9: note = Table A: HLA-B*38:02H
QLREPMLQS

SEQ ID NO: 2900 - protein, 9 aa, Severe acute respiratory syndrome coronavirus 2
  REGION 1..9: note = Table A: HLA-B*39:06H
LREPMLQSA

SEQ ID NO: 2901 - protein, 9 aa, Severe acute respiratory syndrome coronavirus 2
  REGION 1..9: note = Table A: HLA-B*55:02H HLA-B*54:01H
EPMLQSADA

SEQ ID NO: 2902 - protein, 9 aa, Severe acute respiratory syndrome coronavirus 2
  REGION 1..9: note = Table A: HLA-B*15:01H HLA-B*13:01H
LQSADAQSF

SEQ ID NO: 2903 - protein, 9 aa, Severe acute respiratory syndrome coronavirus 2
  REGION 1..9: note = Table A: HLA-C*15:05H HLA-B*38:02H
QSADAQSFL

SEQ ID NO: 2904 - protein, 9 aa, Severe acute respiratory syndrome coronavirus 2
  REGION 1..9: note = Table A: HLA-A*03:01H HLA-A*11:01H HLA-A*33:03H HLA-B*27:02H HLA-A*68:01H HLA-A*34:01H HLA-A*34:02H HLA-A*31:01H HLA-A*66:01H
ADAQSFLNR

SEQ ID NO: 2905 - protein, 9 aa, Severe acute respiratory syndrome coronavirus 2
  REGION 1..9: note = Table A: HLA-A*33:01M HLA-A*33:03H HLA-A*68:02M HLA-C*15:05M HLA-B*51:01H HLA-B*38:02H HLA-B*54:01H HLA-B*07:05H
DAQSFLNRV

SEQ ID NO: 2906 - protein, 9 aa, Severe acute respiratory syndrome coronavirus 2
  REGION 1..9: note = Table A: HLA-B*54:01H
QSFLNRVCG

SEQ ID NO: 2907 - protein, 9 aa, Severe acute respiratory syndrome coronavirus 2
  REGION 1..9: note = Table A: HLA-C*14:03H
SFLNRVCGV

SEQ ID NO: 2908 - protein, 9 aa, Severe acute respiratory syndrome coronavirus 2
  REGION 1..9: note = Table A: HLA-B*14:01M HLA-B*39:06H
NRVCGVSAA

SEQ ID NO: 2909 - protein, 9 aa, Severe acute respiratory syndrome coronavirus 2
  REGION 1..9: note = Table A: HLA-A*74:01M
RVCGVSAAR

SEQ ID NO: 2910 - protein, 9 aa, Severe acute respiratory syndrome coronavirus 2
  REGION 1..9: note = Table A: HLA-A*03:01H
GVSAARLTP

SEQ ID NO: 2911 - protein, 9 aa, Severe acute respiratory syndrome coronavirus 2
  REGION 1..9: note = Table A: HLA-B*35:03H HLA-B*35:01M HLA-B*35:08M HLA-B*39:01H
TGTSTDVVY

SEQ ID NO: 2912 - protein, 9 aa, Severe acute respiratory syndrome coronavirus 2
  REGION 1..9: note = Table A: HLA-A*11:303M HLA-A*74:01H HLA-A*03:01M HLA-A*03:02M HLA-A*11:01H HLA-A*11:02H HLA-A*36:01H HLA-B*57:01H HLA-A*33:01H HLA-A*33:03M HLA-A*26:03H HLA-A*30:02H HLA-A*68:01H HLA-A*68:02H HLA-A*34:01H
  REGION 1..9: note = CONT. FROM ABOVE: HLA-A*34:02M HLA-C*07:27M HLA-A*31:01H HLA- A*66:01M
GTSTDVVYR

SEQ ID NO: 2913 - protein, 9 aa, Severe acute respiratory syndrome coronavirus 2
  REGION 1..9: note = Table A: HLA-A*68:02M HLA-A*02:05H HLA-A*02:06H HLA-B*13:02H
TSTDVVYRA

SEQ ID NO: 2914 - protein, 9 aa, Severe acute respiratory syndrome coronavirus 2
  REGION 1..9: note = Table A: HLA-B*58:01H HLA-B*58:02H HLA-A*11:303H HLA-C*16:01H HLA-A*36:01H HLA-B*57:01H HLA-B*46:01H HLA-C*04:01M HLA-C*04:03H HLA-C*15:05H HLA-A*02:07H HLA-C*08:02M HLA-B*07:05H HLA-B*57:03M HLA-C*05:01H
STDVVYRAF

SEQ ID NO: 2915 - protein, 9 aa, Severe acute respiratory syndrome coronavirus 2
  REGION 1..9: note = Table A: HLA-A*36:01H HLA-A*29:02H HLA-A*30:02H HLA-B*35:07H HLA-B*38:02H
VVYRAFDIY

SEQ ID NO: 2916 - protein, 9 aa, Severe acute respiratory syndrome coronavirus 2
  REGION 1..9: note = Table A: HLA-C*04:01H HLA-C*04:03M HLA-A*02:07H HLA-C*08:02H
AFDIYNDKV

SEQ ID NO: 2917 - protein, 9 aa, Severe acute respiratory syndrome coronavirus 2
  REGION 1..9: note = Table A: HLA-B*50:01H
FDIYNDKVA

SEQ ID NO: 2918 - protein, 9 aa, Severe acute respiratory syndrome coronavirus 2
  REGION 1..9: note = Table A: HLA-C*14:02H HLA-C*14:03H HLA-B*44:05H HLA-A*33:03H HLA-B*46:01H HLA-A*26:03H HLA-A*29:01H HLA-A*29:02H HLA-C*04:01H HLA-C*04:03H HLA-C*07:01H HLA-C*07:02H HLA-B*27:02H HLA-A*30:02H HLA-C*15:05H HLA-A*02:02H
  REGION 1..9: note = CONT. FROM ABOVE: HLA-A*02:03H HLA-A*24:02H HLA-A*24:07H HLA- C*08:01H HLA-A*23:01H HLA-B*37:01H HLA-B*38:02H HLA-A*32:01H HLA-B*15:01H HLA-B*39:01H HLA-A*31:01H HLA-B*07:05H HLA-C*07 :04H
IYNDKVAGF

SEQ ID NO: 2919 - protein, 9 aa, Severe acute respiratory syndrome coronavirus 2
  REGION 1..9: note = Table A: HLA-B*58:02M HLA-A*74:01H HLA-A*02:11H HLA-A*68:02H HLA-C*15:02H HLA-A*02:05M HLA-A*02:08M HLA-A*02:02H HLA-B*07:04M HLA-B*57:03M
KVAGFAKFL

SEQ ID NO: 2920 - protein, 9 aa, Severe acute respiratory syndrome coronavirus 2
  REGION 1..9: note = Table A: HLA-A*11:01M HLA-A*11:02H HLA-A*36:01H HLA-A*34:02H
VAGFAKFLK

SEQ ID NO: 2921 - protein, 9 aa, Severe acute respiratory syndrome coronavirus 2
  REGION 1..9: note = Table A: HLA-B*40:06H HLA-B*13:02H
AGFAKFLKT

SEQ ID NO: 2922 - protein, 9 aa, Severe acute respiratory syndrome coronavirus 2
  REGION 1..9: note = Table A: HLA-B*18:01H
DDNLIDSYF

SEQ ID NO: 2923 - protein, 9 aa, Severe acute respiratory syndrome coronavirus 2
  REGION 1..9: note = Table A: HLA-A*02:11H HLA-A*68:02H HLA-A*02:04M HLA-A*02:05H HLA-A*02:06H HLA-A*02:07M HLA-A*02:01H HLA-A*02:02M HLA-A*02:03H HLA-C*08:01H HLA-B*38:02M HLA-B*40:06H HLA-B*13:02H
NLIDSYFVV

SEQ ID NO: 2924 - protein, 9 aa, Severe acute respiratory syndrome coronavirus 2
  REGION 1..9: note = Table A: HLA-A*03:02H HLA-A*11:01H HLA-A*11:02M HLA-A*36:01M HLA-A*34:02H
LIDSYFVVK

SEQ ID NO: 2925 - protein, 9 aa, Severe acute respiratory syndrome coronavirus 2
  REGION 1..9: note = Table A: HLA-A*33:01H HLA-A*68:01H
IDSYFVVKR

SEQ ID NO: 2926 - protein, 9 aa, Severe acute respiratory syndrome coronavirus 2
  REGION 1..9: note = Table A: HLA-A*34:02M
DSYFVVKRH

SEQ ID NO: 2927 - protein, 9 aa, Severe acute respiratory syndrome coronavirus 2
  REGION 1..9: note = Table A: HLA-C*14:02M HLA-C*14:03M HLA-C*16:01H HLA-A*29:02H HLA-B*08:01H HLA-C*04:03H HLA-A*24:02M HLA-A*24:07H HLA-A*23:01M
YFVVKRHTF

SEQ ID NO: 2928 - protein, 9 aa, Severe acute respiratory syndrome coronavirus 2
  REGION 1..9: note = Table A: HLA-B*15:03M
VKRHTFSNY

SEQ ID NO: 2929 - protein, 9 aa, Severe acute respiratory syndrome coronavirus 2
  REGION 1..9: note = Table A: HLA-A*68:02H HLA-C*15:05H HLA-B*52:01H HLA-B*38:02H
SNYQHEETI

SEQ ID NO: 2930 - protein, 9 aa, Severe acute respiratory syndrome coronavirus 2
  REGION 1..9: note = Table A: HLA-B*38:01H HLA-B*38:02H HLA-B*39:01H HLA-B*15:10M
QHEETIYNL

SEQ ID NO: 2931 - protein, 9 aa, Severe acute respiratory syndrome coronavirus 2
  REGION 1..9: note = Table A: HLA-B*44:05H HLA-A*68:02H HLA-B*38:02H HLA-B*40:01H HLA-B*40:02M HLA-B*41:02H HLA-B*49:01H
HEETIYNLL

SEQ ID NO: 2932 - protein, 9 aa, Severe acute respiratory syndrome coronavirus 2
  REGION 1..9: note = Table A: HLA-A*02:11H HLA-A*02:01H
NLLKDCPAV

SEQ ID NO: 2933 - protein, 9 aa, Severe acute respiratory syndrome coronavirus 2
  REGION 1..9: note = Table A: HLA-A*02:01H HLA-A*02:02H HLA-A*02:03H HLA-B*38:02H
LLKDCPAVA

SEQ ID NO: 2934 - protein, 9 aa, Severe acute respiratory syndrome coronavirus 2
  REGION 1..9: note = Table A: HLA-B*07:02H HLA-B*07:05H
CPAVAKHDF

SEQ ID NO: 2935 - protein, 9 aa, Severe acute respiratory syndrome coronavirus 2
  REGION 1..9: note = Table A: HLA-A*03:02H HLA-A*11:01H HLA-A*11:02M HLA-C*07:27H
AVAKHDFFK

SEQ ID NO: 2936 - protein, 9 aa, Severe acute respiratory syndrome coronavirus 2
  REGION 1..9: note = Table A: HLA-B*57:03H
VAKHDFFKF

SEQ ID NO: 2937 - protein, 9 aa, Severe acute respiratory syndrome coronavirus 2
  REGION 1..9: note = Table A: HLA-B*38:02M
KHDFFKFRI

SEQ ID NO: 2938 - protein, 9 aa, Severe acute respiratory syndrome coronavirus 2
  REGION 1..9: note = Table A: HLA-A*11:02H HLA-A*33:01H HLA-A*33:03H HLA-A*68:01H HLA-B*37:01H HLA-A*31:01H
GDMVPHISR

SEQ ID NO: 2939 - protein, 9 aa, Severe acute respiratory syndrome coronavirus 2
  REGION 1..9: note = Table A: HLA-A*33:03H HLA-A*26:03H HLA-A*68:01H HLA-A*34:01M HLA-A*34:02M HLA-A*66:01M
MVPHISRQR

SEQ ID NO: 2940 - protein, 9 aa, Severe acute respiratory syndrome coronavirus 2
  REGION 1..9: note = Table A: HLA-C*15:05H HLA-B*07:02H HLA-B*07:04M
VPHISRQRL

SEQ ID NO: 2941 - protein, 9 aa, Severe acute respiratory syndrome coronavirus 2
  REGION 1..9: note = Table A: HLA-B*07:04H HLA-B*15:01H HLA-B*15:03H HLA-B*13:02H
RQRLTKYTM

SEQ ID NO: 2942 - protein, 9 aa, Severe acute respiratory syndrome coronavirus 2
  REGION 1..9: note = Table A: HLA-A*36:01H HLA-A*30:02H
KYTMADLVY

SEQ ID NO: 2943 - protein, 9 aa, Severe acute respiratory syndrome coronavirus 2
  REGION 1..9: note = Table A: HLA-A*68:02H HLA-A*02:01H
YTMADLVYA

SEQ ID NO: 2944 - protein, 9 aa, Severe acute respiratory syndrome coronavirus 2
  REGION 1..9: note = Table A: HLA-B*48:01H HLA-A*11:303H HLA-C*16:04H HLA-A*29:01H HLA-A*29:02H HLA-C*07:01H HLA-A*02:11H HLA-A*68:02M HLA-B*35:03M HLA-C*15:05H HLA-A*02:04H HLA-A*02:05H HLA-A*02:06H HLA-A*02:07M HLA-A*02:08H
  REGION 1..9: note = CONT. FROM ABOVE: HLA-B*14:01M HLA-A*02:01H HLA-A*02:02H HLA- A*02:03M HLA-B*35:01M HLA-C*08:01H HLA-B*38:01H HLA-B*38:02H HLA-A*32:01H HLA-B*15:01H HLA-B*15:02H HLA-B*39:01M HLA-B*07 :05M HLA-B*13:02H
TMADLVYAL

SEQ ID NO: 2945 - protein, 9 aa, Severe acute respiratory syndrome coronavirus 2
  REGION 1..9: note = Table A: HLA-A*33:03H HLA-A*68:01H HLA-A*34:01H HLA-A*34:02H HLA-A*66:01H
MADLVYALR

SEQ ID NO: 2946 - protein, 9 aa, Severe acute respiratory syndrome coronavirus 2
  REGION 1..9: note = Table A: HLA-A*11:303M HLA-B*57:01H HLA-A*25:01H HLA-B*46:01H HLA-A*26:01M HLA-A*26:02H HLA-A*29:01H HLA-A*29:02H HLA-B*08:01H HLA-B*18:01H HLA-C*03:02H HLA-A*30:02M HLA-C*12:02H HLA-C*12:03H HLA-A*02:04H
  REGION 1..9: note = CONT. FROM ABOVE: HLA-A*02:02H HLA-A*02:03M HLA-B*35:01M HLA- B*35:07H HLA-B*38:02H HLA-A*32:01H HLA-B*15:01H HLA-B*15:02H HLA-B*15:03M HLA-B*07:05H HLA-C*02:02H HLA-B*15:11H
TLKEILVTY

SEQ ID NO: 2947 - protein, 9 aa, Severe acute respiratory syndrome coronavirus 2
  REGION 1..9: note = Table A: HLA-B*45:01H HLA-B*40:06H HLA-B*50:01H
KEILVTYNC

SEQ ID NO: 2948 - protein, 9 aa, Severe acute respiratory syndrome coronavirus 2
  REGION 1..9: note = Table A: HLA-B*40:02H
YDFVENPDI

SEQ ID NO: 2949 - protein, 9 aa, Severe acute respiratory syndrome coronavirus 2
  REGION 1..9: note = Table A: HLA-B*39:01H
DFVENPDIL

SEQ ID NO: 2950 - protein, 9 aa, Severe acute respiratory syndrome coronavirus 2
  REGION 1..9: note = Table A: HLA-A*68:01H HLA-A*34:01M HLA-A*34:02H HLA-A*66:01M
FVENPDILR

SEQ ID NO: 2951 - protein, 9 aa, Severe acute respiratory syndrome coronavirus 2
  REGION 1..9: note = Table A: HLA-B*44:02H HLA-B*44:05M HLA-C*16:04H HLA-C*06:02H HLA-B*45:01M HLA-B*44:03M HLA-B*18:01H HLA-A*68:02H HLA-C*15:05H HLA-C*15:02M HLA-A*02:04H HLA-A*02:05H HLA-A*02:06H HLA-A*02:07H HLA-A*02:02H HLA-A*02:03H
  REGION 1..9: note = CONT. FROM ABOVE: HLA-B*51:01H HLA-B*52:01H HLA-C*08:01H HLA- B*37:01H HLA-B*38:02M HLA-B*40:01H HLA-B*40:02H HLA-B*40:06M HLA-B*07:05H HLA-B*41:02M HLA-B*13:02H HLA-B*49:01H HLA-C*07 :04M HLA-B*50:01M
VENPDILRV

SEQ ID NO: 2952 - protein, 9 aa, Severe acute respiratory syndrome coronavirus 2
  REGION 1..9: note = Table A: HLA-A*26:01H
ENPDILRVY

SEQ ID NO: 2953 - protein, 9 aa, Severe acute respiratory syndrome coronavirus 2
  REGION 1..9: note = Table A: HLA-B*54:01H
NPDILRVYA

SEQ ID NO: 2954 - protein, 9 aa, Severe acute respiratory syndrome coronavirus 2
  REGION 1..9: note = Table A: HLA-A*33:01H HLA-A*68:02H
DILRVYANL

SEQ ID NO: 2955 - protein, 9 aa, Severe acute respiratory syndrome coronavirus 2
  REGION 1..9: note = Table A: HLA-A*74:01M HLA-A*03:01H HLA-A*11:01H HLA-A*11:02H HLA-A*34:01H HLA-A*34:02H HLA-A*31:01H HLA-A*66:01H
RVYANLGER

SEQ ID NO: 2956 - protein, 9 aa, Severe acute respiratory syndrome coronavirus 2
  REGION 1..9: note = Table A: HLA-A*24:02H
VYANLGERV

SEQ ID NO: 2957 - protein, 9 aa, Severe acute respiratory syndrome coronavirus 2
  REGION 1..9: note = Table A: HLA-A*34:01H HLA-A*66:01H
YANLGERVR

SEQ ID NO: 2958 - protein, 9 aa, Severe acute respiratory syndrome coronavirus 2
  REGION 1..9: note = Table A: HLA-A*02:02H HLA-A*02:03M
NLGERVRQA

SEQ ID NO: 2959 - protein, 9 aa, Severe acute respiratory syndrome coronavirus 2
  REGION 1..9: note = Table A: HLA-B*40:02H HLA-B*41:02M
GERVRQALL

SEQ ID NO: 2960 - protein, 9 aa, Severe acute respiratory syndrome coronavirus 2
  REGION 1..9: note = Table A: HLA-B*58:01H HLA-B*58:02H HLA-C*16:01H HLA-B*57:01H HLA-B*46:01H HLA-B*08:01M HLA-B*53:01H HLA-C*15:05H HLA-C*12:02H HLA-B*35:01M HLA-B*35:07M HLA-B*38:02H HLA-B*15:01H HLA-B*15:02M HLA-B*07:05H HLA-B*57:03M
  REGION 1..9: note = CONT. FROM ABOVE: HLA-C*02:02H
QALLKTVQF

SEQ ID NO: 2961 - protein, 9 aa, Severe acute respiratory syndrome coronavirus 2
  REGION 1..9: note = Table A: HLA-A*02:11H HLA-A*02:04H HLA-A*02:01M HLA-A*02:02H HLA-B*38:02H HLA-B*13:02H
ALLKTVQFC

SEQ ID NO: 2962 - protein, 9 aa, Severe acute respiratory syndrome coronavirus 2
  REGION 1..9: note = Table A: HLA-B*37:01H
CDAMRNAGI

SEQ ID NO: 2963 - protein, 9 aa, Severe acute respiratory syndrome coronavirus 2
  REGION 1..9: note = Table A: HLA-C*15:05H HLA-B*51:01M
DAMRNAGIV

SEQ ID NO: 2964 - protein, 9 aa, Severe acute respiratory syndrome coronavirus 2
  REGION 1..9: note = Table A: HLA-C*06:02H HLA-B*27:05M HLA-A*68:02H HLA-B*14:01M HLA-B*38:02M HLA-B*39:06H HLA-B*39:01H
MRNAGIVGV

SEQ ID NO: 2965 - protein, 9 aa, Severe acute respiratory syndrome coronavirus 2
  REGION 1..9: note = Table A: HLA-B*48:01H HLA-C*07:01H HLA-C*15:05M HLA-C*15:02H HLA-B*07:04H
RNAGIVGVL

SEQ ID NO: 2966 - protein, 9 aa, Severe acute respiratory syndrome coronavirus 2
  REGION 1..9: note = Table A: HLA-A*11:303H HLA-B*44:05H HLA-C*03:03H HLA-C*12:05H HLA-C*03:04H HLA-C*15:05H HLA-C*15:02H HLA-C*17:01H HLA-C*08:01H HLA-B*38:02H HLA-B*40:02H HLA-B*41:02H HLA-C*07:04H
AGIVGVLTL

SEQ ID NO: 2967 - protein, 9 aa, Severe acute respiratory syndrome coronavirus 2
  REGION 1..9: note = Table A: HLA-B*38:02H HLA-B*39:01H
NQDLNGNWY

SEQ ID NO: 2968 - protein, 9 aa, Severe acute respiratory syndrome coronavirus 2
  REGION 1..9: note = Table A: HLA-B*50:01H
YDFGDFIQT

SEQ ID NO: 2969 - protein, 9 aa, Severe acute respiratory syndrome coronavirus 2
  REGION 1..9: note = Table A: HLA-C*08:02H
FGDFIQTTP

SEQ ID NO: 2970 - protein, 9 aa, Severe acute respiratory syndrome coronavirus 2
  REGION 1..9: note = Table A: HLA-B*38:02H HLA-B*13:02M
IQTTPGSGV

SEQ ID NO: 2971 - protein, 9 aa, Severe acute respiratory syndrome coronavirus 2
  REGION 1..9: note = Table A: HLA-B*56:01H HLA-B*55:02H HLA-B*35:03H HLA-C*15:05H HLA-B*55:01H HLA-B*54:01H
TPGSGVPVV

SEQ ID NO: 2972 - protein, 9 aa, Severe acute respiratory syndrome coronavirus 2
  REGION 1..9: note = Table A: HLA-B*58:01H HLA-A*30:02H HLA-B*35:01H HLA-B*35:08H HLA-B*35:07M HLA-B*38:02H HLA-B*39:01H HLA-B*07:05H HLA-B*15:11H
SGVPVVDSY

SEQ ID NO: 2973 - protein, 9 aa, Severe acute respiratory syndrome coronavirus 2
  REGION 1..9: note = Table A: HLA-A*30:02H
GVPVVDSYY

SEQ ID NO: 2974 - protein, 9 aa, Severe acute respiratory syndrome coronavirus 2
  REGION 1..9: note = Table A: HLA-C*04:03M HLA-A*02:07M HLA-C*05:01H
VVDSYYSLL

SEQ ID NO: 2975 - protein, 9 aa, Severe acute respiratory syndrome coronavirus 2
  REGION 1..9: note = Table A: HLA-A*24:02H HLA-A*24:07H HLA-C*08:01H
YYSLLMPIL

SEQ ID NO: 2976 - protein, 9 aa, Severe acute respiratory syndrome coronavirus 2
  REGION 1..9: note = Table A: HLA-A*11:303H HLA-A*02:11H HLA-C*15:05H HLA-A*02:04H HLA-A*02:07H HLA-B*14:01H HLA-A*02:01M HLA-A*02:03H HLA-C*08:01H HLA-B*38:02H HLA-B*40:06H HLA-B*13:02H
SLLMPILTL

SEQ ID NO: 2977 - protein, 9 aa, Severe acute respiratory syndrome coronavirus 2
  REGION 1..9: note = Table A: HLA-A*02:11H HLA-A*02:04H HLA-A*02:01H HLA-A*02:02H HLA-A*02:03H HLA-B*38:02H
LLMPILTLT

SEQ ID NO: 2978 - protein, 9 aa, Severe acute respiratory syndrome coronavirus 2
  REGION 1..9: note = Table A: HLA-B*56:01H HLA-B*55:02H HLA-C*15:05H HLA-B*55:01H HLA-B*39:06H HLA-B*54:01H HLA-B*50:01H
MPILTLTRA

SEQ ID NO: 2979 - protein, 9 aa, Severe acute respiratory syndrome coronavirus 2
  REGION 1..9: note = Table A: HLA-B*39:01H
TRALTAESH

SEQ ID NO: 2980 - protein, 9 aa, Severe acute respiratory syndrome coronavirus 2
  REGION 1..9: note = Table A: HLA-B*44:05M HLA-B*44:03H HLA-B*40:01H HLA-B*40:02H HLA-B*41:02M
AESHVDTDL

SEQ ID NO: 2981 - protein, 9 aa, Severe acute respiratory syndrome coronavirus 2
  REGION 1..9: note = Table A: HLA-B*38:02H HLA-B*39:01H HLA-B*15:10H
SHVDTDLTK

SEQ ID NO: 2982 - protein, 9 aa, Severe acute respiratory syndrome coronavirus 2
  REGION 1..9: note = Table A: HLA-A*68:02H HLA-B*38:02H
DTDLTKPYI

SEQ ID NO: 2983 - protein, 9 aa, Severe acute respiratory syndrome coronavirus 2
  REGION 1..9: note = Table A: HLA-C*15:05H HLA-B*07:04H
KPYIKWDLL

SEQ ID NO: 2984 - protein, 9 aa, Severe acute respiratory syndrome coronavirus 2
  REGION 1..9: note = Table A: HLA-C*04:03H
KWDLLKYDF

SEQ ID NO: 2985 - protein, 9 aa, Severe acute respiratory syndrome coronavirus 2
  REGION 1..9: note = Table A: HLA-A*36:01H HLA-C*04:01H HLA-C*04:03H HLA-C*07:02H HLA-A*02:07H HLA-A*24:07H HLA-C*08:01M HLA-C*08:02H HLA-B*38:02H HLA-B*40:01H HLA-C*05:01H HLA-B*13:01M
KYDFTEERL

SEQ ID NO: 2986 - protein, 9 aa, Severe acute respiratory syndrome coronavirus 2
  REGION 1..9: note = Table A: HLA-C*04:03H
FTEERLKLF

SEQ ID NO: 2987 - protein, 9 aa, Severe acute respiratory syndrome coronavirus 2
  REGION 1..9: note = Table A: HLA-B*38:02H
ERLKLFDRY

SEQ ID NO: 2988 - protein, 9 aa, Severe acute respiratory syndrome coronavirus 2
  REGION 1..9: note = Table A: HLA-B*58:02H HLA-B*07:04H
RLKLFDRYF

SEQ ID NO: 2989 - protein, 9 aa, Severe acute respiratory syndrome coronavirus 2
  REGION 1..9: note = Table A: HLA-A*74:01M HLA-A*03:01H HLA-A*36:01H HLA-A*29:02M HLA-A*30:02M HLA-A*02:02H HLA-A*32:01M HLA-B*15:03H
KLFDRYFKY

SEQ ID NO: 2990 - protein, 9 aa, Severe acute respiratory syndrome coronavirus 2
  REGION 1..9: note = Table A: HLA-C*14:02H HLA-C*14:03M HLA-B*46:01H HLA-A*29:02M HLA-A*30:02H HLA-A*24:07H
YFKYWDQTY

SEQ ID NO: 2991 - protein, 9 aa, Severe acute respiratory syndrome coronavirus 2
  REGION 1..9: note = Table A: HLA-B*15:03H
FKYWDQTYH

SEQ ID NO: 2992 - protein, 9 aa, Severe acute respiratory syndrome coronavirus 2
  REGION 1..9: note = Table A: HLA-B*14:01H HLA-B*38:02H HLA-B*13:02H
DQTYHPNCV

SEQ ID NO: 2993 - protein, 9 aa, Severe acute respiratory syndrome coronavirus 2
  REGION 1..9: note = Table A: HLA-B*38:02H
YHPNCVNCL

SEQ ID NO: 2994 - protein, 9 aa, Severe acute respiratory syndrome coronavirus 2
  REGION 1..9: note = Table A: HLA-A*02:11H
ILHCANFNV

SEQ ID NO: 2995 - protein, 9 aa, Severe acute respiratory syndrome coronavirus 2
  REGION 1..9: note = Table A: HLA-B*38:02H HLA-B*15:10H
LHCANFNVL

SEQ ID NO: 2996 - protein, 9 aa, Severe acute respiratory syndrome coronavirus 2
  REGION 1..9: note = Table A: HLA-B*38:02H HLA-B*15:02H
HCANFNVLF

SEQ ID NO: 2997 - protein, 9 aa, Severe acute respiratory syndrome coronavirus 2
  REGION 1..9: note = Table A: HLA-B*58:01H HLA-A*11:303H HLA-C*16:01H HLA-B*57:01H HLA-A*25:01M HLA-B*46:01M HLA-A*26:02H HLA-C*03:03M HLA-C*03:02H HLA-C*03:04M HLA-C*15:05M HLA-C*12:02M HLA-C*12:03H HLA-A*34:01H HLA-A*34:02H
  REGION 1..9: note = CONT. FROM ABOVE: HLA-C*07:27H HLA-B*38:02H HLA-B*15:01H HLA- B*07:05M HLA-B*57:03M HLA-C*02:02H HLA-A*66:01M
STVFPPTSF

SEQ ID NO: 2998 - protein, 9 aa, Severe acute respiratory syndrome coronavirus 2
  REGION 1..9: note = Table A: HLA-A*34:01M HLA-A*34:02H HLA-B*38:02H HLA-A*66:01M
TVFPPTSFG

SEQ ID NO: 2999 - protein, 9 aa, Severe acute respiratory syndrome coronavirus 2
  REGION 1..9: note = Table A: HLA-C*15:05H
FPPTSFGPL

SEQ ID NO: 3000 - protein, 9 aa, Severe acute respiratory syndrome coronavirus 2
  REGION 1..9: note = Table A: HLA-A*34:02H HLA-A*66:01H
PTSFGPLVR

SEQ ID NO: 3001 - protein, 9 aa, Severe acute respiratory syndrome coronavirus 2
  REGION 1..9: note = Table A: HLA-A*11:303H HLA-A*03:01H HLA-A*11:01M HLA-A*11:02M HLA-A*34:02M HLA-C*07:27H
TSFGPLVRK

SEQ ID NO: 3002 - protein, 9 aa, Severe acute respiratory syndrome coronavirus 2
  REGION 1..9: note = Table A: HLA-C*06:02H
SFGPLVRKI

SEQ ID NO: 3003 - protein, 9 aa, Severe acute respiratory syndrome coronavirus 2
  REGION 1..9: note = Table A: HLA-B*07:04H
GPLVRKIFV

SEQ ID NO: 3004 - protein, 9 aa, Severe acute respiratory syndrome coronavirus 2
  REGION 1..9: note = Table A: HLA-B*58:01H HLA-B*46:01H HLA-C*12:02H HLA-B*15:01H HLA-B*15:03H HLA-B*57:03M
KIFVDGVPF

SEQ ID NO: 3005 - protein, 9 aa, Severe acute respiratory syndrome coronavirus 2
  REGION 1..9: note = Table A: HLA-C*14:03H HLA-A*02:04H HLA-A*23:01H
IFVDGVPFV

SEQ ID NO: 3006 - protein, 9 aa, Severe acute respiratory syndrome coronavirus 2
  REGION 1..9: note = Table A: HLA-C*04:03H HLA-A*02:11M HLA-A*68:02M HLA-B*35:03M HLA-C*15:05H HLA-C*15:02H HLA-A*02:04H HLA-A*02:06H HLA-A*02:07H HLA-A*02:01H HLA-B*35:02H HLA-C*08:01M HLA-C*08:02M HLA-B*35:12H HLA-B*38:02M HLA-B*39:01H
  REGION 1..9: note = CONT. FROM ABOVE: HLA-C*05:01M HLA-B*13:02M
FVDGVPFVV

SEQ ID NO: 3007 - protein, 9 aa, Severe acute respiratory syndrome coronavirus 2
  REGION 1..9: note = Table A: HLA-B*46:01H HLA-A*29:01H HLA-A*29:02H HLA-B*18:01H HLA-B*27:02H HLA-B*53:01M HLA-A*30:02H HLA-C*15:05H HLA-B*35:01H HLA-B*35:08H HLA-B*35:07H HLA-B*38:02M HLA-B*15:01H HLA-B*15:02H HLA-B*15:03H HLA-B*07:05H
  REGION 1..9: note = CONT. FROM ABOVE: HLA-B*15:11H
VPFVVSTGY

SEQ ID NO: 3008 - protein, 9 aa, Severe acute respiratory syndrome coronavirus 2
  REGION 1..9: note = Table A: HLA-A*34:01H HLA-B*38:02H HLA-B*15:02H HLA-A*66:01H
FVVSTGYHF

SEQ ID NO: 3009 - protein, 9 aa, Severe acute respiratory syndrome coronavirus 2
  REGION 1..9: note = Table A: HLA-A*74:01M HLA-A*11:01H HLA-A*11:02H HLA-A*33:01H HLA-A*33:03H HLA-A*30:02H HLA-A*68:01H HLA-A*34:01H HLA-A*34:02H HLA-A*31:01H HLA-A*66:01M
VVSTGYHFR

SEQ ID NO: 3010 - protein, 9 aa, Severe acute respiratory syndrome coronavirus 2
  REGION 1..9: note = Table A: HLA-C*15:02H
STGYHFREL

SEQ ID NO: 3011 - protein, 9 aa, Severe acute respiratory syndrome coronavirus 2
  REGION 1..9: note = Table A: HLA-B*13:02H
GYHFRELGV

SEQ ID NO: 3012 - protein, 9 aa, Severe acute respiratory syndrome coronavirus 2
  REGION 1..9: note = Table A: HLA-B*38:02H HLA-B*15:10H
YHFRELGVV

SEQ ID NO: 3013 - protein, 9 aa, Severe acute respiratory syndrome coronavirus 2
  REGION 1..9: note = Table A: HLA-A*11:303H HLA-A*02:11H HLA-A*68:02H HLA-C*15:05H HLA-A*02:05M HLA-A*02:06M HLA-A*02:07H HLA-A*02:08M HLA-A*02:01H HLA-A*02:02M HLA-B*35:02M HLA-C*08:01M HLA-B*35:12H HLA-B*38:01H HLA-B*38:02H
  REGION 1..9: note = CONT. FROM ABOVE: HLA-B*57:03H HLA-B*13:01H HLA-C*07:04H
VVHNQDVNL

SEQ ID NO: 3014 - protein, 9 aa, Severe acute respiratory syndrome coronavirus 2
  REGION 1..9: note = Table A: HLA-B*38:02H
VHNQDVNLH

SEQ ID NO: 3015 - protein, 9 aa, Severe acute respiratory syndrome coronavirus 2
  REGION 1..9: note = Table A: HLA-B*39:01H
NQDVNLHSS

SEQ ID NO: 3016 - protein, 9 aa, Severe acute respiratory syndrome coronavirus 2
  REGION 1..9: note = Table A: HLA-A*68:01H
QDVNLHSSR

SEQ ID NO: 3017 - protein, 9 aa, Severe acute respiratory syndrome coronavirus 2
  REGION 1..9: note = Table A: HLA-A*33:01M HLA-A*33:03M HLA-A*26:03H HLA-A*68:01H HLA-A*68:02H HLA-C*15:05H HLA-A*34:01H HLA-A*34:02H HLA-B*38:02H HLA-B*15:02H HLA-A*66:01M
DVNLHSSRL

SEQ ID NO: 3018 - protein, 9 aa, Severe acute respiratory syndrome coronavirus 2
  REGION 1..9: note = Table A: HLA-B*38:02H HLA-B*15:02M
NLHSSRLSF

SEQ ID NO: 3019 - protein, 9 aa, Severe acute respiratory syndrome coronavirus 2
  REGION 1..9: note = Table A: HLA-B*07:04H
SSRLSFKEL

SEQ ID NO: 3020 - protein, 9 aa, Severe acute respiratory syndrome coronavirus 2
  REGION 1..9: note = Table A: HLA-B*27:05H HLA-B*14:02H HLA-B*38:02H
SRLSFKELL

SEQ ID NO: 3021 - protein, 9 aa, Severe acute respiratory syndrome coronavirus 2
  REGION 1..9: note = Table A: HLA-C*15:02M HLA-A*02:02H HLA-B*38:02H HLA-B*13:01H HLA-B*13:02M
RLSFKELLV

SEQ ID NO: 3022 - protein, 9 aa, Severe acute respiratory syndrome coronavirus 2
  REGION 1..9: note = Table A: HLA-B*58:01M HLA-B*58:02H HLA-A*36:01M HLA-B*57:01H HLA-B*46:01H HLA-A*29:02H HLA-C*03:02M HLA-C*15:05H HLA-C*12:03H HLA-C*15:02H HLA-B*35:07H HLA-B*38:02H HLA-B*15:01H HLA-B*15:02H HLA-B*15:03H HLA-B*57:03M
  REGION 1..9: note = CONT. FROM ABOVE: HLA-C*02:02H
LSFKELLVY

SEQ ID NO: 3023 - protein, 9 aa, Severe acute respiratory syndrome coronavirus 2
  REGION 1..9: note = Table A: HLA-A*11:303H HLA-A*02:11H HLA-B*35:03H HLA-C*15:05H HLA-A*02:06H HLA-B*35:01M HLA-B*35:02H HLA-B*35:08H HLA-B*35:07H HLA-C*08:01H HLA-B*35:12M HLA-B*38:02M HLA-B*15:01H HLA-B*15:02H HLA-B*39:01H
  REGION 1..9: note = CONT. FROM ABOVE: HLA-B*07:05H
LVYAADPAM

SEQ ID NO: 3024 - protein, 9 aa, Severe acute respiratory syndrome coronavirus 2
  REGION 1..9: note = Table A: HLA-C*14:03H HLA-A*24:02H
VYAADPAMH

SEQ ID NO: 3025 - protein, 9 aa, Severe acute respiratory syndrome coronavirus 2
  REGION 1..9: note = Table A: HLA-A*11:303M HLA-C*16:01H HLA-C*16:04M HLA-B*46:01M HLA-B*56:01M HLA-A*26:03H HLA-C*03:03M HLA-C*12:05M HLA-A*02:11M HLA-B*55:02M HLA-C*03:02M HLA-C*03:04M HLA-A*68:01H HLA-A*68:02M HLA-B*35:03H
  REGION 1..9: note = CONT. FROM ABOVE: HLA-C*15:05H HLA-B*55:01H HLA-C*12:02M HLA- C*12:03M HLA-A*02:05M HLA-A*02:06H HLA-A*02:02H HLA-A*02:03H HLA-A*34:01M HLA-A*34:02H HLA-C*07:27H HLA-B*35:01H HLA-B*35 :02H HLA-B*51:01H HLA-B*35:07H HLA-C*08:01M HLA-B*35:12H
  REGION 1..9: note = CONT. FROM ABOVE: HLA-B*38:02M HLA-B*54:01H HLA-B*39:01H HLA- B*07:05H HLA-C*02:02H HLA-B*13:02H HLA-A*66:01M HLA-B*50:01H
YAADPAMHA

SEQ ID NO: 3026 - protein, 9 aa, Severe acute respiratory syndrome coronavirus 2
  REGION 1..9: note = Table A: HLA-A*11:303M HLA-C*16:04H HLA-B*56:01M HLA-B*45:01M HLA-C*03:03H HLA-A*02:11H HLA-B*55:02M HLA-C*03:02H HLA-C*03:04H HLA-A*68:02H HLA-B*35:03H HLA-C*15:05H HLA-B*55:01H HLA-A*02:05M HLA-A*02:06M
  REGION 1..9: note = CONT. FROM ABOVE: HLA-A*02:07M HLA-A*02:08H HLA-B*14:01H HLA- A*02:01H HLA-C*07:27H HLA-B*35:02M HLA-C*08:01M HLA-C*08:02M HLA-B*35:12M HLA-B*38:02M HLA-B*39:06H HLA-B*54:01M HLA-B*39 :01H HLA-B*07:05H HLA-B*50:01H
AADPAMHAA

SEQ ID NO: 3027 - protein, 9 aa, Severe acute respiratory syndrome coronavirus 2
  REGION 1..9: note = Table A: HLA-B*38:01H HLA-B*38:02H HLA-B*39:01H HLA-B*15:10H
MHAASGNLL

SEQ ID NO: 3028 - protein, 9 aa, Severe acute respiratory syndrome coronavirus 2
  REGION 1..9: note = Table A: HLA-C*12:05H HLA-B*53:01M HLA-C*03:04H HLA-B*35:03M HLA-C*15:05H HLA-C*15:02H HLA-A*34:01H HLA-B*35:02H HLA-C*17:01M HLA-B*35:07H HLA-B*35:12H HLA-B*38:02M HLA-B*57:03H
HAASGNLLL

SEQ ID NO: 3029 - protein, 9 aa, Severe acute respiratory syndrome coronavirus 2
  REGION 1..9: note = Table A: HLA-A*11:01M HLA-A*11:02H HLA-A*36:01H HLA-A*34:02H HLA-C*07:27H
ASGNLLLDK

SEQ ID NO: 3030 - protein, 9 aa, Severe acute respiratory syndrome coronavirus 2
  REGION 1..9: note = Table A: HLA-A*33:03H HLA-A*31:01H
SGNLLLDKR

SEQ ID NO: 3031 - protein, 9 aa, Severe acute respiratory syndrome coronavirus 2
  REGION 1..9: note = Table A: HLA-B*38:02H
LLDKRTTCF

SEQ ID NO: 3032 - protein, 9 aa, Severe acute respiratory syndrome coronavirus 2
  REGION 1..9: note = Table A: HLA-A*68:02M HLA-C*15:05H
TTCFSVAAL

SEQ ID NO: 3033 - protein, 9 aa, Severe acute respiratory syndrome coronavirus 2
  REGION 1..9: note = Table A: HLA-A*11:303H HLA-A*11:01H HLA-A*11:02H HLA-C*12:05H HLA-A*02:11M HLA-A*68:01H HLA-A*68:02H HLA-C*15:05H HLA-A*02:04H HLA-A*02:05H HLA-A*02:06M HLA-A*02:07H HLA-A*02:08H HLA-B*14:01H HLA-A*02:01M
  REGION 1..9: note = CONT. FROM ABOVE: HLA-A*02:02H HLA-A*02:03H HLA-A*34:01H HLA- B*38:02M HLA-B*07:05H HLA-B*13:02M
SVAALTNNV

SEQ ID NO: 3034 - protein, 9 aa, Severe acute respiratory syndrome coronavirus 2
  REGION 1..9: note = Table A: HLA-B*58:01H HLA-A*11:303M HLA-B*44:05H HLA-C*16:01H HLA-C*16:04H HLA-B*46:01M HLA-C*03:02H HLA-C*03:04H HLA-C*15:05M HLA-C*12:02H HLA-C*07:27H HLA-B*35:01M HLA-B*35:07H HLA-C*08:01H HLA-B*38:02H
  REGION 1..9: note = CONT. FROM ABOVE: HLA-B*15:01H HLA-B*15:02H HLA-B*15:03H HLA- B*39:01H HLA-B*07:05H HLA-B*57:03M
AALTNNVAF

SEQ ID NO: 3035 - protein, 9 aa, Severe acute respiratory syndrome coronavirus 2
  REGION 1..9: note = Table A: HLA-A*68:02H
LTNNVAFQT

SEQ ID NO: 3036 - protein, 9 aa, Severe acute respiratory syndrome coronavirus 2
  REGION 1..9: note = Table A: HLA-A*68:02H HLA-C*15:05H HLA-C*15:02H HLA-B*38:02H HLA-B*49:01H
TNNVAFQTV

SEQ ID NO: 3037 - protein, 9 aa, Severe acute respiratory syndrome coronavirus 2
  REGION 1..9: note = Table A: HLA-A*34:02H
NNVAFQTVK

SEQ ID NO: 3038 - protein, 9 aa, Severe acute respiratory syndrome coronavirus 2
  REGION 1..9: note = Table A: HLA-B*38:02H
FQTVKPGNF

SEQ ID NO: 3039 - protein, 9 aa, Severe acute respiratory syndrome coronavirus 2
  REGION 1..9: note = Table A: HLA-A*11:303H HLA-A*74:01M HLA-A*03:01M HLA-A*03:02M HLA-A*11:01M HLA-A*11:02M HLA-A*33:01H HLA-A*33:03M HLA-A*26:03H HLA-A*30:01M HLA-A*30:02H HLA-A*68:01H HLA-A*34:01H HLA-A*34:02M HLA-C*07:27H
  REGION 1..9: note = CONT. FROM ABOVE: HLA-A*31:01H HLA-A*66:01H
TVKPGNFNK

SEQ ID NO: 3040 - protein, 9 aa, Severe acute respiratory syndrome coronavirus 2
  REGION 1..9: note = Table A: HLA-B*07:04H
KPGNFNKDF

SEQ ID NO: 3041 - protein, 9 aa, Severe acute respiratory syndrome coronavirus 2
  REGION 1..9: note = Table A: HLA-A*24:07H
NFNKDFYDF

SEQ ID NO: 3042 - protein, 9 aa, Severe acute respiratory syndrome coronavirus 2
  REGION 1..9: note = Table A: HLA-A*33:01M HLA-A*33:03M HLA-A*68:01H HLA-A*34:01H HLA-A*34:02M HLA-A*66:01H
DFYDFAVSK

SEQ ID NO: 3043 - protein, 9 aa, Severe acute respiratory syndrome coronavirus 2
  REGION 1..9: note = Table A: HLA-C*04:03H
FYDFAVSKG

SEQ ID NO: 3044 - protein, 9 aa, Severe acute respiratory syndrome coronavirus 2
  REGION 1..9: note = Table A: HLA-B*37:01H
YDFAVSKGF

SEQ ID NO: 3045 - protein, 9 aa, Severe acute respiratory syndrome coronavirus 2
  REGION 1..9: note = Table A: HLA-A*34:01H HLA-A*34:02M HLA-A*66:01M
FAVSKGFFK

SEQ ID NO: 3046 - protein, 9 aa, Severe acute respiratory syndrome coronavirus 2
  REGION 1..9: note = Table A: HLA-C*14:02H HLA-C*14:03H HLA-B*52:01H
GFFKEGSSV

SEQ ID NO: 3047 - protein, 9 aa, Severe acute respiratory syndrome coronavirus 2
  REGION 1..9: note = Table A: HLA-B*48:01H HLA-C*08:02H HLA-B*38:02M HLA-B*15:03H HLA-B*39:01M HLA-B*15:10H
FKEGSSVEL

SEQ ID NO: 3048 - protein, 9 aa, Severe acute respiratory syndrome coronavirus 2
  REGION 1..9: note = Table A: HLA-B*58:01H HLA-B*58:02M HLA-B*57:01H HLA-B*57:03H
SSVELKHFF

SEQ ID NO: 3049 - protein, 9 aa, Severe acute respiratory syndrome coronavirus 2
  REGION 1..9: note = Table A: HLA-B*45:01H HLA-B*40:06M HLA-B*50:01H
VELKHFFFA

SEQ ID NO: 3050 - protein, 9 aa, Severe acute respiratory syndrome coronavirus 2
  REGION 1..9: note = Table A: HLA-C*14:03H
FFFAQDGNA

SEQ ID NO: 3051 - protein, 9 aa, Severe acute respiratory syndrome coronavirus 2
  REGION 1..9: note = Table A: HLA-A*11:303M HLA-C*16:04H HLA-B*46:01M HLA-C*03:03M HLA-C*12:05H HLA-B*53:01H HLA-C*03:02M HLA-C*03:04M HLA-A*68:02H HLA-B*35:03M HLA-C*15:05H HLA-A*02:05H HLA-C*07:27H HLA-B*35:01H HLA-B*35:02M
  REGION 1..9: note = CONT. FROM ABOVE: HLA-B*35:08H HLA-B*51:01H HLA-C*08:01M HLA- C*08:02H HLA-B*35:12H HLA-B*38:02H HLA-B*39:01H
FAQDGNAAI

SEQ ID NO: 3052 - protein, 9 aa, Severe acute respiratory syndrome coronavirus 2
  REGION 1..9: note = Table A: HLA-B*35:01H HLA-B*35:08M HLA-B*35:07H
NAAISDYDY

SEQ ID NO: 3053 - protein, 9 aa, Severe acute respiratory syndrome coronavirus 2
  REGION 1..9: note = Table A: HLA-B*58:01H HLA-A*11:303H HLA-C*16:04H HLA-A*36:01H HLA-B*46:01H HLA-A*26:01H HLA-A*29:02H HLA-A*30:02H HLA-C*12:02H HLA-B*35:01M HLA-B*35:08M HLA-B*35:07H HLA-C*08:01H HLA-B*38:02H HLA-B*15:01H
  REGION 1..9: note = CONT. FROM ABOVE: HLA-B*39:01H HLA-C*02:02H
AAISDYDYY

SEQ ID NO: 3054 - protein, 9 aa, Severe acute respiratory syndrome coronavirus 2
  REGION 1..9: note = Table A: HLA-A*74:01M HLA-A*11:01H HLA-A*11:02H HLA-A*36:01H
AISDYDYYR

SEQ ID NO: 3055 - protein, 9 aa, Severe acute respiratory syndrome coronavirus 2
  REGION 1..9: note = Table A: HLA-B*58:01H HLA-A*36:01H HLA-A*01:01M
ISDYDYYRY

SEQ ID NO: 3056 - protein, 9 aa, Severe acute respiratory syndrome coronavirus 2
  REGION 1..9: note = Table A: HLA-C*14:02H HLA-C*14:03H HLA-A*24:02H HLA-A*24:07H
YYRYNLPTM

SEQ ID NO: 3057 - protein, 9 aa, Severe acute respiratory syndrome coronavirus 2
  REGION 1..9: note = Table A: HLA-B*39:06H
YRYNLPTMC

SEQ ID NO: 3058 - protein, 9 aa, Severe acute respiratory syndrome coronavirus 2
  REGION 1..9: note = Table A: HLA-A*02:11H HLA-A*02:02M HLA-B*38:02H
TMCDIRQLL

SEQ ID NO: 3059 - protein, 9 aa, Severe acute respiratory syndrome coronavirus 2
  REGION 1..9: note = Table A: HLA-B*48:01H HLA-A*02:11M HLA-C*15:02M HLA-A*02:04H HLA-A*02:06M HLA-B*52:01M HLA-B*38:02H HLA-B*40:06H HLA-B*15:03H HLA-B*13:02H
RQLLFVVEV

SEQ ID NO: 3060 - protein, 9 aa, Severe acute respiratory syndrome coronavirus 2
  REGION 1..9: note = Table A: HLA-A*02:11H HLA-A*02:04H HLA-B*38:02H
QLLFVVEVV

SEQ ID NO: 3061 - protein, 9 aa, Severe acute respiratory syndrome coronavirus 2
  REGION 1..9: note = Table A: HLA-B*58:01H HLA-A*11:303H HLA-C*16:04H HLA-A*36:01H HLA-A*25:01M HLA-B*46:01H HLA-A*26:01H HLA-A*26:02H HLA-A*26:03M HLA-A*29:01M HLA-A*29:02M HLA-A*01:01H HLA-B*53:01M HLA-A*30:02M HLA-A*68:01H
  REGION 1..9: note = CONT. FROM ABOVE: HLA-A*68:02H HLA-C*15:05H HLA-C*12:02H HLA- A*02:05H HLA-A*02:02H HLA-A*34:01H HLA-A*34:02H HLA-B*35:01H HLA-B*35:08M HLA-B*35:07H HLA-B*38:02H HLA-B*15:01M HLA-B*15 :02H HLA-B*39:01M HLA-B*07:05H HLA-C*02:02H HLA-A*66:01H
FVVEVVDKY

SEQ ID NO: 3062 - protein, 9 aa, Severe acute respiratory syndrome coronavirus 2
  REGION 1..9: note = Table A: HLA-A*26:01H HLA-A*26:03H HLA-A*68:02M
EVVDKYFDC

SEQ ID NO: 3063 - protein, 9 aa, Severe acute respiratory syndrome coronavirus 2
  REGION 1..9: note = Table A: HLA-A*36:01H HLA-A*01:01H
VVDKYFDCY

SEQ ID NO: 3064 - protein, 9 aa, Severe acute respiratory syndrome coronavirus 2
  REGION 1..9: note = Table A: HLA-A*11:303H HLA-A*03:01H HLA-A*03:02H HLA-A*11:01M HLA-A*11:02M HLA-A*36:01M HLA-B*27:02H HLA-A*30:02H HLA-A*68:01H HLA-A*34:01H HLA-A*34:02M HLA-C*07:27H HLA-A*66:01H
QVIVNNLDK

SEQ ID NO: 3065 - protein, 9 aa, Severe acute respiratory syndrome coronavirus 2
  REGION 1..9: note = Table A: HLA-A*11:303H HLA-A*74:01M HLA-A*03:01H HLA-A*03:02M HLA-A*11:01M HLA-A*11:02M HLA-A*36:01H HLA-A*34:02H HLA-C*07:27H
KSAGFPFNK

SEQ ID NO: 3066 - protein, 9 aa, Severe acute respiratory syndrome coronavirus 2
  REGION 1..9: note = Table A: HLA-B*58:01H HLA-B*57:01H HLA-B*53:01M HLA-A*34:01H HLA-A*34:02H HLA-B*57:03M
SAGFPFNKW

SEQ ID NO: 3067 - protein, 9 aa, Severe acute respiratory syndrome coronavirus 2
  REGION 1..9: note = Table A: HLA-B*56:01M HLA-B*55:02H HLA-B*55:01M HLA-B*54:01M
FPFNKWGKA

SEQ ID NO: 3068 - protein, 9 aa, Severe acute respiratory syndrome coronavirus 2
  REGION 1..9: note = Table A: HLA-A*29:02H
KWGKARLYY

SEQ ID NO: 3069 - protein, 9 aa, Severe acute respiratory syndrome coronavirus 2
  REGION 1..9: note = Table A: HLA-C*16:01H HLA-B*57:03H
KARLYYDSM

SEQ ID NO: 3070 - protein, 9 aa, Severe acute respiratory syndrome coronavirus 2
  REGION 1..9: note = Table A: HLA-A*03:01H HLA-A*36:01M HLA-A*29:02H HLA-A*30:02M HLA-B*38:02H HLA-B*15:01M HLA-B*15:03M
RLYYDSMSY

SEQ ID NO: 3071 - protein, 9 aa, Severe acute respiratory syndrome coronavirus 2
  REGION 1..9: note = Table A: HLA-A*11:303H HLA-A*68:02H HLA-B*35:03M HLA-C*15:05H HLA-B*14:01H HLA-B*35:01H HLA-B*35:02M HLA-C*08:01M HLA-B*35:12H HLA-B*38:02M HLA-B*39:01H
MSYEDQDAL

SEQ ID NO: 3072 - protein, 9 aa, Severe acute respiratory syndrome coronavirus 2
  REGION 1..9: note = Table A: HLA-C*04:01H HLA-C*04:03H HLA-A*24:02M HLA-A*24:07H HLA-A*23:01M HLA-B*39:01H
SYEDQDALF

SEQ ID NO: 3073 - protein, 9 aa, Severe acute respiratory syndrome coronavirus 2
  REGION 1..9: note = Table A: HLA-B*49:01H
YEDQDALFA

SEQ ID NO: 3074 - protein, 9 aa, Severe acute respiratory syndrome coronavirus 2
  REGION 1..9: note = Table A: HLA-B*27:02H HLA-B*37:01H
QDALFAYTK

SEQ ID NO: 3075 - protein, 9 aa, Severe acute respiratory syndrome coronavirus 2
  REGION 1..9: note = Table A: HLA-A*33:01H HLA-A*33:03M HLA-A*26:03H HLA-A*68:01H HLA-A*34:01H HLA-A*34:02M HLA-A*66:01H
DALFAYTKR

SEQ ID NO: 3076 - protein, 9 aa, Severe acute respiratory syndrome coronavirus 2
  REGION 1..9: note = Table A: HLA-C*16:01H HLA-B*08:01H HLA-C*03:02H HLA-C*12:03H HLA-B*51:01M HLA-B*38:02H
FAYTKRNVI

SEQ ID NO: 3077 - protein, 9 aa, Severe acute respiratory syndrome coronavirus 2
  REGION 1..9: note = Table A: HLA-B*38:02H
TKRNVIPTI

SEQ ID NO: 3078 - protein, 9 aa, Severe acute respiratory syndrome coronavirus 2
  REGION 1..9: note = Table A: HLA-A*11:303M HLA-A*25:01M HLA-B*46:01M HLA-A*26:01H HLA-A*26:02H HLA-A*26:03H HLA-C*03:03H HLA-A*02:11H HLA-B*53:01H HLA-C*03:02H HLA-C*03:04H HLA-A*68:01H HLA-A*68:02M HLA-B*35:03H HLA-C*15:05M
  REGION 1..9: note = CONT. FROM ABOVE: HLA-C*12:02M HLA-C*12:03H HLA-A*02:04M HLA- A*02:05H HLA-A*02:06M HLA-A*02:07H HLA-A*02:08H HLA-A*02:01H HLA-A*02:02M HLA-A*02:03M HLA-A*34:01M HLA-A*34:02H HLA-C*07 :27H HLA-B*35:01H HLA-B*35:02H HLA-B*35:08H HLA-C*17:01H
  REGION 1..9: note = CONT. FROM ABOVE: HLA-B*35:07M HLA-C*08:01M HLA-B*35:12H HLA- B*38:02H HLA-B*15:01M HLA-B*15:02H HLA-B*39:01H HLA-B*07:05M HLA-C*02:02H HLA-C*07:04M HLA-A*66:01M
NVIPTITQM

SEQ ID NO: 3079 - protein, 9 aa, Severe acute respiratory syndrome coronavirus 2
  REGION 1..9: note = Table A: HLA-B*53:01H HLA-B*35:03H HLA-C*15:05M HLA-B*07:02H HLA-B*07:05H
IPTITQMNL

SEQ ID NO: 3080 - protein, 9 aa, Severe acute respiratory syndrome coronavirus 2
  REGION 1..9: note = Table A: HLA-A*34:02H
PTITQMNLK

SEQ ID NO: 3081 - protein, 9 aa, Severe acute respiratory syndrome coronavirus 2
  REGION 1..9: note = Table A: HLA-B*58:01M HLA-A*36:01M HLA-A*29:01M HLA-A*29:02H HLA-A*01:01H HLA-A*30:02H HLA-C*15:05H HLA-A*34:02H HLA-B*35:01H HLA-B*38:02H HLA-B*15:02H HLA-B*07:05H
TITQMNLKY

SEQ ID NO: 3082 - protein, 9 aa, Severe acute respiratory syndrome coronavirus 2
  REGION 1..9: note = Table A: HLA-A*02:11M HLA-A*02:04H HLA-A*02:06H HLA-B*52:01H HLA-B*38:01H HLA-B*38:02H HLA-B*13:01H HLA-B*13:02H
TQMNLKYAI

SEQ ID NO: 3083 - protein, 9 aa, Severe acute respiratory syndrome coronavirus 2
  REGION 1..9: note = Table A: HLA-B*39:06H HLA-B*54:01M
MNLKYAISA

SEQ ID NO: 3084 - protein, 9 aa, Severe acute respiratory syndrome coronavirus 2
  REGION 1..9: note = Table A: HLA-A*33:03H HLA-A*26:03H HLA-A*34:01H HLA-A*34:02H
NLKYAISAK

SEQ ID NO: 3085 - protein, 9 aa, Severe acute respiratory syndrome coronavirus 2
  REGION 1..9: note = Table A: HLA-A*74:01H HLA-A*33:01H HLA-A*33:03H HLA-A*31:01H
KYAISAKNR

SEQ ID NO: 3086 - protein, 9 aa, Severe acute respiratory syndrome coronavirus 2
  REGION 1..9: note = Table A: HLA-B*54:01H
YAISAKNRA

SEQ ID NO: 3087 - protein, 9 aa, Severe acute respiratory syndrome coronavirus 2
  REGION 1..9: note = Table A: HLA-A*74:01H
AISAKNRAR

SEQ ID NO: 3088 - protein, 9 aa, Severe acute respiratory syndrome coronavirus 2
  REGION 1..9: note = Table A: HLA-B*08:01H HLA-B*07:04H
SAKNRARTV

SEQ ID NO: 3089 - protein, 9 aa, Severe acute respiratory syndrome coronavirus 2
  REGION 1..9: note = Table A: HLA-A*68:02H HLA-B*14:01M HLA-B*38:02H HLA-B*39:01H
NRARTVAGV

SEQ ID NO: 3090 - protein, 9 aa, Severe acute respiratory syndrome coronavirus 2
  REGION 1..9: note = Table A: HLA-B*27:05H HLA-B*27:02M HLA-B*14:01H HLA-B*38:02H HLA-B*39:01H
ARTVAGVSI

SEQ ID NO: 3091 - protein, 9 aa, Severe acute respiratory syndrome coronavirus 2
  REGION 1..9: note = Table A: HLA-A*02:08H
RTVAGVSIC

SEQ ID NO: 3092 - protein, 9 aa, Severe acute respiratory syndrome coronavirus 2
  REGION 1..9: note = Table A: HLA-A*11:303H HLA-A*74:01H HLA-A*03:01H HLA-A*03:02H HLA-A*11:01H HLA-A*11:02H HLA-A*33:03H HLA-A*26:03H HLA-A*68:01H HLA-A*34:01M HLA-A*34:02H HLA-A*31:01H HLA-A*66:01H
SICSTMTNR

SEQ ID NO: 3093 - protein, 9 aa, Severe acute respiratory syndrome coronavirus 2
  REGION 1..9: note = Table A: HLA-B*58:02H HLA-C*16:01H
CSTMTNRQF

SEQ ID NO: 3094 - protein, 9 aa, Severe acute respiratory syndrome coronavirus 2
  REGION 1..9: note = Table A: HLA-A*11:01H HLA-A*11:02H HLA-A*34:02H
STMTNRQFH

SEQ ID NO: 3095 - protein, 9 aa, Severe acute respiratory syndrome coronavirus 2
  REGION 1..9: note = Table A: HLA-A*74:01H HLA-A*03:02H HLA-A*11:01H HLA-A*11:02H HLA-A*33:01H HLA-A*33:03M HLA-A*30:02H HLA-A*68:01H HLA-A*34:02H HLA-A*31:01H HLA-A*66:01H
MTNRQFHQK

SEQ ID NO: 3096 - protein, 9 aa, Severe acute respiratory syndrome coronavirus 2
  REGION 1..9: note = Table A: HLA-C*06:02H
NRQFHQKLL

SEQ ID NO: 3097 - protein, 9 aa, Severe acute respiratory syndrome coronavirus 2
  REGION 1..9: note = Table A: HLA-A*74:01M HLA-A*03:01M HLA-A*11:01M HLA-A*11:02H HLA-A*36:01H HLA-B*27:05H HLA-A*30:01M HLA-A*30:02H HLA-A*31:01H HLA-B*13:02M
RQFHQKLLK

SEQ ID NO: 3098 - protein, 9 aa, Severe acute respiratory syndrome coronavirus 2
  REGION 1..9: note = Table A: HLA-B*38:02M HLA-B*15:10H
FHQKLLKSI

SEQ ID NO: 3099 - protein, 9 aa, Severe acute respiratory syndrome coronavirus 2
  REGION 1..9: note = Table A: HLA-B*39:06H
HQKLLKSIA

SEQ ID NO: 3100 - protein, 9 aa, Severe acute respiratory syndrome coronavirus 2
  REGION 1..9: note = Table A: HLA-B*55:02H HLA-B*39:06H
QKLLKSIAA

SEQ ID NO: 3101 - protein, 9 aa, Severe acute respiratory syndrome coronavirus 2
  REGION 1..9: note = Table A: HLA-A*02:11M HLA-A*02:01H
KLLKSIAAT

SEQ ID NO: 3102 - protein, 9 aa, Severe acute respiratory syndrome coronavirus 2
  REGION 1..9: note = Table A: HLA-A*74:01H HLA-A*33:01H HLA-A*33:03M HLA-A*26:03M HLA-A*68:01H HLA-A*34:01M HLA-A*31:01H HLA-A*66:01H
LLKSIAATR

SEQ ID NO: 3103 - protein, 9 aa, Severe acute respiratory syndrome coronavirus 2
  REGION 1..9: note = Table A: HLA-A*11:303H HLA-C*16:01H HLA-B*08:01M HLA-C*03:04H HLA-C*15:05M HLA-C*12:03H HLA-C*15:02H HLA-A*02:03H HLA-B*51:01H HLA-B*38:02M HLA-B*07:02H HLA-B*07:04H HLA-B*07:05H
IAATRGATV

SEQ ID NO: 3104 - protein, 9 aa, Severe acute respiratory syndrome coronavirus 2
  REGION 1..9: note = Table A: HLA-B*58:02H HLA-A*30:01H HLA-C*15:05H HLA-B*07:04H HLA-B*57:03H
ATRGATVVI

SEQ ID NO: 3105 - protein, 9 aa, Severe acute respiratory syndrome coronavirus 2
  REGION 1..9: note = Table A: HLA-A*11:303H HLA-A*74:01H HLA-A*03:01H HLA-A*03:02H HLA-A*11:01H HLA-A*11:02H HLA-A*36:01H HLA-B*57:01H HLA-C*03:03H HLA-A*30:01H HLA-A*30:02H HLA-A*68:01M HLA-A*34:01H HLA-A*34:02H HLA-C*07:27H
  REGION 1..9: note = CONT. FROM ABOVE: HLA-A*31:01H HLA-A*66:01M
ATVVIGTSK

SEQ ID NO: 3106 - protein, 9 aa, Severe acute respiratory syndrome coronavirus 2
  REGION 1..9: note = Table A: HLA-B*58:01H HLA-B*44:05H HLA-A*25:01M HLA-B*46:01H HLA-A*26:01M HLA-A*26:02H HLA-A*26:03M HLA-B*53:01H HLA-A*68:01H HLA-C*15:05H HLA-C*12:02H HLA-A*34:01M HLA-A*34:02H HLA-B*35:01M HLA-B*35:07H HLA-B*15:13M
  REGION 1..9: note = CONT. FROM ABOVE: HLA-B*38:01H HLA-B*38:02M HLA-B*15:01M HLA- B*15:02H HLA-B*15:03H HLA-B*07:05M HLA-B*57:03H HLA-C*02:02H HLA-A*66:01M
TVVIGTSKF

SEQ ID NO: 3107 - protein, 9 aa, Severe acute respiratory syndrome coronavirus 2
  REGION 1..9: note = Table A: HLA-B*46:01H HLA-A*26:01H HLA-A*26:03H HLA-A*29:01H HLA-A*29:02H HLA-A*30:02M HLA-A*34:01H HLA-B*38:02H HLA-B*15:01M HLA-B*15:02H
VVIGTSKFY

SEQ ID NO: 3108 - protein, 9 aa, Severe acute respiratory syndrome coronavirus 2
  REGION 1..9: note = Table A: HLA-B*58:01M HLA-B*57:01H HLA-A*25:01H HLA-A*32:01H HLA-B*57:03M
GTSKFYGGW

SEQ ID NO: 3109 - protein, 9 aa, Severe acute respiratory syndrome coronavirus 2
  REGION 1..9: note = Table A: HLA-C*14:02H HLA-C*14:03M HLA-A*02:11H HLA-A*30:02H HLA-A*24:07H
KFYGGWHNM

SEQ ID NO: 3110 - protein, 9 aa, Severe acute respiratory syndrome coronavirus 2
  REGION 1..9: note = Table A: HLA-C*14:02H HLA-C*14:03H HLA-C*06:02H HLA-C*07:02H HLA-A*24:02H HLA-A*24:07M HLA-A*23:01H
FYGGWHNML

SEQ ID NO: 3111 - protein, 9 aa, Severe acute respiratory syndrome coronavirus 2
  REGION 1..9: note = Table A: HLA-A*34:02H
YGGWHNMLK

SEQ ID NO: 3112 - protein, 9 aa, Severe acute respiratory syndrome coronavirus 2
  REGION 1..9: note = Table A: HLA-B*38:02H HLA-B*15:03H
WHNMLKTVY

SEQ ID NO: 3113 - protein, 9 aa, Severe acute respiratory syndrome coronavirus 2
  REGION 1..9: note = Table A: HLA-A*02:03H HLA-B*38:02H
MLKTVYSDV

SEQ ID NO: 3114 - protein, 9 aa, Severe acute respiratory syndrome coronavirus 2
  REGION 1..9: note = Table A: HLA-B*58:01H HLA-A*11:303M HLA-A*01:01H HLA-C*04:01H HLA-C*04:03H HLA-C*03:03H HLA-A*02:11H HLA-C*03:04M HLA-B*35:03H HLA-C*15:05H HLA-C*15:02H HLA-A*02:05H HLA-A*02:06M HLA-A*02:07M HLA-A*02:01H
  REGION 1..9: note = CONT. FROM ABOVE: HLA-B*35:02M HLA-B*35:08H HLA-C*17:01H HLA- C*08:01M HLA-C*08:02H HLA-B*35:12M HLA-B*38:01H HLA-B*38:02M HLA-B*40:01H HLA-B*39:01H HLA-B*57:03H HLA-C*05:01H HLA-B*13 :01M
YSDVENPHL

SEQ ID NO: 3115 - protein, 9 aa, Severe acute respiratory syndrome coronavirus 2
  REGION 1..9: note = Table A: HLA-B*44:05H HLA-B*37:01H HLA-B*40:02M HLA-B*41:02M HLA-C*07:04H
SDVENPHLM

SEQ ID NO: 3116 - protein, 9 aa, Severe acute respiratory syndrome coronavirus 2
  REGION 1..9: note = Table A: HLA-B*58:01M HLA-B*44:02M HLA-B*44:05M HLA-B*57:01H HLA-B*44:03H HLA-B*53:01H HLA-B*37:01M HLA-A*32:01H HLA-B*57:03H HLA-B*49:01H HLA-C*07:04H
VENPHLMGW

SEQ ID NO: 3117 - protein, 9 aa, Severe acute respiratory syndrome coronavirus 2
  REGION 1..9: note = Table A: HLA-B*35:01H HLA-B*35:07H
NPHLMGWDY

SEQ ID NO: 3118 - protein, 9 aa, Severe acute respiratory syndrome coronavirus 2
  REGION 1..9: note = Table A: HLA-A*74:01H HLA-A*11:02H HLA-A*34:02H
HLMGWDYPK

SEQ ID NO: 3119 - protein, 9 aa, Severe acute respiratory syndrome coronavirus 2
  REGION 1..9: note = Table A: HLA-A*34:01H
DRAMPNMLR

SEQ ID NO: 3120 - protein, 9 aa, Severe acute respiratory syndrome coronavirus 2
  REGION 1..9: note = Table A: HLA-B*58:01H HLA-B*58:02M HLA-C*12:05H HLA-C*15:05M HLA-C*15:02M HLA-B*51:01H HLA-C*08:01H HLA-B*38:02H HLA-B*07:05H HLA-B*57:03M HLA-B*13:02M
RAMPNMLRI

SEQ ID NO: 3121 - protein, 9 aa, Severe acute respiratory syndrome coronavirus 2
  REGION 1..9: note = Table A: HLA-C*14:03H
AMPNMLRIM

SEQ ID NO: 3122 - protein, 9 aa, Severe acute respiratory syndrome coronavirus 2
  REGION 1..9: note = Table A: HLA-B*56:01H HLA-B*55:02H HLA-C*15:05H HLA-B*55:01H HLA-B*39:06H HLA-B*54:01H HLA-B*07:02H HLA-B*07:04H
MPNMLRIMA

SEQ ID NO: 3123 - protein, 9 aa, Severe acute respiratory syndrome coronavirus 2
  REGION 1..9: note = Table A: HLA-A*02:11M
NMLRIMASL

SEQ ID NO: 3124 - protein, 9 aa, Severe acute respiratory syndrome coronavirus 2
  REGION 1..9: note = Table A: HLA-B*55:02H HLA-A*02:01H
RIMASLVLA

SEQ ID NO: 3125 - protein, 9 aa, Severe acute respiratory syndrome coronavirus 2
  REGION 1..9: note = Table A: HLA-A*74:01M HLA-A*36:01H HLA-A*33:03H HLA-A*34:01H HLA-A*31:01H HLA-A*66:01H
IMASLVLAR

SEQ ID NO: 3126 - protein, 9 aa, Severe acute respiratory syndrome coronavirus 2
  REGION 1..9: note = Table A: HLA-A*36:01H HLA-A*68:01H HLA-A*34:01H HLA-A*34:02H HLA-A*66:01H
MASLVLARK

SEQ ID NO: 3127 - protein, 9 aa, Severe acute respiratory syndrome coronavirus 2
  REGION 1..9: note = Table A: HLA-A*74:01H
CSLSHRFYR

SEQ ID NO: 3128 - protein, 9 aa, Severe acute respiratory syndrome coronavirus 2
  REGION 1..9: note = Table A: HLA-A*02:11H HLA-A*02:04M HLA-A*02:02H HLA-A*24:07H
SLSHRFYRL

SEQ ID NO: 3129 - protein, 9 aa, Severe acute respiratory syndrome coronavirus 2
  REGION 1..9: note = Table A: HLA-A*02:11H HLA-A*02:01H HLA-A*02:02M HLA-A*02:03M HLA-B*38:02H HLA-B*13:02H
RLANECAQV

SEQ ID NO: 3130 - protein, 9 aa, Severe acute respiratory syndrome coronavirus 2
  REGION 1..9: note = Table A: HLA-A*11:303H HLA-C*16:04H HLA-C*03:03M HLA-C*12:05H HLA-B*53:01H HLA-C*03:02H HLA-C*03:04M HLA-B*35:03H HLA-C*15:05H HLA-C*12:03H HLA-C*07:27H HLA-B*35:01H HLA-B*35:02H HLA-C*08:01H HLA-B*35:12H
  REGION 1..9: note = CONT. FROM ABOVE: HLA-B*38:02M HLA-C*07:04H
LANECAQVL

SEQ ID NO: 3131 - protein, 9 aa, Severe acute respiratory syndrome coronavirus 2
  REGION 1..9: note = Table A: HLA-A*26:01H HLA-A*26:02M HLA-A*26:03H HLA-A*34:01H HLA-B*35:01H HLA-B*38:02H HLA-B*15:02H
ECAQVLSEM

SEQ ID NO: 3132 - protein, 9 aa, Severe acute respiratory syndrome coronavirus 2
  REGION 1..9: note = Table A: HLA-B*48:01H HLA-A*11:303H HLA-B*38:02H HLA-B*15:01M HLA-B*15:02H HLA-B*15:03H HLA-B*39:01H HLA-B*13:01H HLA-B*13:02H HLA-B*15:10H
AQVLSEMVM

SEQ ID NO: 3133 - protein, 9 aa, Severe acute respiratory syndrome coronavirus 2
  REGION 1..9: note = Table A: HLA-A*02:06H HLA-A*02:01H
QVLSEMVMC

SEQ ID NO: 3134 - protein, 9 aa, Severe acute respiratory syndrome coronavirus 2
  REGION 1..9: note = Table A: HLA-A*02:01M HLA-A*02:02H HLA-A*02:03H HLA-B*38:02H
VLSEMVMCG

SEQ ID NO: 3135 - protein, 9 aa, Severe acute respiratory syndrome coronavirus 2
  REGION 1..9: note = Table A: HLA-A*34:02H HLA-B*38:02M HLA-B*15:01H HLA-B*15:02H HLA-B*15:11H
MVMCGGSLY

SEQ ID NO: 3136 - protein, 9 aa, Severe acute respiratory syndrome coronavirus 2
  REGION 1..9: note = Table A: HLA-B*13:02H
VMCGGSLYV

SEQ ID NO: 3137 - protein, 9 aa, Severe acute respiratory syndrome coronavirus 2
  REGION 1..9: note = Table A: HLA-A*34:02H
MCGGSLYVK

SEQ ID NO: 3138 - protein, 9 aa, Severe acute respiratory syndrome coronavirus 2
  REGION 1..9: note = Table A: HLA-A*02:11H HLA-A*02:03M HLA-C*08:03H
SLYVKPGGT

SEQ ID NO: 3139 - protein, 9 aa, Severe acute respiratory syndrome coronavirus 2
  REGION 1..9: note = Table A: HLA-B*46:01H HLA-A*26:03H HLA-B*55:01H HLA-B*38:02H HLA-B*15:01H HLA-B*15:02H
YVKPGGTSS

SEQ ID NO: 3140 - protein, 9 aa, Severe acute respiratory syndrome coronavirus 2
  REGION 1..9: note = Table A: HLA-A*11:303H HLA-B*46:01M HLA-A*30:02H HLA-B*35:01H HLA-B*38:02H HLA-B*15:01M HLA-B*15:02H HLA-B*39:01H HLA-B*07:05H HLA-B*15:11H
SSGDATTAY

SEQ ID NO: 3141 - protein, 9 aa, Severe acute respiratory syndrome coronavirus 2
  REGION 1..9: note = Table A: HLA-C*15:05H HLA-A*34:01H HLA-B*38:02H HLA-B*15:01H HLA-B*15:02M HLA-A*66:01H
TTAYANSVF

SEQ ID NO: 3142 - protein, 9 aa, Severe acute respiratory syndrome coronavirus 2
  REGION 1..9: note = Table A: HLA-C*14:03H HLA-A*24:02M HLA-A*24:07H HLA-C*08:01H HLA-A*23:01M
AYANSVFNI

SEQ ID NO: 3143 - protein, 9 aa, Severe acute respiratory syndrome coronavirus 2
  REGION 1..9: note = Table A: HLA-C*16:04M HLA-C*03:02H HLA-C*03:04H HLA-B*35:03H HLA-C*12:03H HLA-C*08:01H HLA-B*38:02H HLA-B*54:01H
YANSVFNIC

SEQ ID NO: 3144 - protein, 9 aa, Severe acute respiratory syndrome coronavirus 2
  REGION 1..9: note = Table A: HLA-A*68:02H HLA-B*54:01H
NSVFNICQA

SEQ ID NO: 3145 - protein, 9 aa, Severe acute respiratory syndrome coronavirus 2
  REGION 1..9: note = Table A: HLA-A*02:11M HLA-A*68:02M HLA-A*02:05H HLA-A*02:08H HLA-B*38:02H HLA-B*07:05H HLA-B*13:02M
SVFNICQAV

SEQ ID NO: 3146 - protein, 9 aa, Severe acute respiratory syndrome coronavirus 2
  REGION 1..9: note = Table A: HLA-B*54:01H
FNICQAVTA

SEQ ID NO: 3147 - protein, 9 aa, Severe acute respiratory syndrome coronavirus 2
  REGION 1..9: note = Table A: HLA-A*11:303H HLA-C*03:04H HLA-A*68:02H HLA-C*15:05M HLA-C*01:02H HLA-A*02:05M HLA-A*02:08M HLA-C*07:27H HLA-B*38:02H HLA-B*07:02H HLA-B*15:01H HLA-B*39:01H HLA-B*07:05H
AVTANVNAL

SEQ ID NO: 3148 - protein, 9 aa, Severe acute respiratory syndrome coronavirus 2
  REGION 1..9: note = Table A: HLA-B*58:01H HLA-B*57:01H HLA-A*02:11H HLA-A*68:02M HLA-C*15:05H HLA-C*15:02H HLA-A*02:05M HLA-A*02:06H HLA-A*02:08M HLA-A*02:01H HLA-A*02:02M HLA-C*08:01H HLA-B*38:02H HLA-B*57:03M
VTANVNALL

SEQ ID NO: 3149 - protein, 9 aa, Severe acute respiratory syndrome coronavirus 2
  REGION 1..9: note = Table A: HLA-A*02:02M HLA-B*38:02H HLA-B*13:01H
LLSTDGNKI

SEQ ID NO: 3150 - protein, 9 aa, Severe acute respiratory syndrome coronavirus 2
  REGION 1..9: note = Table A: HLA-B*18:01H HLA-A*30:02H HLA-B*35:01H HLA-B*39:01H HLA-B*07:05H
DGNKIADKY

SEQ ID NO: 3151 - protein, 9 aa, Severe acute respiratory syndrome coronavirus 2
  REGION 1..9: note = Table A: HLA-B*58:02M HLA-A*11:303H HLA-C*04:03H HLA-C*03:03H HLA-B*53:01H HLA-C*03:04M HLA-C*15:05H HLA-C*15:02H HLA-A*02:07H HLA-C*17:01H HLA-C*08:01H HLA-C*08:02M HLA-B*38:02H HLA-B*57:03H HLA-C*05:01M
IADKYVRNL

SEQ ID NO: 3152 - protein, 9 aa, Severe acute respiratory syndrome coronavirus 2
  REGION 1..9: note = Table A: HLA-A*33:03H
KYVRNLQHR

SEQ ID NO: 3153 - protein, 9 aa, Severe acute respiratory syndrome coronavirus 2
  REGION 1..9: note = Table A: HLA-A*02:02H HLA-B*07:04H
YVRNLQHRL

SEQ ID NO: 3154 - protein, 9 aa, Severe acute respiratory syndrome coronavirus 2
  REGION 1..9: note = Table A: HLA-B*13:01H
LQHRLYECL

SEQ ID NO: 3155 - protein, 9 aa, Severe acute respiratory syndrome coronavirus 2
  REGION 1..9: note = Table A: HLA-B*38:02M
QHRLYECLY

SEQ ID NO: 3156 - protein, 9 aa, Severe acute respiratory syndrome coronavirus 2
  REGION 1..9: note = Table A: HLA-B*39:01H
NRDVDTDFV

SEQ ID NO: 3157 - protein, 9 aa, Severe acute respiratory syndrome coronavirus 2
  REGION 1..9: note = Table A: HLA-B*44:05H HLA-B*18:01H HLA-A*24:02H HLA-A*23:01H HLA-B*37:01H HLA-B*38:02H HLA-B*40:02H HLA-B*07:05H HLA-C*07:04H
VDTDFVNEF

SEQ ID NO: 3158 - protein, 9 aa, Severe acute respiratory syndrome coronavirus 2
  REGION 1..9: note = Table A: HLA-B*58:01H HLA-A*36:01H HLA-A*01:01H
DTDFVNEFY

SEQ ID NO: 3159 - protein, 9 aa, Severe acute respiratory syndrome coronavirus 2
  REGION 1..9: note = Table A: HLA-A*29:02H
DFVNEFYAY

SEQ ID NO: 3160 - protein, 9 aa, Severe acute respiratory syndrome coronavirus 2
  REGION 1..9: note = Table A: HLA-A*33:03H HLA-A*26:01H HLA-A*26:03H HLA-A*29:02H HLA-C*03:03H HLA-A*02:11M HLA-B*53:01H HLA-C*03:02H HLA-C*03:04H HLA-A*68:02M HLA-B*35:03H HLA-C*15:02H HLA-A*02:04H HLA-A*02:05H HLA-A*02:06H HLA-A*02:07M
  REGION 1..9: note = CONT. FROM ABOVE: HLA-A*02:02M HLA-A*02:03H HLA-A*34:01H HLA- A*34:02H HLA-C*17:01H HLA-B*35:07H HLA-C*08:01H HLA-B*38:02M HLA-C*02:02H HLA-C*07:04H HLA-A*66:01H
FVNEFYAYL

SEQ ID NO: 3161 - protein, 9 aa, Severe acute respiratory syndrome coronavirus 2
  REGION 1..9: note = Table A: HLA-C*14:02H HLA-C*14:03H HLA-A*24:07M HLA-A*23:01H
FYAYLRKHF

SEQ ID NO: 3162 - protein, 9 aa, Severe acute respiratory syndrome coronavirus 2
  REGION 1..9: note = Table A: HLA-A*24:02H HLA-A*24:07M HLA-A*23:01H
AYLRKHFSM

SEQ ID NO: 3163 - protein, 9 aa, Severe acute respiratory syndrome coronavirus 2
  REGION 1..9: note = Table A: HLA-B*08:01H
YLRKHFSMM

SEQ ID NO: 3164 - protein, 9 aa, Severe acute respiratory syndrome coronavirus 2
  REGION 1..9: note = Table A: HLA-B*15:03M
RKHFSMMIL

SEQ ID NO: 3165 - protein, 9 aa, Severe acute respiratory syndrome coronavirus 2
  REGION 1..9: note = Table A: HLA-B*38:02H
MMILSDDAV

SEQ ID NO: 3166 - protein, 9 aa, Severe acute respiratory syndrome coronavirus 2
  REGION 1..9: note = Table A: HLA-A*02:01H HLA-B*38:02H
ILSDDAVVC

SEQ ID NO: 3167 - protein, 9 aa, Severe acute respiratory syndrome coronavirus 2
  REGION 1..9: note = Table A: HLA-B*58:01M HLA-A*11:303H HLA-A*01:01H HLA-C*04:01H HLA-C*04:03H HLA-C*15:05H HLA-A*02:07H HLA-B*35:01H HLA-B*35:02H HLA-B*35:08H HLA-C*08:01H HLA-C*08:02M HLA-B*35:12H HLA-B*38:02H HLA-B*39:01H
  REGION 1..9: note = CONT. FROM ABOVE: HLA-B*57:03H HLA-C*05:01H
LSDDAVVCF

SEQ ID NO: 3168 - protein, 9 aa, Severe acute respiratory syndrome coronavirus 2
  REGION 1..9: note = Table A: HLA-B*46:01H HLA-A*26:01H HLA-A*29:01H HLA-A*30:02H HLA-B*35:01H HLA-B*38:02M HLA-B*15:01M HLA-B*15:02H HLA-B*15:03H HLA-B*07:05H
AVVCFNSTY

SEQ ID NO: 3169 - protein, 9 aa, Severe acute respiratory syndrome coronavirus 2
  REGION 1..9: note = Table A: HLA-A*68:02H HLA-C*15:05H HLA-A*34:02H
STYASQGLV

SEQ ID NO: 3170 - protein, 9 aa, Severe acute respiratory syndrome coronavirus 2
  REGION 1..9: note = Table A: HLA-C*14:03H HLA-B*39:06H HLA-B*39:01H
TYASQGLVA

SEQ ID NO: 3171 - protein, 9 aa, Severe acute respiratory syndrome coronavirus 2
  REGION 1..9: note = Table A: HLA-B*54:01H
YASQGLVAS

SEQ ID NO: 3172 - protein, 9 aa, Severe acute respiratory syndrome coronavirus 2
  REGION 1..9: note = Table A: HLA-B*58:01H HLA-B*58:02H HLA-B*44:05H HLA-A*30:02H HLA-C*15:05M HLA-B*52:01H HLA-B*38:02H HLA-B*07:05H HLA-B*57:03H HLA-B*13:02H
ASQGLVASI

SEQ ID NO: 3173 - protein, 9 aa, Severe acute respiratory syndrome coronavirus 2
  REGION 1..9: note = Table A: HLA-A*03:02H HLA-A*11:01H HLA-A*11:02H
SQGLVASIK

SEQ ID NO: 3174 - protein, 9 aa, Severe acute respiratory syndrome coronavirus 2
  REGION 1..9: note = Table A: HLA-A*02:03H HLA-B*15:01H
GLVASIKNF

SEQ ID NO: 3175 - protein, 9 aa, Severe acute respiratory syndrome coronavirus 2
  REGION 1..9: note = Table A: HLA-A*11:02H HLA-A*68:01H HLA-A*34:02H HLA-A*66:01H
LVASIKNFK

SEQ ID NO: 3176 - protein, 9 aa, Severe acute respiratory syndrome coronavirus 2
  REGION 1..9: note = Table A: HLA-A*11:303H HLA-C*15:05H HLA-C*15:02M HLA-A*02:06H HLA-B*40:06H
ASIKNFKSV

SEQ ID NO: 3177 - protein, 9 aa, Severe acute respiratory syndrome coronavirus 2
  REGION 1..9: note = Table A: HLA-B*08:01H HLA-B*07:04M
SIKNFKSVL

SEQ ID NO: 3178 - protein, 9 aa, Severe acute respiratory syndrome coronavirus 2
  REGION 1..9: note = Table A: HLA-B*15:03H
IKNFKSVLY

SEQ ID NO: 3179 - protein, 9 aa, Severe acute respiratory syndrome coronavirus 2
  REGION 1..9: note = Table A: HLA-B*58:01H HLA-B*58:02M HLA-A*36:01M HLA-A*29:02M HLA-C*07:01H HLA-A*30:02H HLA-C*15:02H HLA-B*38:02H HLA-B*15:03H HLA-B*57:03H
KNFKSVLYY

SEQ ID NO: 3180 - protein, 9 aa, Severe acute respiratory syndrome coronavirus 2
  REGION 1..9: note = Table A: HLA-A*02:11H HLA-A*68:02H HLA-A*02:04H HLA-A*02:06H HLA-A*02:01H HLA-B*13:02H
SVLYYQNNV

SEQ ID NO: 3181 - protein, 9 aa, Severe acute respiratory syndrome coronavirus 2
  REGION 1..9: note = Table A: HLA-B*38:02H HLA-B*15:01H HLA-B*15:02H HLA-B*15:03H
VLYYQNNVF

SEQ ID NO: 3182 - protein, 9 aa, Severe acute respiratory syndrome coronavirus 2
  REGION 1..9: note = Table A: HLA-C*14:02H HLA-C*14:03M HLA-A*29:02H HLA-A*24:02H
LYYQNNVFM

SEQ ID NO: 3183 - protein, 9 aa, Severe acute respiratory syndrome coronavirus 2
  REGION 1..9: note = Table A: HLA-B*39:06H
QNNVFMSEA

SEQ ID NO: 3184 - protein, 9 aa, Severe acute respiratory syndrome coronavirus 2
  REGION 1..9: note = Table A: HLA-A*24:07H
VFMSEAKCW

SEQ ID NO: 3185 - protein, 9 aa, Severe acute respiratory syndrome coronavirus 2
  REGION 1..9: note = Table A: HLA-B*45:01M HLA-B*40:06H HLA-B*50:01H
TETDLTKGP

SEQ ID NO: 3186 - protein, 9 aa, Severe acute respiratory syndrome coronavirus 2
  REGION 1..9: note = Table A: HLA-B*18:01H HLA-B*40:02H HLA-B*07:05H HLA-B*41:02H
HEFCSQHTM

SEQ ID NO: 3187 - protein, 9 aa, Severe acute respiratory syndrome coronavirus 2
  REGION 1..9: note = Table A: HLA-A*11:303H HLA-A*03:01M HLA-A*03:02H HLA-A*11:01M HLA-A*11:02M HLA-A*34:02M HLA-C*07:27H
CSQHTMLVK

SEQ ID NO: 3188 - protein, 9 aa, Severe acute respiratory syndrome coronavirus 2
  REGION 1..9: note = Table A: HLA-B*39:06H
QHTMLVKQG

SEQ ID NO: 3189 - protein, 9 aa, Severe acute respiratory syndrome coronavirus 2
  REGION 1..9: note = Table A: HLA-B*38:02M HLA-B*15:01H HLA-B*15:02M HLA-B*39:01H
MLVKQGDDY

SEQ ID NO: 3190 - protein, 9 aa, Severe acute respiratory syndrome coronavirus 2
  REGION 1..9: note = Table A: HLA-A*02:05H HLA-B*38:02H
LVKQGDDYV

SEQ ID NO: 3191 - protein, 9 aa, Severe acute respiratory syndrome coronavirus 2
  REGION 1..9: note = Table A: HLA-B*15:03H
VKQGDDYVY

SEQ ID NO: 3192 - protein, 9 aa, Severe acute respiratory syndrome coronavirus 2
  REGION 1..9: note = Table A: HLA-A*02:05H HLA-A*02:02H HLA-B*13:01M
KQGDDYVYL

SEQ ID NO: 3193 - protein, 9 aa, Severe acute respiratory syndrome coronavirus 2
  REGION 1..9: note = Table A: HLA-B*42:01H HLA-B*56:01M HLA-B*53:01H HLA-B*55:02H HLA-A*68:02H HLA-B*35:03M HLA-C*15:05H HLA-B*55:01M HLA-A*34:01H HLA-B*35:01H HLA-B*35:02M HLA-B*51:01H HLA-B*35:07M HLA-B*52:01H HLA-C*08:01H HLA-B*35:12M
  REGION 1..9: note = CONT. FROM ABOVE: HLA-B*38:02M HLA-B*54:01M HLA-B*07:02H HLA- B*07:04H HLA-B*07:05M HLA-B*57:03H HLA-B*49:01H
LPYPDPSRI

SEQ ID NO: 3194 - protein, 9 aa, Severe acute respiratory syndrome coronavirus 2
  REGION 1..9: note = Table A: HLA-C*14:02H HLA-C*14:03H HLA-C*07:02H HLA-A*24:07H
PYPDPSRIL

SEQ ID NO: 3195 - protein, 9 aa, Severe acute respiratory syndrome coronavirus 2
  REGION 1..9: note = Table A: HLA-B*35:07H
YPDPSRILG

SEQ ID NO: 3196 - protein, 9 aa, Severe acute respiratory syndrome coronavirus 2
  REGION 1..9: note = Table A: HLA-B*35:02M HLA-B*35:12H
DIVKTDGTL

SEQ ID NO: 3197 - protein, 9 aa, Severe acute respiratory syndrome coronavirus 2
  REGION 1..9: note = Table A: HLA-C*15:05H HLA-B*38:02H HLA-B*15:01H HLA-B*15:02M
IVKTDGTLM

SEQ ID NO: 3198 - protein, 9 aa, Severe acute respiratory syndrome coronavirus 2
  REGION 1..9: note = Table A: HLA-B*18:01H HLA-B*07:05H
DGTLMIERF

SEQ ID NO: 3199 - protein, 9 aa, Severe acute respiratory syndrome coronavirus 2
  REGION 1..9: note = Table A: HLA-A*02:11H HLA-C*15:02H
GTLMIERFV

SEQ ID NO: 3200 - protein, 9 aa, Severe acute respiratory syndrome coronavirus 2
  REGION 1..9: note = Table A: HLA-B*58:02H HLA-C*14:02H HLA-C*14:03H HLA-A*11:303H HLA-C*16:01M HLA-B*46:01M HLA-B*08:01H HLA-C*03:03M HLA-A*02:11H HLA-C*03:02M HLA-C*03:04M HLA-B*14:02M HLA-C*12:03H HLA-C*15:02H HLA-A*02:04H
  REGION 1..9: note = CONT. FROM ABOVE: HLA-A*02:05H HLA-A*02:06M HLA-A*02:07M HLA- B*14:01H HLA-A*02:01H HLA-A*02:02H HLA-A*02:03M HLA-A*24:02H HLA-C*17:01H HLA-C*08:01M HLA-B*38:02M HLA-B*40:06M HLA-B*15 :01H HLA-B*15:02H HLA-B*57:03H HLA-C*07:04H
LMIERFVSL

SEQ ID NO: 3201 - protein, 9 aa, Severe acute respiratory syndrome coronavirus 2
  REGION 1..9: note = Table A: HLA-B*49:01H
IERFVSLAI

SEQ ID NO: 3202 - protein, 9 aa, Severe acute respiratory syndrome coronavirus 2
  REGION 1..9: note = Table A: HLA-A*36:01H HLA-A*29:02H HLA-B*35:01M HLA-B*35:08M HLA-B*35:07M HLA-B*38:02M HLA-B*15:01H HLA-B*15:02M HLA-B*39:01H
FVSLAIDAY

SEQ ID NO: 3203 - protein, 9 aa, Severe acute respiratory syndrome coronavirus 2
  REGION 1..9: note = Table A: HLA-A*02:04H HLA-A*02:02H
SLAIDAYPL

SEQ ID NO: 3204 - protein, 9 aa, Severe acute respiratory syndrome coronavirus 2
  REGION 1..9: note = Table A: HLA-A*11:303M HLA-A*03:01H HLA-A*03:02H HLA-A*11:01H HLA-A*11:02H HLA-A*36:01H HLA-A*01:01H HLA-C*04:03H HLA-C*03:03H HLA-B*27:02H HLA-A*30:02H HLA-C*15:05H HLA-A*02:07H HLA-A*34:02M HLA-C*07:27M
  REGION 1..9: note = CONT. FROM ABOVE: HLA-B*13:02M
AIDAYPLTK

SEQ ID NO: 3205 - protein, 9 aa, Severe acute respiratory syndrome coronavirus 2
  REGION 1..9: note = Table A: HLA-A*11:303H HLA-C*16:01H HLA-B*57:01H HLA-B*46:01H HLA-C*03:02H HLA-A*30:02H HLA-C*12:02M HLA-C*12:03H HLA-C*07:27H HLA-B*38:02H HLA-B*15:01M HLA-B*15:02H HLA-B*57:03H HLA-C*02:02H HLA-B*15:11H
LTKHPNQEY

SEQ ID NO: 3206 - protein, 9 aa, Severe acute respiratory syndrome coronavirus 2
  REGION 1..9: note = Table A: HLA-B*44:05H HLA-B*45:01H HLA-B*44:03H HLA-B*40:01M HLA-B*40:02H HLA-B*40:06H HLA-B*41:02H HLA-B*49:01M
QEYADVFHL

SEQ ID NO: 3207 - protein, 9 aa, Severe acute respiratory syndrome coronavirus 2
  REGION 1..9: note = Table A: HLA-A*33:03H HLA-A*26:01H HLA-A*29:02H HLA-A*30:02H HLA-A*24:02M HLA-A*24:07H HLA-A*23:01H
EYADVFHLY

SEQ ID NO: 3208 - protein, 9 aa, Severe acute respiratory syndrome coronavirus 2
  REGION 1..9: note = Table A: HLA-A*36:01H HLA-C*04:03H HLA-C*03:03H HLA-A*02:11H HLA-B*53:01H HLA-C*03:02H HLA-C*03:04M HLA-C*12:03H HLA-C*15:02M HLA-A*02:07M HLA-C*17:01M HLA-C*08:01M HLA-C*08:02M HLA-B*38:02M HLA-C*05:01H
YADVFHLYL

SEQ ID NO: 3209 - protein, 9 aa, Severe acute respiratory syndrome coronavirus 2
  REGION 1..9: note = Table A: HLA-A*25:01H HLA-A*26:01H HLA-A*26:02H HLA-A*26:03M HLA-A*29:01H HLA-A*29:02M HLA-A*34:01H HLA-A*34:02M HLA-B*35:01M HLA-B*35:07M HLA-B*38:02M HLA-B*15:02M HLA-B*07:05H HLA-A*66:01H
DVFHLYLQY

SEQ ID NO: 3210 - protein, 9 aa, Severe acute respiratory syndrome coronavirus 2
  REGION 1..9: note = Table A: HLA-C*14:03H HLA-A*24:02H HLA-A*24:07M HLA-A*23:01H
VFHLYLQYI

SEQ ID NO: 3211 - protein, 9 aa, Severe acute respiratory syndrome coronavirus 2
  REGION 1..9: note = Table A: HLA-C*14:03H HLA-A*02:04H HLA-A*24:02H HLA-A*24:07H HLA-A*23:01M
LYLQYIRKL

SEQ ID NO: 3212 - protein, 9 aa, Severe acute respiratory syndrome coronavirus 2
  REGION 1..9: note = Table A: HLA-B*08:01M HLA-A*02:02H HLA-B*38:02H HLA-B*07:04H
YIRKLHDEL

SEQ ID NO: 3213 - protein, 9 aa, Severe acute respiratory syndrome coronavirus 2
  REGION 1..9: note = Table A: HLA-A*02:02H
KLHDELTGH

SEQ ID NO: 3214 - protein, 9 aa, Severe acute respiratory syndrome coronavirus 2
  REGION 1..9: note = Table A: HLA-B*38:01H HLA-B*38:02M HLA-B*39:01H
LHDELTGHM

SEQ ID NO: 3215 - protein, 9 aa, Severe acute respiratory syndrome coronavirus 2
  REGION 1..9: note = Table A: HLA-B*37:01H HLA-B*38:01H HLA-B*38:02H
HDELTGHML

SEQ ID NO: 3216 - protein, 9 aa, Severe acute respiratory syndrome coronavirus 2
  REGION 1..9: note = Table A: HLA-A*26:01H HLA-A*26:03H HLA-A*34:01H HLA-B*15:02H
ELTGHMLDM

SEQ ID NO: 3217 - protein, 9 aa, Severe acute respiratory syndrome coronavirus 2
  REGION 1..9: note = Table A: HLA-A*36:01H
LTGHMLDMY

SEQ ID NO: 3218 - protein, 9 aa, Severe acute respiratory syndrome coronavirus 2
  REGION 1..9: note = Table A: HLA-B*38:02H HLA-B*39:06H HLA-B*15:10H
GHMLDMYSV

SEQ ID NO: 3219 - protein, 9 aa, Severe acute respiratory syndrome coronavirus 2
  REGION 1..9: note = Table A: HLA-B*38:02H HLA-B*15:02M
HMLDMYSVM

SEQ ID NO: 3220 - protein, 9 aa, Severe acute respiratory syndrome coronavirus 2
  REGION 1..9: note = Table A: HLA-A*02:07M HLA-A*02:01H HLA-B*38:02H
MLDMYSVML

SEQ ID NO: 3221 - protein, 9 aa, Severe acute respiratory syndrome coronavirus 2
  REGION 1..9: note = Table A: HLA-A*34:01H
MLTNDNTSR

SEQ ID NO: 3222 - protein, 9 aa, Severe acute respiratory syndrome coronavirus 2
  REGION 1..9: note = Table A: HLA-B*58:01H HLA-A*36:01H HLA-B*46:01H HLA-A*26:01H HLA-A*29:02H HLA-A*01:01M HLA-A*30:02M HLA-C*12:02H HLA-A*34:02H HLA-B*38:02H HLA-B*15:01M
LTNDNTSRY

SEQ ID NO: 3223 - protein, 9 aa, Severe acute respiratory syndrome coronavirus 2
  REGION 1..9: note = Table A: HLA-B*53:01H
TNDNTSRYW

SEQ ID NO: 3224 - protein, 9 aa, Severe acute respiratory syndrome coronavirus 2
  REGION 1..9: note = Table A: HLA-B*57:03H
TSRYWEPEF

SEQ ID NO: 3225 - protein, 9 aa, Severe acute respiratory syndrome coronavirus 2
  REGION 1..9: note = Table A: HLA-C*06:02H HLA-B*27:05H HLA-C*07:02H HLA-B*27:02H HLA-B*38:02H
SRYWEPEFY

SEQ ID NO: 3226 - protein, 9 aa, Severe acute respiratory syndrome coronavirus 2
  REGION 1..9: note = Table A: HLA-B*07:05H
WEPEFYEAM

SEQ ID NO: 3227 - protein, 9 aa, Severe acute respiratory syndrome coronavirus 2
  REGION 1..9: note = Table A: HLA-B*35:08H
EPEFYEAMY

SEQ ID NO: 3228 - protein, 9 aa, Severe acute respiratory syndrome coronavirus 2
  REGION 1..9: note = Table A: HLA-B*45:01H HLA-B*40:02H HLA-B*40:06H HLA-B*49:01M HLA-B*50:01H
YEAMYTPHT

SEQ ID NO: 3229 - protein, 9 aa, Severe acute respiratory syndrome coronavirus 2
  REGION 1..9: note = Table A: HLA-A*33:03H HLA-B*56:01H HLA-B*08:01H HLA-C*12:05H HLA-A*02:11H HLA-B*53:01H HLA-A*68:01H HLA-A*68:02H HLA-B*35:03H HLA-C*15:05H HLA-A*34:01M HLA-A*34:02H HLA-B*51:01H HLA-B*38:02M HLA-B*39:06H HLA-B*54:01M
  REGION 1..9: note = CONT. FROM ABOVE: HLA-B*07:05H HLA-B*13:02H HLA-A*66:01H
EAMYTPHTV

SEQ ID NO: 3230 - protein, 9 aa, Severe acute respiratory syndrome coronavirus 2
  REGION 1..9: note = Table A: HLA-A*11:303H HLA-A*02:11H HLA-A*02:02H HLA-B*52:01H HLA-B*38:02H HLA-B*15:01H HLA-B*15:02H HLA-B*15:03H
AMYTPHTVL

SEQ ID NO: 3231 - protein, 9 aa, Severe acute respiratory syndrome coronavirus 2
  REGION 1..9: note = Table A: HLA-A*24:07H
MYTPHTVLQ

SEQ ID NO: 3232 - protein, 9 aa, Severe acute respiratory syndrome coronavirus 2
  REGION 1..9: note = Table A: HLA-A*02:11H HLA-A*68:02H HLA-A*02:05H HLA-A*02:06H HLA-A*02:07H HLA-A*02:08H HLA-A*02:01H HLA-A*02:03H HLA-A*34:02H HLA-B*54:01H
YTPHTVLQA

SEQ ID NO: 3233 - protein, 9 aa, Severe acute respiratory syndrome coronavirus 2
  REGION 1..9: note = Table A: HLA-B*42:01H HLA-B*56:01H HLA-B*55:02H HLA-A*68:02H HLA-B*35:03H HLA-C*15:05M HLA-B*55:01M HLA-B*51:01M HLA-C*08:01H HLA-B*38:02M HLA-B*39:06H HLA-B*54:01M HLA-B*07:02H HLA-B*07:04H HLA-B*07:05M HLA-B*13:02H
TPHTVLQAV

SEQ ID NO: 3234 - protein, 9 aa, Severe acute respiratory syndrome coronavirus 2
  REGION 1..9: note = Table A: HLA-B*54:01H
HTVLQAVGA

SEQ ID NO: 3235 - protein, 9 aa, Severe acute respiratory syndrome coronavirus 2
  REGION 1..9: note = Table A: HLA-B*38:02H HLA-B*13:02H
VLQAVGACV

SEQ ID NO: 3236 - protein, 9 aa, Severe acute respiratory syndrome coronavirus 2
  REGION 1..9: note = Table A: HLA-B*48:01H HLA-B*38:02H HLA-B*15:01H HLA-B*39:01H HLA-B*15:10H
LQAVGACVL

SEQ ID NO: 3237 - protein, 9 aa, Severe acute respiratory syndrome coronavirus 2
  REGION 1..9: note = Table A: HLA-A*11:303H HLA-C*15:05H HLA-B*14:01H HLA-A*02:01H HLA-A*02:02H HLA-A*02:03H HLA-B*38:02H
VLCNSQTSL

SEQ ID NO: 3238 - protein, 9 aa, Severe acute respiratory syndrome coronavirus 2
  REGION 1..9: note = Table A: HLA-B*39:06H
SQTSLRCGA

SEQ ID NO: 3239 - protein, 9 aa, Severe acute respiratory syndrome coronavirus 2
  REGION 1..9: note = Table A: HLA-B*18:01H
YDHVISTSH

SEQ ID NO: 3240 - protein, 9 aa, Severe acute respiratory syndrome coronavirus 2
  REGION 1..9: note = Table A: HLA-B*58:01H HLA-B*58:02H HLA-A*11:303H HLA-A*25:01H HLA-A*26:01M HLA-A*26:02H HLA-A*26:03M HLA-A*02:11H HLA-B*53:01M HLA-C*03:04H HLA-A*30:02M HLA-A*68:01H HLA-A*68:02M HLA-B*35:03M HLA-C*15:05H
  REGION 1..9: note = CONT. FROM ABOVE: HLA-A*02:04H HLA-A*02:05H HLA-A*02:06M HLA- A*02:07H HLA-A*02:08H HLA-A*02:01H HLA-A*02:02H HLA-A*02:03H HLA-A*34:01H HLA-A*34:02H HLA-B*35:01H HLA-B*35:07H HLA-C*08 :01H HLA-B*38:01H HLA-B*38:02H HLA-B*40:06H HLA-B*07:04H
  REGION 1..9: note = CONT. FROM ABOVE: HLA-B*15:01H HLA-B*15:02M HLA-B*39:01H HLA- B*57:03M HLA-B*13:01M HLA-B*13:02H HLA-B*15:10H HLA-C*07:04H HLA-A*66:01M
HVISTSHKL

SEQ ID NO: 3241 - protein, 9 aa, Severe acute respiratory syndrome coronavirus 2
  REGION 1..9: note = Table A: HLA-B*58:01H HLA-B*58:02H HLA-C*16:01M HLA-C*03:03H HLA-C*07:01H HLA-C*03:04M HLA-C*15:05M HLA-C*15:02H HLA-C*17:01H HLA-B*07:04H HLA-B*57:03H HLA-C*07:04M
ISTSHKLVL

SEQ ID NO: 3242 - protein, 9 aa, Severe acute respiratory syndrome coronavirus 2
  REGION 1..9: note = Table A: HLA-A*02:11H HLA-A*68:02H HLA-C*15:05H HLA-C*15:02M HLA-A*02:03H HLA-B*52:01H HLA-C*08:01H HLA-B*38:02H HLA-B*13:02M
TSHKLVLSV

SEQ ID NO: 3243 - protein, 9 aa, Severe acute respiratory syndrome coronavirus 2
  REGION 1..9: note = Table A: HLA-B*38:02H HLA-B*15:01H
KLVLSVNPY

SEQ ID NO: 3244 - protein, 9 aa, Severe acute respiratory syndrome coronavirus 2
  REGION 1..9: note = Table A: HLA-A*02:11M HLA-A*68:02H HLA-A*02:04H HLA-A*02:06H HLA-A*02:07H HLA-A*02:01H
LVLSVNPYV

SEQ ID NO: 3245 - protein, 9 aa, Severe acute respiratory syndrome coronavirus 2
  REGION 1..9: note = Table A: HLA-A*02:11H HLA-A*68:02H HLA-A*02:05M HLA-A*02:06H HLA-A*02:08M HLA-A*02:01H HLA-A*02:02H HLA-A*02:03H HLA-B*38:02H HLA-A*31:01H
SVNPYVCNA

SEQ ID NO: 3246 - protein, 9 aa, Severe acute respiratory syndrome coronavirus 2
  REGION 1..9: note = Table A: HLA-B*58:01H HLA-C*16:04H HLA-A*25:01H HLA-A*26:01H HLA-A*26:02H HLA-A*26:03H HLA-A*29:01M HLA-A*29:02M HLA-B*44:03H HLA-B*18:01H HLA-B*53:01H HLA-A*30:02H HLA-A*68:01M HLA-A*68:02M HLA-C*15:05H HLA-A*34:01M
  REGION 1..9: note = CONT. FROM ABOVE: HLA-A*34:02H HLA-B*35:01H HLA-B*35:08H HLA- B*35:07M HLA-B*38:02H HLA-B*15:01H HLA-B*15:02M HLA-B*39:01H HLA-B*07:05M HLA-A*66:01M
DVTDVTQLY

SEQ ID NO: 3247 - protein, 9 aa, Severe acute respiratory syndrome coronavirus 2
  REGION 1..9: note = Table A: HLA-B*58:01M HLA-A*11:303H HLA-A*36:01M HLA-A*01:01M HLA-C*04:01H HLA-C*04:03H HLA-C*03:04H HLA-C*15:05H HLA-C*15:02M HLA-A*02:07M HLA-A*02:01H HLA-C*17:01H HLA-C*08:01M HLA-C*08:02M HLA-B*38:02M
  REGION 1..9: note = CONT. FROM ABOVE: HLA-B*07:05H HLA-B*57:03H HLA-C*05:01M HLA- B*13:01H
VTDVTQLYL

SEQ ID NO: 3248 - protein, 9 aa, Severe acute respiratory syndrome coronavirus 2
  REGION 1..9: note = Table A: HLA-A*11:303H HLA-A*03:01H HLA-B*46:01H HLA-A*29:02H HLA-B*38:02H HLA-B*15:01M HLA-B*15:02H HLA-B*15:03H HLA-B*07:05H HLA-B*15:11H
QLYLGGMSY

SEQ ID NO: 3249 - protein, 9 aa, Severe acute respiratory syndrome coronavirus 2
  REGION 1..9: note = Table A: HLA-C*14:02M HLA-C*14:03M HLA-A*29:02M HLA-A*30:02H
LYLGGMSYY

SEQ ID NO: 3250 - protein, 9 aa, Severe acute respiratory syndrome coronavirus 2
  REGION 1..9: note = Table A: HLA-A*02:02M
YLGGMSYYC

SEQ ID NO: 3251 - protein, 9 aa, Severe acute respiratory syndrome coronavirus 2
  REGION 1..9: note = Table A: HLA-A*34:02H
MSYYCKSHK

SEQ ID NO: 3252 - protein, 9 aa, Severe acute respiratory syndrome coronavirus 2
  REGION 1..9: note = Table A: HLA-B*58:01M HLA-B*58:02H HLA-B*57:01M HLA-B*46:01H HLA-C*15:05H HLA-C*12:02H HLA-A*32:01H HLA-B*07:04H HLA-B*15:01H HLA-B*15:03H HLA-B*57:03H
KSHKPPISF

SEQ ID NO: 3253 - protein, 9 aa, Severe acute respiratory syndrome coronavirus 2
  REGION 1..9: note = Table A: HLA-B*38:02H
SHKPPISFP

SEQ ID NO: 3254 - protein, 9 aa, Severe acute respiratory syndrome coronavirus 2
  REGION 1..9: note = Table A: HLA-C*06:02H HLA-C*07:02H HLA-A*68:02H
HKPPISFPL

SEQ ID NO: 3255 - protein, 9 aa, Severe acute respiratory syndrome coronavirus 2
  REGION 1..9: note = Table A: HLA-B*56:01H HLA-B*55:02H HLA-C*15:05H HLA-B*55:01H
KPPISFPLC

SEQ ID NO: 3256 - protein, 9 aa, Severe acute respiratory syndrome coronavirus 2
  REGION 1..9: note = Table A: HLA-B*56:01H HLA-B*55:02H HLA-C*15:05H HLA-B*54:01H
PPISFPLCA

SEQ ID NO: 3257 - protein, 9 aa, Severe acute respiratory syndrome coronavirus 2
  REGION 1..9: note = Table A: HLA-C*16:04H
CANGQVFGL

SEQ ID NO: 3258 - protein, 9 aa, Severe acute respiratory syndrome coronavirus 2
  REGION 1..9: note = Table A: HLA-A*29:02H HLA-A*30:02H
ANGQVFGLY

SEQ ID NO: 3259 - protein, 9 aa, Severe acute respiratory syndrome coronavirus 2
  REGION 1..9: note = Table A: HLA-A*36:01H HLA-A*34:02H
NGQVFGLYK

SEQ ID NO: 3260 - protein, 9 aa, Severe acute respiratory syndrome coronavirus 2
  REGION 1..9: note = Table A: HLA-A*68:02H
NVTDFNAIA

SEQ ID NO: 3261 - protein, 9 aa, Severe acute respiratory syndrome coronavirus 2
  REGION 1..9: note = Table A: HLA-A*68:02H HLA-B*50:01H
TDFNAIATC

SEQ ID NO: 3262 - protein, 9 aa, Severe acute respiratory syndrome coronavirus 2
  REGION 1..9: note = Table A: HLA-B*35:03M HLA-B*35:02H
WTNAGDYIL

SEQ ID NO: 3263 - protein, 9 aa, Severe acute respiratory syndrome coronavirus 2
  REGION 1..9: note = Table A: HLA-B*50:01H
GDYILANTC

SEQ ID NO: 3264 - protein, 9 aa, Severe acute respiratory syndrome coronavirus 2
  REGION 1..9: note = Table A: HLA-A*74:01H HLA-A*34:01H
ILANTCTER

SEQ ID NO: 3265 - protein, 9 aa, Severe acute respiratory syndrome coronavirus 2
  REGION 1..9: note = Table A: HLA-C*15:05H
LANTCTERL

SEQ ID NO: 3266 - protein, 9 aa, Severe acute respiratory syndrome coronavirus 2
  REGION 1..9: note = Table A: HLA-C*16:01H
TCTERLKLF

SEQ ID NO: 3267 - protein, 9 aa, Severe acute respiratory syndrome coronavirus 2
  REGION 1..9: note = Table A: HLA-B*45:01M HLA-B*40:06M HLA-B*41:02H HLA-B*50:01M
TERLKLFAA

SEQ ID NO: 3268 - protein, 9 aa, Severe acute respiratory syndrome coronavirus 2
  REGION 1..9: note = Table A: HLA-A*74:01H HLA-A*03:01M HLA-A*03:02M HLA-A*11:01H HLA-A*11:02H HLA-A*36:01H
KLFAAETLK

SEQ ID NO: 3269 - protein, 9 aa, Severe acute respiratory syndrome coronavirus 2
  REGION 1..9: note = Table A: HLA-C*16:04H
FAAETLKAT

SEQ ID NO: 3270 - protein, 9 aa, Severe acute respiratory syndrome coronavirus 2
  REGION 1..9: note = Table A: HLA-B*57:01H HLA-B*46:01M HLA-C*12:02H HLA-A*02:02H HLA-B*15:13M HLA-B*38:01H HLA-B*38:02H HLA-B*15:01H HLA-B*15:02H HLA-B*15:03M HLA-B*57:03H HLA-B*13:01M HLA-B*15:11H
TLKATEETF

SEQ ID NO: 3271 - protein, 9 aa, Severe acute respiratory syndrome coronavirus 2
  REGION 1..9: note = Table A: HLA-B*58:01M HLA-B*58:02H HLA-A*11:303H HLA-C*16:01H HLA-B*57:01H HLA-C*12:05H HLA-A*02:11H HLA-B*53:01H HLA-C*03:04H HLA-A*68:02H HLA-B*35:03H HLA-C*15:05H HLA-C*12:03H HLA-C*15:02M HLA-A*02:05M
  REGION 1..9: note = CONT. FROM ABOVE: HLA-A*02:06M HLA-A*02:08H HLA-A*02:02M HLA- B*35:02H HLA-C*17:01H HLA-C*08:01M HLA-B*35:12H HLA-B*38:02H HLA-B*40:06H HLA-B*57:03H HLA-B*13:01H HLA-B*13:02H HLA-C*07 :04H
KATEETFKL

SEQ ID NO: 3272 - protein, 9 aa, Severe acute respiratory syndrome coronavirus 2
  REGION 1..9: note = Table A: HLA-B*58:01H HLA-B*44:02M HLA-B*44:05H HLA-C*16:04H HLA-A*36:01H HLA-A*29:02H HLA-B*45:01H HLA-B*44:03H HLA-B*18:01H HLA-C*07:01H HLA-B*35:01H HLA-B*38:02H HLA-B*07:05M
TEETFKLSY

SEQ ID NO: 3273 - protein, 9 aa, Severe acute respiratory syndrome coronavirus 2
  REGION 1..9: note = Table A: HLA-A*68:02H HLA-B*57:03H
ETFKLSYGI

SEQ ID NO: 3274 - protein, 9 aa, Severe acute respiratory syndrome coronavirus 2
  REGION 1..9: note = Table A: HLA-A*02:11H HLA-A*02:04M HLA-A*02:05H HLA-A*02:06H HLA-A*02:07H HLA-A*02:08M HLA-B*14:01H HLA-A*02:01M HLA-A*02:02H HLA-A*02:03H HLA-B*38:02M HLA-B*40:06H HLA-B*13:02H
KLSYGIATV

SEQ ID NO: 3275 - protein, 9 aa, Severe acute respiratory syndrome coronavirus 2
  REGION 1..9: note = Table A: HLA-A*74:01M HLA-A*33:03H HLA-A*68:01M HLA-A*34:01M HLA-A*34:02M HLA-A*31:01H HLA-A*66:01M
LSYGIATVR

SEQ ID NO: 3276 - protein, 9 aa, Severe acute respiratory syndrome coronavirus 2
  REGION 1..9: note = Table A: HLA-A*11:303H HLA-C*16:01H HLA-B*46:01H HLA-C*06:02H HLA-C*03:03H HLA-C*12:05M HLA-A*02:11H HLA-C*03:02H HLA-C*03:04H HLA-A*68:02H HLA-C*15:05H HLA-C*12:03H HLA-C*15:02M HLA-A*02:04H HLA-A*02:05H
  REGION 1..9: note = CONT. FROM ABOVE: HLA-A*02:06H HLA-A*02:01H HLA-A*02:02H HLA- A*02:03M HLA-B*51:01H HLA-C*08:01H HLA-B*38:02M HLA-B*13:02H HLA-B*49:01H
YGIATVREV

SEQ ID NO: 3277 - protein, 9 aa, Severe acute respiratory syndrome coronavirus 2
  REGION 1..9: note = Table A: HLA-B*48:01H HLA-A*02:11H HLA-C*15:05H HLA-A*02:05H HLA-A*02:02M HLA-C*08:01H HLA-B*38:02H HLA-B*07:02M HLA-B*07:04H HLA-B*07:05H HLA-B*41:02H HLA-B*13:01H
GIATVREVL

SEQ ID NO: 3278 - protein, 9 aa, Severe acute respiratory syndrome coronavirus 2
  REGION 1..9: note = Table A: HLA-A*74:01M HLA-A*33:01H HLA-A*33:03M HLA-A*26:03H HLA-A*68:01H HLA-A*34:01M HLA-A*34:02H HLA-A*31:01H HLA-A*66:01M
TVREVLSDR

SEQ ID NO: 3279 - protein, 9 aa, Severe acute respiratory syndrome coronavirus 2
  REGION 1..9: note = Table A: HLA-B*40:01H HLA-B*40:02H HLA-B*41:02H
REVLSDREL

SEQ ID NO: 3280 - protein, 9 aa, Severe acute respiratory syndrome coronavirus 2
  REGION 1..9: note = Table A: HLA-A*02:11M HLA-C*15:02M HLA-A*02:04M HLA-A*02:05H HLA-A*02:06H HLA-A*02:07H HLA-B*14:01H HLA-A*02:01M HLA-A*02:02H HLA-A*02:03M HLA-C*17:01H HLA-C*08:01H HLA-B*38:02M HLA-B*13:01M HLA-B*13:02H HLA-C*07:04H
VLSDRELHL

SEQ ID NO: 3281 - protein, 9 aa, Severe acute respiratory syndrome coronavirus 2
  REGION 1..9: note = Table A: HLA-B*44:03H
SDRELHLSW

SEQ ID NO: 3282 - protein, 9 aa, Severe acute respiratory syndrome coronavirus 2
  REGION 1..9: note = Table A: HLA-B*45:01H HLA-B*40:02H HLA-B*40:06H HLA-B*13:02H HLA-B*49:01H
RELHLSWEV

SEQ ID NO: 3283 - protein, 9 aa, Severe acute respiratory syndrome coronavirus 2
  REGION 1..9: note = Table A: HLA-A*74:01H HLA-A*34:01H HLA-A*66:01H
LSWEVGKPR

SEQ ID NO: 3284 - protein, 9 aa, Severe acute respiratory syndrome coronavirus 2
  REGION 1..9: note = Table A: HLA-B*40:06H HLA-B*50:01M
WEVGKPRPP

SEQ ID NO: 3285 - protein, 9 aa, Severe acute respiratory syndrome coronavirus 2
  REGION 1..9: note = Table A: HLA-A*33:03H HLA-A*26:03H HLA-A*68:02H HLA-A*34:01M HLA-A*34:02H HLA-B*07:04H HLA-A*66:01H
EVGKPRPPL

SEQ ID NO: 3286 - protein, 9 aa, Severe acute respiratory syndrome coronavirus 2
  REGION 1..9: note = Table A: HLA-B*55:01H
KPRPPLNRN

SEQ ID NO: 3287 - protein, 9 aa, Severe acute respiratory syndrome coronavirus 2
  REGION 1..9: note = Table A: HLA-C*15:05H HLA-B*07:04H
RPPLNRNYV

SEQ ID NO: 3288 - protein, 9 aa, Severe acute respiratory syndrome coronavirus 2
  REGION 1..9: note = Table A: HLA-A*24:07H
PPLNRNYVF

SEQ ID NO: 3289 - protein, 9 aa, Severe acute respiratory syndrome coronavirus 2
  REGION 1..9: note = Table A: HLA-B*27:05H HLA-B*27:02H
NRNYVFTGY

SEQ ID NO: 3290 - protein, 9 aa, Severe acute respiratory syndrome coronavirus 2
  REGION 1..9: note = Table A: HLA-A*74:01H
RNYVFTGYR

SEQ ID NO: 3291 - protein, 9 aa, Severe acute respiratory syndrome coronavirus 2
  REGION 1..9: note = Table A: HLA-A*24:07H HLA-C*08:01H
NYVFTGYRV

SEQ ID NO: 3292 - protein, 9 aa, Severe acute respiratory syndrome coronavirus 2
  REGION 1..9: note = Table A: HLA-B*54:01H
YVFTGYRVT

SEQ ID NO: 3293 - protein, 9 aa, Severe acute respiratory syndrome coronavirus 2
  REGION 1..9: note = Table A: HLA-C*14:03H HLA-A*30:01H HLA-A*24:07H HLA-A*23:01H
VFTGYRVTK

SEQ ID NO: 3294 - protein, 9 aa, Severe acute respiratory syndrome coronavirus 2
  REGION 1..9: note = Table A: HLA-B*58:02H HLA-B*57:03M
VTKNSKVQI

SEQ ID NO: 3295 - protein, 9 aa, Severe acute respiratory syndrome coronavirus 2
  REGION 1..9: note = Table A: HLA-A*25:01H HLA-B*46:01M HLA-A*26:01M HLA-A*26:02H HLA-A*01:01H HLA-A*30:02H HLA-C*12:02M HLA-B*35:01H HLA-B*38:02H HLA-B*15:01H HLA-B*15:02M HLA-B*15:11H
NSKVQIGEY

SEQ ID NO: 3296 - protein, 9 aa, Severe acute respiratory syndrome coronavirus 2
  REGION 1..9: note = Table A: HLA-B*58:01M HLA-B*58:02H HLA-B*57:01H HLA-A*30:02H HLA-A*24:02H HLA-A*24:07H HLA-A*23:01H HLA-A*32:01H HLA-B*15:01M HLA-B*57:03H HLA-B*13:01M
KVQIGEYTF

SEQ ID NO: 3297 - protein, 9 aa, Severe acute respiratory syndrome coronavirus 2
  REGION 1..9: note = Table A: HLA-A*03:02M HLA-A*11:01M HLA-A*11:02H HLA-A*36:01H HLA-A*34:02M HLA-C*07:27H
QIGEYTFEK

SEQ ID NO: 3298 - protein, 9 aa, Severe acute respiratory syndrome coronavirus 2
  REGION 1..9: note = Table A: HLA-B*18:01H HLA-B*27:02H HLA-B*35:01H HLA-C*08:03H HLA-B*38:02H HLA-B*15:01H HLA-B*15:03H HLA-B*39:01H HLA-B*07:05H
GDYGDAVVY

SEQ ID NO: 3299 - protein, 9 aa, Severe acute respiratory syndrome coronavirus 2
  REGION 1..9: note = Table A: HLA-A*33:01H HLA-A*33:03H HLA-A*68:01M HLA-A*34:01M HLA-A*34:02H HLA-A*31:01H HLA-A*66:01H
DYGDAVVYR

SEQ ID NO: 3300 - protein, 9 aa, Severe acute respiratory syndrome coronavirus 2
  REGION 1..9: note = Table A: HLA-B*58:01M HLA-B*58:02H HLA-C*14:02H HLA-C*14:03M HLA-A*11:303H HLA-C*16:04H HLA-A*03:01M HLA-A*03:02H HLA-A*11:01H HLA-A*11:02H HLA-B*57:01H HLA-A*25:01H HLA-B*46:01H HLA-A*26:01M HLA-A*26:02H HLA-A*26:03H
  REGION 1..9: note = CONT. FROM ABOVE: HLA-A*29:01M HLA-A*29:02M HLA-B*53:01H HLA- C*03:02M HLA-A*30:02H HLA-C*15:05M HLA-C*12:02H HLA-C*12:03M HLA-A*02:03H HLA-A*34:01M HLA-A*34:02M HLA-C*07:27H HLA-B*35 :01M HLA-B*35:07M HLA-B*52:01H HLA-B*38:02H HLA-A*32:01H
  REGION 1..9: note = CONT. FROM ABOVE: HLA-B*15:01H HLA-B*15:02H HLA-B*15:03H HLA- B*07:05H HLA-B*57:03M HLA-C*02:02M HLA-B*15:11H HLA-A*66:01H
VVYRGTTTY

SEQ ID NO: 3301 - protein, 9 aa, Severe acute respiratory syndrome coronavirus 2
  REGION 1..9: note = Table A: HLA-A*33:03H
VYRGTTTYK

SEQ ID NO: 3302 - protein, 9 aa, Severe acute respiratory syndrome coronavirus 2
  REGION 1..9: note = Table A: HLA-C*07:01H HLA-C*07:02H
YRGTTTYKL

SEQ ID NO: 3303 - protein, 9 aa, Severe acute respiratory syndrome coronavirus 2
  REGION 1..9: note = Table A: HLA-C*15:05H HLA-C*15:02H HLA-B*13:02M
GTTTYKLNV

SEQ ID NO: 3304 - protein, 9 aa, Severe acute respiratory syndrome coronavirus 2
  REGION 1..9: note = Table A: HLA-A*30:02H
TYKLNVGDY

SEQ ID NO: 3305 - protein, 9 aa, Severe acute respiratory syndrome coronavirus 2
  REGION 1..9: note = Table A: HLA-B*38:02H HLA-B*15:03H
YKLNVGDYF

SEQ ID NO: 3306 - protein, 9 aa, Severe acute respiratory syndrome coronavirus 2
  REGION 1..9: note = Table A: HLA-A*02:11M HLA-A*02:02M HLA-B*13:02H
KLNVGDYFV

SEQ ID NO: 3307 - protein, 9 aa, Severe acute respiratory syndrome coronavirus 2
  REGION 1..9: note = Table A: HLA-C*14:02H HLA-C*14:03M HLA-A*24:07H HLA-B*38:02H HLA-B*49:01H
YFVLTSHTV

SEQ ID NO: 3308 - protein, 9 aa, Severe acute respiratory syndrome coronavirus 2
  REGION 1..9: note = Table A: HLA-A*11:303H HLA-C*03:04H HLA-B*38:02H HLA-B*15:02H HLA-C*07:04H
FVLTSHTVM

SEQ ID NO: 3309 - protein, 9 aa, Severe acute respiratory syndrome coronavirus 2
  REGION 1..9: note = Table A: HLA-A*68:02H
LTSHTVMPL

SEQ ID NO: 3310 - protein, 9 aa, Severe acute respiratory syndrome coronavirus 2
  REGION 1..9: note = Table A: HLA-B*38:02H HLA-B*39:06H HLA-B*39:01H HLA-B*15:10H
SHTVMPLSA

SEQ ID NO: 3311 - protein, 9 aa, Severe acute respiratory syndrome coronavirus 2
  REGION 1..9: note = Table A: HLA-A*68:02H HLA-A*34:02H
HTVMPLSAP

SEQ ID NO: 3312 - protein, 9 aa, Severe acute respiratory syndrome coronavirus 2
  REGION 1..9: note = Table A: HLA-C*14:03H HLA-C*04:03H HLA-A*02:11H HLA-C*15:05H HLA-C*01:02M HLA-A*02:07M HLA-A*02:01H HLA-A*24:02H HLA-A*24:07H HLA-B*52:01H HLA-A*23:01H HLA-B*38:02H
VMPLSAPTL

SEQ ID NO: 3313 - protein, 9 aa, Severe acute respiratory syndrome coronavirus 2
  REGION 1..9: note = Table A: HLA-B*56:01H HLA-B*55:02H HLA-B*35:03H HLA-C*15:05H HLA-B*51:01H HLA-B*54:01M
MPLSAPTLV

SEQ ID NO: 3314 - protein, 9 aa, Severe acute respiratory syndrome coronavirus 2
  REGION 1..9: note = Table A: HLA-C*15:05H HLA-B*07:05H
APTLVPQEH

SEQ ID NO: 3315 - protein, 9 aa, Severe acute respiratory syndrome coronavirus 2
  REGION 1..9: note = Table A: HLA-A*02:11M HLA-A*68:02H HLA-A*02:04H HLA-A*02:05H HLA-A*02:06H HLA-A*02:07H HLA-A*02:01H HLA-A*02:02H HLA-A*02:03H HLA-B*38:02M HLA-B*13:02H
TLVPQEHYV

SEQ ID NO: 3316 - protein, 9 aa, Severe acute respiratory syndrome coronavirus 2
  REGION 1..9: note = Table A: HLA-B*42:01H HLA-B*56:01H HLA-B*53:01H HLA-B*55:02H HLA-B*35:03H HLA-C*15:05M HLA-B*55:01H HLA-B*51:01H HLA-C*08:01M HLA-B*35:12H HLA-B*38:02H HLA-B*54:01H HLA-B*07:02H HLA-B*07:04M HLA-B*07:05H
VPQEHYVRI

SEQ ID NO: 3317 - protein, 9 aa, Severe acute respiratory syndrome coronavirus 2
  REGION 1..9: note = Table A: HLA-B*14:02H HLA-B*14:01H HLA-B*38:01H HLA-B*38:02M HLA-B*39:06H HLA-B*39:01H HLA-B*15:10M
EHYVRITGL

SEQ ID NO: 3318 - protein, 9 aa, Severe acute respiratory syndrome coronavirus 2
  REGION 1..9: note = Table A: HLA-A*29:02H HLA-A*30:02M
HYVRITGLY

SEQ ID NO: 3319 - protein, 9 aa, Severe acute respiratory syndrome coronavirus 2
  REGION 1..9: note = Table A: HLA-B*58:01H HLA-B*58:02H HLA-C*03:03H HLA-A*02:11H HLA-C*03:04H HLA-C*15:05H HLA-C*15:02M HLA-A*02:04H HLA-A*02:06H HLA-A*02:07H HLA-A*02:02H HLA-C*17:01H HLA-A*24:07H HLA-C*08:01H HLA-A*23:01H HLA-A*32:01H
  REGION 1..9: note = CONT. FROM ABOVE: HLA-B*40:06H HLA-B*57:03M HLA-B*13:01H HLA- B*13:02H
RITGLYPTL

SEQ ID NO: 3320 - protein, 9 aa, Severe acute respiratory syndrome coronavirus 2
  REGION 1..9: note = Table A: HLA-B*51:01H HLA-B*13:02H
TGLYPTLNI

SEQ ID NO: 3321 - protein, 9 aa, Severe acute respiratory syndrome coronavirus 2
  REGION 1..9: note = Table A: HLA-C*04:03H HLA-A*02:11H HLA-C*15:05H HLA-A*02:07H HLA-C*08:02M HLA-B*38:02H HLA-C*05:01M
ISDEFSSNV

SEQ ID NO: 3322 - protein, 9 aa, Severe acute respiratory syndrome coronavirus 2
  REGION 1..9: note = Table A: HLA-B*45:01H
SDEFSSNVA

SEQ ID NO: 3323 - protein, 9 aa, Severe acute respiratory syndrome coronavirus 2
  REGION 1..9: note = Table A: HLA-B*18:01H HLA-B*07:05H
DEFSSNVAN

SEQ ID NO: 3324 - protein, 9 aa, Severe acute respiratory syndrome coronavirus 2
  REGION 1..9: note = Table A: HLA-A*33:03H HLA-A*26:01H HLA-A*26:02H HLA-A*26:03M HLA-A*29:01H HLA-A*29:02H HLA-A*34:02H HLA-B*38:02H HLA-B*07:05H
EFSSNVANY

SEQ ID NO: 3325 - protein, 9 aa, Severe acute respiratory syndrome coronavirus 2
  REGION 1..9: note = Table A: HLA-A*11:303M HLA-A*74:01H HLA-A*03:01H HLA-A*03:02H HLA-A*11:01H HLA-A*11:02H HLA-A*36:01H HLA-A*33:03H HLA-A*30:02M HLA-A*68:01H HLA-A*34:02M HLA-C*07:27H HLA-A*31:01H
SSNVANYQK

SEQ ID NO: 3326 - protein, 9 aa, Severe acute respiratory syndrome coronavirus 2
  REGION 1..9: note = Table A: HLA-A*68:02H
SNVANYQKV

SEQ ID NO: 3327 - protein, 9 aa, Severe acute respiratory syndrome coronavirus 2
  REGION 1..9: note = Table A: HLA-A*11:303H HLA-C*16:01H HLA-B*08:01H HLA-C*03:04H HLA-C*15:05M
VANYQKVGM

SEQ ID NO: 3328 - protein, 9 aa, Severe acute respiratory syndrome coronavirus 2
  REGION 1..9: note = Table A: HLA-A*33:03M
NYQKVGMQK

SEQ ID NO: 3329 - protein, 9 aa, Severe acute respiratory syndrome coronavirus 2
  REGION 1..9: note = Table A: HLA-B*46:01M HLA-A*26:01H HLA-A*30:02M HLA-C*12:02H HLA-C*12:03H HLA-B*38:02H HLA-B*15:01H HLA-B*15:02H HLA-B*15:03H HLA-C*02:02M HLA-B*15:11H
YQKVGMQKY

SEQ ID NO: 3330 - protein, 9 aa, Severe acute respiratory syndrome coronavirus 2
  REGION 1..9: note = Table A: HLA-A*11:303H HLA-B*08:01H HLA-C*03:04H HLA-C*15:05H HLA-B*14:02H HLA-B*14:01H HLA-B*07:05H HLA-C*07:04H
VGMQKYSTL

SEQ ID NO: 3331 - protein, 9 aa, Severe acute respiratory syndrome coronavirus 2
  REGION 1..9: note = Table A: HLA-A*11:303H HLA-A*03:01M HLA-A*03:02M HLA-A*11:01M HLA-A*11:02M HLA-A*30:02H HLA-A*34:01H HLA-A*34:02M HLA-C*07:27H HLA-B*15:01H HLA-B*13:02H
LQGPPGTGK

SEQ ID NO: 3332 - protein, 9 aa, Severe acute respiratory syndrome coronavirus 2
  REGION 1..9: note = Table A: HLA-B*48:01H
GKSHFAIGL

SEQ ID NO: 3333 - protein, 9 aa, Severe acute respiratory syndrome coronavirus 2
  REGION 1..9: note = Table A: HLA-B*38:01H HLA-B*38:02H HLA-B*39:06H HLA-B*39:01H HLA-B*15:10H
SHFAIGLAL

SEQ ID NO: 3334 - protein, 9 aa, Severe acute respiratory syndrome coronavirus 2
  REGION 1..9: note = Table A: HLA-A*29:02H
HFAIGLALY

SEQ ID NO: 3335 - protein, 9 aa, Severe acute respiratory syndrome coronavirus 2
  REGION 1..9: note = Table A: HLA-C*16:01H HLA-C*16:04H HLA-C*06:02H HLA-A*29:01H HLA-A*29:02M HLA-B*53:01H HLA-C*03:02H HLA-C*12:02H HLA-C*12:03H HLA-A*34:02H HLA-B*35:01H HLA-B*35:07H HLA-B*38:02M HLA-C*02:02H
FAIGLALYY

SEQ ID NO: 3336 - protein, 9 aa, Severe acute respiratory syndrome coronavirus 2
  REGION 1..9: note = Table A: HLA-A*02:04H
GLALYYPSA

SEQ ID NO: 3337 - protein, 9 aa, Severe acute respiratory syndrome coronavirus 2
  REGION 1..9: note = Table A: HLA-A*66:01H
LALYYPSAR

SEQ ID NO: 3338 - protein, 9 aa, Severe acute respiratory syndrome coronavirus 2
  REGION 1..9: note = Table A: HLA-A*02:11H HLA-B*52:01H HLA-B*38:02H HLA-B*13:02H
ALYYPSARI

SEQ ID NO: 3339 - protein, 9 aa, Severe acute respiratory syndrome coronavirus 2
  REGION 1..9: note = Table A: HLA-C*14:02H HLA-C*14:03M HLA-C*06:02H
LYYPSARIV

SEQ ID NO: 3340 - protein, 9 aa, Severe acute respiratory syndrome coronavirus 2
  REGION 1..9: note = Table A: HLA-C*14:02H HLA-C*14:03H HLA-C*06:02H HLA-A*29:02H HLA-C*07:02M HLA-A*24:07H
YYPSARIVY

SEQ ID NO: 3341 - protein, 9 aa, Severe acute respiratory syndrome coronavirus 2
  REGION 1..9: note = Table A: HLA-B*42:01H HLA-B*56:01H HLA-B*08:01H HLA-B*53:01M HLA-B*55:02M HLA-A*68:02H HLA-B*35:03H HLA-C*15:05H HLA-B*55:01H HLA-A*34:01H HLA-B*51:01H HLA-B*35:07H HLA-B*54:01M HLA-B*07:02H HLA-B*07:04H
YPSARIVYT

SEQ ID NO: 3342 - protein, 9 aa, Severe acute respiratory syndrome coronavirus 2
  REGION 1..9: note = Table A: HLA-B*56:01H HLA-A*68:02H
PSARIVYTA

SEQ ID NO: 3343 - protein, 9 aa, Severe acute respiratory syndrome coronavirus 2
  REGION 1..9: note = Table A: HLA-B*54:01H
SARIVYTAC

SEQ ID NO: 3344 - protein, 9 aa, Severe acute respiratory syndrome coronavirus 2
  REGION 1..9: note = Table A: HLA-A*68:02H
YTACSHAAV

SEQ ID NO: 3345 - protein, 9 aa, Severe acute respiratory syndrome coronavirus 2
  REGION 1..9: note = Table A: HLA-A*11:303H HLA-C*15:05H HLA-C*08:01H HLA-B*38:02H HLA-B*39:01H
CSHAAVDAL

SEQ ID NO: 3346 - protein, 9 aa, Severe acute respiratory syndrome coronavirus 2
  REGION 1..9: note = Table A: HLA-B*38:01H HLA-B*38:02M HLA-B*39:06H HLA-B*39:01H HLA-B*15:10H
SHAAVDALC

SEQ ID NO: 3347 - protein, 9 aa, Severe acute respiratory syndrome coronavirus 2
  REGION 1..9: note = Table A: HLA-A*11:303M HLA-A*03:01H HLA-A*03:02H HLA-A*11:01M HLA-A*11:02M HLA-B*46:01M HLA-C*03:03H HLA-C*03:02H HLA-A*68:01H HLA-A*34:01H HLA-A*34:02M HLA-C*07:27M HLA-C*08:01H HLA-A*66:01H
AAVDALCEK

SEQ ID NO: 3348 - protein, 9 aa, Severe acute respiratory syndrome coronavirus 2
  REGION 1..9: note = Table A: HLA-A*34:02H
DALCEKALK

SEQ ID NO: 3349 - protein, 9 aa, Severe acute respiratory syndrome coronavirus 2
  REGION 1..9: note = Table A: HLA-A*03:01H HLA-A*29:01M HLA-A*29:02H HLA-C*15:05H HLA-B*38:02H HLA-B*15:01H HLA-B*15:02H
ALCEKALKY

SEQ ID NO: 3350 - protein, 9 aa, Severe acute respiratory syndrome coronavirus 2
  REGION 1..9: note = Table A: HLA-A*74:01H HLA-A*30:01M HLA-A*30:02H
ALKYLPIDK

SEQ ID NO: 3351 - protein, 9 aa, Severe acute respiratory syndrome coronavirus 2
  REGION 1..9: note = Table A: HLA-B*53:01H HLA-B*51:01M
LPIDKCSRI

SEQ ID NO: 3352 - protein, 9 aa, Severe acute respiratory syndrome coronavirus 2
  REGION 1..9: note = Table A: HLA-A*74:01M
KCSRIIPAR

SEQ ID NO: 3353 - protein, 9 aa, Severe acute respiratory syndrome coronavirus 2
  REGION 1..9: note = Table A: HLA-B*27:05H
SRIIPARAR

SEQ ID NO: 3354 - protein, 9 aa, Severe acute respiratory syndrome coronavirus 2
  REGION 1..9: note = Table A: HLA-B*38:02H
ARVECFDKF

SEQ ID NO: 3355 - protein, 9 aa, Severe acute respiratory syndrome coronavirus 2
  REGION 1..9: note = Table A: HLA-B*58:01M HLA-A*03:01H HLA-A*03:02H HLA-A*36:01M HLA-B*46:01H HLA-A*29:01H HLA-A*29:02H HLA-A*30:02H HLA-A*02:08H HLA-B*35:01H HLA-B*38:02M HLA-A*32:01H HLA-B*15:01H HLA-B*15:02H HLA-B*07:05H HLA-B*57:03H
KVNSTLEQY

SEQ ID NO: 3356 - protein, 9 aa, Severe acute respiratory syndrome coronavirus 2
  REGION 1..9: note = Table A: HLA-A*68:02H HLA-A*02:06H HLA-A*02:01H
STLEQYVFC

SEQ ID NO: 3357 - protein, 9 aa, Severe acute respiratory syndrome coronavirus 2
  REGION 1..9: note = Table A: HLA-B*45:01H HLA-B*40:02H HLA-B*40:06H HLA-B*49:01M HLA-B*50:01H
LEQYVFCTV

SEQ ID NO: 3358 - protein, 9 aa, Severe acute respiratory syndrome coronavirus 2
  REGION 1..9: note = Table A: HLA-A*68:02H HLA-B*38:02H HLA-B*15:02M
YVFCTVNAL

SEQ ID NO: 3359 - protein, 9 aa, Severe acute respiratory syndrome coronavirus 2
  REGION 1..9: note = Table A: HLA-C*01:02H HLA-A*02:07H HLA-A*02:02H HLA-B*38:02H HLA-B*13:02H
ALPETTADI

SEQ ID NO: 3360 - protein, 9 aa, Severe acute respiratory syndrome coronavirus 2
  REGION 1..9: note = Table A: HLA-B*35:03H HLA-B*35:02H HLA-B*35:12H
LPETTADIV

SEQ ID NO: 3361 - protein, 9 aa, Severe acute respiratory syndrome coronavirus 2
  REGION 1..9: note = Table A: HLA-A*25:01H HLA-A*26:02H
ETTADIVVF

SEQ ID NO: 3362 - protein, 9 aa, Severe acute respiratory syndrome coronavirus 2
  REGION 1..9: note = Table A: HLA-B*44:05H HLA-C*08:01H HLA-B*38:02H HLA-B*40:02H HLA-B*41:02H HLA-B*49:01H
ADIVVFDEI

SEQ ID NO: 3363 - protein, 9 aa, Severe acute respiratory syndrome coronavirus 2
  REGION 1..9: note = Table A: HLA-B*35:03H HLA-B*35:01H HLA-B*35:02M HLA-B*35:08M HLA-C*08:01H HLA-B*35:12M HLA-B*38:02H HLA-C*07:04H
IVVFDEISM

SEQ ID NO: 3364 - protein, 9 aa, Severe acute respiratory syndrome coronavirus 2
  REGION 1..9: note = Table A: HLA-A*02:05M HLA-A*02:08H HLA-A*02:02H HLA-A*02:03H HLA-B*38:02H
VVFDEISMA

SEQ ID NO: 3365 - protein, 9 aa, Severe acute respiratory syndrome coronavirus 2
  REGION 1..9: note = Table A: HLA-B*44:02H HLA-B*44:05H HLA-A*26:01H HLA-B*44:03M HLA-B*18:01H HLA-B*27:02H HLA-B*35:01H HLA-B*38:02H HLA-B*15:02H HLA-B*07:05H
DEISMATNY

SEQ ID NO: 3366 - protein, 9 aa, Severe acute respiratory syndrome coronavirus 2
  REGION 1..9: note = Table A: HLA-B*58:01H HLA-C*15:05H HLA-B*57:03H
ISMATNYDL

SEQ ID NO: 3367 - protein, 9 aa, Severe acute respiratory syndrome coronavirus 2
  REGION 1..9: note = Table A: HLA-C*12:05H HLA-B*35:03H HLA-B*13:02H
MATNYDLSV

SEQ ID NO: 3368 - protein, 9 aa, Severe acute respiratory syndrome coronavirus 2
  REGION 1..9: note = Table A: HLA-C*15:02H
ATNYDLSVV

SEQ ID NO: 3369 - protein, 9 aa, Severe acute respiratory syndrome coronavirus 2
  REGION 1..9: note = Table A: HLA-C*04:01M HLA-C*04:03H HLA-B*39:01H
NYDLSVVNA

SEQ ID NO: 3370 - protein, 9 aa, Severe acute respiratory syndrome coronavirus 2
  REGION 1..9: note = Table A: HLA-A*33:01H HLA-A*33:03H HLA-B*27:02H HLA-A*68:01H HLA-A*34:02H HLA-A*66:01H
YDLSVVNAR

SEQ ID NO: 3371 - protein, 9 aa, Severe acute respiratory syndrome coronavirus 2
  REGION 1..9: note = Table A: HLA-B*44:05H HLA-A*02:11H HLA-A*68:01H HLA-A*68:02M HLA-A*02:04H HLA-A*02:05H HLA-B*14:01H HLA-A*02:01H HLA-A*02:02H HLA-A*02:03H HLA-A*34:01M HLA-B*38:02M HLA-B*07:05H HLA-A*66:01H
DLSVVNARL

SEQ ID NO: 3372 - protein, 9 aa, Severe acute respiratory syndrome coronavirus 2
  REGION 1..9: note = Table A: HLA-A*03:01H HLA-A*11:01H HLA-A*11:02H HLA-A*34:02H
VVNARLRAK

SEQ ID NO: 3373 - protein, 9 aa, Severe acute respiratory syndrome coronavirus 2
  REGION 1..9: note = Table A: HLA-A*74:01H HLA-A*30:02H HLA-A*32:01H HLA-B*15:03H
RLRAKHYVY

SEQ ID NO: 3374 - protein, 9 aa, Severe acute respiratory syndrome coronavirus 2
  REGION 1..9: note = Table A: HLA-C*06:02H HLA-A*02:02H
LRAKHYVYI

SEQ ID NO: 3375 - protein, 9 aa, Severe acute respiratory syndrome coronavirus 2
  REGION 1..9: note = Table A: HLA-C*08:01H HLA-B*54:01H
HYVYIGDPA

SEQ ID NO: 3376 - protein, 9 aa, Severe acute respiratory syndrome coronavirus 2
  REGION 1..9: note = Table A: HLA-B*35:03H
YVYIGDPAQ

SEQ ID NO: 3377 - protein, 9 aa, Severe acute respiratory syndrome coronavirus 2
  REGION 1..9: note = Table A: HLA-C*14:02H HLA-C*14:03H HLA-B*44:05H HLA-A*29:01M HLA-A*29:02H HLA-C*04:01M HLA-C*04:03M HLA-C*07:02H HLA-A*30:02H HLA-C*15:05H HLA-A*02:02H HLA-A*24:02H HLA-A*24:07H HLA-C*08:01M HLA-A*23:01H HLA-B*38:01H
  REGION 1..9: note = CONT. FROM ABOVE: HLA-B*38:02H HLA-B*40:01H HLA-B*39:01M HLA- B*07:05H
VYIGDPAQL

SEQ ID NO: 3378 - protein, 9 aa, Severe acute respiratory syndrome coronavirus 2
  REGION 1..9: note = Table A: HLA-A*33:01M HLA-A*33:03M HLA-A*26:03M HLA-A*68:01H HLA-A*34:01H HLA-A*34:02H HLA-A*66:01H
DPAQLPAPR

SEQ ID NO: 3379 - protein, 9 aa, Severe acute respiratory syndrome coronavirus 2
  REGION 1..9: note = Table A: HLA-B*48:01H HLA-B*38:02H HLA-B*15:01H HLA-B*15:03H HLA-B*13:02H HLA-B*15:10H
AQLPAPRTL

SEQ ID NO: 3380 - protein, 9 aa, Severe acute respiratory syndrome coronavirus 2
  REGION 1..9: note = Table A: HLA-A*34:01H
QLPAPRTLL

SEQ ID NO: 3381 - protein, 9 aa, Severe acute respiratory syndrome coronavirus 2
  REGION 1..9: note = Table A: HLA-B*53:01H HLA-C*15:05H HLA-B*51:01H HLA-B*07:02H HLA-B*07:04H
LPAPRTLLT

SEQ ID NO: 3382 - protein, 9 aa, Severe acute respiratory syndrome coronavirus 2
  REGION 1..9: note = Table A: HLA-A*34:02H
PAPRTLLTK

SEQ ID NO: 3383 - protein, 9 aa, Severe acute respiratory syndrome coronavirus 2
  REGION 1..9: note = Table A: HLA-B*15:03H
TKGTLEPEY

SEQ ID NO: 3384 - protein, 9 aa, Severe acute respiratory syndrome coronavirus 2
  REGION 1..9: note = Table A: HLA-B*45:01H HLA-A*68:02H HLA-A*02:07H HLA-B*40:02H HLA-B*40:06H HLA-B*49:01H HLA-B*50:01M
LEPEYFNSV

SEQ ID NO: 3385 - protein, 9 aa, Severe acute respiratory syndrome coronavirus 2
  REGION 1..9: note = Table A: HLA-A*33:03M HLA-A*24:02H HLA-A*24:07H HLA-A*23:01H
EYFNSVCRL

SEQ ID NO: 3386 - protein, 9 aa, Severe acute respiratory syndrome coronavirus 2
  REGION 1..9: note = Table A: HLA-B*46:01H HLA-A*02:02H HLA-A*02:03H HLA-B*38:02H HLA-B*15:02H
LMKTIGPDM

SEQ ID NO: 3387 - protein, 9 aa, Severe acute respiratory syndrome coronavirus 2
  REGION 1..9: note = Table A: HLA-B*58:01H HLA-B*58:02M HLA-A*11:303H HLA-C*03:03H HLA-A*02:11H HLA-C*03:04H HLA-A*68:02H HLA-C*15:05H HLA-C*15:02M HLA-A*02:05H HLA-A*02:06H HLA-A*02:08M HLA-C*08:01H HLA-B*57:03H HLA-B*13:01H
KTIGPDMFL

SEQ ID NO: 3388 - protein, 9 aa, Severe acute respiratory syndrome coronavirus 2
  REGION 1..9: note = Table A: HLA-A*02:07H
IGPDMFLGT

SEQ ID NO: 3389 - protein, 9 aa, Severe acute respiratory syndrome coronavirus 2
  REGION 1..9: note = Table A: HLA-C*15:05H
GPDMFLGTC

SEQ ID NO: 3390 - protein, 9 aa, Severe acute respiratory syndrome coronavirus 2
  REGION 1..9: note = Table A: HLA-A*33:01H HLA-A*33:03H HLA-A*34:01H
DMFLGTCRR

SEQ ID NO: 3391 - protein, 9 aa, Severe acute respiratory syndrome coronavirus 2
  REGION 1..9: note = Table A: HLA-B*56:01M HLA-B*53:01H HLA-B*55:02M HLA-A*68:02M HLA-B*35:03H HLA-C*15:05M HLA-A*02:05H HLA-B*35:01H HLA-B*35:02M HLA-B*51:01M HLA-C*08:01H HLA-B*35:12M HLA-B*38:02H HLA-B*54:01H HLA-B*39:01H HLA-B*07:05M
CPAEIVDTV

SEQ ID NO: 3392 - protein, 9 aa, Severe acute respiratory syndrome coronavirus 2
  REGION 1..9: note = Table A: HLA-B*44:05H HLA-B*45:01H HLA-B*44:03H HLA-B*39:06H HLA-B*40:01H HLA-B*40:02M HLA-B*40:06H HLA-B*41:02M HLA-B*49:01M HLA-B*50:01H
AEIVDTVSA

SEQ ID NO: 3393 - protein, 9 aa, Severe acute respiratory syndrome coronavirus 2
  REGION 1..9: note = Table A: HLA-A*11:303H HLA-A*25:01H HLA-A*26:01H HLA-A*26:02H HLA-A*26:03H HLA-A*68:02M HLA-B*35:03H HLA-C*01:02H HLA-A*02:05H HLA-A*02:08H HLA-A*34:01M HLA-B*35:01H HLA-C*08:01H HLA-B*38:02M HLA-B*15:02H
  REGION 1..9: note = CONT. FROM ABOVE: HLA-B*39:01M HLA-A*66:01H
EIVDTVSAL

SEQ ID NO: 3394 - protein, 9 aa, Severe acute respiratory syndrome coronavirus 2
  REGION 1..9: note = Table A: HLA-C*04:03M HLA-A*02:11H HLA-A*02:07M HLA-B*38:02H HLA-C*05:01H
IVDTVSALV

SEQ ID NO: 3395 - protein, 9 aa, Severe acute respiratory syndrome coronavirus 2
  REGION 1..9: note = Table A: HLA-A*03:02H HLA-A*11:01H HLA-A*11:02H HLA-A*36:01H
VSALVYDNK

SEQ ID NO: 3396 - protein, 9 aa, Severe acute respiratory syndrome coronavirus 2
  REGION 1..9: note = Table A: HLA-B*58:01H HLA-A*11:303H HLA-B*53:01H HLA-B*35:03M HLA-C*15:05H HLA-A*02:04H HLA-A*02:05H HLA-A*02:06H HLA-B*35:02M HLA-C*08:01M HLA-B*35:12M HLA-B*38:02H HLA-B*57:03H
SALVYDNKL

SEQ ID NO: 3397 - protein, 9 aa, Severe acute respiratory syndrome coronavirus 2
  REGION 1..9: note = Table A: HLA-B*56:01H HLA-A*02:11M HLA-B*55:02H HLA-A*68:02H HLA-B*55:01H HLA-A*02:05H HLA-A*02:03H HLA-A*34:02H HLA-C*08:01H HLA-B*38:02H HLA-B*40:06H HLA-B*54:01M HLA-B*13:02H HLA-A*66:01H HLA-B*50:01H
LVYDNKLKA

SEQ ID NO: 3398 - protein, 9 aa, Severe acute respiratory syndrome coronavirus 2
  REGION 1..9: note = Table A: HLA-C*14:03H
VYDNKLKAH

SEQ ID NO: 3399 - protein, 9 aa, Severe acute respiratory syndrome coronavirus 2
  REGION 1..9: note = Table A: HLA-B*38:02M HLA-B*15:03H
HKDKSAQCF

SEQ ID NO: 3400 - protein, 9 aa, Severe acute respiratory syndrome coronavirus 2
  REGION 1..9: note = Table A: HLA-B*58:02H HLA-B*57:03H
KSAQCFKMF

SEQ ID NO: 3401 - protein, 9 aa, Severe acute respiratory syndrome coronavirus 2
  REGION 1..9: note = Table A: HLA-A*30:02H
SAQCFKMFY

SEQ ID NO: 3402 - protein, 9 aa, Severe acute respiratory syndrome coronavirus 2
  REGION 1..9: note = Table A: HLA-A*11:01H HLA-A*11:02H
AQCFKMFYK

SEQ ID NO: 3403 - protein, 9 aa, Severe acute respiratory syndrome coronavirus 2
  REGION 1..9: note = Table A: HLA-C*14:02H HLA-C*14:03M HLA-A*34:02H HLA-B*15:02H
MFYKGVITH

SEQ ID NO: 3404 - protein, 9 aa, Severe acute respiratory syndrome coronavirus 2
  REGION 1..9: note = Table A: HLA-A*02:05H
GVITHDVSS

SEQ ID NO: 3405 - protein, 9 aa, Severe acute respiratory syndrome coronavirus 2
  REGION 1..9: note = Table A: HLA-B*58:01H HLA-B*58:02H HLA-A*11:303H HLA-B*57:01H HLA-B*46:01H HLA-C*03:03H HLA-A*02:11M HLA-C*03:04H HLA-A*68:02M HLA-C*15:05M HLA-A*02:05H HLA-A*02:02H HLA-A*02:03H HLA-C*08:01H HLA-B*38:02M
  REGION 1..9: note = CONT. FROM ABOVE: HLA-B*57:03M HLA-B*13:02H
ITHDVSSAI

SEQ ID NO: 3406 - protein, 9 aa, Severe acute respiratory syndrome coronavirus 2
  REGION 1..9: note = Table A: HLA-B*39:01H
THDVSSAIN

SEQ ID NO: 3407 - protein, 9 aa, Severe acute respiratory syndrome coronavirus 2
  REGION 1..9: note = Table A: HLA-A*68:01H
HDVSSAINR

SEQ ID NO: 3408 - protein, 9 aa, Severe acute respiratory syndrome coronavirus 2
  REGION 1..9: note = Table A: HLA-A*68:01H HLA-A*68:02H HLA-A*34:01H HLA-A*34:02H HLA-A*66:01H
DVSSAINRP

SEQ ID NO: 3409 - protein, 9 aa, Severe acute respiratory syndrome coronavirus 2
  REGION 1..9: note = Table A: HLA-B*58:02H HLA-C*15:05H HLA-B*57:03H
SSAINRPQI

SEQ ID NO: 3410 - protein, 9 aa, Severe acute respiratory syndrome coronavirus 2
  REGION 1..9: note = Table A: HLA-A*02:11H HLA-B*13:02H
AINRPQIGV

SEQ ID NO: 3411 - protein, 9 aa, Severe acute respiratory syndrome coronavirus 2
  REGION 1..9: note = Table A: HLA-C*15:05H
INRPQIGVV

SEQ ID NO: 3412 - protein, 9 aa, Severe acute respiratory syndrome coronavirus 2
  REGION 1..9: note = Table A: HLA-B*15:01H HLA-B*15:02H
PQIGVVREF

SEQ ID NO: 3413 - protein, 9 aa, Severe acute respiratory syndrome coronavirus 2
  REGION 1..9: note = Table A: HLA-A*02:11H HLA-A*02:02H
QIGVVREFL

SEQ ID NO: 3414 - protein, 9 aa, Severe acute respiratory syndrome coronavirus 2
  REGION 1..9: note = Table A: HLA-A*26:03H HLA-A*68:01H HLA-A*34:01H HLA-A*66:01H
GVVREFLTR

SEQ ID NO: 3415 - protein, 9 aa, Severe acute respiratory syndrome coronavirus 2
  REGION 1..9: note = Table A: HLA-B*45:01H HLA-B*40:06H HLA-B*50:01M
REFLTRNPA

SEQ ID NO: 3416 - protein, 9 aa, Severe acute respiratory syndrome coronavirus 2
  REGION 1..9: note = Table A: HLA-A*25:01H HLA-B*44:03H HLA-A*24:02H HLA-A*24:07M HLA-A*23:01H
EFLTRNPAW

SEQ ID NO: 3417 - protein, 9 aa, Severe acute respiratory syndrome coronavirus 2
  REGION 1..9: note = Table A: HLA-A*11:02H HLA-A*30:01H HLA-A*34:02H
LTRNPAWRK

SEQ ID NO: 3418 - protein, 9 aa, Severe acute respiratory syndrome coronavirus 2
  REGION 1..9: note = Table A: HLA-B*39:06H
TRNPAWRKA

SEQ ID NO: 3419 - protein, 9 aa, Severe acute respiratory syndrome coronavirus 2
  REGION 1..9: note = Table A: HLA-B*42:01H HLA-B*08:01H HLA-B*35:07H HLA-B*07:02H HLA-B*07:04M
NPAWRKAVF

SEQ ID NO: 3420 - protein, 9 aa, Severe acute respiratory syndrome coronavirus 2
  REGION 1..9: note = Table A: HLA-B*57:03H
PAWRKAVFI

SEQ ID NO: 3421 - protein, 9 aa, Severe acute respiratory syndrome coronavirus 2
  REGION 1..9: note = Table A: HLA-B*15:03H
RKAVFISPY

SEQ ID NO: 3422 - protein, 9 aa, Severe acute respiratory syndrome coronavirus 2
  REGION 1..9: note = Table A: HLA-C*14:03H
VFISPYNSQ

SEQ ID NO: 3423 - protein, 9 aa, Severe acute respiratory syndrome coronavirus 2
  REGION 1..9: note = Table A: HLA-B*42:01H HLA-B*56:01H HLA-B*55:02H HLA-B*35:03H HLA-C*15:05H HLA-B*55:01H HLA-B*14:01H HLA-B*35:01H HLA-B*51:01H HLA-C*08:01H HLA-B*38:02M HLA-B*39:06H HLA-B*54:01M HLA-B*07:02M HLA-B*07:04M HLA-B*39:01H
  REGION 1..9: note = CONT. FROM ABOVE: HLA-B*07:05H HLA-B*15:10H
SPYNSQNAV

SEQ ID NO: 3424 - protein, 9 aa, Severe acute respiratory syndrome coronavirus 2
  REGION 1..9: note = Table A: HLA-B*44:05H HLA-A*02:05M HLA-A*02:06H HLA-A*02:08H HLA-A*02:02H HLA-A*02:03H HLA-B*52:01H HLA-B*38:01H HLA-B*38:02M HLA-B*15:01H HLA-B*13:01M HLA-B*13:02H
SQNAVASKI

SEQ ID NO: 3425 - protein, 9 aa, Severe acute respiratory syndrome coronavirus 2
  REGION 1..9: note = Table A: HLA-A*03:01M HLA-A*11:01H HLA-A*11:02H HLA-A*25:01H HLA-A*26:01H HLA-A*26:03H HLA-B*08:01H HLA-A*02:11H HLA-A*68:02H HLA-C*15:05M HLA-C*15:02H HLA-A*02:04M HLA-A*02:05M HLA-A*02:06M HLA-A*02:07H HLA-A*02:08H
  REGION 1..9: note = CONT. FROM ABOVE: HLA-B*14:01H HLA-A*02:01H HLA-A*02:02M HLA- A*02:03H HLA-B*38:02H HLA-B*07:04H HLA-B*13:02H HLA-C*07:04H
AVASKILGL

SEQ ID NO: 3426 - protein, 9 aa, Severe acute respiratory syndrome coronavirus 2
  REGION 1..9: note = Table A: HLA-A*02:11M HLA-A*02:08H HLA-A*02:01H HLA-B*13:02H
KILGLPTQT

SEQ ID NO: 3427 - protein, 9 aa, Severe acute respiratory syndrome coronavirus 2
  REGION 1..9: note = Table A: HLA-A*02:11H HLA-C*15:05H HLA-A*02:07H HLA-B*14:01H HLA-A*02:01H HLA-A*02:02H HLA-A*02:03M HLA-B*38:02M HLA-B*13:02M
ILGLPTQTV

SEQ ID NO: 3428 - protein, 9 aa, Severe acute respiratory syndrome coronavirus 2
  REGION 1..9: note = Table A: HLA-A*30:02H
SSQGSEYDY

SEQ ID NO: 3429 - protein, 9 aa, Severe acute respiratory syndrome coronavirus 2
  REGION 1..9: note = Table A: HLA-B*45:01H HLA-B*40:02H HLA-B*40:06H HLA-B*49:01M HLA-B*50:01H
SEYDYVIFT

SEQ ID NO: 3430 - protein, 9 aa, Severe acute respiratory syndrome coronavirus 2
  REGION 1..9: note = Table A: HLA-B*50:01H
YDYVIFTQT

SEQ ID NO: 3431 - protein, 9 aa, Severe acute respiratory syndrome coronavirus 2
  REGION 1..9: note = Table A: HLA-A*11:303H HLA-B*46:01H HLA-C*15:05H HLA-A*02:03H HLA-B*38:02H
VIFTQTTET

SEQ ID NO: 3432 - protein, 9 aa, Severe acute respiratory syndrome coronavirus 2
  REGION 1..9: note = Table A: HLA-B*46:01H
FTQTTETAH

SEQ ID NO: 3433 - protein, 9 aa, Severe acute respiratory syndrome coronavirus 2
  REGION 1..9: note = Table A: HLA-B*49:01M
TETAHSCNV

SEQ ID NO: 3434 - protein, 9 aa, Severe acute respiratory syndrome coronavirus 2
  REGION 1..9: note = Table A: HLA-A*33:03M HLA-A*68:01H HLA-A*34:01H HLA-A*66:01H
TAHSCNVNR

SEQ ID NO: 3435 - protein, 9 aa, Severe acute respiratory syndrome coronavirus 2
  REGION 1..9: note = Table A: HLA-B*38:01H HLA-B*38:02M
AHSCNVNRF

SEQ ID NO: 3436 - protein, 9 aa, Severe acute respiratory syndrome coronavirus 2
  REGION 1..9: note = Table A: HLA-A*02:11H HLA-A*68:02H HLA-C*15:05H HLA-B*38:02H HLA-B*07:05H HLA-B*57:03H
NVNRFNVAI

SEQ ID NO: 3437 - protein, 9 aa, Severe acute respiratory syndrome coronavirus 2
  REGION 1..9: note = Table A: HLA-B*27:05H HLA-B*27:02H HLA-A*68:01H
NRFNVAITR

SEQ ID NO: 3438 - protein, 9 aa, Severe acute respiratory syndrome coronavirus 2
  REGION 1..9: note = Table A: HLA-A*34:02H HLA-A*66:01H
FNVAITRAK

SEQ ID NO: 3439 - protein, 9 aa, Severe acute respiratory syndrome coronavirus 2
  REGION 1..9: note = Table A: HLA-A*68:02H
NVAITRAKV

SEQ ID NO: 3440 - protein, 9 aa, Severe acute respiratory syndrome coronavirus 2
  REGION 1..9: note = Table A: HLA-B*07:04M
ITRAKVGIL

SEQ ID NO: 3441 - protein, 9 aa, Severe acute respiratory syndrome coronavirus 2
  REGION 1..9: note = Table A: HLA-B*58:02H HLA-B*07:04H HLA-B*13:02H
RAKVGILCI

SEQ ID NO: 3442 - protein, 9 aa, Severe acute respiratory syndrome coronavirus 2
  REGION 1..9: note = Table A: HLA-B*15:03H
AKVGILCIM

SEQ ID NO: 3443 - protein, 9 aa, Severe acute respiratory syndrome coronavirus 2
  REGION 1..9: note = Table A: HLA-A*30:02H
CIMSDRDLY

SEQ ID NO: 3444 - protein, 9 aa, Severe acute respiratory syndrome coronavirus 2
  REGION 1..9: note = Table A: HLA-B*40:02H
SDRDLYDKL

SEQ ID NO: 3445 - protein, 9 aa, Severe acute respiratory syndrome coronavirus 2
  REGION 1..9: note = Table A: HLA-B*37:01M HLA-C*07:04H
RDLYDKLQF

SEQ ID NO: 3446 - protein, 9 aa, Severe acute respiratory syndrome coronavirus 2
  REGION 1..9: note = Table A: HLA-A*68:02H HLA-B*38:02H
DLYDKLQFT

SEQ ID NO: 3447 - protein, 9 aa, Severe acute respiratory syndrome coronavirus 2
  REGION 1..9: note = Table A: HLA-B*37:01H HLA-B*40:02H HLA-B*41:02H
YDKLQFTSL

SEQ ID NO: 3448 - protein, 9 aa, Severe acute respiratory syndrome coronavirus 2
  REGION 1..9: note = Table A: HLA-B*13:02H
KLQFTSLEI

SEQ ID NO: 3449 - protein, 9 aa, Severe acute respiratory syndrome coronavirus 2
  REGION 1..9: note = Table A: HLA-A*33:01H HLA-A*33:03H HLA-A*31:01H
QFTSLEIPR

SEQ ID NO: 3450 - protein, 9 aa, Severe acute respiratory syndrome coronavirus 2
  REGION 1..9: note = Table A: HLA-A*68:01H HLA-A*34:02H HLA-A*66:01H
FTSLEIPRR

SEQ ID NO: 3451 - protein, 9 aa, Severe acute respiratory syndrome coronavirus 2
  REGION 1..9: note = Table A: HLA-B*45:01H HLA-B*40:06H HLA-B*50:01H
LEIPRRNVA

SEQ ID NO: 3452 - protein, 9 aa, Severe acute respiratory syndrome coronavirus 2
  REGION 1..9: note = Table A: HLA-B*42:01M HLA-B*08:01H HLA-C*15:05M HLA-B*55:01H HLA-B*51:01H HLA-B*07:02H HLA-B*07:04H HLA-B*07:05H
IPRRNVATL

SEQ ID NO: 3453 - protein, 9 aa, Severe acute respiratory syndrome coronavirus 2
  REGION 1..9: note = Table A: HLA-B*48:01H HLA-A*11:303H HLA-A*02:11H HLA-A*02:04H HLA-A*02:05H HLA-A*02:06H HLA-A*02:08M HLA-B*14:01H HLA-A*02:01H HLA-A*02:02M HLA-A*02:03M HLA-B*38:02M HLA-B*15:01H HLA-B*39:01H HLA-B*13:02H
LQAENVTGL

SEQ ID NO: 3454 - protein, 9 aa, Severe acute respiratory syndrome coronavirus 2
  REGION 1..9: note = Table A: HLA-C*04:03H HLA-B*53:01H HLA-B*35:01H HLA-B*38:02H HLA-C*05:01H
QAENVTGLF

SEQ ID NO: 3455 - protein, 9 aa, Severe acute respiratory syndrome coronavirus 2
  REGION 1..9: note = Table A: HLA-A*03:01H HLA-A*11:01H HLA-A*11:02H HLA-A*34:02H HLA-B*49:01H
AENVTGLFK

SEQ ID NO: 3456 - protein, 9 aa, Severe acute respiratory syndrome coronavirus 2
  REGION 1..9: note = Table A: HLA-A*68:02M HLA-C*15:05H HLA-B*38:02H HLA-B*07:05H
DCSKVITGL

SEQ ID NO: 3457 - protein, 9 aa, Severe acute respiratory syndrome coronavirus 2
  REGION 1..9: note = Table A: HLA-A*02:11H HLA-B*55:02H HLA-A*02:05M HLA-A*02:06H HLA-A*02:08H HLA-A*02:01H HLA-B*40:06H
KVITGLHPT

SEQ ID NO: 3458 - protein, 9 aa, Severe acute respiratory syndrome coronavirus 2
  REGION 1..9: note = Table A: HLA-A*02:03H
ITGLHPTQA

SEQ ID NO: 3459 - protein, 9 aa, Severe acute respiratory syndrome coronavirus 2
  REGION 1..9: note = Table A: HLA-B*42:01H HLA-B*53:01H HLA-B*35:03H HLA-C*15:05M HLA-A*34:01H HLA-B*35:01M HLA-B*35:02M HLA-B*35:07H HLA-B*35:12M HLA-B*38:02H HLA-B*07:02M HLA-B*07:04M HLA-B*39:01H HLA-B*07:05M
HPTQAPTHL

SEQ ID NO: 3460 - protein, 9 aa, Severe acute respiratory syndrome coronavirus 2
  REGION 1..9: note = Table A: HLA-C*16:04H HLA-A*02:11H HLA-C*15:05H HLA-B*14:02H HLA-C*15:02H HLA-A*02:05M HLA-A*02:06M HLA-A*02:08H HLA-B*14:01H HLA-A*02:01H HLA-A*02:02H HLA-A*02:03M HLA-B*52:01M HLA-C*08:01H HLA-B*38:01H HLA-B*38:02H
  REGION 1..9: note = CONT. FROM ABOVE: HLA-B*39:06H HLA-B*15:01M HLA-B*15:02M HLA- B*39:01M HLA-B*13:01H HLA-B*13:02H HLA-B*15:10M
TQAPTHLSV

SEQ ID NO: 3461 - protein, 9 aa, Severe acute respiratory syndrome coronavirus 2
  REGION 1..9: note = Table A: HLA-B*55:02H
APTHLSVDT

SEQ ID NO: 3462 - protein, 9 aa, Severe acute respiratory syndrome coronavirus 2
  REGION 1..9: note = Table A: HLA-B*38:01H HLA-B*38:02H HLA-B*39:01H
THLSVDTKF

SEQ ID NO: 3463 - protein, 9 aa, Severe acute respiratory syndrome coronavirus 2
  REGION 1..9: note = Table A: HLA-A*25:01H HLA-A*33:03H HLA-A*26:01M HLA-A*26:02H HLA-A*26:03M HLA-B*08:01M HLA-A*68:02M HLA-A*34:01H HLA-A*66:01M
DTKFKTEGL

SEQ ID NO: 3464 - protein, 9 aa, Severe acute respiratory syndrome coronavirus 2
  REGION 1..9: note = Table A: HLA-A*02:04H HLA-A*02:01H
GLCVDIPGI

SEQ ID NO: 3465 - protein, 9 aa, Severe acute respiratory syndrome coronavirus 2
  REGION 1..9: note = Table A: HLA-A*11:303M HLA-A*03:01M HLA-A*03:02H HLA-A*11:01H HLA-A*11:02H HLA-A*36:01H HLA-A*34:02H HLA-C*07:27H HLA-A*66:01H
CVDIPGIPK

SEQ ID NO: 3466 - protein, 9 aa, Severe acute respiratory syndrome coronavirus 2
  REGION 1..9: note = Table A: HLA-A*26:03H HLA-A*34:01H
DIPGIPKDM

SEQ ID NO: 3467 - protein, 9 aa, Severe acute respiratory syndrome coronavirus 2
  REGION 1..9: note = Table A: HLA-C*16:01H HLA-B*08:01H HLA-C*03:04H HLA-B*14:02H HLA-C*15:02H HLA-A*34:02H HLA-B*57:03H
MTYRRLISM

SEQ ID NO: 3468 - protein, 9 aa, Severe acute respiratory syndrome coronavirus 2
  REGION 1..9: note = Table A: HLA-B*27:05M
RRLISMMGF

SEQ ID NO: 3469 - protein, 9 aa, Severe acute respiratory syndrome coronavirus 2
  REGION 1..9: note = Table A: HLA-A*03:01H HLA-A*11:02H HLA-A*29:01H HLA-A*29:02M HLA-A*30:02M HLA-B*38:02M HLA-A*32:01H HLA-B*15:01H HLA-B*15:02H HLA-B*15:03H HLA-B*07:05H
SMMGFKMNY

SEQ ID NO: 3470 - protein, 9 aa, Severe acute respiratory syndrome coronavirus 2
  REGION 1..9: note = Table A: HLA-A*02:11H HLA-A*68:02H HLA-A*02:02H
MGFKMNYQV

SEQ ID NO: 3471 - protein, 9 aa, Severe acute respiratory syndrome coronavirus 2
  REGION 1..9: note = Table A: HLA-A*36:01H HLA-A*30:02M HLA-B*38:02H HLA-A*32:01H HLA-B*15:01M HLA-B*15:03H
KMNYQVNGY

SEQ ID NO: 3472 - protein, 9 aa, Severe acute respiratory syndrome coronavirus 2
  REGION 1..9: note = Table A: HLA-A*11:303H HLA-A*02:05H HLA-A*02:06H HLA-C*17:01H HLA-C*08:01H HLA-B*38:01H HLA-B*38:02M HLA-B*15:01H HLA-B*15:02H HLA-B*39:01H HLA-B*13:01H HLA-B*13:02H
YQVNGYPNM

SEQ ID NO: 3473 - protein, 9 aa, Severe acute respiratory syndrome coronavirus 2
  REGION 1..9: note = Table A: HLA-A*33:03H HLA-A*31:01H
GYPNMFITR

SEQ ID NO: 3474 - protein, 9 aa, Severe acute respiratory syndrome coronavirus 2
  REGION 1..9: note = Table A: HLA-C*14:03H HLA-B*08:01H HLA-B*38:02H
MFITREEAI

SEQ ID NO: 3475 - protein, 9 aa, Severe acute respiratory syndrome coronavirus 2
  REGION 1..9: note = Table A: HLA-A*34:02H
ITREEAIRH

SEQ ID NO: 3476 - protein, 9 aa, Severe acute respiratory syndrome coronavirus 2
  REGION 1..9: note = Table A: HLA-C*06:02H HLA-B*14:01H HLA-B*38:02H
TREEAIRHV

SEQ ID NO: 3477 - protein, 9 aa, Severe acute respiratory syndrome coronavirus 2
  REGION 1..9: note = Table A: HLA-B*45:01H
EEAIRHVRA

SEQ ID NO: 3478 - protein, 9 aa, Severe acute respiratory syndrome coronavirus 2
  REGION 1..9: note = Table A: HLA-B*58:01H HLA-B*57:01H HLA-A*25:01H HLA-A*26:01H HLA-A*26:03H HLA-B*53:01M HLA-A*34:01H HLA-B*57:03H HLA-A*66:01H
EAIRHVRAW

SEQ ID NO: 3479 - protein, 9 aa, Severe acute respiratory syndrome coronavirus 2
  REGION 1..9: note = Table A: HLA-C*06:02H
VRAWIGFDV

SEQ ID NO: 3480 - protein, 9 aa, Severe acute respiratory syndrome coronavirus 2
  REGION 1..9: note = Table A: HLA-A*33:01M HLA-A*33:03H HLA-A*26:03M HLA-A*68:01M HLA-A*34:01M HLA-A*66:01H
DVEGCHATR

SEQ ID NO: 3481 - protein, 9 aa, Severe acute respiratory syndrome coronavirus 2
  REGION 1..9: note = Table A: HLA-B*38:01H HLA-B*38:02H HLA-B*39:01M
TREAVGTNL

SEQ ID NO: 3482 - protein, 9 aa, Severe acute respiratory syndrome coronavirus 2
  REGION 1..9: note = Table A: HLA-B*45:01M HLA-B*40:06H HLA-B*50:01M
REAVGTNLP

SEQ ID NO: 3483 - protein, 9 aa, Severe acute respiratory syndrome coronavirus 2
  REGION 1..9: note = Table A: HLA-A*26:03H HLA-A*68:02H HLA-B*35:03M HLA-A*34:01M HLA-A*34:02H HLA-B*35:01H HLA-B*35:02H HLA-C*08:01H HLA-C*08:03H HLA-B*38:02H HLA-B*39:01H HLA-A*66:01H
EAVGTNLPL

SEQ ID NO: 3484 - protein, 9 aa, Severe acute respiratory syndrome coronavirus 2
  REGION 1..9: note = Table A: HLA-C*12:05M HLA-C*15:05M HLA-C*15:02M HLA-B*13:02H HLA-C*07:04H
VGTNLPLQL

SEQ ID NO: 3485 - protein, 9 aa, Severe acute respiratory syndrome coronavirus 2
  REGION 1..9: note = Table A: HLA-B*58:01H HLA-A*29:02H HLA-C*15:05H HLA-B*57:03H
TNLPLQLGF

SEQ ID NO: 3486 - protein, 9 aa, Severe acute respiratory syndrome coronavirus 2
  REGION 1..9: note = Table A: HLA-B*55:02H HLA-B*54:01H
LPLQLGFST

SEQ ID NO: 3487 - protein, 9 aa, Severe acute respiratory syndrome coronavirus 2
  REGION 1..9: note = Table A: HLA-A*02:11H HLA-A*02:06H HLA-B*52:01H HLA-B*38:02H HLA-B*13:02M
LQLGFSTGV

SEQ ID NO: 3488 - protein, 9 aa, Severe acute respiratory syndrome coronavirus 2
  REGION 1..9: note = Table A: HLA-B*54:01H
FSTGVNLVA

SEQ ID NO: 3489 - protein, 9 aa, Severe acute respiratory syndrome coronavirus 2
  REGION 1..9: note = Table A: HLA-A*68:02H HLA-C*15:05H
STGVNLVAV

SEQ ID NO: 3490 - protein, 9 aa, Severe acute respiratory syndrome coronavirus 2
  REGION 1..9: note = Table A: HLA-A*29:01H HLA-A*29:02H HLA-B*27:02H HLA-B*35:01M HLA-B*38:02M HLA-B*15:01H HLA-B*15:02M HLA-B*07:05H
NLVAVPTGY

SEQ ID NO: 3491 - protein, 9 aa, Severe acute respiratory syndrome coronavirus 2
  REGION 1..9: note = Table A: HLA-A*68:02H HLA-A*34:01H HLA-A*66:01H
LVAVPTGYV

SEQ ID NO: 3492 - protein, 9 aa, Severe acute respiratory syndrome coronavirus 2
  REGION 1..9: note = Table A: HLA-B*37:01H
VDTPNNTDF

SEQ ID NO: 3493 - protein, 9 aa, Severe acute respiratory syndrome coronavirus 2
  REGION 1..9: note = Table A: HLA-A*68:01H HLA-A*34:01H HLA-A*66:01H
TPNNTDFSR

SEQ ID NO: 3494 - protein, 9 aa, Severe acute respiratory syndrome coronavirus 2
  REGION 1..9: note = Table A: HLA-B*37:01H
TDFSRVSAK

SEQ ID NO: 3495 - protein, 9 aa, Severe acute respiratory syndrome coronavirus 2
  REGION 1..9: note = Table A: HLA-B*37:01H HLA-B*38:02H HLA-B*15:03H
AKPPPGDQF

SEQ ID NO: 3496 - protein, 9 aa, Severe acute respiratory syndrome coronavirus 2
  REGION 1..9: note = Table A: HLA-B*14:02H HLA-B*15:02H
DQFKHLIPL

SEQ ID NO: 3497 - protein, 9 aa, Severe acute respiratory syndrome coronavirus 2
  REGION 1..9: note = Table A: HLA-A*30:01H
QFKHLIPLM

SEQ ID NO: 3498 - protein, 9 aa, Severe acute respiratory syndrome coronavirus 2
  REGION 1..9: note = Table A: HLA-C*06:02H HLA-B*38:02H HLA-B*15:03M
FKHLIPLMY

SEQ ID NO: 3499 - protein, 9 aa, Severe acute respiratory syndrome coronavirus 2
  REGION 1..9: note = Table A: HLA-A*74:01H HLA-A*31:01H
KGLPWNVVR

SEQ ID NO: 3500 - protein, 9 aa, Severe acute respiratory syndrome coronavirus 2
  REGION 1..9: note = Table A: HLA-A*02:11H HLA-A*02:04H HLA-A*02:06H HLA-A*02:07M HLA-A*02:02H HLA-A*02:03H HLA-B*38:02H HLA-B*40:06H HLA-B*13:01H HLA-B*13:02H
GLPWNVVRI

SEQ ID NO: 3501 - protein, 9 aa, Severe acute respiratory syndrome coronavirus 2
  REGION 1..9: note = Table A: HLA-A*24:07H
PWNVVRIKI

SEQ ID NO: 3502 - protein, 9 aa, Severe acute respiratory syndrome coronavirus 2
  REGION 1..9: note = Table A: HLA-B*08:01M HLA-B*07:04H
VVRIKIVQM

SEQ ID NO: 3503 - protein, 9 aa, Severe acute respiratory syndrome coronavirus 2
  REGION 1..9: note = Table A: HLA-C*06:02H HLA-B*27:05M HLA-C*07:01H HLA-B*14:02H HLA-B*14:01H HLA-B*38:02M
VRIKIVQML

SEQ ID NO: 3504 - protein, 9 aa, Severe acute respiratory syndrome coronavirus 2
  REGION 1..9: note = Table A: HLA-C*08:01H HLA-B*39:01H
IVQMLSDTL

SEQ ID NO: 3505 - protein, 9 aa, Severe acute respiratory syndrome coronavirus 2
  REGION 1..9: note = Table A: HLA-A*11:303H HLA-A*02:11M HLA-A*68:02H HLA-A*02:04H HLA-A*02:05H HLA-A*02:07H HLA-A*02:01H HLA-A*02:02H HLA-A*02:03M HLA-B*38:02M
MLSDTLKNL

SEQ ID NO: 3506 - protein, 9 aa, Severe acute respiratory syndrome coronavirus 2
  REGION 1..9: note = Table A: HLA-A*33:01H HLA-A*33:03M HLA-A*26:03M HLA-A*68:01H HLA-A*34:01M HLA-A*34:02M HLA-A*66:01M
DTLKNLSDR

SEQ ID NO: 3507 - protein, 9 aa, Severe acute respiratory syndrome coronavirus 2
  REGION 1..9: note = Table A: HLA-A*02:05H HLA-A*02:02M HLA-A*02:03H HLA-B*38:02H HLA-B*13:02H
TLKNLSDRV

SEQ ID NO: 3508 - protein, 9 aa, Severe acute respiratory syndrome coronavirus 2
  REGION 1..9: note = Table A: HLA-B*57:03M
KNLSDRVVF

SEQ ID NO: 3509 - protein, 9 aa, Severe acute respiratory syndrome coronavirus 2
  REGION 1..9: note = Table A: HLA-C*04:03H HLA-A*02:11M HLA-A*68:02M HLA-C*15:02H HLA-A*02:04H HLA-A*02:05H HLA-A*02:06H HLA-A*02:07H HLA-B*14:01H HLA-A*02:01M HLA-A*02:02H HLA-A*02:03H HLA-B*38:02M
NLSDRVVFV

SEQ ID NO: 3510 - protein, 9 aa, Severe acute respiratory syndrome coronavirus 2
  REGION 1..9: note = Table A: HLA-B*58:01H HLA-C*04:03M HLA-C*08:01H HLA-C*08:02H HLA-B*57:03H
LSDRVVFVL

SEQ ID NO: 3511 - protein, 9 aa, Severe acute respiratory syndrome coronavirus 2
  REGION 1..9: note = Table A: HLA-B*57:01H HLA-B*44:03H
SDRVVFVLW

SEQ ID NO: 3512 - protein, 9 aa, Severe acute respiratory syndrome coronavirus 2
  REGION 1..9: note = Table A: HLA-C*14:03H HLA-A*24:02H HLA-A*24:07H HLA-A*23:01M
VFVLWAHGF

SEQ ID NO: 3513 - protein, 9 aa, Severe acute respiratory syndrome coronavirus 2
  REGION 1..9: note = Table A: HLA-A*74:01H HLA-A*02:11H HLA-A*02:04H HLA-A*02:06H HLA-A*02:07M HLA-A*02:01M HLA-A*02:02M HLA-C*08:01H HLA-B*38:02H HLA-A*32:01H HLA-B*40:06H HLA-B*13:02H
VLWAHGFEL

SEQ ID NO: 3514 - protein, 9 aa, Severe acute respiratory syndrome coronavirus 2
  REGION 1..9: note = Table A: HLA-B*38:01H HLA-B*38:02M HLA-B*39:01M HLA-B*15:10H
AHGFELTSM

SEQ ID NO: 3515 - protein, 9 aa, Severe acute respiratory syndrome coronavirus 2
  REGION 1..9: note = Table A: HLA-A*34:02H
HGFELTSMK

SEQ ID NO: 3516 - protein, 9 aa, Severe acute respiratory syndrome coronavirus 2
  REGION 1..9: note = Table A: HLA-A*36:01M HLA-A*29:02M HLA-A*30:02H
GFELTSMKY

SEQ ID NO: 3517 - protein, 9 aa, Severe acute respiratory syndrome coronavirus 2
  REGION 1..9: note = Table A: HLA-A*68:02M
ELTSMKYFV

SEQ ID NO: 3518 - protein, 9 aa, Severe acute respiratory syndrome coronavirus 2
  REGION 1..9: note = Table A: HLA-B*58:01M HLA-B*58:02M HLA-A*02:11H HLA-A*68:02H HLA-C*15:05H HLA-C*15:02M HLA-A*02:06H HLA-B*52:01H HLA-C*08:01H HLA-B*57:03H HLA-B*13:02H
TSMKYFVKI

SEQ ID NO: 3519 - protein, 9 aa, Severe acute respiratory syndrome coronavirus 2
  REGION 1..9: note = Table A: HLA-A*33:01H HLA-A*33:03H HLA-A*34:01H HLA-A*66:01H
YFVKIGPER

SEQ ID NO: 3520 - protein, 9 aa, Severe acute respiratory syndrome coronavirus 2
  REGION 1..9: note = Table A: HLA-C*14:03H
CFSTASDTY

SEQ ID NO: 3521 - protein, 9 aa, Severe acute respiratory syndrome coronavirus 2
  REGION 1..9: note = Table A: HLA-A*68:02H
STASDTYAC

SEQ ID NO: 3522 - protein, 9 aa, Severe acute respiratory syndrome coronavirus 2
  REGION 1..9: note = Table A: HLA-B*58:01M HLA-B*57:01H HLA-A*25:01M HLA-B*53:01H HLA-B*35:03H HLA-B*35:01M HLA-B*35:02H HLA-B*35:08H HLA-B*35:07H HLA-B*15:13H HLA-B*38:02M HLA-B*57:03H
TASDTYACW

SEQ ID NO: 3523 - protein, 9 aa, Severe acute respiratory syndrome coronavirus 2
  REGION 1..9: note = Table A: HLA-A*24:02H HLA-A*24:07H
TYACWHHSI

SEQ ID NO: 3524 - protein, 9 aa, Severe acute respiratory syndrome coronavirus 2
  REGION 1..9: note = Table A: HLA-B*38:02M
WHHSIGFDY

SEQ ID NO: 3525 - protein, 9 aa, Severe acute respiratory syndrome coronavirus 2
  REGION 1..9: note = Table A: HLA-B*38:01M HLA-B*38:02H HLA-B*15:10H
HHSIGFDYV

SEQ ID NO: 3526 - protein, 9 aa, Severe acute respiratory syndrome coronavirus 2
  REGION 1..9: note = Table A: HLA-B*58:01H HLA-C*16:01H HLA-C*16:04H HLA-A*36:01H HLA-A*29:02H HLA-C*07:01H HLA-C*03:02H HLA-A*30:02H HLA-C*12:03H HLA-B*35:01M HLA-B*35:08H HLA-B*35:07H HLA-B*38:02M HLA-B*15:02H HLA-B*57:03H
HSIGFDYVY

SEQ ID NO: 3527 - protein, 9 aa, Severe acute respiratory syndrome coronavirus 2
  REGION 1..9: note = Table A: HLA-C*04:01H HLA-C*04:03M
GFDYVYNPF

SEQ ID NO: 3528 - protein, 9 aa, Severe acute respiratory syndrome coronavirus 2
  REGION 1..9: note = Table A: HLA-C*14:02H HLA-C*14:03M HLA-C*06:02M HLA-C*07:02H HLA-C*08:01H
VYNPFMIDV

SEQ ID NO: 3529 - protein, 9 aa, Severe acute respiratory syndrome coronavirus 2
  REGION 1..9: note = Table A: HLA-A*24:02H HLA-A*24:07M HLA-A*23:01H
PFMIDVQQW

SEQ ID NO: 3530 - protein, 9 aa, Severe acute respiratory syndrome coronavirus 2
  REGION 1..9: note = Table A: HLA-C*04:03H HLA-A*02:07H HLA-C*08:02H HLA-B*38:02H
MIDVQQWGF

SEQ ID NO: 3531 - protein, 9 aa, Severe acute respiratory syndrome coronavirus 2
  REGION 1..9: note = Table A: HLA-B*48:01H HLA-A*02:11H HLA-A*02:05H HLA-B*52:01H HLA-B*38:02H HLA-B*15:03H HLA-B*39:01H HLA-B*13:02H
QQWGFTGNL

SEQ ID NO: 3532 - protein, 9 aa, Severe acute respiratory syndrome coronavirus 2
  REGION 1..9: note = Table A: HLA-A*34:02H
FTGNLQSNH

SEQ ID NO: 3533 - protein, 9 aa, Severe acute respiratory syndrome coronavirus 2
  REGION 1..9: note = Table A: HLA-A*30:02H HLA-B*38:02H HLA-B*15:02H
NLQSNHDLY

SEQ ID NO: 3534 - protein, 9 aa, Severe acute respiratory syndrome coronavirus 2
  REGION 1..9: note = Table A: HLA-A*02:05H HLA-B*38:02H HLA-B*13:02H
LQSNHDLYC

SEQ ID NO: 3535 - protein, 9 aa, Severe acute respiratory syndrome coronavirus 2
  REGION 1..9: note = Table A: HLA-A*68:02H
SNHDLYCQV

SEQ ID NO: 3536 - protein, 9 aa, Severe acute respiratory syndrome coronavirus 2
  REGION 1..9: note = Table A: HLA-B*46:01H HLA-C*07:27H
YCQVHGNAH

SEQ ID NO: 3537 - protein, 9 aa, Severe acute respiratory syndrome coronavirus 2
  REGION 1..9: note = Table A: HLA-A*02:05H HLA-A*02:06H HLA-B*52:01H HLA-B*38:02H HLA-B*13:02H
CQVHGNAHV

SEQ ID NO: 3538 - protein, 9 aa, Severe acute respiratory syndrome coronavirus 2
  REGION 1..9: note = Table A: HLA-B*56:01H HLA-B*55:02H HLA-B*55:01H HLA-A*02:05H HLA-A*02:08H HLA-B*38:02H HLA-B*54:01H
QVHGNAHVA

SEQ ID NO: 3539 - protein, 9 aa, Severe acute respiratory syndrome coronavirus 2
  REGION 1..9: note = Table A: HLA-C*15:05H
HGNAHVASC

SEQ ID NO: 3540 - protein, 9 aa, Severe acute respiratory syndrome coronavirus 2
  REGION 1..9: note = Table A: HLA-B*38:01H HLA-B*38:02H HLA-B*39:01M HLA-B*15:10H
AHVASCDAI

SEQ ID NO: 3541 - protein, 9 aa, Severe acute respiratory syndrome coronavirus 2
  REGION 1..9: note = Table A: HLA-B*35:03M HLA-B*35:01H HLA-B*35:02H HLA-B*35:08H HLA-B*35:12M HLA-B*38:02H HLA-B*15:02M
HVASCDAIM

SEQ ID NO: 3542 - protein, 9 aa, Severe acute respiratory syndrome coronavirus 2
  REGION 1..9: note = Table A: HLA-A*11:303H HLA-A*74:01H HLA-A*11:01M HLA-A*11:02H HLA-A*33:03H HLA-A*68:01H HLA-A*34:01H HLA-A*34:02H HLA-C*07:27H HLA-A*31:01M HLA-A*66:01M
ASCDAIMTR

SEQ ID NO: 3543 - protein, 9 aa, Severe acute respiratory syndrome coronavirus 2
  REGION 1..9: note = Table A: HLA-B*08:01M HLA-C*15:05H HLA-C*15:02H HLA-B*13:02H
AIMTRCLAV

SEQ ID NO: 3544 - protein, 9 aa, Severe acute respiratory syndrome coronavirus 2
  REGION 1..9: note = Table A: HLA-A*02:02M HLA-B*38:02H
CLAVHECFV

SEQ ID NO: 3545 - protein, 9 aa, Severe acute respiratory syndrome coronavirus 2
  REGION 1..9: note = Table A: HLA-A*74:01M HLA-A*11:01H HLA-A*11:02M HLA-A*33:01H HLA-A*33:03M HLA-A*26:03H HLA-A*68:01H HLA-A*34:01M HLA-A*34:02H HLA-A*31:01M HLA-A*66:01M
AVHECFVKR

SEQ ID NO: 3546 - protein, 9 aa, Severe acute respiratory syndrome coronavirus 2
  REGION 1..9: note = Table A: HLA-B*58:02H HLA-A*02:11H HLA-B*57:03H HLA-B*13:02H
FVKRVDWTI

SEQ ID NO: 3547 - protein, 9 aa, Severe acute respiratory syndrome coronavirus 2
  REGION 1..9: note = Table A: HLA-C*06:02M HLA-B*27:05M HLA-C*07:01M HLA-C*07:02M HLA-B*27:02M HLA-B*15:03H HLA-C*07:04H
KRVDWTIEY

SEQ ID NO: 3548 - protein, 9 aa, Severe acute respiratory syndrome coronavirus 2
  REGION 1..9: note = Table A: HLA-A*24:02M HLA-A*24:07H HLA-A*23:01H HLA-B*39:01H
EYPIIGDEL

SEQ ID NO: 3549 - protein, 9 aa, Severe acute respiratory syndrome coronavirus 2
  REGION 1..9: note = Table A: HLA-B*13:02H
PIIGDELKI

SEQ ID NO: 3550 - protein, 9 aa, Severe acute respiratory syndrome coronavirus 2
  REGION 1..9: note = Table A: HLA-B*45:01H HLA-B*50:01H
GDELKINAA

SEQ ID NO: 3551 - protein, 9 aa, Severe acute respiratory syndrome coronavirus 2
  REGION 1..9: note = Table A: HLA-B*18:01M HLA-B*07:05M
DELKINAAC

SEQ ID NO: 3552 - protein, 9 aa, Severe acute respiratory syndrome coronavirus 2
  REGION 1..9: note = Table A: HLA-A*33:01H HLA-A*33:03H HLA-A*26:03M HLA-A*34:01H
ELKINAACR

SEQ ID NO: 3553 - protein, 9 aa, Severe acute respiratory syndrome coronavirus 2
  REGION 1..9: note = Table A: HLA-B*15:03H
RKVQHMVVK

SEQ ID NO: 3554 - protein, 9 aa, Severe acute respiratory syndrome coronavirus 2
  REGION 1..9: note = Table A: HLA-B*56:01H HLA-A*02:11M HLA-B*55:02H HLA-B*55:01H HLA-A*02:05M HLA-A*02:06H HLA-A*02:08H HLA-A*02:02H HLA-B*40:06H
KVQHMVVKA

SEQ ID NO: 3555 - protein, 9 aa, Severe acute respiratory syndrome coronavirus 2
  REGION 1..9: note = Table A: HLA-A*02:08H HLA-A*02:03H HLA-B*52:01H HLA-B*38:02H HLA-B*39:06H HLA-B*40:06H HLA-B*15:01H HLA-B*50:01H
VQHMVVKAA

SEQ ID NO: 3556 - protein, 9 aa, Severe acute respiratory syndrome coronavirus 2
  REGION 1..9: note = Table A: HLA-B*38:01M HLA-B*38:02H HLA-B*39:06H HLA-B*39:01M HLA-B*15:10H
QHMVVKAAL

SEQ ID NO: 3557 - protein, 9 aa, Severe acute respiratory syndrome coronavirus 2
  REGION 1..9: note = Table A: HLA-B*08:01H HLA-A*02:11H HLA-A*02:02H HLA-B*38:02H
HMVVKAALL

SEQ ID NO: 3558 - protein, 9 aa, Severe acute respiratory syndrome coronavirus 2
  REGION 1..9: note = Table A: HLA-B*58:01M HLA-B*57:03M
KAALLADKF

SEQ ID NO: 3559 - protein, 9 aa, Severe acute respiratory syndrome coronavirus 2
  REGION 1..9: note = Table A: HLA-A*02:04H
ALLADKFPV

SEQ ID NO: 3560 - protein, 9 aa, Severe acute respiratory syndrome coronavirus 2
  REGION 1..9: note = Table A: HLA-A*11:303H HLA-B*08:01H HLA-C*03:03H HLA-A*02:11H HLA-C*03:02H HLA-C*03:04H HLA-A*68:02H HLA-A*02:04H HLA-A*02:05H HLA-A*02:06M HLA-A*02:07M HLA-B*14:01H HLA-A*02:01M HLA-A*02:02H HLA-A*02:03M
  REGION 1..9: note = CONT. FROM ABOVE: HLA-C*17:01H HLA-C*08:01M HLA-B*38:02M HLA- B*40:06M HLA-B*15:10H
LLADKFPVL

SEQ ID NO: 3561 - protein, 9 aa, Severe acute respiratory syndrome coronavirus 2
  REGION 1..9: note = Table A: HLA-A*36:01H HLA-C*04:03H HLA-C*05:01H
LADKFPVLH

SEQ ID NO: 3562 - protein, 9 aa, Severe acute respiratory syndrome coronavirus 2
  REGION 1..9: note = Table A: HLA-A*68:02H HLA-B*38:02H
DKFPVLHDI

SEQ ID NO: 3563 - protein, 9 aa, Severe acute respiratory syndrome coronavirus 2
  REGION 1..9: note = Table A: HLA-A*11:303H HLA-A*74:01H HLA-A*03:01M HLA-A*03:02M HLA-A*11:01H HLA-A*11:02H HLA-A*36:01H HLA-A*30:02H HLA-A*34:01H HLA-A*34:02H HLA-A*66:01H
VLHDIGNPK

SEQ ID NO: 3564 - protein, 9 aa, Severe acute respiratory syndrome coronavirus 2
  REGION 1..9: note = Table A: HLA-B*38:02H
LHDIGNPKA

SEQ ID NO: 3565 - protein, 9 aa, Severe acute respiratory syndrome coronavirus 2
  REGION 1..9: note = Table A: HLA-B*44:05M HLA-B*44:03H HLA-B*18:01H HLA-A*68:02H HLA-B*35:03H HLA-C*15:05H HLA-C*08:03H HLA-B*37:01H HLA-B*38:01H HLA-B*38:02M HLA-B*40:02M HLA-B*39:01H HLA-B*07:05H HLA-B*41:02M HLA-B*49:01M
HDIGNPKAI

SEQ ID NO: 3566 - protein, 9 aa, Severe acute respiratory syndrome coronavirus 2
  REGION 1..9: note = Table A: HLA-A*33:01H HLA-A*68:01H HLA-A*34:01H HLA-A*34:02M HLA-A*66:01H
DIGNPKAIK

SEQ ID NO: 3567 - protein, 9 aa, Severe acute respiratory syndrome coronavirus 2
  REGION 1..9: note = Table A: HLA-B*57:03H
CVPQADVEW

SEQ ID NO: 3568 - protein, 9 aa, Severe acute respiratory syndrome coronavirus 2
  REGION 1..9: note = Table A: HLA-A*24:07H HLA-B*38:02H HLA-B*13:01M
PQADVEWKF

SEQ ID NO: 3569 - protein, 9 aa, Severe acute respiratory syndrome coronavirus 2
  REGION 1..9: note = Table A: HLA-B*15:01H
AQPCSDKAY

SEQ ID NO: 3570 - protein, 9 aa, Severe acute respiratory syndrome coronavirus 2
  REGION 1..9: note = Table A: HLA-B*58:01M HLA-B*58:02M HLA-B*57:01H HLA-A*02:11H HLA-B*57:03H HLA-B*13:01H
KAYKIEELF

SEQ ID NO: 3571 - protein, 9 aa, Severe acute respiratory syndrome coronavirus 2
  REGION 1..9: note = Table A: HLA-C*14:03H HLA-A*29:02H HLA-A*30:02H
AYKIEELFY

SEQ ID NO: 3572 - protein, 9 aa, Severe acute respiratory syndrome coronavirus 2
  REGION 1..9: note = Table A: HLA-B*58:01H HLA-A*36:01H HLA-A*29:01H HLA-A*29:02M HLA-A*01:01H HLA-C*07:01H HLA-A*30:02M HLA-B*07:05H HLA-B*57:03H
KIEELFYSY

SEQ ID NO: 3573 - protein, 9 aa, Severe acute respiratory syndrome coronavirus 2
  REGION 1..9: note = Table A: HLA-A*26:03H HLA-A*34:01M HLA-A*34:02H
ELFYSYATH

SEQ ID NO: 3574 - protein, 9 aa, Severe acute respiratory syndrome coronavirus 2
  REGION 1..9: note = Table A: HLA-A*34:02M
YSYATHSDK

SEQ ID NO: 3575 - protein, 9 aa, Severe acute respiratory syndrome coronavirus 2
  REGION 1..9: note = Table A: HLA-C*14:02H HLA-C*14:03H HLA-B*44:05H HLA-C*07:02H HLA-A*24:02H HLA-A*24:07H HLA-C*08:01H HLA-A*23:01M HLA-B*38:02H HLA-B*39:01H
SYATHSDKF

SEQ ID NO: 3576 - protein, 9 aa, Severe acute respiratory syndrome coronavirus 2
  REGION 1..9: note = Table A: HLA-C*14:03H HLA-A*24:02H HLA-A*24:07H HLA-A*23:01H
KFTDGVCLF

SEQ ID NO: 3577 - protein, 9 aa, Severe acute respiratory syndrome coronavirus 2
  REGION 1..9: note = Table A: HLA-B*58:01M HLA-C*04:03H HLA-B*53:01H HLA-B*57:03H
FTDGVCLFW

SEQ ID NO: 3578 - protein, 9 aa, Severe acute respiratory syndrome coronavirus 2
  REGION 1..9: note = Table A: HLA-B*41:02H
VDRYPANSI

SEQ ID NO: 3579 - protein, 9 aa, Severe acute respiratory syndrome coronavirus 2
  REGION 1..9: note = Table A: HLA-B*14:02M HLA-B*14:01M HLA-B*38:02H HLA-B*39:06H HLA-B*39:01H
DRYPANSIV

SEQ ID NO: 3580 - protein, 9 aa, Severe acute respiratory syndrome coronavirus 2
  REGION 1..9: note = Table A: HLA-A*33:01H HLA-A*33:03M HLA-B*56:01H HLA-A*26:03H HLA-B*55:02H HLA-A*68:01M HLA-A*68:02H HLA-A*34:01H HLA-A*34:02M HLA-B*35:07H HLA-B*54:01H HLA-A*66:01M
YPANSIVCR

SEQ ID NO: 3581 - protein, 9 aa, Severe acute respiratory syndrome coronavirus 2
  REGION 1..9: note = Table A: HLA-A*02:11H HLA-A*68:02H HLA-A*02:02H HLA-B*40:02H
FDTRVLSNL

SEQ ID NO: 3582 - protein, 9 aa, Severe acute respiratory syndrome coronavirus 2
  REGION 1..9: note = Table A: HLA-B*14:02H HLA-B*14:01H HLA-B*38:02H
TRVLSNLNL

SEQ ID NO: 3583 - protein, 9 aa, Severe acute respiratory syndrome coronavirus 2
  REGION 1..9: note = Table A: HLA-C*15:05M HLA-B*07:05H
LPGCDGGSL

SEQ ID NO: 3584 - protein, 9 aa, Severe acute respiratory syndrome coronavirus 2
  REGION 1..9: note = Table A: HLA-A*33:01H HLA-A*33:03H HLA-A*68:01H HLA-A*34:02H
DGGSLYVNK

SEQ ID NO: 3585 - protein, 9 aa, Severe acute respiratory syndrome coronavirus 2
  REGION 1..9: note = Table A: HLA-A*11:303H HLA-B*46:01H HLA-B*08:01H HLA-A*02:11H HLA-A*30:02H HLA-B*38:02M HLA-A*32:01H HLA-B*15:01H HLA-B*15:02H HLA-B*15:03H
SLYVNKHAF

SEQ ID NO: 3586 - protein, 9 aa, Severe acute respiratory syndrome coronavirus 2
  REGION 1..9: note = Table A: HLA-A*02:11H
YVNKHAFHT

SEQ ID NO: 3587 - protein, 9 aa, Severe acute respiratory syndrome coronavirus 2
  REGION 1..9: note = Table A: HLA-B*38:01H HLA-B*38:02M HLA-B*15:03M HLA-B*15:10M
KHAFHTPAF

SEQ ID NO: 3588 - protein, 9 aa, Severe acute respiratory syndrome coronavirus 2
  REGION 1..9: note = Table A: HLA-A*11:01H HLA-A*34:02H
AFHTPAFDK

SEQ ID NO: 3589 - protein, 9 aa, Severe acute respiratory syndrome coronavirus 2
  REGION 1..9: note = Table A: HLA-B*38:02H
FHTPAFDKS

SEQ ID NO: 3590 - protein, 9 aa, Severe acute respiratory syndrome coronavirus 2
  REGION 1..9: note = Table A: HLA-B*53:01M HLA-B*35:03H HLA-C*15:05M HLA-B*35:01H HLA-B*35:02H HLA-B*35:08H HLA-B*35:07H HLA-B*35:12M HLA-B*38:02H HLA-B*07:02M HLA-B*07:04H HLA-B*15:02H HLA-B*07:05M HLA-B*15:11H
TPAFDKSAF

SEQ ID NO: 3591 - protein, 9 aa, Severe acute respiratory syndrome coronavirus 2
  REGION 1..9: note = Table A: HLA-A*68:02H HLA-B*51:01H
PAFDKSAFV

SEQ ID NO: 3592 - protein, 9 aa, Severe acute respiratory syndrome coronavirus 2
  REGION 1..9: note = Table A: HLA-A*11:303H HLA-C*12:05H HLA-C*03:02H HLA-C*12:03H HLA-B*07:04H
SAFVNLKQL

SEQ ID NO: 3593 - protein, 9 aa, Severe acute respiratory syndrome coronavirus 2
  REGION 1..9: note = Table A: HLA-B*08:01H HLA-C*03:02H HLA-B*35:07H HLA-B*15:02H
FVNLKQLPF

SEQ ID NO: 3594 - protein, 9 aa, Severe acute respiratory syndrome coronavirus 2
  REGION 1..9: note = Table A: HLA-B*57:03H
VNLKQLPFF

SEQ ID NO: 3595 - protein, 9 aa, Severe acute respiratory syndrome coronavirus 2
  REGION 1..9: note = Table A: HLA-A*29:02H HLA-A*30:02H
NLKQLPFFY

SEQ ID NO: 3596 - protein, 9 aa, Severe acute respiratory syndrome coronavirus 2
  REGION 1..9: note = Table A: HLA-B*39:01H
YYSDSPCES

SEQ ID NO: 3597 - protein, 9 aa, Severe acute respiratory syndrome coronavirus 2
  REGION 1..9: note = Table A: HLA-B*49:01M
CESHGKQVV

SEQ ID NO: 3598 - protein, 9 aa, Severe acute respiratory syndrome coronavirus 2
  REGION 1..9: note = Table A: HLA-B*15:01M HLA-B*15:03H
KQVVSDIDY

SEQ ID NO: 3599 - protein, 9 aa, Severe acute respiratory syndrome coronavirus 2
  REGION 1..9: note = Table A: HLA-A*02:11H HLA-A*68:02M HLA-A*02:05M HLA-A*02:06H HLA-A*02:08M HLA-A*02:01H HLA-B*38:02H
QVVSDIDYV

SEQ ID NO: 3600 - protein, 9 aa, Severe acute respiratory syndrome coronavirus 2
  REGION 1..9: note = Table A: HLA-C*04:03M HLA-C*08:01H HLA-C*08:02M
VSDIDYVPL

SEQ ID NO: 3601 - protein, 9 aa, Severe acute respiratory syndrome coronavirus 2
  REGION 1..9: note = Table A: HLA-A*11:01H HLA-A*11:02H HLA-A*34:02H
SDIDYVPLK

SEQ ID NO: 3602 - protein, 9 aa, Severe acute respiratory syndrome coronavirus 2
  REGION 1..9: note = Table A: HLA-B*56:01H HLA-B*55:02H HLA-B*40:06H HLA-B*54:01H HLA-B*50:01M
IDYVPLKSA

SEQ ID NO: 3603 - protein, 9 aa, Severe acute respiratory syndrome coronavirus 2
  REGION 1..9: note = Table A: HLA-C*15:05H HLA-B*51:01H HLA-B*07:05M
VPLKSATCI

SEQ ID NO: 3604 - protein, 9 aa, Severe acute respiratory syndrome coronavirus 2
  REGION 1..9: note = Table A: HLA-A*33:03H
CNLGGAVCR

SEQ ID NO: 3605 - protein, 9 aa, Severe acute respiratory syndrome coronavirus 2
  REGION 1..9: note = Table A: HLA-B*46:01H
VCRHHANEY

SEQ ID NO: 3606 - protein, 9 aa, Severe acute respiratory syndrome coronavirus 2
  REGION 1..9: note = Table A: HLA-B*38:01M HLA-B*38:02H HLA-B*13:01H HLA-B*15:10H
RHHANEYRL

SEQ ID NO: 3607 - protein, 9 aa, Severe acute respiratory syndrome coronavirus 2
  REGION 1..9: note = Table A: HLA-B*38:02M
HHANEYRLY

SEQ ID NO: 3608 - protein, 9 aa, Severe acute respiratory syndrome coronavirus 2
  REGION 1..9: note = Table A: HLA-B*42:01H HLA-B*58:01M HLA-B*58:02M HLA-C*14:03H HLA-A*11:303H HLA-C*16:01H HLA-A*36:01H HLA-B*57:01H HLA-C*06:02H HLA-B*08:01H HLA-C*04:03H HLA-C*03:03M HLA-C*07:01H HLA-C*12:05H HLA-A*02:11M HLA-B*53:01H
  REGION 1..9: note = CONT. FROM ABOVE: HLA-C*03:02M HLA-C*03:04M HLA-A*68:02H HLA- B*35:03H HLA-C*15:05M HLA-C*12:02H HLA-C*12:03M HLA-C*15:02H HLA-A*02:04M HLA-A*02:06H HLA-A*02:07H HLA-A*02:02M HLA-A*34 :01H HLA-A*34:02M HLA-B*35:01H HLA-B*35:02H HLA-B*51:01H
  REGION 1..9: note = CONT. FROM ABOVE: HLA-C*17:01M HLA-A*24:07H HLA-B*35:07H HLA- C*08:01M HLA-B*35:12H HLA-B*38:01H HLA-B*38:02M HLA-A*32:01H HLA-B*07:02H HLA-B*07:04M HLA-B*07:05H HLA-B*57:03M HLA-C*02 :02H HLA-B*13:01H HLA-B*13:02H HLA-B*15:10H HLA-C*07:04H
  REGION 1..9: note = CONT. FROM ABOVE: HLA-A*66:01H
HANEYRLYL

SEQ ID NO: 3609 - protein, 9 aa, Severe acute respiratory syndrome coronavirus 2
  REGION 1..9: note = Table A: HLA-B*45:01H HLA-B*40:06H HLA-B*50:01H
NEYRLYLDA

SEQ ID NO: 3610 - protein, 9 aa, Severe acute respiratory syndrome coronavirus 2
  REGION 1..9: note = Table A: HLA-A*02:11H HLA-B*13:01H
RLYLDAYNM

SEQ ID NO: 3611 - protein, 9 aa, Severe acute respiratory syndrome coronavirus 2
  REGION 1..9: note = Table A: HLA-C*14:02H HLA-C*14:03H HLA-A*24:02H
LYLDAYNMM

SEQ ID NO: 3612 - protein, 9 aa, Severe acute respiratory syndrome coronavirus 2
  REGION 1..9: note = Table A: HLA-A*02:11H HLA-A*02:06H HLA-A*02:07M HLA-A*02:01M HLA-C*08:01H HLA-C*08:02H HLA-B*38:02M HLA-B*13:01H HLA-B*13:02H
YLDAYNMMI

SEQ ID NO: 3613 - protein, 9 aa, Severe acute respiratory syndrome coronavirus 2
  REGION 1..9: note = Table A: HLA-B*56:01H HLA-B*55:02H HLA-A*68:02H HLA-C*15:05H HLA-B*51:01M HLA-B*38:02H HLA-B*39:06M HLA-B*54:01H HLA-B*07:05H
DAYNMMISA

SEQ ID NO: 3614 - protein, 9 aa, Severe acute respiratory syndrome coronavirus 2
  REGION 1..9: note = Table A: HLA-B*38:02H
YNMMISAGF

SEQ ID NO: 3615 - protein, 9 aa, Severe acute respiratory syndrome coronavirus 2
  REGION 1..9: note = Table A: HLA-C*08:01H HLA-B*38:02M HLA-B*15:02H
MMISAGFSL

SEQ ID NO: 3616 - protein, 9 aa, Severe acute respiratory syndrome coronavirus 2
  REGION 1..9: note = Table A: HLA-B*53:01H HLA-B*38:02H
MISAGFSLW

SEQ ID NO: 3617 - protein, 9 aa, Severe acute respiratory syndrome coronavirus 2
  REGION 1..9: note = Table A: HLA-C*15:02M
ISAGFSLWV

SEQ ID NO: 3618 - protein, 9 aa, Severe acute respiratory syndrome coronavirus 2
  REGION 1..9: note = Table A: HLA-B*35:07H
SAGFSLWVY

SEQ ID NO: 3619 - protein, 9 aa, Severe acute respiratory syndrome coronavirus 2
  REGION 1..9: note = Table A: HLA-A*11:02H
AGFSLWVYK

SEQ ID NO: 3620 - protein, 9 aa, Severe acute respiratory syndrome coronavirus 2
  REGION 1..9: note = Table A: HLA-B*58:02H HLA-B*57:03H
FSLWVYKQF

SEQ ID NO: 3621 - protein, 9 aa, Severe acute respiratory syndrome coronavirus 2
  REGION 1..9: note = Table A: HLA-A*36:01H HLA-A*25:01H HLA-A*26:01H HLA-A*29:01H HLA-A*29:02M HLA-A*30:02H HLA-A*34:02H HLA-B*35:01H HLA-B*35:07M HLA-B*38:02M HLA-B*15:01H HLA-B*15:02M HLA-B*15:03H HLA-B*07:05H
WVYKQFDTY

SEQ ID NO: 3622 - protein, 9 aa, Severe acute respiratory syndrome coronavirus 2
  REGION 1..9: note = Table A: HLA-B*58:01H HLA-B*58:02M HLA-B*57:01M HLA-B*44:03H HLA-B*53:01H HLA-A*24:02H HLA-A*24:07M HLA-A*23:01H HLA-B*38:02H HLA-A*32:01H HLA-B*15:03M HLA-B*57:03H HLA-B*13:01H HLA-B*13:02H
KQFDTYNLW

SEQ ID NO: 3623 - protein, 9 aa, Severe acute respiratory syndrome coronavirus 2
  REGION 1..9: note = Table A: HLA-A*25:01H HLA-A*26:01H HLA-A*26:02H HLA-A*68:02H HLA-C*15:05H HLA-A*34:02H HLA-A*66:01H
DTYNLWNTF

SEQ ID NO: 3624 - protein, 9 aa, Severe acute respiratory syndrome coronavirus 2
  REGION 1..9: note = Table A: HLA-A*02:11H HLA-A*02:04H HLA-A*02:06H HLA-A*02:07H HLA-A*02:01H HLA-A*02:02M HLA-C*08:01H HLA-B*38:02H HLA-B*40:06H
NLWNTFTRL

SEQ ID NO: 3625 - protein, 9 aa, Severe acute respiratory syndrome coronavirus 2
  REGION 1..9: note = Table A: HLA-C*16:01H HLA-B*08:01M HLA-A*68:02H HLA-C*15:05H HLA-B*14:02M HLA-A*02:04H HLA-A*02:05H HLA-B*14:01H
NTFTRLQSL

SEQ ID NO: 3626 - protein, 9 aa, Severe acute respiratory syndrome coronavirus 2
  REGION 1..9: note = Table A: HLA-B*14:01H HLA-B*38:02H HLA-B*39:01H
TRLQSLENV

SEQ ID NO: 3627 - protein, 9 aa, Severe acute respiratory syndrome coronavirus 2
  REGION 1..9: note = Table A: HLA-B*38:02H HLA-B*15:01M HLA-B*15:02H HLA-B*39:01H HLA-B*13:01H
LQSLENVAF

SEQ ID NO: 3628 - protein, 9 aa, Severe acute respiratory syndrome coronavirus 2
  REGION 1..9: note = Table A: HLA-A*02:11H HLA-A*68:02H HLA-A*02:04H HLA-A*02:07H HLA-A*02:01H HLA-B*13:02H
SLENVAFNV

SEQ ID NO: 3629 - protein, 9 aa, Severe acute respiratory syndrome coronavirus 2
  REGION 1..9: note = Table A: HLA-B*45:01H HLA-B*18:01H HLA-B*40:02M HLA-B*40:06H HLA-B*41:02H HLA-B*49:01H HLA-B*50:01M
LENVAFNVV

SEQ ID NO: 3630 - protein, 9 aa, Severe acute respiratory syndrome coronavirus 2
  REGION 1..9: note = Table A: HLA-A*11:303H HLA-A*03:01H HLA-A*03:02M HLA-A*11:01M HLA-A*11:02M HLA-A*33:01H HLA-A*33:03H HLA-A*26:03H HLA-A*68:01H HLA-A*68:02H HLA-A*34:01M HLA-A*34:02H HLA-C*07:27H HLA-A*66:01M
NVAFNVVNK

SEQ ID NO: 3631 - protein, 9 aa, Severe acute respiratory syndrome coronavirus 2
  REGION 1..9: note = Table A: HLA-B*39:01H
GHFDGQQGE

SEQ ID NO: 3632 - protein, 9 aa, Severe acute respiratory syndrome coronavirus 2
  REGION 1..9: note = Table A: HLA-C*04:01H
HFDGQQGEV

SEQ ID NO: 3633 - protein, 9 aa, Severe acute respiratory syndrome coronavirus 2
  REGION 1..9: note = Table A: HLA-B*35:02H
DGQQGEVPV

SEQ ID NO: 3634 - protein, 9 aa, Severe acute respiratory syndrome coronavirus 2
  REGION 1..9: note = Table A: HLA-A*02:11H HLA-A*02:05H HLA-B*52:01H HLA-B*38:01H HLA-B*38:02M HLA-B*39:01H HLA-B*13:01H HLA-B*13:02H
QQGEVPVSI

SEQ ID NO: 3635 - protein, 9 aa, Severe acute respiratory syndrome coronavirus 2
  REGION 1..9: note = Table A: HLA-B*56:01H HLA-B*55:02H HLA-B*54:01H
VPVSIINNT

SEQ ID NO: 3636 - protein, 9 aa, Severe acute respiratory syndrome coronavirus 2
  REGION 1..9: note = Table A: HLA-B*58:01H HLA-B*46:01M HLA-B*15:01M HLA-B*15:03H
VSIINNTVY

SEQ ID NO: 3637 - protein, 9 aa, Severe acute respiratory syndrome coronavirus 2
  REGION 1..9: note = Table A: HLA-A*11:303H HLA-A*74:01H HLA-A*03:01M HLA-A*03:02H HLA-A*11:01M HLA-A*11:02M HLA-A*36:01H HLA-A*30:02H HLA-A*68:01H HLA-A*34:02H HLA-C*07:27H
IINNTVYTK

SEQ ID NO: 3638 - protein, 9 aa, Severe acute respiratory syndrome coronavirus 2
  REGION 1..9: note = Table A: HLA-C*15:02H
INNTVYTKV

SEQ ID NO: 3639 - protein, 9 aa, Severe acute respiratory syndrome coronavirus 2
  REGION 1..9: note = Table A: HLA-A*02:11H HLA-A*68:02M HLA-A*02:05H HLA-A*02:06M HLA-A*02:07H HLA-A*02:08H HLA-B*14:01H HLA-A*02:01M HLA-A*02:02M HLA-A*02:03M HLA-B*38:02H HLA-B*13:02H
TVYTKVDGV

SEQ ID NO: 3640 - protein, 9 aa, Severe acute respiratory syndrome coronavirus 2
  REGION 1..9: note = Table A: HLA-A*68:02H HLA-C*12:03H HLA-B*38:02H
YTKVDGVDV

SEQ ID NO: 3641 - protein, 9 aa, Severe acute respiratory syndrome coronavirus 2
  REGION 1..9: note = Table A: HLA-A*11:303H HLA-C*04:01H HLA-C*04:03H HLA-A*02:11M HLA-C*15:05H HLA-A*02:05M HLA-A*02:06M HLA-A*02:07H HLA-A*02:08M HLA-A*02:01H HLA-A*02:02H HLA-B*35:02M HLA-C*08:01M HLA-C*08:02M HLA-B*35:12M
  REGION 1..9: note = CONT. FROM ABOVE: HLA-B*38:01H HLA-B*38:02H HLA-B*40:01H HLA- B*57:03H HLA-C*05:01M HLA-B*13:01M
KVDGVDVEL

SEQ ID NO: 3642 - protein, 9 aa, Severe acute respiratory syndrome coronavirus 2
  REGION 1..9: note = Table A: HLA-B*27:02H
VDVELFENK

SEQ ID NO: 3643 - protein, 9 aa, Severe acute respiratory syndrome coronavirus 2
  REGION 1..9: note = Table A: HLA-A*25:01H HLA-A*26:03H HLA-B*08:01M HLA-A*02:11H HLA-A*68:02M HLA-B*14:02H HLA-A*02:04H HLA-B*14:01M HLA-A*02:02M HLA-A*02:03H HLA-A*34:01H HLA-B*38:02M HLA-B*15:02M HLA-B*39:01H
ELFENKTTL

SEQ ID NO: 3644 - protein, 9 aa, Severe acute respiratory syndrome coronavirus 2
  REGION 1..9: note = Table A: HLA-B*49:01H
FENKTTLPV

SEQ ID NO: 3645 - protein, 9 aa, Severe acute respiratory syndrome coronavirus 2
  REGION 1..9: note = Table A: HLA-B*58:01H HLA-B*58:02H HLA-A*11:303H HLA-B*44:05H HLA-B*57:01H HLA-B*46:01H HLA-A*29:01H HLA-A*29:02H HLA-B*53:01H HLA-C*03:02H HLA-A*30:02H HLA-C*15:05M HLA-A*24:02H HLA-B*35:01M HLA-B*35:07H
  REGION 1..9: note = CONT. FROM ABOVE: HLA-C*08:01H HLA-A*23:01H HLA-B*15:13H HLA- B*38:02M HLA-A*32:01H HLA-B*15:01M HLA-B*15:02M HLA-B*07:05M HLA-B*57:03H
TTLPVNVAF

SEQ ID NO: 3646 - protein, 9 aa, Severe acute respiratory syndrome coronavirus 2
  REGION 1..9: note = Table A: HLA-B*53:01M HLA-B*35:03H HLA-C*15:05H HLA-B*35:01M HLA-B*35:02M HLA-B*35:07M HLA-B*35:12M HLA-B*54:01H HLA-B*07:05H
LPVNVAFEL

SEQ ID NO: 3647 - protein, 9 aa, Severe acute respiratory syndrome coronavirus 2
  REGION 1..9: note = Table A: HLA-A*24:07H
PVNVAFELW

SEQ ID NO: 3648 - protein, 9 aa, Severe acute respiratory syndrome coronavirus 2
  REGION 1..9: note = Table A: HLA-A*34:02H
NVAFELWAK

SEQ ID NO: 3649 - protein, 9 aa, Severe acute respiratory syndrome coronavirus 2
  REGION 1..9: note = Table A: HLA-A*74:01H HLA-A*33:01H HLA-A*33:03H HLA-A*34:01H HLA-A*66:01H
VAFELWAKR

SEQ ID NO: 3650 - protein, 9 aa, Severe acute respiratory syndrome coronavirus 2
  REGION 1..9: note = Table A: HLA-B*49:01H
FELWAKRNI

SEQ ID NO: 3651 - protein, 9 aa, Severe acute respiratory syndrome coronavirus 2
  REGION 1..9: note = Table A: HLA-A*34:02H
ELWAKRNIK

SEQ ID NO: 3652 - protein, 9 aa, Severe acute respiratory syndrome coronavirus 2
  REGION 1..9: note = Table A: HLA-A*02:11H HLA-C*15:05H HLA-C*15:02M HLA-A*02:06H HLA-A*02:01H HLA-B*40:02H HLA-B*40:06H HLA-B*13:02H
RNIKPVPEV

SEQ ID NO: 3653 - protein, 9 aa, Severe acute respiratory syndrome coronavirus 2
  REGION 1..9: note = Table A: HLA-A*34:02H
NIKPVPEVK

SEQ ID NO: 3654 - protein, 9 aa, Severe acute respiratory syndrome coronavirus 2
  REGION 1..9: note = Table A: HLA-B*42:01H HLA-B*53:01H HLA-B*35:03M HLA-C*15:05M HLA-B*35:02H HLA-B*35:07H HLA-B*35:12H HLA-B*07:02M HLA-B*07:04H HLA-B*07:05H
KPVPEVKIL

SEQ ID NO: 3655 - protein, 9 aa, Severe acute respiratory syndrome coronavirus 2
  REGION 1..9: note = Table A: HLA-B*38:02H HLA-B*13:02H
ILNNLGVDI

SEQ ID NO: 3656 - protein, 9 aa, Severe acute respiratory syndrome coronavirus 2
  REGION 1..9: note = Table A: HLA-B*39:06H
NNLGVDIAA

SEQ ID NO: 3657 - protein, 9 aa, Severe acute respiratory syndrome coronavirus 2
  REGION 1..9: note = Table A: HLA-A*02:06H HLA-A*02:07H HLA-B*14:01H HLA-C*08:02H
GVDIAANTV

SEQ ID NO: 3658 - protein, 9 aa, Severe acute respiratory syndrome coronavirus 2
  REGION 1..9: note = Table A: HLA-B*58:01H HLA-C*16:01H HLA-C*16:04H HLA-A*29:01H HLA-A*29:02H HLA-A*30:02M HLA-C*12:02H HLA-B*35:01M HLA-C*02:02H
AANTVIWDY

SEQ ID NO: 3659 - protein, 9 aa, Severe acute respiratory syndrome coronavirus 2
  REGION 1..9: note = Table A: HLA-A*66:01H
NTVIWDYKR

SEQ ID NO: 3660 - protein, 9 aa, Severe acute respiratory syndrome coronavirus 2
  REGION 1..9: note = Table A: HLA-A*25:01M HLA-A*33:01H HLA-A*33:03H HLA-A*26:01H HLA-A*26:02H HLA-A*26:03H HLA-B*53:01M HLA-A*68:01H HLA-A*68:02M HLA-C*15:05M HLA-A*34:01H HLA-A*34:02H HLA-B*51:01H HLA-B*52:01H HLA-B*38:02H HLA-B*07:05H
DAPAHISTI

SEQ ID NO: 3661 - protein, 9 aa, Severe acute respiratory syndrome coronavirus 2
  REGION 1..9: note = Table A: HLA-B*56:01H HLA-C*15:05H
APAHISTIG

SEQ ID NO: 3662 - protein, 9 aa, Severe acute respiratory syndrome coronavirus 2
  REGION 1..9: note = Table A: HLA-C*15:05H
PAHISTIGV

SEQ ID NO: 3663 - protein, 9 aa, Severe acute respiratory syndrome coronavirus 2
  REGION 1..9: note = Table A: HLA-B*38:02H HLA-B*39:06H HLA-B*39:01H HLA-B*15:10H
AHISTIGVC

SEQ ID NO: 3664 - protein, 9 aa, Severe acute respiratory syndrome coronavirus 2
  REGION 1..9: note = Table A: HLA-A*11:01H HLA-A*11:02H HLA-A*34:02H
CSMTDIAKK

SEQ ID NO: 3665 - protein, 9 aa, Severe acute respiratory syndrome coronavirus 2
  REGION 1..9: note = Table A: HLA-A*02:02H
SMTDIAKKP

SEQ ID NO: 3666 - protein, 9 aa, Severe acute respiratory syndrome coronavirus 2
  REGION 1..9: note = Table A: HLA-B*42:01H HLA-B*58:01H HLA-B*58:02H HLA-B*57:01M HLA-B*08:01H HLA-A*02:11H HLA-B*53:01H HLA-C*15:05M HLA-B*55:01H HLA-C*12:02H HLA-B*51:01H HLA-B*52:01M HLA-C*08:01H HLA-B*38:02M HLA-B*07:02H HLA-B*07:04M
  REGION 1..9: note = CONT. FROM ABOVE: HLA-B*15:01H HLA-B*57:03H HLA-C*02:02H HLA- B*13:02H
IAKKPTETI

SEQ ID NO: 3667 - protein, 9 aa, Severe acute respiratory syndrome coronavirus 2
  REGION 1..9: note = Table A: HLA-B*15:03H
AKKPTETIC

SEQ ID NO: 3668 - protein, 9 aa, Severe acute respiratory syndrome coronavirus 2
  REGION 1..9: note = Table A: HLA-B*56:01H HLA-B*55:02H HLA-C*15:05H HLA-B*55:01H
KPTETICAP

SEQ ID NO: 3669 - protein, 9 aa, Severe acute respiratory syndrome coronavirus 2
  REGION 1..9: note = Table A: HLA-A*68:02M
ETICAPLTV

SEQ ID NO: 3670 - protein, 9 aa, Severe acute respiratory syndrome coronavirus 2
  REGION 1..9: note = Table A: HLA-B*15:02H
TICAPLTVF

SEQ ID NO: 3671 - protein, 9 aa, Severe acute respiratory syndrome coronavirus 2
  REGION 1..9: note = Table A: HLA-B*27:05H HLA-B*27:02H HLA-B*14:01H HLA-B*39:01M
GRVDGQVDL

SEQ ID NO: 3672 - protein, 9 aa, Severe acute respiratory syndrome coronavirus 2
  REGION 1..9: note = Table A: HLA-B*58:01H HLA-A*36:01M HLA-C*04:03M HLA-C*15:05H HLA-A*02:07M HLA-C*08:02H HLA-B*38:02H HLA-B*57:03H HLA-C*05:01H HLA-B*13:01H
RVDGQVDLF

SEQ ID NO: 3673 - protein, 9 aa, Severe acute respiratory syndrome coronavirus 2
  REGION 1..9: note = Table A: HLA-A*02:11H HLA-A*02:05M HLA-A*02:06H HLA-A*02:08H HLA-A*02:01H HLA-A*02:03H HLA-C*08:01H HLA-B*38:02H HLA-B*39:06H HLA-B*40:06M HLA-B*13:02H HLA-B*50:01M
GQVDLFRNA

SEQ ID NO: 3674 - protein, 9 aa, Severe acute respiratory syndrome coronavirus 2
  REGION 1..9: note = Table A: HLA-A*74:01H HLA-A*33:03H
QVDLFRNAR

SEQ ID NO: 3675 - protein, 9 aa, Severe acute respiratory syndrome coronavirus 2
  REGION 1..9: note = Table A: HLA-B*14:02H
FRNARNGVL

SEQ ID NO: 3676 - protein, 9 aa, Severe acute respiratory syndrome coronavirus 2
  REGION 1..9: note = Table A: HLA-B*27:05H
ARNGVLITE

SEQ ID NO: 3677 - protein, 9 aa, Severe acute respiratory syndrome coronavirus 2
  REGION 1..9: note = Table A: HLA-B*13:02H
GVLITEGSV

SEQ ID NO: 3678 - protein, 9 aa, Severe acute respiratory syndrome coronavirus 2
  REGION 1..9: note = Table A: HLA-A*11:303H HLA-A*03:01H HLA-A*03:02H HLA-A*11:01H HLA-A*36:01H HLA-B*27:02H HLA-A*30:02H HLA-A*34:02H
VLITEGSVK

SEQ ID NO: 3679 - protein, 9 aa, Severe acute respiratory syndrome coronavirus 2
  REGION 1..9: note = Table A: HLA-A*02:05H HLA-A*02:08H
ITEGSVKGL

SEQ ID NO: 3680 - protein, 9 aa, Severe acute respiratory syndrome coronavirus 2
  REGION 1..9: note = Table A: HLA-B*42:01H HLA-B*08:01H HLA-A*02:11H HLA-B*55:02H HLA-A*30:01M HLA-A*30:02H HLA-A*68:02H HLA-C*15:05H HLA-B*55:01M HLA-A*02:05H HLA-A*02:06H HLA-A*02:08M HLA-A*02:01H HLA-A*02:02M HLA-A*02:03M HLA-B*38:02M
  REGION 1..9: note = CONT. FROM ABOVE: HLA-B*07:02H HLA-B*07:04M HLA-B*07:05H HLA- B*13:02M
SVKGLQPSV

SEQ ID NO: 3681 - protein, 9 aa, Severe acute respiratory syndrome coronavirus 2
  REGION 1..9: note = Table A: HLA-A*11:303H HLA-A*03:01M HLA-A*03:02M HLA-A*11:01H HLA-A*11:02H HLA-A*34:02H
GLQPSVGPK

SEQ ID NO: 3682 - protein, 9 aa, Severe acute respiratory syndrome coronavirus 2
  REGION 1..9: note = Table A: HLA-B*56:01M HLA-B*55:02M HLA-B*55:01M HLA-B*07:04H
QPSVGPKQA

SEQ ID NO: 3683 - protein, 9 aa, Severe acute respiratory syndrome coronavirus 2
  REGION 1..9: note = Table A: HLA-A*26:03H HLA-B*08:01H HLA-C*15:05M HLA-C*01:02H HLA-A*02:05M HLA-A*02:08M HLA-A*02:02H HLA-A*02:03H HLA-A*34:01H HLA-B*38:02H HLA-B*07:02M HLA-B*07:04M HLA-B*07:05H
SVGPKQASL

SEQ ID NO: 3684 - protein, 9 aa, Severe acute respiratory syndrome coronavirus 2
  REGION 1..9: note = Table A: HLA-B*35:03H HLA-C*15:05H HLA-B*38:02H
QASLNGVTL

SEQ ID NO: 3685 - protein, 9 aa, Severe acute respiratory syndrome coronavirus 2
  REGION 1..9: note = Table A: HLA-C*15:02H HLA-B*57:03H HLA-B*13:02H
ASLNGVTLI

SEQ ID NO: 3686 - protein, 9 aa, Severe acute respiratory syndrome coronavirus 2
  REGION 1..9: note = Table A: HLA-B*39:06H HLA-B*39:01H
NGVTLIGEA

SEQ ID NO: 3687 - protein, 9 aa, Severe acute respiratory syndrome coronavirus 2
  REGION 1..9: note = Table A: HLA-A*68:02H HLA-C*15:05H HLA-A*02:05H HLA-A*02:06H HLA-A*02:08H HLA-C*08:03H HLA-B*38:02H HLA-B*07:05H HLA-B*13:02M
GVTLIGEAV

SEQ ID NO: 3688 - protein, 9 aa, Severe acute respiratory syndrome coronavirus 2
  REGION 1..9: note = Table A: HLA-A*11:01H HLA-A*34:02H
VTLIGEAVK

SEQ ID NO: 3689 - protein, 9 aa, Severe acute respiratory syndrome coronavirus 2
  REGION 1..9: note = Table A: HLA-C*15:05H
IGEAVKTQF

SEQ ID NO: 3690 - protein, 9 aa, Severe acute respiratory syndrome coronavirus 2
  REGION 1..9: note = Table A: HLA-B*58:01M HLA-B*57:01H HLA-A*26:01H HLA-A*26:02H HLA-B*53:01M HLA-A*68:01H HLA-A*34:01H HLA-A*34:02M HLA-B*35:01H HLA-B*35:07M HLA-B*38:02H HLA-B*15:02H HLA-B*57:03H
EAVKTQFNY

SEQ ID NO: 3691 - protein, 9 aa, Severe acute respiratory syndrome coronavirus 2
  REGION 1..9: note = Table A: HLA-A*03:01H HLA-B*46:01M HLA-A*26:01H HLA-A*29:02H HLA-A*30:01M HLA-A*30:02H HLA-C*12:02M HLA-B*38:02M HLA-B*15:01M HLA-B*15:02H HLA-A*31:01H HLA-C*02:02H
AVKTQFNYY

SEQ ID NO: 3692 - protein, 9 aa, Severe acute respiratory syndrome coronavirus 2
  REGION 1..9: note = Table A: HLA-A*11:303H HLA-A*74:01H HLA-A*03:02H HLA-A*11:01M HLA-A*11:02M HLA-A*36:01H HLA-A*30:02H HLA-C*07:27H
KTQFNYYKK

SEQ ID NO: 3693 - protein, 9 aa, Severe acute respiratory syndrome coronavirus 2
  REGION 1..9: note = Table A: HLA-C*06:02H HLA-A*02:11H HLA-A*68:02H HLA-A*02:05M HLA-A*02:06H HLA-A*02:02H HLA-A*02:03H HLA-B*52:01M HLA-B*38:02H HLA-B*13:02M
TQFNYYKKV

SEQ ID NO: 3694 - protein, 9 aa, Severe acute respiratory syndrome coronavirus 2
  REGION 1..9: note = Table A: HLA-A*02:11H
NYYKKVDGV

SEQ ID NO: 3695 - protein, 9 aa, Severe acute respiratory syndrome coronavirus 2
  REGION 1..9: note = Table A: HLA-B*58:01M HLA-A*11:303H HLA-A*36:01H HLA-C*04:03H HLA-A*02:11M HLA-A*68:02H HLA-C*15:05M HLA-C*15:02H HLA-A*02:04H HLA-A*02:05M HLA-A*02:06M HLA-A*02:07H HLA-A*02:08M HLA-B*14:01H HLA-A*02:01H
  REGION 1..9: note = CONT. FROM ABOVE: HLA-A*02:02M HLA-C*08:01M HLA-C*08:02M HLA- B*38:01H HLA-B*38:02M HLA-B*40:01H HLA-B*07:05H HLA-B*57:03M HLA-C*05:01M HLA-B*13:01M HLA-B*13:02H
KVDGVVQQL

SEQ ID NO: 3696 - protein, 9 aa, Severe acute respiratory syndrome coronavirus 2
  REGION 1..9: note = Table A: HLA-A*02:06H
GVVQQLPET

SEQ ID NO: 3697 - protein, 9 aa, Severe acute respiratory syndrome coronavirus 2
  REGION 1..9: note = Table A: HLA-B*58:01H HLA-A*03:02H HLA-A*29:01M HLA-A*29:02H HLA-A*30:02H HLA-B*35:01M HLA-B*38:02H HLA-B*15:01H HLA-B*15:02H HLA-B*39:01H HLA-B*07:05M
VVQQLPETY

SEQ ID NO: 3698 - protein, 9 aa, Severe acute respiratory syndrome coronavirus 2
  REGION 1..9: note = Table A: HLA-B*38:02H HLA-B*15:01M
VQQLPETYF

SEQ ID NO: 3699 - protein, 9 aa, Severe acute respiratory syndrome coronavirus 2
  REGION 1..9: note = Table A: HLA-C*14:02M HLA-C*14:03M HLA-C*06:02H HLA-A*24:02M HLA-A*24:07M HLA-A*23:01H
TYFTQSRNL

SEQ ID NO: 3700 - protein, 9 aa, Severe acute respiratory syndrome coronavirus 2
  REGION 1..9: note = Table A: HLA-B*44:05H HLA-A*24:02H HLA-B*38:01H HLA-B*38:02M HLA-B*15:01H HLA-B*15:02M HLA-B*15:03M HLA-B*39:01H HLA-B*57:03H HLA-B*13:01M
TQSRNLQEF

SEQ ID NO: 3701 - protein, 9 aa, Severe acute respiratory syndrome coronavirus 2
  REGION 1..9: note = Table A: HLA-A*74:01H HLA-A*31:01H
RNLQEFKPR

SEQ ID NO: 3702 - protein, 9 aa, Severe acute respiratory syndrome coronavirus 2
  REGION 1..9: note = Table A: HLA-B*44:05H HLA-B*40:02H HLA-B*41:02H HLA-B*49:01H
QEFKPRSQM

SEQ ID NO: 3703 - protein, 9 aa, Severe acute respiratory syndrome coronavirus 2
  REGION 1..9: note = Table A: HLA-B*45:01M HLA-A*68:02H HLA-B*40:06M HLA-B*49:01H HLA-B*50:01H
MEIDFLELA

SEQ ID NO: 3704 - protein, 9 aa, Severe acute respiratory syndrome coronavirus 2
  REGION 1..9: note = Table A: HLA-B*49:01H
LELAMDEFI

SEQ ID NO: 3705 - protein, 9 aa, Severe acute respiratory syndrome coronavirus 2
  REGION 1..9: note = Table A: HLA-A*33:01H HLA-A*33:03H HLA-A*68:01H HLA-A*34:01H HLA-A*34:02M HLA-A*66:01M
LAMDEFIER

SEQ ID NO: 3706 - protein, 9 aa, Severe acute respiratory syndrome coronavirus 2
  REGION 1..9: note = Table A: HLA-B*58:01H HLA-A*11:303H HLA-A*36:01H HLA-A*29:01H HLA-A*29:02H HLA-A*01:01H HLA-B*44:03H HLA-C*04:01H HLA-C*04:03M HLA-A*02:11H HLA-A*30:02M HLA-C*15:05H HLA-A*02:07H HLA-A*02:01H HLA-A*02:02H
  REGION 1..9: note = CONT. FROM ABOVE: HLA-B*35:01H HLA-B*35:08H HLA-B*38:02M HLA- B*15:01M HLA-B*15:02H HLA-B*15:03M HLA-B*39:01H HLA-B*07:05M HLA-B*13:01H
AMDEFIERY

SEQ ID NO: 3707 - protein, 9 aa, Severe acute respiratory syndrome coronavirus 2
  REGION 1..9: note = Table A: HLA-B*18:01H HLA-B*14:02H HLA-B*07:05H
DEFIERYKL

SEQ ID NO: 3708 - protein, 9 aa, Severe acute respiratory syndrome coronavirus 2
  REGION 1..9: note = Table A: HLA-B*18:01H
IERYKLEGY

SEQ ID NO: 3709 - protein, 9 aa, Severe acute respiratory syndrome coronavirus 2
  REGION 1..9: note = Table A: HLA-A*24:02H HLA-A*24:07M HLA-A*23:01H
RYKLEGYAF

SEQ ID NO: 3710 - protein, 9 aa, Severe acute respiratory syndrome coronavirus 2
  REGION 1..9: note = Table A: HLA-B*49:01M
LEGYAFEHI

SEQ ID NO: 3711 - protein, 9 aa, Severe acute respiratory syndrome coronavirus 2
  REGION 1..9: note = Table A: HLA-A*68:02M HLA-B*51:01H HLA-B*52:01H
EGYAFEHIV

SEQ ID NO: 3712 - protein, 9 aa, Severe acute respiratory syndrome coronavirus 2
  REGION 1..9: note = Table A: HLA-C*14:02H HLA-C*14:03H HLA-A*29:02H HLA-B*15:03H
GYAFEHIVY

SEQ ID NO: 3713 - protein, 9 aa, Severe acute respiratory syndrome coronavirus 2
  REGION 1..9: note = Table A: HLA-A*68:02H HLA-C*12:03H
YAFEHIVYG

SEQ ID NO: 3714 - protein, 9 aa, Severe acute respiratory syndrome coronavirus 2
  REGION 1..9: note = Table A: HLA-B*38:02H HLA-B*39:01H
EHIVYGDFS

SEQ ID NO: 3715 - protein, 9 aa, Severe acute respiratory syndrome coronavirus 2
  REGION 1..9: note = Table A: HLA-A*11:303H HLA-C*04:03H HLA-C*03:03H HLA-C*03:04M HLA-C*15:05H HLA-A*02:07H HLA-C*17:01H HLA-C*08:01M HLA-C*08:02H HLA-B*38:02M HLA-B*39:01H HLA-C*05:01M
YGDFSHSQL

SEQ ID NO: 3716 - protein, 9 aa, Severe acute respiratory syndrome coronavirus 2
  REGION 1..9: note = Table A: HLA-C*15:05H HLA-C*15:02H
HSQLGGLHL

SEQ ID NO: 3717 - protein, 9 aa, Severe acute respiratory syndrome coronavirus 2
  REGION 1..9: note = Table A: HLA-A*02:04M HLA-A*02:05H HLA-A*02:06H HLA-A*02:02H HLA-C*08:01H HLA-B*38:02H HLA-B*13:01H HLA-B*13:02H
SQLGGLHLL

SEQ ID NO: 3718 - protein, 9 aa, Severe acute respiratory syndrome coronavirus 2
  REGION 1..9: note = Table A: HLA-B*38:02H HLA-B*13:02H
QLGGLHLLI

SEQ ID NO: 3719 - protein, 9 aa, Severe acute respiratory syndrome coronavirus 2
  REGION 1..9: note = Table A: HLA-A*02:04H
GGLHLLIGL

SEQ ID NO: 3720 - protein, 9 aa, Severe acute respiratory syndrome coronavirus 2
  REGION 1..9: note = Table A: HLA-A*74:01M HLA-A*34:01H
HLLIGLAKR

SEQ ID NO: 3721 - protein, 9 aa, Severe acute respiratory syndrome coronavirus 2
  REGION 1..9: note = Table A: HLA-B*15:03M
AKRFKESPF

SEQ ID NO: 3722 - protein, 9 aa, Severe acute respiratory syndrome coronavirus 2
  REGION 1..9: note = Table A: HLA-C*14:02H HLA-C*14:03H HLA-C*07:01H HLA-A*30:01H HLA-A*24:02H HLA-A*24:07M HLA-A*23:01H HLA-B*07:04H
RFKESPFEL

SEQ ID NO: 3723 - protein, 9 aa, Severe acute respiratory syndrome coronavirus 2
  REGION 1..9: note = Table A: HLA-B*37:01M
MDSTVKNYF

SEQ ID NO: 3724 - protein, 9 aa, Severe acute respiratory syndrome coronavirus 2
  REGION 1..9: note = Table A: HLA-C*14:03H
YFITDAQTG

SEQ ID NO: 3725 - protein, 9 aa, Severe acute respiratory syndrome coronavirus 2
  REGION 1..9: note = Table A: HLA-B*13:02M
AQTGSSKCV

SEQ ID NO: 3726 - protein, 9 aa, Severe acute respiratory syndrome coronavirus 2
  REGION 1..9: note = Table A: HLA-C*04:03M HLA-A*02:07H
VIDLLLDDF

SEQ ID NO: 3727 - protein, 9 aa, Severe acute respiratory syndrome coronavirus 2
  REGION 1..9: note = Table A: HLA-A*11:303H HLA-A*02:11H HLA-A*02:04M HLA-A*02:06H HLA-A*02:07H HLA-A*02:01M HLA-C*08:01H HLA-B*38:02H HLA-B*13:01H
LLLDDFVEI

SEQ ID NO: 3728 - protein, 9 aa, Severe acute respiratory syndrome coronavirus 2
  REGION 1..9: note = Table A: HLA-A*02:11H HLA-A*02:04H HLA-A*02:07M HLA-B*38:02H
LLDDFVEII

SEQ ID NO: 3729 - protein, 9 aa, Severe acute respiratory syndrome coronavirus 2
  REGION 1..9: note = Table A: HLA-B*44:02H HLA-B*44:05M HLA-B*44:03H HLA-B*40:01M HLA-B*40:02M HLA-B*41:02H HLA-B*49:01M
VEIIKSQDL

SEQ ID NO: 3730 - protein, 9 aa, Severe acute respiratory syndrome coronavirus 2
  REGION 1..9: note = Table A: HLA-C*15:05H HLA-A*02:03H HLA-B*38:02H HLA-B*13:02M
IIKSQDLSV

SEQ ID NO: 3731 - protein, 9 aa, Severe acute respiratory syndrome coronavirus 2
  REGION 1..9: note = Table A: HLA-A*11:303H HLA-A*03:02M HLA-A*11:01M HLA-A*11:02M HLA-B*27:02H HLA-A*34:02H HLA-C*07:27H HLA-B*38:02H HLA-B*39:01H HLA-B*13:02H
SQDLSVVSK

SEQ ID NO: 3732 - protein, 9 aa, Severe acute respiratory syndrome coronavirus 2
  REGION 1..9: note = Table A: HLA-B*37:01H HLA-B*40:02H HLA-B*49:01H
QDLSVVSKV

SEQ ID NO: 3733 - protein, 9 aa, Severe acute respiratory syndrome coronavirus 2
  REGION 1..9: note = Table A: HLA-A*68:02H HLA-B*38:02H
DLSVVSKVV

SEQ ID NO: 3734 - protein, 9 aa, Severe acute respiratory syndrome coronavirus 2
  REGION 1..9: note = Table A: HLA-A*11:303H HLA-A*03:01H HLA-A*11:01H HLA-A*11:02H HLA-A*26:01H HLA-A*26:02H HLA-A*02:11M HLA-A*68:01H HLA-A*68:02H HLA-C*15:05H HLA-C*12:03H HLA-C*15:02M HLA-A*02:04M HLA-A*02:05H HLA-A*02:06H
  REGION 1..9: note = CONT. FROM ABOVE: HLA-A*02:07M HLA-A*02:08H HLA-A*02:01M HLA- A*02:02M HLA-A*02:03H HLA-C*17:01H HLA-C*08:01H HLA-B*38:02M HLA-B*40:06M HLA-B*13:02M HLA-C*07:04H
SVVSKVVKV

SEQ ID NO: 3735 - protein, 9 aa, Severe acute respiratory syndrome coronavirus 2
  REGION 1..9: note = Table A: HLA-A*02:08M HLA-B*07:04H
VVSKVVKVT

SEQ ID NO: 3736 - protein, 9 aa, Severe acute respiratory syndrome coronavirus 2
  REGION 1..9: note = Table A: HLA-B*58:02H HLA-B*57:01M HLA-B*52:01M HLA-B*57:03M
VSKVVKVTI

SEQ ID NO: 3737 - protein, 9 aa, Severe acute respiratory syndrome coronavirus 2
  REGION 1..9: note = Table A: HLA-B*58:01M HLA-A*36:01H HLA-A*29:02H HLA-A*30:02H HLA-B*38:02H HLA-B*15:01M HLA-B*15:03H HLA-B*57:03H
KVVKVTIDY

SEQ ID NO: 3738 - protein, 9 aa, Severe acute respiratory syndrome coronavirus 2
  REGION 1..9: note = Table A: HLA-A*02:05H
VVKVTIDYT

SEQ ID NO: 3739 - protein, 9 aa, Severe acute respiratory syndrome coronavirus 2
  REGION 1..9: note = Table A: HLA-A*02:08H HLA-B*57:03H
KVTIDYTEI

SEQ ID NO: 3740 - protein, 9 aa, Severe acute respiratory syndrome coronavirus 2
  REGION 1..9: note = Table A: HLA-C*04:01H HLA-C*04:03M HLA-A*02:07M HLA-B*35:02H HLA-B*35:08M HLA-C*08:01H HLA-C*08:02M HLA-B*35:12H HLA-B*38:01H HLA-B*38:02M HLA-B*15:02H HLA-B*39:01H HLA-C*05:01M HLA-B*13:01H
TIDYTEISF

SEQ ID NO: 3741 - protein, 9 aa, Severe acute respiratory syndrome coronavirus 2
  REGION 1..9: note = Table A: HLA-B*58:01M HLA-A*36:01H HLA-B*57:03H
YTEISFMLW

SEQ ID NO: 3742 - protein, 9 aa, Severe acute respiratory syndrome coronavirus 2
  REGION 1..9: note = Table A: HLA-B*50:01H
TEISFMLWC

SEQ ID NO: 3743 - protein, 9 aa, Severe acute respiratory syndrome coronavirus 2
  REGION 1..9: note = Table A: HLA-A*34:02H
EISFMLWCK

SEQ ID NO: 3744 - protein, 9 aa, Severe acute respiratory syndrome coronavirus 2
  REGION 1..9: note = Table A: HLA-B*38:02H HLA-B*15:03M
CKDGHVETF

SEQ ID NO: 3745 - protein, 9 aa, Severe acute respiratory syndrome coronavirus 2
  REGION 1..9: note = Table A: HLA-A*36:01H
KDGHVETFY

SEQ ID NO: 3746 - protein, 9 aa, Severe acute respiratory syndrome coronavirus 2
  REGION 1..9: note = Table A: HLA-A*11:01H HLA-A*11:02H
GHVETFYPK

SEQ ID NO: 3747 - protein, 9 aa, Severe acute respiratory syndrome coronavirus 2
  REGION 1..9: note = Table A: HLA-C*04:03H HLA-A*02:11H HLA-B*53:01H HLA-A*68:02H HLA-B*35:03H HLA-A*02:04H HLA-A*02:05H HLA-A*02:06H HLA-A*02:07M HLA-A*02:02H HLA-B*35:02H HLA-C*08:01H HLA-B*35:12H HLA-B*38:02H HLA-B*40:06H HLA-B*13:01H
HVETFYPKL

SEQ ID NO: 3748 - protein, 9 aa, Severe acute respiratory syndrome coronavirus 2
  REGION 1..9: note = Table A: HLA-A*34:02H
ETFYPKLQS

SEQ ID NO: 3749 - protein, 9 aa, Severe acute respiratory syndrome coronavirus 2
  REGION 1..9: note = Table A: HLA-B*56:01M HLA-B*55:02M HLA-B*55:01H HLA-B*54:01H
YPKLQSSQA

SEQ ID NO: 3750 - protein, 9 aa, Severe acute respiratory syndrome coronavirus 2
  REGION 1..9: note = Table A: HLA-A*02:04H
SSQAWQPGV

SEQ ID NO: 3751 - protein, 9 aa, Severe acute respiratory syndrome coronavirus 2
  REGION 1..9: note = Table A: HLA-B*39:06H HLA-B*39:01H
SQAWQPGVA

SEQ ID NO: 3752 - protein, 9 aa, Severe acute respiratory syndrome coronavirus 2
  REGION 1..9: note = Table A: HLA-A*11:303M HLA-B*46:01H HLA-C*03:03H HLA-C*03:02M HLA-C*03:04M HLA-B*35:03M HLA-C*15:05M HLA-C*12:02H HLA-A*34:01H HLA-C*07:27H HLA-B*35:01H HLA-B*35:02M HLA-B*35:08M HLA-B*51:01H HLA-B*35:07H
  REGION 1..9: note = CONT. FROM ABOVE: HLA-C*08:01M HLA-B*35:12H HLA-B*38:02M HLA- B*54:01H HLA-B*07:02H HLA-B*07:04H HLA-B*15:01H HLA-B*15:02H HLA-B*15:03H HLA-B*07:05M HLA-B*15:11H
QAWQPGVAM

SEQ ID NO: 3753 - protein, 9 aa, Severe acute respiratory syndrome coronavirus 2
  REGION 1..9: note = Table A: HLA-C*15:05H
QPGVAMPNL

SEQ ID NO: 3754 - protein, 9 aa, Severe acute respiratory syndrome coronavirus 2
  REGION 1..9: note = Table A: HLA-A*03:01M HLA-A*03:02H HLA-A*11:01M HLA-A*11:02M HLA-A*36:01H HLA-A*34:02M HLA-C*07:27H
GVAMPNLYK

SEQ ID NO: 3755 - protein, 9 aa, Severe acute respiratory syndrome coronavirus 2
  REGION 1..9: note = Table A: HLA-B*58:01H HLA-B*58:02H HLA-A*11:303M HLA-C*16:01H HLA-B*46:01H HLA-C*03:03H HLA-C*12:05H HLA-A*02:11H HLA-C*03:02M HLA-C*03:04M HLA-B*35:03H HLA-C*15:05H HLA-C*12:02H HLA-C*12:03H HLA-A*02:04H
  REGION 1..9: note = CONT. FROM ABOVE: HLA-A*02:02H HLA-B*35:01H HLA-C*17:01H HLA- B*35:07H HLA-C*08:01H HLA-B*38:02H HLA-B*07:05H HLA-B*57:03M HLA-C*02:02M HLA-C*07:04H
VAMPNLYKM

SEQ ID NO: 3756 - protein, 9 aa, Severe acute respiratory syndrome coronavirus 2
  REGION 1..9: note = Table A: HLA-A*33:03H HLA-A*34:01H HLA-A*66:01H
MPNLYKMQR

SEQ ID NO: 3757 - protein, 9 aa, Severe acute respiratory syndrome coronavirus 2
  REGION 1..9: note = Table A: HLA-A*24:07H
LYKMQRMLL

SEQ ID NO: 3758 - protein, 9 aa, Severe acute respiratory syndrome coronavirus 2
  REGION 1..9: note = Table A: HLA-B*38:02H
MQRMLLEKC

SEQ ID NO: 3759 - protein, 9 aa, Severe acute respiratory syndrome coronavirus 2
  REGION 1..9: note = Table A: HLA-B*18:01H
LEKCDLQNY

SEQ ID NO: 3760 - protein, 9 aa, Severe acute respiratory syndrome coronavirus 2
  REGION 1..9: note = Table A: HLA-B*39:01H
DLQNYGDSA

SEQ ID NO: 3761 - protein, 9 aa, Severe acute respiratory syndrome coronavirus 2
  REGION 1..9: note = Table A: HLA-B*35:03H HLA-C*15:05H HLA-B*38:02H HLA-B*39:01H
QNYGDSATL

SEQ ID NO: 3762 - protein, 9 aa, Severe acute respiratory syndrome coronavirus 2
  REGION 1..9: note = Table A: HLA-A*03:02H HLA-A*11:01H HLA-A*11:02H HLA-A*36:01H HLA-A*34:02M
YGDSATLPK

SEQ ID NO: 3763 - protein, 9 aa, Severe acute respiratory syndrome coronavirus 2
  REGION 1..9: note = Table A: HLA-A*68:02H
DSATLPKGI

SEQ ID NO: 3764 - protein, 9 aa, Severe acute respiratory syndrome coronavirus 2
  REGION 1..9: note = Table A: HLA-B*35:02H HLA-B*35:12H
SATLPKGIM

SEQ ID NO: 3765 - protein, 9 aa, Severe acute respiratory syndrome coronavirus 2
  REGION 1..9: note = Table A: HLA-A*11:303H HLA-C*15:05H HLA-C*15:02H HLA-B*57:03M HLA-C*07:04H
ATLPKGIMM

SEQ ID NO: 3766 - protein, 9 aa, Severe acute respiratory syndrome coronavirus 2
  REGION 1..9: note = Table A: HLA-B*42:01H HLA-B*56:01M HLA-B*08:01H HLA-B*55:02M HLA-A*68:02H HLA-C*15:05H HLA-B*55:01M HLA-B*51:01M HLA-B*38:02H HLA-B*54:01M HLA-B*07:02H HLA-B*07:04M
LPKGIMMNV

SEQ ID NO: 3767 - protein, 9 aa, Severe acute respiratory syndrome coronavirus 2
  REGION 1..9: note = Table A: HLA-A*29:02H HLA-A*30:02H HLA-B*38:02H HLA-B*15:01M HLA-B*15:02H HLA-B*07:05H
GIMMNVAKY

SEQ ID NO: 3768 - protein, 9 aa, Severe acute respiratory syndrome coronavirus 2
  REGION 1..9: note = Table A: HLA-A*02:11H
IMMNVAKYT

SEQ ID NO: 3769 - protein, 9 aa, Severe acute respiratory syndrome coronavirus 2
  REGION 1..9: note = Table A: HLA-B*15:03H
AKYTQLCQY

SEQ ID NO: 3770 - protein, 9 aa, Severe acute respiratory syndrome coronavirus 2
  REGION 1..9: note = Table A: HLA-A*24:02H HLA-A*24:07H HLA-A*23:01H
KYTQLCQYL

SEQ ID NO: 3771 - protein, 9 aa, Severe acute respiratory syndrome coronavirus 2
  REGION 1..9: note = Table A: HLA-A*02:04H HLA-A*02:02H HLA-B*38:02H
QLCQYLNTL

SEQ ID NO: 3772 - protein, 9 aa, Severe acute respiratory syndrome coronavirus 2
  REGION 1..9: note = Table A: HLA-B*48:01H HLA-C*15:05H HLA-B*52:01M HLA-B*38:02H HLA-B*15:01H HLA-B*15:03H HLA-B*13:02M HLA-B*15:10H
CQYLNTLTL

SEQ ID NO: 3773 - protein, 9 aa, Severe acute respiratory syndrome coronavirus 2
  REGION 1..9: note = Table A: HLA-A*02:11H HLA-A*02:04H HLA-A*02:03H HLA-B*38:02H HLA-B*13:02H
YLNTLTLAV

SEQ ID NO: 3774 - protein, 9 aa, Severe acute respiratory syndrome coronavirus 2
  REGION 1..9: note = Table A: HLA-A*29:01H HLA-A*29:02H HLA-B*35:01H HLA-B*07:05H
NTLTLAVPY

SEQ ID NO: 3775 - protein, 9 aa, Severe acute respiratory syndrome coronavirus 2
  REGION 1..9: note = Table A: HLA-A*02:11H HLA-B*57:03H
LTLAVPYNM

SEQ ID NO: 3776 - protein, 9 aa, Severe acute respiratory syndrome coronavirus 2
  REGION 1..9: note = Table A: HLA-A*74:01H HLA-A*33:03H HLA-A*68:01H HLA-A*34:01M HLA-A*66:01H
TLAVPYNMR

SEQ ID NO: 3777 - protein, 9 aa, Severe acute respiratory syndrome coronavirus 2
  REGION 1..9: note = Table A: HLA-C*14:03H HLA-A*24:02M HLA-A*24:07H HLA-A*23:01M
PYNMRVIHF

SEQ ID NO: 3778 - protein, 9 aa, Severe acute respiratory syndrome coronavirus 2
  REGION 1..9: note = Table A: HLA-B*41:02H
SDKGVAPGT

SEQ ID NO: 3779 - protein, 9 aa, Severe acute respiratory syndrome coronavirus 2
  REGION 1..9: note = Table A: HLA-A*11:303H HLA-C*15:05H HLA-B*49:01H
KGVAPGTAV

SEQ ID NO: 3780 - protein, 9 aa, Severe acute respiratory syndrome coronavirus 2
  REGION 1..9: note = Table A: HLA-B*48:01M HLA-A*11:303H HLA-A*26:03H HLA-C*03:04H HLA-A*68:02H HLA-B*35:03H HLA-C*15:05M HLA-C*01:02H HLA-A*02:05H HLA-A*02:06H HLA-A*02:08H HLA-B*14:01H HLA-A*02:02M HLA-A*02:03M HLA-A*34:01H
  REGION 1..9: note = CONT. FROM ABOVE: HLA-B*35:02H HLA-C*17:01H HLA-C*08:03H HLA- B*35:12H HLA-B*38:02M HLA-B*40:01H HLA-B*40:02H HLA-B*07:02M HLA-B*15:01M HLA-B*15:02M HLA-B*39:01M HLA-B*07:05M HLA-B*15 :10H HLA-C*07:04H
GVAPGTAVL

SEQ ID NO: 3781 - protein, 9 aa, Severe acute respiratory syndrome coronavirus 2
  REGION 1..9: note = Table A: HLA-A*74:01H HLA-A*68:01M HLA-A*34:01H
VAPGTAVLR

SEQ ID NO: 3782 - protein, 9 aa, Severe acute respiratory syndrome coronavirus 2
  REGION 1..9: note = Table A: HLA-B*48:01M HLA-B*52:01H HLA-B*15:01H HLA-B*15:03M HLA-B*13:01M HLA-B*13:02H
RQWLPTGTL

SEQ ID NO: 3783 - protein, 9 aa, Severe acute respiratory syndrome coronavirus 2
  REGION 1..9: note = Table A: HLA-A*24:02H HLA-A*24:07H HLA-A*23:01H
QWLPTGTLL

SEQ ID NO: 3784 - protein, 9 aa, Severe acute respiratory syndrome coronavirus 2
  REGION 1..9: note = Table A: HLA-B*13:02H
WLPTGTLLV

SEQ ID NO: 3785 - protein, 9 aa, Severe acute respiratory syndrome coronavirus 2
  REGION 1..9: note = Table A: HLA-C*04:03H
LVDSDLNDF

SEQ ID NO: 3786 - protein, 9 aa, Severe acute respiratory syndrome coronavirus 2
  REGION 1..9: note = Table A: HLA-B*38:02H
DLNDFVSDA

SEQ ID NO: 3787 - protein, 9 aa, Severe acute respiratory syndrome coronavirus 2
  REGION 1..9: note = Table A: HLA-A*11:303H HLA-A*26:03H HLA-C*03:03H HLA-C*03:04M HLA-A*68:02H HLA-B*35:03H HLA-C*15:05H HLA-C*01:02H HLA-A*02:05H HLA-A*02:06H HLA-A*02:08H HLA-A*02:02M HLA-A*02:03H HLA-A*34:01H HLA-B*35:01H
  REGION 1..9: note = CONT. FROM ABOVE: HLA-B*35:02H HLA-B*35:08H HLA-C*08:01M HLA- C*08:02H HLA-B*35:12H HLA-B*38:01H HLA-B*38:02H HLA-B*15:02H HLA-B*39:01H HLA-C*07:04H
FVSDADSTL

SEQ ID NO: 3788 - protein, 9 aa, Severe acute respiratory syndrome coronavirus 2
  REGION 1..9: note = Table A: HLA-C*05:01H
VSDADSTLI

SEQ ID NO: 3789 - protein, 9 aa, Severe acute respiratory syndrome coronavirus 2
  REGION 1..9: note = Table A: HLA-A*02:11H HLA-A*02:05H HLA-A*02:06H HLA-A*02:01M HLA-A*02:02H HLA-A*02:03M HLA-B*38:02M HLA-B*13:02H
TLIGDCATV

SEQ ID NO: 3790 - protein, 9 aa, Severe acute respiratory syndrome coronavirus 2
  REGION 1..9: note = Table A: HLA-B*58:01H HLA-B*58:02H HLA-B*57:01M HLA-A*25:01H HLA-B*53:01H HLA-B*15:13H HLA-B*57:03H
ATVHTANKW

SEQ ID NO: 3791 - protein, 9 aa, Severe acute respiratory syndrome coronavirus 2
  REGION 1..9: note = Table A: HLA-B*38:02H
VHTANKWDL

SEQ ID NO: 3792 - protein, 9 aa, Severe acute respiratory syndrome coronavirus 2
  REGION 1..9: note = Table A: HLA-A*68:02H
HTANKWDLI

SEQ ID NO: 3793 - protein, 9 aa, Severe acute respiratory syndrome coronavirus 2
  REGION 1..9: note = Table A: HLA-B*53:01H HLA-B*35:03H HLA-C*15:05H HLA-C*15:02M
TANKWDLII

SEQ ID NO: 3794 - protein, 9 aa, Severe acute respiratory syndrome coronavirus 2
  REGION 1..9: note = Table A: HLA-C*04:01M HLA-C*04:03H
KWDLIISDM

SEQ ID NO: 3795 - protein, 9 aa, Severe acute respiratory syndrome coronavirus 2
  REGION 1..9: note = Table A: HLA-A*03:02H HLA-A*11:01H HLA-A*11:02H HLA-A*36:01H HLA-A*34:02H
IISDMYDPK

SEQ ID NO: 3796 - protein, 9 aa, Severe acute respiratory syndrome coronavirus 2
  REGION 1..9: note = Table A: HLA-A*33:03H HLA-C*06:02H HLA-C*04:01M HLA-C*04:03M HLA-A*02:11M HLA-A*02:07H HLA-A*02:02H HLA-A*24:02H HLA-B*51:01H HLA-B*52:01H HLA-C*08:01H HLA-A*23:01H HLA-B*38:02H HLA-B*49:01H
MYDPKTKNV

SEQ ID NO: 3797 - protein, 9 aa, Severe acute respiratory syndrome coronavirus 2
  REGION 1..9: note = Table A: HLA-A*33:03H HLA-B*08:01H HLA-A*34:02H
DPKTKNVTK

SEQ ID NO: 3798 - protein, 9 aa, Severe acute respiratory syndrome coronavirus 2
  REGION 1..9: note = Table A: HLA-B*44:02H HLA-B*44:05M HLA-B*44:03M HLA-B*37:01M
KENDSKEGF

SEQ ID NO: 3799 - protein, 9 aa, Severe acute respiratory syndrome coronavirus 2
  REGION 1..9: note = Table A: HLA-A*25:01H HLA-A*33:01H HLA-A*26:01M HLA-B*38:02H HLA-B*15:02H
DSKEGFFTY

SEQ ID NO: 3800 - protein, 9 aa, Severe acute respiratory syndrome coronavirus 2
  REGION 1..9: note = Table A: HLA-B*38:02H
SKEGFFTYI

SEQ ID NO: 3801 - protein, 9 aa, Severe acute respiratory syndrome coronavirus 2
  REGION 1..9: note = Table A: HLA-A*34:02H
YICGFIQQK

SEQ ID NO: 3802 - protein, 9 aa, Severe acute respiratory syndrome coronavirus 2
  REGION 1..9: note = Table A: HLA-C*14:02H HLA-C*14:03M HLA-C*15:05H
GFIQQKLAL

SEQ ID NO: 3803 - protein, 9 aa, Severe acute respiratory syndrome coronavirus 2
  REGION 1..9: note = Table A: HLA-A*11:303H HLA-C*03:03H HLA-C*12:05H HLA-C*03:02H HLA-C*03:04H HLA-B*35:03H HLA-C*15:05M HLA-B*35:01H HLA-B*51:01H HLA-C*08:01H HLA-B*38:02M HLA-B*54:01H HLA-B*39:01H HLA-B*57:03H
LALGGSVAI

SEQ ID NO: 3804 - protein, 9 aa, Severe acute respiratory syndrome coronavirus 2
  REGION 1..9: note = Table A: HLA-A*03:01H HLA-A*03:02M HLA-A*11:01H HLA-A*11:02H
ALGGSVAIK

SEQ ID NO: 3805 - protein, 9 aa, Severe acute respiratory syndrome coronavirus 2
  REGION 1..9: note = Table A: HLA-A*11:303H HLA-A*03:01M HLA-A*03:02H HLA-A*11:01M HLA-A*11:02H HLA-B*46:01H HLA-A*68:01H HLA-C*12:02H HLA-A*02:05H HLA-A*34:02M HLA-B*38:02H HLA-B*15:01H
SVAIKITEH

SEQ ID NO: 3806 - protein, 9 aa, Severe acute respiratory syndrome coronavirus 2
  REGION 1..9: note = Table A: HLA-B*58:01H HLA-B*58:02H HLA-B*57:01H HLA-A*30:02H HLA-B*15:13H HLA-A*32:01H HLA-B*57:03M HLA-B*13:01H
AIKITEHSW

SEQ ID NO: 3807 - protein, 9 aa, Severe acute respiratory syndrome coronavirus 2
  REGION 1..9: note = Table A: HLA-A*02:11H HLA-A*02:08H HLA-A*02:02H
KITEHSWNA

SEQ ID NO: 3808 - protein, 9 aa, Severe acute respiratory syndrome coronavirus 2
  REGION 1..9: note = Table A: HLA-B*44:05H HLA-B*40:01H HLA-B*40:02H HLA-B*41:02H HLA-B*49:01H
TEHSWNADL

SEQ ID NO: 3809 - protein, 9 aa, Severe acute respiratory syndrome coronavirus 2
  REGION 1..9: note = Table A: HLA-B*38:01H HLA-B*38:02M HLA-B*39:01M
EHSWNADLY

SEQ ID NO: 3810 - protein, 9 aa, Severe acute respiratory syndrome coronavirus 2
  REGION 1..9: note = Table A: HLA-A*34:02M
HSWNADLYK

SEQ ID NO: 3811 - protein, 9 aa, Severe acute respiratory syndrome coronavirus 2
  REGION 1..9: note = Table A: HLA-A*24:02H HLA-A*24:07H
SWNADLYKL

SEQ ID NO: 3812 - protein, 9 aa, Severe acute respiratory syndrome coronavirus 2
  REGION 1..9: note = Table A: HLA-A*26:01H
DLYKLMGHF

SEQ ID NO: 3813 - protein, 9 aa, Severe acute respiratory syndrome coronavirus 2
  REGION 1..9: note = Table A: HLA-B*58:01H HLA-A*32:01M HLA-B*57:03M HLA-B*13:01H
KLMGHFAWW

SEQ ID NO: 3814 - protein, 9 aa, Severe acute respiratory syndrome coronavirus 2
  REGION 1..9: note = Table A: HLA-B*38:02H HLA-B*15:03H
GHFAWWTAF

SEQ ID NO: 3815 - protein, 9 aa, Severe acute respiratory syndrome coronavirus 2
  REGION 1..9: note = Table A: HLA-B*56:01H HLA-B*55:02M HLA-C*15:05H HLA-B*55:01H HLA-A*02:05H HLA-B*35:01H HLA-C*08:01H HLA-B*38:02H HLA-B*39:06H HLA-B*54:01M
TAFVTNVNA

SEQ ID NO: 3816 - protein, 9 aa, Severe acute respiratory syndrome coronavirus 2
  REGION 1..9: note = Table A: HLA-A*26:03H HLA-A*68:02H HLA-B*38:02H
FVTNVNASS

SEQ ID NO: 3817 - protein, 9 aa, Severe acute respiratory syndrome coronavirus 2
  REGION 1..9: note = Table A: HLA-B*15:01H HLA-B*07:05H
VNASSSEAF

SEQ ID NO: 3818 - protein, 9 aa, Severe acute respiratory syndrome coronavirus 2
  REGION 1..9: note = Table A: HLA-B*35:03H HLA-B*35:02M HLA-B*35:12H HLA-B*38:02H
NASSSEAFL

SEQ ID NO: 3819 - protein, 9 aa, Severe acute respiratory syndrome coronavirus 2
  REGION 1..9: note = Table A: HLA-A*33:03H HLA-A*26:01H HLA-B*18:01H HLA-A*68:02H HLA-A*34:01H HLA-A*34:02H HLA-B*35:01M HLA-B*35:07M HLA-B*38:02M HLA-B*15:02M HLA-B*07:05H HLA-A*66:01H
EAFLIGCNY

SEQ ID NO: 3820 - protein, 9 aa, Severe acute respiratory syndrome coronavirus 2
  REGION 1..9: note = Table A: HLA-C*14:03H
AFLIGCNYL

SEQ ID NO: 3821 - protein, 9 aa, Severe acute respiratory syndrome coronavirus 2
  REGION 1..9: note = Table A: HLA-A*02:11H HLA-A*02:02H HLA-B*38:02H HLA-B*13:01H HLA-B*13:02H
YLGKPREQI

SEQ ID NO: 3822 - protein, 9 aa, Severe acute respiratory syndrome coronavirus 2
  REGION 1..9: note = Table A: HLA-A*30:02H HLA-C*15:05H HLA-B*35:01H HLA-B*35:07M HLA-B*38:02H HLA-B*07:02H HLA-B*07:04H HLA-B*15:02H HLA-B*15:03H HLA-B*07:05H
KPREQIDGY

SEQ ID NO: 3823 - protein, 9 aa, Severe acute respiratory syndrome coronavirus 2
  REGION 1..9: note = Table A: HLA-B*44:05H HLA-B*37:01H HLA-B*40:01M HLA-B*40:02H HLA-B*41:02H
REQIDGYVM

SEQ ID NO: 3824 - protein, 9 aa, Severe acute respiratory syndrome coronavirus 2
  REGION 1..9: note = Table A: HLA-A*26:03H HLA-A*34:01H HLA-B*38:02H
EQIDGYVMH

SEQ ID NO: 3825 - protein, 9 aa, Severe acute respiratory syndrome coronavirus 2
  REGION 1..9: note = Table A: HLA-A*02:07H
QIDGYVMHA

SEQ ID NO: 3826 - protein, 9 aa, Severe acute respiratory syndrome coronavirus 2
  REGION 1..9: note = Table A: HLA-B*18:01H HLA-B*35:01H HLA-B*51:01H HLA-B*38:02H HLA-B*15:02H HLA-B*07:05H
DGYVMHANY

SEQ ID NO: 3827 - protein, 9 aa, Severe acute respiratory syndrome coronavirus 2
  REGION 1..9: note = Table A: HLA-A*24:02H HLA-A*24:07H HLA-A*23:01H
GYVMHANYI

SEQ ID NO: 3828 - protein, 9 aa, Severe acute respiratory syndrome coronavirus 2
  REGION 1..9: note = Table A: HLA-B*58:01H HLA-A*24:02H HLA-A*24:07M HLA-A*23:01H HLA-B*38:02H HLA-A*32:01H HLA-B*57:03H HLA-B*13:01H
VMHANYIFW

SEQ ID NO: 3829 - protein, 9 aa, Severe acute respiratory syndrome coronavirus 2
  REGION 1..9: note = Table A: HLA-C*14:03H HLA-A*24:07H
IFWRNTNPI

SEQ ID NO: 3830 - protein, 9 aa, Severe acute respiratory syndrome coronavirus 2
  REGION 1..9: note = Table A: HLA-C*06:02M HLA-B*27:05H HLA-C*07:02H HLA-B*38:02H HLA-B*39:01H HLA-C*07:04H
WRNTNPIQL

SEQ ID NO: 3831 - protein, 9 aa, Severe acute respiratory syndrome coronavirus 2
  REGION 1..9: note = Table A: HLA-B*07:05H
TNPIQLSSY

SEQ ID NO: 3832 - protein, 9 aa, Severe acute respiratory syndrome coronavirus 2
  REGION 1..9: note = Table A: HLA-B*58:01H HLA-B*57:03M
YSLFDMSKF

SEQ ID NO: 3833 - protein, 9 aa, Severe acute respiratory syndrome coronavirus 2
  REGION 1..9: note = Table A: HLA-C*04:03H
LFDMSKFPL

SEQ ID NO: 3834 - protein, 9 aa, Severe acute respiratory syndrome coronavirus 2
  REGION 1..9: note = Table A: HLA-A*11:02H HLA-A*34:02M
FDMSKFPLK

SEQ ID NO: 3835 - protein, 9 aa, Severe acute respiratory syndrome coronavirus 2
  REGION 1..9: note = Table A: HLA-C*07:01H HLA-A*68:02H HLA-C*15:05M HLA-A*02:02H HLA-A*34:02H HLA-B*51:01H HLA-B*38:02M HLA-B*07:05M HLA-B*13:02H
DMSKFPLKL

SEQ ID NO: 3836 - protein, 9 aa, Severe acute respiratory syndrome coronavirus 2
  REGION 1..9: note = Table A: HLA-A*74:01M HLA-A*33:01M HLA-A*33:03H HLA-A*34:01M HLA-A*34:02M HLA-A*31:01H HLA-A*66:01H
MSKFPLKLR

SEQ ID NO: 3837 - protein, 9 aa, Severe acute respiratory syndrome coronavirus 2
  REGION 1..9: note = Table A: HLA-B*56:01H HLA-B*55:02H HLA-B*55:01H HLA-B*54:01M
FPLKLRGTA

SEQ ID NO: 3838 - protein, 9 aa, Severe acute respiratory syndrome coronavirus 2
  REGION 1..9: note = Table A: HLA-B*08:01H HLA-B*07:04H
PLKLRGTAV

SEQ ID NO: 3839 - protein, 9 aa, Severe acute respiratory syndrome coronavirus 2
  REGION 1..9: note = Table A: HLA-B*14:01H
LRGTAVMSL

SEQ ID NO: 3840 - protein, 9 aa, Severe acute respiratory syndrome coronavirus 2
  REGION 1..9: note = Table A: HLA-A*03:01H
RGTAVMSLK

SEQ ID NO: 3841 - protein, 9 aa, Severe acute respiratory syndrome coronavirus 2
  REGION 1..9: note = Table A: HLA-B*44:05H HLA-B*40:01H HLA-B*40:02H HLA-B*13:01H HLA-B*49:01M
KEGQINDMI

SEQ ID NO: 3842 - protein, 9 aa, Severe acute respiratory syndrome coronavirus 2
  REGION 1..9: note = Table A: HLA-A*11:303H HLA-A*68:02H HLA-B*35:03H HLA-C*15:05M HLA-C*15:02M HLA-A*02:04M HLA-A*02:05H HLA-A*02:07H HLA-A*02:02H HLA-A*02:03H HLA-C*08:01H HLA-B*38:02M HLA-B*07:05H HLA-B*13:02H HLA-C*07:04H
QINDMILSL

SEQ ID NO: 3843 - protein, 9 aa, Severe acute respiratory syndrome coronavirus 2
  REGION 1..9: note = Table A: HLA-C*04:03M
INDMILSLL

SEQ ID NO: 3844 - protein, 9 aa, Severe acute respiratory syndrome coronavirus 2
  REGION 1..9: note = Table A: HLA-A*34:02H
DMILSLLSK

SEQ ID NO: 3845 - protein, 9 aa, Severe acute respiratory syndrome coronavirus 2
  REGION 1..9: note = Table A: HLA-A*74:01H
ILSLLSKGR

SEQ ID NO: 3846 - protein, 9 aa, Severe acute respiratory syndrome coronavirus 2
  REGION 1..9: note = Table A: HLA-A*74:01M
RLIIRENNR

SEQ ID NO: 3847 - protein, 9 aa, Severe acute respiratory syndrome coronavirus 2
  REGION 1..9: note = Table A: HLA-B*07:04H
IIRENNRVV

SEQ ID NO: 3848 - protein, 9 aa, Severe acute respiratory syndrome coronavirus 2
  REGION 1..9: note = Table A: HLA-B*38:02H
IRENNRVVI

SEQ ID NO: 3849 - protein, 9 aa, Severe acute respiratory syndrome coronavirus 2
  REGION 1..9: note = Table A: HLA-B*14:01H HLA-B*39:01H
NRVVISSDV

SEQ ID NO: 3850 - protein, 9 aa, Severe acute respiratory syndrome coronavirus 2
  REGION 1..9: note = Table A: HLA-A*02:05H HLA-A*02:08H HLA-C*08:01H HLA-B*38:02H HLA-B*13:01M
RVVISSDVL

SEQ ID NO: 3851 - protein, 9 aa, Severe acute respiratory syndrome coronavirus 2
  REGION 1..9: note = Table A: HLA-A*68:02H HLA-C*15:05H HLA-A*02:05H HLA-A*02:06M HLA-A*02:08H HLA-A*02:01H HLA-C*08:01H HLA-B*38:02H HLA-B*13:02H
VVISSDVLV

SEQ ID NO: 3852 - protein, 9 aa, Severe acute respiratory syndrome coronavirus 2
  REGION 1..9: note = Table A: HLA-A*68:02H
ISSDVLVNN

SEQ ID NO: 3853 - protein, 10 aa, Severe acute respiratory syndrome coronavirus 2
  REGION 1..10: note = Table A: HLA-A*68:01H HLA-A*34:02H
ESLVPGFNEK

SEQ ID NO: 3854 - protein, 10 aa, Severe acute respiratory syndrome coronavirus 2
  REGION 1..10: note = Table A: HLA-A*02:02H
SLVPGFNEKT

SEQ ID NO: 3855 - protein, 10 aa, Severe acute respiratory syndrome coronavirus 2
  REGION 1..10: note = Table A: HLA-B*38:01H HLA-B*38:02M HLA-B*39:01H HLA-B*15:10M
THVQLSLPVL

SEQ ID NO: 3856 - protein, 10 aa, Severe acute respiratory syndrome coronavirus 2
  REGION 1..10: note = Table A: HLA-B*13:02H
VQLSLPVLQV

SEQ ID NO: 3857 - protein, 10 aa, Severe acute respiratory syndrome coronavirus 2
  REGION 1..10: note = Table A: HLA-B*35:03H HLA-C*15:05H HLA-B*07:02H
LPVLQVRDVL

SEQ ID NO: 3858 - protein, 10 aa, Severe acute respiratory syndrome coronavirus 2
  REGION 1..10: note = Table A: HLA-B*07:04H
QVRDVLVRGF

SEQ ID NO: 3859 - protein, 10 aa, Severe acute respiratory syndrome coronavirus 2
  REGION 1..10: note = Table A: HLA-A*02:02H HLA-B*38:02H
VLVRGFGDSV

SEQ ID NO: 3860 - protein, 10 aa, Severe acute respiratory syndrome coronavirus 2
  REGION 1..10: note = Table A: HLA-A*68:01H
SVEEVLSEAR

SEQ ID NO: 3861 - protein, 10 aa, Severe acute respiratory syndrome coronavirus 2
  REGION 1..10: note = Table A: HLA-A*33:03H HLA-A*68:02H HLA-A*34:01H HLA-A*34:02H
EVLSEARQHL

SEQ ID NO: 3862 - protein, 10 aa, Severe acute respiratory syndrome coronavirus 2
  REGION 1..10: note = Table A: HLA-A*03:02H
VLSEARQHLK

SEQ ID NO: 3863 - protein, 10 aa, Severe acute respiratory syndrome coronavirus 2
  REGION 1..10: note = Table A: HLA-B*38:02M HLA-B*39:01H
QHLKDGTCGL

SEQ ID NO: 3864 - protein, 10 aa, Severe acute respiratory syndrome coronavirus 2
  REGION 1..10: note = Table A: HLA-A*03:02M HLA-A*11:01M HLA-A*11:02H HLA-B*27:02H HLA-C*07:27H
GTCGLVEVEK

SEQ ID NO: 3865 - protein, 10 aa, Severe acute respiratory syndrome coronavirus 2
  REGION 1..10: note = Table A: HLA-B*40:01H
GLVEVEKGVL

SEQ ID NO: 3866 - protein, 10 aa, Severe acute respiratory syndrome coronavirus 2
  REGION 1..10: note = Table A: HLA-A*68:02H
EVEKGVLPQL

SEQ ID NO: 3867 - protein, 10 aa, Severe acute respiratory syndrome coronavirus 2
  REGION 1..10: note = Table A: HLA-A*29:01H HLA-A*29:02H
GVLPQLEQPY

SEQ ID NO: 3868 - protein, 10 aa, Severe acute respiratory syndrome coronavirus 2
  REGION 1..10: note = Table A: HLA-A*02:11H HLA-A*02:04H HLA-A*02:07M HLA-A*02:01H HLA-A*02:02H
VLPQLEQPYV

SEQ ID NO: 3869 - protein, 10 aa, Severe acute respiratory syndrome coronavirus 2
  REGION 1..10: note = Table A: HLA-B*53:01H HLA-B*55:02H HLA-B*35:03H HLA-B*35:01H HLA-B*35:08H HLA-B*35:07H
LPQLEQPYVF

SEQ ID NO: 3870 - protein, 10 aa, Severe acute respiratory syndrome coronavirus 2
  REGION 1..10: note = Table A: HLA-B*27:05H
ARTAPHGHVM

SEQ ID NO: 3871 - protein, 10 aa, Severe acute respiratory syndrome coronavirus 2
  REGION 1..10: note = Table A: HLA-C*15:02H HLA-A*02:08H HLA-B*57:03H
RTAPHGHVMV

SEQ ID NO: 3872 - protein, 10 aa, Severe acute respiratory syndrome coronavirus 2
  REGION 1..10: note = Table A: HLA-B*42:01H HLA-B*56:01H HLA-B*55:02M HLA-C*15:05M HLA-B*55:01H HLA-B*07:02M HLA-B*07:04M HLA-B*07:05H
APHGHVMVEL

SEQ ID NO: 3873 - protein, 10 aa, Severe acute respiratory syndrome coronavirus 2
  REGION 1..10: note = Table A: HLA-A*36:01H HLA-A*26:01M HLA-A*26:02H HLA-A*29:01M HLA-A*29:02H HLA-A*30:02H HLA-A*68:01H HLA-A*34:02H HLA-B*35:01M HLA-B*35:08H HLA-B*35:07H HLA-B*38:02H HLA-B*15:01H HLA-B*15:02H HLA-B*07:05H
LVAELEGIQY

SEQ ID NO: 3874 - protein, 10 aa, Severe acute respiratory syndrome coronavirus 2
  REGION 1..10: note = Table A: HLA-B*27:02H
AELEGIQYGR

SEQ ID NO: 3875 - protein, 10 aa, Severe acute respiratory syndrome coronavirus 2
  REGION 1..10: note = Table A: HLA-B*48:01H HLA-A*02:11H HLA-B*14:02M HLA-A*02:05M HLA-A*02:06H HLA-A*02:08M HLA-B*14:01H HLA-A*02:02M HLA-A*02:03H HLA-B*52:01H HLA-C*08:01H HLA-C*08:03H HLA-B*38:01H HLA-B*38:02M HLA-B*40:02H HLA-B*15:01M
  REGION 1..10: note = CONT. FROM ABOVE: HLA-B*15:02H HLA-B*15:03H HLA-B*39:01H HLA- B*13:01M HLA-B*13:02H HLA-B*15:10H
IQYGRSGETL

SEQ ID NO: 3876 - protein, 10 aa, Severe acute respiratory syndrome coronavirus 2
  REGION 1..10: note = Table A: HLA-B*57:03H
RSGETLGVLV

SEQ ID NO: 3877 - protein, 10 aa, Severe acute respiratory syndrome coronavirus 2
  REGION 1..10: note = Table A: HLA-A*68:02M HLA-A*34:02H
ETLGVLVPHV

SEQ ID NO: 3878 - protein, 10 aa, Severe acute respiratory syndrome coronavirus 2
  REGION 1..10: note = Table A: HLA-A*68:02H
LVPHVGEIPV

SEQ ID NO: 3879 - protein, 10 aa, Severe acute respiratory syndrome coronavirus 2
  REGION 1..10: note = Table A: HLA-B*56:01M HLA-B*55:02M HLA-B*55:01M HLA-B*54:01H
VPHVGEIPVA

SEQ ID NO: 3880 - protein, 10 aa, Severe acute respiratory syndrome coronavirus 2
  REGION 1..10: note = Table A: HLA-B*27:02H HLA-B*35:01H HLA-B*38:02H HLA-B*39:01H
PHVGEIPVAY

SEQ ID NO: 3881 - protein, 10 aa, Severe acute respiratory syndrome coronavirus 2
  REGION 1..10: note = Table A: HLA-A*74:01M HLA-A*03:02H HLA-A*33:01M HLA-A*33:03M HLA-A*26:03M HLA-A*68:01M HLA-A*68:02H HLA-A*34:01H HLA-A*34:02M HLA-A*66:01M
HVGEIPVAYR

SEQ ID NO: 3882 - protein, 10 aa, Severe acute respiratory syndrome coronavirus 2
  REGION 1..10: note = Table A: HLA-B*40:02H HLA-B*40:06H HLA-B*49:01M
GEIPVAYRKV

SEQ ID NO: 3883 - protein, 10 aa, Severe acute respiratory syndrome coronavirus 2
  REGION 1..10: note = Table A: HLA-B*07:04H
IPVAYRKVLL

SEQ ID NO: 3884 - protein, 10 aa, Severe acute respiratory syndrome coronavirus 2
  REGION 1..10: note = Table A: HLA-B*46:01H HLA-A*26:03H HLA-A*29:02H HLA-A*30:02H HLA-C*07:27H HLA-B*38:02H HLA-B*15:01M HLA-B*15:02H HLA-B*15:03H
GNKGAGGHSY

SEQ ID NO: 3885 - protein, 10 aa, Severe acute respiratory syndrome coronavirus 2
  REGION 1..10: note = Table A: HLA-B*58:02H HLA-B*57:01H HLA-A*25:01M HLA-B*46:01H HLA-A*26:01H HLA-A*26:03H HLA-C*12:02H HLA-A*34:02H HLA-B*57:03H HLA-A*66:01H
HSYGADLKSF

SEQ ID NO: 3886 - protein, 10 aa, Severe acute respiratory syndrome coronavirus 2
  REGION 1..10: note = Table A: HLA-A*02:02H
YGADLKSFDL

SEQ ID NO: 3887 - protein, 10 aa, Severe acute respiratory syndrome coronavirus 2
  REGION 1..10: note = Table A: HLA-A*25:01H HLA-B*53:01H HLA-B*38:02H
DPYEDFQENW

SEQ ID NO: 3888 - protein, 10 aa, Severe acute respiratory syndrome coronavirus 2
  REGION 1..10: note = Table A: HLA-B*45:01H
QENWNTKHSS

SEQ ID NO: 3889 - protein, 10 aa, Severe acute respiratory syndrome coronavirus 2
  REGION 1..10: note = Table A: HLA-A*33:01H HLA-A*33:03H HLA-A*26:03M HLA-A*68:01M HLA-A*34:01M HLA-A*34:02H HLA-A*66:01M
NTKHSSGVTR

SEQ ID NO: 3890 - protein, 10 aa, Severe acute respiratory syndrome coronavirus 2
  REGION 1..10: note = Table A: HLA-B*38:02M HLA-B*07:04H HLA-B*15:10H
KHSSGVTREL

SEQ ID NO: 3891 - protein, 10 aa, Severe acute respiratory syndrome coronavirus 2
  REGION 1..10: note = Table A: HLA-A*68:01H HLA-A*68:02M HLA-A*34:02H HLA-C*08:03H HLA-B*57:03H
HSSGVTRELM

SEQ ID NO: 3892 - protein, 10 aa, Severe acute respiratory syndrome coronavirus 2
  REGION 1..10: note = Table A: HLA-A*02:08H
GVTRELMREL

SEQ ID NO: 3893 - protein, 10 aa, Severe acute respiratory syndrome coronavirus 2
  REGION 1..10: note = Table A: HLA-A*11:303H HLA-B*46:01M HLA-A*29:02H HLA-C*03:02H HLA-A*30:02M HLA-B*38:02M HLA-B*15:01M HLA-B*15:02M HLA-B*15:03H
LMRELNGGAY

SEQ ID NO: 3894 - protein, 10 aa, Severe acute respiratory syndrome coronavirus 2
  REGION 1..10: note = Table A: HLA-B*39:01H
MRELNGGAYT

SEQ ID NO: 3895 - protein, 10 aa, Severe acute respiratory syndrome coronavirus 2
  REGION 1..10: note = Table A: HLA-A*74:01H
RELNGGAYTR

SEQ ID NO: 3896 - protein, 10 aa, Severe acute respiratory syndrome coronavirus 2
  REGION 1..10: note = Table A: HLA-A*25:01M HLA-A*26:01M HLA-A*26:02M HLA-A*26:03H HLA-A*30:02H HLA-A*68:01H HLA-A*34:01M HLA-A*34:02H HLA-B*38:02M HLA-B*15:01H HLA-B*15:02M
ELNGGAYTRY

SEQ ID NO: 3897 - protein, 10 aa, Severe acute respiratory syndrome coronavirus 2
  REGION 1..10: note = Table A: HLA-A*24:02M HLA-A*24:07M HLA-A*23:01M
AYTRYVDNNF

SEQ ID NO: 3898 - protein, 10 aa, Severe acute respiratory syndrome coronavirus 2
  REGION 1..10: note = Table A: HLA-C*15:05H
GPDGYPLECI

SEQ ID NO: 3899 - protein, 10 aa, Severe acute respiratory syndrome coronavirus 2
  REGION 1..10: note = Table A: HLA-B*53:01H
YPLECIKDLL

SEQ ID NO: 3900 - protein, 10 aa, Severe acute respiratory syndrome coronavirus 2
  REGION 1..10: note = Table A: HLA-A*33:03H HLA-A*26:03H HLA-A*68:01H HLA-A*34:01M HLA-A*34:02H HLA-A*66:01H
EQLDFIDTKR

SEQ ID NO: 3901 - protein, 10 aa, Severe acute respiratory syndrome coronavirus 2
  REGION 1..10: note = Table A: HLA-C*14:03H HLA-A*25:01H HLA-A*26:01H HLA-A*29:02H HLA-A*30:02H HLA-B*15:02H
DFIDTKRGVY

SEQ ID NO: 3902 - protein, 10 aa, Severe acute respiratory syndrome coronavirus 2
  REGION 1..10: note = Table A: HLA-A*33:01H HLA-A*33:03H
DTKRGVYCCR

SEQ ID NO: 3903 - protein, 10 aa, Severe acute respiratory syndrome coronavirus 2
  REGION 1..10: note = Table A: HLA-B*44:03H
REHEHEIAWY

SEQ ID NO: 3904 - protein, 10 aa, Severe acute respiratory syndrome coronavirus 2
  REGION 1..10: note = Table A: HLA-B*40:01H HLA-B*40:02H HLA-B*41:02M
TERSEKSYEL

SEQ ID NO: 3905 - protein, 10 aa, Severe acute respiratory syndrome coronavirus 2
  REGION 1..10: note = Table A: HLA-B*45:01M HLA-B*50:01M
SEKSYELQTP

SEQ ID NO: 3906 - protein, 10 aa, Severe acute respiratory syndrome coronavirus 2
  REGION 1..10: note = Table A: HLA-A*68:02H HLA-A*02:04H
ELQTPFEIKL

SEQ ID NO: 3907 - protein, 10 aa, Severe acute respiratory syndrome coronavirus 2
  REGION 1..10: note = Table A: HLA-A*02:05H
LQTPFEIKLA

SEQ ID NO: 3908 - protein, 10 aa, Severe acute respiratory syndrome coronavirus 2
  REGION 1..10: note = Table A: HLA-A*11:01H HLA-A*11:02H HLA-A*36:01H HLA-A*34:02H
QTPFEIKLAK

SEQ ID NO: 3909 - protein, 10 aa, Severe acute respiratory syndrome coronavirus 2
  REGION 1..10: note = Table A: HLA-A*68:01H HLA-A*34:01H HLA-A*34:02H
TPFEIKLAKK

SEQ ID NO: 3910 - protein, 10 aa, Severe acute respiratory syndrome coronavirus 2
  REGION 1..10: note = Table A: HLA-A*25:01M HLA-A*26:01H HLA-A*26:02M HLA-A*26:03M HLA-A*68:01H HLA-A*68:02H HLA-A*34:02H HLA-A*66:01H
DTFNGECPNF

SEQ ID NO: 3911 - protein, 10 aa, Severe acute respiratory syndrome coronavirus 2
  REGION 1..10: note = Table A: HLA-A*34:02H
FVFPLNSIIK

SEQ ID NO: 3912 - protein, 10 aa, Severe acute respiratory syndrome coronavirus 2
  REGION 1..10: note = Table A: HLA-B*53:01H HLA-B*55:02H HLA-C*15:05H HLA-B*51:01M HLA-B*54:01H HLA-B*07:04H
FPLNSIIKTI

SEQ ID NO: 3913 - protein, 10 aa, Severe acute respiratory syndrome coronavirus 2
  REGION 1..10: note = Table A: HLA-A*68:01H HLA-A*66:01H
NSIIKTIQPR

SEQ ID NO: 3914 - protein, 10 aa, Severe acute respiratory syndrome coronavirus 2
  REGION 1..10: note = Table A: HLA-A*03:01H HLA-A*03:02H HLA-A*11:01H HLA-A*11:02H HLA-A*30:01H HLA-A*34:02H HLA-C*07:27H
KTIQPRVEKK

SEQ ID NO: 3915 - protein, 10 aa, Severe acute respiratory syndrome coronavirus 2
  REGION 1..10: note = Table A: HLA-A*74:01M
KLDGFMGRIR

SEQ ID NO: 3916 - protein, 10 aa, Severe acute respiratory syndrome coronavirus 2
  REGION 1..10: note = Table A: HLA-B*51:01H
DGFMGRIRSV

SEQ ID NO: 3917 - protein, 10 aa, Severe acute respiratory syndrome coronavirus 2
  REGION 1..10: note = Table A: HLA-A*30:02H
GFMGRIRSVY

SEQ ID NO: 3918 - protein, 10 aa, Severe acute respiratory syndrome coronavirus 2
  REGION 1..10: note = Table A: HLA-C*15:05M HLA-B*07:05H
SPNECNQMCL

SEQ ID NO: 3919 - protein, 10 aa, Severe acute respiratory syndrome coronavirus 2
  REGION 1..10: note = Table A: HLA-B*44:05H
GETSWQTGDF

SEQ ID NO: 3920 - protein, 10 aa, Severe acute respiratory syndrome coronavirus 2
  REGION 1..10: note = Table A: HLA-A*68:02M
ETSWQTGDFV

SEQ ID NO: 3921 - protein, 10 aa, Severe acute respiratory syndrome coronavirus 2
  REGION 1..10: note = Table A: HLA-A*11:01H HLA-A*36:01H HLA-A*34:02H
TSWQTGDFVK

SEQ ID NO: 3922 - protein, 10 aa, Severe acute respiratory syndrome coronavirus 2
  REGION 1..10: note = Table A: HLA-A*68:02H
QTGDFVKATC

SEQ ID NO: 3923 - protein, 10 aa, Severe acute respiratory syndrome coronavirus 2
  REGION 1..10: note = Table A: HLA-B*27:02H
GYLPQNAVVK

SEQ ID NO: 3924 - protein, 10 aa, Severe acute respiratory syndrome coronavirus 2
  REGION 1..10: note = Table A: HLA-A*02:11H HLA-A*02:05H HLA-A*02:07H HLA-A*02:02H HLA-A*02:03H HLA-A*24:07H HLA-B*38:02H HLA-B*13:02H
YLPQNAVVKI

SEQ ID NO: 3925 - protein, 10 aa, Severe acute respiratory syndrome coronavirus 2
  REGION 1..10: note = Table A: HLA-B*35:01M HLA-B*35:07M HLA-B*07:04H HLA-B*15:11H
LPQNAVVKIY

SEQ ID NO: 3926 - protein, 10 aa, Severe acute respiratory syndrome coronavirus 2
  REGION 1..10: note = Table A: HLA-B*35:02H HLA-C*08:01H HLA-C*08:02H HLA-B*35:12H HLA-B*39:01H
NSEVGPEHSL

SEQ ID NO: 3927 - protein, 10 aa, Severe acute respiratory syndrome coronavirus 2
  REGION 1..10: note = Table A: HLA-B*45:01H HLA-B*49:01H HLA-B*50:01M
SEVGPEHSLA

SEQ ID NO: 3928 - protein, 10 aa, Severe acute respiratory syndrome coronavirus 2
  REGION 1..10: note = Table A: HLA-C*14:03H HLA-B*46:01H HLA-C*03:02H HLA-A*30:02H HLA-C*12:02H HLA-B*15:01H
VGPEHSLAEY

SEQ ID NO: 3929 - protein, 10 aa, Severe acute respiratory syndrome coronavirus 2
  REGION 1..10: note = Table A: HLA-A*02:02H
SLAEYHNESG

SEQ ID NO: 3930 - protein, 10 aa, Severe acute respiratory syndrome coronavirus 2
  REGION 1..10: note = Table A: HLA-B*49:01H
AEYHNESGLK

SEQ ID NO: 3931 - protein, 10 aa, Severe acute respiratory syndrome coronavirus 2
  REGION 1..10: note = Table A: HLA-B*38:01H HLA-B*38:02H HLA-B*15:10H
YHNESGLKTI

SEQ ID NO: 3932 - protein, 10 aa, Severe acute respiratory syndrome coronavirus 2
  REGION 1..10: note = Table A: HLA-B*35:03H HLA-C*08:03H HLA-B*40:01H
HNESGLKTIL

SEQ ID NO: 3933 - protein, 10 aa, Severe acute respiratory syndrome coronavirus 2
  REGION 1..10: note = Table A: HLA-A*68:01H
NESGLKTILR

SEQ ID NO: 3934 - protein, 10 aa, Severe acute respiratory syndrome coronavirus 2
  REGION 1..10: note = Table A: HLA-A*34:02H
ESGLKTILRK

SEQ ID NO: 3935 - protein, 10 aa, Severe acute respiratory syndrome coronavirus 2
  REGION 1..10: note = Table A: HLA-B*58:01H HLA-B*58:02H HLA-B*57:01H HLA-C*15:05H HLA-C*15:02H HLA-B*15:01H HLA-B*57:03H
RTIAFGGCVF

SEQ ID NO: 3936 - protein, 10 aa, Severe acute respiratory syndrome coronavirus 2
  REGION 1..10: note = Table A: HLA-B*35:01H HLA-B*35:07H
IAFGGCVFSY

SEQ ID NO: 3937 - protein, 10 aa, Severe acute respiratory syndrome coronavirus 2
  REGION 1..10: note = Table A: HLA-A*33:03H
HNKCAYWVPR

SEQ ID NO: 3938 - protein, 10 aa, Severe acute respiratory syndrome coronavirus 2
  REGION 1..10: note = Table A: HLA-B*56:01H HLA-B*55:02H HLA-B*54:01M
CAYWVPRASA

SEQ ID NO: 3939 - protein, 10 aa, Severe acute respiratory syndrome coronavirus 2
  REGION 1..10: note = Table A: HLA-B*56:01H HLA-B*55:02H HLA-C*15:05H HLA-B*55:01H HLA-B*07:02H HLA-B*07:04H
VPRASANIGC

SEQ ID NO: 3940 - protein, 10 aa, Severe acute respiratory syndrome coronavirus 2
  REGION 1..10: note = Table A: HLA-B*39:01H
NHTGVVGEGS

SEQ ID NO: 3941 - protein, 10 aa, Severe acute respiratory syndrome coronavirus 2
  REGION 1..10: note = Table A: HLA-A*02:05H HLA-A*02:08M
GVVGEGSEGL

SEQ ID NO: 3942 - protein, 10 aa, Severe acute respiratory syndrome coronavirus 2
  REGION 1..10: note = Table A: HLA-A*02:04H HLA-A*02:02H
GLNDNLLEIL

SEQ ID NO: 3943 - protein, 10 aa, Severe acute respiratory syndrome coronavirus 2
  REGION 1..10: note = Table A: HLA-B*40:02H
KEKVNINIVG

SEQ ID NO: 3944 - protein, 10 aa, Severe acute respiratory syndrome coronavirus 2
  REGION 1..10: note = Table A: HLA-A*30:02H HLA-B*57:03H
KVNINIVGDF

SEQ ID NO: 3945 - protein, 10 aa, Severe acute respiratory syndrome coronavirus 2
  REGION 1..10: note = Table A: HLA-A*36:01H HLA-B*27:02H
VNINIVGDFK

SEQ ID NO: 3946 - protein, 10 aa, Severe acute respiratory syndrome coronavirus 2
  REGION 1..10: note = Table A: HLA-A*02:11H HLA-A*02:04H HLA-A*02:02M
KLNEEIAIIL

SEQ ID NO: 3947 - protein, 10 aa, Severe acute respiratory syndrome coronavirus 2
  REGION 1..10: note = Table A: HLA-B*44:02M HLA-B*44:05H HLA-A*25:01H HLA-A*26:03H HLA-B*44:03H HLA-B*18:01M HLA-A*68:02H HLA-B*40:02H HLA-B*07:05M
EEIAIILASF

SEQ ID NO: 3948 - protein, 10 aa, Severe acute respiratory syndrome coronavirus 2
  REGION 1..10: note = Table A: HLA-B*54:01H
IAIILASFSA

SEQ ID NO: 3949 - protein, 10 aa, Severe acute respiratory syndrome coronavirus 2
  REGION 1..10: note = Table A: HLA-B*46:01H HLA-C*15:05H HLA-B*38:02H HLA-B*15:01M HLA-B*15:03H HLA-B*07:05H HLA-B*57:03H
ASFSASTSAF

SEQ ID NO: 3950 - protein, 10 aa, Severe acute respiratory syndrome coronavirus 2
  REGION 1..10: note = Table A: HLA-A*11:303H HLA-A*03:01H HLA-A*03:02M HLA-A*11:01M HLA-A*11:02M HLA-A*36:01H HLA-B*27:02H HLA-A*30:02H HLA-A*68:01M HLA-A*68:02H HLA-A*34:02M HLA-C*07:27H
STSAFVETVK

SEQ ID NO: 3951 - protein, 10 aa, Severe acute respiratory syndrome coronavirus 2
  REGION 1..10: note = Table A: HLA-A*02:05H
SAFVETVKGL

SEQ ID NO: 3952 - protein, 10 aa, Severe acute respiratory syndrome coronavirus 2
  REGION 1..10: note = Table A: HLA-B*58:01H HLA-A*36:01H HLA-A*26:01H HLA-A*29:01M HLA-A*29:02M HLA-A*01:01H HLA-A*34:02H HLA-B*35:01M HLA-B*38:02H HLA-B*15:02H HLA-B*39:01H
FVETVKGLDY

SEQ ID NO: 3953 - protein, 10 aa, Severe acute respiratory syndrome coronavirus 2
  REGION 1..10: note = Table A: HLA-A*68:02H
ETVKGLDYKA

SEQ ID NO: 3954 - protein, 10 aa, Severe acute respiratory syndrome coronavirus 2
  REGION 1..10: note = Table A: HLA-A*25:01H HLA-A*26:03H HLA-B*07:04H
TVKGLDYKAF

SEQ ID NO: 3955 - protein, 10 aa, Severe acute respiratory syndrome coronavirus 2
  REGION 1..10: note = Table A: HLA-A*02:08H
KAFKQIVESC

SEQ ID NO: 3956 - protein, 10 aa, Severe acute respiratory syndrome coronavirus 2
  REGION 1..10: note = Table A: HLA-B*15:01H HLA-B*13:01H
KQIVESCGNF

SEQ ID NO: 3957 - protein, 10 aa, Severe acute respiratory syndrome coronavirus 2
  REGION 1..10: note = Table A: HLA-A*34:02H
QIVESCGNFK

SEQ ID NO: 3958 - protein, 10 aa, Severe acute respiratory syndrome coronavirus 2
  REGION 1..10: note = Table A: HLA-A*68:01H HLA-A*34:02H
ESCGNFKVTK

SEQ ID NO: 3959 - protein, 10 aa, Severe acute respiratory syndrome coronavirus 2
  REGION 1..10: note = Table A: HLA-A*03:01H HLA-A*03:02M HLA-A*11:01H HLA-A*36:01H HLA-C*06:02H HLA-A*30:02H
KGAWNIGEQK

SEQ ID NO: 3960 - protein, 10 aa, Severe acute respiratory syndrome coronavirus 2
  REGION 1..10: note = Table A: HLA-B*40:01H HLA-B*40:02H
GEQKSILSPL

SEQ ID NO: 3961 - protein, 10 aa, Severe acute respiratory syndrome coronavirus 2
  REGION 1..10: note = Table A: HLA-A*30:02H HLA-B*38:02H
EQKSILSPLY

SEQ ID NO: 3962 - protein, 10 aa, Severe acute respiratory syndrome coronavirus 2
  REGION 1..10: note = Table A: HLA-B*58:01H HLA-B*58:02H HLA-B*57:01H HLA-B*57:03H
KSILSPLYAF

SEQ ID NO: 3963 - protein, 10 aa, Severe acute respiratory syndrome coronavirus 2
  REGION 1..10: note = Table A: HLA-B*56:01H HLA-B*55:02H HLA-C*15:05H HLA-B*55:01H HLA-B*54:01H
SPLYAFASEA

SEQ ID NO: 3964 - protein, 10 aa, Severe acute respiratory syndrome coronavirus 2
  REGION 1..10: note = Table A: HLA-A*68:02H HLA-A*02:05H
YAFASEAARV

SEQ ID NO: 3965 - protein, 10 aa, Severe acute respiratory syndrome coronavirus 2
  REGION 1..10: note = Table A: HLA-A*33:03H HLA-A*68:01M HLA-A*34:01M HLA-A*34:02H HLA-A*66:01M
FASEAARVVR

SEQ ID NO: 3966 - protein, 10 aa, Severe acute respiratory syndrome coronavirus 2
  REGION 1..10: note = Table A: HLA-B*49:01H
SEAARVVRSI

SEQ ID NO: 3967 - protein, 10 aa, Severe acute respiratory syndrome coronavirus 2
  REGION 1..10: note = Table A: HLA-B*53:01H HLA-A*34:01M HLA-A*34:02H HLA-B*35:01H HLA-B*35:07M HLA-B*57:03H
EAARVVRSIF

SEQ ID NO: 3968 - protein, 10 aa, Severe acute respiratory syndrome coronavirus 2
  REGION 1..10: note = Table A: HLA-B*07:04H
VVRSIFSRTL

SEQ ID NO: 3969 - protein, 10 aa, Severe acute respiratory syndrome coronavirus 2
  REGION 1..10: note = Table A: HLA-B*56:01H HLA-A*02:11M HLA-B*55:02H HLA-A*68:02H HLA-B*55:01H HLA-A*02:04H HLA-A*02:05H HLA-A*02:06H HLA-A*02:08H HLA-A*02:01H HLA-A*02:02H HLA-A*02:03H HLA-B*38:02H HLA-B*40:06H HLA-B*54:01H
SIFSRTLETA

SEQ ID NO: 3970 - protein, 10 aa, Severe acute respiratory syndrome coronavirus 2
  REGION 1..10: note = Table A: HLA-A*02:11H HLA-C*15:05H HLA-A*02:06H HLA-A*02:08H HLA-B*57:03H HLA-B*13:02H
RTLETAQNSV

SEQ ID NO: 3971 - protein, 10 aa, Severe acute respiratory syndrome coronavirus 2
  REGION 1..10: note = Table A: HLA-B*49:01H
LETAQNSVRV

SEQ ID NO: 3972 - protein, 10 aa, Severe acute respiratory syndrome coronavirus 2
  REGION 1..10: note = Table A: HLA-A*25:01M HLA-A*26:01H HLA-A*26:02H HLA-A*26:03M HLA-A*68:01H HLA-A*68:02M HLA-A*34:01M HLA-A*34:02H HLA-A*66:01H
ETAQNSVRVL

SEQ ID NO: 3973 - protein, 10 aa, Severe acute respiratory syndrome coronavirus 2
  REGION 1..10: note = Table A: HLA-A*11:303H HLA-A*74:01H HLA-A*03:01M HLA-A*03:02M HLA-A*11:01M HLA-A*11:02M HLA-A*30:01M HLA-A*30:02H HLA-C*07:27H HLA-B*15:01H HLA-B*13:02H
AQNSVRVLQK

SEQ ID NO: 3974 - protein, 10 aa, Severe acute respiratory syndrome coronavirus 2
  REGION 1..10: note = Table A: HLA-B*07:04H
SVRVLQKAAI

SEQ ID NO: 3975 - protein, 10 aa, Severe acute respiratory syndrome coronavirus 2
  REGION 1..10: note = Table A: HLA-B*58:02H HLA-B*57:03H HLA-B*13:02H
RVLQKAAITI

SEQ ID NO: 3976 - protein, 10 aa, Severe acute respiratory syndrome coronavirus 2
  REGION 1..10: note = Table A: HLA-B*58:01H HLA-A*36:01M HLA-B*57:01H HLA-A*25:01H HLA-B*46:01H HLA-A*26:01M HLA-A*26:02H HLA-A*26:03H HLA-A*01:01H HLA-A*30:02M HLA-B*35:01H HLA-B*38:02H HLA-B*15:01M HLA-B*57:03H
ITILDGISQY

SEQ ID NO: 3977 - protein, 10 aa, Severe acute respiratory syndrome coronavirus 2
  REGION 1..10: note = Table A: HLA-A*02:11H HLA-A*02:04H HLA-A*02:07M HLA-A*02:01H HLA-A*02:02H HLA-C*08:02H HLA-B*38:02H
ILDGISQYSL

SEQ ID NO: 3978 - protein, 10 aa, Severe acute respiratory syndrome coronavirus 2
  REGION 1..10: note = Table A: HLA-A*02:05H HLA-A*02:08H HLA-A*02:03H HLA-B*39:06H
SQYSLRLIDA

SEQ ID NO: 3979 - protein, 10 aa, Severe acute respiratory syndrome coronavirus 2
  REGION 1..10: note = Table A: HLA-A*68:01H HLA-A*68:02M HLA-A*02:05H HLA-A*02:02M HLA-A*34:01H HLA-B*38:02H HLA-A*66:01H
FTSDLATNNL

SEQ ID NO: 3980 - protein, 10 aa, Severe acute respiratory syndrome coronavirus 2
  REGION 1..10: note = Table A: HLA-A*01:01H
TSDLATNNLV

SEQ ID NO: 3981 - protein, 10 aa, Severe acute respiratory syndrome coronavirus 2
  REGION 1..10: note = Table A: HLA-A*26:02H HLA-B*38:02H HLA-B*15:02H
DLATNNLVVM

SEQ ID NO: 3982 - protein, 10 aa, Severe acute respiratory syndrome coronavirus 2
  REGION 1..10: note = Table A: HLA-A*03:01H HLA-A*03:02H HLA-A*11:01M HLA-A*11:02H HLA-A*36:01H HLA-A*26:01H HLA-A*29:01H HLA-A*30:02M HLA-B*15:01H
ATNNLVVMAY

SEQ ID NO: 3983 - protein, 10 aa, Severe acute respiratory syndrome coronavirus 2
  REGION 1..10: note = Table A: HLA-C*14:02M HLA-C*14:03H HLA-A*02:08H HLA-A*24:02H HLA-A*24:07M HLA-C*08:01H HLA-A*23:01H HLA-B*39:01H
AYITGGVVQL

SEQ ID NO: 3984 - protein, 10 aa, Severe acute respiratory syndrome coronavirus 2
  REGION 1..10: note = Table A: HLA-A*68:02H HLA-C*08:03H
YITGGVVQLT

SEQ ID NO: 3985 - protein, 10 aa, Severe acute respiratory syndrome coronavirus 2
  REGION 1..10: note = Table A: HLA-B*38:02H
WLTNIFGTVY

SEQ ID NO: 3986 - protein, 10 aa, Severe acute respiratory syndrome coronavirus 2
  REGION 1..10: note = Table A: HLA-A*68:02H HLA-A*02:05H HLA-A*02:02H
NIFGTVYEKL

SEQ ID NO: 3987 - protein, 10 aa, Severe acute respiratory syndrome coronavirus 2
  REGION 1..10: note = Table A: HLA-A*02:11H
TVYEKLKPVL

SEQ ID NO: 3988 - protein, 10 aa, Severe acute respiratory syndrome coronavirus 2
  REGION 1..10: note = Table A: HLA-B*44:05H
EEKFKEGVEF

SEQ ID NO: 3989 - protein, 10 aa, Severe acute respiratory syndrome coronavirus 2
  REGION 1..10: note = Table A: HLA-A*74:01M HLA-A*31:01H
KFKEGVEFLR

SEQ ID NO: 3990 - protein, 10 aa, Severe acute respiratory syndrome coronavirus 2
  REGION 1..10: note = Table A: HLA-B*50:01H
WEIVKFISTC

SEQ ID NO: 3991 - protein, 10 aa, Severe acute respiratory syndrome coronavirus 2
  REGION 1..10: note = Table A: HLA-B*40:02H HLA-B*41:02H
CEIVGGQIVT

SEQ ID NO: 3992 - protein, 10 aa, Severe acute respiratory syndrome coronavirus 2
  REGION 1..10: note = Table A: HLA-A*25:01H HLA-A*26:01H HLA-A*26:02M HLA-A*26:03M HLA-A*68:02H HLA-A*02:08H HLA-A*34:01H HLA-B*38:02H
EIVGGQIVTC

SEQ ID NO: 3993 - protein, 10 aa, Severe acute respiratory syndrome coronavirus 2
  REGION 1..10: note = Table A: HLA-A*02:08M
IVGGQIVTCA

SEQ ID NO: 3994 - protein, 10 aa, Severe acute respiratory syndrome coronavirus 2
  REGION 1..10: note = Table A: HLA-B*58:01H HLA-B*44:02M HLA-B*44:05H HLA-C*16:04H HLA-B*45:01H HLA-B*44:03H HLA-B*27:02M HLA-A*23:01H HLA-B*40:01H HLA-B*40:02H HLA-B*40:06H HLA-B*15:01H HLA-B*15:03H HLA-B*07:05H HLA-B*41:02M HLA-B*57:03M
  REGION 1..10: note = CONT. FROM ABOVE: HLA-B*13:01H HLA-B*49:01M HLA-B*50:01H
KEIKESVQTF

SEQ ID NO: 3995 - protein, 10 aa, Severe acute respiratory syndrome coronavirus 2
  REGION 1..10: note = Table A: HLA-A*25:01H HLA-A*26:01H HLA-A*26:02H HLA-A*26:03H HLA-A*34:01H HLA-A*34:02H HLA-A*66:01H
EIKESVQTFF

SEQ ID NO: 3996 - protein, 10 aa, Severe acute respiratory syndrome coronavirus 2
  REGION 1..10: note = Table A: HLA-A*68:02H
ESVQTFFKLV

SEQ ID NO: 3997 - protein, 10 aa, Severe acute respiratory syndrome coronavirus 2
  REGION 1..10: note = Table A: HLA-B*57:03H
QTFFKLVNKF

SEQ ID NO: 3998 - protein, 10 aa, Severe acute respiratory syndrome coronavirus 2
  REGION 1..10: note = Table A: HLA-A*36:01H HLA-B*27:02H
ADSIIIGGAK

SEQ ID NO: 3999 - protein, 10 aa, Severe acute respiratory syndrome coronavirus 2
  REGION 1..10: note = Table A: HLA-B*44:05H HLA-A*25:01H HLA-A*33:03H HLA-A*26:01H HLA-A*26:03M HLA-A*68:01M HLA-A*68:02M HLA-C*15:05H HLA-A*34:01H HLA-A*34:02H HLA-C*08:03H HLA-B*07:05H HLA-A*66:01M
DSIIIGGAKL

SEQ ID NO: 4000 - protein, 10 aa, Severe acute respiratory syndrome coronavirus 2
  REGION 1..10: note = Table A: HLA-A*03:02H HLA-A*11:01H HLA-A*11:02H HLA-A*30:01H HLA-A*34:02H
SIIIGGAKLK

SEQ ID NO: 4001 - protein, 10 aa, Severe acute respiratory syndrome coronavirus 2
  REGION 1..10: note = Table A: HLA-B*07:04H
IIGGAKLKAL

SEQ ID NO: 4002 - protein, 10 aa, Severe acute respiratory syndrome coronavirus 2
  REGION 1..10: note = Table A: HLA-B*15:03H
LKALNLGETF

SEQ ID NO: 4003 - protein, 10 aa, Severe acute respiratory syndrome coronavirus 2
  REGION 1..10: note = Table A: HLA-A*02:11H HLA-A*02:06H HLA-B*57:03H
KALNLGETFV

SEQ ID NO: 4004 - protein, 10 aa, Severe acute respiratory syndrome coronavirus 2
  REGION 1..10: note = Table A: HLA-A*26:03H HLA-A*68:01H HLA-A*68:02M HLA-A*34:01M HLA-A*34:02M HLA-A*66:01M
ETFVTHSKGL

SEQ ID NO: 4005 - protein, 10 aa, Severe acute respiratory syndrome coronavirus 2
  REGION 1..10: note = Table A: HLA-A*29:02M HLA-A*30:02M
TFVTHSKGLY

SEQ ID NO: 4006 - protein, 10 aa, Severe acute respiratory syndrome coronavirus 2
  REGION 1..10: note = Table A: HLA-A*33:03H HLA-A*26:03H HLA-A*34:01M HLA-A*34:02H HLA-A*66:01M
FVTHSKGLYR

SEQ ID NO: 4007 - protein, 10 aa, Severe acute respiratory syndrome coronavirus 2
  REGION 1..10: note = Table A: HLA-A*11:01H HLA-A*11:02H HLA-A*34:02H
VTHSKGLYRK

SEQ ID NO: 4008 - protein, 10 aa, Severe acute respiratory syndrome coronavirus 2
  REGION 1..10: note = Table A: HLA-B*58:01H HLA-B*58:02M HLA-A*36:01H HLA-B*57:01H HLA-A*30:01H HLA-C*15:05H HLA-C*15:02H HLA-B*57:03H
KSREETGLLM

SEQ ID NO: 4009 - protein, 10 aa, Severe acute respiratory syndrome coronavirus 2
  REGION 1..10: note = Table A: HLA-B*40:01M
REETGLLMPL

SEQ ID NO: 4010 - protein, 10 aa, Severe acute respiratory syndrome coronavirus 2
  REGION 1..10: note = Table A: HLA-B*53:01H HLA-B*51:01H
MPLKAPKEII

SEQ ID NO: 4011 - protein, 10 aa, Severe acute respiratory syndrome coronavirus 2
  REGION 1..10: note = Table A: HLA-B*56:01H HLA-B*55:02H HLA-B*55:01H HLA-B*54:01H
APKEIIFLEG

SEQ ID NO: 4012 - protein, 10 aa, Severe acute respiratory syndrome coronavirus 2
  REGION 1..10: note = Table A: HLA-A*68:02M HLA-B*38:01H HLA-B*39:01H
EIIFLEGETL

SEQ ID NO: 4013 - protein, 10 aa, Severe acute respiratory syndrome coronavirus 2
  REGION 1..10: note = Table A: HLA-B*55:02H HLA-B*54:01H
LPTEVLTEEV

SEQ ID NO: 4014 - protein, 10 aa, Severe acute respiratory syndrome coronavirus 2
  REGION 1..10: note = Table A: HLA-B*44:05H HLA-B*40:01M HLA-B*40:02H
TEVLTEEVVL

SEQ ID NO: 4015 - protein, 10 aa, Severe acute respiratory syndrome coronavirus 2
  REGION 1..10: note = Table A: HLA-A*68:01H HLA-A*34:02M
EVLTEEVVLK

SEQ ID NO: 4016 - protein, 10 aa, Severe acute respiratory syndrome coronavirus 2
  REGION 1..10: note = Table A: HLA-B*44:05H
EEVVLKTGDL

SEQ ID NO: 4017 - protein, 10 aa, Severe acute respiratory syndrome coronavirus 2
  REGION 1..10: note = Table A: HLA-A*02:02H HLA-A*02:03H HLA-B*38:02H
VLKTGDLQPL

SEQ ID NO: 4018 - protein, 10 aa, Severe acute respiratory syndrome coronavirus 2
  REGION 1..10: note = Table A: HLA-C*08:03H
GDLQPLEQPT

SEQ ID NO: 4019 - protein, 10 aa, Severe acute respiratory syndrome coronavirus 2
  REGION 1..10: note = Table A: HLA-B*56:01H HLA-B*55:02M HLA-C*15:05H HLA-B*55:01H HLA-B*54:01H
QPLEQPTSEA

SEQ ID NO: 4020 - protein, 10 aa, Severe acute respiratory syndrome coronavirus 2
  REGION 1..10: note = Table A: HLA-A*68:02H
PTSEAVEAPL

SEQ ID NO: 4021 - protein, 10 aa, Severe acute respiratory syndrome coronavirus 2
  REGION 1..10: note = Table A: HLA-B*44:05H HLA-B*45:01H HLA-A*68:02H HLA-C*08:03H HLA-B*40:01H HLA-B*40:02M HLA-B*40:06H HLA-B*07:05H HLA-B*41:02H HLA-B*49:01M HLA-B*50:01M
VEAPLVGTPV

SEQ ID NO: 4022 - protein, 10 aa, Severe acute respiratory syndrome coronavirus 2
  REGION 1..10: note = Table A: HLA-B*55:02H HLA-C*15:05M HLA-B*07:05H
APLVGTPVCI

SEQ ID NO: 4023 - protein, 10 aa, Severe acute respiratory syndrome coronavirus 2
  REGION 1..10: note = Table A: HLA-B*27:02H HLA-A*34:02H
MLLEIKDTEK

SEQ ID NO: 4024 - protein, 10 aa, Severe acute respiratory syndrome coronavirus 2
  REGION 1..10: note = Table A: HLA-A*36:01H HLA-A*01:01M
LLEIKDTEKY

SEQ ID NO: 4025 - protein, 10 aa, Severe acute respiratory syndrome coronavirus 2
  REGION 1..10: note = Table A: HLA-B*38:02H
MMVTNNTFTL

SEQ ID NO: 4026 - protein, 10 aa, Severe acute respiratory syndrome coronavirus 2
  REGION 1..10: note = Table A: HLA-A*11:303H HLA-A*03:01H HLA-A*03:02H HLA-A*11:01M HLA-A*11:02H HLA-A*36:01H HLA-A*68:01M HLA-A*68:02H HLA-A*34:01H HLA-A*34:02H HLA-A*66:01H
MVTNNTFTLK

SEQ ID NO: 4027 - protein, 10 aa, Severe acute respiratory syndrome coronavirus 2
  REGION 1..10: note = Table A: HLA-A*11:01H HLA-A*36:01H HLA-A*34:02H
VTNNTFTLKG

SEQ ID NO: 4028 - protein, 10 aa, Severe acute respiratory syndrome coronavirus 2
  REGION 1..10: note = Table A: HLA-A*11:01H HLA-A*11:02H HLA-A*34:02M
FTLKGGAPTK

SEQ ID NO: 4029 - protein, 10 aa, Severe acute respiratory syndrome coronavirus 2
  REGION 1..10: note = Table A: HLA-A*02:02H HLA-A*02:03M HLA-B*38:02H
TLKGGAPTKV

SEQ ID NO: 4030 - protein, 10 aa, Severe acute respiratory syndrome coronavirus 2
  REGION 1..10: note = Table A: HLA-B*57:03M
KGGAPTKVTF

SEQ ID NO: 4031 - protein, 10 aa, Severe acute respiratory syndrome coronavirus 2
  REGION 1..10: note = Table A: HLA-A*34:02M
DTVIEVQGYK

SEQ ID NO: 4032 - protein, 10 aa, Severe acute respiratory syndrome coronavirus 2
  REGION 1..10: note = Table A: HLA-B*57:03M
QGYKSVNITF

SEQ ID NO: 4033 - protein, 10 aa, Severe acute respiratory syndrome coronavirus 2
  REGION 1..10: note = Table A: HLA-B*49:01H
FELDERIDKV

SEQ ID NO: 4034 - protein, 10 aa, Severe acute respiratory syndrome coronavirus 2
  REGION 1..10: note = Table A: HLA-A*34:02H
ERIDKVLNEK

SEQ ID NO: 4035 - protein, 10 aa, Severe acute respiratory syndrome coronavirus 2
  REGION 1..10: note = Table A: HLA-A*30:02H HLA-B*15:01H
KVLNEKCSAY

SEQ ID NO: 4036 - protein, 10 aa, Severe acute respiratory syndrome coronavirus 2
  REGION 1..10: note = Table A: HLA-B*44:02M HLA-B*44:05H HLA-C*16:04H HLA-B*44:03M HLA-B*18:01H HLA-B*27:02H HLA-A*24:02H HLA-A*23:01M HLA-B*40:01H HLA-B*40:02H HLA-B*39:01H HLA-B*07:05H HLA-B*41:02H
VELGTEVNEF

SEQ ID NO: 4037 - protein, 10 aa, Severe acute respiratory syndrome coronavirus 2
  REGION 1..10: note = Table A: HLA-B*49:01H
TEVNEFACVV

SEQ ID NO: 4038 - protein, 10 aa, Severe acute respiratory syndrome coronavirus 2
  REGION 1..10: note = Table A: HLA-A*11:303H HLA-A*25:01M HLA-A*26:02H HLA-A*26:03H HLA-A*02:11H HLA-A*68:01H HLA-A*68:02M HLA-C*15:05H HLA-A*02:04H HLA-A*02:05H HLA-A*02:06M HLA-A*02:08H HLA-A*02:01H HLA-A*02:02M HLA-A*02:03M
  REGION 1..10: note = CONT. FROM ABOVE: HLA-C*08:01H HLA-B*38:02H HLA-B*07:04H HLA- B*57:03H
VVADAVIKTL

SEQ ID NO: 4039 - protein, 10 aa, Severe acute respiratory syndrome coronavirus 2
  REGION 1..10: note = Table A: HLA-B*58:02H HLA-A*02:08H HLA-B*57:03H
KTLQPVSELL

SEQ ID NO: 4040 - protein, 10 aa, Severe acute respiratory syndrome coronavirus 2
  REGION 1..10: note = Table A: HLA-B*35:03H HLA-C*15:05H HLA-B*35:01H HLA-B*35:07H
QPVSELLTPL

SEQ ID NO: 4041 - protein, 10 aa, Severe acute respiratory syndrome coronavirus 2
  REGION 1..10: note = Table A: HLA-B*27:02H HLA-B*53:01H HLA-B*35:03H HLA-B*35:01H HLA-B*35:02H HLA-B*35:08M HLA-B*35:07H HLA-C*08:01H HLA-B*35:12H HLA-B*38:02H
TPLGIDLDEW

SEQ ID NO: 4042 - protein, 10 aa, Severe acute respiratory syndrome coronavirus 2
  REGION 1..10: note = Table A: HLA-B*38:02H
DLDEWSMATY

SEQ ID NO: 4043 - protein, 10 aa, Severe acute respiratory syndrome coronavirus 2
  REGION 1..10: note = Table A: HLA-C*14:02H HLA-C*14:03H HLA-A*29:02H HLA-B*27:02H HLA-A*24:02H HLA-C*08:01H HLA-A*23:01H
YYLFDESGEF

SEQ ID NO: 4044 - protein, 10 aa, Severe acute respiratory syndrome coronavirus 2
  REGION 1..10: note = Table A: HLA-A*36:01H HLA-B*27:02M HLA-A*02:05H HLA-A*02:02H HLA-A*34:01H HLA-A*34:02H HLA-B*38:02H
YLFDESGEFK

SEQ ID NO: 4045 - protein, 10 aa, Severe acute respiratory syndrome coronavirus 2
  REGION 1..10: note = Table A: HLA-C*04:01H HLA-C*04:03M HLA-A*02:07H HLA-C*08:01H HLA-B*38:02H
LFDESGEFKL

SEQ ID NO: 4046 - protein, 10 aa, Severe acute respiratory syndrome coronavirus 2
  REGION 1..10: note = Table A: HLA-B*44:02H HLA-B*44:05H HLA-B*44:03H HLA-B*18:01H HLA-A*30:02H HLA-B*40:02H
GEFKLASHMY

SEQ ID NO: 4047 - protein, 10 aa, Severe acute respiratory syndrome coronavirus 2
  REGION 1..10: note = Table A: HLA-B*44:03H
EEEFEPSTQY

SEQ ID NO: 4048 - protein, 10 aa, Severe acute respiratory syndrome coronavirus 2
  REGION 1..10: note = Table A: HLA-A*29:01H HLA-A*29:02H HLA-B*39:01H
EFEPSTQYEY

SEQ ID NO: 4049 - protein, 10 aa, Severe acute respiratory syndrome coronavirus 2
  REGION 1..10: note = Table A: HLA-B*39:01H
QYEYGTEDDY

SEQ ID NO: 4050 - protein, 10 aa, Severe acute respiratory syndrome coronavirus 2
  REGION 1..10: note = Table A: HLA-B*44:05H HLA-B*40:01H HLA-B*40:02H HLA-B*41:02H
TEDDYQGKPL

SEQ ID NO: 4051 - protein, 10 aa, Severe acute respiratory syndrome coronavirus 2
  REGION 1..10: note = Table A: HLA-A*25:01H HLA-A*33:01H HLA-A*26:01H HLA-A*26:02H HLA-A*26:03H HLA-B*18:01M HLA-B*27:02H HLA-A*68:02H HLA-B*14:02H HLA-C*08:03H HLA-B*38:02H HLA-B*39:01H HLA-B*07:05H
DDYQGKPLEF

SEQ ID NO: 4052 - protein, 10 aa, Severe acute respiratory syndrome coronavirus 2
  REGION 1..10: note = Table A: HLA-B*56:01H HLA-B*55:02H HLA-C*15:05M HLA-B*55:01H HLA-A*02:08H HLA-B*39:06M HLA-B*40:06H HLA-B*54:01H HLA-B*07:02H HLA-B*07:05M HLA-B*50:01M
KPLEFGATSA

SEQ ID NO: 4053 - protein, 10 aa, Severe acute respiratory syndrome coronavirus 2
  REGION 1..10: note = Table A: HLA-B*40:01H
LEFGATSAAL

SEQ ID NO: 4054 - protein, 10 aa, Severe acute respiratory syndrome coronavirus 2
  REGION 1..10: note = Table A: HLA-B*53:01H
QPEEEQEEDW

SEQ ID NO: 4055 - protein, 10 aa, Severe acute respiratory syndrome coronavirus 2
  REGION 1..10: note = Table A: HLA-A*02:07H HLA-A*02:01M HLA-C*08:02H HLA-B*38:02H
WLDDDSQQTV

SEQ ID NO: 4056 - protein, 10 aa, Severe acute respiratory syndrome coronavirus 2
  REGION 1..10: note = Table A: HLA-A*68:02H
TTTIQTIVEV

SEQ ID NO: 4057 - protein, 10 aa, Severe acute respiratory syndrome coronavirus 2
  REGION 1..10: note = Table A: HLA-A*02:05H HLA-A*02:06H HLA-A*02:08H HLA-B*57:03M
QTIVEVQPQL

SEQ ID NO: 4058 - protein, 10 aa, Severe acute respiratory syndrome coronavirus 2
  REGION 1..10: note = Table A: HLA-B*44:05H HLA-B*49:01M
MELTPVVQTI

SEQ ID NO: 4059 - protein, 10 aa, Severe acute respiratory syndrome coronavirus 2
  REGION 1..10: note = Table A: HLA-B*15:01H
VVQTIEVNSF

SEQ ID NO: 4060 - protein, 10 aa, Severe acute respiratory syndrome coronavirus 2
  REGION 1..10: note = Table A: HLA-A*36:01H HLA-A*01:01H
TIEVNSFSGY

SEQ ID NO: 4061 - protein, 10 aa, Severe acute respiratory syndrome coronavirus 2
  REGION 1..10: note = Table A: HLA-B*49:01H
IEVNSFSGYL

SEQ ID NO: 4062 - protein, 10 aa, Severe acute respiratory syndrome coronavirus 2
  REGION 1..10: note = Table A: HLA-A*03:02M HLA-A*11:01H HLA-A*11:02H HLA-A*36:01H HLA-A*33:01H HLA-A*33:03M HLA-A*26:03H HLA-B*27:02H HLA-A*68:01M HLA-A*68:02H HLA-A*34:01M HLA-A*34:02H HLA-A*66:01H
EVNSFSGYLK

SEQ ID NO: 4063 - protein, 10 aa, Severe acute respiratory syndrome coronavirus 2
  REGION 1..10: note = Table A: HLA-B*27:02H HLA-A*30:02H
GYLKLTDNVY

SEQ ID NO: 4064 - protein, 10 aa, Severe acute respiratory syndrome coronavirus 2
  REGION 1..10: note = Table A: HLA-A*03:02H HLA-B*27:02H
KNADIVEEAK

SEQ ID NO: 4065 - protein, 10 aa, Severe acute respiratory syndrome coronavirus 2
  REGION 1..10: note = Table A: HLA-B*56:01H HLA-B*55:02M HLA-A*30:01M HLA-B*55:01M HLA-A*02:05M HLA-A*02:08H HLA-A*02:02H HLA-A*02:03H HLA-B*07:04H HLA-A*31:01H
KVKPTVVVNA

SEQ ID NO: 4066 - protein, 10 aa, Severe acute respiratory syndrome coronavirus 2
  REGION 1..10: note = Table A: HLA-B*35:01H HLA-B*38:02H HLA-B*15:02M
TVVVNAANVY

SEQ ID NO: 4067 - protein, 10 aa, Severe acute respiratory syndrome coronavirus 2
  REGION 1..10: note = Table A: HLA-A*02:08H
VVVNAANVYL

SEQ ID NO: 4068 - protein, 10 aa, Severe acute respiratory syndrome coronavirus 2
  REGION 1..10: note = Table A: HLA-A*11:303H HLA-A*03:01H HLA-A*03:02H HLA-A*11:01M HLA-A*11:02M HLA-A*36:01H HLA-A*34:02H HLA-C*07:27H
VVNAANVYLK

SEQ ID NO: 4069 - protein, 10 aa, Severe acute respiratory syndrome coronavirus 2
  REGION 1..10: note = Table A: HLA-B*38:02H HLA-B*39:01H
KHGGGVAGAL

SEQ ID NO: 4070 - protein, 10 aa, Severe acute respiratory syndrome coronavirus 2
  REGION 1..10: note = Table A: HLA-A*03:02H HLA-A*36:01H HLA-B*27:02H
GGGVAGALNK

SEQ ID NO: 4071 - protein, 10 aa, Severe acute respiratory syndrome coronavirus 2
  REGION 1..10: note = Table A: HLA-A*02:05H
GGVAGALNKA

SEQ ID NO: 4072 - protein, 10 aa, Severe acute respiratory syndrome coronavirus 2
  REGION 1..10: note = Table A: HLA-C*08:03H
GVAGALNKAT

SEQ ID NO: 4073 - protein, 10 aa, Severe acute respiratory syndrome coronavirus 2
  REGION 1..10: note = Table A: HLA-A*11:303H HLA-C*15:05H HLA-A*02:02M HLA-B*38:02H HLA-B*15:01M HLA-B*15:02H
ALNKATNNAM

SEQ ID NO: 4074 - protein, 10 aa, Severe acute respiratory syndrome coronavirus 2
  REGION 1..10: note = Table A: HLA-A*11:01H
ATNNAMQVES

SEQ ID NO: 4075 - protein, 10 aa, Severe acute respiratory syndrome coronavirus 2
  REGION 1..10: note = Table A: HLA-B*35:01M HLA-B*35:08M HLA-B*35:07H HLA-B*39:01H
NAMQVESDDY

SEQ ID NO: 4076 - protein, 10 aa, Severe acute respiratory syndrome coronavirus 2
  REGION 1..10: note = Table A: HLA-B*35:02H
MQVESDDYIA

SEQ ID NO: 4077 - protein, 10 aa, Severe acute respiratory syndrome coronavirus 2
  REGION 1..10: note = Table A: HLA-A*11:01H HLA-A*36:01H HLA-A*33:01H HLA-A*33:03H HLA-A*34:02H
DYIATNGPLK

SEQ ID NO: 4078 - protein, 10 aa, Severe acute respiratory syndrome coronavirus 2
  REGION 1..10: note = Table A: HLA-A*02:11H HLA-A*68:02H HLA-A*02:05H HLA-A*02:02H HLA-A*02:03M HLA-B*38:02H HLA-B*13:02H
YIATNGPLKV

SEQ ID NO: 4079 - protein, 10 aa, Severe acute respiratory syndrome coronavirus 2
  REGION 1..10: note = Table A: HLA-A*74:01H HLA-A*11:01H HLA-A*68:01H HLA-A*31:01H
ATNGPLKVGG

SEQ ID NO: 4080 - protein, 10 aa, Severe acute respiratory syndrome coronavirus 2
  REGION 1..10: note = Table A: HLA-C*15:05M HLA-B*07:05H
GPLKVGGSCV

SEQ ID NO: 4081 - protein, 10 aa, Severe acute respiratory syndrome coronavirus 2
  REGION 1..10: note = Table A: HLA-C*08:03H
GSCVLSGHNL

SEQ ID NO: 4082 - protein, 10 aa, Severe acute respiratory syndrome coronavirus 2
  REGION 1..10: note = Table A: HLA-A*03:01H HLA-A*03:02H HLA-A*11:01H HLA-A*11:02M HLA-A*34:02H
CVLSGHNLAK

SEQ ID NO: 4083 - protein, 10 aa, Severe acute respiratory syndrome coronavirus 2
  REGION 1..10: note = Table A: HLA-A*26:03H HLA-A*68:01H HLA-A*02:08H HLA-A*34:01H
HVVGPNVNKG

SEQ ID NO: 4084 - protein, 10 aa, Severe acute respiratory syndrome coronavirus 2
  REGION 1..10: note = Table A: HLA-A*02:08H HLA-B*35:02H HLA-B*35:12H
NVNKGEDIQL

SEQ ID NO: 4085 - protein, 10 aa, Severe acute respiratory syndrome coronavirus 2
  REGION 1..10: note = Table A: HLA-B*45:01H HLA-B*50:01M
GEDIQLLKSA

SEQ ID NO: 4086 - protein, 10 aa, Severe acute respiratory syndrome coronavirus 2
  REGION 1..10: note = Table A: HLA-B*44:02H HLA-B*44:03H HLA-B*18:01H HLA-B*35:01H
EDIQLLKSAY

SEQ ID NO: 4087 - protein, 10 aa, Severe acute respiratory syndrome coronavirus 2
  REGION 1..10: note = Table A: HLA-B*45:01H HLA-C*08:03H HLA-B*39:01H
AYENFNQHEV

SEQ ID NO: 4088 - protein, 10 aa, Severe acute respiratory syndrome coronavirus 2
  REGION 1..10: note = Table A: HLA-B*44:05H HLA-B*40:01M HLA-B*40:02M HLA-B*41:02H HLA-B*49:01H
YENFNQHEVL

SEQ ID NO: 4089 - protein, 10 aa, Severe acute respiratory syndrome coronavirus 2
  REGION 1..10: note = Table A: HLA-A*68:02M
ENFNQHEVLL

SEQ ID NO: 4090 - protein, 10 aa, Severe acute respiratory syndrome coronavirus 2
  REGION 1..10: note = Table A: HLA-B*38:01M HLA-B*38:02H HLA-B*39:01H HLA-B*15:10H
QHEVLLAPLL

SEQ ID NO: 4091 - protein, 10 aa, Severe acute respiratory syndrome coronavirus 2
  REGION 1..10: note = Table A: HLA-B*54:01H
EVLLAPLLSA

SEQ ID NO: 4092 - protein, 10 aa, Severe acute respiratory syndrome coronavirus 2
  REGION 1..10: note = Table A: HLA-A*02:11H HLA-A*02:02H
LLAPLLSAGI

SEQ ID NO: 4093 - protein, 10 aa, Severe acute respiratory syndrome coronavirus 2
  REGION 1..10: note = Table A: HLA-C*14:02H HLA-C*14:03H
IFGADPIHSL

SEQ ID NO: 4094 - protein, 10 aa, Severe acute respiratory syndrome coronavirus 2
  REGION 1..10: note = Table A: HLA-A*33:03H HLA-A*68:01H HLA-A*68:02H HLA-A*34:01M HLA-A*34:02H HLA-A*66:01M
FGADPIHSLR

SEQ ID NO: 4095 - protein, 10 aa, Severe acute respiratory syndrome coronavirus 2
  REGION 1..10: note = Table A: HLA-A*36:01H HLA-A*01:01H
CVDTVRTNVY

SEQ ID NO: 4096 - protein, 10 aa, Severe acute respiratory syndrome coronavirus 2
  REGION 1..10: note = Table A: HLA-A*68:02H
DTVRTNVYLA

SEQ ID NO: 4097 - protein, 10 aa, Severe acute respiratory syndrome coronavirus 2
  REGION 1..10: note = Table A: HLA-A*36:01H HLA-A*29:02H HLA-B*38:02H HLA-B*15:01H HLA-B*15:02H
YLAVFDKNLY

SEQ ID NO: 4098 - protein, 10 aa, Severe acute respiratory syndrome coronavirus 2
  REGION 1..10: note = Table A: HLA-A*11:303H HLA-A*03:01H HLA-A*03:02H HLA-A*11:01M HLA-A*11:02H HLA-A*30:02H HLA-A*34:02H HLA-C*07:27H
AVFDKNLYDK

SEQ ID NO: 4099 - protein, 10 aa, Severe acute respiratory syndrome coronavirus 2
  REGION 1..10: note = Table A: HLA-C*04:01H HLA-C*04:03H
VFDKNLYDKL

SEQ ID NO: 4100 - protein, 10 aa, Severe acute respiratory syndrome coronavirus 2
  REGION 1..10: note = Table A: HLA-A*25:01M HLA-B*46:01H HLA-A*26:01H HLA-A*26:02H HLA-A*02:02H HLA-A*02:03H HLA-B*38:02M HLA-B*15:02M
NLYDKLVSSF

SEQ ID NO: 4101 - protein, 10 aa, Severe acute respiratory syndrome coronavirus 2
  REGION 1..10: note = Table A: HLA-C*04:03H
LYDKLVSSFL

SEQ ID NO: 4102 - protein, 10 aa, Severe acute respiratory syndrome coronavirus 2
  REGION 1..10: note = Table A: HLA-A*36:01H
KLVSSFLEMK

SEQ ID NO: 4103 - protein, 10 aa, Severe acute respiratory syndrome coronavirus 2
  REGION 1..10: note = Table A: HLA-A*11:01H HLA-A*11:02H
SSFLEMKSEK

SEQ ID NO: 4104 - protein, 10 aa, Severe acute respiratory syndrome coronavirus 2
  REGION 1..10: note = Table A: HLA-B*57:03H
KSEKQVEQKI

SEQ ID NO: 4105 - protein, 10 aa, Severe acute respiratory syndrome coronavirus 2
  REGION 1..10: note = Table A: HLA-B*45:01H HLA-B*40:06H HLA-B*41:02H
SEKQVEQKIA

SEQ ID NO: 4106 - protein, 10 aa, Severe acute respiratory syndrome coronavirus 2
  REGION 1..10: note = Table A: HLA-A*02:11H HLA-A*02:05H HLA-A*02:06H HLA-A*02:08M HLA-B*38:02H HLA-B*13:01H HLA-B*13:02M
KQVEQKIAEI

SEQ ID NO: 4107 - protein, 10 aa, Severe acute respiratory syndrome coronavirus 2
  REGION 1..10: note = Table A: HLA-A*02:11H HLA-A*68:02H HLA-A*02:05M HLA-A*02:06H HLA-A*02:07H HLA-A*02:08M HLA-A*02:01M HLA-A*02:02H HLA-A*02:03H HLA-C*08:01H HLA-C*08:03H HLA-B*38:02H HLA-B*13:02M
KIAEIPKEEV

SEQ ID NO: 4108 - protein, 10 aa, Severe acute respiratory syndrome coronavirus 2
  REGION 1..10: note = Table A: HLA-B*45:01M HLA-B*40:06H HLA-B*50:01H
AEIPKEEVKP

SEQ ID NO: 4109 - protein, 10 aa, Severe acute respiratory syndrome coronavirus 2
  REGION 1..10: note = Table A: HLA-A*25:01H HLA-A*26:03H
EIPKEEVKPF

SEQ ID NO: 4110 - protein, 10 aa, Severe acute respiratory syndrome coronavirus 2
  REGION 1..10: note = Table A: HLA-B*07:04H
IPKEEVKPFI

SEQ ID NO: 4111 - protein, 10 aa, Severe acute respiratory syndrome coronavirus 2
  REGION 1..10: note = Table A: HLA-A*33:03H HLA-A*26:03H HLA-A*68:01H HLA-A*34:01H HLA-A*34:02H HLA-A*66:01M
EVKPFITESK

SEQ ID NO: 4112 - protein, 10 aa, Severe acute respiratory syndrome coronavirus 2
  REGION 1..10: note = Table A: HLA-A*11:303H HLA-C*08:01H HLA-B*38:02H
ACVEEVTTTL

SEQ ID NO: 4113 - protein, 10 aa, Severe acute respiratory syndrome coronavirus 2
  REGION 1..10: note = Table A: HLA-B*27:02H HLA-A*68:01H HLA-A*68:02H HLA-A*34:02H
EVTTTLEETK

SEQ ID NO: 4114 - protein, 10 aa, Severe acute respiratory syndrome coronavirus 2
  REGION 1..10: note = Table A: HLA-B*58:01H HLA-B*57:01H HLA-B*57:03M
VTTTLEETKF

SEQ ID NO: 4115 - protein, 10 aa, Severe acute respiratory syndrome coronavirus 2
  REGION 1..10: note = Table A: HLA-B*44:05H
EETKFLTENL

SEQ ID NO: 4116 - protein, 10 aa, Severe acute respiratory syndrome coronavirus 2
  REGION 1..10: note = Table A: HLA-A*68:02H
ETKFLTENLL

SEQ ID NO: 4117 - protein, 10 aa, Severe acute respiratory syndrome coronavirus 2
  REGION 1..10: note = Table A: HLA-A*36:01H HLA-A*29:02M
KFLTENLLLY

SEQ ID NO: 4118 - protein, 10 aa, Severe acute respiratory syndrome coronavirus 2
  REGION 1..10: note = Table A: HLA-A*02:04M HLA-A*02:01H
FLTENLLLYI

SEQ ID NO: 4119 - protein, 10 aa, Severe acute respiratory syndrome coronavirus 2
  REGION 1..10: note = Table A: HLA-A*02:02H
LLYIDINGNL

SEQ ID NO: 4120 - protein, 10 aa, Severe acute respiratory syndrome coronavirus 2
  REGION 1..10: note = Table A: HLA-C*14:03H HLA-A*23:01H
LYIDINGNLH

SEQ ID NO: 4121 - protein, 10 aa, Severe acute respiratory syndrome coronavirus 2
  REGION 1..10: note = Table A: HLA-A*02:02H HLA-B*38:02H
NLHPDSATLV

SEQ ID NO: 4122 - protein, 10 aa, Severe acute respiratory syndrome coronavirus 2
  REGION 1..10: note = Table A: HLA-B*35:01H HLA-B*38:02H HLA-B*13:01H
TLVSDIDITF

SEQ ID NO: 4123 - protein, 10 aa, Severe acute respiratory syndrome coronavirus 2
  REGION 1..10: note = Table A: HLA-A*02:11H HLA-A*68:02M HLA-A*02:04M HLA-A*02:05M HLA-A*02:07H HLA-A*02:08H HLA-A*02:02M
LVSDIDITFL

SEQ ID NO: 4124 - protein, 10 aa, Severe acute respiratory syndrome coronavirus 2
  REGION 1..10: note = Table A: HLA-A*36:01H
VSDIDITFLK

SEQ ID NO: 4125 - protein, 10 aa, Severe acute respiratory syndrome coronavirus 2
  REGION 1..10: note = Table A: HLA-A*24:07H
TFLKKDAPYI

SEQ ID NO: 4126 - protein, 10 aa, Severe acute respiratory syndrome coronavirus 2
  REGION 1..10: note = Table A: HLA-A*02:02H
FLKKDAPYIV

SEQ ID NO: 4127 - protein, 10 aa, Severe acute respiratory syndrome coronavirus 2
  REGION 1..10: note = Table A: HLA-A*68:02M HLA-B*51:01H
DAPYIVGDVV

SEQ ID NO: 4128 - protein, 10 aa, Severe acute respiratory syndrome coronavirus 2
  REGION 1..10: note = Table A: HLA-A*68:02H
IVGDVVQEGV

SEQ ID NO: 4129 - protein, 10 aa, Severe acute respiratory syndrome coronavirus 2
  REGION 1..10: note = Table A: HLA-A*26:03H
DVVQEGVLTA

SEQ ID NO: 4130 - protein, 10 aa, Severe acute respiratory syndrome coronavirus 2
  REGION 1..10: note = Table A: HLA-A*11:303H HLA-A*03:02H HLA-A*02:11M HLA-A*68:02H HLA-C*15:05H HLA-A*02:04M HLA-A*02:05M HLA-A*02:06M HLA-A*02:07H HLA-A*02:08M HLA-B*14:01H HLA-A*02:01H HLA-A*02:02H HLA-A*02:03M HLA-B*38:02M
  REGION 1..10: note = CONT. FROM ABOVE: HLA-B*13:02H
VVQEGVLTAV

SEQ ID NO: 4131 - protein, 10 aa, Severe acute respiratory syndrome coronavirus 2
  REGION 1..10: note = Table A: HLA-C*08:03H
GVLTAVVIPT

SEQ ID NO: 4132 - protein, 10 aa, Severe acute respiratory syndrome coronavirus 2
  REGION 1..10: note = Table A: HLA-A*03:01H HLA-A*03:02H HLA-A*11:01H HLA-A*11:02H HLA-B*27:02H HLA-A*23:01H
VLTAVVIPTK

SEQ ID NO: 4133 - protein, 10 aa, Severe acute respiratory syndrome coronavirus 2
  REGION 1..10: note = Table A: HLA-A*03:01H HLA-A*03:02H HLA-A*11:01H HLA-A*11:02H HLA-A*36:01H HLA-A*68:01M HLA-A*34:02M
LTAVVIPTKK

SEQ ID NO: 4134 - protein, 10 aa, Severe acute respiratory syndrome coronavirus 2
  REGION 1..10: note = Table A: HLA-B*54:01H
TAVVIPTKKA

SEQ ID NO: 4135 - protein, 10 aa, Severe acute respiratory syndrome coronavirus 2
  REGION 1..10: note = Table A: HLA-A*11:01H HLA-A*36:01H
AGGTTEMLAK

SEQ ID NO: 4136 - protein, 10 aa, Severe acute respiratory syndrome coronavirus 2
  REGION 1..10: note = Table A: HLA-A*68:01H
TTEMLAKALR

SEQ ID NO: 4137 - protein, 10 aa, Severe acute respiratory syndrome coronavirus 2
  REGION 1..10: note = Table A: HLA-A*30:02M HLA-B*38:02H HLA-B*15:01M HLA-B*15:02H HLA-B*15:03H
ALRKVPTDNY

SEQ ID NO: 4138 - protein, 10 aa, Severe acute respiratory syndrome coronavirus 2
  REGION 1..10: note = Table A: HLA-B*38:02H
LRKVPTDNYI

SEQ ID NO: 4139 - protein, 10 aa, Severe acute respiratory syndrome coronavirus 2
  REGION 1..10: note = Table A: HLA-A*02:08H
KVPTDNYITT

SEQ ID NO: 4140 - protein, 10 aa, Severe acute respiratory syndrome coronavirus 2
  REGION 1..10: note = Table A: HLA-B*56:01H HLA-B*27:02H HLA-B*53:01H HLA-B*55:02H HLA-C*15:05H HLA-B*35:01H HLA-B*35:08M HLA-B*35:07H HLA-B*38:02H HLA-B*15:02H HLA-B*07:05H HLA-B*15:11M
VPTDNYITTY

SEQ ID NO: 4141 - protein, 10 aa, Severe acute respiratory syndrome coronavirus 2
  REGION 1..10: note = Table A: HLA-C*03:04H HLA-C*08:03H
YITTYPGQGL

SEQ ID NO: 4142 - protein, 10 aa, Severe acute respiratory syndrome coronavirus 2
  REGION 1..10: note = Table A: HLA-A*34:02H HLA-A*66:01H
TTYPGQGLNG

SEQ ID NO: 4143 - protein, 10 aa, Severe acute respiratory syndrome coronavirus 2
  REGION 1..10: note = Table A: HLA-C*14:02H HLA-C*14:03H
TYPGQGLNGY

SEQ ID NO: 4144 - protein, 10 aa, Severe acute respiratory syndrome coronavirus 2
  REGION 1..10: note = Table A: HLA-A*11:303H HLA-C*03:03H HLA-C*03:02H HLA-C*03:04M HLA-A*68:02M HLA-B*35:03M HLA-C*15:05H HLA-C*12:03H HLA-A*02:05H HLA-A*02:06H HLA-A*02:08H HLA-A*02:02H HLA-B*35:01H HLA-B*35:02H HLA-C*17:01H
  REGION 1..10: note = CONT. FROM ABOVE: HLA-C*08:01M HLA-C*08:03H HLA-B*35:12H HLA- B*38:02M HLA-B*40:01H HLA-B*39:01H HLA-B*57:03H HLA-A*66:01H
YTVEEAKTVL

SEQ ID NO: 4145 - protein, 10 aa, Severe acute respiratory syndrome coronavirus 2
  REGION 1..10: note = Table A: HLA-A*11:303M HLA-A*03:01M HLA-A*03:02H HLA-A*11:01H HLA-A*11:02H HLA-A*36:01M HLA-A*26:03H HLA-B*27:02H HLA-A*30:02H HLA-A*68:01H HLA-A*68:02H HLA-A*34:01H HLA-A*34:02H HLA-C*07:27H HLA-A*66:01H
TVEEAKTVLK

SEQ ID NO: 4146 - protein, 10 aa, Severe acute respiratory syndrome coronavirus 2
  REGION 1..10: note = Table A: HLA-B*58:02H HLA-B*57:03M
KSAFYILPSI

SEQ ID NO: 4147 - protein, 10 aa, Severe acute respiratory syndrome coronavirus 2
  REGION 1..10: note = Table A: HLA-A*68:02H HLA-C*12:03H
SAFYILPSII

SEQ ID NO: 4148 - protein, 10 aa, Severe acute respiratory syndrome coronavirus 2
  REGION 1..10: note = Table A: HLA-A*03:02H
ILPSIISNEK

SEQ ID NO: 4149 - protein, 10 aa, Severe acute respiratory syndrome coronavirus 2
  REGION 1..10: note = Table A: HLA-B*38:02H
SIISNEKQEI

SEQ ID NO: 4150 - protein, 10 aa, Severe acute respiratory syndrome coronavirus 2
  REGION 1..10: note = Table A: HLA-B*58:01M HLA-B*44:02H HLA-B*44:05H HLA-B*57:01H HLA-B*44:03H HLA-B*27:02H HLA-B*38:02H HLA-A*32:01H HLA-B*57:03M HLA-B*13:01H
KQEILGTVSW

SEQ ID NO: 4151 - protein, 10 aa, Severe acute respiratory syndrome coronavirus 2
  REGION 1..10: note = Table A: HLA-A*68:02H
EILGTVSWNL

SEQ ID NO: 4152 - protein, 10 aa, Severe acute respiratory syndrome coronavirus 2
  REGION 1..10: note = Table A: HLA-B*38:02H
AHAEETRKLM

SEQ ID NO: 4153 - protein, 10 aa, Severe acute respiratory syndrome coronavirus 2
  REGION 1..10: note = Table A: HLA-B*45:01H
AEETRKLMPV

SEQ ID NO: 4154 - protein, 10 aa, Severe acute respiratory syndrome coronavirus 2
  REGION 1..10: note = Table A: HLA-A*03:01H HLA-A*03:02M
KLMPVCVETK

SEQ ID NO: 4155 - protein, 10 aa, Severe acute respiratory syndrome coronavirus 2
  REGION 1..10: note = Table A: HLA-B*54:01H
MPVCVETKAI

SEQ ID NO: 4156 - protein, 10 aa, Severe acute respiratory syndrome coronavirus 2
  REGION 1..10: note = Table A: HLA-B*44:05H HLA-B*40:02H HLA-B*49:01M
VETKAIVSTI

SEQ ID NO: 4157 - protein, 10 aa, Severe acute respiratory syndrome coronavirus 2
  REGION 1..10: note = Table A: HLA-A*30:02M
AIVSTIQRKY

SEQ ID NO: 4158 - protein, 10 aa, Severe acute respiratory syndrome coronavirus 2
  REGION 1..10: note = Table A: HLA-A*30:01H
IVSTIQRKYK

SEQ ID NO: 4159 - protein, 10 aa, Severe acute respiratory syndrome coronavirus 2
  REGION 1..10: note = Table A: HLA-B*15:03M
IKIQEGVVDY

SEQ ID NO: 4160 - protein, 10 aa, Severe acute respiratory syndrome coronavirus 2
  REGION 1..10: note = Table A: HLA-A*02:11H HLA-A*30:02H HLA-A*02:08H
KIQEGVVDYG

SEQ ID NO: 4161 - protein, 10 aa, Severe acute respiratory syndrome coronavirus 2
  REGION 1..10: note = Table A: HLA-A*30:02H
GVVDYGARFY

SEQ ID NO: 4162 - protein, 10 aa, Severe acute respiratory syndrome coronavirus 2
  REGION 1..10: note = Table A: HLA-A*36:01H HLA-C*04:03H
VVDYGARFYF

SEQ ID NO: 4163 - protein, 10 aa, Severe acute respiratory syndrome coronavirus 2
  REGION 1..10: note = Table A: HLA-C*14:02H HLA-C*14:03M
FYFYTSKTTV

SEQ ID NO: 4164 - protein, 10 aa, Severe acute respiratory syndrome coronavirus 2
  REGION 1..10: note = Table A: HLA-C*14:02H HLA-C*14:03M
YFYTSKTTVA

SEQ ID NO: 4165 - protein, 10 aa, Severe acute respiratory syndrome coronavirus 2
  REGION 1..10: note = Table A: HLA-A*68:02H HLA-A*02:08H
YTSKTTVASL

SEQ ID NO: 4166 - protein, 10 aa, Severe acute respiratory syndrome coronavirus 2
  REGION 1..10: note = Table A: HLA-A*68:01H HLA-A*68:02M HLA-A*02:08H HLA-B*57:03H
TTVASLINTL

SEQ ID NO: 4167 - protein, 10 aa, Severe acute respiratory syndrome coronavirus 2
  REGION 1..10: note = Table A: HLA-A*02:02H HLA-A*02:03H HLA-B*38:02H
TLNDLNETLV

SEQ ID NO: 4168 - protein, 10 aa, Severe acute respiratory syndrome coronavirus 2
  REGION 1..10: note = Table A: HLA-A*36:01H HLA-A*25:01H HLA-A*26:01M HLA-A*26:02H HLA-A*26:03H HLA-A*29:02H HLA-A*01:01H HLA-A*34:02M
ETLVTMPLGY

SEQ ID NO: 4169 - protein, 10 aa, Severe acute respiratory syndrome coronavirus 2
  REGION 1..10: note = Table A: HLA-A*11:01H HLA-A*11:02H HLA-B*57:01H HLA-A*34:02H HLA-B*57:03H
VTMPLGYVTH

SEQ ID NO: 4170 - protein, 10 aa, Severe acute respiratory syndrome coronavirus 2
  REGION 1..10: note = Table A: HLA-B*42:01H HLA-B*53:01H HLA-B*35:03M HLA-C*15:05M HLA-A*34:01H HLA-B*35:01H HLA-B*35:07H HLA-B*54:01H HLA-B*07:02H HLA-B*07:04H HLA-B*07:05H
MPLGYVTHGL

SEQ ID NO: 4171 - protein, 10 aa, Severe acute respiratory syndrome coronavirus 2
  REGION 1..10: note = Table A: HLA-A*02:08H
VTHGLNLEEA

SEQ ID NO: 4172 - protein, 10 aa, Severe acute respiratory syndrome coronavirus 2
  REGION 1..10: note = Table A: HLA-A*30:02H HLA-B*15:01M
GLNLEEAARY

SEQ ID NO: 4173 - protein, 10 aa, Severe acute respiratory syndrome coronavirus 2
  REGION 1..10: note = Table A: HLA-A*34:02H
EAARYMRSLK

SEQ ID NO: 4174 - protein, 10 aa, Severe acute respiratory syndrome coronavirus 2
  REGION 1..10: note = Table A: HLA-B*55:02H
RYMRSLKVPA

SEQ ID NO: 4175 - protein, 10 aa, Severe acute respiratory syndrome coronavirus 2
  REGION 1..10: note = Table A: HLA-B*08:01H HLA-A*02:02H HLA-A*02:03M HLA-B*38:02M HLA-B*07:02H HLA-B*07:04H
SLKVPATVSV

SEQ ID NO: 4176 - protein, 10 aa, Severe acute respiratory syndrome coronavirus 2
  REGION 1..10: note = Table A: HLA-B*58:01H HLA-A*36:01M HLA-B*57:01H HLA-B*46:01H HLA-A*01:01M HLA-A*30:02H HLA-B*35:01H HLA-B*38:02H HLA-B*15:01M HLA-B*39:01H HLA-B*57:03H HLA-B*15:11H
VSSPDAVTAY

SEQ ID NO: 4177 - protein, 10 aa, Severe acute respiratory syndrome coronavirus 2
  REGION 1..10: note = Table A: HLA-A*03:01H HLA-A*68:01H HLA-A*68:02H HLA-A*02:05H HLA-A*34:02H HLA-B*38:02H HLA-B*54:01H
TAYNGYLTSS

SEQ ID NO: 4178 - protein, 10 aa, Severe acute respiratory syndrome coronavirus 2
  REGION 1..10: note = Table A: HLA-A*02:05H HLA-A*02:06H HLA-A*02:08M HLA-B*57:03H
KTPEEHFIET

SEQ ID NO: 4179 - protein, 10 aa, Severe acute respiratory syndrome coronavirus 2
  REGION 1..10: note = Table A: HLA-C*15:05H HLA-B*38:02H
TPEEHFIETI

SEQ ID NO: 4180 - protein, 10 aa, Severe acute respiratory syndrome coronavirus 2
  REGION 1..10: note = Table A: HLA-B*44:05H HLA-B*40:01H HLA-B*40:02H
EEHFIETISL

SEQ ID NO: 4181 - protein, 10 aa, Severe acute respiratory syndrome coronavirus 2
  REGION 1..10: note = Table A: HLA-C*14:03H
HFIETISLAG

SEQ ID NO: 4182 - protein, 10 aa, Severe acute respiratory syndrome coronavirus 2
  REGION 1..10: note = Table A: HLA-A*33:03H HLA-A*26:03M HLA-A*68:01M HLA-A*68:02H HLA-A*34:01M HLA-A*34:02H HLA-A*66:01H
ETISLAGSYK

SEQ ID NO: 4183 - protein, 10 aa, Severe acute respiratory syndrome coronavirus 2
  REGION 1..10: note = Table A: HLA-B*57:01H
ISLAGSYKDW

SEQ ID NO: 4184 - protein, 10 aa, Severe acute respiratory syndrome coronavirus 2
  REGION 1..10: note = Table A: HLA-A*68:02H HLA-C*15:05H HLA-C*17:01H HLA-B*38:02H
WSYSGQSTQL

SEQ ID NO: 4185 - protein, 10 aa, Severe acute respiratory syndrome coronavirus 2
  REGION 1..10: note = Table A: HLA-B*27:02H HLA-B*15:01M HLA-B*15:03H
GQSTQLGIEF

SEQ ID NO: 4186 - protein, 10 aa, Severe acute respiratory syndrome coronavirus 2
  REGION 1..10: note = Table A: HLA-A*68:02H
QSTQLGIEFL

SEQ ID NO: 4187 - protein, 10 aa, Severe acute respiratory syndrome coronavirus 2
  REGION 1..10: note = Table A: HLA-A*11:303M HLA-A*03:02M HLA-A*11:01H HLA-A*11:02H HLA-A*36:01H HLA-A*30:02H HLA-A*68:02H HLA-A*34:02H HLA-C*07:27H
STQLGIEFLK

SEQ ID NO: 4188 - protein, 10 aa, Severe acute respiratory syndrome coronavirus 2
  REGION 1..10: note = Table A: HLA-B*38:02H HLA-B*15:01H HLA-B*15:02H
FLKRGDKSVY

SEQ ID NO: 4189 - protein, 10 aa, Severe acute respiratory syndrome coronavirus 2
  REGION 1..10: note = Table A: HLA-B*15:03H
LKRGDKSVYY

SEQ ID NO: 4190 - protein, 10 aa, Severe acute respiratory syndrome coronavirus 2
  REGION 1..10: note = Table A: HLA-C*14:02H HLA-C*14:03H HLA-B*46:01H HLA-A*29:01H HLA-A*29:02H HLA-C*07:02H HLA-B*27:02H HLA-C*15:05H HLA-A*24:02H HLA-A*24:07H HLA-C*08:01H HLA-A*23:01H HLA-B*39:01H HLA-B*07:05H
VYYTSNPTTF

SEQ ID NO: 4191 - protein, 10 aa, Severe acute respiratory syndrome coronavirus 2
  REGION 1..10: note = Table A: HLA-A*68:02H HLA-A*02:05H HLA-A*02:08H HLA-A*02:02H HLA-A*34:02H HLA-A*66:01H
YTSNPTTFHL

SEQ ID NO: 4192 - protein, 10 aa, Severe acute respiratory syndrome coronavirus 2
  REGION 1..10: note = Table A: HLA-A*68:02H
TTFHLDGEVI

SEQ ID NO: 4193 - protein, 10 aa, Severe acute respiratory syndrome coronavirus 2
  REGION 1..10: note = Table A: HLA-B*38:01M HLA-B*38:02H HLA-B*39:01H HLA-B*15:10M
FHLDGEVITF

SEQ ID NO: 4194 - protein, 10 aa, Severe acute respiratory syndrome coronavirus 2
  REGION 1..10: note = Table A: HLA-A*26:03H HLA-A*68:02H
EVITFDNLKT

SEQ ID NO: 4195 - protein, 10 aa, Severe acute respiratory syndrome coronavirus 2
  REGION 1..10: note = Table A: HLA-A*02:11H HLA-A*68:02H HLA-A*02:05H HLA-A*02:08H HLA-A*02:02H HLA-B*57:03M
ITFDNLKTLL

SEQ ID NO: 4196 - protein, 10 aa, Severe acute respiratory syndrome coronavirus 2
  REGION 1..10: note = Table A: HLA-A*33:01H
DNLKTLLSLR

SEQ ID NO: 4197 - protein, 10 aa, Severe acute respiratory syndrome coronavirus 2
  REGION 1..10: note = Table A: HLA-A*74:01H
KTLLSLREVR

SEQ ID NO: 4198 - protein, 10 aa, Severe acute respiratory syndrome coronavirus 2
  REGION 1..10: note = Table A: HLA-A*24:07H HLA-A*23:01H
VFTTVDNINL

SEQ ID NO: 4199 - protein, 10 aa, Severe acute respiratory syndrome coronavirus 2
  REGION 1..10: note = Table A: HLA-A*68:02H
TTVDNINLHT

SEQ ID NO: 4200 - protein, 10 aa, Severe acute respiratory syndrome coronavirus 2
  REGION 1..10: note = Table A: HLA-A*68:02H
DNINLHTQVV

SEQ ID NO: 4201 - protein, 10 aa, Severe acute respiratory syndrome coronavirus 2
  REGION 1..10: note = Table A: HLA-B*38:02H
LHTQVVDMSM

SEQ ID NO: 4202 - protein, 10 aa, Severe acute respiratory syndrome coronavirus 2
  REGION 1..10: note = Table A: HLA-B*27:02M HLA-A*30:02H HLA-B*35:01H HLA-B*38:02M HLA-B*15:01M HLA-B*15:02M HLA-B*15:03M HLA-B*39:01H
TQVVDMSMTY

SEQ ID NO: 4203 - protein, 10 aa, Severe acute respiratory syndrome coronavirus 2
  REGION 1..10: note = Table A: HLA-A*68:02H HLA-A*34:02H HLA-C*08:03H
MTYGQQFGPT

SEQ ID NO: 4204 - protein, 10 aa, Severe acute respiratory syndrome coronavirus 2
  REGION 1..10: note = Table A: HLA-A*29:02H HLA-A*30:02H
TYGQQFGPTY

SEQ ID NO: 4205 - protein, 10 aa, Severe acute respiratory syndrome coronavirus 2
  REGION 1..10: note = Table A: HLA-B*39:01H
YGQQFGPTYL

SEQ ID NO: 4206 - protein, 10 aa, Severe acute respiratory syndrome coronavirus 2
  REGION 1..10: note = Table A: HLA-B*39:01H
QQFGPTYLDG

SEQ ID NO: 4207 - protein, 10 aa, Severe acute respiratory syndrome coronavirus 2
  REGION 1..10: note = Table A: HLA-B*27:02H HLA-A*23:01H
TYLDGADVTK

SEQ ID NO: 4208 - protein, 10 aa, Severe acute respiratory syndrome coronavirus 2
  REGION 1..10: note = Table A: HLA-A*02:07H HLA-B*38:02H HLA-B*13:01H
YLDGADVTKI

SEQ ID NO: 4209 - protein, 10 aa, Severe acute respiratory syndrome coronavirus 2
  REGION 1..10: note = Table A: HLA-A*68:01H HLA-A*68:02H
DGADVTKIKP

SEQ ID NO: 4210 - protein, 10 aa, Severe acute respiratory syndrome coronavirus 2
  REGION 1..10: note = Table A: HLA-B*38:01H HLA-B*38:02H HLA-B*15:10H
SHEGKTFYVL

SEQ ID NO: 4211 - protein, 10 aa, Severe acute respiratory syndrome coronavirus 2
  REGION 1..10: note = Table A: HLA-C*08:01H HLA-B*39:01H
FYVLPNDDTL

SEQ ID NO: 4212 - protein, 10 aa, Severe acute respiratory syndrome coronavirus 2
  REGION 1..10: note = Table A: HLA-A*34:01H HLA-A*66:01H
YVLPNDDTLR

SEQ ID NO: 4213 - protein, 10 aa, Severe acute respiratory syndrome coronavirus 2
  REGION 1..10: note = Table A: HLA-A*02:07H
VLPNDDTLRV

SEQ ID NO: 4214 - protein, 10 aa, Severe acute respiratory syndrome coronavirus 2
  REGION 1..10: note = Table A: HLA-B*38:02M HLA-B*15:02H
TLRVEAFEYY

SEQ ID NO: 4215 - protein, 10 aa, Severe acute respiratory syndrome coronavirus 2
  REGION 1..10: note = Table A: HLA-A*24:02H HLA-A*24:07H HLA-A*23:01H
EYYHTTDPSF

SEQ ID NO: 4216 - protein, 10 aa, Severe acute respiratory syndrome coronavirus 2
  REGION 1..10: note = Table A: HLA-C*14:02M HLA-C*14:03H HLA-A*29:02H HLA-C*04:03H HLA-A*24:02H HLA-A*24:07M HLA-A*23:01H
YYHTTDPSFL

SEQ ID NO: 4217 - protein, 10 aa, Severe acute respiratory syndrome coronavirus 2
  REGION 1..10: note = Table A: HLA-A*11:303H HLA-A*74:01H HLA-A*03:01H HLA-A*11:01M HLA-A*11:02H HLA-A*36:01H HLA-A*33:01M HLA-A*33:03H HLA-A*26:01H HLA-A*26:03H HLA-A*68:01H HLA-A*68:02H HLA-A*34:01H HLA-A*34:02H HLA-C*07:27H
  REGION 1..10: note = CONT. FROM ABOVE: HLA-A*31:01H HLA-A*66:01H
HTTDPSFLGR

SEQ ID NO: 4218 - protein, 10 aa, Severe acute respiratory syndrome coronavirus 2
  REGION 1..10: note = Table A: HLA-B*58:01H HLA-A*36:01H HLA-A*26:01H HLA-A*29:02H HLA-A*01:01H HLA-C*04:03H HLA-A*30:02M HLA-A*34:02M
TTDPSFLGRY

SEQ ID NO: 4219 - protein, 10 aa, Severe acute respiratory syndrome coronavirus 2
  REGION 1..10: note = Table A: HLA-C*14:02H HLA-C*14:03H
SFLGRYMSAL

SEQ ID NO: 4220 - protein, 10 aa, Severe acute respiratory syndrome coronavirus 2
  REGION 1..10: note = Table A: HLA-A*30:02H
RYMSALNHTK

SEQ ID NO: 4221 - protein, 10 aa, Severe acute respiratory syndrome coronavirus 2
  REGION 1..10: note = Table A: HLA-A*30:02H
ALNHTKKWKY

SEQ ID NO: 4222 - protein, 10 aa, Severe acute respiratory syndrome coronavirus 2
  REGION 1..10: note = Table A: HLA-B*56:01H HLA-B*55:02H HLA-B*35:03H HLA-C*15:05M HLA-B*55:01H HLA-B*51:01M HLA-B*38:02H HLA-B*54:01H HLA-B*07:02H HLA-B*07:05H
YPQVNGLTSI

SEQ ID NO: 4223 - protein, 10 aa, Severe acute respiratory syndrome coronavirus 2
  REGION 1..10: note = Table A: HLA-B*58:01H HLA-B*57:01H HLA-A*25:01H HLA-B*53:01M HLA-B*15:13H HLA-A*32:01H HLA-B*57:03M
QVNGLTSIKW

SEQ ID NO: 4224 - protein, 10 aa, Severe acute respiratory syndrome coronavirus 2
  REGION 1..10: note = Table A: HLA-A*24:02H HLA-A*23:01H
CYLATALLTL

SEQ ID NO: 4225 - protein, 10 aa, Severe acute respiratory syndrome coronavirus 2
  REGION 1..10: note = Table A: HLA-A*68:02H
ATALLTLQQI

SEQ ID NO: 4226 - protein, 10 aa, Severe acute respiratory syndrome coronavirus 2
  REGION 1..10: note = Table A: HLA-A*02:11H HLA-A*02:04M HLA-A*02:01M HLA-A*02:02H
ALLTLQQIEL

SEQ ID NO: 4227 - protein, 10 aa, Severe acute respiratory syndrome coronavirus 2
  REGION 1..10: note = Table A: HLA-B*57:01H HLA-A*29:02H HLA-B*57:03M
LTLQQIELKF

SEQ ID NO: 4228 - protein, 10 aa, Severe acute respiratory syndrome coronavirus 2
  REGION 1..10: note = Table A: HLA-B*45:01H HLA-B*40:06H HLA-B*50:01M
QQIELKFNPP

SEQ ID NO: 4229 - protein, 10 aa, Severe acute respiratory syndrome coronavirus 2
  REGION 1..10: note = Table A: HLA-B*40:01M HLA-B*40:02M HLA-B*40:06H HLA-B*41:02H HLA-B*49:01H
IELKFNPPAL

SEQ ID NO: 4230 - protein, 10 aa, Severe acute respiratory syndrome coronavirus 2
  REGION 1..10: note = Table A: HLA-A*29:02H HLA-B*39:01H
FNPPALQDAY

SEQ ID NO: 4231 - protein, 10 aa, Severe acute respiratory syndrome coronavirus 2
  REGION 1..10: note = Table A: HLA-B*35:01M HLA-B*35:08H
NPPALQDAYY

SEQ ID NO: 4232 - protein, 10 aa, Severe acute respiratory syndrome coronavirus 2
  REGION 1..10: note = Table A: HLA-A*74:01M
ALQDAYYRAR

SEQ ID NO: 4233 - protein, 10 aa, Severe acute respiratory syndrome coronavirus 2
  REGION 1..10: note = Table A: HLA-B*57:03M
RARAGEAANF

SEQ ID NO: 4234 - protein, 10 aa, Severe acute respiratory syndrome coronavirus 2
  REGION 1..10: note = Table A: HLA-B*49:01H
GEAANFCALI

SEQ ID NO: 4235 - protein, 10 aa, Severe acute respiratory syndrome coronavirus 2
  REGION 1..10: note = Table A: HLA-A*74:01H HLA-A*36:01H HLA-A*30:02H
KTVGELGDVR

SEQ ID NO: 4236 - protein, 10 aa, Severe acute respiratory syndrome coronavirus 2
  REGION 1..10: note = Table A: HLA-B*44:05M HLA-B*44:03H HLA-B*40:01M HLA-B*40:02M HLA-B*41:02M HLA-B*49:01H
GELGDVRETM

SEQ ID NO: 4237 - protein, 10 aa, Severe acute respiratory syndrome coronavirus 2
  REGION 1..10: note = Table A: HLA-A*36:01H
LGDVRETMSY

SEQ ID NO: 4238 - protein, 10 aa, Severe acute respiratory syndrome coronavirus 2
  REGION 1..10: note = Table A: HLA-A*68:02M HLA-A*34:02H
ETMSYLFQHA

SEQ ID NO: 4239 - protein, 10 aa, Severe acute respiratory syndrome coronavirus 2
  REGION 1..10: note = Table A: HLA-C*15:05M HLA-A*02:08M HLA-C*08:03H HLA-B*57:03M
KTCGQQQTTL

SEQ ID NO: 4240 - protein, 10 aa, Severe acute respiratory syndrome coronavirus 2
  REGION 1..10: note = Table A: HLA-B*13:02H
GQQQTTLKGV

SEQ ID NO: 4241 - protein, 10 aa, Severe acute respiratory syndrome coronavirus 2
  REGION 1..10: note = Table A: HLA-B*39:06H
QQTTLKGVEA

SEQ ID NO: 4242 - protein, 10 aa, Severe acute respiratory syndrome coronavirus 2
  REGION 1..10: note = Table A: HLA-B*35:03H HLA-B*57:03H
TTLKGVEAVM

SEQ ID NO: 4243 - protein, 10 aa, Severe acute respiratory syndrome coronavirus 2
  REGION 1..10: note = Table A: HLA-B*46:01H HLA-A*30:02H HLA-B*38:02M HLA-B*15:01H HLA-B*15:02H HLA-B*15:11H
TLKGVEAVMY

SEQ ID NO: 4244 - protein, 10 aa, Severe acute respiratory syndrome coronavirus 2
  REGION 1..10: note = Table A: HLA-B*40:01H
VEAVMYMGTL

SEQ ID NO: 4245 - protein, 10 aa, Severe acute respiratory syndrome coronavirus 2
  REGION 1..10: note = Table A: HLA-A*11:01H HLA-A*11:02H HLA-A*29:01H HLA-A*29:02H HLA-A*30:02H HLA-B*15:01H
AVMYMGTLSY

SEQ ID NO: 4246 - protein, 10 aa, Severe acute respiratory syndrome coronavirus 2
  REGION 1..10: note = Table A: HLA-B*38:02H
YMGTLSYEQF

SEQ ID NO: 4247 - protein, 10 aa, Severe acute respiratory syndrome coronavirus 2
  REGION 1..10: note = Table A: HLA-A*36:01H
MGTLSYEQFK

SEQ ID NO: 4248 - protein, 10 aa, Severe acute respiratory syndrome coronavirus 2
  REGION 1..10: note = Table A: HLA-A*11:303M HLA-A*03:01H HLA-A*03:02M HLA-A*11:01H HLA-A*11:02H HLA-A*36:01H HLA-A*30:02H HLA-A*34:02H HLA-C*07:27M
GTLSYEQFKK

SEQ ID NO: 4249 - protein, 10 aa, Severe acute respiratory syndrome coronavirus 2
  REGION 1..10: note = Table A: HLA-B*49:01H
YEQFKKGVQI

SEQ ID NO: 4250 - protein, 10 aa, Severe acute respiratory syndrome coronavirus 2
  REGION 1..10: note = Table A: HLA-A*03:02H
GVQIPCTCGK

SEQ ID NO: 4251 - protein, 10 aa, Severe acute respiratory syndrome coronavirus 2
  REGION 1..10: note = Table A: HLA-C*14:03H HLA-A*23:01H
KYLVQQESPF

SEQ ID NO: 4252 - protein, 10 aa, Severe acute respiratory syndrome coronavirus 2
  REGION 1..10: note = Table A: HLA-A*02:04H HLA-A*02:01H HLA-A*02:02H HLA-A*02:03H HLA-B*38:02H
YLVQQESPFV

SEQ ID NO: 4253 - protein, 10 aa, Severe acute respiratory syndrome coronavirus 2
  REGION 1..10: note = Table A: HLA-B*45:01H HLA-B*40:06H HLA-B*50:01H
QESPFVMMSA

SEQ ID NO: 4254 - protein, 10 aa, Severe acute respiratory syndrome coronavirus 2
  REGION 1..10: note = Table A: HLA-A*03:02H HLA-A*29:01M HLA-A*29:02M HLA-A*30:02M HLA-B*38:02H HLA-B*15:01H HLA-B*07:05H
VMMSAPPAQY

SEQ ID NO: 4255 - protein, 10 aa, Severe acute respiratory syndrome coronavirus 2
  REGION 1..10: note = Table A: HLA-C*03:04H HLA-A*68:02M HLA-B*35:03H HLA-A*02:08H HLA-C*08:01H HLA-C*08:03H HLA-B*38:02H HLA-B*39:01H HLA-B*57:03H
MSAPPAQYEL

SEQ ID NO: 4256 - protein, 10 aa, Severe acute respiratory syndrome coronavirus 2
  REGION 1..10: note = Table A: HLA-A*36:01H
SAPPAQYELK

SEQ ID NO: 4257 - protein, 10 aa, Severe acute respiratory syndrome coronavirus 2
  REGION 1..10: note = Table A: HLA-B*38:02H HLA-B*15:01M HLA-B*15:03M
AQYELKHGTF

SEQ ID NO: 4258 - protein, 10 aa, Severe acute respiratory syndrome coronavirus 2
  REGION 1..10: note = Table A: HLA-B*44:05H HLA-B*45:01M HLA-A*68:02H HLA-A*02:05H HLA-C*08:03H HLA-B*38:02H HLA-B*40:01H HLA-B*40:02M HLA-B*40:06M HLA-B*39:01H HLA-B*41:02H HLA-B*49:01M HLA-B*50:01H
SEYTGNYQCG

SEQ ID NO: 4259 - protein, 10 aa, Severe acute respiratory syndrome coronavirus 2
  REGION 1..10: note = Table A: HLA-B*38:02H HLA-B*15:03H
KHITSKETLY

SEQ ID NO: 4260 - protein, 10 aa, Severe acute respiratory syndrome coronavirus 2
  REGION 1..10: note = Table A: HLA-A*02:02H
TLYCIDGALL

SEQ ID NO: 4261 - protein, 10 aa, Severe acute respiratory syndrome coronavirus 2
  REGION 1..10: note = Table A: HLA-A*11:01H HLA-A*11:02H HLA-A*26:03H HLA-A*34:01H HLA-A*34:02M HLA-A*66:01H
YCIDGALLTK

SEQ ID NO: 4262 - protein, 10 aa, Severe acute respiratory syndrome coronavirus 2
  REGION 1..10: note = Table A: HLA-B*27:02H HLA-B*35:01H HLA-B*15:01H HLA-B*15:03H
GALLTKSSEY

SEQ ID NO: 4263 - protein, 10 aa, Severe acute respiratory syndrome coronavirus 2
  REGION 1..10: note = Table A: HLA-B*45:01H HLA-B*40:02H HLA-B*40:06H HLA-B*41:02H HLA-B*49:01M HLA-B*50:01H
SEYKGPITDV

SEQ ID NO: 4264 - protein, 10 aa, Severe acute respiratory syndrome coronavirus 2
  REGION 1..10: note = Table A: HLA-A*33:03H HLA-A*24:02H HLA-A*24:07M HLA-A*23:01H
EYKGPITDVF

SEQ ID NO: 4265 - protein, 10 aa, Severe acute respiratory syndrome coronavirus 2
  REGION 1..10: note = Table A: HLA-B*15:03H
YKGPITDVFY

SEQ ID NO: 4266 - protein, 10 aa, Severe acute respiratory syndrome coronavirus 2
  REGION 1..10: note = Table A: HLA-A*36:01H
KGPITDVFYK

SEQ ID NO: 4267 - protein, 10 aa, Severe acute respiratory syndrome coronavirus 2
  REGION 1..10: note = Table A: HLA-B*58:01H HLA-C*16:01H HLA-A*36:01H HLA-B*57:01H HLA-A*25:01H HLA-A*29:02H HLA-A*01:01H HLA-A*68:02H HLA-B*57:03H
YTTTIKPVTY

SEQ ID NO: 4268 - protein, 10 aa, Severe acute respiratory syndrome coronavirus 2
  REGION 1..10: note = Table A: HLA-A*11:303H HLA-A*03:01H HLA-A*03:02H HLA-A*11:01M HLA-A*11:02M HLA-A*36:01H HLA-A*68:01H HLA-A*34:02H HLA-C*07:27H
TTTIKPVTYK

SEQ ID NO: 4269 - protein, 10 aa, Severe acute respiratory syndrome coronavirus 2
  REGION 1..10: note = Table A: HLA-A*68:02H HLA-A*02:08H HLA-A*34:02H HLA-B*57:03H HLA-A*66:01H
TTIKPVTYKL

SEQ ID NO: 4270 - protein, 10 aa, Severe acute respiratory syndrome coronavirus 2
  REGION 1..10: note = Table A: HLA-A*02:06H
VVCTEIDPKL

SEQ ID NO: 4271 - protein, 10 aa, Severe acute respiratory syndrome coronavirus 2
  REGION 1..10: note = Table A: HLA-B*44:02M HLA-B*44:05M HLA-C*16:04H HLA-B*46:01M HLA-B*45:01H HLA-B*44:03H HLA-B*18:01M HLA-B*27:02H HLA-A*30:02H HLA-B*35:01H HLA-B*38:02H HLA-B*40:01H HLA-B*40:02H HLA-B*15:01H HLA-B*39:01H HLA-B*07:05H
  REGION 1..10: note = CONT. FROM ABOVE: HLA-B*49:01H HLA-B*50:01H
TEIDPKLDNY

SEQ ID NO: 4272 - protein, 10 aa, Severe acute respiratory syndrome coronavirus 2
  REGION 1..10: note = Table A: HLA-A*36:01H HLA-A*26:01H HLA-A*01:01H HLA-A*34:02H HLA-B*38:02H
EIDPKLDNYY

SEQ ID NO: 4273 - protein, 10 aa, Severe acute respiratory syndrome coronavirus 2
  REGION 1..10: note = Table A: HLA-C*14:02H HLA-C*14:03H HLA-A*24:02H HLA-A*24:07M HLA-A*23:01H
NYYKKDNSYF

SEQ ID NO: 4274 - protein, 10 aa, Severe acute respiratory syndrome coronavirus 2
  REGION 1..10: note = Table A: HLA-C*14:02H HLA-C*14:03M HLA-A*23:01H HLA-B*39:01H
SYFTEQPIDL

SEQ ID NO: 4275 - protein, 10 aa, Severe acute respiratory syndrome coronavirus 2
  REGION 1..10: note = Table A: HLA-A*36:01H HLA-A*01:01H
PIDLVPNQPY

SEQ ID NO: 4276 - protein, 10 aa, Severe acute respiratory syndrome coronavirus 2
  REGION 1..10: note = Table A: HLA-A*02:07H
LVPNQPYPNA

SEQ ID NO: 4277 - protein, 10 aa, Severe acute respiratory syndrome coronavirus 2
  REGION 1..10: note = Table A: HLA-B*55:02H
VPNQPYPNAS

SEQ ID NO: 4278 - protein, 10 aa, Severe acute respiratory syndrome coronavirus 2
  REGION 1..10: note = Table A: HLA-A*24:02H HLA-A*24:07M HLA-A*23:01H
PYPNASFDNF

SEQ ID NO: 4279 - protein, 10 aa, Severe acute respiratory syndrome coronavirus 2
  REGION 1..10: note = Table A: HLA-B*38:02H
IKFADDLNQL

SEQ ID NO: 4280 - protein, 10 aa, Severe acute respiratory syndrome coronavirus 2
  REGION 1..10: note = Table A: HLA-A*36:01H
ADDLNQLTGY

SEQ ID NO: 4281 - protein, 10 aa, Severe acute respiratory syndrome coronavirus 2
  REGION 1..10: note = Table A: HLA-A*34:02H
DDLNQLTGYK

SEQ ID NO: 4282 - protein, 10 aa, Severe acute respiratory syndrome coronavirus 2
  REGION 1..10: note = Table A: HLA-B*57:03H
PASRELKVTF

SEQ ID NO: 4283 - protein, 10 aa, Severe acute respiratory syndrome coronavirus 2
  REGION 1..10: note = Table A: HLA-B*57:03H
ASRELKVTFF

SEQ ID NO: 4284 - protein, 10 aa, Severe acute respiratory syndrome coronavirus 2
  REGION 1..10: note = Table A: HLA-C*14:02H HLA-C*14:03H
FFPDLNGDVV

SEQ ID NO: 4285 - protein, 10 aa, Severe acute respiratory syndrome coronavirus 2
  REGION 1..10: note = Table A: HLA-B*55:02H HLA-B*35:03H HLA-B*35:02H HLA-B*35:08H HLA-B*35:12H HLA-B*54:01H
FPDLNGDVVA

SEQ ID NO: 4286 - protein, 10 aa, Severe acute respiratory syndrome coronavirus 2
  REGION 1..10: note = Table A: HLA-A*25:01M HLA-A*26:01M HLA-A*26:02H HLA-A*26:03M
DVVAIDYKHY

SEQ ID NO: 4287 - protein, 10 aa, Severe acute respiratory syndrome coronavirus 2
  REGION 1..10: note = Table A: HLA-A*33:01H HLA-A*33:03M
DYKHYTPSFK

SEQ ID NO: 4288 - protein, 10 aa, Severe acute respiratory syndrome coronavirus 2
  REGION 1..10: note = Table A: HLA-A*26:03H HLA-A*34:02H HLA-A*66:01H
YTPSFKKGAK

SEQ ID NO: 4289 - protein, 10 aa, Severe acute respiratory syndrome coronavirus 2
  REGION 1..10: note = Table A: HLA-B*07:04M
TPSFKKGAKL

SEQ ID NO: 4290 - protein, 10 aa, Severe acute respiratory syndrome coronavirus 2
  REGION 1..10: note = Table A: HLA-A*02:11M HLA-A*02:02H
LLHKPIVWHV

SEQ ID NO: 4291 - protein, 10 aa, Severe acute respiratory syndrome coronavirus 2
  REGION 1..10: note = Table A: HLA-B*56:01H HLA-B*55:02M HLA-B*55:01H
KPIVWHVNNA

SEQ ID NO: 4292 - protein, 10 aa, Severe acute respiratory syndrome coronavirus 2
  REGION 1..10: note = Table A: HLA-A*30:02M HLA-B*15:01H
VNNATNKATY

SEQ ID NO: 4293 - protein, 10 aa, Severe acute respiratory syndrome coronavirus 2
  REGION 1..10: note = Table A: HLA-A*34:02H
NNATNKATYK

SEQ ID NO: 4294 - protein, 10 aa, Severe acute respiratory syndrome coronavirus 2
  REGION 1..10: note = Table A: HLA-A*33:03M HLA-A*31:01H
TYKPNTWCIR

SEQ ID NO: 4295 - protein, 10 aa, Severe acute respiratory syndrome coronavirus 2
  REGION 1..10: note = Table A: HLA-B*07:04H
KPNTWCIRCL

SEQ ID NO: 4296 - protein, 10 aa, Severe acute respiratory syndrome coronavirus 2
  REGION 1..10: note = Table A: HLA-A*02:11M HLA-A*02:01H HLA-A*02:03H
CLWSTKPVET

SEQ ID NO: 4297 - protein, 10 aa, Severe acute respiratory syndrome coronavirus 2
  REGION 1..10: note = Table A: HLA-B*15:03M
TKPVETSNSF

SEQ ID NO: 4298 - protein, 10 aa, Severe acute respiratory syndrome coronavirus 2
  REGION 1..10: note = Table A: HLA-B*40:01H
VETSNSFDVL

SEQ ID NO: 4299 - protein, 10 aa, Severe acute respiratory syndrome coronavirus 2
  REGION 1..10: note = Table A: HLA-A*68:01M HLA-A*68:02M HLA-A*34:02H HLA-A*66:01H
ETSNSFDVLK

SEQ ID NO: 4300 - protein, 10 aa, Severe acute respiratory syndrome coronavirus 2
  REGION 1..10: note = Table A: HLA-A*02:02H HLA-A*02:03H HLA-B*38:02H HLA-B*15:01H
VLKSEDAQGM

SEQ ID NO: 4301 - protein, 10 aa, Severe acute respiratory syndrome coronavirus 2
  REGION 1..10: note = Table A: HLA-B*44:05H HLA-B*40:01M
SEDAQGMDNL

SEQ ID NO: 4302 - protein, 10 aa, Severe acute respiratory syndrome coronavirus 2
  REGION 1..10: note = Table A: HLA-B*38:02H
DLKPVSEEVV

SEQ ID NO: 4303 - protein, 10 aa, Severe acute respiratory syndrome coronavirus 2
  REGION 1..10: note = Table A: HLA-B*44:05M HLA-B*40:01H HLA-B*40:02H HLA-B*49:01M
SEEVVENPTI

SEQ ID NO: 4304 - protein, 10 aa, Severe acute respiratory syndrome coronavirus 2
  REGION 1..10: note = Table A: HLA-A*11:303H HLA-A*03:02H HLA-A*11:01M HLA-A*11:02H HLA-A*33:03H HLA-A*26:03H HLA-B*27:02H HLA-A*68:01H HLA-A*68:02M HLA-A*34:01H HLA-A*34:02H HLA-C*07:27H HLA-A*66:01H
EVVENPTIQK

SEQ ID NO: 4305 - protein, 10 aa, Severe acute respiratory syndrome coronavirus 2
  REGION 1..10: note = Table A: HLA-B*49:01H
LECNVKTTEV

SEQ ID NO: 4306 - protein, 10 aa, Severe acute respiratory syndrome coronavirus 2
  REGION 1..10: note = Table A: HLA-B*58:01H HLA-A*68:02H HLA-A*02:08H HLA-B*57:03H
KTTEVVGDII

SEQ ID NO: 4307 - protein, 10 aa, Severe acute respiratory syndrome coronavirus 2
  REGION 1..10: note = Table A: HLA-A*26:01H HLA-A*26:02H HLA-A*26:03H HLA-A*68:01H HLA-A*68:02H HLA-A*34:02H
EVVGDIILKP

SEQ ID NO: 4308 - protein, 10 aa, Severe acute respiratory syndrome coronavirus 2
  REGION 1..10: note = Table A: HLA-A*11:303H HLA-C*03:03H HLA-A*02:11H HLA-C*03:04H HLA-C*15:05H HLA-C*01:02H HLA-A*02:08H HLA-B*14:01H HLA-C*08:01H HLA-C*08:03H HLA-B*38:02H
IILKPANNSL

SEQ ID NO: 4309 - protein, 10 aa, Severe acute respiratory syndrome coronavirus 2
  REGION 1..10: note = Table A: HLA-A*03:01H
ILKPANNSLK

SEQ ID NO: 4310 - protein, 10 aa, Severe acute respiratory syndrome coronavirus 2
  REGION 1..10: note = Table A: HLA-C*04:03M HLA-C*08:02H HLA-C*05:01H
ITEEVGHTDL

SEQ ID NO: 4311 - protein, 10 aa, Severe acute respiratory syndrome coronavirus 2
  REGION 1..10: note = Table A: HLA-B*44:05H HLA-B*40:01M
TEEVGHTDLM

SEQ ID NO: 4312 - protein, 10 aa, Severe acute respiratory syndrome coronavirus 2
  REGION 1..10: note = Table A: HLA-B*45:01H HLA-B*50:01H
EEVGHTDLMA

SEQ ID NO: 4313 - protein, 10 aa, Severe acute respiratory syndrome coronavirus 2
  REGION 1..10: note = Table A: HLA-A*30:02H
VGHTDLMAAY

SEQ ID NO: 4314 - protein, 10 aa, Severe acute respiratory syndrome coronavirus 2
  REGION 1..10: note = Table A: HLA-B*38:02H
GHTDLMAAYV

SEQ ID NO: 4315 - protein, 10 aa, Severe acute respiratory syndrome coronavirus 2
  REGION 1..10: note = Table A: HLA-A*11:303H HLA-C*03:03H HLA-C*03:04M HLA-A*68:02H HLA-B*35:03M HLA-C*15:05H HLA-A*34:01H HLA-C*07:27H HLA-B*35:01H HLA-B*35:02H HLA-B*35:07H HLA-C*08:01M HLA-C*08:03H HLA-B*35:12H HLA-B*38:02M
  REGION 1..10: note = CONT. FROM ABOVE: HLA-B*39:01H HLA-B*07:05H
MAAYVDNSSL

SEQ ID NO: 4316 - protein, 10 aa, Severe acute respiratory syndrome coronavirus 2
  REGION 1..10: note = Table A: HLA-C*14:03H HLA-B*27:02H HLA-A*24:02H HLA-A*24:07H HLA-A*23:01M HLA-B*49:01H
AYVDNSSLTI

SEQ ID NO: 4317 - protein, 10 aa, Severe acute respiratory syndrome coronavirus 2
  REGION 1..10: note = Table A: HLA-A*03:02H HLA-A*36:01H HLA-B*27:02H HLA-A*68:01H HLA-A*34:02H
YVDNSSLTIK

SEQ ID NO: 4318 - protein, 10 aa, Severe acute respiratory syndrome coronavirus 2
  REGION 1..10: note = Table A: HLA-A*03:02H HLA-A*11:01H
VDNSSLTIKK

SEQ ID NO: 4319 - protein, 10 aa, Severe acute respiratory syndrome coronavirus 2
  REGION 1..10: note = Table A: HLA-A*74:01H HLA-A*33:03H
TIKKPNELSR

SEQ ID NO: 4320 - protein, 10 aa, Severe acute respiratory syndrome coronavirus 2
  REGION 1..10: note = Table A: HLA-B*56:01H HLA-B*55:02H HLA-C*15:05H
KPNELSRVLG

SEQ ID NO: 4321 - protein, 10 aa, Severe acute respiratory syndrome coronavirus 2
  REGION 1..10: note = Table A: HLA-B*13:02H
RVLGLKTLAT

SEQ ID NO: 4322 - protein, 10 aa, Severe acute respiratory syndrome coronavirus 2
  REGION 1..10: note = Table A: HLA-A*02:02M HLA-A*02:03H
GLKTLATHGL

SEQ ID NO: 4323 - protein, 10 aa, Severe acute respiratory syndrome coronavirus 2
  REGION 1..10: note = Table A: HLA-B*55:02H HLA-C*15:05H HLA-A*02:08H
KTLATHGLAA

SEQ ID NO: 4324 - protein, 10 aa, Severe acute respiratory syndrome coronavirus 2
  REGION 1..10: note = Table A: HLA-A*02:11H HLA-A*68:02H HLA-A*02:04H HLA-A*02:05H HLA-A*02:06H HLA-A*02:08H HLA-A*02:01M HLA-A*02:02H HLA-A*02:03H HLA-B*38:02M
TLATHGLAAV

SEQ ID NO: 4325 - protein, 10 aa, Severe acute respiratory syndrome coronavirus 2
  REGION 1..10: note = Table A: HLA-B*38:02H HLA-B*39:01H
THGLAAVNSV

SEQ ID NO: 4326 - protein, 10 aa, Severe acute respiratory syndrome coronavirus 2
  REGION 1..10: note = Table A: HLA-A*11:01H HLA-A*11:02H HLA-A*25:01M HLA-A*26:01M HLA-A*26:02M HLA-A*26:03M HLA-A*29:01H HLA-A*29:02H HLA-A*30:02M HLA-A*34:02H
SVPWDTIANY

SEQ ID NO: 4327 - protein, 10 aa, Severe acute respiratory syndrome coronavirus 2
  REGION 1..10: note = Table A: HLA-B*56:01H HLA-B*55:02M HLA-B*55:01H HLA-B*54:01H
VPWDTIANYA

SEQ ID NO: 4328 - protein, 10 aa, Severe acute respiratory syndrome coronavirus 2
  REGION 1..10: note = Table A: HLA-A*02:02H
TIANYAKPFL

SEQ ID NO: 4329 - protein, 10 aa, Severe acute respiratory syndrome coronavirus 2
  REGION 1..10: note = Table A: HLA-A*03:01H HLA-A*11:02H HLA-A*34:02H
ANYAKPFLNK

SEQ ID NO: 4330 - protein, 10 aa, Severe acute respiratory syndrome coronavirus 2
  REGION 1..10: note = Table A: HLA-C*12:03H HLA-B*07:04H
YAKPFLNKVV

SEQ ID NO: 4331 - protein, 10 aa, Severe acute respiratory syndrome coronavirus 2
  REGION 1..10: note = Table A: HLA-B*42:01H HLA-B*56:01M HLA-B*55:02H HLA-C*15:05H HLA-B*55:01M HLA-B*54:01H HLA-B*07:02H HLA-B*07:04M
KPFLNKVVST

SEQ ID NO: 4332 - protein, 10 aa, Severe acute respiratory syndrome coronavirus 2
  REGION 1..10: note = Table A: HLA-A*02:08H
KVVSTTTNIV

SEQ ID NO: 4333 - protein, 10 aa, Severe acute respiratory syndrome coronavirus 2
  REGION 1..10: note = Table A: HLA-A*74:01H HLA-A*11:01H HLA-A*36:01H HLA-B*57:01H HLA-A*33:03H HLA-A*68:01M HLA-A*31:01H
VSTTTNIVTR

SEQ ID NO: 4334 - protein, 10 aa, Severe acute respiratory syndrome coronavirus 2
  REGION 1..10: note = Table A: HLA-A*02:08H
STTTNIVTRC

SEQ ID NO: 4335 - protein, 10 aa, Severe acute respiratory syndrome coronavirus 2
  REGION 1..10: note = Table A: HLA-A*68:02H
TTTNIVTRCL

SEQ ID NO: 4336 - protein, 10 aa, Severe acute respiratory syndrome coronavirus 2
  REGION 1..10: note = Table A: HLA-A*24:02H HLA-A*24:07M HLA-A*23:01H
NYMPYFFTLL

SEQ ID NO: 4337 - protein, 10 aa, Severe acute respiratory syndrome coronavirus 2
  REGION 1..10: note = Table A: HLA-A*34:02H
FTRSTNSRIK

SEQ ID NO: 4338 - protein, 10 aa, Severe acute respiratory syndrome coronavirus 2
  REGION 1..10: note = Table A: HLA-B*07:04H
STNSRIKASM

SEQ ID NO: 4339 - protein, 10 aa, Severe acute respiratory syndrome coronavirus 2
  REGION 1..10: note = Table A: HLA-B*58:02H HLA-B*07:04H HLA-B*13:02H
RIKASMPTTI

SEQ ID NO: 4340 - protein, 10 aa, Severe acute respiratory syndrome coronavirus 2
  REGION 1..10: note = Table A: HLA-A*03:01H HLA-A*03:02M HLA-A*11:01H HLA-A*36:01H
KASMPTTIAK

SEQ ID NO: 4341 - protein, 10 aa, Severe acute respiratory syndrome coronavirus 2
  REGION 1..10: note = Table A: HLA-B*56:01H HLA-B*53:01H HLA-B*55:02H HLA-A*68:02H HLA-B*35:03M HLA-C*15:05M HLA-B*55:01M HLA-B*35:01H HLA-B*35:02H HLA-B*51:01H HLA-B*35:12H HLA-B*38:02H HLA-B*54:01H HLA-B*07:02H HLA-B*07:04H HLA-B*07:05H
MPTTIAKNTV

SEQ ID NO: 4342 - protein, 10 aa, Severe acute respiratory syndrome coronavirus 2
  REGION 1..10: note = Table A: HLA-A*02:08H HLA-A*02:03H
TIAKNTVKSV

SEQ ID NO: 4343 - protein, 10 aa, Severe acute respiratory syndrome coronavirus 2
  REGION 1..10: note = Table A: HLA-B*07:04H
TVKSVGKFCL

SEQ ID NO: 4344 - protein, 10 aa, Severe acute respiratory syndrome coronavirus 2
  REGION 1..10: note = Table A: HLA-A*24:07H
SFNYLKSPNF

SEQ ID NO: 4345 - protein, 10 aa, Severe acute respiratory syndrome coronavirus 2
  REGION 1..10: note = Table A: HLA-A*02:02H HLA-A*02:03H HLA-B*38:02H HLA-B*07:04H
YLKSPNFSKL

SEQ ID NO: 4346 - protein, 10 aa, Severe acute respiratory syndrome coronavirus 2
  REGION 1..10: note = Table A: HLA-B*42:01H HLA-C*15:05H HLA-B*07:04M
SPNFSKLINI

SEQ ID NO: 4347 - protein, 10 aa, Severe acute respiratory syndrome coronavirus 2
  REGION 1..10: note = Table A: HLA-A*02:11M HLA-A*02:04M HLA-A*02:02M HLA-B*40:06H
KLINIIIWFL

SEQ ID NO: 4348 - protein, 10 aa, Severe acute respiratory syndrome coronavirus 2
  REGION 1..10: note = Table A: HLA-A*11:303H HLA-C*15:05H
AALGVLMSNL

SEQ ID NO: 4349 - protein, 10 aa, Severe acute respiratory syndrome coronavirus 2
  REGION 1..10: note = Table A: HLA-A*02:02H
ALGVLMSNLG

SEQ ID NO: 4350 - protein, 10 aa, Severe acute respiratory syndrome coronavirus 2
  REGION 1..10: note = Table A: HLA-A*36:01H HLA-A*29:01H HLA-A*29:02H HLA-A*30:02H
LMSNLGMPSY

SEQ ID NO: 4351 - protein, 10 aa, Severe acute respiratory syndrome coronavirus 2
  REGION 1..10: note = Table A: HLA-B*40:02H HLA-B*49:01H
REGYLNSTNV

SEQ ID NO: 4352 - protein, 10 aa, Severe acute respiratory syndrome coronavirus 2
  REGION 1..10: note = Table A: HLA-A*24:02H HLA-C*08:03H HLA-A*23:01H
GYLNSTNVTI

SEQ ID NO: 4353 - protein, 10 aa, Severe acute respiratory syndrome coronavirus 2
  REGION 1..10: note = Table A: HLA-A*25:01H HLA-A*30:02H HLA-B*35:01H HLA-B*07:05H
NSTNVTIATY

SEQ ID NO: 4354 - protein, 10 aa, Severe acute respiratory syndrome coronavirus 2
  REGION 1..10: note = Table A: HLA-A*24:02H HLA-A*24:07H HLA-A*23:01H
TYPSLETIQI

SEQ ID NO: 4355 - protein, 10 aa, Severe acute respiratory syndrome coronavirus 2
  REGION 1..10: note = Table A: HLA-C*15:05H HLA-B*57:03H
PSLETIQITI

SEQ ID NO: 4356 - protein, 10 aa, Severe acute respiratory syndrome coronavirus 2
  REGION 1..10: note = Table A: HLA-B*44:05H HLA-A*25:01H HLA-A*33:03H HLA-A*26:01H HLA-A*26:02H HLA-A*26:03H HLA-A*68:01H HLA-A*68:02M HLA-A*34:01M HLA-A*34:02M HLA-B*38:02H HLA-A*66:01M
ETIQITISSF

SEQ ID NO: 4357 - protein, 10 aa, Severe acute respiratory syndrome coronavirus 2
  REGION 1..10: note = Table A: HLA-A*03:02H
TIQITISSFK

SEQ ID NO: 4358 - protein, 10 aa, Severe acute respiratory syndrome coronavirus 2
  REGION 1..10: note = Table A: HLA-A*24:07H HLA-B*57:03H
IQITISSFKW

SEQ ID NO: 4359 - protein, 10 aa, Severe acute respiratory syndrome coronavirus 2
  REGION 1..10: note = Table A: HLA-B*46:01H HLA-C*15:05H HLA-A*32:01H HLA-B*57:03M
SSFKWDLTAF

SEQ ID NO: 4360 - protein, 10 aa, Severe acute respiratory syndrome coronavirus 2
  REGION 1..10: note = Table A: HLA-C*04:01H
KWDLTAFGLV

SEQ ID NO: 4361 - protein, 10 aa, Severe acute respiratory syndrome coronavirus 2
  REGION 1..10: note = Table A: HLA-B*57:03H
LTAFGLVAEW

SEQ ID NO: 4362 - protein, 10 aa, Severe acute respiratory syndrome coronavirus 2
  REGION 1..10: note = Table A: HLA-C*14:03H HLA-A*29:02H HLA-A*30:02H
AYILFTRFFY

SEQ ID NO: 4363 - protein, 10 aa, Severe acute respiratory syndrome coronavirus 2
  REGION 1..10: note = Table A: HLA-A*02:04H HLA-A*02:02H
ILFTRFFYVL

SEQ ID NO: 4364 - protein, 10 aa, Severe acute respiratory syndrome coronavirus 2
  REGION 1..10: note = Table A: HLA-C*14:03H
FFYVLGLAAI

SEQ ID NO: 4365 - protein, 10 aa, Severe acute respiratory syndrome coronavirus 2
  REGION 1..10: note = Table A: HLA-A*24:07H
LFFSYFAVHF

SEQ ID NO: 4366 - protein, 10 aa, Severe acute respiratory syndrome coronavirus 2
  REGION 1..10: note = Table A: HLA-B*58:01H HLA-B*57:01H HLA-A*25:01H HLA-B*53:01H HLA-B*57:03H
FAVHFISNSW

SEQ ID NO: 4367 - protein, 10 aa, Severe acute respiratory syndrome coronavirus 2
  REGION 1..10: note = Table A: HLA-A*24:07M HLA-A*23:01H
HFISNSWLMW

SEQ ID NO: 4368 - protein, 10 aa, Severe acute respiratory syndrome coronavirus 2
  REGION 1..10: note = Table A: HLA-B*13:02H
VQMAPISAMV

SEQ ID NO: 4369 - protein, 10 aa, Severe acute respiratory syndrome coronavirus 2
  REGION 1..10: note = Table A: HLA-A*74:01H HLA-A*34:01H
QMAPISAMVR

SEQ ID NO: 4370 - protein, 10 aa, Severe acute respiratory syndrome coronavirus 2
  REGION 1..10: note = Table A: HLA-B*35:01H HLA-B*35:07H
APISAMVRMY

SEQ ID NO: 4371 - protein, 10 aa, Severe acute respiratory syndrome coronavirus 2
  REGION 1..10: note = Table A: HLA-A*30:02H
RMYIFFASFY

SEQ ID NO: 4372 - protein, 10 aa, Severe acute respiratory syndrome coronavirus 2
  REGION 1..10: note = Table A: HLA-A*29:02H
MYIFFASFYY

SEQ ID NO: 4373 - protein, 10 aa, Severe acute respiratory syndrome coronavirus 2
  REGION 1..10: note = Table A: HLA-A*24:07H
IFFASFYYVW

SEQ ID NO: 4374 - protein, 10 aa, Severe acute respiratory syndrome coronavirus 2
  REGION 1..10: note = Table A: HLA-A*02:11M
YVWKSYVHVV

SEQ ID NO: 4375 - protein, 10 aa, Severe acute respiratory syndrome coronavirus 2
  REGION 1..10: note = Table A: HLA-A*02:08H HLA-B*38:02H
HVVDGCNSST

SEQ ID NO: 4376 - protein, 10 aa, Severe acute respiratory syndrome coronavirus 2
  REGION 1..10: note = Table A: HLA-B*49:01H
VECTTIVNGV

SEQ ID NO: 4377 - protein, 10 aa, Severe acute respiratory syndrome coronavirus 2
  REGION 1..10: note = Table A: HLA-A*33:03H HLA-A*26:03H HLA-A*68:01M HLA-A*34:01M HLA-A*34:02H HLA-A*66:01M
ECTTIVNGVR

SEQ ID NO: 4378 - protein, 10 aa, Severe acute respiratory syndrome coronavirus 2
  REGION 1..10: note = Table A: HLA-A*30:02H
IVNGVRRSFY

SEQ ID NO: 4379 - protein, 10 aa, Severe acute respiratory syndrome coronavirus 2
  REGION 1..10: note = Table A: HLA-A*11:303H HLA-A*25:01M HLA-B*46:01H HLA-A*26:01M HLA-A*26:02H HLA-A*26:03M HLA-C*03:02H HLA-C*03:04H HLA-A*68:02H HLA-A*34:01M HLA-A*34:02H HLA-B*38:02M HLA-B*07:04H HLA-B*15:01H HLA-B*15:02M
  REGION 1..10: note = CONT. FROM ABOVE: HLA-A*66:01M
YVYANGGKGF

SEQ ID NO: 4380 - protein, 10 aa, Severe acute respiratory syndrome coronavirus 2
  REGION 1..10: note = Table A: HLA-A*68:02M HLA-A*34:02H
DTFCAGSTFI

SEQ ID NO: 4381 - protein, 10 aa, Severe acute respiratory syndrome coronavirus 2
  REGION 1..10: note = Table A: HLA-A*74:01H HLA-A*11:01H HLA-A*11:02H HLA-A*26:03H HLA-B*27:02H HLA-A*68:01M HLA-A*68:02H HLA-A*34:01H HLA-A*34:02H HLA-A*66:01H
STFISDEVAR

SEQ ID NO: 4382 - protein, 10 aa, Severe acute respiratory syndrome coronavirus 2
  REGION 1..10: note = Table A: HLA-C*03:04H HLA-C*01:02H HLA-A*02:05H HLA-A*02:02M
FISDEVARDL

SEQ ID NO: 4383 - protein, 10 aa, Severe acute respiratory syndrome coronavirus 2
  REGION 1..10: note = Table A: HLA-A*25:01H HLA-A*26:01H HLA-A*26:02H HLA-A*26:03H HLA-A*34:01H HLA-A*34:02H
EVARDLSLQF

SEQ ID NO: 4384 - protein, 10 aa, Severe acute respiratory syndrome coronavirus 2
  REGION 1..10: note = Table A: HLA-A*34:02H
VARDLSLQFK

SEQ ID NO: 4385 - protein, 10 aa, Severe acute respiratory syndrome coronavirus 2
  REGION 1..10: note = Table A: HLA-B*56:01H HLA-B*55:02H
RPINPTDQSS

SEQ ID NO: 4386 - protein, 10 aa, Severe acute respiratory syndrome coronavirus 2
  REGION 1..10: note = Table A: HLA-B*15:01H
PINPTDQSSY

SEQ ID NO: 4387 - protein, 10 aa, Severe acute respiratory syndrome coronavirus 2
  REGION 1..10: note = Table A: HLA-A*68:02H HLA-C*15:05H
SSYIVDSVTV

SEQ ID NO: 4388 - protein, 10 aa, Severe acute respiratory syndrome coronavirus 2
  REGION 1..10: note = Table A: HLA-B*27:02H HLA-A*30:02H HLA-A*23:01H
SYIVDSVTVK

SEQ ID NO: 4389 - protein, 10 aa, Severe acute respiratory syndrome coronavirus 2
  REGION 1..10: note = Table A: HLA-A*02:07H
IVDSVTVKNG

SEQ ID NO: 4390 - protein, 10 aa, Severe acute respiratory syndrome coronavirus 2
  REGION 1..10: note = Table A: HLA-B*57:03H
VTVKNGSIHL

SEQ ID NO: 4391 - protein, 10 aa, Severe acute respiratory syndrome coronavirus 2
  REGION 1..10: note = Table A: HLA-A*25:01H HLA-B*46:01H HLA-A*26:01M HLA-A*26:02M HLA-A*26:03M HLA-A*29:02H HLA-A*30:02H HLA-C*12:02H HLA-A*34:01H HLA-A*34:02H HLA-B*38:02H HLA-B*15:01M HLA-B*15:02H HLA-A*31:01H
TVKNGSIHLY

SEQ ID NO: 4392 - protein, 10 aa, Severe acute respiratory syndrome coronavirus 2
  REGION 1..10: note = Table A: HLA-B*15:03H
VKNGSIHLYF

SEQ ID NO: 4393 - protein, 10 aa, Severe acute respiratory syndrome coronavirus 2
  REGION 1..10: note = Table A: HLA-A*03:01H HLA-A*34:02H
HLYFDKAGQK

SEQ ID NO: 4394 - protein, 10 aa, Severe acute respiratory syndrome coronavirus 2
  REGION 1..10: note = Table A: HLA-A*36:01M HLA-A*29:01H HLA-A*29:02M HLA-A*01:01H HLA-C*04:03H HLA-A*30:02H HLA-B*38:02H HLA-B*07:05H
YFDKAGQKTY

SEQ ID NO: 4395 - protein, 10 aa, Severe acute respiratory syndrome coronavirus 2
  REGION 1..10: note = Table A: HLA-B*15:01H
GQKTYERHSL

SEQ ID NO: 4396 - protein, 10 aa, Severe acute respiratory syndrome coronavirus 2
  REGION 1..10: note = Table A: HLA-A*03:01H
KTYERHSLSH

SEQ ID NO: 4397 - protein, 10 aa, Severe acute respiratory syndrome coronavirus 2
  REGION 1..10: note = Table A: HLA-A*24:07H HLA-A*23:01H
TYERHSLSHF

SEQ ID NO: 4398 - protein, 10 aa, Severe acute respiratory syndrome coronavirus 2
  REGION 1..10: note = Table A: HLA-B*38:02H
RHSLSHFVNL

SEQ ID NO: 4399 - protein, 10 aa, Severe acute respiratory syndrome coronavirus 2
  REGION 1..10: note = Table A: HLA-A*68:02H HLA-C*08:01H
LSHFVNLDNL

SEQ ID NO: 4400 - protein, 10 aa, Severe acute respiratory syndrome coronavirus 2
  REGION 1..10: note = Table A: HLA-B*38:02H
SHFVNLDNLR

SEQ ID NO: 4401 - protein, 10 aa, Severe acute respiratory syndrome coronavirus 2
  REGION 1..10: note = Table A: HLA-A*68:02H
NTKGSLPINV

SEQ ID NO: 4402 - protein, 10 aa, Severe acute respiratory syndrome coronavirus 2
  REGION 1..10: note = Table A: HLA-B*57:03M
GSLPINVIVF

SEQ ID NO: 4403 - protein, 10 aa, Severe acute respiratory syndrome coronavirus 2
  REGION 1..10: note = Table A: HLA-B*54:01H
LPINVIVFDG

SEQ ID NO: 4404 - protein, 10 aa, Severe acute respiratory syndrome coronavirus 2
  REGION 1..10: note = Table A: HLA-A*26:03H HLA-A*68:01H HLA-A*34:01H HLA-A*34:02H HLA-A*66:01H
NVIVFDGKSK

SEQ ID NO: 4405 - protein, 10 aa, Severe acute respiratory syndrome coronavirus 2
  REGION 1..10: note = Table A: HLA-B*58:01H HLA-A*36:01H HLA-A*30:02H HLA-B*57:03H
SSAKSASVYY

SEQ ID NO: 4406 - protein, 10 aa, Severe acute respiratory syndrome coronavirus 2
  REGION 1..10: note = Table A: HLA-B*58:02H HLA-C*15:05H HLA-C*15:02H HLA-A*02:08H HLA-B*57:03M
KSASVYYSQL

SEQ ID NO: 4407 - protein, 10 aa, Severe acute respiratory syndrome coronavirus 2
  REGION 1..10: note = Table A: HLA-B*35:03H HLA-C*15:05M HLA-B*35:01H HLA-B*35:02H HLA-B*35:12H HLA-B*07:05H
QPILLLDQAL

SEQ ID NO: 4408 - protein, 10 aa, Severe acute respiratory syndrome coronavirus 2
  REGION 1..10: note = Table A: HLA-B*38:02H HLA-B*39:01H
ALVSDVGDSA

SEQ ID NO: 4409 - protein, 10 aa, Severe acute respiratory syndrome coronavirus 2
  REGION 1..10: note = Table A: HLA-C*08:02H HLA-C*05:01H
VSDVGDSAEV

SEQ ID NO: 4410 - protein, 10 aa, Severe acute respiratory syndrome coronavirus 2
  REGION 1..10: note = Table A: HLA-A*68:02H
DVGDSAEVAV

SEQ ID NO: 4411 - protein, 10 aa, Severe acute respiratory syndrome coronavirus 2
  REGION 1..10: note = Table A: HLA-A*03:02H HLA-A*36:01H
VGDSAEVAVK

SEQ ID NO: 4412 - protein, 10 aa, Severe acute respiratory syndrome coronavirus 2
  REGION 1..10: note = Table A: HLA-A*25:01H HLA-A*26:02H
DSAEVAVKMF

SEQ ID NO: 4413 - protein, 10 aa, Severe acute respiratory syndrome coronavirus 2
  REGION 1..10: note = Table A: HLA-B*45:01M HLA-B*40:06M HLA-B*50:01M
AEVAVKMFDA

SEQ ID NO: 4414 - protein, 10 aa, Severe acute respiratory syndrome coronavirus 2
  REGION 1..10: note = Table A: HLA-A*25:01M HLA-A*26:01M HLA-A*26:02M HLA-A*26:03H HLA-B*38:02H
EVAVKMFDAY

SEQ ID NO: 4415 - protein, 10 aa, Severe acute respiratory syndrome coronavirus 2
  REGION 1..10: note = Table A: HLA-B*58:01M HLA-B*58:02H HLA-C*14:02H HLA-C*14:03H HLA-A*74:01H HLA-B*44:05H HLA-A*03:02H HLA-B*57:01H HLA-B*46:01H HLA-C*07:01H HLA-A*02:11M HLA-B*27:02H HLA-A*30:02H HLA-C*12:02H HLA-A*02:04H HLA-A*02:05H
  REGION 1..10: note = CONT. FROM ABOVE: HLA-A*02:07H HLA-A*02:08H HLA-A*02:01H HLA- A*02:02H HLA-A*02:03H HLA-A*24:02H HLA-A*24:07M HLA-C*08:01H HLA-A*23:01M HLA-B*38:02M HLA-A*32:01H HLA-B*40:06H HLA-B*15 :01M HLA-B*15:03M HLA-B*07:05H HLA-B*57:03H HLA-B*13:01M
KMFDAYVNTF

SEQ ID NO: 4416 - protein, 10 aa, Severe acute respiratory syndrome coronavirus 2
  REGION 1..10: note = Table A: HLA-C*14:02H HLA-C*14:03M HLA-B*27:02H HLA-A*24:02M HLA-A*24:07M HLA-A*23:01M
AYVNTFSSTF

SEQ ID NO: 4417 - protein, 10 aa, Severe acute respiratory syndrome coronavirus 2
  REGION 1..10: note = Table A: HLA-A*11:303H HLA-A*03:02H HLA-A*11:01M HLA-A*11:02H HLA-A*36:01H HLA-A*34:02H HLA-C*07:27H
SSTFNVPMEK

SEQ ID NO: 4418 - protein, 10 aa, Severe acute respiratory syndrome coronavirus 2
  REGION 1..10: note = Table A: HLA-A*11:01H HLA-A*11:02H HLA-A*02:11H HLA-A*68:01H HLA-A*68:02M HLA-A*02:05M HLA-A*02:08M HLA-A*02:02H HLA-A*34:02H HLA-B*57:03H
STFNVPMEKL

SEQ ID NO: 4419 - protein, 10 aa, Severe acute respiratory syndrome coronavirus 2
  REGION 1..10: note = Table A: HLA-B*56:01H HLA-B*55:02H HLA-C*15:05H HLA-B*51:01H HLA-B*07:04H
VPMEKLKTLV

SEQ ID NO: 4420 - protein, 10 aa, Severe acute respiratory syndrome coronavirus 2
  REGION 1..10: note = Table A: HLA-A*02:02H HLA-B*38:02H HLA-B*39:01H
TLVATAEAEL

SEQ ID NO: 4421 - protein, 10 aa, Severe acute respiratory syndrome coronavirus 2
  REGION 1..10: note = Table A: HLA-B*45:01M HLA-B*40:06H HLA-B*41:02H HLA-B*50:01M
AEAELAKNVS

SEQ ID NO: 4422 - protein, 10 aa, Severe acute respiratory syndrome coronavirus 2
  REGION 1..10: note = Table A: HLA-B*35:02H HLA-B*39:01H
EAELAKNVSL

SEQ ID NO: 4423 - protein, 10 aa, Severe acute respiratory syndrome coronavirus 2
  REGION 1..10: note = Table A: HLA-B*58:01H HLA-B*57:01H HLA-B*46:01H HLA-C*15:05H HLA-A*23:01H HLA-B*57:03M
VSLDNVLSTF

SEQ ID NO: 4424 - protein, 10 aa, Severe acute respiratory syndrome coronavirus 2
  REGION 1..10: note = Table A: HLA-A*02:07H HLA-B*38:02H
SLDNVLSTFI

SEQ ID NO: 4425 - protein, 10 aa, Severe acute respiratory syndrome coronavirus 2
  REGION 1..10: note = Table A: HLA-B*54:01H
DNVLSTFISA

SEQ ID NO: 4426 - protein, 10 aa, Severe acute respiratory syndrome coronavirus 2
  REGION 1..10: note = Table A: HLA-B*55:02H HLA-B*54:01H
NVLSTFISAA

SEQ ID NO: 4427 - protein, 10 aa, Severe acute respiratory syndrome coronavirus 2
  REGION 1..10: note = Table A: HLA-A*74:01M HLA-A*26:03H HLA-A*34:01H HLA-A*66:01H
VLSTFISAAR

SEQ ID NO: 4428 - protein, 10 aa, Severe acute respiratory syndrome coronavirus 2
  REGION 1..10: note = Table A: HLA-C*14:02H HLA-C*14:03H HLA-A*24:07M HLA-A*23:01H
TFISAARQGF

SEQ ID NO: 4429 - protein, 10 aa, Severe acute respiratory syndrome coronavirus 2
  REGION 1..10: note = Table A: HLA-B*27:02H
GFVDSDVETK

SEQ ID NO: 4430 - protein, 10 aa, Severe acute respiratory syndrome coronavirus 2
  REGION 1..10: note = Table A: HLA-B*40:01H HLA-B*40:02H
VETKDVVECL

SEQ ID NO: 4431 - protein, 10 aa, Severe acute respiratory syndrome coronavirus 2
  REGION 1..10: note = Table A: HLA-A*34:02H
ETKDVVECLK

SEQ ID NO: 4432 - protein, 10 aa, Severe acute respiratory syndrome coronavirus 2
  REGION 1..10: note = Table A: HLA-A*02:02M
KLSHQSDIEV

SEQ ID NO: 4433 - protein, 10 aa, Severe acute respiratory syndrome coronavirus 2
  REGION 1..10: note = Table A: HLA-B*39:01H
SHQSDIEVTG

SEQ ID NO: 4434 - protein, 10 aa, Severe acute respiratory syndrome coronavirus 2
  REGION 1..10: note = Table A: HLA-A*25:01H HLA-A*26:01H HLA-A*26:02H HLA-A*26:03M
EVTGDSCNNY

SEQ ID NO: 4435 - protein, 10 aa, Severe acute respiratory syndrome coronavirus 2
  REGION 1..10: note = Table A: HLA-C*08:03H
TYNKVENMTP

SEQ ID NO: 4436 - protein, 10 aa, Severe acute respiratory syndrome coronavirus 2
  REGION 1..10: note = Table A: HLA-A*33:01H HLA-A*33:03H
YNKVENMTPR

SEQ ID NO: 4437 - protein, 10 aa, Severe acute respiratory syndrome coronavirus 2
  REGION 1..10: note = Table A: HLA-B*57:03H
MTPRDLGACI

SEQ ID NO: 4438 - protein, 10 aa, Severe acute respiratory syndrome coronavirus 2
  REGION 1..10: note = Table A: HLA-B*55:02H
SARHINAQVA

SEQ ID NO: 4439 - protein, 10 aa, Severe acute respiratory syndrome coronavirus 2
  REGION 1..10: note = Table A: HLA-B*27:05M HLA-B*27:02H
ARHINAQVAK

SEQ ID NO: 4440 - protein, 10 aa, Severe acute respiratory syndrome coronavirus 2
  REGION 1..10: note = Table A: HLA-A*02:08M HLA-B*07:04H
QVAKSHNIAL

SEQ ID NO: 4441 - protein, 10 aa, Severe acute respiratory syndrome coronavirus 2
  REGION 1..10: note = Table A: HLA-B*38:02H
SHNIALIWNV

SEQ ID NO: 4442 - protein, 10 aa, Severe acute respiratory syndrome coronavirus 2
  REGION 1..10: note = Table A: HLA-A*02:02H HLA-B*13:01H
ALIWNVKDFM

SEQ ID NO: 4443 - protein, 10 aa, Severe acute respiratory syndrome coronavirus 2
  REGION 1..10: note = Table A: HLA-C*08:03H HLA-B*40:01H HLA-B*40:02H
KDFMSLSEQL

SEQ ID NO: 4444 - protein, 10 aa, Severe acute respiratory syndrome coronavirus 2
  REGION 1..10: note = Table A: HLA-A*33:01M HLA-A*33:03M
DFMSLSEQLR

SEQ ID NO: 4445 - protein, 10 aa, Severe acute respiratory syndrome coronavirus 2
  REGION 1..10: note = Table A: HLA-A*02:02H
SLSEQLRKQI

SEQ ID NO: 4446 - protein, 10 aa, Severe acute respiratory syndrome coronavirus 2
  REGION 1..10: note = Table A: HLA-A*30:01H
AAKKNNLPFK

SEQ ID NO: 4447 - protein, 10 aa, Severe acute respiratory syndrome coronavirus 2
  REGION 1..10: note = Table A: HLA-A*02:08H
ATTRQVVNVV

SEQ ID NO: 4448 - protein, 10 aa, Severe acute respiratory syndrome coronavirus 2
  REGION 1..10: note = Table A: HLA-A*68:01H HLA-A*68:02M HLA-A*02:05H HLA-A*02:08M HLA-B*38:02H HLA-B*57:03H HLA-B*13:02H
QVVNVVTTKI

SEQ ID NO: 4449 - protein, 10 aa, Severe acute respiratory syndrome coronavirus 2
  REGION 1..10: note = Table A: HLA-A*11:01H HLA-A*11:02H HLA-A*26:03H HLA-A*68:01M HLA-A*68:02H HLA-A*34:01H HLA-A*34:02H HLA-A*66:01H
NVVTTKIALK

SEQ ID NO: 4450 - protein, 10 aa, Severe acute respiratory syndrome coronavirus 2
  REGION 1..10: note = Table A: HLA-A*02:04H
KIVNNWLKQL

SEQ ID NO: 4451 - protein, 10 aa, Severe acute respiratory syndrome coronavirus 2
  REGION 1..10: note = Table A: HLA-B*08:01H
WLKQLIKVTL

SEQ ID NO: 4452 - protein, 10 aa, Severe acute respiratory syndrome coronavirus 2
  REGION 1..10: note = Table A: HLA-A*02:11H HLA-A*02:04M HLA-A*02:02H
QLIKVTLVFL

SEQ ID NO: 4453 - protein, 10 aa, Severe acute respiratory syndrome coronavirus 2
  REGION 1..10: note = Table A: HLA-C*14:03H HLA-A*29:02M
VFLFVAAIFY

SEQ ID NO: 4454 - protein, 10 aa, Severe acute respiratory syndrome coronavirus 2
  REGION 1..10: note = Table A: HLA-A*02:04M HLA-A*02:02H
FLFVAAIFYL

SEQ ID NO: 4455 - protein, 10 aa, Severe acute respiratory syndrome coronavirus 2
  REGION 1..10: note = Table A: HLA-C*14:03H HLA-C*04:01H HLA-C*04:03H HLA-A*02:11H
IFYLITPVHV

SEQ ID NO: 4456 - protein, 10 aa, Severe acute respiratory syndrome coronavirus 2
  REGION 1..10: note = Table A: HLA-C*14:02H HLA-C*14:03M
FYLITPVHVM

SEQ ID NO: 4457 - protein, 10 aa, Severe acute respiratory syndrome coronavirus 2
  REGION 1..10: note = Table A: HLA-A*36:01H
LITPVHVMSK

SEQ ID NO: 4458 - protein, 10 aa, Severe acute respiratory syndrome coronavirus 2
  REGION 1..10: note = Table A: HLA-B*38:02H
KHTDFSSEII

SEQ ID NO: 4459 - protein, 10 aa, Severe acute respiratory syndrome coronavirus 2
  REGION 1..10: note = Table A: HLA-B*27:02H HLA-B*35:01H HLA-B*39:01H
TDFSSEIIGY

SEQ ID NO: 4460 - protein, 10 aa, Severe acute respiratory syndrome coronavirus 2
  REGION 1..10: note = Table A: HLA-A*34:02H
DFSSEIIGYK

SEQ ID NO: 4461 - protein, 10 aa, Severe acute respiratory syndrome coronavirus 2
  REGION 1..10: note = Table A: HLA-A*02:11H HLA-A*68:02M HLA-A*02:05H HLA-A*02:02H HLA-B*54:01H
FSSEIIGYKA

SEQ ID NO: 4462 - protein, 10 aa, Severe acute respiratory syndrome coronavirus 2
  REGION 1..10: note = Table A: HLA-A*26:03H
EIIGYKAIDG

SEQ ID NO: 4463 - protein, 10 aa, Severe acute respiratory syndrome coronavirus 2
  REGION 1..10: note = Table A: HLA-C*08:02H
AIDGGVTRDI

SEQ ID NO: 4464 - protein, 10 aa, Severe acute respiratory syndrome coronavirus 2
  REGION 1..10: note = Table A: HLA-A*68:02H
DIASTDTCFA

SEQ ID NO: 4465 - protein, 10 aa, Severe acute respiratory syndrome coronavirus 2
  REGION 1..10: note = Table A: HLA-A*11:303H HLA-A*03:01H HLA-A*03:02H HLA-A*11:01M HLA-A*11:02H HLA-A*34:02H
ASTDTCFANK

SEQ ID NO: 4466 - protein, 10 aa, Severe acute respiratory syndrome coronavirus 2
  REGION 1..10: note = Table A: HLA-A*25:01H
ANKHADFDTW

SEQ ID NO: 4467 - protein, 10 aa, Severe acute respiratory syndrome coronavirus 2
  REGION 1..10: note = Table A: HLA-A*30:02H
TWFSQRGGSY

SEQ ID NO: 4468 - protein, 10 aa, Severe acute respiratory syndrome coronavirus 2
  REGION 1..10: note = Table A: HLA-B*57:03H
KACPLIAAVI

SEQ ID NO: 4469 - protein, 10 aa, Severe acute respiratory syndrome coronavirus 2
  REGION 1..10: note = Table A: HLA-A*02:05H HLA-A*02:06H HLA-A*02:03H
AVITREVGFV

SEQ ID NO: 4470 - protein, 10 aa, Severe acute respiratory syndrome coronavirus 2
  REGION 1..10: note = Table A: HLA-B*40:01H HLA-B*40:02M HLA-B*40:06H
REVGFVVPGL

SEQ ID NO: 4471 - protein, 10 aa, Severe acute respiratory syndrome coronavirus 2
  REGION 1..10: note = Table A: HLA-A*68:02H HLA-A*02:03H
FVVPGLPGTI

SEQ ID NO: 4472 - protein, 10 aa, Severe acute respiratory syndrome coronavirus 2
  REGION 1..10: note = Table A: HLA-C*15:05H
VVPGLPGTIL

SEQ ID NO: 4473 - protein, 10 aa, Severe acute respiratory syndrome coronavirus 2
  REGION 1..10: note = Table A: HLA-A*34:01H
VPGLPGTILR

SEQ ID NO: 4474 - protein, 10 aa, Severe acute respiratory syndrome coronavirus 2
  REGION 1..10: note = Table A: HLA-A*02:02H HLA-B*38:02H
ILRTTNGDFL

SEQ ID NO: 4475 - protein, 10 aa, Severe acute respiratory syndrome coronavirus 2
  REGION 1..10: note = Table A: HLA-B*58:01H HLA-A*36:01H HLA-B*57:03M
RTTNGDFLHF

SEQ ID NO: 4476 - protein, 10 aa, Severe acute respiratory syndrome coronavirus 2
  REGION 1..10: note = Table A: HLA-A*68:02H HLA-A*02:02H
TTNGDFLHFL

SEQ ID NO: 4477 - protein, 10 aa, Severe acute respiratory syndrome coronavirus 2
  REGION 1..10: note = Table A: HLA-A*02:11H
FLHFLPRVFS

SEQ ID NO: 4478 - protein, 10 aa, Severe acute respiratory syndrome coronavirus 2
  REGION 1..10: note = Table A: HLA-A*29:01H HLA-A*29:02H HLA-A*30:02H
VFSAVGNICY

SEQ ID NO: 4479 - protein, 10 aa, Severe acute respiratory syndrome coronavirus 2
  REGION 1..10: note = Table A: HLA-B*45:01H HLA-B*18:01H HLA-B*40:06M HLA-B*49:01H HLA-B*50:01H
IEYTDFATSA

SEQ ID NO: 4480 - protein, 10 aa, Severe acute respiratory syndrome coronavirus 2
  REGION 1..10: note = Table A: HLA-B*40:02H
TDFATSACVL

SEQ ID NO: 4481 - protein, 10 aa, Severe acute respiratory syndrome coronavirus 2
  REGION 1..10: note = Table A: HLA-A*03:01H HLA-A*03:02H
VLAAECTIFK

SEQ ID NO: 4482 - protein, 10 aa, Severe acute respiratory syndrome coronavirus 2
  REGION 1..10: note = Table A: HLA-A*30:02H
ASGKPVPYCY

SEQ ID NO: 4483 - protein, 10 aa, Severe acute respiratory syndrome coronavirus 2
  REGION 1..10: note = Table A: HLA-C*15:05H
VPYCYDTNVL

SEQ ID NO: 4484 - protein, 10 aa, Severe acute respiratory syndrome coronavirus 2
  REGION 1..10: note = Table A: HLA-B*35:01H
TNVLEGSVAY

SEQ ID NO: 4485 - protein, 10 aa, Severe acute respiratory syndrome coronavirus 2
  REGION 1..10: note = Table A: HLA-B*40:01H HLA-B*40:02H
LEGSVAYESL

SEQ ID NO: 4486 - protein, 10 aa, Severe acute respiratory syndrome coronavirus 2
  REGION 1..10: note = Table A: HLA-A*02:02H HLA-B*07:04H
SLRPDTRYVL

SEQ ID NO: 4487 - protein, 10 aa, Severe acute respiratory syndrome coronavirus 2
  REGION 1..10: note = Table A: HLA-C*14:03H HLA-A*11:303H HLA-A*25:01H HLA-B*46:01H HLA-A*26:02H HLA-A*02:11H HLA-C*15:05H HLA-A*02:04M HLA-A*02:07H HLA-B*14:01H HLA-A*02:01M HLA-A*02:02M HLA-A*02:03H HLA-A*24:02H HLA-A*23:01H
  REGION 1..10: note = CONT. FROM ABOVE: HLA-B*38:02M HLA-B*15:01M HLA-B*15:02H
VLMDGSIIQF

SEQ ID NO: 4488 - protein, 10 aa, Severe acute respiratory syndrome coronavirus 2
  REGION 1..10: note = Table A: HLA-A*30:02H
GSIIQFPNTY

SEQ ID NO: 4489 - protein, 10 aa, Severe acute respiratory syndrome coronavirus 2
  REGION 1..10: note = Table A: HLA-A*11:303H HLA-C*03:03H HLA-A*02:11H HLA-C*03:04H HLA-A*68:02H HLA-A*02:04H HLA-A*02:05H HLA-A*02:08H HLA-A*02:01H HLA-A*02:02H HLA-A*02:03H HLA-C*17:01H HLA-A*66:01H
SIIQFPNTYL

SEQ ID NO: 4490 - protein, 10 aa, Severe acute respiratory syndrome coronavirus 2
  REGION 1..10: note = Table A: HLA-A*68:02H
NTYLEGSVRV

SEQ ID NO: 4491 - protein, 10 aa, Severe acute respiratory syndrome coronavirus 2
  REGION 1..10: note = Table A: HLA-C*14:03H HLA-C*06:02H
TYLEGSVRVV

SEQ ID NO: 4492 - protein, 10 aa, Severe acute respiratory syndrome coronavirus 2
  REGION 1..10: note = Table A: HLA-A*36:01H HLA-A*30:02M HLA-B*15:01H
RVVTTFDSEY

SEQ ID NO: 4493 - protein, 10 aa, Severe acute respiratory syndrome coronavirus 2
  REGION 1..10: note = Table A: HLA-A*34:02H
TTFDSEYCRH

SEQ ID NO: 4494 - protein, 10 aa, Severe acute respiratory syndrome coronavirus 2
  REGION 1..10: note = Table A: HLA-A*33:03H
EYCRHGTCER

SEQ ID NO: 4495 - protein, 10 aa, Severe acute respiratory syndrome coronavirus 2
  REGION 1..10: note = Table A: HLA-A*30:02H
SGRWVLNNDY

SEQ ID NO: 4496 - protein, 10 aa, Severe acute respiratory syndrome coronavirus 2
  REGION 1..10: note = Table A: HLA-B*27:05M HLA-B*27:02M HLA-B*38:02H
GRWVLNNDYY

SEQ ID NO: 4497 - protein, 10 aa, Severe acute respiratory syndrome coronavirus 2
  REGION 1..10: note = Table A: HLA-C*01:02H HLA-A*02:04H HLA-A*02:02H
VLNNDYYRSL

SEQ ID NO: 4498 - protein, 10 aa, Severe acute respiratory syndrome coronavirus 2
  REGION 1..10: note = Table A: HLA-A*24:07H
DYYRSLPGVF

SEQ ID NO: 4499 - protein, 10 aa, Severe acute respiratory syndrome coronavirus 2
  REGION 1..10: note = Table A: HLA-A*02:11H HLA-A*02:06H
RSLPGVFCGV

SEQ ID NO: 4500 - protein, 10 aa, Severe acute respiratory syndrome coronavirus 2
  REGION 1..10: note = Table A: HLA-B*35:01H
DAVNLLTNMF

SEQ ID NO: 4501 - protein, 10 aa, Severe acute respiratory syndrome coronavirus 2
  REGION 1..10: note = Table A: HLA-A*02:11H HLA-A*68:02H HLA-B*54:01H
FTPLIQPIGA

SEQ ID NO: 4502 - protein, 10 aa, Severe acute respiratory syndrome coronavirus 2
  REGION 1..10: note = Table A: HLA-C*15:05M HLA-B*07:02H HLA-B*07:05M
TPLIQPIGAL

SEQ ID NO: 4503 - protein, 10 aa, Severe acute respiratory syndrome coronavirus 2
  REGION 1..10: note = Table A: HLA-B*56:01H HLA-B*55:02H HLA-B*35:03H HLA-C*15:05H HLA-B*55:01M HLA-B*39:06H HLA-B*54:01M
QPIGALDISA

SEQ ID NO: 4504 - protein, 10 aa, Severe acute respiratory syndrome coronavirus 2
  REGION 1..10: note = Table A: HLA-A*68:02H HLA-A*02:05H HLA-A*02:06H HLA-A*02:08M HLA-A*02:01H HLA-B*38:02H
SIVAGGIVAI

SEQ ID NO: 4505 - protein, 10 aa, Severe acute respiratory syndrome coronavirus 2
  REGION 1..10: note = Table A: HLA-A*68:02H HLA-A*02:08H
IVAGGIVAIV

SEQ ID NO: 4506 - protein, 10 aa, Severe acute respiratory syndrome coronavirus 2
  REGION 1..10: note = Table A: HLA-C*16:04H HLA-A*02:11H HLA-B*55:02H HLA-A*30:02H HLA-C*15:02H HLA-A*02:05H HLA-A*02:08H HLA-A*02:02H HLA-C*08:01H HLA-B*07:04H HLA-B*13:02H
RAFGEYSHVV

SEQ ID NO: 4507 - protein, 10 aa, Severe acute respiratory syndrome coronavirus 2
  REGION 1..10: note = Table A: HLA-C*08:01H
YSHVVAFNTL

SEQ ID NO: 4508 - protein, 10 aa, Severe acute respiratory syndrome coronavirus 2
  REGION 1..10: note = Table A: HLA-B*38:01H HLA-B*38:02M HLA-B*15:10H
SHVVAFNTLL

SEQ ID NO: 4509 - protein, 10 aa, Severe acute respiratory syndrome coronavirus 2
  REGION 1..10: note = Table A: HLA-A*26:01H
HVVAFNTLLF

SEQ ID NO: 4510 - protein, 10 aa, Severe acute respiratory syndrome coronavirus 2
  REGION 1..10: note = Table A: HLA-A*68:02H
YSFLPGVYSV

SEQ ID NO: 4511 - protein, 10 aa, Severe acute respiratory syndrome coronavirus 2
  REGION 1..10: note = Table A: HLA-A*24:07H HLA-A*23:01H
SFLPGVYSVI

SEQ ID NO: 4512 - protein, 10 aa, Severe acute respiratory syndrome coronavirus 2
  REGION 1..10: note = Table A: HLA-C*14:02H HLA-C*14:03M HLA-A*24:07H HLA-A*23:01H HLA-B*15:02H HLA-B*07:05H
TFYLTNDVSF

SEQ ID NO: 4513 - protein, 10 aa, Severe acute respiratory syndrome coronavirus 2
  REGION 1..10: note = Table A: HLA-C*14:02H HLA-C*14:03M HLA-A*24:02H HLA-A*24:07H HLA-A*23:01H
FYLTNDVSFL

SEQ ID NO: 4514 - protein, 10 aa, Severe acute respiratory syndrome coronavirus 2
  REGION 1..10: note = Table A: HLA-A*34:02H
LTNDVSFLAH

SEQ ID NO: 4515 - protein, 10 aa, Severe acute respiratory syndrome coronavirus 2
  REGION 1..10: note = Table A: HLA-A*25:01H HLA-B*53:01H HLA-A*68:02H
DVSFLAHIQW

SEQ ID NO: 4516 - protein, 10 aa, Severe acute respiratory syndrome coronavirus 2
  REGION 1..10: note = Table A: HLA-C*15:05H
TPLVPFWITI

SEQ ID NO: 4517 - protein, 10 aa, Severe acute respiratory syndrome coronavirus 2
  REGION 1..10: note = Table A: HLA-B*58:02H HLA-B*57:03H
ISTKHFYWFF

SEQ ID NO: 4518 - protein, 10 aa, Severe acute respiratory syndrome coronavirus 2
  REGION 1..10: note = Table A: HLA-C*14:03H
HFYWFFSNYL

SEQ ID NO: 4519 - protein, 10 aa, Severe acute respiratory syndrome coronavirus 2
  REGION 1..10: note = Table A: HLA-B*27:05H HLA-B*27:02H
RRVVFNGVSF

SEQ ID NO: 4520 - protein, 10 aa, Severe acute respiratory syndrome coronavirus 2
  REGION 1..10: note = Table A: HLA-A*68:02H
VVFNGVSFST

SEQ ID NO: 4521 - protein, 10 aa, Severe acute respiratory syndrome coronavirus 2
  REGION 1..10: note = Table A: HLA-C*14:02M HLA-C*14:03M HLA-A*29:02H HLA-A*24:02M HLA-A*24:07H HLA-A*23:01H HLA-B*07:05H
VFNGVSFSTF

SEQ ID NO: 4522 - protein, 10 aa, Severe acute respiratory syndrome coronavirus 2
  REGION 1..10: note = Table A: HLA-A*68:02H
GVSFSTFEEA

SEQ ID NO: 4523 - protein, 10 aa, Severe acute respiratory syndrome coronavirus 2
  REGION 1..10: note = Table A: HLA-C*04:01M HLA-C*04:03H HLA-B*38:02H
TFEEAALCTF

SEQ ID NO: 4524 - protein, 10 aa, Severe acute respiratory syndrome coronavirus 2
  REGION 1..10: note = Table A: HLA-B*40:01H
FEEAALCTFL

SEQ ID NO: 4525 - protein, 10 aa, Severe acute respiratory syndrome coronavirus 2
  REGION 1..10: note = Table A: HLA-A*02:02M
LLNKEMYLKL

SEQ ID NO: 4526 - protein, 10 aa, Severe acute respiratory syndrome coronavirus 2
  REGION 1..10: note = Table A: HLA-B*08:01H
YLKLRSDVLL

SEQ ID NO: 4527 - protein, 10 aa, Severe acute respiratory syndrome coronavirus 2
  REGION 1..10: note = Table A: HLA-B*44:03H HLA-B*18:01H HLA-B*35:01H
SDVLLPLTQY

SEQ ID NO: 4528 - protein, 10 aa, Severe acute respiratory syndrome coronavirus 2
  REGION 1..10: note = Table A: HLA-A*74:01M
VLLPLTQYNR

SEQ ID NO: 4529 - protein, 10 aa, Severe acute respiratory syndrome coronavirus 2
  REGION 1..10: note = Table A: HLA-A*30:02M HLA-B*38:02H HLA-B*15:01H HLA-B*15:02H HLA-B*15:03H
TQYNRYLALY

SEQ ID NO: 4530 - protein, 10 aa, Severe acute respiratory syndrome coronavirus 2
  REGION 1..10: note = Table A: HLA-A*30:01H
RYLALYNKYK

SEQ ID NO: 4531 - protein, 10 aa, Severe acute respiratory syndrome coronavirus 2
  REGION 1..10: note = Table A: HLA-A*01:01H
FSGAMDTTSY

SEQ ID NO: 4532 - protein, 10 aa, Severe acute respiratory syndrome coronavirus 2
  REGION 1..10: note = Table A: HLA-A*68:01H HLA-A*34:01H
SGAMDTTSYR

SEQ ID NO: 4533 - protein, 10 aa, Severe acute respiratory syndrome coronavirus 2
  REGION 1..10: note = Table A: HLA-A*02:07H HLA-A*02:01H HLA-A*02:02H
AMDTTSYREA

SEQ ID NO: 4534 - protein, 10 aa, Severe acute respiratory syndrome coronavirus 2
  REGION 1..10: note = Table A: HLA-B*38:02H
CHLAKALNDF

SEQ ID NO: 4535 - protein, 10 aa, Severe acute respiratory syndrome coronavirus 2
  REGION 1..10: note = Table A: HLA-A*36:01H HLA-A*30:02H HLA-B*35:01H
FSNSGSDVLY

SEQ ID NO: 4536 - protein, 10 aa, Severe acute respiratory syndrome coronavirus 2
  REGION 1..10: note = Table A: HLA-A*03:01H HLA-A*02:11H HLA-C*15:05H HLA-A*02:03H HLA-B*52:01M HLA-B*38:02H HLA-B*13:02H
VLYQPPQTSI

SEQ ID NO: 4537 - protein, 10 aa, Severe acute respiratory syndrome coronavirus 2
  REGION 1..10: note = Table A: HLA-B*56:01H HLA-B*55:02M HLA-C*15:05M HLA-B*55:01H HLA-B*54:01H HLA-B*07:05H
QPPQTSITSA

SEQ ID NO: 4538 - protein, 10 aa, Severe acute respiratory syndrome coronavirus 2
  REGION 1..10: note = Table A: HLA-B*58:01H HLA-B*57:01H HLA-A*68:01H HLA-B*57:03M
ITSAVLQSGF

SEQ ID NO: 4539 - protein, 10 aa, Severe acute respiratory syndrome coronavirus 2
  REGION 1..10: note = Table A: HLA-A*68:01H HLA-A*34:01H HLA-A*34:02H HLA-A*66:01M
TSAVLQSGFR

SEQ ID NO: 4540 - protein, 10 aa, Severe acute respiratory syndrome coronavirus 2
  REGION 1..10: note = Table A: HLA-B*35:01H HLA-B*35:07H HLA-B*54:01M
MAFPSGKVEG

SEQ ID NO: 4541 - protein, 10 aa, Severe acute respiratory syndrome coronavirus 2
  REGION 1..10: note = Table A: HLA-C*15:05H
FPSGKVEGCM

SEQ ID NO: 4542 - protein, 10 aa, Severe acute respiratory syndrome coronavirus 2
  REGION 1..10: note = Table A: HLA-B*15:01H
VQVTCGTTTL

SEQ ID NO: 4543 - protein, 10 aa, Severe acute respiratory syndrome coronavirus 2
  REGION 1..10: note = Table A: HLA-A*02:04H HLA-A*02:01H
GLWLDDVVYC

SEQ ID NO: 4544 - protein, 10 aa, Severe acute respiratory syndrome coronavirus 2
  REGION 1..10: note = Table A: HLA-A*36:01H HLA-A*01:01H
TSEDMLNPNY

SEQ ID NO: 4545 - protein, 10 aa, Severe acute respiratory syndrome coronavirus 2
  REGION 1..10: note = Table A: HLA-A*02:04H HLA-A*02:02M HLA-B*38:02H
MLNPNYEDLL

SEQ ID NO: 4546 - protein, 10 aa, Severe acute respiratory syndrome coronavirus 2
  REGION 1..10: note = Table A: HLA-B*55:02M HLA-A*02:08H
KSNHNFLVQA

SEQ ID NO: 4547 - protein, 10 aa, Severe acute respiratory syndrome coronavirus 2
  REGION 1..10: note = Table A: HLA-A*11:303H HLA-A*02:04M HLA-A*02:05H HLA-A*02:06H HLA-B*14:01H HLA-A*02:01M HLA-A*02:02M HLA-A*02:03H HLA-C*08:03H HLA-B*38:02M
FLVQAGNVQL

SEQ ID NO: 4548 - protein, 10 aa, Severe acute respiratory syndrome coronavirus 2
  REGION 1..10: note = Table A: HLA-A*74:01M HLA-A*03:02H HLA-A*11:01H HLA-A*33:01H HLA-A*33:03H HLA-A*26:03M HLA-A*68:01M HLA-A*34:01M HLA-A*34:02H HLA-A*31:01H HLA-A*66:01H
LVQAGNVQLR

SEQ ID NO: 4549 - protein, 10 aa, Severe acute respiratory syndrome coronavirus 2
  REGION 1..10: note = Table A: HLA-B*13:02H
VQAGNVQLRV

SEQ ID NO: 4550 - protein, 10 aa, Severe acute respiratory syndrome coronavirus 2
  REGION 1..10: note = Table A: HLA-A*30:02H
VQLRVIGHSM

SEQ ID NO: 4551 - protein, 10 aa, Severe acute respiratory syndrome coronavirus 2
  REGION 1..10: note = Table A: HLA-A*02:05H HLA-A*02:08H
RVIGHSMQNC

SEQ ID NO: 4552 - protein, 10 aa, Severe acute respiratory syndrome coronavirus 2
  REGION 1..10: note = Table A: HLA-A*74:01H HLA-A*03:01H HLA-A*03:02H
KLKVDTANPK

SEQ ID NO: 4553 - protein, 10 aa, Severe acute respiratory syndrome coronavirus 2
  REGION 1..10: note = Table A: HLA-A*25:01M HLA-A*26:01H HLA-A*26:02M HLA-A*26:03H HLA-A*68:01H HLA-A*34:02M
DTANPKTPKY

SEQ ID NO: 4554 - protein, 10 aa, Severe acute respiratory syndrome coronavirus 2
  REGION 1..10: note = Table A: HLA-A*34:02H
TANPKTPKYK

SEQ ID NO: 4555 - protein, 10 aa, Severe acute respiratory syndrome coronavirus 2
  REGION 1..10: note = Table A: HLA-B*07:04M
NPKTPKYKFV

SEQ ID NO: 4556 - protein, 10 aa, Severe acute respiratory syndrome coronavirus 2
  REGION 1..10: note = Table A: HLA-B*57:03H
KTPKYKFVRI

SEQ ID NO: 4557 - protein, 10 aa, Severe acute respiratory syndrome coronavirus 2
  REGION 1..10: note = Table A: HLA-B*42:01H HLA-B*57:01H HLA-A*25:01H HLA-B*46:01M HLA-C*03:02M HLA-C*15:05H HLA-C*12:02M HLA-A*34:01H HLA-B*38:02M HLA-B*07:02M HLA-B*07:04M HLA-B*15:01H HLA-B*15:02M HLA-B*57:03H HLA-C*02:02H HLA-B*15:11H
  REGION 1..10: note = CONT. FROM ABOVE: HLA-A*66:01H
FVRIQPGQTF

SEQ ID NO: 4558 - protein, 10 aa, Severe acute respiratory syndrome coronavirus 2
  REGION 1..10: note = Table A: HLA-A*02:11H HLA-A*02:08H HLA-B*13:02H
RIQPGQTFSV

SEQ ID NO: 4559 - protein, 10 aa, Severe acute respiratory syndrome coronavirus 2
  REGION 1..10: note = Table A: HLA-C*01:02H HLA-B*15:01H
IQPGQTFSVL

SEQ ID NO: 4560 - protein, 10 aa, Severe acute respiratory syndrome coronavirus 2
  REGION 1..10: note = Table A: HLA-B*55:02H
QPGQTFSVLA

SEQ ID NO: 4561 - protein, 10 aa, Severe acute respiratory syndrome coronavirus 2
  REGION 1..10: note = Table A: HLA-A*30:02H HLA-B*15:01M HLA-B*13:02H
GQTFSVLACY

SEQ ID NO: 4562 - protein, 10 aa, Severe acute respiratory syndrome coronavirus 2
  REGION 1..10: note = Table A: HLA-A*02:03H
ACYNGSPSGV

SEQ ID NO: 4563 - protein, 10 aa, Severe acute respiratory syndrome coronavirus 2
  REGION 1..10: note = Table A: HLA-A*30:02H
CYNGSPSGVY

SEQ ID NO: 4564 - protein, 10 aa, Severe acute respiratory syndrome coronavirus 2
  REGION 1..10: note = Table A: HLA-B*35:03H HLA-C*15:05M HLA-B*35:01H HLA-B*07:02M HLA-B*07:04H HLA-B*07:05M
SPSGVYQCAM

SEQ ID NO: 4565 - protein, 10 aa, Severe acute respiratory syndrome coronavirus 2
  REGION 1..10: note = Table A: HLA-A*74:01H HLA-A*02:02H
AMRPNFTIKG

SEQ ID NO: 4566 - protein, 10 aa, Severe acute respiratory syndrome coronavirus 2
  REGION 1..10: note = Table A: HLA-B*42:01H HLA-B*56:01H HLA-B*55:02H HLA-C*15:05M HLA-B*55:01H HLA-B*07:02M HLA-B*07:04H HLA-B*07:05H
RPNFTIKGSF

SEQ ID NO: 4567 - protein, 10 aa, Severe acute respiratory syndrome coronavirus 2
  REGION 1..10: note = Table A: HLA-A*34:02H HLA-A*66:01H
FTIKGSFLNG

SEQ ID NO: 4568 - protein, 10 aa, Severe acute respiratory syndrome coronavirus 2
  REGION 1..10: note = Table A: HLA-B*38:02M HLA-B*39:06H HLA-B*39:01H
MHHMELPTGV

SEQ ID NO: 4569 - protein, 10 aa, Severe acute respiratory syndrome coronavirus 2
  REGION 1..10: note = Table A: HLA-B*38:02H
HHMELPTGVH

SEQ ID NO: 4570 - protein, 10 aa, Severe acute respiratory syndrome coronavirus 2
  REGION 1..10: note = Table A: HLA-B*38:02H
HMELPTGVHA

SEQ ID NO: 4571 - protein, 10 aa, Severe acute respiratory syndrome coronavirus 2
  REGION 1..10: note = Table A: HLA-B*45:01H HLA-B*40:02H HLA-B*40:06H HLA-B*50:01H
MELPTGVHAG

SEQ ID NO: 4572 - protein, 10 aa, Severe acute respiratory syndrome coronavirus 2
  REGION 1..10: note = Table A: HLA-A*30:02H
AGTDLEGNFY

SEQ ID NO: 4573 - protein, 10 aa, Severe acute respiratory syndrome coronavirus 2
  REGION 1..10: note = Table A: HLA-A*36:01H
GTDLEGNFYG

SEQ ID NO: 4574 - protein, 10 aa, Severe acute respiratory syndrome coronavirus 2
  REGION 1..10: note = Table A: HLA-A*33:01H HLA-A*33:03M HLA-B*27:02H HLA-A*68:01H HLA-A*68:02H HLA-A*66:01H
GNFYGPFVDR

SEQ ID NO: 4575 - protein, 10 aa, Severe acute respiratory syndrome coronavirus 2
  REGION 1..10: note = Table A: HLA-C*06:02H
FYGPFVDRQT

SEQ ID NO: 4576 - protein, 10 aa, Severe acute respiratory syndrome coronavirus 2
  REGION 1..10: note = Table A: HLA-C*15:05H
GPFVDRQTAQ

SEQ ID NO: 4577 - protein, 10 aa, Severe acute respiratory syndrome coronavirus 2
  REGION 1..10: note = Table A: HLA-B*38:02H HLA-B*13:01H HLA-B*13:02M
AQAAGTDTTI

SEQ ID NO: 4578 - protein, 10 aa, Severe acute respiratory syndrome coronavirus 2
  REGION 1..10: note = Table A: HLA-A*68:02H
GTDTTITVNV

SEQ ID NO: 4579 - protein, 10 aa, Severe acute respiratory syndrome coronavirus 2
  REGION 1..10: note = Table A: HLA-C*08:03H
TDTTITVNVL

SEQ ID NO: 4580 - protein, 10 aa, Severe acute respiratory syndrome coronavirus 2
  REGION 1..10: note = Table A: HLA-B*58:01H HLA-B*57:01H HLA-A*25:01M HLA-B*57:03H
TTITVNVLAW

SEQ ID NO: 4581 - protein, 10 aa, Severe acute respiratory syndrome coronavirus 2
  REGION 1..10: note = Table A: HLA-A*36:01H HLA-A*29:02H
ITVNVLAWLY

SEQ ID NO: 4582 - protein, 10 aa, Severe acute respiratory syndrome coronavirus 2
  REGION 1..10: note = Table A: HLA-B*58:01H HLA-B*57:01H HLA-B*53:01H HLA-B*35:07H HLA-B*38:02H HLA-B*57:03M HLA-B*13:01H
YAAVINGDRW

SEQ ID NO: 4583 - protein, 10 aa, Severe acute respiratory syndrome coronavirus 2
  REGION 1..10: note = Table A: HLA-A*11:303H HLA-A*74:01H HLA-A*11:01H HLA-A*11:02M HLA-A*02:11M HLA-C*03:04H HLA-A*30:02H HLA-A*68:02M HLA-C*15:02H HLA-A*02:04M HLA-A*02:05M HLA-A*02:06M HLA-A*02:07H HLA-A*02:08M HLA-A*02:01H
  REGION 1..10: note = CONT. FROM ABOVE: HLA-A*02:02M HLA-C*17:01H HLA-C*08:01M HLA- B*38:02H HLA-B*40:06H HLA-B*57:03H HLA-B*13:01H HLA-A*66:01H
AVINGDRWFL

SEQ ID NO: 4584 - protein, 10 aa, Severe acute respiratory syndrome coronavirus 2
  REGION 1..10: note = Table A: HLA-A*24:07H
WFLNRFTTTL

SEQ ID NO: 4585 - protein, 10 aa, Severe acute respiratory syndrome coronavirus 2
  REGION 1..10: note = Table A: HLA-A*68:02H
FTTTLNDFNL

SEQ ID NO: 4586 - protein, 10 aa, Severe acute respiratory syndrome coronavirus 2
  REGION 1..10: note = Table A: HLA-A*11:303H HLA-B*46:01M HLA-A*02:04M HLA-A*02:01H HLA-A*02:02H HLA-A*02:03H HLA-B*38:02M HLA-B*15:01H HLA-B*15:02M
TLNDFNLVAM

SEQ ID NO: 4587 - protein, 10 aa, Severe acute respiratory syndrome coronavirus 2
  REGION 1..10: note = Table A: HLA-B*18:01H
NDFNLVAMKY

SEQ ID NO: 4588 - protein, 10 aa, Severe acute respiratory syndrome coronavirus 2
  REGION 1..10: note = Table A: HLA-B*39:01H
DHVDILGPLS

SEQ ID NO: 4589 - protein, 10 aa, Severe acute respiratory syndrome coronavirus 2
  REGION 1..10: note = Table A: HLA-A*36:01H HLA-B*38:02H HLA-B*54:01H
HVDILGPLSA

SEQ ID NO: 4590 - protein, 10 aa, Severe acute respiratory syndrome coronavirus 2
  REGION 1..10: note = Table A: HLA-B*55:02H
GPLSAQTGIA

SEQ ID NO: 4591 - protein, 10 aa, Severe acute respiratory syndrome coronavirus 2
  REGION 1..10: note = Table A: HLA-B*13:02H
AQTGIAVLDM

SEQ ID NO: 4592 - protein, 10 aa, Severe acute respiratory syndrome coronavirus 2
  REGION 1..10: note = Table A: HLA-A*03:01M HLA-A*03:02H HLA-A*11:01M HLA-A*11:02M HLA-A*34:02H
AVLDMCASLK

SEQ ID NO: 4593 - protein, 10 aa, Severe acute respiratory syndrome coronavirus 2
  REGION 1..10: note = Table A: HLA-A*02:02M HLA-A*02:03H HLA-B*38:02H
SLKELLQNGM

SEQ ID NO: 4594 - protein, 10 aa, Severe acute respiratory syndrome coronavirus 2
  REGION 1..10: note = Table A: HLA-A*33:03H HLA-A*26:03H HLA-B*27:02H HLA-A*68:01H HLA-A*34:01H HLA-A*34:02H HLA-A*66:01M
ELLQNGMNGR

SEQ ID NO: 4595 - protein, 10 aa, Severe acute respiratory syndrome coronavirus 2
  REGION 1..10: note = Table A: HLA-A*68:02H
DEFTPFDVVR

SEQ ID NO: 4596 - protein, 10 aa, Severe acute respiratory syndrome coronavirus 2
  REGION 1..10: note = Table A: HLA-B*15:01H
VVRQCSGVTF

SEQ ID NO: 4597 - protein, 10 aa, Severe acute respiratory syndrome coronavirus 2
  REGION 1..10: note = Table A: HLA-A*11:01H HLA-A*36:01H HLA-B*27:02H HLA-A*30:02H HLA-A*34:02H
SGVTFQSAVK

SEQ ID NO: 4598 - protein, 10 aa, Severe acute respiratory syndrome coronavirus 2
  REGION 1..10: note = Table A: HLA-A*74:01H HLA-A*68:01M HLA-A*34:01H
GVTFQSAVKR

SEQ ID NO: 4599 - protein, 10 aa, Severe acute respiratory syndrome coronavirus 2
  REGION 1..10: note = Table A: HLA-B*57:03H
RTIKGTHHWL

SEQ ID NO: 4600 - protein, 10 aa, Severe acute respiratory syndrome coronavirus 2
  REGION 1..10: note = Table A: HLA-B*07:04H
TIKGTHHWLL

SEQ ID NO: 4601 - protein, 10 aa, Severe acute respiratory syndrome coronavirus 2
  REGION 1..10: note = Table A: HLA-B*38:02H
THHWLLLTIL

SEQ ID NO: 4602 - protein, 10 aa, Severe acute respiratory syndrome coronavirus 2
  REGION 1..10: note = Table A: HLA-B*58:01H HLA-B*27:02H
LLVLVQSTQW

SEQ ID NO: 4603 - protein, 10 aa, Severe acute respiratory syndrome coronavirus 2
  REGION 1..10: note = Table A: HLA-C*03:02H HLA-B*38:02H
FLYENAFLPF

SEQ ID NO: 4604 - protein, 10 aa, Severe acute respiratory syndrome coronavirus 2
  REGION 1..10: note = Table A: HLA-B*18:01H
YENAFLPFAM

SEQ ID NO: 4605 - protein, 10 aa, Severe acute respiratory syndrome coronavirus 2
  REGION 1..10: note = Table A: HLA-B*42:01H HLA-B*56:01H HLA-B*53:01H HLA-B*55:02M HLA-B*35:03H HLA-C*15:05M HLA-B*35:01H HLA-B*35:02H HLA-B*35:08H HLA-B*51:01M HLA-B*35:07H HLA-B*35:12H HLA-B*38:02H HLA-B*54:01M HLA-B*07:02H HLA-B*07:04H
  REGION 1..10: note = CONT. FROM ABOVE: HLA-B*15:02M HLA-B*07:05M HLA-B*15:11H
LPFAMGIIAM

SEQ ID NO: 4606 - protein, 10 aa, Severe acute respiratory syndrome coronavirus 2
  REGION 1..10: note = Table A: HLA-B*54:01H
FAMGIIAMSA

SEQ ID NO: 4607 - protein, 10 aa, Severe acute respiratory syndrome coronavirus 2
  REGION 1..10: note = Table A: HLA-A*02:03H
AMSAFAMMFV

SEQ ID NO: 4608 - protein, 10 aa, Severe acute respiratory syndrome coronavirus 2
  REGION 1..10: note = Table A: HLA-A*34:02H
MSAFAMMFVK

SEQ ID NO: 4609 - protein, 10 aa, Severe acute respiratory syndrome coronavirus 2
  REGION 1..10: note = Table A: HLA-B*46:01H HLA-B*15:01H HLA-B*15:02H
LLPSLATVAY

SEQ ID NO: 4610 - protein, 10 aa, Severe acute respiratory syndrome coronavirus 2
  REGION 1..10: note = Table A: HLA-B*53:01H HLA-C*15:05H HLA-B*35:01H
LPSLATVAYF

SEQ ID NO: 4611 - protein, 10 aa, Severe acute respiratory syndrome coronavirus 2
  REGION 1..10: note = Table A: HLA-A*36:01H HLA-A*30:02H
ATVAYFNMVY

SEQ ID NO: 4612 - protein, 10 aa, Severe acute respiratory syndrome coronavirus 2
  REGION 1..10: note = Table A: HLA-A*25:01H
FNMVYMPASW

SEQ ID NO: 4613 - protein, 10 aa, Severe acute respiratory syndrome coronavirus 2
  REGION 1..10: note = Table A: HLA-A*33:03H HLA-A*31:01H
VYMPASWVMR

SEQ ID NO: 4614 - protein, 10 aa, Severe acute respiratory syndrome coronavirus 2
  REGION 1..10: note = Table A: HLA-C*15:05H HLA-B*35:07H HLA-B*07:04M
MPASWVMRIM

SEQ ID NO: 4615 - protein, 10 aa, Severe acute respiratory syndrome coronavirus 2
  REGION 1..10: note = Table A: HLA-B*57:03H
ASWVMRIMTW

SEQ ID NO: 4616 - protein, 10 aa, Severe acute respiratory syndrome coronavirus 2
  REGION 1..10: note = Table A: HLA-A*25:01M HLA-A*26:01M HLA-A*26:02H HLA-A*26:03H HLA-A*34:01H HLA-B*38:02M HLA-B*15:02H
DMVDTSLSGF

SEQ ID NO: 4617 - protein, 10 aa, Severe acute respiratory syndrome coronavirus 2
  REGION 1..10: note = Table A: HLA-A*36:01M HLA-A*34:02M
MVDTSLSGFK

SEQ ID NO: 4618 - protein, 10 aa, Severe acute respiratory syndrome coronavirus 2
  REGION 1..10: note = Table A: HLA-A*34:02M HLA-A*66:01H
DTSLSGFKLK

SEQ ID NO: 4619 - protein, 10 aa, Severe acute respiratory syndrome coronavirus 2
  REGION 1..10: note = Table A: HLA-B*56:01H HLA-B*55:02H HLA-B*40:06H
AVVLLILMTA

SEQ ID NO: 4620 - protein, 10 aa, Severe acute respiratory syndrome coronavirus 2
  REGION 1..10: note = Table A: HLA-A*74:01H
VVLLILMTAR

SEQ ID NO: 4621 - protein, 10 aa, Severe acute respiratory syndrome coronavirus 2
  REGION 1..10: note = Table A: HLA-A*02:11H HLA-A*68:02H HLA-A*02:05M HLA-A*02:06M HLA-A*02:08H HLA-A*02:02H HLA-A*02:03H HLA-A*34:01H HLA-B*38:02H
TVYDDGARRV

SEQ ID NO: 4622 - protein, 10 aa, Severe acute respiratory syndrome coronavirus 2
  REGION 1..10: note = Table A: HLA-A*24:07H HLA-C*08:01H HLA-A*23:01H
VYDDGARRVW

SEQ ID NO: 4623 - protein, 10 aa, Severe acute respiratory syndrome coronavirus 2
  REGION 1..10: note = Table A: HLA-B*27:05H
RRVWTLMNVL

SEQ ID NO: 4624 - protein, 10 aa, Severe acute respiratory syndrome coronavirus 2
  REGION 1..10: note = Table A: HLA-A*29:01M HLA-A*29:02H HLA-B*38:02M HLA-B*15:01H HLA-B*15:02H HLA-B*07:05H
TLMNVLTLVY

SEQ ID NO: 4625 - protein, 10 aa, Severe acute respiratory syndrome coronavirus 2
  REGION 1..10: note = Table A: HLA-C*14:02H HLA-C*14:03H HLA-A*24:02H HLA-A*24:07H
VYKVYYGNAL

SEQ ID NO: 4626 - protein, 10 aa, Severe acute respiratory syndrome coronavirus 2
  REGION 1..10: note = Table A: HLA-A*25:01M HLA-B*53:01H HLA-B*35:01H HLA-B*35:07H HLA-B*38:02H HLA-B*57:03H
NALDQAISMW

SEQ ID NO: 4627 - protein, 10 aa, Severe acute respiratory syndrome coronavirus 2
  REGION 1..10: note = Table A: HLA-A*11:303H HLA-B*46:01H HLA-A*29:01H HLA-B*27:02H HLA-A*30:02M HLA-B*38:02M HLA-B*15:01H HLA-B*15:03H
ALIISVTSNY

SEQ ID NO: 4628 - protein, 10 aa, Severe acute respiratory syndrome coronavirus 2
  REGION 1..10: note = Table A: HLA-A*68:02H HLA-A*02:01H HLA-A*02:02H HLA-A*02:03M HLA-B*38:02H
SNYSGVVTTV

SEQ ID NO: 4629 - protein, 10 aa, Severe acute respiratory syndrome coronavirus 2
  REGION 1..10: note = Table A: HLA-C*14:02H HLA-C*14:03H HLA-C*07:02H HLA-B*07:05H
NYSGVVTTVM

SEQ ID NO: 4630 - protein, 10 aa, Severe acute respiratory syndrome coronavirus 2
  REGION 1..10: note = Table A: HLA-C*14:03H
MFLARGIVFM

SEQ ID NO: 4631 - protein, 10 aa, Severe acute respiratory syndrome coronavirus 2
  REGION 1..10: note = Table A: HLA-A*30:02H
RYFRLTLGVY

SEQ ID NO: 4632 - protein, 10 aa, Severe acute respiratory syndrome coronavirus 2
  REGION 1..10: note = Table A: HLA-B*27:02H
FRLTLGVYDY

SEQ ID NO: 4633 - protein, 10 aa, Severe acute respiratory syndrome coronavirus 2
  REGION 1..10: note = Table A: HLA-A*02:02H HLA-B*13:01M
RLTLGVYDYL

SEQ ID NO: 4634 - protein, 10 aa, Severe acute respiratory syndrome coronavirus 2
  REGION 1..10: note = Table A: HLA-B*18:01H HLA-B*27:02H HLA-B*37:01H HLA-B*38:02H
YDYLVSTQEF

SEQ ID NO: 4635 - protein, 10 aa, Severe acute respiratory syndrome coronavirus 2
  REGION 1..10: note = Table A: HLA-A*33:01H HLA-A*33:03H
DYLVSTQEFR

SEQ ID NO: 4636 - protein, 10 aa, Severe acute respiratory syndrome coronavirus 2
  REGION 1..10: note = Table A: HLA-A*36:01H HLA-A*29:02M HLA-A*30:02H
YLVSTQEFRY

SEQ ID NO: 4637 - protein, 10 aa, Severe acute respiratory syndrome coronavirus 2
  REGION 1..10: note = Table A: HLA-A*33:03H
STQEFRYMNS

SEQ ID NO: 4638 - protein, 10 aa, Severe acute respiratory syndrome coronavirus 2
  REGION 1..10: note = Table A: HLA-A*11:01H HLA-A*11:02H HLA-A*68:01H HLA-A*34:02M
MNSQGLLPPK

SEQ ID NO: 4639 - protein, 10 aa, Severe acute respiratory syndrome coronavirus 2
  REGION 1..10: note = Table A: HLA-B*53:01H HLA-B*35:03H HLA-C*15:05M HLA-B*35:01H HLA-B*35:02H HLA-B*35:08M HLA-B*35:07M HLA-B*35:12H HLA-B*07:05M
LPPKNSIDAF

SEQ ID NO: 4640 - protein, 10 aa, Severe acute respiratory syndrome coronavirus 2
  REGION 1..10: note = Table A: HLA-A*03:02H
TVQSKMSDVK

SEQ ID NO: 4641 - protein, 10 aa, Severe acute respiratory syndrome coronavirus 2
  REGION 1..10: note = Table A: HLA-A*02:11M HLA-A*02:01H HLA-A*02:02M HLA-A*02:03M
KMSDVKCTSV

SEQ ID NO: 4642 - protein, 10 aa, Severe acute respiratory syndrome coronavirus 2
  REGION 1..10: note = Table A: HLA-A*03:01H HLA-A*03:02H
QLHNDILLAK

SEQ ID NO: 4643 - protein, 10 aa, Severe acute respiratory syndrome coronavirus 2
  REGION 1..10: note = Table A: HLA-B*15:01H HLA-B*13:01H
LLAKDTTEAF

SEQ ID NO: 4644 - protein, 10 aa, Severe acute respiratory syndrome coronavirus 2
  REGION 1..10: note = Table A: HLA-A*68:02M
DTTEAFEKMV

SEQ ID NO: 4645 - protein, 10 aa, Severe acute respiratory syndrome coronavirus 2
  REGION 1..10: note = Table A: HLA-B*44:05H HLA-B*40:01M HLA-B*40:02M HLA-B*41:02H
TEAFEKMVSL

SEQ ID NO: 4646 - protein, 10 aa, Severe acute respiratory syndrome coronavirus 2
  REGION 1..10: note = Table A: HLA-A*68:02H HLA-A*34:01H HLA-A*34:02H
EAFEKMVSLL

SEQ ID NO: 4647 - protein, 10 aa, Severe acute respiratory syndrome coronavirus 2
  REGION 1..10: note = Table A: HLA-A*02:11H HLA-B*57:03H
KMVSLLSVLL

SEQ ID NO: 4648 - protein, 10 aa, Severe acute respiratory syndrome coronavirus 2
  REGION 1..10: note = Table A: HLA-A*11:303H HLA-A*03:01H HLA-A*03:02H HLA-A*11:01M HLA-A*11:02M HLA-A*30:02H HLA-C*07:27H
SMQGAVDINK

SEQ ID NO: 4649 - protein, 10 aa, Severe acute respiratory syndrome coronavirus 2
  REGION 1..10: note = Table A: HLA-B*38:01H HLA-B*38:02H HLA-B*39:01H HLA-B*13:01H
MQGAVDINKL

SEQ ID NO: 4650 - protein, 10 aa, Severe acute respiratory syndrome coronavirus 2
  REGION 1..10: note = Table A: HLA-B*44:02M HLA-B*44:05H HLA-B*45:01H HLA-B*44:03M HLA-B*40:01H HLA-B*40:02M HLA-B*41:02M HLA-B*49:01H
EEMLDNRATL

SEQ ID NO: 4651 - protein, 10 aa, Severe acute respiratory syndrome coronavirus 2
  REGION 1..10: note = Table A: HLA-B*58:01H HLA-A*11:01H HLA-B*57:01H HLA-A*30:02H HLA-C*15:05H HLA-A*34:02H HLA-B*57:03M
ATLQAIASEF

SEQ ID NO: 4652 - protein, 10 aa, Severe acute respiratory syndrome coronavirus 2
  REGION 1..10: note = Table A: HLA-A*11:303H HLA-C*03:03H HLA-C*03:04H HLA-B*35:03H HLA-C*15:05H HLA-C*08:01H HLA-B*38:02M HLA-B*39:01H
QAIASEFSSL

SEQ ID NO: 4653 - protein, 10 aa, Severe acute respiratory syndrome coronavirus 2
  REGION 1..10: note = Table A: HLA-B*58:01H HLA-A*36:01H HLA-A*01:01H HLA-A*30:02H
ASEFSSLPSY

SEQ ID NO: 4654 - protein, 10 aa, Severe acute respiratory syndrome coronavirus 2
  REGION 1..10: note = Table A: HLA-B*45:01H HLA-B*40:06H HLA-B*49:01H HLA-B*50:01M
SEFSSLPSYA

SEQ ID NO: 4655 - protein, 10 aa, Severe acute respiratory syndrome coronavirus 2
  REGION 1..10: note = Table A: HLA-B*46:01H
FSSLPSYAAF

SEQ ID NO: 4656 - protein, 10 aa, Severe acute respiratory syndrome coronavirus 2
  REGION 1..10: note = Table A: HLA-B*56:01M HLA-B*55:02M HLA-B*54:01H
LPSYAAFATA

SEQ ID NO: 4657 - protein, 10 aa, Severe acute respiratory syndrome coronavirus 2
  REGION 1..10: note = Table A: HLA-C*16:04H HLA-B*46:01H HLA-B*27:02H HLA-B*35:01M HLA-B*35:07M HLA-B*38:02M HLA-B*15:01M HLA-B*15:02H HLA-B*15:03H HLA-B*07:05H HLA-B*15:11H
AAFATAQEAY

SEQ ID NO: 4658 - protein, 10 aa, Severe acute respiratory syndrome coronavirus 2
  REGION 1..10: note = Table A: HLA-A*02:05H HLA-A*02:08H
ATAQEAYEQA

SEQ ID NO: 4659 - protein, 10 aa, Severe acute respiratory syndrome coronavirus 2
  REGION 1..10: note = Table A: HLA-B*38:02H HLA-B*39:01H
TAQEAYEQAV

SEQ ID NO: 4660 - protein, 10 aa, Severe acute respiratory syndrome coronavirus 2
  REGION 1..10: note = Table A: HLA-B*39:01H
AQEAYEQAVA

SEQ ID NO: 4661 - protein, 10 aa, Severe acute respiratory syndrome coronavirus 2
  REGION 1..10: note = Table A: HLA-A*26:03H HLA-A*34:01H
EAYEQAVANG

SEQ ID NO: 4662 - protein, 10 aa, Severe acute respiratory syndrome coronavirus 2
  REGION 1..10: note = Table A: HLA-B*39:01H
EQAVANGDSE

SEQ ID NO: 4663 - protein, 10 aa, Severe acute respiratory syndrome coronavirus 2
  REGION 1..10: note = Table A: HLA-C*03:04H HLA-B*35:03M HLA-C*15:05H HLA-B*35:01H HLA-B*35:02M HLA-B*35:08H HLA-C*08:01M HLA-B*35:12M HLA-B*38:02H
VANGDSEVVL

SEQ ID NO: 4664 - protein, 10 aa, Severe acute respiratory syndrome coronavirus 2
  REGION 1..10: note = Table A: HLA-B*44:05H HLA-B*40:02H HLA-B*41:02H
GDSEVVLKKL

SEQ ID NO: 4665 - protein, 10 aa, Severe acute respiratory syndrome coronavirus 2
  REGION 1..10: note = Table A: HLA-A*74:01M HLA-A*03:01H HLA-A*30:01H
KLKKSLNVAK

SEQ ID NO: 4666 - protein, 10 aa, Severe acute respiratory syndrome coronavirus 2
  REGION 1..10: note = Table A: HLA-B*58:01M HLA-B*58:02M HLA-B*57:01M HLA-A*30:02H HLA-C*15:05H HLA-A*32:01H HLA-B*15:01H HLA-B*57:03H
KSLNVAKSEF

SEQ ID NO: 4667 - protein, 10 aa, Severe acute respiratory syndrome coronavirus 2
  REGION 1..10: note = Table A: HLA-A*33:03M
EFDRDAAMQR

SEQ ID NO: 4668 - protein, 10 aa, Severe acute respiratory syndrome coronavirus 2
  REGION 1..10: note = Table A: HLA-A*03:01H HLA-A*02:11H HLA-C*15:05M HLA-A*02:05H HLA-A*02:08M HLA-A*02:01H HLA-A*02:02H HLA-A*02:03M HLA-B*38:02H HLA-B*15:01M HLA-B*07:05H
KMADQAMTQM

SEQ ID NO: 4669 - protein, 10 aa, Severe acute respiratory syndrome coronavirus 2
  REGION 1..10: note = Table A: HLA-A*36:01H HLA-A*01:01H HLA-B*35:01M HLA-B*35:08M HLA-B*35:07H HLA-B*38:02M
MADQAMTQMY

SEQ ID NO: 4670 - protein, 10 aa, Severe acute respiratory syndrome coronavirus 2
  REGION 1..10: note = Table A: HLA-B*54:01H
QAMTQMYKQA

SEQ ID NO: 4671 - protein, 10 aa, Severe acute respiratory syndrome coronavirus 2
  REGION 1..10: note = Table A: HLA-A*74:01H
AMTQMYKQAR

SEQ ID NO: 4672 - protein, 10 aa, Severe acute respiratory syndrome coronavirus 2
  REGION 1..10: note = Table A: HLA-B*15:03H
AKVTSAMQTM

SEQ ID NO: 4673 - protein, 10 aa, Severe acute respiratory syndrome coronavirus 2
  REGION 1..10: note = Table A: HLA-A*02:08M
KVTSAMQTML

SEQ ID NO: 4674 - protein, 10 aa, Severe acute respiratory syndrome coronavirus 2
  REGION 1..10: note = Table A: HLA-B*57:03H
VTSAMQTMLF

SEQ ID NO: 4675 - protein, 10 aa, Severe acute respiratory syndrome coronavirus 2
  REGION 1..10: note = Table A: HLA-A*11:02H HLA-A*34:02H
QTMLFTMLRK

SEQ ID NO: 4676 - protein, 10 aa, Severe acute respiratory syndrome coronavirus 2
  REGION 1..10: note = Table A: HLA-A*02:02H HLA-B*38:02H
MLRKLDNDAL

SEQ ID NO: 4677 - protein, 10 aa, Severe acute respiratory syndrome coronavirus 2
  REGION 1..10: note = Table A: HLA-B*13:01H
KLDNDALNNI

SEQ ID NO: 4678 - protein, 10 aa, Severe acute respiratory syndrome coronavirus 2
  REGION 1..10: note = Table A: HLA-B*54:01H
DALNNIINNA

SEQ ID NO: 4679 - protein, 10 aa, Severe acute respiratory syndrome coronavirus 2
  REGION 1..10: note = Table A: HLA-A*74:01H HLA-A*03:01H HLA-A*03:02M HLA-A*11:01H HLA-A*11:02H HLA-A*26:03H HLA-A*30:02H HLA-A*68:01H HLA-A*02:02H HLA-A*34:01H HLA-A*31:01H
ALNNIINNAR

SEQ ID NO: 4680 - protein, 10 aa, Severe acute respiratory syndrome coronavirus 2
  REGION 1..10: note = Table A: HLA-B*56:01H HLA-B*55:02M HLA-C*15:05H HLA-B*54:01H
VPLNIIPLTT

SEQ ID NO: 4681 - protein, 10 aa, Severe acute respiratory syndrome coronavirus 2
  REGION 1..10: note = Table A: HLA-A*26:03H HLA-A*68:01H HLA-A*34:02H HLA-A*66:01H
NIIPLTTAAK

SEQ ID NO: 4682 - protein, 10 aa, Severe acute respiratory syndrome coronavirus 2
  REGION 1..10: note = Table A: HLA-B*15:03H
AKLMVVIPDY

SEQ ID NO: 4683 - protein, 10 aa, Severe acute respiratory syndrome coronavirus 2
  REGION 1..10: note = Table A: HLA-A*25:01M HLA-B*46:01H HLA-A*26:01H HLA-A*26:02H HLA-A*26:03H HLA-A*29:02H HLA-A*30:02H HLA-B*35:01H HLA-B*35:08M HLA-B*35:07M HLA-B*38:02M HLA-B*15:01H HLA-B*15:02H HLA-B*39:01H HLA-B*07:05H HLA-B*15:11H
MVVIPDYNTY

SEQ ID NO: 4684 - protein, 10 aa, Severe acute respiratory syndrome coronavirus 2
  REGION 1..10: note = Table A: HLA-A*11:303H HLA-A*74:01H HLA-A*03:01M HLA-A*03:02M HLA-A*11:01H HLA-A*11:02H HLA-A*36:01M HLA-B*57:01H HLA-C*03:03H HLA-B*27:02H HLA-A*30:02H HLA-A*68:01H HLA-A*02:05H HLA-A*34:02M HLA-C*07:27M
  REGION 1..10: note = CONT. FROM ABOVE: HLA-A*66:01H
VVIPDYNTYK

SEQ ID NO: 4685 - protein, 10 aa, Severe acute respiratory syndrome coronavirus 2
  REGION 1..10: note = Table A: HLA-B*15:03H
YKNTCDGTTF

SEQ ID NO: 4686 - protein, 10 aa, Severe acute respiratory syndrome coronavirus 2
  REGION 1..10: note = Table A: HLA-A*26:01H HLA-A*29:01H HLA-A*29:02H HLA-A*34:02H HLA-B*35:01M
NTCDGTTFTY

SEQ ID NO: 4687 - protein, 10 aa, Severe acute respiratory syndrome coronavirus 2
  REGION 1..10: note = Table A: HLA-B*58:01H HLA-B*57:01H HLA-B*57:03H
TTFTYASALW

SEQ ID NO: 4688 - protein, 10 aa, Severe acute respiratory syndrome coronavirus 2
  REGION 1..10: note = Table A: HLA-A*68:02H
FTYASALWEI

SEQ ID NO: 4689 - protein, 10 aa, Severe acute respiratory syndrome coronavirus 2
  REGION 1..10: note = Table A: HLA-B*13:01H
QQVVDADSKI

SEQ ID NO: 4690 - protein, 10 aa, Severe acute respiratory syndrome coronavirus 2
  REGION 1..10: note = Table A: HLA-B*37:01H HLA-B*40:02H HLA-B*41:02H
VDADSKIVQL

SEQ ID NO: 4691 - protein, 10 aa, Severe acute respiratory syndrome coronavirus 2
  REGION 1..10: note = Table A: HLA-B*58:01H HLA-A*36:01H HLA-B*38:02H HLA-B*13:01H
SMDNSPNLAW

SEQ ID NO: 4692 - protein, 10 aa, Severe acute respiratory syndrome coronavirus 2
  REGION 1..10: note = Table A: HLA-B*55:02H HLA-C*15:05H
SPNLAWPLIV

SEQ ID NO: 4693 - protein, 10 aa, Severe acute respiratory syndrome coronavirus 2
  REGION 1..10: note = Table A: HLA-A*02:02H
NLAWPLIVTA

SEQ ID NO: 4694 - protein, 10 aa, Severe acute respiratory syndrome coronavirus 2
  REGION 1..10: note = Table A: HLA-A*02:11H
LAWPLIVTAL

SEQ ID NO: 4695 - protein, 10 aa, Severe acute respiratory syndrome coronavirus 2
  REGION 1..10: note = Table A: HLA-A*11:303M HLA-B*44:05H HLA-C*03:03H HLA-C*12:05H HLA-C*03:04H HLA-A*68:02H HLA-B*35:03H HLA-C*15:05H HLA-A*02:05H HLA-A*02:08H HLA-A*02:02H HLA-B*35:01H HLA-B*35:02H HLA-C*17:01H HLA-C*08:01M
  REGION 1..10: note = CONT. FROM ABOVE: HLA-C*08:03H HLA-B*35:12H HLA-B*38:02M HLA- B*40:02H HLA-B*57:03M
SAVKLQNNEL

SEQ ID NO: 4696 - protein, 10 aa, Severe acute respiratory syndrome coronavirus 2
  REGION 1..10: note = Table A: HLA-C*08:03H
KLQNNELSPV

SEQ ID NO: 4697 - protein, 10 aa, Severe acute respiratory syndrome coronavirus 2
  REGION 1..10: note = Table A: HLA-C*15:05H HLA-B*39:01H
QNNELSPVAL

SEQ ID NO: 4698 - protein, 10 aa, Severe acute respiratory syndrome coronavirus 2
  REGION 1..10: note = Table A: HLA-A*68:01H
NNELSPVALR

SEQ ID NO: 4699 - protein, 10 aa, Severe acute respiratory syndrome coronavirus 2
  REGION 1..10: note = Table A: HLA-A*26:01H HLA-A*26:02M HLA-A*26:03M HLA-A*68:02H HLA-A*02:02H HLA-A*34:01M HLA-A*34:02H HLA-B*38:02H HLA-B*15:02H
ELSPVALRQM

SEQ ID NO: 4700 - protein, 10 aa, Severe acute respiratory syndrome coronavirus 2
  REGION 1..10: note = Table A: HLA-B*56:01M HLA-B*55:02M HLA-C*15:05M HLA-B*55:01H HLA-B*54:01H HLA-B*07:02H HLA-B*07:04H
SPVALRQMSC

SEQ ID NO: 4701 - protein, 10 aa, Severe acute respiratory syndrome coronavirus 2
  REGION 1..10: note = Table A: HLA-A*36:01H HLA-A*29:02H HLA-A*01:01H HLA-A*30:02H
CTDDNALAYY

SEQ ID NO: 4702 - protein, 10 aa, Severe acute respiratory syndrome coronavirus 2
  REGION 1..10: note = Table A: HLA-B*27:02H HLA-A*34:02M
NALAYYNTTK

SEQ ID NO: 4703 - protein, 10 aa, Severe acute respiratory syndrome coronavirus 2
  REGION 1..10: note = Table A: HLA-C*14:02H HLA-C*14:03H HLA-A*24:02H HLA-A*24:07M HLA-A*23:01H
YYNTTKGGRF

SEQ ID NO: 4704 - protein, 10 aa, Severe acute respiratory syndrome coronavirus 2
  REGION 1..10: note = Table A: HLA-A*30:01H HLA-B*55:01H
TTKGGRFVLA

SEQ ID NO: 4705 - protein, 10 aa, Severe acute respiratory syndrome coronavirus 2
  REGION 1..10: note = Table A: HLA-B*58:01H HLA-B*57:01H HLA-B*44:03H HLA-B*53:01M HLA-A*02:02H HLA-B*15:13H HLA-B*38:02H HLA-B*57:03M HLA-B*13:01M
LLSDLQDLKW

SEQ ID NO: 4706 - protein, 10 aa, Severe acute respiratory syndrome coronavirus 2
  REGION 1..10: note = Table A: HLA-A*33:01H
DLQDLKWARF

SEQ ID NO: 4707 - protein, 10 aa, Severe acute respiratory syndrome coronavirus 2
  REGION 1..10: note = Table A: HLA-B*53:01H HLA-C*15:05H HLA-B*51:01M HLA-B*07:04H
FPKSDGTGTI

SEQ ID NO: 4708 - protein, 10 aa, Severe acute respiratory syndrome coronavirus 2
  REGION 1..10: note = Table A: HLA-A*36:01H
KSDGTGTIYT

SEQ ID NO: 4709 - protein, 10 aa, Severe acute respiratory syndrome coronavirus 2
  REGION 1..10: note = Table A: HLA-C*04:03H
YTELEPPCRF

SEQ ID NO: 4710 - protein, 10 aa, Severe acute respiratory syndrome coronavirus 2
  REGION 1..10: note = Table A: HLA-B*49:01H
TELEPPCRFV

SEQ ID NO: 4711 - protein, 10 aa, Severe acute respiratory syndrome coronavirus 2
  REGION 1..10: note = Table A: HLA-A*26:03H HLA-A*34:01H HLA-A*34:02M HLA-A*66:01M
FVTDTPKGPK

SEQ ID NO: 4712 - protein, 10 aa, Severe acute respiratory syndrome coronavirus 2
  REGION 1..10: note = Table A: HLA-A*26:01H
DTPKGPKVKY

SEQ ID NO: 4713 - protein, 10 aa, Severe acute respiratory syndrome coronavirus 2
  REGION 1..10: note = Table A: HLA-B*42:01H HLA-B*07:04H
TPKGPKVKYL

SEQ ID NO: 4714 - protein, 10 aa, Severe acute respiratory syndrome coronavirus 2
  REGION 1..10: note = Table A: HLA-A*24:07H HLA-B*57:03H
KGPKVKYLYF

SEQ ID NO: 4715 - protein, 10 aa, Severe acute respiratory syndrome coronavirus 2
  REGION 1..10: note = Table A: HLA-C*14:03H HLA-A*02:02H HLA-A*24:02H HLA-A*23:01H
LYFIKGLNNL

SEQ ID NO: 4716 - protein, 10 aa, Severe acute respiratory syndrome coronavirus 2
  REGION 1..10: note = Table A: HLA-A*74:01H HLA-A*33:03H HLA-A*26:03H HLA-A*34:01H HLA-A*66:01H
FIKGLNNLNR

SEQ ID NO: 4717 - protein, 10 aa, Severe acute respiratory syndrome coronavirus 2
  REGION 1..10: note = Table A: HLA-B*55:02H
RGMVLGSLAA

SEQ ID NO: 4718 - protein, 10 aa, Severe acute respiratory syndrome coronavirus 2
  REGION 1..10: note = Table A: HLA-A*68:02H
MVLGSLAATV

SEQ ID NO: 4719 - protein, 10 aa, Severe acute respiratory syndrome coronavirus 2
  REGION 1..10: note = Table A: HLA-A*02:02H HLA-A*02:03H HLA-B*38:02H HLA-B*13:02H
SLAATVRLQA

SEQ ID NO: 4720 - protein, 10 aa, Severe acute respiratory syndrome coronavirus 2
  REGION 1..10: note = Table A: HLA-B*44:05M HLA-B*40:01H HLA-B*40:02M HLA-B*39:01H HLA-B*41:02M HLA-B*49:01M
TEVPANSTVL

SEQ ID NO: 4721 - protein, 10 aa, Severe acute respiratory syndrome coronavirus 2
  REGION 1..10: note = Table A: HLA-B*53:01H HLA-B*55:02H HLA-C*15:05M HLA-B*35:01M HLA-B*35:07H HLA-B*07:02H HLA-B*07:05M
VPANSTVLSF

SEQ ID NO: 4722 - protein, 10 aa, Severe acute respiratory syndrome coronavirus 2
  REGION 1..10: note = Table A: HLA-C*14:02H HLA-C*14:03M
AFAVDAAKAY

SEQ ID NO: 4723 - protein, 10 aa, Severe acute respiratory syndrome coronavirus 2
  REGION 1..10: note = Table A: HLA-A*26:03H HLA-A*68:01H HLA-A*34:01H HLA-A*34:02M HLA-A*66:01M
FAVDAAKAYK

SEQ ID NO: 4724 - protein, 10 aa, Severe acute respiratory syndrome coronavirus 2
  REGION 1..10: note = Table A: HLA-A*68:02H
DAAKAYKDYL

SEQ ID NO: 4725 - protein, 10 aa, Severe acute respiratory syndrome coronavirus 2
  REGION 1..10: note = Table A: HLA-B*07:04H
QPITNCVKML

SEQ ID NO: 4726 - protein, 10 aa, Severe acute respiratory syndrome coronavirus 2
  REGION 1..10: note = Table A: HLA-B*38:02H
CTHTGTGQAI

SEQ ID NO: 4727 - protein, 10 aa, Severe acute respiratory syndrome coronavirus 2
  REGION 1..10: note = Table A: HLA-A*68:02H
HTGTGQAITV

SEQ ID NO: 4728 - protein, 10 aa, Severe acute respiratory syndrome coronavirus 2
  REGION 1..10: note = Table A: HLA-B*13:02H
GQAITVTPEA

SEQ ID NO: 4729 - protein, 10 aa, Severe acute respiratory syndrome coronavirus 2
  REGION 1..10: note = Table A: HLA-B*39:01H
DQESFGGASC

SEQ ID NO: 4730 - protein, 10 aa, Severe acute respiratory syndrome coronavirus 2
  REGION 1..10: note = Table A: HLA-A*29:02H
SFGGASCCLY

SEQ ID NO: 4731 - protein, 10 aa, Severe acute respiratory syndrome coronavirus 2
  REGION 1..10: note = Table A: HLA-A*36:01H HLA-C*04:03H HLA-A*02:07H HLA-C*08:02H HLA-B*38:02H HLA-C*05:01H
HIDHPNPKGF

SEQ ID NO: 4732 - protein, 10 aa, Severe acute respiratory syndrome coronavirus 2
  REGION 1..10: note = Table A: HLA-B*42:01H HLA-B*08:01H HLA-B*35:03H HLA-C*15:05H HLA-B*07:02H HLA-B*07:04M
HPNPKGFCDL

SEQ ID NO: 4733 - protein, 10 aa, Severe acute respiratory syndrome coronavirus 2
  REGION 1..10: note = Table A: HLA-A*30:02H
KGFCDLKGKY

SEQ ID NO: 4734 - protein, 10 aa, Severe acute respiratory syndrome coronavirus 2
  REGION 1..10: note = Table A: HLA-A*11:303H HLA-C*16:04H HLA-C*03:03H HLA-C*03:02H HLA-C*03:04M HLA-B*35:03H HLA-C*15:05H HLA-C*12:02H HLA-C*07:27H HLA-C*08:01H
CANDPVGFTL

SEQ ID NO: 4735 - protein, 10 aa, Severe acute respiratory syndrome coronavirus 2
  REGION 1..10: note = Table A: HLA-A*11:01H HLA-A*36:01M HLA-C*03:03H HLA-A*34:02H
ANDPVGFTLK

SEQ ID NO: 4736 - protein, 10 aa, Severe acute respiratory syndrome coronavirus 2
  REGION 1..10: note = Table A: HLA-B*55:01H HLA-A*02:02H HLA-A*02:03H HLA-B*38:02M
QLREPMLQSA

SEQ ID NO: 4737 - protein, 10 aa, Severe acute respiratory syndrome coronavirus 2
  REGION 1..10: note = Table A: HLA-B*50:01H
REPMLQSADA

SEQ ID NO: 4738 - protein, 10 aa, Severe acute respiratory syndrome coronavirus 2
  REGION 1..10: note = Table A: HLA-B*38:02H HLA-B*15:02H
MLQSADAQSF

SEQ ID NO: 4739 - protein, 10 aa, Severe acute respiratory syndrome coronavirus 2
  REGION 1..10: note = Table A: HLA-A*02:08H
LQSADAQSFL

SEQ ID NO: 4740 - protein, 10 aa, Severe acute respiratory syndrome coronavirus 2
  REGION 1..10: note = Table A: HLA-A*33:03H HLA-A*68:01H HLA-A*34:02H
SADAQSFLNR

SEQ ID NO: 4741 - protein, 10 aa, Severe acute respiratory syndrome coronavirus 2
  REGION 1..10: note = Table A: HLA-B*54:01H
FLNRVCGVSA

SEQ ID NO: 4742 - protein, 10 aa, Severe acute respiratory syndrome coronavirus 2
  REGION 1..10: note = Table A: HLA-A*68:01M
TGTSTDVVYR

SEQ ID NO: 4743 - protein, 10 aa, Severe acute respiratory syndrome coronavirus 2
  REGION 1..10: note = Table A: HLA-A*02:05H HLA-A*02:08H
GTSTDVVYRA

SEQ ID NO: 4744 - protein, 10 aa, Severe acute respiratory syndrome coronavirus 2
  REGION 1..10: note = Table A: HLA-B*58:02H HLA-C*16:01H HLA-B*57:01H HLA-A*25:01H HLA-A*68:02H HLA-B*57:03H
TSTDVVYRAF

SEQ ID NO: 4745 - protein, 10 aa, Severe acute respiratory syndrome coronavirus 2
  REGION 1..10: note = Table A: HLA-C*16:04H HLA-A*36:01H HLA-A*02:11H HLA-A*30:02H HLA-A*68:02M HLA-C*15:02H HLA-A*02:04H HLA-A*02:05H HLA-A*02:06M HLA-A*02:07H HLA-A*02:08M HLA-A*02:02H HLA-A*02:03H HLA-C*08:01H HLA-C*08:03H HLA-B*38:02H
  REGION 1..10: note = CONT. FROM ABOVE: HLA-B*40:06H HLA-B*57:03H HLA-B*13:01H HLA- B*13:02M
RAFDIYNDKV

SEQ ID NO: 4746 - protein, 10 aa, Severe acute respiratory syndrome coronavirus 2
  REGION 1..10: note = Table A: HLA-A*25:01H HLA-A*26:01H HLA-A*26:02H HLA-A*26:03H HLA-A*68:01H HLA-A*68:02H HLA-A*34:01M HLA-A*34:02H HLA-B*38:02M HLA-B*15:02M HLA-B*39:01H HLA-A*66:01M
DIYNDKVAGF

SEQ ID NO: 4747 - protein, 10 aa, Severe acute respiratory syndrome coronavirus 2
  REGION 1..10: note = Table A: HLA-A*74:01H HLA-A*03:01H HLA-A*03:02H HLA-A*11:01M HLA-A*11:02M HLA-A*36:01H HLA-A*30:01H HLA-A*30:02H HLA-A*34:02H
KVAGFAKFLK

SEQ ID NO: 4748 - protein, 10 aa, Severe acute respiratory syndrome coronavirus 2
  REGION 1..10: note = Table A: HLA-B*49:01H
QEKDEDDNLI

SEQ ID NO: 4749 - protein, 10 aa, Severe acute respiratory syndrome coronavirus 2
  REGION 1..10: note = Table A: HLA-B*44:03H HLA-B*18:01H HLA-B*39:01H HLA-B*07:05H
DEDDNLIDSY

SEQ ID NO: 4750 - protein, 10 aa, Severe acute respiratory syndrome coronavirus 2
  REGION 1..10: note = Table A: HLA-A*34:02H
NLIDSYFVVK

SEQ ID NO: 4751 - protein, 10 aa, Severe acute respiratory syndrome coronavirus 2
  REGION 1..10: note = Table A: HLA-C*14:02H HLA-C*14:03H HLA-A*30:02H HLA-A*24:02H HLA-A*24:07H HLA-C*08:01H HLA-A*23:01M
SYFVVKRHTF

SEQ ID NO: 4752 - protein, 10 aa, Severe acute respiratory syndrome coronavirus 2
  REGION 1..10: note = Table A: HLA-A*30:02M
VVKRHTFSNY

SEQ ID NO: 4753 - protein, 10 aa, Severe acute respiratory syndrome coronavirus 2
  REGION 1..10: note = Table A: HLA-A*68:02H
HTFSNYQHEE

SEQ ID NO: 4754 - protein, 10 aa, Severe acute respiratory syndrome coronavirus 2
  REGION 1..10: note = Table A: HLA-A*02:11M HLA-A*02:04M HLA-A*02:05M HLA-A*02:06H HLA-A*02:08H HLA-A*02:02H HLA-C*08:01H HLA-B*38:01H HLA-B*38:02M HLA-B*13:01M
YQHEETIYNL

SEQ ID NO: 4755 - protein, 10 aa, Severe acute respiratory syndrome coronavirus 2
  REGION 1..10: note = Table A: HLA-B*38:01H HLA-B*38:02H HLA-B*39:01M HLA-B*15:10M
QHEETIYNLL

SEQ ID NO: 4756 - protein, 10 aa, Severe acute respiratory syndrome coronavirus 2
  REGION 1..10: note = Table A: HLA-A*36:01H
HEETIYNLLK

SEQ ID NO: 4757 - protein, 10 aa, Severe acute respiratory syndrome coronavirus 2
  REGION 1..10: note = Table A: HLA-B*57:03H
AVAKHDFFKF

SEQ ID NO: 4758 - protein, 10 aa, Severe acute respiratory syndrome coronavirus 2
  REGION 1..10: note = Table A: HLA-A*02:07H HLA-B*13:01H
RIDGDMVPHI

SEQ ID NO: 4759 - protein, 10 aa, Severe acute respiratory syndrome coronavirus 2
  REGION 1..10: note = Table A: HLA-A*33:01M HLA-A*33:03H HLA-A*68:01H
DGDMVPHISR

SEQ ID NO: 4760 - protein, 10 aa, Severe acute respiratory syndrome coronavirus 2
  REGION 1..10: note = Table A: HLA-A*33:01H HLA-A*33:03H HLA-A*26:03H HLA-A*34:01H HLA-A*66:01H
DMVPHISRQR

SEQ ID NO: 4761 - protein, 10 aa, Severe acute respiratory syndrome coronavirus 2
  REGION 1..10: note = Table A: HLA-A*34:01H HLA-A*34:02H
MVPHISRQRL

SEQ ID NO: 4762 - protein, 10 aa, Severe acute respiratory syndrome coronavirus 2
  REGION 1..10: note = Table A: HLA-B*15:03M
TKYTMADLVY

SEQ ID NO: 4763 - protein, 10 aa, Severe acute respiratory syndrome coronavirus 2
  REGION 1..10: note = Table A: HLA-A*68:02H
YTMADLVYAL

SEQ ID NO: 4764 - protein, 10 aa, Severe acute respiratory syndrome coronavirus 2
  REGION 1..10: note = Table A: HLA-A*74:01M HLA-A*26:03H HLA-A*68:01H HLA-A*34:01M
TMADLVYALR

SEQ ID NO: 4765 - protein, 10 aa, Severe acute respiratory syndrome coronavirus 2
  REGION 1..10: note = Table A: HLA-B*39:01H
RHFDEGNCDT

SEQ ID NO: 4766 - protein, 10 aa, Severe acute respiratory syndrome coronavirus 2
  REGION 1..10: note = Table A: HLA-C*04:01H HLA-C*08:02H HLA-B*38:02H HLA-B*39:01H
HFDEGNCDTL

SEQ ID NO: 4767 - protein, 10 aa, Severe acute respiratory syndrome coronavirus 2
  REGION 1..10: note = Table A: HLA-B*57:01H HLA-A*25:01M HLA-A*26:01M HLA-A*26:02H HLA-A*34:02H HLA-B*35:01M HLA-B*35:07H HLA-B*38:02H HLA-B*15:02H HLA-B*57:03H
DTLKEILVTY

SEQ ID NO: 4768 - protein, 10 aa, Severe acute respiratory syndrome coronavirus 2
  REGION 1..10: note = Table A: HLA-A*24:07H
YFNKKDWYDF

SEQ ID NO: 4769 - protein, 10 aa, Severe acute respiratory syndrome coronavirus 2
  REGION 1..10: note = Table A: HLA-A*33:01H HLA-A*33:03H HLA-B*27:02H HLA-A*68:01H HLA-A*34:01H HLA-A*66:01H
DFVENPDILR

SEQ ID NO: 4770 - protein, 10 aa, Severe acute respiratory syndrome coronavirus 2
  REGION 1..10: note = Table A: HLA-C*04:03H HLA-A*02:11H HLA-A*68:02H HLA-A*02:04H HLA-A*02:05H HLA-A*02:06H HLA-A*02:07H
FVENPDILRV

SEQ ID NO: 4771 - protein, 10 aa, Severe acute respiratory syndrome coronavirus 2
  REGION 1..10: note = Table A: HLA-B*44:02H HLA-B*44:05H HLA-B*57:01H HLA-B*46:01H HLA-B*44:03H HLA-B*18:01M HLA-C*07:01H HLA-C*03:02H HLA-A*30:02M HLA-B*15:01H HLA-B*07:05H
VENPDILRVY

SEQ ID NO: 4772 - protein, 10 aa, Severe acute respiratory syndrome coronavirus 2
  REGION 1..10: note = Table A: HLA-A*68:02H
ENPDILRVYA

SEQ ID NO: 4773 - protein, 10 aa, Severe acute respiratory syndrome coronavirus 2
  REGION 1..10: note = Table A: HLA-A*02:11H HLA-A*02:05H HLA-A*02:08M HLA-B*13:02H
RVYANLGERV

SEQ ID NO: 4774 - protein, 10 aa, Severe acute respiratory syndrome coronavirus 2
  REGION 1..10: note = Table A: HLA-A*02:02H
NLGERVRQAL

SEQ ID NO: 4775 - protein, 10 aa, Severe acute respiratory syndrome coronavirus 2
  REGION 1..10: note = Table A: HLA-B*07:04M
RVRQALLKTV

SEQ ID NO: 4776 - protein, 10 aa, Severe acute respiratory syndrome coronavirus 2
  REGION 1..10: note = Table A: HLA-B*15:01M HLA-B*15:03M HLA-B*57:03H HLA-B*13:01H
RQALLKTVQF

SEQ ID NO: 4777 - protein, 10 aa, Severe acute respiratory syndrome coronavirus 2
  REGION 1..10: note = Table A: HLA-A*02:03H
LLKTVQFCDA

SEQ ID NO: 4778 - protein, 10 aa, Severe acute respiratory syndrome coronavirus 2
  REGION 1..10: note = Table A: HLA-A*74:01H
KTVQFCDAMR

SEQ ID NO: 4779 - protein, 10 aa, Severe acute respiratory syndrome coronavirus 2
  REGION 1..10: note = Table A: HLA-A*02:11H HLA-A*30:01H HLA-A*02:01H HLA-A*02:02H HLA-A*02:03M HLA-B*38:02H
AMRNAGIVGV

SEQ ID NO: 4780 - protein, 10 aa, Severe acute respiratory syndrome coronavirus 2
  REGION 1..10: note = Table A: HLA-A*36:01H
GSGVPVVDSY

SEQ ID NO: 4781 - protein, 10 aa, Severe acute respiratory syndrome coronavirus 2
  REGION 1..10: note = Table A: HLA-A*30:02H
SGVPVVDSYY

SEQ ID NO: 4782 - protein, 10 aa, Severe acute respiratory syndrome coronavirus 2
  REGION 1..10: note = Table A: HLA-B*35:03H HLA-C*15:05H
VPVVDSYYSL

SEQ ID NO: 4783 - protein, 10 aa, Severe acute respiratory syndrome coronavirus 2
  REGION 1..10: note = Table A: HLA-A*74:01H
LLMPILTLTR

SEQ ID NO: 4784 - protein, 10 aa, Severe acute respiratory syndrome coronavirus 2
  REGION 1..10: note = Table A: HLA-B*42:01H HLA-B*56:01H HLA-B*55:02H HLA-B*35:03M HLA-C*15:05M HLA-B*55:01H HLA-B*35:07H HLA-B*54:01H HLA-B*07:02M HLA-B*07:04H HLA-B*07:05H
MPILTLTRAL

SEQ ID NO: 4785 - protein, 10 aa, Severe acute respiratory syndrome coronavirus 2
  REGION 1..10: note = Table A: HLA-A*34:02H
ESHVDTDLTK

SEQ ID NO: 4786 - protein, 10 aa, Severe acute respiratory syndrome coronavirus 2
  REGION 1..10: note = Table A: HLA-B*38:02H HLA-B*39:01H
SHVDTDLTKP

SEQ ID NO: 4787 - protein, 10 aa, Severe acute respiratory syndrome coronavirus 2
  REGION 1..10: note = Table A: HLA-A*36:01H HLA-B*35:08H
HVDTDLTKPY

SEQ ID NO: 4788 - protein, 10 aa, Severe acute respiratory syndrome coronavirus 2
  REGION 1..10: note = Table A: HLA-A*36:01H HLA-A*34:02H
DTDLTKPYIK

SEQ ID NO: 4789 - protein, 10 aa, Severe acute respiratory syndrome coronavirus 2
  REGION 1..10: note = Table A: HLA-A*02:02H HLA-B*38:02H HLA-B*15:03H
LKYDFTEERL

SEQ ID NO: 4790 - protein, 10 aa, Severe acute respiratory syndrome coronavirus 2
  REGION 1..10: note = Table A: HLA-A*36:01H
KYDFTEERLK

SEQ ID NO: 4791 - protein, 10 aa, Severe acute respiratory syndrome coronavirus 2
  REGION 1..10: note = Table A: HLA-A*74:01H
RLKLFDRYFK

SEQ ID NO: 4792 - protein, 10 aa, Severe acute respiratory syndrome coronavirus 2
  REGION 1..10: note = Table A: HLA-A*32:01H
KLFDRYFKYW

SEQ ID NO: 4793 - protein, 10 aa, Severe acute respiratory syndrome coronavirus 2
  REGION 1..10: note = Table A: HLA-C*14:02H HLA-C*14:03M HLA-A*30:02M HLA-A*24:07H HLA-A*23:01H
RYFKYWDQTY

SEQ ID NO: 4794 - protein, 10 aa, Severe acute respiratory syndrome coronavirus 2
  REGION 1..10: note = Table A: HLA-C*16:01H HLA-B*46:01H HLA-C*03:03H HLA-C*03:02H HLA-C*03:04H HLA-B*57:03H
FSTVFPPTSF

SEQ ID NO: 4795 - protein, 10 aa, Severe acute respiratory syndrome coronavirus 2
  REGION 1..10: note = Table A: HLA-A*34:01H HLA-A*34:02H HLA-A*66:01M
STVFPPTSFG

SEQ ID NO: 4796 - protein, 10 aa, Severe acute respiratory syndrome coronavirus 2
  REGION 1..10: note = Table A: HLA-C*14:02M HLA-C*14:03M HLA-C*01:02H
VFPPTSFGPL

SEQ ID NO: 4797 - protein, 10 aa, Severe acute respiratory syndrome coronavirus 2
  REGION 1..10: note = Table A: HLA-A*11:01H HLA-A*34:02H
PTSFGPLVRK

SEQ ID NO: 4798 - protein, 10 aa, Severe acute respiratory syndrome coronavirus 2
  REGION 1..10: note = Table A: HLA-B*15:03M
RKIFVDGVPF

SEQ ID NO: 4799 - protein, 10 aa, Severe acute respiratory syndrome coronavirus 2
  REGION 1..10: note = Table A: HLA-A*02:11M HLA-A*02:04H HLA-A*02:05M HLA-A*02:06M HLA-A*02:08H HLA-A*02:01M HLA-A*02:02M HLA-A*02:03H
KIFVDGVPFV

SEQ ID NO: 4800 - protein, 10 aa, Severe acute respiratory syndrome coronavirus 2
  REGION 1..10: note = Table A: HLA-A*02:07H
FVDGVPFVVS

SEQ ID NO: 4801 - protein, 10 aa, Severe acute respiratory syndrome coronavirus 2
  REGION 1..10: note = Table A: HLA-A*26:01H HLA-A*29:01H HLA-A*29:02H HLA-A*30:02H HLA-B*15:01H
GVPFVVSTGY

SEQ ID NO: 4802 - protein, 10 aa, Severe acute respiratory syndrome coronavirus 2
  REGION 1..10: note = Table A: HLA-A*24:07H HLA-A*23:01H
PFVVSTGYHF

SEQ ID NO: 4803 - protein, 10 aa, Severe acute respiratory syndrome coronavirus 2
  REGION 1..10: note = Table A: HLA-A*26:03H HLA-A*68:01H HLA-A*34:01M HLA-A*34:02H HLA-A*66:01M
FVVSTGYHFR

SEQ ID NO: 4804 - protein, 10 aa, Severe acute respiratory syndrome coronavirus 2
  REGION 1..10: note = Table A: HLA-A*02:03H
TGYHFRELGV

SEQ ID NO: 4805 - protein, 10 aa, Severe acute respiratory syndrome coronavirus 2
  REGION 1..10: note = Table A: HLA-A*02:08H
GVVHNQDVNL

SEQ ID NO: 4806 - protein, 10 aa, Severe acute respiratory syndrome coronavirus 2
  REGION 1..10: note = Table A: HLA-A*36:01M
RLSFKELLVY

SEQ ID NO: 4807 - protein, 10 aa, Severe acute respiratory syndrome coronavirus 2
  REGION 1..10: note = Table A: HLA-A*02:05H HLA-A*02:02H
LSFKELLVYA

SEQ ID NO: 4808 - protein, 10 aa, Severe acute respiratory syndrome coronavirus 2
  REGION 1..10: note = Table A: HLA-A*03:01H HLA-A*03:02H HLA-A*34:02H
LVYAADPAMH

SEQ ID NO: 4809 - protein, 10 aa, Severe acute respiratory syndrome coronavirus 2
  REGION 1..10: note = Table A: HLA-C*14:03H
VYAADPAMHA

SEQ ID NO: 4810 - protein, 10 aa, Severe acute respiratory syndrome coronavirus 2
  REGION 1..10: note = Table A: HLA-A*11:303M HLA-C*16:01H HLA-C*16:04M HLA-B*46:01M HLA-B*56:01M HLA-A*26:03H HLA-C*03:03H HLA-C*12:05H HLA-A*02:11M HLA-B*55:02M HLA-C*03:02M HLA-C*03:04M HLA-A*68:01H HLA-A*68:02M HLA-B*35:03H
  REGION 1..10: note = CONT. FROM ABOVE: HLA-B*55:01H HLA-C*12:02H HLA-C*12:03H HLA- A*02:05H HLA-A*02:06M HLA-A*02:08M HLA-A*02:01H HLA-A*02:02M HLA-A*02:03M HLA-A*34:01H HLA-B*35:01H HLA-B*35:02H HLA-B*35 :07H HLA-C*08:01M HLA-B*38:02M HLA-B*39:06H HLA-B*54:01H
  REGION 1..10: note = CONT. FROM ABOVE: HLA-B*39:01H HLA-A*66:01H HLA-B*50:01H
YAADPAMHAA

SEQ ID NO: 4811 - protein, 10 aa, Severe acute respiratory syndrome coronavirus 2
  REGION 1..10: note = Table A: HLA-A*02:02H HLA-B*38:02H
AMHAASGNLL

SEQ ID NO: 4812 - protein, 10 aa, Severe acute respiratory syndrome coronavirus 2
  REGION 1..10: note = Table A: HLA-B*38:01H HLA-B*38:02M HLA-B*15:10M
MHAASGNLLL

SEQ ID NO: 4813 - protein, 10 aa, Severe acute respiratory syndrome coronavirus 2
  REGION 1..10: note = Table A: HLA-A*11:01H HLA-A*36:01H HLA-B*27:02H HLA-A*34:02H
AASGNLLLDK

SEQ ID NO: 4814 - protein, 10 aa, Severe acute respiratory syndrome coronavirus 2
  REGION 1..10: note = Table A: HLA-A*02:08H
RTTCFSVAAL

SEQ ID NO: 4815 - protein, 10 aa, Severe acute respiratory syndrome coronavirus 2
  REGION 1..10: note = Table A: HLA-A*68:02H
FSVAALTNNV

SEQ ID NO: 4816 - protein, 10 aa, Severe acute respiratory syndrome coronavirus 2
  REGION 1..10: note = Table A: HLA-B*55:02H HLA-A*02:08H
SVAALTNNVA

SEQ ID NO: 4817 - protein, 10 aa, Severe acute respiratory syndrome coronavirus 2
  REGION 1..10: note = Table A: HLA-B*46:01H HLA-C*15:05H HLA-B*35:01H HLA-B*15:01H HLA-B*07:05H HLA-B*57:03H
VAALTNNVAF

SEQ ID NO: 4818 - protein, 10 aa, Severe acute respiratory syndrome coronavirus 2
  REGION 1..10: note = Table A: HLA-A*68:02M HLA-C*08:03H
LTNNVAFQTV

SEQ ID NO: 4819 - protein, 10 aa, Severe acute respiratory syndrome coronavirus 2
  REGION 1..10: note = Table A: HLA-C*14:02H HLA-C*14:03H HLA-A*24:07H HLA-A*23:01H
AFQTVKPGNF

SEQ ID NO: 4820 - protein, 10 aa, Severe acute respiratory syndrome coronavirus 2
  REGION 1..10: note = Table A: HLA-A*11:303H HLA-A*03:02M HLA-A*11:01M HLA-A*11:02M HLA-A*68:01H HLA-A*34:02M HLA-C*07:27M
QTVKPGNFNK

SEQ ID NO: 4821 - protein, 10 aa, Severe acute respiratory syndrome coronavirus 2
  REGION 1..10: note = Table A: HLA-A*36:01M HLA-A*30:02M HLA-B*35:01H
KPGNFNKDFY

SEQ ID NO: 4822 - protein, 10 aa, Severe acute respiratory syndrome coronavirus 2
  REGION 1..10: note = Table A: HLA-A*36:01H
KDFYDFAVSK

SEQ ID NO: 4823 - protein, 10 aa, Severe acute respiratory syndrome coronavirus 2
  REGION 1..10: note = Table A: HLA-C*04:01H HLA-C*04:03M
FYDFAVSKGF

SEQ ID NO: 4824 - protein, 10 aa, Severe acute respiratory syndrome coronavirus 2
  REGION 1..10: note = Table A: HLA-A*34:02H
DFAVSKGFFK

SEQ ID NO: 4825 - protein, 10 aa, Severe acute respiratory syndrome coronavirus 2
  REGION 1..10: note = Table A: HLA-C*08:03H
KGFFKEGSSV

SEQ ID NO: 4826 - protein, 10 aa, Severe acute respiratory syndrome coronavirus 2
  REGION 1..10: note = Table A: HLA-C*14:02M HLA-C*14:03H HLA-B*08:01H HLA-A*02:02H HLA-A*24:07H HLA-B*38:02H
FFKEGSSVEL

SEQ ID NO: 4827 - protein, 10 aa, Severe acute respiratory syndrome coronavirus 2
  REGION 1..10: note = Table A: HLA-B*57:03H
GSSVELKHFF

SEQ ID NO: 4828 - protein, 10 aa, Severe acute respiratory syndrome coronavirus 2
  REGION 1..10: note = Table A: HLA-B*57:03M
SSVELKHFFF

SEQ ID NO: 4829 - protein, 10 aa, Severe acute respiratory syndrome coronavirus 2
  REGION 1..10: note = Table A: HLA-C*14:02H HLA-C*14:03H
FFFAQDGNAA

SEQ ID NO: 4830 - protein, 10 aa, Severe acute respiratory syndrome coronavirus 2
  REGION 1..10: note = Table A: HLA-B*35:01H HLA-B*35:08M HLA-B*35:07H
NAAISDYDYY

SEQ ID NO: 4831 - protein, 10 aa, Severe acute respiratory syndrome coronavirus 2
  REGION 1..10: note = Table A: HLA-A*36:01H HLA-A*30:02H
AISDYDYYRY

SEQ ID NO: 4832 - protein, 10 aa, Severe acute respiratory syndrome coronavirus 2
  REGION 1..10: note = Table A: HLA-A*24:07H
TMCDIRQLLF

SEQ ID NO: 4833 - protein, 10 aa, Severe acute respiratory syndrome coronavirus 2
  REGION 1..10: note = Table A: HLA-A*29:02H
LFVVEVVDKY

SEQ ID NO: 4834 - protein, 10 aa, Severe acute respiratory syndrome coronavirus 2
  REGION 1..10: note = Table A: HLA-A*25:01H HLA-A*26:01H HLA-A*26:02M HLA-A*26:03H HLA-B*35:01H
EVVDKYFDCY

SEQ ID NO: 4835 - protein, 10 aa, Severe acute respiratory syndrome coronavirus 2
  REGION 1..10: note = Table A: HLA-B*27:02H
NQVIVNNLDK

SEQ ID NO: 4836 - protein, 10 aa, Severe acute respiratory syndrome coronavirus 2
  REGION 1..10: note = Table A: HLA-A*02:05M HLA-A*02:08M HLA-B*38:02H
QVIVNNLDKS

SEQ ID NO: 4837 - protein, 10 aa, Severe acute respiratory syndrome coronavirus 2
  REGION 1..10: note = Table A: HLA-B*38:02H
NLDKSAGFPF

SEQ ID NO: 4838 - protein, 10 aa, Severe acute respiratory syndrome coronavirus 2
  REGION 1..10: note = Table A: HLA-B*58:01H HLA-B*58:02H HLA-A*36:01H HLA-B*57:01H HLA-B*44:03H HLA-A*30:02H HLA-A*32:01M HLA-B*57:03H HLA-B*13:01H
KSAGFPFNKW

SEQ ID NO: 4839 - protein, 10 aa, Severe acute respiratory syndrome coronavirus 2
  REGION 1..10: note = Table A: HLA-A*74:01H HLA-A*11:01H HLA-A*11:02M HLA-A*36:01M HLA-B*27:05H HLA-A*30:01M HLA-A*30:02H HLA-A*31:01H
AGFPFNKWGK

SEQ ID NO: 4840 - protein, 10 aa, Severe acute respiratory syndrome coronavirus 2
  REGION 1..10: note = Table A: HLA-A*34:01H HLA-A*66:01H
FPFNKWGKAR

SEQ ID NO: 4841 - protein, 10 aa, Severe acute respiratory syndrome coronavirus 2
  REGION 1..10: note = Table A: HLA-B*27:05H HLA-B*27:02H
ARLYYDSMSY

SEQ ID NO: 4842 - protein, 10 aa, Severe acute respiratory syndrome coronavirus 2
  REGION 1..10: note = Table A: HLA-B*58:01H HLA-A*68:02H HLA-B*38:02H HLA-B*57:03H
MSYEDQDALF

SEQ ID NO: 4843 - protein, 10 aa, Severe acute respiratory syndrome coronavirus 2
  REGION 1..10: note = Table A: HLA-A*36:01H HLA-B*27:02H
YEDQDALFAY

SEQ ID NO: 4844 - protein, 10 aa, Severe acute respiratory syndrome coronavirus 2
  REGION 1..10: note = Table A: HLA-A*02:11H HLA-A*02:02H HLA-A*02:03H
ALFAYTKRNV

SEQ ID NO: 4845 - protein, 10 aa, Severe acute respiratory syndrome coronavirus 2
  REGION 1..10: note = Table A: HLA-B*58:02H HLA-B*57:03M
YTKRNVIPTI

SEQ ID NO: 4846 - protein, 10 aa, Severe acute respiratory syndrome coronavirus 2
  REGION 1..10: note = Table A: HLA-C*01:02H
VIPTITQMNL

SEQ ID NO: 4847 - protein, 10 aa, Severe acute respiratory syndrome coronavirus 2
  REGION 1..10: note = Table A: HLA-A*36:01H HLA-A*26:01H HLA-A*29:02H HLA-A*01:01M
PTITQMNLKY

SEQ ID NO: 4848 - protein, 10 aa, Severe acute respiratory syndrome coronavirus 2
  REGION 1..10: note = Table A: HLA-A*34:02H
MNLKYAISAK

SEQ ID NO: 4849 - protein, 10 aa, Severe acute respiratory syndrome coronavirus 2
  REGION 1..10: note = Table A: HLA-A*33:03H HLA-A*26:03M HLA-A*34:01M HLA-A*34:02H HLA-A*66:01M
YAISAKNRAR

SEQ ID NO: 4850 - protein, 10 aa, Severe acute respiratory syndrome coronavirus 2
  REGION 1..10: note = Table A: HLA-B*58:02H HLA-C*15:05H HLA-B*07:04H HLA-B*57:03M
RARTVAGVSI

SEQ ID NO: 4851 - protein, 10 aa, Severe acute respiratory syndrome coronavirus 2
  REGION 1..10: note = Table A: HLA-A*68:02H HLA-A*02:05H HLA-A*02:08H HLA-C*08:03H HLA-B*38:02H HLA-B*39:01H
TVAGVSICST

SEQ ID NO: 4852 - protein, 10 aa, Severe acute respiratory syndrome coronavirus 2
  REGION 1..10: note = Table A: HLA-B*08:01H HLA-B*39:06H
HQKLLKSIAA

SEQ ID NO: 4853 - protein, 10 aa, Severe acute respiratory syndrome coronavirus 2
  REGION 1..10: note = Table A: HLA-A*74:01H
KLLKSIAATR

SEQ ID NO: 4854 - protein, 10 aa, Severe acute respiratory syndrome coronavirus 2
  REGION 1..10: note = Table A: HLA-C*15:05H HLA-A*02:03H
SIAATRGATV

SEQ ID NO: 4855 - protein, 10 aa, Severe acute respiratory syndrome coronavirus 2
  REGION 1..10: note = Table A: HLA-A*03:01H HLA-A*03:02H HLA-A*11:01H HLA-A*36:01H HLA-B*27:02H
GATVVIGTSK

SEQ ID NO: 4856 - protein, 10 aa, Severe acute respiratory syndrome coronavirus 2
  REGION 1..10: note = Table A: HLA-B*58:01M HLA-B*44:05M HLA-B*57:01M HLA-A*25:01H HLA-A*26:01H HLA-A*26:02H HLA-A*26:03H HLA-B*27:02H HLA-A*30:02H HLA-A*68:01H HLA-C*15:05H HLA-A*34:01H HLA-A*34:02H HLA-B*15:01H HLA-B*57:03H HLA-A*66:01H
ATVVIGTSKF

SEQ ID NO: 4857 - protein, 10 aa, Severe acute respiratory syndrome coronavirus 2
  REGION 1..10: note = Table A: HLA-A*30:02H
TVVIGTSKFY

SEQ ID NO: 4858 - protein, 10 aa, Severe acute respiratory syndrome coronavirus 2
  REGION 1..10: note = Table A: HLA-C*14:02H HLA-C*14:03H HLA-A*02:02H HLA-A*24:07M HLA-A*23:01H
KFYGGWHNML

SEQ ID NO: 4859 - protein, 10 aa, Severe acute respiratory syndrome coronavirus 2
  REGION 1..10: note = Table A: HLA-A*30:02H
GWHNMLKTVY

SEQ ID NO: 4860 - protein, 10 aa, Severe acute respiratory syndrome coronavirus 2
  REGION 1..10: note = Table A: HLA-C*14:02H HLA-C*14:03H HLA-A*02:01H HLA-A*02:02M HLA-A*24:02H HLA-A*24:07H HLA-C*08:01H HLA-A*23:01H
VYSDVENPHL

SEQ ID NO: 4861 - protein, 10 aa, Severe acute respiratory syndrome coronavirus 2
  REGION 1..10: note = Table A: HLA-A*36:01H HLA-A*01:01M HLA-C*04:03M HLA-C*08:02H HLA-C*05:01H
YSDVENPHLM

SEQ ID NO: 4862 - protein, 10 aa, Severe acute respiratory syndrome coronavirus 2
  REGION 1..10: note = Table A: HLA-A*25:01M
DVENPHLMGW

SEQ ID NO: 4863 - protein, 10 aa, Severe acute respiratory syndrome coronavirus 2
  REGION 1..10: note = Table A: HLA-B*58:02H HLA-C*03:02H HLA-B*07:04M HLA-B*57:03H
RAMPNMLRIM

SEQ ID NO: 4864 - protein, 10 aa, Severe acute respiratory syndrome coronavirus 2
  REGION 1..10: note = Table A: HLA-B*54:01H
MPNMLRIMAS

SEQ ID NO: 4865 - protein, 10 aa, Severe acute respiratory syndrome coronavirus 2
  REGION 1..10: note = Table A: HLA-A*74:01M
RIMASLVLAR

SEQ ID NO: 4866 - protein, 10 aa, Severe acute respiratory syndrome coronavirus 2
  REGION 1..10: note = Table A: HLA-A*02:02H HLA-B*13:01H
RLANECAQVL

SEQ ID NO: 4867 - protein, 10 aa, Severe acute respiratory syndrome coronavirus 2
  REGION 1..10: note = Table A: HLA-A*68:02H
ECAQVLSEMV

SEQ ID NO: 4868 - protein, 10 aa, Severe acute respiratory syndrome coronavirus 2
  REGION 1..10: note = Table A: HLA-A*02:06H HLA-A*02:01H
QVLSEMVMCG

SEQ ID NO: 4869 - protein, 10 aa, Severe acute respiratory syndrome coronavirus 2
  REGION 1..10: note = Table A: HLA-B*44:05H
SEMVMCGGSL

SEQ ID NO: 4870 - protein, 10 aa, Severe acute respiratory syndrome coronavirus 2
  REGION 1..10: note = Table A: HLA-A*68:02H
MVMCGGSLYV

SEQ ID NO: 4871 - protein, 10 aa, Severe acute respiratory syndrome coronavirus 2
  REGION 1..10: note = Table A: HLA-C*08:03H
GSLYVKPGGT

SEQ ID NO: 4872 - protein, 10 aa, Severe acute respiratory syndrome coronavirus 2
  REGION 1..10: note = Table A: HLA-A*03:01H
SLYVKPGGTS

SEQ ID NO: 4873 - protein, 10 aa, Severe acute respiratory syndrome coronavirus 2
  REGION 1..10: note = Table A: HLA-A*33:03H HLA-B*46:01H HLA-A*26:03M HLA-B*55:01H HLA-A*34:01H HLA-B*38:02H HLA-A*66:01M
YVKPGGTSSG

SEQ ID NO: 4874 - protein, 10 aa, Severe acute respiratory syndrome coronavirus 2
  REGION 1..10: note = Table A: HLA-A*36:01H HLA-B*35:01H HLA-B*35:08H HLA-B*38:02H HLA-B*15:01H HLA-B*39:01H
TSSGDATTAY

SEQ ID NO: 4875 - protein, 10 aa, Severe acute respiratory syndrome coronavirus 2
  REGION 1..10: note = Table A: HLA-B*57:03H
ATTAYANSVF

SEQ ID NO: 4876 - protein, 10 aa, Severe acute respiratory syndrome coronavirus 2
  REGION 1..10: note = Table A: HLA-B*38:02H
QAVTANVNAL

SEQ ID NO: 4877 - protein, 10 aa, Severe acute respiratory syndrome coronavirus 2
  REGION 1..10: note = Table A: HLA-A*02:08H
AVTANVNALL

SEQ ID NO: 4878 - protein, 10 aa, Severe acute respiratory syndrome coronavirus 2
  REGION 1..10: note = Table A: HLA-B*38:02H HLA-B*13:01H HLA-B*13:02H
ALLSTDGNKI

SEQ ID NO: 4879 - protein, 10 aa, Severe acute respiratory syndrome coronavirus 2
  REGION 1..10: note = Table A: HLA-A*03:02H HLA-A*11:01H HLA-A*36:01H HLA-A*34:02H
STDGNKIADK

SEQ ID NO: 4880 - protein, 10 aa, Severe acute respiratory syndrome coronavirus 2
  REGION 1..10: note = Table A: HLA-A*02:08H HLA-A*02:02M HLA-B*07:04H
KIADKYVRNL

SEQ ID NO: 4881 - protein, 10 aa, Severe acute respiratory syndrome coronavirus 2
  REGION 1..10: note = Table A: HLA-A*74:01M
RLYECLYRNR

SEQ ID NO: 4882 - protein, 10 aa, Severe acute respiratory syndrome coronavirus 2
  REGION 1..10: note = Table A: HLA-A*36:01H HLA-A*29:02H HLA-B*27:02H
VDTDFVNEFY

SEQ ID NO: 4883 - protein, 10 aa, Severe acute respiratory syndrome coronavirus 2
  REGION 1..10: note = Table A: HLA-A*68:02H
DTDFVNEFYA

SEQ ID NO: 4884 - protein, 10 aa, Severe acute respiratory syndrome coronavirus 2
  REGION 1..10: note = Table A: HLA-A*74:01H HLA-A*34:01H HLA-A*66:01H
FVNEFYAYLR

SEQ ID NO: 4885 - protein, 10 aa, Severe acute respiratory syndrome coronavirus 2
  REGION 1..10: note = Table A: HLA-B*08:01H
YAYLRKHFSM

SEQ ID NO: 4886 - protein, 10 aa, Severe acute respiratory syndrome coronavirus 2
  REGION 1..10: note = Table A: HLA-A*02:04H HLA-A*02:01H HLA-A*02:02M HLA-B*38:02M HLA-B*15:01H HLA-B*15:02H HLA-B*13:01H
ILSDDAVVCF

SEQ ID NO: 4887 - protein, 10 aa, Severe acute respiratory syndrome coronavirus 2
  REGION 1..10: note = Table A: HLA-A*26:01H HLA-B*35:01M HLA-B*15:02H
DAVVCFNSTY

SEQ ID NO: 4888 - protein, 10 aa, Severe acute respiratory syndrome coronavirus 2
  REGION 1..10: note = Table A: HLA-A*03:01H HLA-A*11:01H HLA-B*55:02H HLA-C*15:05H HLA-A*34:02H HLA-B*54:01H
STYASQGLVA

SEQ ID NO: 4889 - protein, 10 aa, Severe acute respiratory syndrome coronavirus 2
  REGION 1..10: note = Table A: HLA-C*12:05H HLA-A*68:02M HLA-C*15:05H HLA-B*51:01H HLA-B*38:02H
YASQGLVASI

SEQ ID NO: 4890 - protein, 10 aa, Severe acute respiratory syndrome coronavirus 2
  REGION 1..10: note = Table A: HLA-A*11:303H HLA-A*03:02M HLA-A*11:01M HLA-A*11:02M HLA-C*07:27H
ASQGLVASIK

SEQ ID NO: 4891 - protein, 10 aa, Severe acute respiratory syndrome coronavirus 2
  REGION 1..10: note = Table A: HLA-B*46:01H HLA-A*30:02H HLA-B*15:01H HLA-C*02:02H
SIKNFKSVLY

SEQ ID NO: 4892 - protein, 10 aa, Severe acute respiratory syndrome coronavirus 2
  REGION 1..10: note = Table A: HLA-B*15:03H
IKNFKSVLYY

SEQ ID NO: 4893 - protein, 10 aa, Severe acute respiratory syndrome coronavirus 2
  REGION 1..10: note = Table A: HLA-B*38:02H HLA-B*39:06H
YQNNVFMSEA

SEQ ID NO: 4894 - protein, 10 aa, Severe acute respiratory syndrome coronavirus 2
  REGION 1..10: note = Table A: HLA-B*37:01H
TDLTKGPHEF

SEQ ID NO: 4895 - protein, 10 aa, Severe acute respiratory syndrome coronavirus 2
  REGION 1..10: note = Table A: HLA-A*30:02H HLA-B*38:02H HLA-B*15:01H HLA-B*15:02H
LVKQGDDYVY

SEQ ID NO: 4896 - protein, 10 aa, Severe acute respiratory syndrome coronavirus 2
  REGION 1..10: note = Table A: HLA-A*30:02H HLA-A*23:01H
VYLPYPDPSR

SEQ ID NO: 4897 - protein, 10 aa, Severe acute respiratory syndrome coronavirus 2
  REGION 1..10: note = Table A: HLA-C*04:03H HLA-A*02:11H HLA-A*02:07H
YLPYPDPSRI

SEQ ID NO: 4898 - protein, 10 aa, Severe acute respiratory syndrome coronavirus 2
  REGION 1..10: note = Table A: HLA-B*42:01M HLA-B*56:01H HLA-B*53:01H HLA-B*55:02H HLA-B*35:03M HLA-C*15:05M HLA-B*55:01H HLA-B*35:01H HLA-B*35:02H HLA-B*51:01M HLA-B*35:07M HLA-B*35:12H HLA-B*54:01H HLA-B*07:02M HLA-B*07:04H HLA-B*07:05H
  REGION 1..10: note = CONT. FROM ABOVE: HLA-B*15:10H HLA-B*15:11H
LPYPDPSRIL

SEQ ID NO: 4899 - protein, 10 aa, Severe acute respiratory syndrome coronavirus 2
  REGION 1..10: note = Table A: HLA-A*24:07H
PYPDPSRILG

SEQ ID NO: 4900 - protein, 10 aa, Severe acute respiratory syndrome coronavirus 2
  REGION 1..10: note = Table A: HLA-B*56:01M HLA-B*55:02M HLA-C*15:05H HLA-B*55:01H HLA-B*54:01M
YPDPSRILGA

SEQ ID NO: 4901 - protein, 10 aa, Severe acute respiratory syndrome coronavirus 2
  REGION 1..10: note = Table A: HLA-C*04:03H HLA-A*02:07M
FVDDIVKTDG

SEQ ID NO: 4902 - protein, 10 aa, Severe acute respiratory syndrome coronavirus 2
  REGION 1..10: note = Table A: HLA-A*74:01H HLA-A*11:01H HLA-A*36:01H
KTDGTLMIER

SEQ ID NO: 4903 - protein, 10 aa, Severe acute respiratory syndrome coronavirus 2
  REGION 1..10: note = Table A: HLA-B*08:01M HLA-A*02:11H HLA-A*02:04M HLA-A*02:06H HLA-A*02:02H
TLMIERFVSL

SEQ ID NO: 4904 - protein, 10 aa, Severe acute respiratory syndrome coronavirus 2
  REGION 1..10: note = Table A: HLA-A*30:02H
RFVSLAIDAY

SEQ ID NO: 4905 - protein, 10 aa, Severe acute respiratory syndrome coronavirus 2
  REGION 1..10: note = Table A: HLA-A*11:01H HLA-A*11:02H HLA-A*36:01H HLA-B*27:02H HLA-A*68:01H HLA-A*34:02M HLA-A*66:01H
LAIDAYPLTK

SEQ ID NO: 4906 - protein, 10 aa, Severe acute respiratory syndrome coronavirus 2
  REGION 1..10: note = Table A: HLA-A*33:01H HLA-A*34:01H HLA-A*66:01H
DAYPLTKHPN

SEQ ID NO: 4907 - protein, 10 aa, Severe acute respiratory syndrome coronavirus 2
  REGION 1..10: note = Table A: HLA-B*53:01M HLA-B*35:03M HLA-B*35:01H HLA-B*35:02M HLA-B*35:08H HLA-B*35:07H HLA-B*35:12M HLA-B*38:02H
HPNQEYADVF

SEQ ID NO: 4908 - protein, 10 aa, Severe acute respiratory syndrome coronavirus 2
  REGION 1..10: note = Table A: HLA-B*44:02H HLA-B*44:03M
QEYADVFHLY

SEQ ID NO: 4909 - protein, 10 aa, Severe acute respiratory syndrome coronavirus 2
  REGION 1..10: note = Table A: HLA-A*24:02H HLA-A*24:07M HLA-A*23:01H
EYADVFHLYL

SEQ ID NO: 4910 - protein, 10 aa, Severe acute respiratory syndrome coronavirus 2
  REGION 1..10: note = Table A: HLA-A*68:02M
DVFHLYLQYI

SEQ ID NO: 4911 - protein, 10 aa, Severe acute respiratory syndrome coronavirus 2
  REGION 1..10: note = Table A: HLA-A*02:04H HLA-A*02:02H
HLYLQYIRKL

SEQ ID NO: 4912 - protein, 10 aa, Severe acute respiratory syndrome coronavirus 2
  REGION 1..10: note = Table A: HLA-A*02:02M
KLHDELTGHM

SEQ ID NO: 4913 - protein, 10 aa, Severe acute respiratory syndrome coronavirus 2
  REGION 1..10: note = Table A: HLA-B*38:01H HLA-B*38:02H HLA-B*39:01M HLA-B*15:10M
LHDELTGHML

SEQ ID NO: 4914 - protein, 10 aa, Severe acute respiratory syndrome coronavirus 2
  REGION 1..10: note = Table A: HLA-A*02:11H HLA-A*02:04H
HMLDMYSVML

SEQ ID NO: 4915 - protein, 10 aa, Severe acute respiratory syndrome coronavirus 2
  REGION 1..10: note = Table A: HLA-B*58:01H HLA-B*58:02H HLA-B*57:01H HLA-A*25:01H HLA-B*57:03H
LTNDNTSRYW

SEQ ID NO: 4916 - protein, 10 aa, Severe acute respiratory syndrome coronavirus 2
  REGION 1..10: note = Table A: HLA-A*02:11H HLA-C*08:01H HLA-B*40:06H
RYWEPEFYEA

SEQ ID NO: 4917 - protein, 10 aa, Severe acute respiratory syndrome coronavirus 2
  REGION 1..10: note = Table A: HLA-B*45:01H HLA-B*40:02H HLA-B*41:02H HLA-B*49:01M HLA-B*50:01H
YEAMYTPHTV

SEQ ID NO: 4918 - protein, 10 aa, Severe acute respiratory syndrome coronavirus 2
  REGION 1..10: note = Table A: HLA-A*68:02M HLA-B*35:03H HLA-A*34:01M HLA-A*34:02H HLA-A*66:01H
EAMYTPHTVL

SEQ ID NO: 4919 - protein, 10 aa, Severe acute respiratory syndrome coronavirus 2
  REGION 1..10: note = Table A: HLA-A*02:11H HLA-A*68:02M HLA-A*02:05H HLA-A*02:06H HLA-A*02:07H HLA-A*02:02H
YTPHTVLQAV

SEQ ID NO: 4920 - protein, 10 aa, Severe acute respiratory syndrome coronavirus 2
  REGION 1..10: note = Table A: HLA-B*56:01H HLA-B*55:02M HLA-B*54:01H
TPHTVLQAVG

SEQ ID NO: 4921 - protein, 10 aa, Severe acute respiratory syndrome coronavirus 2
  REGION 1..10: note = Table A: HLA-B*38:01H HLA-B*38:02M HLA-B*39:01H HLA-B*15:10H
DHVISTSHKL

SEQ ID NO: 4922 - protein, 10 aa, Severe acute respiratory syndrome coronavirus 2
  REGION 1..10: note = Table A: HLA-A*68:02H
HVISTSHKLV

SEQ ID NO: 4923 - protein, 10 aa, Severe acute respiratory syndrome coronavirus 2
  REGION 1..10: note = Table A: HLA-B*07:04H
VISTSHKLVL

SEQ ID NO: 4924 - protein, 10 aa, Severe acute respiratory syndrome coronavirus 2
  REGION 1..10: note = Table A: HLA-A*68:02H
STSHKLVLSV

SEQ ID NO: 4925 - protein, 10 aa, Severe acute respiratory syndrome coronavirus 2
  REGION 1..10: note = Table A: HLA-B*15:03H
HKLVLSVNPY

SEQ ID NO: 4926 - protein, 10 aa, Severe acute respiratory syndrome coronavirus 2
  REGION 1..10: note = Table A: HLA-A*02:11H
KLVLSVNPYV

SEQ ID NO: 4927 - protein, 10 aa, Severe acute respiratory syndrome coronavirus 2
  REGION 1..10: note = Table A: HLA-C*04:03H HLA-C*08:02H
GCDVTDVTQL

SEQ ID NO: 4928 - protein, 10 aa, Severe acute respiratory syndrome coronavirus 2
  REGION 1..10: note = Table A: HLA-A*68:01H HLA-A*68:02M HLA-A*34:02H HLA-A*66:01H
DVTDVTQLYL

SEQ ID NO: 4929 - protein, 10 aa, Severe acute respiratory syndrome coronavirus 2
  REGION 1..10: note = Table A: HLA-A*36:01H HLA-C*04:03H
VTDVTQLYLG

SEQ ID NO: 4930 - protein, 10 aa, Severe acute respiratory syndrome coronavirus 2
  REGION 1..10: note = Table A: HLA-A*26:02H
DVTQLYLGGM

SEQ ID NO: 4931 - protein, 10 aa, Severe acute respiratory syndrome coronavirus 2
  REGION 1..10: note = Table A: HLA-B*27:02H HLA-A*30:02H HLA-B*38:02H HLA-B*15:01H HLA-B*15:02M HLA-B*15:03H
TQLYLGGMSY

SEQ ID NO: 4932 - protein, 10 aa, Severe acute respiratory syndrome coronavirus 2
  REGION 1..10: note = Table A: HLA-A*36:01H HLA-B*46:01H HLA-A*26:01H HLA-A*29:02H HLA-A*30:02H HLA-B*38:02M HLA-B*15:01H HLA-B*15:02M
QLYLGGMSYY

SEQ ID NO: 4933 - protein, 10 aa, Severe acute respiratory syndrome coronavirus 2
  REGION 1..10: note = Table A: HLA-B*38:02H HLA-B*15:10H
SHKPPISFPL

SEQ ID NO: 4934 - protein, 10 aa, Severe acute respiratory syndrome coronavirus 2
  REGION 1..10: note = Table A: HLA-B*56:01H HLA-B*55:02H
KPPISFPLCA

SEQ ID NO: 4935 - protein, 10 aa, Severe acute respiratory syndrome coronavirus 2
  REGION 1..10: note = Table A: HLA-C*15:05H HLA-B*35:01H HLA-B*35:07H HLA-B*15:02H HLA-B*07:05H
FPLCANGQVF

SEQ ID NO: 4936 - protein, 10 aa, Severe acute respiratory syndrome coronavirus 2
  REGION 1..10: note = Table A: HLA-A*30:02H
CANGQVFGLY

SEQ ID NO: 4937 - protein, 10 aa, Severe acute respiratory syndrome coronavirus 2
  REGION 1..10: note = Table A: HLA-A*11:01H
ANGQVFGLYK

SEQ ID NO: 4938 - protein, 10 aa, Severe acute respiratory syndrome coronavirus 2
  REGION 1..10: note = Table A: HLA-C*08:03H
NVTDFNAIAT

SEQ ID NO: 4939 - protein, 10 aa, Severe acute respiratory syndrome coronavirus 2
  REGION 1..10: note = Table A: HLA-A*02:02M
ILANTCTERL

SEQ ID NO: 4940 - protein, 10 aa, Severe acute respiratory syndrome coronavirus 2
  REGION 1..10: note = Table A: HLA-A*02:02H HLA-B*07:04H HLA-B*15:01H
RLKLFAAETL

SEQ ID NO: 4941 - protein, 10 aa, Severe acute respiratory syndrome coronavirus 2
  REGION 1..10: note = Table A: HLA-A*02:11H HLA-A*02:05H HLA-A*02:08H HLA-A*02:02M HLA-A*02:03H HLA-B*13:02H
KLFAAETLKA

SEQ ID NO: 4942 - protein, 10 aa, Severe acute respiratory syndrome coronavirus 2
  REGION 1..10: note = Table A: HLA-A*68:02H
FAAETLKATE

SEQ ID NO: 4943 - protein, 10 aa, Severe acute respiratory syndrome coronavirus 2
  REGION 1..10: note = Table A: HLA-B*57:01H HLA-A*25:01H HLA-A*26:03H HLA-B*38:02H HLA-B*57:03M
ETLKATEETF

SEQ ID NO: 4944 - protein, 10 aa, Severe acute respiratory syndrome coronavirus 2
  REGION 1..10: note = Table A: HLA-B*58:01H HLA-A*11:01M HLA-A*11:02H HLA-A*36:01H HLA-A*26:01H HLA-A*29:01H HLA-A*29:02M HLA-A*01:01H HLA-B*44:03H HLA-A*30:02M HLA-A*34:02H HLA-C*07:27H
ATEETFKLSY

SEQ ID NO: 4945 - protein, 10 aa, Severe acute respiratory syndrome coronavirus 2
  REGION 1..10: note = Table A: HLA-A*74:01H
KLSYGIATVR

SEQ ID NO: 4946 - protein, 10 aa, Severe acute respiratory syndrome coronavirus 2
  REGION 1..10: note = Table A: HLA-B*38:02H
YGIATVREVL

SEQ ID NO: 4947 - protein, 10 aa, Severe acute respiratory syndrome coronavirus 2
  REGION 1..10: note = Table A: HLA-A*68:02H HLA-A*34:02H
EVLSDRELHL

SEQ ID NO: 4948 - protein, 10 aa, Severe acute respiratory syndrome coronavirus 2
  REGION 1..10: note = Table A: HLA-A*02:02H
VLSDRELHLS

SEQ ID NO: 4949 - protein, 10 aa, Severe acute respiratory syndrome coronavirus 2
  REGION 1..10: note = Table A: HLA-B*58:01M HLA-A*36:01H HLA-B*57:01H HLA-B*57:03M
LSDRELHLSW

SEQ ID NO: 4950 - protein, 10 aa, Severe acute respiratory syndrome coronavirus 2
  REGION 1..10: note = Table A: HLA-A*74:01H HLA-A*34:01H HLA-A*66:01H
HLSWEVGKPR

SEQ ID NO: 4951 - protein, 10 aa, Severe acute respiratory syndrome coronavirus 2
  REGION 1..10: note = Table A: HLA-B*40:02H
WEVGKPRPPL

SEQ ID NO: 4952 - protein, 10 aa, Severe acute respiratory syndrome coronavirus 2
  REGION 1..10: note = Table A: HLA-A*74:01H HLA-A*33:03H HLA-A*31:01M
VGKPRPPLNR

SEQ ID NO: 4953 - protein, 10 aa, Severe acute respiratory syndrome coronavirus 2
  REGION 1..10: note = Table A: HLA-A*30:02H HLA-B*07:04H
KPRPPLNRNY

SEQ ID NO: 4954 - protein, 10 aa, Severe acute respiratory syndrome coronavirus 2
  REGION 1..10: note = Table A: HLA-B*42:01H HLA-C*15:05H HLA-B*07:02H HLA-B*07:04M
RPPLNRNYVF

SEQ ID NO: 4955 - protein, 10 aa, Severe acute respiratory syndrome coronavirus 2
  REGION 1..10: note = Table A: HLA-A*74:01H HLA-A*03:01H HLA-A*03:02H HLA-A*11:01M HLA-A*11:02M HLA-A*36:01H HLA-A*30:01M HLA-A*30:02H HLA-A*68:01H HLA-A*68:02H HLA-A*34:02H HLA-C*07:27H HLA-A*66:01H
YVFTGYRVTK

SEQ ID NO: 4956 - protein, 10 aa, Severe acute respiratory syndrome coronavirus 2
  REGION 1..10: note = Table A: HLA-B*57:03H
RVTKNSKVQI

SEQ ID NO: 4957 - protein, 10 aa, Severe acute respiratory syndrome coronavirus 2
  REGION 1..10: note = Table A: HLA-A*36:01H HLA-A*30:02H
KNSKVQIGEY

SEQ ID NO: 4958 - protein, 10 aa, Severe acute respiratory syndrome coronavirus 2
  REGION 1..10: note = Table A: HLA-B*38:01H HLA-B*38:02H HLA-B*15:03M
SKVQIGEYTF

SEQ ID NO: 4959 - protein, 10 aa, Severe acute respiratory syndrome coronavirus 2
  REGION 1..10: note = Table A: HLA-A*11:01H HLA-A*11:02H
VQIGEYTFEK

SEQ ID NO: 4960 - protein, 10 aa, Severe acute respiratory syndrome coronavirus 2
  REGION 1..10: note = Table A: HLA-B*44:03M HLA-B*18:01H HLA-B*27:02H HLA-A*30:02H HLA-B*15:01H
GEYTFEKGDY

SEQ ID NO: 4961 - protein, 10 aa, Severe acute respiratory syndrome coronavirus 2
  REGION 1..10: note = Table A: HLA-B*40:02H HLA-B*49:01H
FEKGDYGDAV

SEQ ID NO: 4962 - protein, 10 aa, Severe acute respiratory syndrome coronavirus 2
  REGION 1..10: note = Table A: HLA-A*36:01H
KGDYGDAVVY

SEQ ID NO: 4963 - protein, 10 aa, Severe acute respiratory syndrome coronavirus 2
  REGION 1..10: note = Table A: HLA-B*27:02H HLA-A*68:01H HLA-A*68:02H
GDYGDAVVYR

SEQ ID NO: 4964 - protein, 10 aa, Severe acute respiratory syndrome coronavirus 2
  REGION 1..10: note = Table A: HLA-A*25:01H HLA-B*46:01H HLA-A*26:01H HLA-A*30:02H HLA-B*38:02H HLA-B*15:01M HLA-B*15:02H HLA-B*15:03H
AVVYRGTTTY

SEQ ID NO: 4965 - protein, 10 aa, Severe acute respiratory syndrome coronavirus 2
  REGION 1..10: note = Table A: HLA-A*11:303H HLA-A*03:01M HLA-A*03:02M HLA-A*11:01M HLA-A*11:02M HLA-A*30:02H HLA-A*34:02M HLA-C*07:27H
VVYRGTTTYK

SEQ ID NO: 4966 - protein, 10 aa, Severe acute respiratory syndrome coronavirus 2
  REGION 1..10: note = Table A: HLA-A*24:07H
VYRGTTTYKL

SEQ ID NO: 4967 - protein, 10 aa, Severe acute respiratory syndrome coronavirus 2
  REGION 1..10: note = Table A: HLA-A*36:01H HLA-A*26:01M HLA-A*30:02H
TTYKLNVGDY

SEQ ID NO: 4968 - protein, 10 aa, Severe acute respiratory syndrome coronavirus 2
  REGION 1..10: note = Table A: HLA-A*29:02H HLA-A*30:02H HLA-A*24:02M HLA-A*24:07H HLA-C*08:01H HLA-A*23:01M
TYKLNVGDYF

SEQ ID NO: 4969 - protein, 10 aa, Severe acute respiratory syndrome coronavirus 2
  REGION 1..10: note = Table A: HLA-A*02:02H
KLNVGDYFVL

SEQ ID NO: 4970 - protein, 10 aa, Severe acute respiratory syndrome coronavirus 2
  REGION 1..10: note = Table A: HLA-C*14:02H HLA-C*14:03H
YFVLTSHTVM

SEQ ID NO: 4971 - protein, 10 aa, Severe acute respiratory syndrome coronavirus 2
  REGION 1..10: note = Table A: HLA-A*02:03H
VLTSHTVMPL

SEQ ID NO: 4972 - protein, 10 aa, Severe acute respiratory syndrome coronavirus 2
  REGION 1..10: note = Table A: HLA-B*39:06H
TSHTVMPLSA

SEQ ID NO: 4973 - protein, 10 aa, Severe acute respiratory syndrome coronavirus 2
  REGION 1..10: note = Table A: HLA-A*02:11H HLA-A*68:02H HLA-B*35:03M HLA-C*15:05H HLA-A*02:04H HLA-A*02:05H HLA-A*02:06H HLA-A*02:08H HLA-A*02:01H HLA-A*02:02H HLA-B*35:01H HLA-B*35:12H HLA-B*38:02H HLA-B*07:05H HLA-B*57:03H
TVMPLSAPTL

SEQ ID NO: 4974 - protein, 10 aa, Severe acute respiratory syndrome coronavirus 2
  REGION 1..10: note = Table A: HLA-B*35:01M HLA-B*07:05H
APTLVPQEHY

SEQ ID NO: 4975 - protein, 10 aa, Severe acute respiratory syndrome coronavirus 2
  REGION 1..10: note = Table A: HLA-B*27:05H
VRITGLYPTL

SEQ ID NO: 4976 - protein, 10 aa, Severe acute respiratory syndrome coronavirus 2
  REGION 1..10: note = Table A: HLA-B*27:02H HLA-B*53:01M HLA-B*35:03M HLA-C*15:05H HLA-B*35:01H HLA-B*35:02M HLA-B*35:08M HLA-B*35:07H HLA-B*35:12M HLA-B*38:02H HLA-B*39:01H HLA-B*07:05H
YPTLNISDEF

SEQ ID NO: 4977 - protein, 10 aa, Severe acute respiratory syndrome coronavirus 2
  REGION 1..10: note = Table A: HLA-B*44:05H HLA-A*25:01H HLA-A*26:01H HLA-B*44:03M HLA-B*18:01H HLA-B*27:02M HLA-B*35:01H HLA-B*07:05H
DEFSSNVANY

SEQ ID NO: 4978 - protein, 10 aa, Severe acute respiratory syndrome coronavirus 2
  REGION 1..10: note = Table A: HLA-A*03:02H HLA-A*11:01H HLA-A*11:02H HLA-A*36:01H HLA-B*27:02H HLA-A*68:01M HLA-A*68:02H HLA-A*34:02M
FSSNVANYQK

SEQ ID NO: 4979 - protein, 10 aa, Severe acute respiratory syndrome coronavirus 2
  REGION 1..10: note = Table A: HLA-A*34:01H
NVANYQKVGM

SEQ ID NO: 4980 - protein, 10 aa, Severe acute respiratory syndrome coronavirus 2
  REGION 1..10: note = Table A: HLA-A*11:303H HLA-A*03:01M HLA-A*03:02H HLA-A*11:01H HLA-A*11:02H HLA-A*34:02H
ANYQKVGMQK

SEQ ID NO: 4981 - protein, 10 aa, Severe acute respiratory syndrome coronavirus 2
  REGION 1..10: note = Table A: HLA-A*29:02H HLA-A*30:02M HLA-A*23:01H
NYQKVGMQKY

SEQ ID NO: 4982 - protein, 10 aa, Severe acute respiratory syndrome coronavirus 2
  REGION 1..10: note = Table A: HLA-A*11:303H HLA-A*03:01M HLA-A*03:02H HLA-A*11:01H HLA-A*11:02H HLA-A*30:02H HLA-A*34:02H
TLQGPPGTGK

SEQ ID NO: 4983 - protein, 10 aa, Severe acute respiratory syndrome coronavirus 2
  REGION 1..10: note = Table A: HLA-C*15:05H HLA-B*07:05H
GPPGTGKSHF

SEQ ID NO: 4984 - protein, 10 aa, Severe acute respiratory syndrome coronavirus 2
  REGION 1..10: note = Table A: HLA-B*58:02H HLA-B*57:03H
KSHFAIGLAL

SEQ ID NO: 4985 - protein, 10 aa, Severe acute respiratory syndrome coronavirus 2
  REGION 1..10: note = Table A: HLA-B*38:02M
SHFAIGLALY

SEQ ID NO: 4986 - protein, 10 aa, Severe acute respiratory syndrome coronavirus 2
  REGION 1..10: note = Table A: HLA-A*29:02M
HFAIGLALYY

SEQ ID NO: 4987 - protein, 10 aa, Severe acute respiratory syndrome coronavirus 2
  REGION 1..10: note = Table A: HLA-A*02:03H
ALYYPSARIV

SEQ ID NO: 4988 - protein, 10 aa, Severe acute respiratory syndrome coronavirus 2
  REGION 1..10: note = Table A: HLA-C*14:02M HLA-C*14:03H HLA-A*29:02H HLA-A*30:02H
LYYPSARIVY

SEQ ID NO: 4989 - protein, 10 aa, Severe acute respiratory syndrome coronavirus 2
  REGION 1..10: note = Table A: HLA-C*14:03H HLA-C*06:02H
YYPSARIVYT

SEQ ID NO: 4990 - protein, 10 aa, Severe acute respiratory syndrome coronavirus 2
  REGION 1..10: note = Table A: HLA-B*56:01M HLA-B*55:02H HLA-B*55:01M HLA-B*54:01H HLA-B*07:04H
YPSARIVYTA

SEQ ID NO: 4991 - protein, 10 aa, Severe acute respiratory syndrome coronavirus 2
  REGION 1..10: note = Table A: HLA-B*39:01H
ACSHAAVDAL

SEQ ID NO: 4992 - protein, 10 aa, Severe acute respiratory syndrome coronavirus 2
  REGION 1..10: note = Table A: HLA-A*36:01H HLA-A*34:02H
HAAVDALCEK

SEQ ID NO: 4993 - protein, 10 aa, Severe acute respiratory syndrome coronavirus 2
  REGION 1..10: note = Table A: HLA-A*02:02H HLA-A*02:03H
ALCEKALKYL

SEQ ID NO: 4994 - protein, 10 aa, Severe acute respiratory syndrome coronavirus 2
  REGION 1..10: note = Table A: HLA-A*31:01H
KYLPIDKCSR

SEQ ID NO: 4995 - protein, 10 aa, Severe acute respiratory syndrome coronavirus 2
  REGION 1..10: note = Table A: HLA-B*15:03M
FKVNSTLEQY

SEQ ID NO: 4996 - protein, 10 aa, Severe acute respiratory syndrome coronavirus 2
  REGION 1..10: note = Table A: HLA-A*02:11H HLA-A*02:08H
KVNSTLEQYV

SEQ ID NO: 4997 - protein, 10 aa, Severe acute respiratory syndrome coronavirus 2
  REGION 1..10: note = Table A: HLA-A*02:05H
IVVFDEISMA

SEQ ID NO: 4998 - protein, 10 aa, Severe acute respiratory syndrome coronavirus 2
  REGION 1..10: note = Table A: HLA-A*68:02H
TNYDLSVVNA

SEQ ID NO: 4999 - protein, 10 aa, Severe acute respiratory syndrome coronavirus 2
  REGION 1..10: note = Table A: HLA-A*33:01H HLA-A*26:03H HLA-A*68:01H HLA-A*34:01M HLA-A*66:01H
DLSVVNARLR

SEQ ID NO: 5000 - protein, 10 aa, Severe acute respiratory syndrome coronavirus 2
  REGION 1..10: note = Table A: HLA-A*11:01H HLA-A*11:02H HLA-A*34:02H
SVVNARLRAK

SEQ ID NO: 5001 - protein, 10 aa, Severe acute respiratory syndrome coronavirus 2
  REGION 1..10: note = Table A: HLA-C*14:03H HLA-A*11:303H HLA-A*25:01H HLA-B*46:01H HLA-A*26:01M HLA-A*26:02M HLA-A*26:03M HLA-C*04:03H HLA-C*03:03H HLA-A*02:11M HLA-C*03:04H HLA-A*68:01H HLA-A*68:02M HLA-B*35:03H HLA-C*15:05M
  REGION 1..10: note = CONT. FROM ABOVE: HLA-C*01:02H HLA-C*12:02H HLA-A*02:04M HLA- A*02:05H HLA-A*02:06M HLA-A*02:07H HLA-A*02:08H HLA-A*02:01H HLA-A*02:02M HLA-A*02:03M HLA-A*34:01H HLA-A*34:02H HLA-C*07 :27H HLA-C*17:01M HLA-C*08:01H HLA-C*08:03H HLA-B*38:02M
  REGION 1..10: note = CONT. FROM ABOVE: HLA-B*39:01H HLA-A*66:01H
YVYIGDPAQL

SEQ ID NO: 5002 - protein, 10 aa, Severe acute respiratory syndrome coronavirus 2
  REGION 1..10: note = Table A: HLA-A*34:02H
LPAPRTLLTK

SEQ ID NO: 5003 - protein, 10 aa, Severe acute respiratory syndrome coronavirus 2
  REGION 1..10: note = Table A: HLA-A*30:02M
LTKGTLEPEY

SEQ ID NO: 5004 - protein, 10 aa, Severe acute respiratory syndrome coronavirus 2
  REGION 1..10: note = Table A: HLA-B*50:01H
LEPEYFNSVC

SEQ ID NO: 5005 - protein, 10 aa, Severe acute respiratory syndrome coronavirus 2
  REGION 1..10: note = Table A: HLA-A*34:01H
EPEYFNSVCR

SEQ ID NO: 5006 - protein, 10 aa, Severe acute respiratory syndrome coronavirus 2
  REGION 1..10: note = Table A: HLA-B*13:01H
RLMKTIGPDM

SEQ ID NO: 5007 - protein, 10 aa, Severe acute respiratory syndrome coronavirus 2
  REGION 1..10: note = Table A: HLA-B*38:02H
LMKTIGPDMF

SEQ ID NO: 5008 - protein, 10 aa, Severe acute respiratory syndrome coronavirus 2
  REGION 1..10: note = Table A: HLA-A*36:01H
KTIGPDMFLG

SEQ ID NO: 5009 - protein, 10 aa, Severe acute respiratory syndrome coronavirus 2
  REGION 1..10: note = Table A: HLA-B*44:05H HLA-B*44:03H HLA-B*40:01H HLA-B*40:02M HLA-B*41:02M HLA-B*49:01H
AEIVDTVSAL

SEQ ID NO: 5010 - protein, 10 aa, Severe acute respiratory syndrome coronavirus 2
  REGION 1..10: note = Table A: HLA-A*68:02M
EIVDTVSALV

SEQ ID NO: 5011 - protein, 10 aa, Severe acute respiratory syndrome coronavirus 2
  REGION 1..10: note = Table A: HLA-B*58:01H HLA-A*36:01M HLA-A*29:01H HLA-A*29:02H HLA-A*01:01M HLA-B*38:02H HLA-B*07:05H
IVDTVSALVY

SEQ ID NO: 5012 - protein, 10 aa, Severe acute respiratory syndrome coronavirus 2
  REGION 1..10: note = Table A: HLA-A*03:02M HLA-A*11:01H HLA-A*68:01H HLA-A*68:02H
TVSALVYDNK

SEQ ID NO: 5013 - protein, 10 aa, Severe acute respiratory syndrome coronavirus 2
  REGION 1..10: note = Table A: HLA-B*57:03H
VSALVYDNKL

SEQ ID NO: 5014 - protein, 10 aa, Severe acute respiratory syndrome coronavirus 2
  REGION 1..10: note = Table A: HLA-A*11:01H HLA-A*34:02H
SALVYDNKLK

SEQ ID NO: 5015 - protein, 10 aa, Severe acute respiratory syndrome coronavirus 2
  REGION 1..10: note = Table A: HLA-B*46:01H HLA-A*34:01H HLA-A*34:02H
LVYDNKLKAH

SEQ ID NO: 5016 - protein, 10 aa, Severe acute respiratory syndrome coronavirus 2
  REGION 1..10: note = Table A: HLA-B*38:02H
AHKDKSAQCF

SEQ ID NO: 5017 - protein, 10 aa, Severe acute respiratory syndrome coronavirus 2
  REGION 1..10: note = Table A: HLA-A*36:01H HLA-A*30:02H
KSAQCFKMFY

SEQ ID NO: 5018 - protein, 10 aa, Severe acute respiratory syndrome coronavirus 2
  REGION 1..10: note = Table A: HLA-A*74:01H HLA-A*03:01H HLA-B*15:01H
KMFYKGVITH

SEQ ID NO: 5019 - protein, 10 aa, Severe acute respiratory syndrome coronavirus 2
  REGION 1..10: note = Table A: HLA-A*26:03H HLA-A*02:05M HLA-A*02:06H HLA-A*02:08H HLA-A*02:03H
GVITHDVSSA

SEQ ID NO: 5020 - protein, 10 aa, Severe acute respiratory syndrome coronavirus 2
  REGION 1..10: note = Table A: HLA-A*68:02H
DVSSAINRPQ

SEQ ID NO: 5021 - protein, 10 aa, Severe acute respiratory syndrome coronavirus 2
  REGION 1..10: note = Table A: HLA-B*58:02H HLA-B*57:03H
VSSAINRPQI

SEQ ID NO: 5022 - protein, 10 aa, Severe acute respiratory syndrome coronavirus 2
  REGION 1..10: note = Table A: HLA-C*12:05H HLA-A*68:02H HLA-A*02:06H
SAINRPQIGV

SEQ ID NO: 5023 - protein, 10 aa, Severe acute respiratory syndrome coronavirus 2
  REGION 1..10: note = Table A: HLA-A*74:01H HLA-A*33:01H HLA-A*33:03H HLA-A*31:01H
INRPQIGVVR

SEQ ID NO: 5024 - protein, 10 aa, Severe acute respiratory syndrome coronavirus 2
  REGION 1..10: note = Table A: HLA-B*42:01H HLA-C*15:05H HLA-B*07:02H HLA-B*07:04H HLA-B*07:05H
RPQIGVVREF

SEQ ID NO: 5025 - protein, 10 aa, Severe acute respiratory syndrome coronavirus 2
  REGION 1..10: note = Table A: HLA-B*44:02H HLA-B*44:03M
REFLTRNPAW

SEQ ID NO: 5026 - protein, 10 aa, Severe acute respiratory syndrome coronavirus 2
  REGION 1..10: note = Table A: HLA-A*33:01H HLA-A*33:03M
EFLTRNPAWR

SEQ ID NO: 5027 - protein, 10 aa, Severe acute respiratory syndrome coronavirus 2
  REGION 1..10: note = Table A: HLA-A*02:05H
FISPYNSQNA

SEQ ID NO: 5028 - protein, 10 aa, Severe acute respiratory syndrome coronavirus 2
  REGION 1..10: note = Table A: HLA-B*56:01H HLA-B*55:02H HLA-C*15:05M HLA-B*55:01M HLA-B*39:06H HLA-B*54:01M HLA-B*07:05H
SPYNSQNAVA

SEQ ID NO: 5029 - protein, 10 aa, Severe acute respiratory syndrome coronavirus 2
  REGION 1..10: note = Table A: HLA-B*27:02H HLA-A*68:01H HLA-A*34:02H
YNSQNAVASK

SEQ ID NO: 5030 - protein, 10 aa, Severe acute respiratory syndrome coronavirus 2
  REGION 1..10: note = Table A: HLA-A*02:11M HLA-A*02:06H HLA-A*02:08H HLA-A*02:01H HLA-A*02:03H HLA-B*38:02H HLA-B*13:02M
KILGLPTQTV

SEQ ID NO: 5031 - protein, 10 aa, Severe acute respiratory syndrome coronavirus 2
  REGION 1..10: note = Table A: HLA-A*36:01M HLA-A*01:01M HLA-B*35:08H HLA-B*38:02H
TVDSSQGSEY

SEQ ID NO: 5032 - protein, 10 aa, Severe acute respiratory syndrome coronavirus 2
  REGION 1..10: note = Table A: HLA-A*68:02H HLA-A*02:08H
YVIFTQTTET

SEQ ID NO: 5033 - protein, 10 aa, Severe acute respiratory syndrome coronavirus 2
  REGION 1..10: note = Table A: HLA-A*02:05H HLA-A*02:08H HLA-A*02:03H HLA-B*38:02H
VIFTQTTETA

SEQ ID NO: 5034 - protein, 10 aa, Severe acute respiratory syndrome coronavirus 2
  REGION 1..10: note = Table A: HLA-A*33:03M HLA-A*26:03H HLA-A*68:01H HLA-A*34:01M HLA-A*34:02M HLA-A*66:01M
ETAHSCNVNR

SEQ ID NO: 5035 - protein, 10 aa, Severe acute respiratory syndrome coronavirus 2
  REGION 1..10: note = Table A: HLA-A*68:02H
HSCNVNRFNV

SEQ ID NO: 5036 - protein, 10 aa, Severe acute respiratory syndrome coronavirus 2
  REGION 1..10: note = Table A: HLA-B*39:06H
NRFNVAITRA

SEQ ID NO: 5037 - protein, 10 aa, Severe acute respiratory syndrome coronavirus 2
  REGION 1..10: note = Table A: HLA-B*07:04H
RAKVGILCIM

SEQ ID NO: 5038 - protein, 10 aa, Severe acute respiratory syndrome coronavirus 2
  REGION 1..10: note = Table A: HLA-C*04:03H HLA-C*08:01H
LYDKLQFTSL

SEQ ID NO: 5039 - protein, 10 aa, Severe acute respiratory syndrome coronavirus 2
  REGION 1..10: note = Table A: HLA-A*74:01H
LQFTSLEIPR

SEQ ID NO: 5040 - protein, 10 aa, Severe acute respiratory syndrome coronavirus 2
  REGION 1..10: note = Table A: HLA-A*02:11H
TSLEIPRRNV

SEQ ID NO: 5041 - protein, 10 aa, Severe acute respiratory syndrome coronavirus 2
  REGION 1..10: note = Table A: HLA-A*25:01H HLA-A*26:03H HLA-A*34:01H
EIPRRNVATL

SEQ ID NO: 5042 - protein, 10 aa, Severe acute respiratory syndrome coronavirus 2
  REGION 1..10: note = Table A: HLA-A*68:02H
NVATLQAENV

SEQ ID NO: 5043 - protein, 10 aa, Severe acute respiratory syndrome coronavirus 2
  REGION 1..10: note = Table A: HLA-A*02:04H HLA-B*38:02H
TLQAENVTGL

SEQ ID NO: 5044 - protein, 10 aa, Severe acute respiratory syndrome coronavirus 2
  REGION 1..10: note = Table A: HLA-B*38:02H HLA-B*15:01H
LQAENVTGLF

SEQ ID NO: 5045 - protein, 10 aa, Severe acute respiratory syndrome coronavirus 2
  REGION 1..10: note = Table A: HLA-A*03:02H HLA-A*11:01H HLA-A*36:01M HLA-B*27:02H HLA-A*68:01H HLA-A*34:02M
QAENVTGLFK

SEQ ID NO: 5046 - protein, 10 aa, Severe acute respiratory syndrome coronavirus 2
  REGION 1..10: note = Table A: HLA-A*30:02H HLA-B*57:03H
KVITGLHPTQ

SEQ ID NO: 5047 - protein, 10 aa, Severe acute respiratory syndrome coronavirus 2
  REGION 1..10: note = Table A: HLA-A*02:03H
VITGLHPTQA

SEQ ID NO: 5048 - protein, 10 aa, Severe acute respiratory syndrome coronavirus 2
  REGION 1..10: note = Table A: HLA-C*08:03H
TGLHPTQAPT

SEQ ID NO: 5049 - protein, 10 aa, Severe acute respiratory syndrome coronavirus 2
  REGION 1..10: note = Table A: HLA-B*38:02H
LHPTQAPTHL

SEQ ID NO: 5050 - protein, 10 aa, Severe acute respiratory syndrome coronavirus 2
  REGION 1..10: note = Table A: HLA-B*57:03H
PTHLSVDTKF

SEQ ID NO: 5051 - protein, 10 aa, Severe acute respiratory syndrome coronavirus 2
  REGION 1..10: note = Table A: HLA-B*35:01H HLA-B*35:08H HLA-B*35:07H
IPGIPKDMTY

SEQ ID NO: 5052 - protein, 10 aa, Severe acute respiratory syndrome coronavirus 2
  REGION 1..10: note = Table A: HLA-B*07:04H
IPKDMTYRRL

SEQ ID NO: 5053 - protein, 10 aa, Severe acute respiratory syndrome coronavirus 2
  REGION 1..10: note = Table A: HLA-B*58:01H HLA-A*36:01H HLA-A*30:02H
ISMMGFKMNY

SEQ ID NO: 5054 - protein, 10 aa, Severe acute respiratory syndrome coronavirus 2
  REGION 1..10: note = Table A: HLA-B*15:03H
FKMNYQVNGY

SEQ ID NO: 5055 - protein, 10 aa, Severe acute respiratory syndrome coronavirus 2
  REGION 1..10: note = Table A: HLA-A*68:01H HLA-A*34:02H HLA-A*66:01H
NGYPNMFITR

SEQ ID NO: 5056 - protein, 10 aa, Severe acute respiratory syndrome coronavirus 2
  REGION 1..10: note = Table A: HLA-A*30:01H HLA-A*02:03H
ITREEAIRHV

SEQ ID NO: 5057 - protein, 10 aa, Severe acute respiratory syndrome coronavirus 2
  REGION 1..10: note = Table A: HLA-B*44:03H
EEAIRHVRAW

SEQ ID NO: 5058 - protein, 10 aa, Severe acute respiratory syndrome coronavirus 2
  REGION 1..10: note = Table A: HLA-B*57:03H
RAWIGFDVEG

SEQ ID NO: 5059 - protein, 10 aa, Severe acute respiratory syndrome coronavirus 2
  REGION 1..10: note = Table A: HLA-A*02:11H HLA-A*68:02H HLA-A*02:05H HLA-A*02:02H
IGFDVEGCHA

SEQ ID NO: 5060 - protein, 10 aa, Severe acute respiratory syndrome coronavirus 2
  REGION 1..10: note = Table A: HLA-A*03:01H HLA-A*30:01H HLA-C*15:05H HLA-B*57:03M
ATREAVGTNL

SEQ ID NO: 5061 - protein, 10 aa, Severe acute respiratory syndrome coronavirus 2
  REGION 1..10: note = Table A: HLA-B*40:01M HLA-B*40:02H
REAVGTNLPL

SEQ ID NO: 5062 - protein, 10 aa, Severe acute respiratory syndrome coronavirus 2
  REGION 1..10: note = Table A: HLA-B*58:01H HLA-A*03:01H HLA-A*11:01H HLA-B*57:01H HLA-B*27:02H HLA-B*57:03H
GTNLPLQLGF

SEQ ID NO: 5063 - protein, 10 aa, Severe acute respiratory syndrome coronavirus 2
  REGION 1..10: note = Table A: HLA-A*68:02H
FSTGVNLVAV

SEQ ID NO: 5064 - protein, 10 aa, Severe acute respiratory syndrome coronavirus 2
  REGION 1..10: note = Table A: HLA-A*36:01H HLA-A*01:01M HLA-C*04:03M HLA-A*02:07M HLA-B*35:08H HLA-C*08:02M HLA-B*38:02H HLA-B*39:01H HLA-C*05:01M
YVDTPNNTDF

SEQ ID NO: 5065 - protein, 10 aa, Severe acute respiratory syndrome coronavirus 2
  REGION 1..10: note = Table A: HLA-A*26:03H HLA-A*68:01M HLA-A*34:01H HLA-A*66:01H
DTPNNTDFSR

SEQ ID NO: 5066 - protein, 10 aa, Severe acute respiratory syndrome coronavirus 2
  REGION 1..10: note = Table A: HLA-B*56:01H HLA-B*55:02H HLA-C*15:05H HLA-B*55:01H
TPNNTDFSRV

SEQ ID NO: 5067 - protein, 10 aa, Severe acute respiratory syndrome coronavirus 2
  REGION 1..10: note = Table A: HLA-B*39:06H
NNTDFSRVSA

SEQ ID NO: 5068 - protein, 10 aa, Severe acute respiratory syndrome coronavirus 2
  REGION 1..10: note = Table A: HLA-A*34:02H
NTDFSRVSAK

SEQ ID NO: 5069 - protein, 10 aa, Severe acute respiratory syndrome coronavirus 2
  REGION 1..10: note = Table A: HLA-B*42:01H HLA-A*11:303M HLA-C*16:01H HLA-C*16:04H HLA-B*57:01H HLA-B*46:01M HLA-B*53:01H HLA-C*03:02M HLA-C*03:04H HLA-A*30:02H HLA-C*15:05H HLA-B*55:01H HLA-C*12:02H HLA-A*34:01H HLA-C*07:27H
  REGION 1..10: note = CONT. FROM ABOVE: HLA-B*35:01H HLA-B*35:08H HLA-B*35:07M HLA- C*08:01H HLA-B*38:02M HLA-B*07:02H HLA-B*07:04M HLA-B*15:01M HLA-B*15:02M HLA-B*15:03H HLA-B*07:05H HLA-B*57:03M HLA-C*02 :02M HLA-B*15:11M
SAKPPPGDQF

SEQ ID NO: 5070 - protein, 10 aa, Severe acute respiratory syndrome coronavirus 2
  REGION 1..10: note = Table A: HLA-A*29:02H
QFKHLIPLMY

SEQ ID NO: 5071 - protein, 10 aa, Severe acute respiratory syndrome coronavirus 2
  REGION 1..10: note = Table A: HLA-B*53:01H
IPLMYKGLPW

SEQ ID NO: 5072 - protein, 10 aa, Severe acute respiratory syndrome coronavirus 2
  REGION 1..10: note = Table A: HLA-A*02:11M HLA-A*02:02H HLA-A*02:03H
LMYKGLPWNV

SEQ ID NO: 5073 - protein, 10 aa, Severe acute respiratory syndrome coronavirus 2
  REGION 1..10: note = Table A: HLA-B*58:02M HLA-B*57:01H HLA-A*02:04H HLA-B*57:03M
KGLPWNVVRI

SEQ ID NO: 5074 - protein, 10 aa, Severe acute respiratory syndrome coronavirus 2
  REGION 1..10: note = Table A: HLA-A*02:08H HLA-C*08:03H
KIVQMLSDTL

SEQ ID NO: 5075 - protein, 10 aa, Severe acute respiratory syndrome coronavirus 2
  REGION 1..10: note = Table A: HLA-A*03:02H
IVQMLSDTLK

SEQ ID NO: 5076 - protein, 10 aa, Severe acute respiratory syndrome coronavirus 2
  REGION 1..10: note = Table A: HLA-A*02:04H HLA-A*02:02M
NLSDRVVFVL

SEQ ID NO: 5077 - protein, 10 aa, Severe acute respiratory syndrome coronavirus 2
  REGION 1..10: note = Table A: HLA-B*58:01M HLA-B*57:01H HLA-B*57:03H
LSDRVVFVLW

SEQ ID NO: 5078 - protein, 10 aa, Severe acute respiratory syndrome coronavirus 2
  REGION 1..10: note = Table A: HLA-A*02:04H
FVLWAHGFEL

SEQ ID NO: 5079 - protein, 10 aa, Severe acute respiratory syndrome coronavirus 2
  REGION 1..10: note = Table A: HLA-A*02:11H
VLWAHGFELT

SEQ ID NO: 5080 - protein, 10 aa, Severe acute respiratory syndrome coronavirus 2
  REGION 1..10: note = Table A: HLA-B*46:01H HLA-C*03:02H HLA-C*03:04H HLA-B*35:07H HLA-B*38:02H
WAHGFELTSM

SEQ ID NO: 5081 - protein, 10 aa, Severe acute respiratory syndrome coronavirus 2
  REGION 1..10: note = Table A: HLA-A*36:01H HLA-A*30:02H HLA-B*35:01H HLA-B*35:07H HLA-B*38:02H HLA-B*15:02H
HGFELTSMKY

SEQ ID NO: 5082 - protein, 10 aa, Severe acute respiratory syndrome coronavirus 2
  REGION 1..10: note = Table A: HLA-A*74:01M HLA-A*30:01H HLA-A*31:01H
KYFVKIGPER

SEQ ID NO: 5083 - protein, 10 aa, Severe acute respiratory syndrome coronavirus 2
  REGION 1..10: note = Table A: HLA-B*35:01M HLA-B*35:07H HLA-B*38:02M HLA-B*15:01H HLA-B*15:02H HLA-B*39:01H
TCFSTASDTY

SEQ ID NO: 5084 - protein, 10 aa, Severe acute respiratory syndrome coronavirus 2
  REGION 1..10: note = Table A: HLA-B*58:01M HLA-B*57:01H HLA-A*25:01M HLA-B*57:03M
STASDTYACW

SEQ ID NO: 5085 - protein, 10 aa, Severe acute respiratory syndrome coronavirus 2
  REGION 1..10: note = Table A: HLA-B*38:02H
WHHSIGFDYV

SEQ ID NO: 5086 - protein, 10 aa, Severe acute respiratory syndrome coronavirus 2
  REGION 1..10: note = Table A: HLA-B*38:02M
HHSIGFDYVY

SEQ ID NO: 5087 - protein, 10 aa, Severe acute respiratory syndrome coronavirus 2
  REGION 1..10: note = Table A: HLA-A*68:02H
YVYNPFMIDV

SEQ ID NO: 5088 - protein, 10 aa, Severe acute respiratory syndrome coronavirus 2
  REGION 1..10: note = Table A: HLA-B*53:01H HLA-B*35:01H HLA-B*35:07M
NPFMIDVQQW

SEQ ID NO: 5089 - protein, 10 aa, Severe acute respiratory syndrome coronavirus 2
  REGION 1..10: note = Table A: HLA-A*02:11H HLA-A*02:04H HLA-A*02:07H HLA-A*02:02H HLA-B*38:02H
FMIDVQQWGF

SEQ ID NO: 5090 - protein, 10 aa, Severe acute respiratory syndrome coronavirus 2
  REGION 1..10: note = Table A: HLA-A*36:01H HLA-A*29:02H
GNLQSNHDLY

SEQ ID NO: 5091 - protein, 10 aa, Severe acute respiratory syndrome coronavirus 2
  REGION 1..10: note = Table A: HLA-A*68:01H
VASCDAIMTR

SEQ ID NO: 5092 - protein, 10 aa, Severe acute respiratory syndrome coronavirus 2
  REGION 1..10: note = Table A: HLA-B*15:03H
VKRVDWTIEY

SEQ ID NO: 5093 - protein, 10 aa, Severe acute respiratory syndrome coronavirus 2
  REGION 1..10: note = Table A: HLA-B*44:05M HLA-B*18:01H HLA-A*68:02H HLA-A*02:02H HLA-C*08:01H HLA-B*38:01H HLA-B*38:02H HLA-B*40:01H HLA-B*40:02H HLA-B*40:06H HLA-B*07:05H HLA-B*41:02H HLA-B*49:01M HLA-B*50:01H
IEYPIIGDEL

SEQ ID NO: 5094 - protein, 10 aa, Severe acute respiratory syndrome coronavirus 2
  REGION 1..10: note = Table A: HLA-B*53:01M HLA-B*35:03H HLA-C*15:05H HLA-B*51:01H
YPIIGDELKI

SEQ ID NO: 5095 - protein, 10 aa, Severe acute respiratory syndrome coronavirus 2
  REGION 1..10: note = Table A: HLA-A*02:08H
KVQHMVVKAA

SEQ ID NO: 5096 - protein, 10 aa, Severe acute respiratory syndrome coronavirus 2
  REGION 1..10: note = Table A: HLA-B*15:01H
VQHMVVKAAL

SEQ ID NO: 5097 - protein, 10 aa, Severe acute respiratory syndrome coronavirus 2
  REGION 1..10: note = Table A: HLA-B*38:01H HLA-B*38:02M HLA-B*15:10M
QHMVVKAALL

SEQ ID NO: 5098 - protein, 10 aa, Severe acute respiratory syndrome coronavirus 2
  REGION 1..10: note = Table A: HLA-A*02:11H HLA-A*02:04M HLA-A*02:06H HLA-A*02:07H HLA-B*40:06H HLA-B*13:01H
ALLADKFPVL

SEQ ID NO: 5099 - protein, 10 aa, Severe acute respiratory syndrome coronavirus 2
  REGION 1..10: note = Table A: HLA-A*11:02H HLA-A*34:02H
PVLHDIGNPK

SEQ ID NO: 5100 - protein, 10 aa, Severe acute respiratory syndrome coronavirus 2
  REGION 1..10: note = Table A: HLA-A*02:11H HLA-A*02:01H HLA-A*02:02M HLA-A*02:03H
VLHDIGNPKA

SEQ ID NO: 5101 - protein, 10 aa, Severe acute respiratory syndrome coronavirus 2
  REGION 1..10: note = Table A: HLA-B*38:02M
LHDIGNPKAI

SEQ ID NO: 5102 - protein, 10 aa, Severe acute respiratory syndrome coronavirus 2
  REGION 1..10: note = Table A: HLA-A*34:02H
HDIGNPKAIK

SEQ ID NO: 5103 - protein, 10 aa, Severe acute respiratory syndrome coronavirus 2
  REGION 1..10: note = Table A: HLA-B*58:01M HLA-B*57:01H HLA-B*57:03M
KCVPQADVEW

SEQ ID NO: 5104 - protein, 10 aa, Severe acute respiratory syndrome coronavirus 2
  REGION 1..10: note = Table A: HLA-B*53:01M HLA-B*35:01M HLA-B*35:02H HLA-B*35:08H HLA-B*35:07H HLA-B*35:12H
VPQADVEWKF

SEQ ID NO: 5105 - protein, 10 aa, Severe acute respiratory syndrome coronavirus 2
  REGION 1..10: note = Table A: HLA-B*40:06H HLA-B*50:01H
VEWKFYDAQP

SEQ ID NO: 5106 - protein, 10 aa, Severe acute respiratory syndrome coronavirus 2
  REGION 1..10: note = Table A: HLA-B*58:01M HLA-B*58:02H HLA-A*36:01H HLA-B*57:01H HLA-A*29:02H HLA-A*30:02M HLA-C*15:02H HLA-B*15:03H HLA-B*57:03M
KAYKIEELFY

SEQ ID NO: 5107 - protein, 10 aa, Severe acute respiratory syndrome coronavirus 2
  REGION 1..10: note = Table A: HLA-B*15:03H
YKIEELFYSY

SEQ ID NO: 5108 - protein, 10 aa, Severe acute respiratory syndrome coronavirus 2
  REGION 1..10: note = Table A: HLA-B*58:01H HLA-A*36:01H HLA-A*34:02H HLA-B*38:02H HLA-B*57:03M HLA-A*66:01H
YSYATHSDKF

SEQ ID NO: 5109 - protein, 10 aa, Severe acute respiratory syndrome coronavirus 2
  REGION 1..10: note = Table A: HLA-B*38:02M HLA-B*39:01H
THSDKFTDGV

SEQ ID NO: 5110 - protein, 10 aa, Severe acute respiratory syndrome coronavirus 2
  REGION 1..10: note = Table A: HLA-A*24:02H HLA-A*24:07M HLA-A*23:01H HLA-B*57:03H
KFTDGVCLFW

SEQ ID NO: 5111 - protein, 10 aa, Severe acute respiratory syndrome coronavirus 2
  REGION 1..10: note = Table A: HLA-C*08:02H
NVDRYPANSI

SEQ ID NO: 5112 - protein, 10 aa, Severe acute respiratory syndrome coronavirus 2
  REGION 1..10: note = Table A: HLA-B*14:02H HLA-B*14:01H
DRYPANSIVC

SEQ ID NO: 5113 - protein, 10 aa, Severe acute respiratory syndrome coronavirus 2
  REGION 1..10: note = Table A: HLA-B*53:01M HLA-C*15:05H HLA-A*34:01H HLA-B*35:01H HLA-B*35:07M
YPANSIVCRF

SEQ ID NO: 5114 - protein, 10 aa, Severe acute respiratory syndrome coronavirus 2
  REGION 1..10: note = Table A: HLA-C*04:03H
RFDTRVLSNL

SEQ ID NO: 5115 - protein, 10 aa, Severe acute respiratory syndrome coronavirus 2
  REGION 1..10: note = Table A: HLA-A*02:01H
VLSNLNLPGC

SEQ ID NO: 5116 - protein, 10 aa, Severe acute respiratory syndrome coronavirus 2
  REGION 1..10: note = Table A: HLA-B*35:01H
LPGCDGGSLY

SEQ ID NO: 5117 - protein, 10 aa, Severe acute respiratory syndrome coronavirus 2
  REGION 1..10: note = Table A: HLA-A*30:02H HLA-B*57:03M
GSLYVNKHAF

SEQ ID NO: 5118 - protein, 10 aa, Severe acute respiratory syndrome coronavirus 2
  REGION 1..10: note = Table A: HLA-A*11:01H HLA-A*11:02H HLA-A*36:01H HLA-A*34:02M
HAFHTPAFDK

SEQ ID NO: 5119 - protein, 10 aa, Severe acute respiratory syndrome coronavirus 2
  REGION 1..10: note = Table A: HLA-B*39:06H
FHTPAFDKSA

SEQ ID NO: 5120 - protein, 10 aa, Severe acute respiratory syndrome coronavirus 2
  REGION 1..10: note = Table A: HLA-C*14:03H HLA-A*25:01M HLA-B*46:01M HLA-A*26:01M HLA-A*26:02M HLA-A*26:03M HLA-A*30:02H HLA-A*68:01H HLA-A*68:02H HLA-C*12:02H HLA-A*34:01H HLA-A*34:02M HLA-B*38:02H HLA-B*15:01H HLA-B*15:02H HLA-B*57:03M
  REGION 1..10: note = CONT. FROM ABOVE: HLA-A*66:01M
HTPAFDKSAF

SEQ ID NO: 5121 - protein, 10 aa, Severe acute respiratory syndrome coronavirus 2
  REGION 1..10: note = Table A: HLA-C*04:01H HLA-C*04:03H
AFDKSAFVNL

SEQ ID NO: 5122 - protein, 10 aa, Severe acute respiratory syndrome coronavirus 2
  REGION 1..10: note = Table A: HLA-B*57:03H
KSAFVNLKQL

SEQ ID NO: 5123 - protein, 10 aa, Severe acute respiratory syndrome coronavirus 2
  REGION 1..10: note = Table A: HLA-C*14:03H HLA-A*24:07H
AFVNLKQLPF

SEQ ID NO: 5124 - protein, 10 aa, Severe acute respiratory syndrome coronavirus 2
  REGION 1..10: note = Table A: HLA-A*29:02H
VNLKQLPFFY

SEQ ID NO: 5125 - protein, 10 aa, Severe acute respiratory syndrome coronavirus 2
  REGION 1..10: note = Table A: HLA-B*56:01H HLA-B*55:02H HLA-C*15:05H HLA-B*55:01H HLA-B*07:04M
SPCESHGKQV

SEQ ID NO: 5126 - protein, 10 aa, Severe acute respiratory syndrome coronavirus 2
  REGION 1..10: note = Table A: HLA-B*15:03H
GKQVVSDIDY

SEQ ID NO: 5127 - protein, 10 aa, Severe acute respiratory syndrome coronavirus 2
  REGION 1..10: note = Table A: HLA-A*02:05H HLA-A*02:08H HLA-B*13:01H
KQVVSDIDYV

SEQ ID NO: 5128 - protein, 10 aa, Severe acute respiratory syndrome coronavirus 2
  REGION 1..10: note = Table A: HLA-A*68:02H
VVSDIDYVPL

SEQ ID NO: 5129 - protein, 10 aa, Severe acute respiratory syndrome coronavirus 2
  REGION 1..10: note = Table A: HLA-A*36:01H
VSDIDYVPLK

SEQ ID NO: 5130 - protein, 10 aa, Severe acute respiratory syndrome coronavirus 2
  REGION 1..10: note = Table A: HLA-B*38:01M HLA-B*38:02H HLA-B*15:10M
HHANEYRLYL

SEQ ID NO: 5131 - protein, 10 aa, Severe acute respiratory syndrome coronavirus 2
  REGION 1..10: note = Table A: HLA-B*44:03H HLA-B*18:01M HLA-B*07:05H
NEYRLYLDAY

SEQ ID NO: 5132 - protein, 10 aa, Severe acute respiratory syndrome coronavirus 2
  REGION 1..10: note = Table A: HLA-A*02:02H HLA-B*13:01H
RLYLDAYNMM

SEQ ID NO: 5133 - protein, 10 aa, Severe acute respiratory syndrome coronavirus 2
  REGION 1..10: note = Table A: HLA-A*23:01H
LYLDAYNMMI

SEQ ID NO: 5134 - protein, 10 aa, Severe acute respiratory syndrome coronavirus 2
  REGION 1..10: note = Table A: HLA-B*38:02H
MMISAGFSLW

SEQ ID NO: 5135 - protein, 10 aa, Severe acute respiratory syndrome coronavirus 2
  REGION 1..10: note = Table A: HLA-A*36:01H HLA-B*46:01H HLA-A*30:02H
ISAGFSLWVY

SEQ ID NO: 5136 - protein, 10 aa, Severe acute respiratory syndrome coronavirus 2
  REGION 1..10: note = Table A: HLA-A*11:01H HLA-A*34:02H
SAGFSLWVYK

SEQ ID NO: 5137 - protein, 10 aa, Severe acute respiratory syndrome coronavirus 2
  REGION 1..10: note = Table A: HLA-A*24:02H HLA-A*24:07H HLA-A*23:01H
VYKQFDTYNL

SEQ ID NO: 5138 - protein, 10 aa, Severe acute respiratory syndrome coronavirus 2
  REGION 1..10: note = Table A: HLA-B*39:06H
TRLQSLENVA

SEQ ID NO: 5139 - protein, 10 aa, Severe acute respiratory syndrome coronavirus 2
  REGION 1..10: note = Table A: HLA-B*44:05H HLA-A*02:11H HLA-A*30:02H HLA-A*02:04H HLA-B*38:02H HLA-A*32:01M HLA-B*15:01M HLA-B*15:03H HLA-B*57:03M HLA-B*13:01M
RLQSLENVAF

SEQ ID NO: 5140 - protein, 10 aa, Severe acute respiratory syndrome coronavirus 2
  REGION 1..10: note = Table A: HLA-B*38:02H
SLENVAFNVV

SEQ ID NO: 5141 - protein, 10 aa, Severe acute respiratory syndrome coronavirus 2
  REGION 1..10: note = Table A: HLA-A*33:03H HLA-A*26:03H HLA-B*27:02H HLA-A*68:01M HLA-A*34:02M
ENVAFNVVNK

SEQ ID NO: 5142 - protein, 10 aa, Severe acute respiratory syndrome coronavirus 2
  REGION 1..10: note = Table A: HLA-A*68:01H
NVAFNVVNKG

SEQ ID NO: 5143 - protein, 10 aa, Severe acute respiratory syndrome coronavirus 2
  REGION 1..10: note = Table A: HLA-C*14:03H HLA-A*24:07H
AFNVVNKGHF

SEQ ID NO: 5144 - protein, 10 aa, Severe acute respiratory syndrome coronavirus 2
  REGION 1..10: note = Table A: HLA-C*08:03H HLA-B*38:02M HLA-B*39:06H HLA-B*39:01H HLA-B*15:10M
GHFDGQQGEV

SEQ ID NO: 5145 - protein, 10 aa, Severe acute respiratory syndrome coronavirus 2
  REGION 1..10: note = Table A: HLA-B*13:01H HLA-B*13:02M
GQQGEVPVSI

SEQ ID NO: 5146 - protein, 10 aa, Severe acute respiratory syndrome coronavirus 2
  REGION 1..10: note = Table A: HLA-B*56:01M HLA-B*55:02M HLA-C*15:05M HLA-B*55:01H HLA-B*51:01M HLA-B*54:01H HLA-B*07:05H
VPVSIINNTV

SEQ ID NO: 5147 - protein, 10 aa, Severe acute respiratory syndrome coronavirus 2
  REGION 1..10: note = Table A: HLA-A*11:303M HLA-A*03:01M HLA-A*03:02H HLA-A*11:01H HLA-A*11:02H HLA-A*68:01H HLA-A*34:02H HLA-C*07:27M
SIINNTVYTK

SEQ ID NO: 5148 - protein, 10 aa, Severe acute respiratory syndrome coronavirus 2
  REGION 1..10: note = Table A: HLA-A*68:02H
NTVYTKVDGV

SEQ ID NO: 5149 - protein, 10 aa, Severe acute respiratory syndrome coronavirus 2
  REGION 1..10: note = Table A: HLA-B*48:01H HLA-B*38:01H HLA-B*38:02H HLA-B*39:01H
TKVDGVDVEL

SEQ ID NO: 5150 - protein, 10 aa, Severe acute respiratory syndrome coronavirus 2
  REGION 1..10: note = Table A: HLA-A*36:01H HLA-C*04:03H HLA-A*02:07H HLA-B*57:03M HLA-B*13:01H
KVDGVDVELF

SEQ ID NO: 5151 - protein, 10 aa, Severe acute respiratory syndrome coronavirus 2
  REGION 1..10: note = Table A: HLA-A*36:01H
GVDVELFENK

SEQ ID NO: 5152 - protein, 10 aa, Severe acute respiratory syndrome coronavirus 2
  REGION 1..10: note = Table A: HLA-B*44:05H HLA-B*40:01M HLA-B*40:02H HLA-B*41:02H HLA-B*49:01H
VELFENKTTL

SEQ ID NO: 5153 - protein, 10 aa, Severe acute respiratory syndrome coronavirus 2
  REGION 1..10: note = Table A: HLA-B*58:01M HLA-B*58:02M HLA-C*16:01H HLA-A*36:01H HLA-B*57:01M HLA-C*15:05H HLA-A*32:01H HLA-B*57:03H
KTTLPVNVAF

SEQ ID NO: 5154 - protein, 10 aa, Severe acute respiratory syndrome coronavirus 2
  REGION 1..10: note = Table A: HLA-B*53:01H HLA-B*35:01H HLA-B*35:07H
LPVNVAFELW

SEQ ID NO: 5155 - protein, 10 aa, Severe acute respiratory syndrome coronavirus 2
  REGION 1..10: note = Table A: HLA-A*36:01H HLA-A*30:02H HLA-B*35:01H
IAANTVIWDY

SEQ ID NO: 5156 - protein, 10 aa, Severe acute respiratory syndrome coronavirus 2
  REGION 1..10: note = Table A: HLA-B*44:05H HLA-C*15:05H HLA-B*37:01H HLA-B*38:02H HLA-B*40:02H HLA-B*41:02H HLA-B*49:01H
RDAPAHISTI

SEQ ID NO: 5157 - protein, 10 aa, Severe acute respiratory syndrome coronavirus 2
  REGION 1..10: note = Table A: HLA-B*56:01M HLA-B*55:02H HLA-A*68:02H HLA-C*15:05M HLA-B*55:01H HLA-B*54:01H HLA-B*07:02H HLA-B*07:04H HLA-B*07:05H
APAHISTIGV

SEQ ID NO: 5158 - protein, 10 aa, Severe acute respiratory syndrome coronavirus 2
  REGION 1..10: note = Table A: HLA-A*03:01H HLA-A*03:02H HLA-A*11:01H HLA-A*11:02H
GVCSMTDIAK

SEQ ID NO: 5159 - protein, 10 aa, Severe acute respiratory syndrome coronavirus 2
  REGION 1..10: note = Table A: HLA-C*15:05H
KPTETICAPL

SEQ ID NO: 5160 - protein, 10 aa, Severe acute respiratory syndrome coronavirus 2
  REGION 1..10: note = Table A: HLA-A*25:01M HLA-A*26:01H HLA-A*26:02H HLA-A*26:03H
ETICAPLTVF

SEQ ID NO: 5161 - protein, 10 aa, Severe acute respiratory syndrome coronavirus 2
  REGION 1..10: note = Table A: HLA-C*04:03H
FFDGRVDGQV

SEQ ID NO: 5162 - protein, 10 aa, Severe acute respiratory syndrome coronavirus 2
  REGION 1..10: note = Table A: HLA-B*27:05M HLA-B*27:02H HLA-B*38:01H HLA-B*38:02M HLA-B*39:01M
GRVDGQVDLF

SEQ ID NO: 5163 - protein, 10 aa, Severe acute respiratory syndrome coronavirus 2
  REGION 1..10: note = Table A: HLA-A*74:01H HLA-A*36:01H
RVDGQVDLFR

SEQ ID NO: 5164 - protein, 10 aa, Severe acute respiratory syndrome coronavirus 2
  REGION 1..10: note = Table A: HLA-A*74:01H
GQVDLFRNAR

SEQ ID NO: 5165 - protein, 10 aa, Severe acute respiratory syndrome coronavirus 2
  REGION 1..10: note = Table A: HLA-B*27:05H HLA-B*27:02H HLA-B*39:01H
ARNGVLITEG

SEQ ID NO: 5166 - protein, 10 aa, Severe acute respiratory syndrome coronavirus 2
  REGION 1..10: note = Table A: HLA-A*03:01H HLA-A*03:02H HLA-A*11:01H
GVLITEGSVK

SEQ ID NO: 5167 - protein, 10 aa, Severe acute respiratory syndrome coronavirus 2
  REGION 1..10: note = Table A: HLA-C*08:03H
GSVKGLQPSV

SEQ ID NO: 5168 - protein, 10 aa, Severe acute respiratory syndrome coronavirus 2
  REGION 1..10: note = Table A: HLA-A*03:01H HLA-A*03:02H HLA-A*34:02H
KGLQPSVGPK

SEQ ID NO: 5169 - protein, 10 aa, Severe acute respiratory syndrome coronavirus 2
  REGION 1..10: note = Table A: HLA-A*02:03H
LQPSVGPKQA

SEQ ID NO: 5170 - protein, 10 aa, Severe acute respiratory syndrome coronavirus 2
  REGION 1..10: note = Table A: HLA-C*08:03H
PSVGPKQASL

SEQ ID NO: 5171 - protein, 10 aa, Severe acute respiratory syndrome coronavirus 2
  REGION 1..10: note = Table A: HLA-B*48:01M HLA-A*02:08M HLA-A*02:02H HLA-B*40:02H HLA-B*15:01H HLA-B*57:03H HLA-B*13:01H HLA-B*13:02H
KQASLNGVTL

SEQ ID NO: 5172 - protein, 10 aa, Severe acute respiratory syndrome coronavirus 2
  REGION 1..10: note = Table A: HLA-A*36:01H HLA-B*27:02H HLA-A*68:02H
GVTLIGEAVK

SEQ ID NO: 5173 - protein, 10 aa, Severe acute respiratory syndrome coronavirus 2
  REGION 1..10: note = Table A: HLA-B*44:03H
GEAVKTQFNY

SEQ ID NO: 5174 - protein, 10 aa, Severe acute respiratory syndrome coronavirus 2
  REGION 1..10: note = Table A: HLA-A*36:01H HLA-A*26:01H HLA-A*26:02H HLA-A*26:03H HLA-B*53:01H HLA-A*68:02H HLA-A*34:01H HLA-A*34:02M HLA-B*35:01M HLA-B*35:07H HLA-B*38:02H HLA-A*66:01H
EAVKTQFNYY

SEQ ID NO: 5175 - protein, 10 aa, Severe acute respiratory syndrome coronavirus 2
  REGION 1..10: note = Table A: HLA-A*74:01H HLA-A*03:01H HLA-A*11:01H HLA-A*11:02H HLA-A*30:01M HLA-A*30:02H HLA-A*34:02H
AVKTQFNYYK

SEQ ID NO: 5176 - protein, 10 aa, Severe acute respiratory syndrome coronavirus 2
  REGION 1..10: note = Table A: HLA-B*48:01M HLA-B*38:02H HLA-B*15:03H
KKVDGVVQQL

SEQ ID NO: 5177 - protein, 10 aa, Severe acute respiratory syndrome coronavirus 2
  REGION 1..10: note = Table A: HLA-A*29:01H HLA-B*27:02H HLA-A*30:02H HLA-B*35:01H HLA-B*15:01H HLA-B*07:05H
GVVQQLPETY

SEQ ID NO: 5178 - protein, 10 aa, Severe acute respiratory syndrome coronavirus 2
  REGION 1..10: note = Table A: HLA-A*26:03H HLA-A*68:02M HLA-A*34:01M HLA-A*34:02M HLA-A*66:01M
ETYFTQSRNL

SEQ ID NO: 5179 - protein, 10 aa, Severe acute respiratory syndrome coronavirus 2
  REGION 1..10: note = Table A: HLA-C*16:01H HLA-A*25:01H HLA-A*33:03H HLA-B*46:01H HLA-A*26:03H HLA-C*03:02H HLA-B*57:03H HLA-C*02:02H
FTQSRNLQEF

SEQ ID NO: 5180 - protein, 10 aa, Severe acute respiratory syndrome coronavirus 2
  REGION 1..10: note = Table A: HLA-B*07:04H
KPRSQMEIDF

SEQ ID NO: 5181 - protein, 10 aa, Severe acute respiratory syndrome coronavirus 2
  REGION 1..10: note = Table A: HLA-A*02:11H HLA-A*02:04H HLA-A*02:05H HLA-A*02:06M HLA-A*02:01H HLA-C*08:01H HLA-B*38:01H HLA-B*38:02H HLA-B*13:01H HLA-B*13:02H
SQMEIDFLEL

SEQ ID NO: 5182 - protein, 10 aa, Severe acute respiratory syndrome coronavirus 2
  REGION 1..10: note = Table A: HLA-B*18:01H
MEIDFLELAM

SEQ ID NO: 5183 - protein, 10 aa, Severe acute respiratory syndrome coronavirus 2
  REGION 1..10: note = Table A: HLA-A*26:03H HLA-A*34:01H
ELAMDEFIER

SEQ ID NO: 5184 - protein, 10 aa, Severe acute respiratory syndrome coronavirus 2
  REGION 1..10: note = Table A: HLA-A*36:01H HLA-B*53:01H HLA-C*03:02H HLA-B*35:01H HLA-B*35:08H HLA-B*35:07H
LAMDEFIERY

SEQ ID NO: 5185 - protein, 10 aa, Severe acute respiratory syndrome coronavirus 2
  REGION 1..10: note = Table A: HLA-B*27:05H HLA-B*38:02H
ERYKLEGYAF

SEQ ID NO: 5186 - protein, 10 aa, Severe acute respiratory syndrome coronavirus 2
  REGION 1..10: note = Table A: HLA-B*13:01H
KLEGYAFEHI

SEQ ID NO: 5187 - protein, 10 aa, Severe acute respiratory syndrome coronavirus 2
  REGION 1..10: note = Table A: HLA-B*15:02H
EGYAFEHIVY

SEQ ID NO: 5188 - protein, 10 aa, Severe acute respiratory syndrome coronavirus 2
  REGION 1..10: note = Table A: HLA-A*29:02H HLA-C*04:03H
AFEHIVYGDF

SEQ ID NO: 5189 - protein, 10 aa, Severe acute respiratory syndrome coronavirus 2
  REGION 1..10: note = Table A: HLA-B*39:01H
EHIVYGDFSH

SEQ ID NO: 5190 - protein, 10 aa, Severe acute respiratory syndrome coronavirus 2
  REGION 1..10: note = Table A: HLA-C*14:02M HLA-C*14:03M HLA-C*07:02H HLA-A*24:02M HLA-A*24:07H HLA-A*23:01H
VYGDFSHSQL

SEQ ID NO: 5191 - protein, 10 aa, Severe acute respiratory syndrome coronavirus 2
  REGION 1..10: note = Table A: HLA-B*38:01M HLA-B*38:02H HLA-B*39:01H HLA-B*15:10M
SHSQLGGLHL

SEQ ID NO: 5192 - protein, 10 aa, Severe acute respiratory syndrome coronavirus 2
  REGION 1..10: note = Table A: HLA-B*58:02H
HSQLGGLHLL

SEQ ID NO: 5193 - protein, 10 aa, Severe acute respiratory syndrome coronavirus 2
  REGION 1..10: note = Table A: HLA-B*38:02H HLA-B*13:02M
SQLGGLHLLI

SEQ ID NO: 5194 - protein, 10 aa, Severe acute respiratory syndrome coronavirus 2
  REGION 1..10: note = Table A: HLA-A*03:01H
GLHLLIGLAK

SEQ ID NO: 5195 - protein, 10 aa, Severe acute respiratory syndrome coronavirus 2
  REGION 1..10: note = Table A: HLA-B*27:05H HLA-C*07:01H
KRFKESPFEL

SEQ ID NO: 5196 - protein, 10 aa, Severe acute respiratory syndrome coronavirus 2
  REGION 1..10: note = Table A: HLA-B*44:05H HLA-B*44:03H
KESPFELEDF

SEQ ID NO: 5197 - protein, 10 aa, Severe acute respiratory syndrome coronavirus 2
  REGION 1..10: note = Table A: HLA-B*53:01M HLA-C*15:05H HLA-B*35:01M HLA-B*35:08H HLA-B*35:07M HLA-B*38:02H HLA-B*07:04H HLA-B*07:05H HLA-B*15:11M
IPMDSTVKNY

SEQ ID NO: 5198 - protein, 10 aa, Severe acute respiratory syndrome coronavirus 2
  REGION 1..10: note = Table A: HLA-B*55:01H HLA-A*02:03H
TVKNYFITDA

SEQ ID NO: 5199 - protein, 10 aa, Severe acute respiratory syndrome coronavirus 2
  REGION 1..10: note = Table A: HLA-B*27:02H
YFITDAQTGS

SEQ ID NO: 5200 - protein, 10 aa, Severe acute respiratory syndrome coronavirus 2
  REGION 1..10: note = Table A: HLA-A*03:01M HLA-A*03:02M HLA-A*11:01H HLA-A*36:01M HLA-A*34:02H
ITDAQTGSSK

SEQ ID NO: 5201 - protein, 10 aa, Severe acute respiratory syndrome coronavirus 2
  REGION 1..10: note = Table A: HLA-A*26:01H HLA-A*26:02M HLA-B*35:01H
SVIDLLLDDF

SEQ ID NO: 5202 - protein, 10 aa, Severe acute respiratory syndrome coronavirus 2
  REGION 1..10: note = Table A: HLA-A*36:01H
LLDDFVEIIK

SEQ ID NO: 5203 - protein, 10 aa, Severe acute respiratory syndrome coronavirus 2
  REGION 1..10: note = Table A: HLA-A*68:02H
FVEIIKSQDL

SEQ ID NO: 5204 - protein, 10 aa, Severe acute respiratory syndrome coronavirus 2
  REGION 1..10: note = Table A: HLA-A*68:02H
EIIKSQDLSV

SEQ ID NO: 5205 - protein, 10 aa, Severe acute respiratory syndrome coronavirus 2
  REGION 1..10: note = Table A: HLA-A*02:03H
IIKSQDLSVV

SEQ ID NO: 5206 - protein, 10 aa, Severe acute respiratory syndrome coronavirus 2
  REGION 1..10: note = Table A: HLA-A*11:303M HLA-A*74:01H HLA-A*03:01M HLA-A*03:02H HLA-A*11:01H HLA-A*11:02H HLA-A*36:01H HLA-A*30:01H HLA-A*30:02H HLA-A*68:01H HLA-C*07:27M HLA-A*31:01H HLA-B*57:03H
KSQDLSVVSK

SEQ ID NO: 5207 - protein, 10 aa, Severe acute respiratory syndrome coronavirus 2
  REGION 1..10: note = Table A: HLA-B*38:02H
SQDLSVVSKV

SEQ ID NO: 5208 - protein, 10 aa, Severe acute respiratory syndrome coronavirus 2
  REGION 1..10: note = Table A: HLA-A*68:01H HLA-A*34:02H
DLSVVSKVVK

SEQ ID NO: 5209 - protein, 10 aa, Severe acute respiratory syndrome coronavirus 2
  REGION 1..10: note = Table A: HLA-A*68:02H HLA-B*57:03M HLA-B*13:02H
VVSKVVKVTI

SEQ ID NO: 5210 - protein, 10 aa, Severe acute respiratory syndrome coronavirus 2
  REGION 1..10: note = Table A: HLA-B*15:03H
SKVVKVTIDY

SEQ ID NO: 5211 - protein, 10 aa, Severe acute respiratory syndrome coronavirus 2
  REGION 1..10: note = Table A: HLA-A*02:08M
KVVKVTIDYT

SEQ ID NO: 5212 - protein, 10 aa, Severe acute respiratory syndrome coronavirus 2
  REGION 1..10: note = Table A: HLA-B*57:01H HLA-B*46:01H HLA-B*57:03M
VTIDYTEISF

SEQ ID NO: 5213 - protein, 10 aa, Severe acute respiratory syndrome coronavirus 2
  REGION 1..10: note = Table A: HLA-C*04:03H
TIDYTEISFM

SEQ ID NO: 5214 - protein, 10 aa, Severe acute respiratory syndrome coronavirus 2
  REGION 1..10: note = Table A: HLA-A*24:02H HLA-A*24:07M HLA-A*23:01H
DYTEISFMLW

SEQ ID NO: 5215 - protein, 10 aa, Severe acute respiratory syndrome coronavirus 2
  REGION 1..10: note = Table A: HLA-A*25:01H HLA-B*46:01H HLA-C*12:02H
WCKDGHVETF

SEQ ID NO: 5216 - protein, 10 aa, Severe acute respiratory syndrome coronavirus 2
  REGION 1..10: note = Table A: HLA-B*38:01H HLA-B*38:02M HLA-B*15:10H
GHVETFYPKL

SEQ ID NO: 5217 - protein, 10 aa, Severe acute respiratory syndrome coronavirus 2
  REGION 1..10: note = Table A: HLA-A*26:03H HLA-A*68:02H HLA-A*34:02H
ETFYPKLQSS

SEQ ID NO: 5218 - protein, 10 aa, Severe acute respiratory syndrome coronavirus 2
  REGION 1..10: note = Table A: HLA-B*53:01M HLA-B*35:07H HLA-B*07:04H
YPKLQSSQAW

SEQ ID NO: 5219 - protein, 10 aa, Severe acute respiratory syndrome coronavirus 2
  REGION 1..10: note = Table A: HLA-B*38:02H HLA-B*15:01M HLA-B*15:02H HLA-B*39:01H
SQAWQPGVAM

SEQ ID NO: 5220 - protein, 10 aa, Severe acute respiratory syndrome coronavirus 2
  REGION 1..10: note = Table A: HLA-B*35:01H
QPGVAMPNLY

SEQ ID NO: 5221 - protein, 10 aa, Severe acute respiratory syndrome coronavirus 2
  REGION 1..10: note = Table A: HLA-A*74:01H
AMPNLYKMQR

SEQ ID NO: 5222 - protein, 10 aa, Severe acute respiratory syndrome coronavirus 2
  REGION 1..10: note = Table A: HLA-A*02:11M HLA-A*68:02H HLA-A*02:05H HLA-A*02:06H HLA-A*02:07M HLA-A*02:01H HLA-A*02:02M HLA-A*02:03H HLA-B*13:02H
TLPKGIMMNV

SEQ ID NO: 5223 - protein, 10 aa, Severe acute respiratory syndrome coronavirus 2
  REGION 1..10: note = Table A: HLA-B*56:01M HLA-B*55:02M HLA-B*55:01M HLA-B*54:01H
LPKGIMMNVA

SEQ ID NO: 5224 - protein, 10 aa, Severe acute respiratory syndrome coronavirus 2
  REGION 1..10: note = Table A: HLA-A*30:02H
KGIMMNVAKY

SEQ ID NO: 5225 - protein, 10 aa, Severe acute respiratory syndrome coronavirus 2
  REGION 1..10: note = Table A: HLA-B*08:01H HLA-A*02:02H
MMNVAKYTQL

SEQ ID NO: 5226 - protein, 10 aa, Severe acute respiratory syndrome coronavirus 2
  REGION 1..10: note = Table A: HLA-B*38:02H
TQLCQYLNTL

SEQ ID NO: 5227 - protein, 10 aa, Severe acute respiratory syndrome coronavirus 2
  REGION 1..10: note = Table A: HLA-B*42:01H HLA-B*08:01M HLA-B*53:01H HLA-C*15:05H HLA-B*14:02H HLA-B*51:01H HLA-B*35:07H HLA-B*07:02H HLA-B*07:04M
VPYNMRVIHF

SEQ ID NO: 5228 - protein, 10 aa, Severe acute respiratory syndrome coronavirus 2
  REGION 1..10: note = Table A: HLA-A*03:01H HLA-A*03:02H HLA-A*36:01H HLA-A*30:02H
VIHFGAGSDK

SEQ ID NO: 5229 - protein, 10 aa, Severe acute respiratory syndrome coronavirus 2
  REGION 1..10: note = Table A: HLA-B*38:02H
IHFGAGSDKG

SEQ ID NO: 5230 - protein, 10 aa, Severe acute respiratory syndrome coronavirus 2
  REGION 1..10: note = Table A: HLA-C*08:03H
KGVAPGTAVL

SEQ ID NO: 5231 - protein, 10 aa, Severe acute respiratory syndrome coronavirus 2
  REGION 1..10: note = Table A: HLA-A*11:303H HLA-A*74:01M HLA-A*03:01H HLA-A*03:02M HLA-A*11:01M HLA-A*11:02M HLA-A*26:03M HLA-B*27:02H HLA-A*68:01H HLA-A*68:02H HLA-A*02:05H HLA-A*02:08H HLA-A*34:01M HLA-A*34:02M HLA-C*07:27H
  REGION 1..10: note = CONT. FROM ABOVE: HLA-A*31:01H HLA-A*66:01M
GVAPGTAVLR

SEQ ID NO: 5232 - protein, 10 aa, Severe acute respiratory syndrome coronavirus 2
  REGION 1..10: note = Table A: HLA-B*07:04H
APGTAVLRQW

SEQ ID NO: 5233 - protein, 10 aa, Severe acute respiratory syndrome coronavirus 2
  REGION 1..10: note = Table A: HLA-B*48:01H HLA-A*74:01H HLA-A*02:11H HLA-B*15:03H HLA-B*13:01M HLA-B*13:02H
RQWLPTGTLL

SEQ ID NO: 5234 - protein, 10 aa, Severe acute respiratory syndrome coronavirus 2
  REGION 1..10: note = Table A: HLA-A*68:02H HLA-A*02:05H HLA-B*38:02H
FVSDADSTLI

SEQ ID NO: 5235 - protein, 10 aa, Severe acute respiratory syndrome coronavirus 2
  REGION 1..10: note = Table A: HLA-A*34:02H
DCATVHTANK

SEQ ID NO: 5236 - protein, 10 aa, Severe acute respiratory syndrome coronavirus 2
  REGION 1..10: note = Table A: HLA-B*38:02H
VHTANKWDLI

SEQ ID NO: 5237 - protein, 10 aa, Severe acute respiratory syndrome coronavirus 2
  REGION 1..10: note = Table A: HLA-A*36:01M
KWDLIISDMY

SEQ ID NO: 5238 - protein, 10 aa, Severe acute respiratory syndrome coronavirus 2
  REGION 1..10: note = Table A: HLA-A*36:01H HLA-B*27:02H
LIISDMYDPK

SEQ ID NO: 5239 - protein, 10 aa, Severe acute respiratory syndrome coronavirus 2
  REGION 1..10: note = Table A: HLA-A*36:01H
ISDMYDPKTK

SEQ ID NO: 5240 - protein, 10 aa, Severe acute respiratory syndrome coronavirus 2
  REGION 1..10: note = Table A: HLA-A*02:11M HLA-A*68:02H HLA-A*02:02H HLA-A*02:03H HLA-B*38:02H
DMYDPKTKNV

SEQ ID NO: 5241 - protein, 10 aa, Severe acute respiratory syndrome coronavirus 2
  REGION 1..10: note = Table A: HLA-A*68:02H
DSKEGFFTYI

SEQ ID NO: 5242 - protein, 10 aa, Severe acute respiratory syndrome coronavirus 2
  REGION 1..10: note = Table A: HLA-A*68:02H HLA-A*02:02H
YICGFIQQKL

SEQ ID NO: 5243 - protein, 10 aa, Severe acute respiratory syndrome coronavirus 2
  REGION 1..10: note = Table A: HLA-B*13:02H
KLALGGSVAI

SEQ ID NO: 5244 - protein, 10 aa, Severe acute respiratory syndrome coronavirus 2
  REGION 1..10: note = Table A: HLA-A*34:02H
LALGGSVAIK

SEQ ID NO: 5245 - protein, 10 aa, Severe acute respiratory syndrome coronavirus 2
  REGION 1..10: note = Table A: HLA-B*13:02H
ALGGSVAIKI

SEQ ID NO: 5246 - protein, 10 aa, Severe acute respiratory syndrome coronavirus 2
  REGION 1..10: note = Table A: HLA-B*58:01H HLA-B*58:02H HLA-B*57:01H HLA-A*25:01H HLA-B*44:03H HLA-B*53:01M HLA-A*23:01H HLA-B*57:03H HLA-B*13:01H
VAIKITEHSW

SEQ ID NO: 5247 - protein, 10 aa, Severe acute respiratory syndrome coronavirus 2
  REGION 1..10: note = Table A: HLA-B*44:03H HLA-B*18:01H
TEHSWNADLY

SEQ ID NO: 5248 - protein, 10 aa, Severe acute respiratory syndrome coronavirus 2
  REGION 1..10: note = Table A: HLA-B*58:02H HLA-A*68:02H HLA-B*57:03H
HSWNADLYKL

SEQ ID NO: 5249 - protein, 10 aa, Severe acute respiratory syndrome coronavirus 2
  REGION 1..10: note = Table A: HLA-A*68:02H HLA-A*02:08H
WTAFVTNVNA

SEQ ID NO: 5250 - protein, 10 aa, Severe acute respiratory syndrome coronavirus 2
  REGION 1..10: note = Table A: HLA-B*35:01H HLA-B*15:02H
NVNASSSEAF

SEQ ID NO: 5251 - protein, 10 aa, Severe acute respiratory syndrome coronavirus 2
  REGION 1..10: note = Table A: HLA-A*68:02H
SSSEAFLIGC

SEQ ID NO: 5252 - protein, 10 aa, Severe acute respiratory syndrome coronavirus 2
  REGION 1..10: note = Table A: HLA-B*44:02M HLA-B*44:05H HLA-C*16:04H HLA-B*44:03H HLA-B*18:01M HLA-B*07:05M
SEAFLIGCNY

SEQ ID NO: 5253 - protein, 10 aa, Severe acute respiratory syndrome coronavirus 2
  REGION 1..10: note = Table A: HLA-A*68:01H HLA-A*68:02M HLA-A*34:01H HLA-A*66:01H
EAFLIGCNYL

SEQ ID NO: 5254 - protein, 10 aa, Severe acute respiratory syndrome coronavirus 2
  REGION 1..10: note = Table A: HLA-B*15:03M
GKPREQIDGY

SEQ ID NO: 5255 - protein, 10 aa, Severe acute respiratory syndrome coronavirus 2
  REGION 1..10: note = Table A: HLA-A*26:03H HLA-A*68:02H HLA-A*02:05H HLA-A*02:06H HLA-A*02:08H HLA-B*38:02H
EQIDGYVMHA

SEQ ID NO: 5256 - protein, 10 aa, Severe acute respiratory syndrome coronavirus 2
  REGION 1..10: note = Table A: HLA-B*51:01M
DGYVMHANYI

SEQ ID NO: 5257 - protein, 10 aa, Severe acute respiratory syndrome coronavirus 2
  REGION 1..10: note = Table A: HLA-A*25:01H
YVMHANYIFW

SEQ ID NO: 5258 - protein, 10 aa, Severe acute respiratory syndrome coronavirus 2
  REGION 1..10: note = Table A: HLA-A*74:01H
VMHANYIFWR

SEQ ID NO: 5259 - protein, 10 aa, Severe acute respiratory syndrome coronavirus 2
  REGION 1..10: note = Table A: HLA-C*14:03H
FWRNTNPIQL

SEQ ID NO: 5260 - protein, 10 aa, Severe acute respiratory syndrome coronavirus 2
  REGION 1..10: note = Table A: HLA-A*25:01H HLA-B*46:01H HLA-A*26:01H HLA-A*29:02H HLA-A*30:02M HLA-A*34:02H HLA-B*35:01H HLA-B*38:02H HLA-B*15:01H HLA-B*07:05H
NTNPIQLSSY

SEQ ID NO: 5261 - protein, 10 aa, Severe acute respiratory syndrome coronavirus 2
  REGION 1..10: note = Table A: HLA-B*35:03M HLA-C*15:05M HLA-B*35:01H HLA-B*07:05M
NPIQLSSYSL

SEQ ID NO: 5262 - protein, 10 aa, Severe acute respiratory syndrome coronavirus 2
  REGION 1..10: note = Table A: HLA-A*03:02H HLA-A*11:01M HLA-A*11:02M HLA-A*34:02H HLA-C*07:27H
SSYSLFDMSK

SEQ ID NO: 5263 - protein, 10 aa, Severe acute respiratory syndrome coronavirus 2
  REGION 1..10: note = Table A: HLA-A*24:02H HLA-A*24:07H
SYSLFDMSKF

SEQ ID NO: 5264 - protein, 10 aa, Severe acute respiratory syndrome coronavirus 2
  REGION 1..10: note = Table A: HLA-A*74:01H HLA-A*02:11M HLA-A*68:02H HLA-A*02:04M HLA-A*02:07H HLA-A*02:01H HLA-A*02:02H HLA-A*02:03H HLA-C*08:03H
SLFDMSKFPL

SEQ ID NO: 5265 - protein, 10 aa, Severe acute respiratory syndrome coronavirus 2
  REGION 1..10: note = Table A: HLA-A*36:01H
LFDMSKFPLK

SEQ ID NO: 5266 - protein, 10 aa, Severe acute respiratory syndrome coronavirus 2
  REGION 1..10: note = Table A: HLA-A*33:01M HLA-A*33:03M HLA-A*26:03H HLA-A*34:01M HLA-A*34:02H HLA-A*66:01M
DMSKFPLKLR

SEQ ID NO: 5267 - protein, 10 aa, Severe acute respiratory syndrome coronavirus 2
  REGION 1..10: note = Table A: HLA-B*55:02H HLA-C*15:05H HLA-B*54:01H HLA-B*07:04H
FPLKLRGTAV

SEQ ID NO: 5268 - protein, 10 aa, Severe acute respiratory syndrome coronavirus 2
  REGION 1..10: note = Table A: HLA-B*07:04H
KLRGTAVMSL

SEQ ID NO: 5269 - protein, 10 aa, Severe acute respiratory syndrome coronavirus 2
  REGION 1..10: note = Table A: HLA-A*26:02H HLA-A*02:02M HLA-A*02:03M HLA-B*38:02M HLA-B*15:02H
SLKEGQINDM

SEQ ID NO: 5270 - protein, 10 aa, Severe acute respiratory syndrome coronavirus 2
  REGION 1..10: note = Table A: HLA-B*44:05H HLA-B*40:01M HLA-B*40:02M HLA-B*40:06H HLA-B*41:02H
KEGQINDMIL

SEQ ID NO: 5271 - protein, 10 aa, Severe acute respiratory syndrome coronavirus 2
  REGION 1..10: note = Table A: HLA-B*48:01H HLA-A*02:04H HLA-A*02:05H HLA-A*02:06H HLA-B*15:01H HLA-B*13:01H HLA-B*13:02M
GQINDMILSL

SEQ ID NO: 5272 - protein, 10 aa, Severe acute respiratory syndrome coronavirus 2
  REGION 1..10: note = Table A: HLA-A*02:04H
QINDMILSLL

SEQ ID NO: 5273 - protein, 10 aa, Severe acute respiratory syndrome coronavirus 2
  REGION 1..10: note = Table A: HLA-B*07:04H
IIRENNRVVI

SEQ ID NO: 5274 - protein, 10 aa, Severe acute respiratory syndrome coronavirus 2
  REGION 1..10: note = Table A: HLA-B*14:02H HLA-B*38:02H HLA-B*39:01M
NRVVISSDVL

SEQ ID NO: 5275 - protein, 11 aa, Severe acute respiratory syndrome coronavirus 2
  REGION 1..11: note = Table A: HLA-A*02:11H HLA-A*68:02H HLA-A*02:07H
LVPGFNEKTHV

SEQ ID NO: 5276 - protein, 11 aa, Severe acute respiratory syndrome coronavirus 2
  REGION 1..11: note = Table A: HLA-B*57:03M
KTHVQLSLPVL

SEQ ID NO: 5277 - protein, 11 aa, Severe acute respiratory syndrome coronavirus 2
  REGION 1..11: note = Table A: HLA-B*13:01H
RGFGDSVEEVL

SEQ ID NO: 5278 - protein, 11 aa, Severe acute respiratory syndrome coronavirus 2
  REGION 1..11: note = Table A: HLA-B*27:02H HLA-A*68:01H
DSVEEVLSEAR

SEQ ID NO: 5279 - protein, 11 aa, Severe acute respiratory syndrome coronavirus 2
  REGION 1..11: note = Table A: HLA-B*44:05H HLA-B*44:03H
EEVLSEARQHL

SEQ ID NO: 5280 - protein, 11 aa, Severe acute respiratory syndrome coronavirus 2
  REGION 1..11: note = Table A: HLA-A*33:03H HLA-A*34:02M
EVLSEARQHLK

SEQ ID NO: 5281 - protein, 11 aa, Severe acute respiratory syndrome coronavirus 2
  REGION 1..11: note = Table A: HLA-B*44:05H HLA-B*40:01H HLA-B*40:02M HLA-B*40:06H HLA-B*41:02H
VEVEKGVLPQL

SEQ ID NO: 5282 - protein, 11 aa, Severe acute respiratory syndrome coronavirus 2
  REGION 1..11: note = Table A: HLA-A*02:04H HLA-A*02:06H
GVLPQLEQPYV

SEQ ID NO: 5283 - protein, 11 aa, Severe acute respiratory syndrome coronavirus 2
  REGION 1..11: note = Table A: HLA-A*24:07M
VLPQLEQPYVF

SEQ ID NO: 5284 - protein, 11 aa, Severe acute respiratory syndrome coronavirus 2
  REGION 1..11: note = Table A: HLA-A*74:01H
QLEQPYVFIKR

SEQ ID NO: 5285 - protein, 11 aa, Severe acute respiratory syndrome coronavirus 2
  REGION 1..11: note = Table A: HLA-B*56:01H HLA-B*55:02H HLA-B*55:01H HLA-B*54:01H
QPYVFIKRSDA

SEQ ID NO: 5286 - protein, 11 aa, Severe acute respiratory syndrome coronavirus 2
  REGION 1..11: note = Table A: HLA-C*04:03H HLA-C*08:01H
TAPHGHVMVEL

SEQ ID NO: 5287 - protein, 11 aa, Severe acute respiratory syndrome coronavirus 2
  REGION 1..11: note = Table A: HLA-B*38:02H
GHVMVELVAEL

SEQ ID NO: 5288 - protein, 11 aa, Severe acute respiratory syndrome coronavirus 2
  REGION 1..11: note = Table A: HLA-A*26:01H HLA-B*35:01H HLA-B*38:02H
ELVAELEGIQY

SEQ ID NO: 5289 - protein, 11 aa, Severe acute respiratory syndrome coronavirus 2
  REGION 1..11: note = Table A: HLA-A*68:02H
LVAELEGIQYG

SEQ ID NO: 5290 - protein, 11 aa, Severe acute respiratory syndrome coronavirus 2
  REGION 1..11: note = Table A: HLA-A*02:01H HLA-A*02:02H
VLVPHVGEIPV

SEQ ID NO: 5291 - protein, 11 aa, Severe acute respiratory syndrome coronavirus 2
  REGION 1..11: note = Table A: HLA-A*02:11H HLA-A*02:05H HLA-A*02:07H HLA-A*02:08H
LVPHVGEIPVA

SEQ ID NO: 5292 - protein, 11 aa, Severe acute respiratory syndrome coronavirus 2
  REGION 1..11: note = Table A: HLA-B*56:01M HLA-B*53:01H HLA-B*55:02M HLA-C*15:05H HLA-B*35:01H HLA-B*35:08M HLA-B*35:07M HLA-B*38:02H HLA-B*54:01M HLA-B*15:02H HLA-B*07:05H HLA-B*15:11H
VPHVGEIPVAY

SEQ ID NO: 5293 - protein, 11 aa, Severe acute respiratory syndrome coronavirus 2
  REGION 1..11: note = Table A: HLA-B*40:02H
GEIPVAYRKVL

SEQ ID NO: 5294 - protein, 11 aa, Severe acute respiratory syndrome coronavirus 2
  REGION 1..11: note = Table A: HLA-A*30:02M
NGNKGAGGHSY

SEQ ID NO: 5295 - protein, 11 aa, Severe acute respiratory syndrome coronavirus 2
  REGION 1..11: note = Table A: HLA-B*38:02H
GHSYGADLKSF

SEQ ID NO: 5296 - protein, 11 aa, Severe acute respiratory syndrome coronavirus 2
  REGION 1..11: note = Table A: HLA-B*38:02H
KHSSGVTRELM

SEQ ID NO: 5297 - protein, 11 aa, Severe acute respiratory syndrome coronavirus 2
  REGION 1..11: note = Table A: HLA-A*36:01H HLA-A*25:01H HLA-A*26:01M HLA-A*26:02H HLA-A*26:03H HLA-A*30:02H HLA-B*35:01H HLA-B*38:02H HLA-B*15:02H HLA-B*39:01H
ELMRELNGGAY

SEQ ID NO: 5298 - protein, 11 aa, Severe acute respiratory syndrome coronavirus 2
  REGION 1..11: note = Table A: HLA-A*02:11H
LMRELNGGAYT

SEQ ID NO: 5299 - protein, 11 aa, Severe acute respiratory syndrome coronavirus 2
  REGION 1..11: note = Table A: HLA-B*44:02H HLA-A*36:01H HLA-B*44:03H HLA-A*30:02M
RELNGGAYTRY

SEQ ID NO: 5300 - protein, 11 aa, Severe acute respiratory syndrome coronavirus 2
  REGION 1..11: note = Table A: HLA-B*54:01H
YPLECIKDLLA

SEQ ID NO: 5301 - protein, 11 aa, Severe acute respiratory syndrome coronavirus 2
  REGION 1..11: note = Table A: HLA-A*02:11M HLA-A*02:07H
QLDFIDTKRGV

SEQ ID NO: 5302 - protein, 11 aa, Severe acute respiratory syndrome coronavirus 2
  REGION 1..11: note = Table A: HLA-B*40:06H
REHEHEIAWYT

SEQ ID NO: 5303 - protein, 11 aa, Severe acute respiratory syndrome coronavirus 2
  REGION 1..11: note = Table A: HLA-A*34:02H
EIAWYTERSEK

SEQ ID NO: 5304 - protein, 11 aa, Severe acute respiratory syndrome coronavirus 2
  REGION 1..11: note = Table A: HLA-A*30:02H
AWYTERSEKSY

SEQ ID NO: 5305 - protein, 11 aa, Severe acute respiratory syndrome coronavirus 2
  REGION 1..11: note = Table A: HLA-B*58:02M HLA-A*02:11H HLA-C*15:02H HLA-B*57:03M HLA-B*13:02H
KSYELQTPFEI

SEQ ID NO: 5306 - protein, 11 aa, Severe acute respiratory syndrome coronavirus 2
  REGION 1..11: note = Table A: HLA-B*40:01H HLA-B*40:02H
YELQTPFEIKL

SEQ ID NO: 5307 - protein, 11 aa, Severe acute respiratory syndrome coronavirus 2
  REGION 1..11: note = Table A: HLA-A*34:02H
QTPFEIKLAKK

SEQ ID NO: 5308 - protein, 11 aa, Severe acute respiratory syndrome coronavirus 2
  REGION 1..11: note = Table A: HLA-B*07:04H
TPFEIKLAKKF

SEQ ID NO: 5309 - protein, 11 aa, Severe acute respiratory syndrome coronavirus 2
  REGION 1..11: note = Table A: HLA-A*68:02H
DTFNGECPNFV

SEQ ID NO: 5310 - protein, 11 aa, Severe acute respiratory syndrome coronavirus 2
  REGION 1..11: note = Table A: HLA-A*02:11H HLA-A*02:05H
FVFPLNSIIKT

SEQ ID NO: 5311 - protein, 11 aa, Severe acute respiratory syndrome coronavirus 2
  REGION 1..11: note = Table A: HLA-A*24:07M HLA-A*23:01H
VFPLNSIIKTI

SEQ ID NO: 5312 - protein, 11 aa, Severe acute respiratory syndrome coronavirus 2
  REGION 1..11: note = Table A: HLA-A*30:01H
IIKTIQPRVEK

SEQ ID NO: 5313 - protein, 11 aa, Severe acute respiratory syndrome coronavirus 2
  REGION 1..11: note = Table A: HLA-A*02:11H HLA-A*02:08H HLA-A*02:03H
SVYPVASPNEC

SEQ ID NO: 5314 - protein, 11 aa, Severe acute respiratory syndrome coronavirus 2
  REGION 1..11: note = Table A: HLA-B*49:01H
GETSWQTGDFV

SEQ ID NO: 5315 - protein, 11 aa, Severe acute respiratory syndrome coronavirus 2
  REGION 1..11: note = Table A: HLA-A*36:01H HLA-A*68:01H HLA-A*68:02H HLA-A*34:02M
ETSWQTGDFVK

SEQ ID NO: 5316 - protein, 11 aa, Severe acute respiratory syndrome coronavirus 2
  REGION 1..11: note = Table A: HLA-A*26:01H
LTKEGATTCGY

SEQ ID NO: 5317 - protein, 11 aa, Severe acute respiratory syndrome coronavirus 2
  REGION 1..11: note = Table A: HLA-A*24:02M HLA-A*24:07M HLA-A*23:01M
GYLPQNAVVKI

SEQ ID NO: 5318 - protein, 11 aa, Severe acute respiratory syndrome coronavirus 2
  REGION 1..11: note = Table A: HLA-B*15:02H
YLPQNAVVKIY

SEQ ID NO: 5319 - protein, 11 aa, Severe acute respiratory syndrome coronavirus 2
  REGION 1..11: note = Table A: HLA-B*55:02H
LPQNAVVKIYC

SEQ ID NO: 5320 - protein, 11 aa, Severe acute respiratory syndrome coronavirus 2
  REGION 1..11: note = Table A: HLA-A*68:02H HLA-B*35:03H HLA-B*35:02H HLA-C*08:03H HLA-B*35:12H HLA-B*38:01H HLA-B*38:02H
HNSEVGPEHSL

SEQ ID NO: 5321 - protein, 11 aa, Severe acute respiratory syndrome coronavirus 2
  REGION 1..11: note = Table A: HLA-A*25:01H HLA-A*26:01H HLA-A*26:02H HLA-A*26:03H HLA-A*30:02H HLA-A*34:01M HLA-A*34:02H HLA-B*35:01H HLA-B*38:02H
EVGPEHSLAEY

SEQ ID NO: 5322 - protein, 11 aa, Severe acute respiratory syndrome coronavirus 2
  REGION 1..11: note = Table A: HLA-A*02:02M
SLAEYHNESGL

SEQ ID NO: 5323 - protein, 11 aa, Severe acute respiratory syndrome coronavirus 2
  REGION 1..11: note = Table A: HLA-A*36:01H
LAEYHNESGLK

SEQ ID NO: 5324 - protein, 11 aa, Severe acute respiratory syndrome coronavirus 2
  REGION 1..11: note = Table A: HLA-B*45:01H HLA-B*40:02H HLA-B*49:01H
AEYHNESGLKT

SEQ ID NO: 5325 - protein, 11 aa, Severe acute respiratory syndrome coronavirus 2
  REGION 1..11: note = Table A: HLA-A*33:03H HLA-A*24:02H
EYHNESGLKTI

SEQ ID NO: 5326 - protein, 11 aa, Severe acute respiratory syndrome coronavirus 2
  REGION 1..11: note = Table A: HLA-B*38:01M HLA-B*38:02H HLA-B*39:01M HLA-B*15:10H
YHNESGLKTIL

SEQ ID NO: 5327 - protein, 11 aa, Severe acute respiratory syndrome coronavirus 2
  REGION 1..11: note = Table A: HLA-A*33:01H HLA-A*33:03H HLA-A*68:01H
HNESGLKTILR

SEQ ID NO: 5328 - protein, 11 aa, Severe acute respiratory syndrome coronavirus 2
  REGION 1..11: note = Table A: HLA-B*58:02M
KTILRKGGRTI

SEQ ID NO: 5329 - protein, 11 aa, Severe acute respiratory syndrome coronavirus 2
  REGION 1..11: note = Table A: HLA-B*39:01H
NHTGVVGEGSE

SEQ ID NO: 5330 - protein, 11 aa, Severe acute respiratory syndrome coronavirus 2
  REGION 1..11: note = Table A: HLA-B*40:01H
GEGSEGLNDNL

SEQ ID NO: 5331 - protein, 11 aa, Severe acute respiratory syndrome coronavirus 2
  REGION 1..11: note = Table A: HLA-A*02:11H
NLLEILQKEKV

SEQ ID NO: 5332 - protein, 11 aa, Severe acute respiratory syndrome coronavirus 2
  REGION 1..11: note = Table A: HLA-A*02:11H
ILQKEKVNINI

SEQ ID NO: 5333 - protein, 11 aa, Severe acute respiratory syndrome coronavirus 2
  REGION 1..11: note = Table A: HLA-A*03:02M HLA-A*11:02H HLA-A*36:01H HLA-A*30:02H
KVNINIVGDFK

SEQ ID NO: 5334 - protein, 11 aa, Severe acute respiratory syndrome coronavirus 2
  REGION 1..11: note = Table A: HLA-A*02:11H HLA-A*02:02H
IVGDFKLNEEI

SEQ ID NO: 5335 - protein, 11 aa, Severe acute respiratory syndrome coronavirus 2
  REGION 1..11: note = Table A: HLA-A*02:11H HLA-A*02:04H HLA-A*02:02M
KLNEEIAIILA

SEQ ID NO: 5336 - protein, 11 aa, Severe acute respiratory syndrome coronavirus 2
  REGION 1..11: note = Table A: HLA-B*44:05H
NEEIAIILASF

SEQ ID NO: 5337 - protein, 11 aa, Severe acute respiratory syndrome coronavirus 2
  REGION 1..11: note = Table A: HLA-A*02:02H HLA-A*02:03H
ILASFSASTSA

SEQ ID NO: 5338 - protein, 11 aa, Severe acute respiratory syndrome coronavirus 2
  REGION 1..11: note = Table A: HLA-A*68:02H
FSASTSAFVET

SEQ ID NO: 5339 - protein, 11 aa, Severe acute respiratory syndrome coronavirus 2
  REGION 1..11: note = Table A: HLA-A*68:02H
SASTSAFVETV

SEQ ID NO: 5340 - protein, 11 aa, Severe acute respiratory syndrome coronavirus 2
  REGION 1..11: note = Table A: HLA-A*11:01M HLA-A*11:02H HLA-A*36:01H
ASTSAFVETVK

SEQ ID NO: 5341 - protein, 11 aa, Severe acute respiratory syndrome coronavirus 2
  REGION 1..11: note = Table A: HLA-A*68:02H
TSAFVETVKGL

SEQ ID NO: 5342 - protein, 11 aa, Severe acute respiratory syndrome coronavirus 2
  REGION 1..11: note = Table A: HLA-C*14:02H HLA-C*14:03M HLA-A*36:01H HLA-A*29:01M HLA-A*29:02H HLA-B*44:03H HLA-B*27:02H HLA-A*30:02H
AFVETVKGLDY

SEQ ID NO: 5343 - protein, 11 aa, Severe acute respiratory syndrome coronavirus 2
  REGION 1..11: note = Table A: HLA-A*36:01H HLA-A*34:02H
FVETVKGLDYK

SEQ ID NO: 5344 - protein, 11 aa, Severe acute respiratory syndrome coronavirus 2
  REGION 1..11: note = Table A: HLA-A*25:01H HLA-A*26:01M HLA-A*26:02M HLA-A*26:03M HLA-A*34:01H HLA-A*66:01H
ETVKGLDYKAF

SEQ ID NO: 5345 - protein, 11 aa, Severe acute respiratory syndrome coronavirus 2
  REGION 1..11: note = Table A: HLA-A*74:01H HLA-A*33:03H
TVKGLDYKAFK

SEQ ID NO: 5346 - protein, 11 aa, Severe acute respiratory syndrome coronavirus 2
  REGION 1..11: note = Table A: HLA-B*44:03H
GEQKSILSPLY

SEQ ID NO: 5347 - protein, 11 aa, Severe acute respiratory syndrome coronavirus 2
  REGION 1..11: note = Table A: HLA-B*56:01H HLA-B*55:02M HLA-B*54:01H
SPLYAFASEAA

SEQ ID NO: 5348 - protein, 11 aa, Severe acute respiratory syndrome coronavirus 2
  REGION 1..11: note = Table A: HLA-C*16:01H HLA-A*02:11H HLA-C*03:04H HLA-A*68:02H HLA-C*12:03H HLA-B*54:01H
YAFASEAARVV

SEQ ID NO: 5349 - protein, 11 aa, Severe acute respiratory syndrome coronavirus 2
  REGION 1..11: note = Table A: HLA-A*74:01H HLA-A*31:01H
AFASEAARVVR

SEQ ID NO: 5350 - protein, 11 aa, Severe acute respiratory syndrome coronavirus 2
  REGION 1..11: note = Table A: HLA-A*74:01H
AARVVRSIFSR

SEQ ID NO: 5351 - protein, 11 aa, Severe acute respiratory syndrome coronavirus 2
  REGION 1..11: note = Table A: HLA-B*58:02H HLA-B*07:04H HLA-B*57:03H
RVVRSIFSRTL

SEQ ID NO: 5352 - protein, 11 aa, Severe acute respiratory syndrome coronavirus 2
  REGION 1..11: note = Table A: HLA-A*02:08H
RSIFSRTLETA

SEQ ID NO: 5353 - protein, 11 aa, Severe acute respiratory syndrome coronavirus 2
  REGION 1..11: note = Table A: HLA-A*74:01H HLA-A*03:01H HLA-A*03:02H HLA-A*11:01H HLA-A*11:02H HLA-A*36:01H HLA-A*30:02H HLA-A*31:01M HLA-B*57:03H
RTLETAQNSVR

SEQ ID NO: 5354 - protein, 11 aa, Severe acute respiratory syndrome coronavirus 2
  REGION 1..11: note = Table A: HLA-B*40:02H
LETAQNSVRVL

SEQ ID NO: 5355 - protein, 11 aa, Severe acute respiratory syndrome coronavirus 2
  REGION 1..11: note = Table A: HLA-A*68:01H HLA-A*68:02H
ETAQNSVRVLQ

SEQ ID NO: 5356 - protein, 11 aa, Severe acute respiratory syndrome coronavirus 2
  REGION 1..11: note = Table A: HLA-A*03:02H HLA-A*11:01H HLA-A*34:02H
TAQNSVRVLQK

SEQ ID NO: 5357 - protein, 11 aa, Severe acute respiratory syndrome coronavirus 2
  REGION 1..11: note = Table A: HLA-B*38:02H
QKAAITILDGI

SEQ ID NO: 5358 - protein, 11 aa, Severe acute respiratory syndrome coronavirus 2
  REGION 1..11: note = Table A: HLA-A*30:02H HLA-B*15:01H
AITILDGISQY

SEQ ID NO: 5359 - protein, 11 aa, Severe acute respiratory syndrome coronavirus 2
  REGION 1..11: note = Table A: HLA-A*02:11H HLA-A*02:04M HLA-A*02:06H HLA-A*02:01H HLA-A*02:02H HLA-C*08:01H HLA-B*38:02H
TILDGISQYSL

SEQ ID NO: 5360 - protein, 11 aa, Severe acute respiratory syndrome coronavirus 2
  REGION 1..11: note = Table A: HLA-B*57:03M
YSLRLIDAMMF

SEQ ID NO: 5361 - protein, 11 aa, Severe acute respiratory syndrome coronavirus 2
  REGION 1..11: note = Table A: HLA-A*68:02M HLA-A*02:02H
FTSDLATNNLV

SEQ ID NO: 5362 - protein, 11 aa, Severe acute respiratory syndrome coronavirus 2
  REGION 1..11: note = Table A: HLA-A*68:02H HLA-B*35:03H HLA-C*17:01H
MAYITGGVVQL

SEQ ID NO: 5363 - protein, 11 aa, Severe acute respiratory syndrome coronavirus 2
  REGION 1..11: note = Table A: HLA-B*44:03H
KEGVEFLRDGW

SEQ ID NO: 5364 - protein, 11 aa, Severe acute respiratory syndrome coronavirus 2
  REGION 1..11: note = Table A: HLA-B*45:01M HLA-B*40:02H HLA-B*41:02H HLA-B*50:01M
CEIVGGQIVTC

SEQ ID NO: 5365 - protein, 11 aa, Severe acute respiratory syndrome coronavirus 2
  REGION 1..11: note = Table A: HLA-A*68:02H
EIVGGQIVTCA

SEQ ID NO: 5366 - protein, 11 aa, Severe acute respiratory syndrome coronavirus 2
  REGION 1..11: note = Table A: HLA-B*58:01H HLA-B*44:02H HLA-B*44:05M HLA-B*44:03M HLA-A*24:07H HLA-A*23:01H HLA-B*40:01M HLA-B*40:02H HLA-B*40:06H HLA-B*57:03M HLA-B*13:01H HLA-B*49:01H
KEIKESVQTFF

SEQ ID NO: 5367 - protein, 11 aa, Severe acute respiratory syndrome coronavirus 2
  REGION 1..11: note = Table A: HLA-A*34:02H
EIKESVQTFFK

SEQ ID NO: 5368 - protein, 11 aa, Severe acute respiratory syndrome coronavirus 2
  REGION 1..11: note = Table A: HLA-A*11:303H HLA-A*74:01H HLA-A*03:02M HLA-A*11:01M HLA-A*11:02M HLA-A*30:01H HLA-A*34:02H HLA-C*07:27H HLA-A*31:01H
SVQTFFKLVNK

SEQ ID NO: 5369 - protein, 11 aa, Severe acute respiratory syndrome coronavirus 2
  REGION 1..11: note = Table A: HLA-B*08:01H
FFKLVNKFLAL

SEQ ID NO: 5370 - protein, 11 aa, Severe acute respiratory syndrome coronavirus 2
  REGION 1..11: note = Table A: HLA-B*44:05M HLA-B*40:02H
ADSIIIGGAKL

SEQ ID NO: 5371 - protein, 11 aa, Severe acute respiratory syndrome coronavirus 2
  REGION 1..11: note = Table A: HLA-A*33:01H HLA-A*68:01M HLA-A*34:02M HLA-A*66:01M
DSIIIGGAKLK

SEQ ID NO: 5372 - protein, 11 aa, Severe acute respiratory syndrome coronavirus 2
  REGION 1..11: note = Table A: HLA-B*46:01H HLA-B*08:01H HLA-C*03:03H HLA-A*02:11H HLA-C*03:04H HLA-A*02:04H HLA-A*02:05H HLA-A*02:08H HLA-A*02:02H HLA-A*02:03H HLA-B*07:04H
IIIGGAKLKAL

SEQ ID NO: 5373 - protein, 11 aa, Severe acute respiratory syndrome coronavirus 2
  REGION 1..11: note = Table A: HLA-A*24:07H HLA-B*38:02H HLA-A*32:01H HLA-B*15:01H HLA-B*57:03M
KLKALNLGETF

SEQ ID NO: 5374 - protein, 11 aa, Severe acute respiratory syndrome coronavirus 2
  REGION 1..11: note = Table A: HLA-A*03:02H
NLGETFVTHSK

SEQ ID NO: 5375 - protein, 11 aa, Severe acute respiratory syndrome coronavirus 2
  REGION 1..11: note = Table A: HLA-B*44:05H HLA-B*40:02H
GETFVTHSKGL

SEQ ID NO: 5376 - protein, 11 aa, Severe acute respiratory syndrome coronavirus 2
  REGION 1..11: note = Table A: HLA-A*36:01M HLA-A*26:01H HLA-A*26:02H HLA-A*01:01H HLA-A*30:02H HLA-A*68:01H HLA-A*34:01H HLA-A*34:02M HLA-A*66:01H
ETFVTHSKGLY

SEQ ID NO: 5377 - protein, 11 aa, Severe acute respiratory syndrome coronavirus 2
  REGION 1..11: note = Table A: HLA-A*74:01H HLA-A*33:03H
TFVTHSKGLYR

SEQ ID NO: 5378 - protein, 11 aa, Severe acute respiratory syndrome coronavirus 2
  REGION 1..11: note = Table A: HLA-B*45:01H
EETGLLMPLKA

SEQ ID NO: 5379 - protein, 11 aa, Severe acute respiratory syndrome coronavirus 2
  REGION 1..11: note = Table A: HLA-A*02:11H
LLMPLKAPKEI

SEQ ID NO: 5380 - protein, 11 aa, Severe acute respiratory syndrome coronavirus 2
  REGION 1..11: note = Table A: HLA-B*53:01H HLA-B*35:03H HLA-B*35:01H HLA-B*35:08H HLA-B*35:07M HLA-B*54:01H
MPLKAPKEIIF

SEQ ID NO: 5381 - protein, 11 aa, Severe acute respiratory syndrome coronavirus 2
  REGION 1..11: note = Table A: HLA-B*44:05H HLA-B*40:01H HLA-B*40:02M
KEIIFLEGETL

SEQ ID NO: 5382 - protein, 11 aa, Severe acute respiratory syndrome coronavirus 2
  REGION 1..11: note = Table A: HLA-A*02:02H
FLEGETLPTEV

SEQ ID NO: 5383 - protein, 11 aa, Severe acute respiratory syndrome coronavirus 2
  REGION 1..11: note = Table A: HLA-B*40:01H
LEGETLPTEVL

SEQ ID NO: 5384 - protein, 11 aa, Severe acute respiratory syndrome coronavirus 2
  REGION 1..11: note = Table A: HLA-C*08:03H
VVLKTGDLQPL

SEQ ID NO: 5385 - protein, 11 aa, Severe acute respiratory syndrome coronavirus 2
  REGION 1..11: note = Table A: HLA-B*45:01H
LEQPTSEAVEA

SEQ ID NO: 5386 - protein, 11 aa, Severe acute respiratory syndrome coronavirus 2
  REGION 1..11: note = Table A: HLA-B*35:03H
QPTSEAVEAPL

SEQ ID NO: 5387 - protein, 11 aa, Severe acute respiratory syndrome coronavirus 2
  REGION 1..11: note = Table A: HLA-B*45:01H HLA-B*50:01H
VEAPLVGTPVC

SEQ ID NO: 5388 - protein, 11 aa, Severe acute respiratory syndrome coronavirus 2
  REGION 1..11: note = Table A: HLA-A*68:02H HLA-B*51:01H
EAPLVGTPVCI

SEQ ID NO: 5389 - protein, 11 aa, Severe acute respiratory syndrome coronavirus 2
  REGION 1..11: note = Table A: HLA-A*36:01H HLA-A*29:02H HLA-A*02:11H HLA-A*30:02H HLA-B*35:01H HLA-B*35:07H HLA-B*38:02M HLA-B*15:01H HLA-B*15:02H
MLLEIKDTEKY

SEQ ID NO: 5390 - protein, 11 aa, Severe acute respiratory syndrome coronavirus 2
  REGION 1..11: note = Table A: HLA-B*08:01H
EIKDTEKYCAL

SEQ ID NO: 5391 - protein, 11 aa, Severe acute respiratory syndrome coronavirus 2
  REGION 1..11: note = Table A: HLA-C*15:05M HLA-B*35:01H HLA-B*07:02M HLA-B*07:05M
APNMMVTNNTF

SEQ ID NO: 5392 - protein, 11 aa, Severe acute respiratory syndrome coronavirus 2
  REGION 1..11: note = Table A: HLA-A*36:01H HLA-A*34:02M
MMVTNNTFTLK

SEQ ID NO: 5393 - protein, 11 aa, Severe acute respiratory syndrome coronavirus 2
  REGION 1..11: note = Table A: HLA-C*08:03H
NTFTLKGGAPT

SEQ ID NO: 5394 - protein, 11 aa, Severe acute respiratory syndrome coronavirus 2
  REGION 1..11: note = Table A: HLA-A*02:11H
FTLKGGAPTKV

SEQ ID NO: 5395 - protein, 11 aa, Severe acute respiratory syndrome coronavirus 2
  REGION 1..11: note = Table A: HLA-A*68:02H HLA-A*02:05H HLA-A*02:06H HLA-A*02:08H
VTFGDDTVIEV

SEQ ID NO: 5396 - protein, 11 aa, Severe acute respiratory syndrome coronavirus 2
  REGION 1..11: note = Table A: HLA-B*27:02H
DDTVIEVQGYK

SEQ ID NO: 5397 - protein, 11 aa, Severe acute respiratory syndrome coronavirus 2
  REGION 1..11: note = Table A: HLA-A*26:03H HLA-A*02:11H HLA-A*68:01H HLA-A*68:02M HLA-A*02:05M HLA-A*02:06M HLA-A*02:07H HLA-A*02:08H HLA-A*02:02H HLA-A*02:03H HLA-B*38:02H
TVIEVQGYKSV

SEQ ID NO: 5398 - protein, 11 aa, Severe acute respiratory syndrome coronavirus 2
  REGION 1..11: note = Table A: HLA-B*49:01H
IEVQGYKSVNI

SEQ ID NO: 5399 - protein, 11 aa, Severe acute respiratory syndrome coronavirus 2
  REGION 1..11: note = Table A: HLA-A*11:02H
ITFELDERIDK

SEQ ID NO: 5400 - protein, 11 aa, Severe acute respiratory syndrome coronavirus 2
  REGION 1..11: note = Table A: HLA-B*40:02H
FELDERIDKVL

SEQ ID NO: 5401 - protein, 11 aa, Severe acute respiratory syndrome coronavirus 2
  REGION 1..11: note = Table A: HLA-A*68:02H
SAYTVELGTEV

SEQ ID NO: 5402 - protein, 11 aa, Severe acute respiratory syndrome coronavirus 2
  REGION 1..11: note = Table A: HLA-B*35:01H HLA-B*35:08H HLA-B*38:02H HLA-B*39:01H
TVELGTEVNEF

SEQ ID NO: 5403 - protein, 11 aa, Severe acute respiratory syndrome coronavirus 2
  REGION 1..11: note = Table A: HLA-B*50:01H
TEVNEFACVVA

SEQ ID NO: 5404 - protein, 11 aa, Severe acute respiratory syndrome coronavirus 2
  REGION 1..11: note = Table A: HLA-A*02:08H
CVVADAVIKTL

SEQ ID NO: 5405 - protein, 11 aa, Severe acute respiratory syndrome coronavirus 2
  REGION 1..11: note = Table A: HLA-B*58:01H HLA-A*36:01H HLA-B*57:01H HLA-B*57:03M
LTPLGIDLDEW

SEQ ID NO: 5406 - protein, 11 aa, Severe acute respiratory syndrome coronavirus 2
  REGION 1..11: note = Table A: HLA-C*14:02H HLA-C*14:03H HLA-A*24:02H HLA-C*08:01H HLA-A*23:01H
TYYLFDESGEF

SEQ ID NO: 5407 - protein, 11 aa, Severe acute respiratory syndrome coronavirus 2
  REGION 1..11: note = Table A: HLA-A*11:303H HLA-A*29:02H HLA-A*02:11H HLA-A*68:02M HLA-B*35:03H HLA-A*02:04H HLA-A*02:05H HLA-A*02:06H HLA-A*02:07H HLA-A*02:08H HLA-B*14:01H HLA-A*02:01H HLA-A*02:02H HLA-A*02:03M HLA-C*17:01H
  REGION 1..11: note = CONT. FROM ABOVE: HLA-C*08:01M HLA-B*38:01H HLA-B*38:02M HLA- B*40:06M HLA-B*13:01H HLA-B*13:02M
YLFDESGEFKL

SEQ ID NO: 5408 - protein, 11 aa, Severe acute respiratory syndrome coronavirus 2
  REGION 1..11: note = Table A: HLA-A*36:01H HLA-A*30:02H
SGEFKLASHMY

SEQ ID NO: 5409 - protein, 11 aa, Severe acute respiratory syndrome coronavirus 2
  REGION 1..11: note = Table A: HLA-B*18:01H
EEEEFEPSTQY

SEQ ID NO: 5410 - protein, 11 aa, Severe acute respiratory syndrome coronavirus 2
  REGION 1..11: note = Table A: HLA-B*44:02M HLA-B*44:05H HLA-C*16:04H HLA-B*44:03M HLA-B*18:01M HLA-C*07:01H HLA-B*27:02H HLA-B*07:05M
EEFEPSTQYEY

SEQ ID NO: 5411 - protein, 11 aa, Severe acute respiratory syndrome coronavirus 2
  REGION 1..11: note = Table A: HLA-B*38:02H HLA-B*39:01H
TQYEYGTEDDY

SEQ ID NO: 5412 - protein, 11 aa, Severe acute respiratory syndrome coronavirus 2
  REGION 1..11: note = Table A: HLA-B*56:01M HLA-B*55:02M HLA-C*15:05H HLA-B*55:01M HLA-B*54:01H HLA-B*07:05H HLA-B*50:01H
KPLEFGATSAA

SEQ ID NO: 5413 - protein, 11 aa, Severe acute respiratory syndrome coronavirus 2
  REGION 1..11: note = Table A: HLA-A*68:02H
QTTTIQTIVEV

SEQ ID NO: 5414 - protein, 11 aa, Severe acute respiratory syndrome coronavirus 2
  REGION 1..11: note = Table A: HLA-B*44:05H HLA-B*40:01H HLA-B*40:02H
VEVQPQLEMEL

SEQ ID NO: 5415 - protein, 11 aa, Severe acute respiratory syndrome coronavirus 2
  REGION 1..11: note = Table A: HLA-A*68:02H
ELTPVVQTIEV

SEQ ID NO: 5416 - protein, 11 aa, Severe acute respiratory syndrome coronavirus 2
  REGION 1..11: note = Table A: HLA-A*26:01H HLA-A*30:02H
QTIEVNSFSGY

SEQ ID NO: 5417 - protein, 11 aa, Severe acute respiratory syndrome coronavirus 2
  REGION 1..11: note = Table A: HLA-A*25:01H HLA-A*26:03H HLA-A*68:01H HLA-A*68:02H HLA-A*34:01H HLA-A*34:02H
EVNSFSGYLKL

SEQ ID NO: 5418 - protein, 11 aa, Severe acute respiratory syndrome coronavirus 2
  REGION 1..11: note = Table A: HLA-A*24:07H HLA-A*23:01H
GYLKLTDNVYI

SEQ ID NO: 5419 - protein, 11 aa, Severe acute respiratory syndrome coronavirus 2
  REGION 1..11: note = Table A: HLA-A*02:02H
KLTDNVYIKNA

SEQ ID NO: 5420 - protein, 11 aa, Severe acute respiratory syndrome coronavirus 2
  REGION 1..11: note = Table A: HLA-A*23:01H
VYIKNADIVEE

SEQ ID NO: 5421 - protein, 11 aa, Severe acute respiratory syndrome coronavirus 2
  REGION 1..11: note = Table A: HLA-A*02:05H HLA-A*02:08H
YIKNADIVEEA

SEQ ID NO: 5422 - protein, 11 aa, Severe acute respiratory syndrome coronavirus 2
  REGION 1..11: note = Table A: HLA-B*56:01H HLA-B*55:02M HLA-B*55:01H HLA-A*02:08M
KVKPTVVVNAA

SEQ ID NO: 5423 - protein, 11 aa, Severe acute respiratory syndrome coronavirus 2
  REGION 1..11: note = Table A: HLA-A*03:02M HLA-A*11:01M HLA-A*11:02M HLA-C*07:27H
VVVNAANVYLK

SEQ ID NO: 5424 - protein, 11 aa, Severe acute respiratory syndrome coronavirus 2
  REGION 1..11: note = Table A: HLA-A*02:02M HLA-A*02:03M HLA-B*38:02H
YLKHGGGVAGA

SEQ ID NO: 5425 - protein, 11 aa, Severe acute respiratory syndrome coronavirus 2
  REGION 1..11: note = Table A: HLA-A*03:02H HLA-A*36:01H HLA-B*27:02H HLA-A*34:02H
HGGGVAGALNK

SEQ ID NO: 5426 - protein, 11 aa, Severe acute respiratory syndrome coronavirus 2
  REGION 1..11: note = Table A: HLA-B*38:02H
NAMQVESDDYI

SEQ ID NO: 5427 - protein, 11 aa, Severe acute respiratory syndrome coronavirus 2
  REGION 1..11: note = Table A: HLA-A*24:07H
DYIATNGPLKV

SEQ ID NO: 5428 - protein, 11 aa, Severe acute respiratory syndrome coronavirus 2
  REGION 1..11: note = Table A: HLA-C*15:05M HLA-C*08:03H HLA-B*07:05H
GPLKVGGSCVL

SEQ ID NO: 5429 - protein, 11 aa, Severe acute respiratory syndrome coronavirus 2
  REGION 1..11: note = Table A: HLA-A*03:01H HLA-A*03:02H
CLHVVGPNVNK

SEQ ID NO: 5430 - protein, 11 aa, Severe acute respiratory syndrome coronavirus 2
  REGION 1..11: note = Table A: HLA-A*02:08H
NVNKGEDIQLL

SEQ ID NO: 5431 - protein, 11 aa, Severe acute respiratory syndrome coronavirus 2
  REGION 1..11: note = Table A: HLA-B*44:03H
GEDIQLLKSAY

SEQ ID NO: 5432 - protein, 11 aa, Severe acute respiratory syndrome coronavirus 2
  REGION 1..11: note = Table A: HLA-A*02:11H HLA-A*68:02H HLA-A*02:05H HLA-A*02:06H HLA-A*02:08H HLA-A*02:02H
SAYENFNQHEV

SEQ ID NO: 5433 - protein, 11 aa, Severe acute respiratory syndrome coronavirus 2
  REGION 1..11: note = Table A: HLA-C*08:01H
AYENFNQHEVL

SEQ ID NO: 5434 - protein, 11 aa, Severe acute respiratory syndrome coronavirus 2
  REGION 1..11: note = Table A: HLA-B*37:01H HLA-B*40:01M HLA-B*40:02H
YENFNQHEVLL

SEQ ID NO: 5435 - protein, 11 aa, Severe acute respiratory syndrome coronavirus 2
  REGION 1..11: note = Table A: HLA-C*08:01H HLA-B*38:02H
NQHEVLLAPLL

SEQ ID NO: 5436 - protein, 11 aa, Severe acute respiratory syndrome coronavirus 2
  REGION 1..11: note = Table A: HLA-B*45:01H HLA-B*40:06M HLA-B*50:01H
HEVLLAPLLSA

SEQ ID NO: 5437 - protein, 11 aa, Severe acute respiratory syndrome coronavirus 2
  REGION 1..11: note = Table A: HLA-B*56:01H HLA-B*55:02H
APLLSAGIFGA

SEQ ID NO: 5438 - protein, 11 aa, Severe acute respiratory syndrome coronavirus 2
  REGION 1..11: note = Table A: HLA-A*11:303H HLA-C*03:03H HLA-A*02:11M HLA-C*03:04H HLA-A*30:02H HLA-A*68:02H HLA-A*02:04M HLA-A*02:05M HLA-A*02:07H HLA-A*02:08M HLA-A*02:02M HLA-A*02:03H HLA-C*08:01H HLA-C*08:03H HLA-B*40:02H
  REGION 1..11: note = CONT. FROM ABOVE: HLA-B*40:06H
GIFGADPIHSL

SEQ ID NO: 5439 - protein, 11 aa, Severe acute respiratory syndrome coronavirus 2
  REGION 1..11: note = Table A: HLA-A*02:11H HLA-A*68:02H HLA-A*02:02H
FGADPIHSLRV

SEQ ID NO: 5440 - protein, 11 aa, Severe acute respiratory syndrome coronavirus 2
  REGION 1..11: note = Table A: HLA-B*46:01H HLA-C*12:02H HLA-C*12:03H
VCVDTVRTNVY

SEQ ID NO: 5441 - protein, 11 aa, Severe acute respiratory syndrome coronavirus 2
  REGION 1..11: note = Table A: HLA-C*04:03H HLA-A*02:11H HLA-A*02:07M HLA-A*02:01H
CVDTVRTNVYL

SEQ ID NO: 5442 - protein, 11 aa, Severe acute respiratory syndrome coronavirus 2
  REGION 1..11: note = Table A: HLA-A*68:02H
DTVRTNVYLAV

SEQ ID NO: 5443 - protein, 11 aa, Severe acute respiratory syndrome coronavirus 2
  REGION 1..11: note = Table A: HLA-A*29:02H HLA-A*30:02H HLA-A*24:07H HLA-A*23:01H
VYLAVFDKNLY

SEQ ID NO: 5444 - protein, 11 aa, Severe acute respiratory syndrome coronavirus 2
  REGION 1..11: note = Table A: HLA-A*02:11M HLA-A*68:02H HLA-A*02:04H HLA-A*02:05H HLA-A*02:06H HLA-A*02:07H HLA-A*02:08M HLA-A*02:02H HLA-C*08:01H HLA-B*13:01H
AVFDKNLYDKL

SEQ ID NO: 5445 - protein, 11 aa, Severe acute respiratory syndrome coronavirus 2
  REGION 1..11: note = Table A: HLA-A*02:11H HLA-A*02:02M
NLYDKLVSSFL

SEQ ID NO: 5446 - protein, 11 aa, Severe acute respiratory syndrome coronavirus 2
  REGION 1..11: note = Table A: HLA-A*03:02H HLA-A*11:01H
QVEQKIAEIPK

SEQ ID NO: 5447 - protein, 11 aa, Severe acute respiratory syndrome coronavirus 2
  REGION 1..11: note = Table A: HLA-B*44:02H HLA-B*44:05M HLA-B*45:01H HLA-B*44:03H
AEIPKEEVKPF

SEQ ID NO: 5448 - protein, 11 aa, Severe acute respiratory syndrome coronavirus 2
  REGION 1..11: note = Table A: HLA-B*56:01H HLA-B*55:02M HLA-C*15:05H HLA-B*07:04H
KPFITESKPSV

SEQ ID NO: 5449 - protein, 11 aa, Severe acute respiratory syndrome coronavirus 2
  REGION 1..11: note = Table A: HLA-A*68:01H
ITESKPSVEQR

SEQ ID NO: 5450 - protein, 11 aa, Severe acute respiratory syndrome coronavirus 2
  REGION 1..11: note = Table A: HLA-B*27:02M
EEVTTTLEETK

SEQ ID NO: 5451 - protein, 11 aa, Severe acute respiratory syndrome coronavirus 2
  REGION 1..11: note = Table A: HLA-A*26:01H HLA-A*26:02M
EVTTTLEETKF

SEQ ID NO: 5452 - protein, 11 aa, Severe acute respiratory syndrome coronavirus 2
  REGION 1..11: note = Table A: HLA-A*24:07H HLA-A*23:01H
KFLTENLLLYI

SEQ ID NO: 5453 - protein, 11 aa, Severe acute respiratory syndrome coronavirus 2
  REGION 1..11: note = Table A: HLA-A*02:11H
LLLYIDINGNL

SEQ ID NO: 5454 - protein, 11 aa, Severe acute respiratory syndrome coronavirus 2
  REGION 1..11: note = Table A: HLA-B*57:03M
ATLVSDIDITF

SEQ ID NO: 5455 - protein, 11 aa, Severe acute respiratory syndrome coronavirus 2
  REGION 1..11: note = Table A: HLA-A*02:11H HLA-A*02:04H HLA-A*02:05H HLA-A*02:07H HLA-A*02:01H HLA-A*02:02M HLA-C*08:01H HLA-B*38:02H HLA-B*13:01H
TLVSDIDITFL

SEQ ID NO: 5456 - protein, 11 aa, Severe acute respiratory syndrome coronavirus 2
  REGION 1..11: note = Table A: HLA-A*03:02H HLA-A*11:01H HLA-A*11:02H HLA-A*68:02H HLA-A*34:02H
LVSDIDITFLK

SEQ ID NO: 5457 - protein, 11 aa, Severe acute respiratory syndrome coronavirus 2
  REGION 1..11: note = Table A: HLA-A*36:01H
VSDIDITFLKK

SEQ ID NO: 5458 - protein, 11 aa, Severe acute respiratory syndrome coronavirus 2
  REGION 1..11: note = Table A: HLA-B*58:02H
ITFLKKDAPYI

SEQ ID NO: 5459 - protein, 11 aa, Severe acute respiratory syndrome coronavirus 2
  REGION 1..11: note = Table A: HLA-A*26:02H HLA-A*68:02H HLA-B*38:02H
DVVQEGVLTAV

SEQ ID NO: 5460 - protein, 11 aa, Severe acute respiratory syndrome coronavirus 2
  REGION 1..11: note = Table A: HLA-A*11:303H HLA-A*03:01H HLA-A*03:02M HLA-A*11:01H HLA-A*11:02H HLA-A*30:01H HLA-A*34:02H HLA-C*07:27H
GVLTAVVIPTK

SEQ ID NO: 5461 - protein, 11 aa, Severe acute respiratory syndrome coronavirus 2
  REGION 1..11: note = Table A: HLA-A*03:02H
VLTAVVIPTKK

SEQ ID NO: 5462 - protein, 11 aa, Severe acute respiratory syndrome coronavirus 2
  REGION 1..11: note = Table A: HLA-A*03:02H HLA-A*11:01H HLA-A*36:01H
KAGGTTEMLAK

SEQ ID NO: 5463 - protein, 11 aa, Severe acute respiratory syndrome coronavirus 2
  REGION 1..11: note = Table A: HLA-A*74:01M HLA-A*11:01H HLA-A*11:02H HLA-A*68:01H HLA-A*31:01H HLA-A*66:01H
GTTEMLAKALR

SEQ ID NO: 5464 - protein, 11 aa, Severe acute respiratory syndrome coronavirus 2
  REGION 1..11: note = Table A: HLA-A*30:02H
KALRKVPTDNY

SEQ ID NO: 5465 - protein, 11 aa, Severe acute respiratory syndrome coronavirus 2
  REGION 1..11: note = Table A: HLA-A*36:01H HLA-A*30:02H HLA-B*15:01H HLA-B*57:03H
KVPTDNYITTY

SEQ ID NO: 5466 - protein, 11 aa, Severe acute respiratory syndrome coronavirus 2
  REGION 1..11: note = Table A: HLA-A*03:01H HLA-A*11:01H HLA-A*11:02H HLA-A*36:01H HLA-B*57:01H HLA-A*25:01H HLA-B*46:01H HLA-A*26:01M HLA-A*26:02M HLA-A*26:03M HLA-A*29:01H HLA-A*29:02H HLA-A*01:01H HLA-A*30:02M HLA-A*68:01H HLA-A*34:02M
  REGION 1..11: note = CONT. FROM ABOVE: HLA-B*38:02H HLA-B*15:01M HLA-B*39:01H HLA- A*66:01H
TTYPGQGLNGY

SEQ ID NO: 5467 - protein, 11 aa, Severe acute respiratory syndrome coronavirus 2
  REGION 1..11: note = Table A: HLA-B*56:01H HLA-B*55:02H HLA-C*15:05H HLA-B*54:01H
YPGQGLNGYTV

SEQ ID NO: 5468 - protein, 11 aa, Severe acute respiratory syndrome coronavirus 2
  REGION 1..11: note = Table A: HLA-A*03:02M HLA-B*27:02H
GLNGYTVEEAK

SEQ ID NO: 5469 - protein, 11 aa, Severe acute respiratory syndrome coronavirus 2
  REGION 1..11: note = Table A: HLA-A*11:303H HLA-A*03:02H HLA-A*11:01M HLA-A*11:02M HLA-A*36:01H HLA-A*68:01M HLA-A*68:02H HLA-A*34:01H HLA-A*34:02H HLA-C*07:27H HLA-A*66:01M
YTVEEAKTVLK

SEQ ID NO: 5470 - protein, 11 aa, Severe acute respiratory syndrome coronavirus 2
  REGION 1..11: note = Table A: HLA-A*11:303H HLA-A*03:01H HLA-A*03:02M HLA-A*11:01M HLA-A*11:02M HLA-A*36:01H HLA-A*68:01M HLA-A*34:02M HLA-C*07:27H
TVEEAKTVLKK

SEQ ID NO: 5471 - protein, 11 aa, Severe acute respiratory syndrome coronavirus 2
  REGION 1..11: note = Table A: HLA-B*57:03H
KSAFYILPSII

SEQ ID NO: 5472 - protein, 11 aa, Severe acute respiratory syndrome coronavirus 2
  REGION 1..11: note = Table A: HLA-B*27:02H HLA-A*34:02H
YILPSIISNEK

SEQ ID NO: 5473 - protein, 11 aa, Severe acute respiratory syndrome coronavirus 2
  REGION 1..11: note = Table A: HLA-B*44:05H
QEILGTVSWNL

SEQ ID NO: 5474 - protein, 11 aa, Severe acute respiratory syndrome coronavirus 2
  REGION 1..11: note = Table A: HLA-A*33:01H HLA-A*33:03H HLA-A*68:01H HLA-A*34:01M HLA-A*34:02H HLA-A*66:01M
EILGTVSWNLR

SEQ ID NO: 5475 - protein, 11 aa, Severe acute respiratory syndrome coronavirus 2
  REGION 1..11: note = Table A: HLA-A*02:02M
MLAHAEETRKL

SEQ ID NO: 5476 - protein, 11 aa, Severe acute respiratory syndrome coronavirus 2
  REGION 1..11: note = Table A: HLA-B*35:03H HLA-B*54:01H
MPVCVETKAIV

SEQ ID NO: 5477 - protein, 11 aa, Severe acute respiratory syndrome coronavirus 2
  REGION 1..11: note = Table A: HLA-A*74:01H HLA-A*33:01M HLA-A*33:03H HLA-A*26:03M HLA-A*68:01H HLA-A*34:01M HLA-A*34:02M HLA-A*31:01H HLA-A*66:01M
ETKAIVSTIQR

SEQ ID NO: 5478 - protein, 11 aa, Severe acute respiratory syndrome coronavirus 2
  REGION 1..11: note = Table A: HLA-B*58:02M HLA-A*30:02M HLA-B*57:03H
KAIVSTIQRKY

SEQ ID NO: 5479 - protein, 11 aa, Severe acute respiratory syndrome coronavirus 2
  REGION 1..11: note = Table A: HLA-A*30:01H
AIVSTIQRKYK

SEQ ID NO: 5480 - protein, 11 aa, Severe acute respiratory syndrome coronavirus 2
  REGION 1..11: note = Table A: HLA-B*15:01H
GIKIQEGVVDY

SEQ ID NO: 5481 - protein, 11 aa, Severe acute respiratory syndrome coronavirus 2
  REGION 1..11: note = Table A: HLA-A*02:11H
KIQEGVVDYGA

SEQ ID NO: 5482 - protein, 11 aa, Severe acute respiratory syndrome coronavirus 2
  REGION 1..11: note = Table A: HLA-B*44:05H HLA-B*44:03H
QEGVVDYGARF

SEQ ID NO: 5483 - protein, 11 aa, Severe acute respiratory syndrome coronavirus 2
  REGION 1..11: note = Table A: HLA-A*36:01M HLA-A*29:02H
VVDYGARFYFY

SEQ ID NO: 5484 - protein, 11 aa, Severe acute respiratory syndrome coronavirus 2
  REGION 1..11: note = Table A: HLA-C*14:03H
RFYFYTSKTTV

SEQ ID NO: 5485 - protein, 11 aa, Severe acute respiratory syndrome coronavirus 2
  REGION 1..11: note = Table A: HLA-C*14:03H
FYFYTSKTTVA

SEQ ID NO: 5486 - protein, 11 aa, Severe acute respiratory syndrome coronavirus 2
  REGION 1..11: note = Table A: HLA-A*68:02H
YTSKTTVASLI

SEQ ID NO: 5487 - protein, 11 aa, Severe acute respiratory syndrome coronavirus 2
  REGION 1..11: note = Table A: HLA-B*58:01H HLA-B*58:02M HLA-B*57:01H HLA-C*15:02H HLA-A*02:08M HLA-B*57:03H
KTTVASLINTL

SEQ ID NO: 5488 - protein, 11 aa, Severe acute respiratory syndrome coronavirus 2
  REGION 1..11: note = Table A: HLA-B*44:03H HLA-B*18:01H HLA-B*07:05H
NETLVTMPLGY

SEQ ID NO: 5489 - protein, 11 aa, Severe acute respiratory syndrome coronavirus 2
  REGION 1..11: note = Table A: HLA-A*02:11H HLA-A*02:02H
TMPLGYVTHGL

SEQ ID NO: 5490 - protein, 11 aa, Severe acute respiratory syndrome coronavirus 2
  REGION 1..11: note = Table A: HLA-A*30:02H
HGLNLEEAARY

SEQ ID NO: 5491 - protein, 11 aa, Severe acute respiratory syndrome coronavirus 2
  REGION 1..11: note = Table A: HLA-B*58:02H HLA-A*02:11H HLA-C*15:05H HLA-B*57:03M HLA-B*13:02H
RSLKVPATVSV

SEQ ID NO: 5492 - protein, 11 aa, Severe acute respiratory syndrome coronavirus 2
  REGION 1..11: note = Table A: HLA-A*03:02H HLA-A*11:01H HLA-A*25:01H HLA-B*46:01H HLA-A*26:01H HLA-A*26:02M HLA-A*26:03H HLA-A*29:01H HLA-A*29:02H HLA-A*30:02M HLA-A*68:01H HLA-C*07:27H HLA-B*35:01H HLA-B*35:08H HLA-B*38:02M HLA-B*15:01M
  REGION 1..11: note = CONT. FROM ABOVE: HLA-B*15:02M HLA-B*07:05H HLA-B*15:11H
SVSSPDAVTAY

SEQ ID NO: 5493 - protein, 11 aa, Severe acute respiratory syndrome coronavirus 2
  REGION 1..11: note = Table A: HLA-B*35:01M HLA-B*35:08H HLA-B*07:05H
SPDAVTAYNGY

SEQ ID NO: 5494 - protein, 11 aa, Severe acute respiratory syndrome coronavirus 2
  REGION 1..11: note = Table A: HLA-B*58:02M HLA-A*02:11M HLA-A*68:02H HLA-A*02:05M HLA-A*02:06H HLA-A*02:07H HLA-A*02:08M HLA-B*57:03H
KTPEEHFIETI

SEQ ID NO: 5495 - protein, 11 aa, Severe acute respiratory syndrome coronavirus 2
  REGION 1..11: note = Table A: HLA-A*01:01H
FIETISLAGSY

SEQ ID NO: 5496 - protein, 11 aa, Severe acute respiratory syndrome coronavirus 2
  REGION 1..11: note = Table A: HLA-B*48:01H HLA-B*13:01H
GQSTQLGIEFL

SEQ ID NO: 5497 - protein, 11 aa, Severe acute respiratory syndrome coronavirus 2
  REGION 1..11: note = Table A: HLA-A*11:01H HLA-A*11:02H HLA-A*36:01H
QSTQLGIEFLK

SEQ ID NO: 5498 - protein, 11 aa, Severe acute respiratory syndrome coronavirus 2
  REGION 1..11: note = Table A: HLA-A*74:01H HLA-A*11:02H
STQLGIEFLKR

SEQ ID NO: 5499 - protein, 11 aa, Severe acute respiratory syndrome coronavirus 2
  REGION 1..11: note = Table A: HLA-A*25:01H HLA-B*46:01H HLA-A*26:02H HLA-C*15:05H HLA-C*12:02H HLA-B*38:02H HLA-B*15:01H HLA-B*15:02H HLA-B*07:05H
SVYYTSNPTTF

SEQ ID NO: 5500 - protein, 11 aa, Severe acute respiratory syndrome coronavirus 2
  REGION 1..11: note = Table A: HLA-A*24:02H HLA-A*24:07M HLA-A*23:01H
YYTSNPTTFHL

SEQ ID NO: 5501 - protein, 11 aa, Severe acute respiratory syndrome coronavirus 2
  REGION 1..11: note = Table A: HLA-A*25:01H HLA-A*26:01M HLA-A*26:02M HLA-A*26:03M HLA-A*68:02M HLA-A*34:01H HLA-A*66:01H
EVITFDNLKTL

SEQ ID NO: 5502 - protein, 11 aa, Severe acute respiratory syndrome coronavirus 2
  REGION 1..11: note = Table A: HLA-B*07:04H
SLREVRTIKVF

SEQ ID NO: 5503 - protein, 11 aa, Severe acute respiratory syndrome coronavirus 2
  REGION 1..11: note = Table A: HLA-B*58:01H HLA-A*02:11M HLA-A*68:02H HLA-A*02:04H HLA-A*02:05M HLA-A*02:06H HLA-A*02:08H HLA-A*02:02M HLA-A*32:01H HLA-B*40:01H HLA-B*57:03M
KVFTTVDNINL

SEQ ID NO: 5504 - protein, 11 aa, Severe acute respiratory syndrome coronavirus 2
  REGION 1..11: note = Table A: HLA-A*68:02H
TTVDNINLHTQ

SEQ ID NO: 5505 - protein, 11 aa, Severe acute respiratory syndrome coronavirus 2
  REGION 1..11: note = Table A: HLA-A*02:11H HLA-A*68:02H HLA-A*02:07M
TVDNINLHTQV

SEQ ID NO: 5506 - protein, 11 aa, Severe acute respiratory syndrome coronavirus 2
  REGION 1..11: note = Table A: HLA-A*36:01H HLA-A*01:01H HLA-A*30:02H
HTQVVDMSMTY

SEQ ID NO: 5507 - protein, 11 aa, Severe acute respiratory syndrome coronavirus 2
  REGION 1..11: note = Table A: HLA-A*26:01H HLA-A*29:02H HLA-A*30:02M HLA-A*34:02H
MTYGQQFGPTY

SEQ ID NO: 5508 - protein, 11 aa, Severe acute respiratory syndrome coronavirus 2
  REGION 1..11: note = Table A: HLA-A*02:05H HLA-A*02:08M HLA-B*38:02H
QQFGPTYLDGA

SEQ ID NO: 5509 - protein, 11 aa, Severe acute respiratory syndrome coronavirus 2
  REGION 1..11: note = Table A: HLA-A*11:01H
PTYLDGADVTK

SEQ ID NO: 5510 - protein, 11 aa, Severe acute respiratory syndrome coronavirus 2
  REGION 1..11: note = Table A: HLA-A*24:02M HLA-A*24:07M HLA-A*23:01H
TYLDGADVTKI

SEQ ID NO: 5511 - protein, 11 aa, Severe acute respiratory syndrome coronavirus 2
  REGION 1..11: note = Table A: HLA-A*33:01H
DGADVTKIKPH

SEQ ID NO: 5512 - protein, 11 aa, Severe acute respiratory syndrome coronavirus 2
  REGION 1..11: note = Table A: HLA-B*42:01H HLA-B*07:02H HLA-B*07:04H
KPHNSHEGKTF

SEQ ID NO: 5513 - protein, 11 aa, Severe acute respiratory syndrome coronavirus 2
  REGION 1..11: note = Table A: HLA-B*38:02H
TFYVLPNDDTL

SEQ ID NO: 5514 - protein, 11 aa, Severe acute respiratory syndrome coronavirus 2
  REGION 1..11: note = Table A: HLA-A*02:11H HLA-A*68:02H HLA-A*02:04H HLA-A*02:05H HLA-A*02:06M HLA-A*02:07H HLA-B*13:02H
YVLPNDDTLRV

SEQ ID NO: 5515 - protein, 11 aa, Severe acute respiratory syndrome coronavirus 2
  REGION 1..11: note = Table A: HLA-B*56:01H HLA-B*55:02H HLA-B*55:01M HLA-B*35:12H HLA-B*54:01M
LPNDDTLRVEA

SEQ ID NO: 5516 - protein, 11 aa, Severe acute respiratory syndrome coronavirus 2
  REGION 1..11: note = Table A: HLA-C*14:03H HLA-A*33:03H HLA-A*68:02H HLA-A*24:02H HLA-A*24:07H HLA-C*08:03H HLA-A*23:01H
EYYHTTDPSFL

SEQ ID NO: 5517 - protein, 11 aa, Severe acute respiratory syndrome coronavirus 2
  REGION 1..11: note = Table A: HLA-B*27:02H
YHTTDPSFLGR

SEQ ID NO: 5518 - protein, 11 aa, Severe acute respiratory syndrome coronavirus 2
  REGION 1..11: note = Table A: HLA-A*36:01M HLA-A*25:01H HLA-A*26:01M HLA-A*29:02H HLA-A*01:01H HLA-A*30:02H HLA-A*34:02M HLA-A*66:01H
HTTDPSFLGRY

SEQ ID NO: 5519 - protein, 11 aa, Severe acute respiratory syndrome coronavirus 2
  REGION 1..11: note = Table A: HLA-A*36:01H
TTDPSFLGRYM

SEQ ID NO: 5520 - protein, 11 aa, Severe acute respiratory syndrome coronavirus 2
  REGION 1..11: note = Table A: HLA-B*54:01H
DPSFLGRYMSA

SEQ ID NO: 5521 - protein, 11 aa, Severe acute respiratory syndrome coronavirus 2
  REGION 1..11: note = Table A: HLA-B*27:05H
GRYMSALNHTK

SEQ ID NO: 5522 - protein, 11 aa, Severe acute respiratory syndrome coronavirus 2
  REGION 1..11: note = Table A: HLA-A*30:02H
SALNHTKKWKY

SEQ ID NO: 5523 - protein, 11 aa, Severe acute respiratory syndrome coronavirus 2
  REGION 1..11: note = Table A: HLA-C*14:03H HLA-A*24:02M HLA-A*24:07M HLA-C*08:01H HLA-A*23:01M
KYPQVNGLTSI

SEQ ID NO: 5524 - protein, 11 aa, Severe acute respiratory syndrome coronavirus 2
  REGION 1..11: note = Table A: HLA-B*58:01H HLA-A*30:02H
TSIKWADNNCY

SEQ ID NO: 5525 - protein, 11 aa, Severe acute respiratory syndrome coronavirus 2
  REGION 1..11: note = Table A: HLA-A*03:02H HLA-B*27:02H
ALLTLQQIELK

SEQ ID NO: 5526 - protein, 11 aa, Severe acute respiratory syndrome coronavirus 2
  REGION 1..11: note = Table A: HLA-A*36:01H HLA-A*29:01H HLA-A*29:02H HLA-A*30:02H
KFNPPALQDAY

SEQ ID NO: 5527 - protein, 11 aa, Severe acute respiratory syndrome coronavirus 2
  REGION 1..11: note = Table A: HLA-A*29:02H
FNPPALQDAYY

SEQ ID NO: 5528 - protein, 11 aa, Severe acute respiratory syndrome coronavirus 2
  REGION 1..11: note = Table A: HLA-A*68:01H
NPPALQDAYYR

SEQ ID NO: 5529 - protein, 11 aa, Severe acute respiratory syndrome coronavirus 2
  REGION 1..11: note = Table A: HLA-B*38:02H
YRARAGEAANF

SEQ ID NO: 5530 - protein, 11 aa, Severe acute respiratory syndrome coronavirus 2
  REGION 1..11: note = Table A: HLA-B*57:03H
KTVGELGDVRE

SEQ ID NO: 5531 - protein, 11 aa, Severe acute respiratory syndrome coronavirus 2
  REGION 1..11: note = Table A: HLA-B*38:02H
ELGDVRETMSY

SEQ ID NO: 5532 - protein, 11 aa, Severe acute respiratory syndrome coronavirus 2
  REGION 1..11: note = Table A: HLA-A*02:11H HLA-A*02:02M HLA-B*38:02H
YLFQHANLDSC

SEQ ID NO: 5533 - protein, 11 aa, Severe acute respiratory syndrome coronavirus 2
  REGION 1..11: note = Table A: HLA-A*36:01H HLA-A*30:02H HLA-B*57:03H
TTLKGVEAVMY

SEQ ID NO: 5534 - protein, 11 aa, Severe acute respiratory syndrome coronavirus 2
  REGION 1..11: note = Table A: HLA-A*02:02H HLA-A*02:03H
TLKGVEAVMYM

SEQ ID NO: 5535 - protein, 11 aa, Severe acute respiratory syndrome coronavirus 2
  REGION 1..11: note = Table A: HLA-C*14:03H HLA-A*24:02M HLA-A*24:07H HLA-C*08:01H HLA-A*23:01M
MYMGTLSYEQF

SEQ ID NO: 5536 - protein, 11 aa, Severe acute respiratory syndrome coronavirus 2
  REGION 1..11: note = Table A: HLA-A*36:01H
YMGTLSYEQFK

SEQ ID NO: 5537 - protein, 11 aa, Severe acute respiratory syndrome coronavirus 2
  REGION 1..11: note = Table A: HLA-B*45:01H
YEQFKKGVQIP

SEQ ID NO: 5538 - protein, 11 aa, Severe acute respiratory syndrome coronavirus 2
  REGION 1..11: note = Table A: HLA-B*45:01H
QESPFVMMSAP

SEQ ID NO: 5539 - protein, 11 aa, Severe acute respiratory syndrome coronavirus 2
  REGION 1..11: note = Table A: HLA-B*55:02H
SPFVMMSAPPA

SEQ ID NO: 5540 - protein, 11 aa, Severe acute respiratory syndrome coronavirus 2
  REGION 1..11: note = Table A: HLA-A*29:02H
FVMMSAPPAQY

SEQ ID NO: 5541 - protein, 11 aa, Severe acute respiratory syndrome coronavirus 2
  REGION 1..11: note = Table A: HLA-A*02:02H
MMSAPPAQYEL

SEQ ID NO: 5542 - protein, 11 aa, Severe acute respiratory syndrome coronavirus 2
  REGION 1..11: note = Table A: HLA-A*03:02H HLA-A*11:01H HLA-A*11:02H HLA-A*36:01H HLA-A*68:01H HLA-A*68:02H HLA-A*34:02M
MSAPPAQYELK

SEQ ID NO: 5543 - protein, 11 aa, Severe acute respiratory syndrome coronavirus 2
  REGION 1..11: note = Table A: HLA-B*40:06H HLA-B*50:01M
YELKHGTFTCA

SEQ ID NO: 5544 - protein, 11 aa, Severe acute respiratory syndrome coronavirus 2
  REGION 1..11: note = Table A: HLA-A*34:02H
YTGNYQCGHYK

SEQ ID NO: 5545 - protein, 11 aa, Severe acute respiratory syndrome coronavirus 2
  REGION 1..11: note = Table A: HLA-A*24:07H
HYKHITSKETL

SEQ ID NO: 5546 - protein, 11 aa, Severe acute respiratory syndrome coronavirus 2
  REGION 1..11: note = Table A: HLA-B*15:03M
YKHITSKETLY

SEQ ID NO: 5547 - protein, 11 aa, Severe acute respiratory syndrome coronavirus 2
  REGION 1..11: note = Table A: HLA-B*18:01H HLA-B*35:01H
DGALLTKSSEY

SEQ ID NO: 5548 - protein, 11 aa, Severe acute respiratory syndrome coronavirus 2
  REGION 1..11: note = Table A: HLA-B*44:02H HLA-B*44:05M HLA-B*45:01H HLA-B*44:03M HLA-B*18:01H HLA-B*38:02H HLA-B*40:01M HLA-B*40:02H HLA-B*07:05H HLA-B*13:01H HLA-B*49:01H
SEYKGPITDVF

SEQ ID NO: 5549 - protein, 11 aa, Severe acute respiratory syndrome coronavirus 2
  REGION 1..11: note = Table A: HLA-A*33:03H HLA-A*29:02H HLA-A*30:02H
EYKGPITDVFY

SEQ ID NO: 5550 - protein, 11 aa, Severe acute respiratory syndrome coronavirus 2
  REGION 1..11: note = Table A: HLA-A*36:01M HLA-A*01:01M
ITDVFYKENSY

SEQ ID NO: 5551 - protein, 11 aa, Severe acute respiratory syndrome coronavirus 2
  REGION 1..11: note = Table A: HLA-A*24:02H HLA-A*24:07H HLA-A*23:01H
FYKENSYTTTI

SEQ ID NO: 5552 - protein, 11 aa, Severe acute respiratory syndrome coronavirus 2
  REGION 1..11: note = Table A: HLA-B*45:01H
KENSYTTTIKP

SEQ ID NO: 5553 - protein, 11 aa, Severe acute respiratory syndrome coronavirus 2
  REGION 1..11: note = Table A: HLA-C*14:03H HLA-A*30:02H HLA-A*24:07H
SYTTTIKPVTY

SEQ ID NO: 5554 - protein, 11 aa, Severe acute respiratory syndrome coronavirus 2
  REGION 1..11: note = Table A: HLA-A*34:02M
YTTTIKPVTYK

SEQ ID NO: 5555 - protein, 11 aa, Severe acute respiratory syndrome coronavirus 2
  REGION 1..11: note = Table A: HLA-A*36:01H HLA-A*01:01H
CTEIDPKLDNY

SEQ ID NO: 5556 - protein, 11 aa, Severe acute respiratory syndrome coronavirus 2
  REGION 1..11: note = Table A: HLA-B*44:02M HLA-B*44:05M HLA-C*16:04H HLA-B*44:03H HLA-B*18:01M HLA-A*30:02M HLA-B*38:02H HLA-B*39:01H HLA-B*07:05H
TEIDPKLDNYY

SEQ ID NO: 5557 - protein, 11 aa, Severe acute respiratory syndrome coronavirus 2
  REGION 1..11: note = Table A: HLA-A*36:01M HLA-A*34:02H
EIDPKLDNYYK

SEQ ID NO: 5558 - protein, 11 aa, Severe acute respiratory syndrome coronavirus 2
  REGION 1..11: note = Table A: HLA-A*33:01H
DNYYKKDNSYF

SEQ ID NO: 5559 - protein, 11 aa, Severe acute respiratory syndrome coronavirus 2
  REGION 1..11: note = Table A: HLA-B*35:01M HLA-B*35:07M HLA-B*38:02H HLA-B*15:11M
QPIDLVPNQPY

SEQ ID NO: 5560 - protein, 11 aa, Severe acute respiratory syndrome coronavirus 2
  REGION 1..11: note = Table A: HLA-B*42:01H HLA-B*55:02H HLA-C*15:05M HLA-B*35:01H HLA-B*07:02M HLA-B*07:04H HLA-B*07:05M HLA-B*15:11H
VPNQPYPNASF

SEQ ID NO: 5561 - protein, 11 aa, Severe acute respiratory syndrome coronavirus 2
  REGION 1..11: note = Table A: HLA-B*53:01M HLA-C*15:05H HLA-B*35:01H HLA-B*35:07H HLA-B*38:02H HLA-B*07:05H
QPYPNASFDNF

SEQ ID NO: 5562 - protein, 11 aa, Severe acute respiratory syndrome coronavirus 2
  REGION 1..11: note = Table A: HLA-B*53:01M HLA-B*35:01H HLA-B*35:07H
YPNASFDNFKF

SEQ ID NO: 5563 - protein, 11 aa, Severe acute respiratory syndrome coronavirus 2
  REGION 1..11: note = Table A: HLA-A*02:05H HLA-C*08:01H HLA-C*08:03H
NIKFADDLNQL

SEQ ID NO: 5564 - protein, 11 aa, Severe acute respiratory syndrome coronavirus 2
  REGION 1..11: note = Table A: HLA-A*36:01H HLA-A*01:01H HLA-B*35:01H HLA-B*35:08H HLA-B*35:07H HLA-B*38:02H
FADDLNQLTGY

SEQ ID NO: 5565 - protein, 11 aa, Severe acute respiratory syndrome coronavirus 2
  REGION 1..11: note = Table A: HLA-B*07:04H
KPASRELKVTF

SEQ ID NO: 5566 - protein, 11 aa, Severe acute respiratory syndrome coronavirus 2
  REGION 1..11: note = Table A: HLA-B*53:01H HLA-B*35:03M HLA-C*15:05H HLA-B*35:01H HLA-B*35:02M HLA-B*35:08M HLA-B*35:12M HLA-B*38:02H
FPDLNGDVVAI

SEQ ID NO: 5567 - protein, 11 aa, Severe acute respiratory syndrome coronavirus 2
  REGION 1..11: note = Table A: HLA-A*68:02H
DVVAIDYKHYT

SEQ ID NO: 5568 - protein, 11 aa, Severe acute respiratory syndrome coronavirus 2
  REGION 1..11: note = Table A: HLA-A*03:01H
IDYKHYTPSFK

SEQ ID NO: 5569 - protein, 11 aa, Severe acute respiratory syndrome coronavirus 2
  REGION 1..11: note = Table A: HLA-A*33:01H
DYKHYTPSFKK

SEQ ID NO: 5570 - protein, 11 aa, Severe acute respiratory syndrome coronavirus 2
  REGION 1..11: note = Table A: HLA-B*07:04H
TPSFKKGAKLL

SEQ ID NO: 5571 - protein, 11 aa, Severe acute respiratory syndrome coronavirus 2
  REGION 1..11: note = Table A: HLA-B*57:03H
GAKLLHKPIVW

SEQ ID NO: 5572 - protein, 11 aa, Severe acute respiratory syndrome coronavirus 2
  REGION 1..11: note = Table A: HLA-A*02:11M
KLLHKPIVWHV

SEQ ID NO: 5573 - protein, 11 aa, Severe acute respiratory syndrome coronavirus 2
  REGION 1..11: note = Table A: HLA-A*03:01H HLA-A*03:02H HLA-A*34:02H
IVWHVNNATNK

SEQ ID NO: 5574 - protein, 11 aa, Severe acute respiratory syndrome coronavirus 2
  REGION 1..11: note = Table A: HLA-B*58:01H HLA-A*03:02H HLA-A*36:01H HLA-A*25:01H HLA-B*46:01H HLA-A*26:01M HLA-A*26:02H HLA-A*29:02H HLA-A*30:02H HLA-C*12:02H HLA-B*35:01M HLA-B*35:08H HLA-B*35:07M HLA-B*38:02M HLA-A*32:01H HLA-B*15:01H
  REGION 1..11: note = CONT. FROM ABOVE: HLA-B*15:02H HLA-B*07:05H HLA-B*15:11H
HVNNATNKATY

SEQ ID NO: 5575 - protein, 11 aa, Severe acute respiratory syndrome coronavirus 2
  REGION 1..11: note = Table A: HLA-A*74:01M HLA-A*31:01H
ATYKPNTWCIR

SEQ ID NO: 5576 - protein, 11 aa, Severe acute respiratory syndrome coronavirus 2
  REGION 1..11: note = Table A: HLA-B*58:02H HLA-B*57:01M HLA-A*25:01H HLA-B*46:01H HLA-A*30:02H HLA-C*12:02H HLA-B*38:02H HLA-B*15:01H HLA-B*57:03M
STKPVETSNSF

SEQ ID NO: 5577 - protein, 11 aa, Severe acute respiratory syndrome coronavirus 2
  REGION 1..11: note = Table A: HLA-B*55:02H HLA-C*15:05H
KPVETSNSFDV

SEQ ID NO: 5578 - protein, 11 aa, Severe acute respiratory syndrome coronavirus 2
  REGION 1..11: note = Table A: HLA-B*45:01H
SEDAQGMDNLA

SEQ ID NO: 5579 - protein, 11 aa, Severe acute respiratory syndrome coronavirus 2
  REGION 1..11: note = Table A: HLA-B*44:05M HLA-B*40:01M HLA-B*40:02M HLA-B*41:02M
VENPTIQKDVL

SEQ ID NO: 5580 - protein, 11 aa, Severe acute respiratory syndrome coronavirus 2
  REGION 1..11: note = Table A: HLA-B*57:03M
KTTEVVGDIIL

SEQ ID NO: 5581 - protein, 11 aa, Severe acute respiratory syndrome coronavirus 2
  REGION 1..11: note = Table A: HLA-A*03:02H HLA-A*11:01H HLA-A*11:02H HLA-A*36:01H HLA-A*68:01H HLA-A*34:02H
TTEVVGDIILK

SEQ ID NO: 5582 - protein, 11 aa, Severe acute respiratory syndrome coronavirus 2
  REGION 1..11: note = Table A: HLA-B*45:01H HLA-B*40:06H
TEVVGDIILKP

SEQ ID NO: 5583 - protein, 11 aa, Severe acute respiratory syndrome coronavirus 2
  REGION 1..11: note = Table A: HLA-A*68:02H
EVVGDIILKPA

SEQ ID NO: 5584 - protein, 11 aa, Severe acute respiratory syndrome coronavirus 2
  REGION 1..11: note = Table A: HLA-B*08:01H
DIILKPANNSL

SEQ ID NO: 5585 - protein, 11 aa, Severe acute respiratory syndrome coronavirus 2
  REGION 1..11: note = Table A: HLA-A*03:02H
IILKPANNSLK

SEQ ID NO: 5586 - protein, 11 aa, Severe acute respiratory syndrome coronavirus 2
  REGION 1..11: note = Table A: HLA-C*08:03H
KITEEVGHTDL

SEQ ID NO: 5587 - protein, 11 aa, Severe acute respiratory syndrome coronavirus 2
  REGION 1..11: note = Table A: HLA-A*36:01H HLA-A*01:01H HLA-C*04:03H
ITEEVGHTDLM

SEQ ID NO: 5588 - protein, 11 aa, Severe acute respiratory syndrome coronavirus 2
  REGION 1..11: note = Table A: HLA-B*45:01H
TEEVGHTDLMA

SEQ ID NO: 5589 - protein, 11 aa, Severe acute respiratory syndrome coronavirus 2
  REGION 1..11: note = Table A: HLA-B*45:01M HLA-B*40:06H HLA-B*50:01M
EEVGHTDLMAA

SEQ ID NO: 5590 - protein, 11 aa, Severe acute respiratory syndrome coronavirus 2
  REGION 1..11: note = Table A: HLA-A*25:01H HLA-A*26:01H HLA-A*26:02H
EVGHTDLMAAY

SEQ ID NO: 5591 - protein, 11 aa, Severe acute respiratory syndrome coronavirus 2
  REGION 1..11: note = Table A: HLA-A*02:02H
LMAAYVDNSSL

SEQ ID NO: 5592 - protein, 11 aa, Severe acute respiratory syndrome coronavirus 2
  REGION 1..11: note = Table A: HLA-A*11:01H HLA-B*27:02H HLA-A*30:02H HLA-A*23:01H
AYVDNSSLTIK

SEQ ID NO: 5593 - protein, 11 aa, Severe acute respiratory syndrome coronavirus 2
  REGION 1..11: note = Table A: HLA-A*11:303H HLA-A*03:01H HLA-A*03:02M HLA-A*11:01H HLA-A*11:02H HLA-A*36:01H HLA-A*68:01H HLA-A*02:07H HLA-A*34:02M HLA-C*07:27H
YVDNSSLTIKK

SEQ ID NO: 5594 - protein, 11 aa, Severe acute respiratory syndrome coronavirus 2
  REGION 1..11: note = Table A: HLA-A*74:01H
LTIKKPNELSR

SEQ ID NO: 5595 - protein, 11 aa, Severe acute respiratory syndrome coronavirus 2
  REGION 1..11: note = Table A: HLA-B*42:01H HLA-C*15:05H HLA-B*07:02H HLA-B*07:04M
KPNELSRVLGL

SEQ ID NO: 5596 - protein, 11 aa, Severe acute respiratory syndrome coronavirus 2
  REGION 1..11: note = Table A: HLA-A*02:11H HLA-A*02:08H HLA-B*57:03H
KTLATHGLAAV

SEQ ID NO: 5597 - protein, 11 aa, Severe acute respiratory syndrome coronavirus 2
  REGION 1..11: note = Table A: HLA-C*08:01H HLA-B*38:02H
AAVNSVPWDTI

SEQ ID NO: 5598 - protein, 11 aa, Severe acute respiratory syndrome coronavirus 2
  REGION 1..11: note = Table A: HLA-A*26:01H HLA-A*30:02M
NSVPWDTIANY

SEQ ID NO: 5599 - protein, 11 aa, Severe acute respiratory syndrome coronavirus 2
  REGION 1..11: note = Table A: HLA-A*02:05H
SVPWDTIANYA

SEQ ID NO: 5600 - protein, 11 aa, Severe acute respiratory syndrome coronavirus 2
  REGION 1..11: note = Table A: HLA-B*55:02H HLA-B*07:04H
KPFLNKVVSTT

SEQ ID NO: 5601 - protein, 11 aa, Severe acute respiratory syndrome coronavirus 2
  REGION 1..11: note = Table A: HLA-A*02:08H
KVVSTTTNIVT

SEQ ID NO: 5602 - protein, 11 aa, Severe acute respiratory syndrome coronavirus 2
  REGION 1..11: note = Table A: HLA-A*11:303H HLA-A*74:01H HLA-A*03:01H HLA-A*03:02M HLA-A*11:01M HLA-A*11:02M HLA-A*36:01H HLA-B*57:01H HLA-A*33:01H HLA-A*33:03M HLA-B*27:02H HLA-A*30:02H HLA-A*68:01H HLA-A*68:02H HLA-A*34:01H
  REGION 1..11: note = CONT. FROM ABOVE: HLA-A*34:02H HLA-C*07:27H HLA-A*31:01M HLA- A*66:01H
VVSTTTNIVTR

SEQ ID NO: 5603 - protein, 11 aa, Severe acute respiratory syndrome coronavirus 2
  REGION 1..11: note = Table A: HLA-A*74:01H
TTNIVTRCLNR

SEQ ID NO: 5604 - protein, 11 aa, Severe acute respiratory syndrome coronavirus 2
  REGION 1..11: note = Table A: HLA-A*24:07H
NYMPYFFTLLL

SEQ ID NO: 5605 - protein, 11 aa, Severe acute respiratory syndrome coronavirus 2
  REGION 1..11: note = Table A: HLA-B*38:02H
SRIKASMPTTI

SEQ ID NO: 5606 - protein, 11 aa, Severe acute respiratory syndrome coronavirus 2
  REGION 1..11: note = Table A: HLA-A*02:11H HLA-A*02:07H
SMPTTIAKNTV

SEQ ID NO: 5607 - protein, 11 aa, Severe acute respiratory syndrome coronavirus 2
  REGION 1..11: note = Table A: HLA-B*56:01H HLA-B*55:02H HLA-A*34:02H HLA-B*54:01H
MPTTIAKNTVK

SEQ ID NO: 5608 - protein, 11 aa, Severe acute respiratory syndrome coronavirus 2
  REGION 1..11: note = Table A: HLA-A*02:08H
TTIAKNTVKSV

SEQ ID NO: 5609 - protein, 11 aa, Severe acute respiratory syndrome coronavirus 2
  REGION 1..11: note = Table A: HLA-B*15:03H
AKNTVKSVGKF

SEQ ID NO: 5610 - protein, 11 aa, Severe acute respiratory syndrome coronavirus 2
  REGION 1..11: note = Table A: HLA-B*58:02H HLA-B*57:03M
ASFNYLKSPNF

SEQ ID NO: 5611 - protein, 11 aa, Severe acute respiratory syndrome coronavirus 2
  REGION 1..11: note = Table A: HLA-A*24:07H HLA-A*23:01H
NYLKSPNFSKL

SEQ ID NO: 5612 - protein, 11 aa, Severe acute respiratory syndrome coronavirus 2
  REGION 1..11: note = Table A: HLA-B*58:02M HLA-A*74:01H HLA-A*02:11M HLA-A*02:08H HLA-B*57:03M
KSPNFSKLINI

SEQ ID NO: 5613 - protein, 11 aa, Severe acute respiratory syndrome coronavirus 2
  REGION 1..11: note = Table A: HLA-B*42:01H HLA-B*55:02H HLA-C*15:05H HLA-B*07:04M
SPNFSKLINII

SEQ ID NO: 5614 - protein, 11 aa, Severe acute respiratory syndrome coronavirus 2
  REGION 1..11: note = Table A: HLA-A*24:02H HLA-A*24:07M HLA-A*23:01H
IYSTAALGVLM

SEQ ID NO: 5615 - protein, 11 aa, Severe acute respiratory syndrome coronavirus 2
  REGION 1..11: note = Table A: HLA-A*30:02H
VLMSNLGMPSY

SEQ ID NO: 5616 - protein, 11 aa, Severe acute respiratory syndrome coronavirus 2
  REGION 1..11: note = Table A: HLA-B*51:01M
EGYLNSTNVTI

SEQ ID NO: 5617 - protein, 11 aa, Severe acute respiratory syndrome coronavirus 2
  REGION 1..11: note = Table A: HLA-A*02:07H
GLDSLDTYPSL

SEQ ID NO: 5618 - protein, 11 aa, Severe acute respiratory syndrome coronavirus 2
  REGION 1..11: note = Table A: HLA-A*68:01H HLA-A*68:02M HLA-A*34:02H HLA-A*66:01H
DTYPSLETIQI

SEQ ID NO: 5619 - protein, 11 aa, Severe acute respiratory syndrome coronavirus 2
  REGION 1..11: note = Table A: HLA-C*15:05H HLA-B*54:01H
YPSLETIQITI

SEQ ID NO: 5620 - protein, 11 aa, Severe acute respiratory syndrome coronavirus 2
  REGION 1..11: note = Table A: HLA-A*26:03H HLA-A*68:01H HLA-A*34:01H HLA-A*34:02H HLA-A*66:01M
ETIQITISSFK

SEQ ID NO: 5621 - protein, 11 aa, Severe acute respiratory syndrome coronavirus 2
  REGION 1..11: note = Table A: HLA-A*02:11H HLA-A*02:04H
YVLGLAAIMQL

SEQ ID NO: 5622 - protein, 11 aa, Severe acute respiratory syndrome coronavirus 2
  REGION 1..11: note = Table A: HLA-A*24:07H
YFAVHFISNSW

SEQ ID NO: 5623 - protein, 11 aa, Severe acute respiratory syndrome coronavirus 2
  REGION 1..11: note = Table A: HLA-C*03:03H HLA-C*03:04M HLA-C*17:01H
FAVHFISNSWL

SEQ ID NO: 5624 - protein, 11 aa, Severe acute respiratory syndrome coronavirus 2
  REGION 1..11: note = Table A: HLA-A*74:01H
VQMAPISAMVR

SEQ ID NO: 5625 - protein, 11 aa, Severe acute respiratory syndrome coronavirus 2
  REGION 1..11: note = Table A: HLA-A*02:11H HLA-A*02:02H
QMAPISAMVRM

SEQ ID NO: 5626 - protein, 11 aa, Severe acute respiratory syndrome coronavirus 2
  REGION 1..11: note = Table A: HLA-C*15:05H
APISAMVRMYI

SEQ ID NO: 5627 - protein, 11 aa, Severe acute respiratory syndrome coronavirus 2
  REGION 1..11: note = Table A: HLA-A*33:03H HLA-A*68:01H HLA-A*34:01H
ECTTIVNGVRR

SEQ ID NO: 5628 - protein, 11 aa, Severe acute respiratory syndrome coronavirus 2
  REGION 1..11: note = Table A: HLA-C*14:02H HLA-C*14:03H HLA-A*24:07M HLA-A*23:01H
FYVYANGGKGF

SEQ ID NO: 5629 - protein, 11 aa, Severe acute respiratory syndrome coronavirus 2
  REGION 1..11: note = Table A: HLA-C*14:03H
TFISDEVARDL

SEQ ID NO: 5630 - protein, 11 aa, Severe acute respiratory syndrome coronavirus 2
  REGION 1..11: note = Table A: HLA-C*04:03H HLA-C*15:02H HLA-A*02:07H HLA-C*08:01H HLA-C*08:02M
ISDEVARDLSL

SEQ ID NO: 5631 - protein, 11 aa, Severe acute respiratory syndrome coronavirus 2
  REGION 1..11: note = Table A: HLA-B*18:01H
DEVARDLSLQF

SEQ ID NO: 5632 - protein, 11 aa, Severe acute respiratory syndrome coronavirus 2
  REGION 1..11: note = Table A: HLA-A*33:03H HLA-A*68:01H HLA-A*68:02H HLA-A*34:01M HLA-A*34:02M HLA-A*66:01H
EVARDLSLQFK

SEQ ID NO: 5633 - protein, 11 aa, Severe acute respiratory syndrome coronavirus 2
  REGION 1..11: note = Table A: HLA-A*74:01H
VARDLSLQFKR

SEQ ID NO: 5634 - protein, 11 aa, Severe acute respiratory syndrome coronavirus 2
  REGION 1..11: note = Table A: HLA-B*53:01H HLA-B*55:02H HLA-A*30:02M HLA-C*15:05M HLA-B*35:01H HLA-B*35:08M HLA-B*35:07M HLA-B*38:02H HLA-B*07:02H HLA-B*15:01H HLA-B*15:02H HLA-B*15:03H HLA-B*07:05M HLA-B*15:11M
RPINPTDQSSY

SEQ ID NO: 5635 - protein, 11 aa, Severe acute respiratory syndrome coronavirus 2
  REGION 1..11: note = Table A: HLA-A*68:02H
QSSYIVDSVTV

SEQ ID NO: 5636 - protein, 11 aa, Severe acute respiratory syndrome coronavirus 2
  REGION 1..11: note = Table A: HLA-A*11:303H HLA-A*03:01H HLA-A*03:02H HLA-A*11:01M HLA-A*11:02M HLA-A*34:02H HLA-C*07:27H
SSYIVDSVTVK

SEQ ID NO: 5637 - protein, 11 aa, Severe acute respiratory syndrome coronavirus 2
  REGION 1..11: note = Table A: HLA-B*58:01H HLA-A*36:01M HLA-B*57:01H HLA-A*30:02M HLA-B*57:03H
VTVKNGSIHLY

SEQ ID NO: 5638 - protein, 11 aa, Severe acute respiratory syndrome coronavirus 2
  REGION 1..11: note = Table A: HLA-A*24:07M HLA-A*66:01H
TVKNGSIHLYF

SEQ ID NO: 5639 - protein, 11 aa, Severe acute respiratory syndrome coronavirus 2
  REGION 1..11: note = Table A: HLA-C*14:02H HLA-C*14:03M HLA-A*29:02H HLA-A*30:02M HLA-A*24:07H
LYFDKAGQKTY

SEQ ID NO: 5640 - protein, 11 aa, Severe acute respiratory syndrome coronavirus 2
  REGION 1..11: note = Table A: HLA-C*04:03H
YFDKAGQKTYE

SEQ ID NO: 5641 - protein, 11 aa, Severe acute respiratory syndrome coronavirus 2
  REGION 1..11: note = Table A: HLA-A*33:01H
FDKAGQKTYER

SEQ ID NO: 5642 - protein, 11 aa, Severe acute respiratory syndrome coronavirus 2
  REGION 1..11: note = Table A: HLA-B*58:02H HLA-B*57:03H
KTYERHSLSHF

SEQ ID NO: 5643 - protein, 11 aa, Severe acute respiratory syndrome coronavirus 2
  REGION 1..11: note = Table A: HLA-A*02:04H HLA-A*02:02M HLA-B*38:02H
SLSHFVNLDNL

SEQ ID NO: 5644 - protein, 11 aa, Severe acute respiratory syndrome coronavirus 2
  REGION 1..11: note = Table A: HLA-A*36:01H
LSHFVNLDNLR

SEQ ID NO: 5645 - protein, 11 aa, Severe acute respiratory syndrome coronavirus 2
  REGION 1..11: note = Table A: HLA-B*38:02H
SHFVNLDNLRA

SEQ ID NO: 5646 - protein, 11 aa, Severe acute respiratory syndrome coronavirus 2
  REGION 1..11: note = Table A: HLA-B*57:03H
KSASVYYSQLM

SEQ ID NO: 5647 - protein, 11 aa, Severe acute respiratory syndrome coronavirus 2
  REGION 1..11: note = Table A: HLA-A*02:11H HLA-A*68:02M HLA-A*02:05H HLA-A*02:06H HLA-A*02:07H HLA-A*02:08H HLA-A*02:02H
LVSDVGDSAEV

SEQ ID NO: 5648 - protein, 11 aa, Severe acute respiratory syndrome coronavirus 2
  REGION 1..11: note = Table A: HLA-A*26:03H HLA-A*68:01H HLA-A*34:02H
DVGDSAEVAVK

SEQ ID NO: 5649 - protein, 11 aa, Severe acute respiratory syndrome coronavirus 2
  REGION 1..11: note = Table A: HLA-C*04:03H
VGDSAEVAVKM

SEQ ID NO: 5650 - protein, 11 aa, Severe acute respiratory syndrome coronavirus 2
  REGION 1..11: note = Table A: HLA-B*44:03H
AEVAVKMFDAY

SEQ ID NO: 5651 - protein, 11 aa, Severe acute respiratory syndrome coronavirus 2
  REGION 1..11: note = Table A: HLA-A*68:02H
EVAVKMFDAYV

SEQ ID NO: 5652 - protein, 11 aa, Severe acute respiratory syndrome coronavirus 2
  REGION 1..11: note = Table A: HLA-C*15:05H HLA-B*51:01H HLA-B*38:02H
DAYVNTFSSTF

SEQ ID NO: 5653 - protein, 11 aa, Severe acute respiratory syndrome coronavirus 2
  REGION 1..11: note = Table A: HLA-A*11:01H HLA-A*11:02M HLA-A*34:02H
STFNVPMEKLK

SEQ ID NO: 5654 - protein, 11 aa, Severe acute respiratory syndrome coronavirus 2
  REGION 1..11: note = Table A: HLA-B*56:01M HLA-B*08:01H HLA-B*55:02M HLA-B*55:01M HLA-B*54:01M
VPMEKLKTLVA

SEQ ID NO: 5655 - protein, 11 aa, Severe acute respiratory syndrome coronavirus 2
  REGION 1..11: note = Table A: HLA-B*58:01H HLA-B*58:02H HLA-A*02:11H HLA-C*15:05H HLA-A*02:08M HLA-C*08:03H HLA-B*57:03H
KTLVATAEAEL

SEQ ID NO: 5656 - protein, 11 aa, Severe acute respiratory syndrome coronavirus 2
  REGION 1..11: note = Table A: HLA-A*11:01H HLA-A*02:11H HLA-A*68:02M HLA-A*02:05M HLA-A*02:06H HLA-A*02:08M HLA-A*02:02M
ATAEAELAKNV

SEQ ID NO: 5657 - protein, 11 aa, Severe acute respiratory syndrome coronavirus 2
  REGION 1..11: note = Table A: HLA-B*44:02M HLA-B*44:05H HLA-C*16:04H HLA-B*45:01M HLA-B*44:03M HLA-A*02:02H HLA-B*40:01H HLA-B*40:02H HLA-B*40:06H HLA-B*41:02H HLA-B*49:01H HLA-B*50:01H
AEAELAKNVSL

SEQ ID NO: 5658 - protein, 11 aa, Severe acute respiratory syndrome coronavirus 2
  REGION 1..11: note = Table A: HLA-B*38:02H
LAKNVSLDNVL

SEQ ID NO: 5659 - protein, 11 aa, Severe acute respiratory syndrome coronavirus 2
  REGION 1..11: note = Table A: HLA-B*57:03H
VSLDNVLSTFI

SEQ ID NO: 5660 - protein, 11 aa, Severe acute respiratory syndrome coronavirus 2
  REGION 1..11: note = Table A: HLA-A*34:01H HLA-A*66:01H
NVLSTFISAAR

SEQ ID NO: 5661 - protein, 11 aa, Severe acute respiratory syndrome coronavirus 2
  REGION 1..11: note = Table A: HLA-B*57:03H
STFISAARQGF

SEQ ID NO: 5662 - protein, 11 aa, Severe acute respiratory syndrome coronavirus 2
  REGION 1..11: note = Table A: HLA-B*27:02H
QGFVDSDVETK

SEQ ID NO: 5663 - protein, 11 aa, Severe acute respiratory syndrome coronavirus 2
  REGION 1..11: note = Table A: HLA-A*02:11H
YMLTYNKVENM

SEQ ID NO: 5664 - protein, 11 aa, Severe acute respiratory syndrome coronavirus 2
  REGION 1..11: note = Table A: HLA-A*74:01H HLA-A*33:01M HLA-A*33:03H HLA-A*31:01M
TYNKVENMTPR

SEQ ID NO: 5665 - protein, 11 aa, Severe acute respiratory syndrome coronavirus 2
  REGION 1..11: note = Table A: HLA-B*45:01M HLA-B*50:01H
VENMTPRDLGA

SEQ ID NO: 5666 - protein, 11 aa, Severe acute respiratory syndrome coronavirus 2
  REGION 1..11: note = Table A: HLA-A*02:11H
KSHNIALIWNV

SEQ ID NO: 5667 - protein, 11 aa, Severe acute respiratory syndrome coronavirus 2
  REGION 1..11: note = Table A: HLA-A*02:11H HLA-A*02:07H
LIWNVKDFMSL

SEQ ID NO: 5668 - protein, 11 aa, Severe acute respiratory syndrome coronavirus 2
  REGION 1..11: note = Table A: HLA-B*45:01H
SEQLRKQIRSA

SEQ ID NO: 5669 - protein, 11 aa, Severe acute respiratory syndrome coronavirus 2
  REGION 1..11: note = Table A: HLA-B*07:04H
AAKKNNLPFKL

SEQ ID NO: 5670 - protein, 11 aa, Severe acute respiratory syndrome coronavirus 2
  REGION 1..11: note = Table A: HLA-B*13:01H HLA-B*13:02M
RQVVNVVTTKI

SEQ ID NO: 5671 - protein, 11 aa, Severe acute respiratory syndrome coronavirus 2
  REGION 1..11: note = Table A: HLA-C*15:05H HLA-C*08:03H
VVNVVTTKIAL

SEQ ID NO: 5672 - protein, 11 aa, Severe acute respiratory syndrome coronavirus 2
  REGION 1..11: note = Table A: HLA-A*32:01H
ALKGGKIVNNW

SEQ ID NO: 5673 - protein, 11 aa, Severe acute respiratory syndrome coronavirus 2
  REGION 1..11: note = Table A: HLA-A*36:01H
KGGKIVNNWLK

SEQ ID NO: 5674 - protein, 11 aa, Severe acute respiratory syndrome coronavirus 2
  REGION 1..11: note = Table A: HLA-A*02:11M HLA-A*68:02H
AIFYLITPVHV

SEQ ID NO: 5675 - protein, 11 aa, Severe acute respiratory syndrome coronavirus 2
  REGION 1..11: note = Table A: HLA-C*14:03H HLA-A*24:07H
IFYLITPVHVM

SEQ ID NO: 5676 - protein, 11 aa, Severe acute respiratory syndrome coronavirus 2
  REGION 1..11: note = Table A: HLA-A*34:02H
YLITPVHVMSK

SEQ ID NO: 5677 - protein, 11 aa, Severe acute respiratory syndrome coronavirus 2
  REGION 1..11: note = Table A: HLA-B*58:01H HLA-A*36:01H HLA-A*01:01H HLA-A*34:02H HLA-B*35:08H
HTDFSSEIIGY

SEQ ID NO: 5678 - protein, 11 aa, Severe acute respiratory syndrome coronavirus 2
  REGION 1..11: note = Table A: HLA-A*11:01H HLA-A*11:02H HLA-B*27:02H HLA-A*34:02H
TDFSSEIIGYK

SEQ ID NO: 5679 - protein, 11 aa, Severe acute respiratory syndrome coronavirus 2
  REGION 1..11: note = Table A: HLA-A*26:03H
EIIGYKAIDGG

SEQ ID NO: 5680 - protein, 11 aa, Severe acute respiratory syndrome coronavirus 2
  REGION 1..11: note = Table A: HLA-A*74:01H HLA-A*33:01M HLA-A*33:03M HLA-A*31:01M
GYKAIDGGVTR

SEQ ID NO: 5681 - protein, 11 aa, Severe acute respiratory syndrome coronavirus 2
  REGION 1..11: note = Table A: HLA-B*58:02M HLA-A*02:11H HLA-C*08:01H HLA-B*57:03H
KAIDGGVTRDI

SEQ ID NO: 5682 - protein, 11 aa, Severe acute respiratory syndrome coronavirus 2
  REGION 1..11: note = Table A: HLA-B*38:01H HLA-B*38:02H
TRDIASTDTCF

SEQ ID NO: 5683 - protein, 11 aa, Severe acute respiratory syndrome coronavirus 2
  REGION 1..11: note = Table A: HLA-A*03:02H
IASTDTCFANK

SEQ ID NO: 5684 - protein, 11 aa, Severe acute respiratory syndrome coronavirus 2
  REGION 1..11: note = Table A: HLA-B*58:01H HLA-B*57:01H HLA-B*53:01M HLA-B*57:03M HLA-B*13:01H
FANKHADFDTW

SEQ ID NO: 5685 - protein, 11 aa, Severe acute respiratory syndrome coronavirus 2
  REGION 1..11: note = Table A: HLA-A*36:01H
HADFDTWFSQR

SEQ ID NO: 5686 - protein, 11 aa, Severe acute respiratory syndrome coronavirus 2
  REGION 1..11: note = Table A: HLA-A*36:01M HLA-A*26:01M HLA-A*01:01H HLA-A*34:02M HLA-A*66:01H
DTWFSQRGGSY

SEQ ID NO: 5687 - protein, 11 aa, Severe acute respiratory syndrome coronavirus 2
  REGION 1..11: note = Table A: HLA-B*57:03H
IAAVITREVGF

SEQ ID NO: 5688 - protein, 11 aa, Severe acute respiratory syndrome coronavirus 2
  REGION 1..11: note = Table A: HLA-A*02:11H
AVITREVGFVV

SEQ ID NO: 5689 - protein, 11 aa, Severe acute respiratory syndrome coronavirus 2
  REGION 1..11: note = Table A: HLA-B*50:01H
REVGFVVPGLP

SEQ ID NO: 5690 - protein, 11 aa, Severe acute respiratory syndrome coronavirus 2
  REGION 1..11: note = Table A: HLA-C*03:03H HLA-C*03:04H HLA-C*17:01H
FVVPGLPGTIL

SEQ ID NO: 5691 - protein, 11 aa, Severe acute respiratory syndrome coronavirus 2
  REGION 1..11: note = Table A: HLA-A*74:01H HLA-A*68:01H
VVPGLPGTILR

SEQ ID NO: 5692 - protein, 11 aa, Severe acute respiratory syndrome coronavirus 2
  REGION 1..11: note = Table A: HLA-B*58:02M HLA-C*15:02H HLA-B*57:03H
RTTNGDFLHFL

SEQ ID NO: 5693 - protein, 11 aa, Severe acute respiratory syndrome coronavirus 2
  REGION 1..11: note = Table A: HLA-A*02:11H
FLHFLPRVFSA

SEQ ID NO: 5694 - protein, 11 aa, Severe acute respiratory syndrome coronavirus 2
  REGION 1..11: note = Table A: HLA-A*30:02M HLA-B*15:01H
RVFSAVGNICY

SEQ ID NO: 5695 - protein, 11 aa, Severe acute respiratory syndrome coronavirus 2
  REGION 1..11: note = Table A: HLA-C*16:01H HLA-B*46:01M HLA-C*03:02H HLA-C*12:02H HLA-C*12:03H
ICYTPSKLIEY

SEQ ID NO: 5696 - protein, 11 aa, Severe acute respiratory syndrome coronavirus 2
  REGION 1..11: note = Table A: HLA-C*15:05H HLA-B*35:01H
TPSKLIEYTDF

SEQ ID NO: 5697 - protein, 11 aa, Severe acute respiratory syndrome coronavirus 2
  REGION 1..11: note = Table A: HLA-B*50:01H
IEYTDFATSAC

SEQ ID NO: 5698 - protein, 11 aa, Severe acute respiratory syndrome coronavirus 2
  REGION 1..11: note = Table A: HLA-C*04:03H HLA-C*08:02H
YTDFATSACVL

SEQ ID NO: 5699 - protein, 11 aa, Severe acute respiratory syndrome coronavirus 2
  REGION 1..11: note = Table A: HLA-A*11:02H
CVLAAECTIFK

SEQ ID NO: 5700 - protein, 11 aa, Severe acute respiratory syndrome coronavirus 2
  REGION 1..11: note = Table A: HLA-B*35:01H
DTNVLEGSVAY

SEQ ID NO: 5701 - protein, 11 aa, Severe acute respiratory syndrome coronavirus 2
  REGION 1..11: note = Table A: HLA-A*33:03H
ESLRPDTRYVL

SEQ ID NO: 5702 - protein, 11 aa, Severe acute respiratory syndrome coronavirus 2
  REGION 1..11: note = Table A: HLA-A*34:01H
FPNTYLEGSVR

SEQ ID NO: 5703 - protein, 11 aa, Severe acute respiratory syndrome coronavirus 2
  REGION 1..11: note = Table A: HLA-B*27:02H
VRVVTTFDSEY

SEQ ID NO: 5704 - protein, 11 aa, Severe acute respiratory syndrome coronavirus 2
  REGION 1..11: note = Table A: HLA-A*34:01H
EAGVCVSTSGR

SEQ ID NO: 5705 - protein, 11 aa, Severe acute respiratory syndrome coronavirus 2
  REGION 1..11: note = Table A: HLA-A*30:02H
SGRWVLNNDYY

SEQ ID NO: 5706 - protein, 11 aa, Severe acute respiratory syndrome coronavirus 2
  REGION 1..11: note = Table A: HLA-B*27:05H
GRWVLNNDYYR

SEQ ID NO: 5707 - protein, 11 aa, Severe acute respiratory syndrome coronavirus 2
  REGION 1..11: note = Table A: HLA-A*02:07H
GVDAVNLLTNM

SEQ ID NO: 5708 - protein, 11 aa, Severe acute respiratory syndrome coronavirus 2
  REGION 1..11: note = Table A: HLA-A*02:11H HLA-A*68:02H
FTPLIQPIGAL

SEQ ID NO: 5709 - protein, 11 aa, Severe acute respiratory syndrome coronavirus 2
  REGION 1..11: note = Table A: HLA-B*58:02H HLA-C*15:05H HLA-B*57:03H
ASIVAGGIVAI

SEQ ID NO: 5710 - protein, 11 aa, Severe acute respiratory syndrome coronavirus 2
  REGION 1..11: note = Table A: HLA-A*68:02H
IVAGGIVAIVV

SEQ ID NO: 5711 - protein, 11 aa, Severe acute respiratory syndrome coronavirus 2
  REGION 1..11: note = Table A: HLA-B*55:02H
RAFGEYSHVVA

SEQ ID NO: 5712 - protein, 11 aa, Severe acute respiratory syndrome coronavirus 2
  REGION 1..11: note = Table A: HLA-C*14:03H
AFGEYSHVVAF

SEQ ID NO: 5713 - protein, 11 aa, Severe acute respiratory syndrome coronavirus 2
  REGION 1..11: note = Table A: HLA-A*24:02H HLA-A*24:07H
EYSHVVAFNTL

SEQ ID NO: 5714 - protein, 11 aa, Severe acute respiratory syndrome coronavirus 2
  REGION 1..11: note = Table A: HLA-B*38:02H
SHVVAFNTLLF

SEQ ID NO: 5715 - protein, 11 aa, Severe acute respiratory syndrome coronavirus 2
  REGION 1..11: note = Table A: HLA-B*35:01H
TPVYSFLPGVY

SEQ ID NO: 5716 - protein, 11 aa, Severe acute respiratory syndrome coronavirus 2
  REGION 1..11: note = Table A: HLA-A*02:04H HLA-A*02:07H
FLPGVYSVIYL

SEQ ID NO: 5717 - protein, 11 aa, Severe acute respiratory syndrome coronavirus 2
  REGION 1..11: note = Table A: HLA-A*24:07H
VYSVIYLYLTF

SEQ ID NO: 5718 - protein, 11 aa, Severe acute respiratory syndrome coronavirus 2
  REGION 1..11: note = Table A: HLA-A*02:11H HLA-A*68:02H
LTNDVSFLAHI

SEQ ID NO: 5719 - protein, 11 aa, Severe acute respiratory syndrome coronavirus 2
  REGION 1..11: note = Table A: HLA-A*68:02H
DVSFLAHIQWM

SEQ ID NO: 5720 - protein, 11 aa, Severe acute respiratory syndrome coronavirus 2
  REGION 1..11: note = Table A: HLA-A*02:11H
VMFTPLVPFWI

SEQ ID NO: 5721 - protein, 11 aa, Severe acute respiratory syndrome coronavirus 2
  REGION 1..11: note = Table A: HLA-A*25:01M HLA-B*46:01H HLA-A*26:01H HLA-A*26:02H HLA-C*03:02H HLA-A*30:02H HLA-A*68:02H HLA-C*15:05H HLA-C*12:02H HLA-C*08:01H HLA-A*23:01H HLA-B*38:02M HLA-A*32:01H HLA-B*15:01M HLA-B*15:02H HLA-B*07:05H
  REGION 1..11: note = CONT. FROM ABOVE: HLA-B*57:03H
VVFNGVSFSTF

SEQ ID NO: 5722 - protein, 11 aa, Severe acute respiratory syndrome coronavirus 2
  REGION 1..11: note = Table A: HLA-A*25:01H HLA-A*26:01H HLA-A*26:02H HLA-B*38:02H HLA-B*57:03H
STFEEAALCTF

SEQ ID NO: 5723 - protein, 11 aa, Severe acute respiratory syndrome coronavirus 2
  REGION 1..11: note = Table A: HLA-A*02:11H
CTFLLNKEMYL

SEQ ID NO: 5724 - protein, 11 aa, Severe acute respiratory syndrome coronavirus 2
  REGION 1..11: note = Table A: HLA-A*02:11H HLA-A*02:04H HLA-A*02:02H
FLLNKEMYLKL

SEQ ID NO: 5725 - protein, 11 aa, Severe acute respiratory syndrome coronavirus 2
  REGION 1..11: note = Table A: HLA-A*74:01H
LLNKEMYLKLR

SEQ ID NO: 5726 - protein, 11 aa, Severe acute respiratory syndrome coronavirus 2
  REGION 1..11: note = Table A: HLA-B*58:01H HLA-A*36:01H HLA-A*01:01H HLA-B*57:03H
RSDVLLPLTQY

SEQ ID NO: 5727 - protein, 11 aa, Severe acute respiratory syndrome coronavirus 2
  REGION 1..11: note = Table A: HLA-A*33:01H HLA-A*33:03H
DVLLPLTQYNR

SEQ ID NO: 5728 - protein, 11 aa, Severe acute respiratory syndrome coronavirus 2
  REGION 1..11: note = Table A: HLA-A*29:02H HLA-A*30:02H
VLLPLTQYNRY

SEQ ID NO: 5729 - protein, 11 aa, Severe acute respiratory syndrome coronavirus 2
  REGION 1..11: note = Table A: HLA-A*02:02H
LLPLTQYNRYL

SEQ ID NO: 5730 - protein, 11 aa, Severe acute respiratory syndrome coronavirus 2
  REGION 1..11: note = Table A: HLA-A*30:02H
RYLALYNKYKY

SEQ ID NO: 5731 - protein, 11 aa, Severe acute respiratory syndrome coronavirus 2
  REGION 1..11: note = Table A: HLA-A*74:01H
ALYNKYKYFSG

SEQ ID NO: 5732 - protein, 11 aa, Severe acute respiratory syndrome coronavirus 2
  REGION 1..11: note = Table A: HLA-C*14:02H HLA-C*14:03M HLA-A*36:01H HLA-A*29:01M HLA-A*29:02M HLA-B*07:05H
YFSGAMDTTSY

SEQ ID NO: 5733 - protein, 11 aa, Severe acute respiratory syndrome coronavirus 2
  REGION 1..11: note = Table A: HLA-A*33:03H HLA-A*66:01H
FSGAMDTTSYR

SEQ ID NO: 5734 - protein, 11 aa, Severe acute respiratory syndrome coronavirus 2
  REGION 1..11: note = Table A: HLA-B*56:01H HLA-B*55:02H HLA-B*55:01H HLA-A*02:01H HLA-B*54:01H
GAMDTTSYREA

SEQ ID NO: 5735 - protein, 11 aa, Severe acute respiratory syndrome coronavirus 2
  REGION 1..11: note = Table A: HLA-B*38:02H HLA-B*39:01H
NDFSNSGSDVL

SEQ ID NO: 5736 - protein, 11 aa, Severe acute respiratory syndrome coronavirus 2
  REGION 1..11: note = Table A: HLA-A*02:11H HLA-A*02:05H HLA-A*02:06H HLA-A*02:08H HLA-A*02:01H HLA-A*02:03H HLA-B*38:02H HLA-B*39:06H
YQPPQTSITSA

SEQ ID NO: 5737 - protein, 11 aa, Severe acute respiratory syndrome coronavirus 2
  REGION 1..11: note = Table A: HLA-C*15:05H HLA-B*07:05H
QPPQTSITSAV

SEQ ID NO: 5738 - protein, 11 aa, Severe acute respiratory syndrome coronavirus 2
  REGION 1..11: note = Table A: HLA-A*36:01H HLA-A*68:01H HLA-A*34:02H HLA-A*66:01H
ITSAVLQSGFR

SEQ ID NO: 5739 - protein, 11 aa, Severe acute respiratory syndrome coronavirus 2
  REGION 1..11: note = Table A: HLA-A*11:01H HLA-A*11:02H HLA-A*34:02H
TSAVLQSGFRK

SEQ ID NO: 5740 - protein, 11 aa, Severe acute respiratory syndrome coronavirus 2
  REGION 1..11: note = Table A: HLA-A*02:11H
KMAFPSGKVEG

SEQ ID NO: 5741 - protein, 11 aa, Severe acute respiratory syndrome coronavirus 2
  REGION 1..11: note = Table A: HLA-A*02:08H
MAFPSGKVEGC

SEQ ID NO: 5742 - protein, 11 aa, Severe acute respiratory syndrome coronavirus 2
  REGION 1..11: note = Table A: HLA-A*74:01H HLA-A*26:03M HLA-B*27:02H HLA-A*68:01H HLA-A*34:01M HLA-A*66:01H
FLVQAGNVQLR

SEQ ID NO: 5743 - protein, 11 aa, Severe acute respiratory syndrome coronavirus 2
  REGION 1..11: note = Table A: HLA-A*11:303H HLA-A*74:01M HLA-A*03:01M HLA-A*03:02H HLA-A*11:01M HLA-A*11:02M HLA-A*36:01M HLA-A*34:02H HLA-C*07:27H
KVDTANPKTPK

SEQ ID NO: 5744 - protein, 11 aa, Severe acute respiratory syndrome coronavirus 2
  REGION 1..11: note = Table A: HLA-A*68:01H HLA-A*34:02M HLA-A*66:01H
DTANPKTPKYK

SEQ ID NO: 5745 - protein, 11 aa, Severe acute respiratory syndrome coronavirus 2
  REGION 1..11: note = Table A: HLA-A*24:02H HLA-A*24:07H HLA-A*23:01M HLA-B*57:03H
KFVRIQPGQTF

SEQ ID NO: 5746 - protein, 11 aa, Severe acute respiratory syndrome coronavirus 2
  REGION 1..11: note = Table A: HLA-B*46:01H HLA-A*30:02H HLA-B*15:01H
ACYNGSPSGVY

SEQ ID NO: 5747 - protein, 11 aa, Severe acute respiratory syndrome coronavirus 2
  REGION 1..11: note = Table A: HLA-B*42:01M HLA-B*55:02H HLA-C*15:05M HLA-B*55:01H HLA-B*07:02M HLA-B*07:04H HLA-B*07:05M
RPNFTIKGSFL

SEQ ID NO: 5748 - protein, 11 aa, Severe acute respiratory syndrome coronavirus 2
  REGION 1..11: note = Table A: HLA-A*02:11H HLA-A*02:07H HLA-A*02:02M HLA-A*02:03H
YMHHMELPTGV

SEQ ID NO: 5749 - protein, 11 aa, Severe acute respiratory syndrome coronavirus 2
  REGION 1..11: note = Table A: HLA-B*55:02H HLA-B*38:01H HLA-B*38:02M HLA-B*39:06M HLA-B*39:01H HLA-B*15:10H
HHMELPTGVHA

SEQ ID NO: 5750 - protein, 11 aa, Severe acute respiratory syndrome coronavirus 2
  REGION 1..11: note = Table A: HLA-B*35:03M HLA-C*15:05M HLA-B*35:02H HLA-B*35:12H HLA-B*07:02H HLA-B*07:04M HLA-B*07:05H
LPTGVHAGTDL

SEQ ID NO: 5751 - protein, 11 aa, Severe acute respiratory syndrome coronavirus 2
  REGION 1..11: note = Table A: HLA-B*38:02H HLA-B*39:01H
VHAGTDLEGNF

SEQ ID NO: 5752 - protein, 11 aa, Severe acute respiratory syndrome coronavirus 2
  REGION 1..11: note = Table A: HLA-A*36:01H HLA-B*35:01H HLA-B*35:08H
HAGTDLEGNFY

SEQ ID NO: 5753 - protein, 11 aa, Severe acute respiratory syndrome coronavirus 2
  REGION 1..11: note = Table A: HLA-A*33:03H HLA-A*34:01H
EGNFYGPFVDR

SEQ ID NO: 5754 - protein, 11 aa, Severe acute respiratory syndrome coronavirus 2
  REGION 1..11: note = Table A: HLA-A*02:02H
FYGPFVDRQTA

SEQ ID NO: 5755 - protein, 11 aa, Severe acute respiratory syndrome coronavirus 2
  REGION 1..11: note = Table A: HLA-B*56:01M HLA-B*55:02M HLA-C*15:05H HLA-B*55:01H HLA-B*54:01H HLA-B*07:02H HLA-B*07:05H
GPFVDRQTAQA

SEQ ID NO: 5756 - protein, 11 aa, Severe acute respiratory syndrome coronavirus 2
  REGION 1..11: note = Table A: HLA-A*68:02H
QAAGTDTTITV

SEQ ID NO: 5757 - protein, 11 aa, Severe acute respiratory syndrome coronavirus 2
  REGION 1..11: note = Table A: HLA-A*25:01H
DTTITVNVLAW

SEQ ID NO: 5758 - protein, 11 aa, Severe acute respiratory syndrome coronavirus 2
  REGION 1..11: note = Table A: HLA-A*24:02H HLA-A*24:07H HLA-A*23:01H HLA-B*57:03H
LYAAVINGDRW

SEQ ID NO: 5759 - protein, 11 aa, Severe acute respiratory syndrome coronavirus 2
  REGION 1..11: note = Table A: HLA-C*08:01H HLA-B*57:03H
AAVINGDRWFL

SEQ ID NO: 5760 - protein, 11 aa, Severe acute respiratory syndrome coronavirus 2
  REGION 1..11: note = Table A: HLA-A*74:01M
VINGDRWFLNR

SEQ ID NO: 5761 - protein, 11 aa, Severe acute respiratory syndrome coronavirus 2
  REGION 1..11: note = Table A: HLA-A*24:07H
RWFLNRFTTTL

SEQ ID NO: 5762 - protein, 11 aa, Severe acute respiratory syndrome coronavirus 2
  REGION 1..11: note = Table A: HLA-A*24:07H
RFTTTLNDFNL

SEQ ID NO: 5763 - protein, 11 aa, Severe acute respiratory syndrome coronavirus 2
  REGION 1..11: note = Table A: HLA-A*68:02H
FTTTLNDFNLV

SEQ ID NO: 5764 - protein, 11 aa, Severe acute respiratory syndrome coronavirus 2
  REGION 1..11: note = Table A: HLA-A*03:02H
TLNDFNLVAMK

SEQ ID NO: 5765 - protein, 11 aa, Severe acute respiratory syndrome coronavirus 2
  REGION 1..11: note = Table A: HLA-A*36:01H
LNDFNLVAMKY

SEQ ID NO: 5766 - protein, 11 aa, Severe acute respiratory syndrome coronavirus 2
  REGION 1..11: note = Table A: HLA-A*02:11H HLA-A*68:02H
YNYEPLTQDHV

SEQ ID NO: 5767 - protein, 11 aa, Severe acute respiratory syndrome coronavirus 2
  REGION 1..11: note = Table A: HLA-C*08:02H
TQDHVDILGPL

SEQ ID NO: 5768 - protein, 11 aa, Severe acute respiratory syndrome coronavirus 2
  REGION 1..11: note = Table A: HLA-B*38:02H HLA-B*39:06H HLA-B*54:01H HLA-B*39:01H
DHVDILGPLSA

SEQ ID NO: 5769 - protein, 11 aa, Severe acute respiratory syndrome coronavirus 2
  REGION 1..11: note = Table A: HLA-A*02:11H HLA-A*02:02H HLA-A*02:03H
ILGPLSAQTGI

SEQ ID NO: 5770 - protein, 11 aa, Severe acute respiratory syndrome coronavirus 2
  REGION 1..11: note = Table A: HLA-B*55:02H HLA-C*15:05M HLA-B*07:05H
GPLSAQTGIAV

SEQ ID NO: 5771 - protein, 11 aa, Severe acute respiratory syndrome coronavirus 2
  REGION 1..11: note = Table A: HLA-B*57:03H
ASLKELLQNGM

SEQ ID NO: 5772 - protein, 11 aa, Severe acute respiratory syndrome coronavirus 2
  REGION 1..11: note = Table A: HLA-A*02:02H HLA-A*02:03H
GMNGRTILGSA

SEQ ID NO: 5773 - protein, 11 aa, Severe acute respiratory syndrome coronavirus 2
  REGION 1..11: note = Table A: HLA-B*45:01H HLA-B*49:01H HLA-B*50:01H
LEDEFTPFDVV

SEQ ID NO: 5774 - protein, 11 aa, Severe acute respiratory syndrome coronavirus 2
  REGION 1..11: note = Table A: HLA-B*56:01H HLA-B*55:02H HLA-C*15:05H HLA-B*54:01H
TPFDVVRQCSG

SEQ ID NO: 5775 - protein, 11 aa, Severe acute respiratory syndrome coronavirus 2
  REGION 1..11: note = Table A: HLA-A*68:01H
SGVTFQSAVKR

SEQ ID NO: 5776 - protein, 11 aa, Severe acute respiratory syndrome coronavirus 2
  REGION 1..11: note = Table A: HLA-B*58:02M HLA-B*57:03H
VTFQSAVKRTI

SEQ ID NO: 5777 - protein, 11 aa, Severe acute respiratory syndrome coronavirus 2
  REGION 1..11: note = Table A: HLA-B*58:02M HLA-A*74:01H HLA-B*57:03M
RTIKGTHHWLL

SEQ ID NO: 5778 - protein, 11 aa, Severe acute respiratory syndrome coronavirus 2
  REGION 1..11: note = Table A: HLA-B*07:04H
TIKGTHHWLLL

SEQ ID NO: 5779 - protein, 11 aa, Severe acute respiratory syndrome coronavirus 2
  REGION 1..11: note = Table A: HLA-A*24:07H
FFLYENAFLPF

SEQ ID NO: 5780 - protein, 11 aa, Severe acute respiratory syndrome coronavirus 2
  REGION 1..11: note = Table A: HLA-A*02:04H HLA-A*02:02H
FLYENAFLPFA

SEQ ID NO: 5781 - protein, 11 aa, Severe acute respiratory syndrome coronavirus 2
  REGION 1..11: note = Table A: HLA-C*14:03H HLA-A*02:07H
FLPFAMGIIAM

SEQ ID NO: 5782 - protein, 11 aa, Severe acute respiratory syndrome coronavirus 2
  REGION 1..11: note = Table A: HLA-B*35:07H
FAMGIIAMSAF

SEQ ID NO: 5783 - protein, 11 aa, Severe acute respiratory syndrome coronavirus 2
  REGION 1..11: note = Table A: HLA-A*02:11H HLA-A*02:02H
MMFVKHKHAFL

SEQ ID NO: 5784 - protein, 11 aa, Severe acute respiratory syndrome coronavirus 2
  REGION 1..11: note = Table A: HLA-B*46:01H HLA-A*29:02H HLA-C*03:02H HLA-B*38:02H HLA-B*15:01H HLA-B*15:02M
FLLPSLATVAY

SEQ ID NO: 5785 - protein, 11 aa, Severe acute respiratory syndrome coronavirus 2
  REGION 1..11: note = Table A: HLA-A*74:01H HLA-A*33:03H HLA-A*34:02H
MVYMPASWVMR

SEQ ID NO: 5786 - protein, 11 aa, Severe acute respiratory syndrome coronavirus 2
  REGION 1..11: note = Table A: HLA-A*24:02M HLA-A*24:07H HLA-A*23:01M
VYMPASWVMRI

SEQ ID NO: 5787 - protein, 11 aa, Severe acute respiratory syndrome coronavirus 2
  REGION 1..11: note = Table A: HLA-A*36:01H HLA-B*27:02H HLA-A*34:01H HLA-A*34:02H HLA-A*66:01H
DMVDTSLSGFK

SEQ ID NO: 5788 - protein, 11 aa, Severe acute respiratory syndrome coronavirus 2
  REGION 1..11: note = Table A: HLA-A*02:07H HLA-C*08:01H HLA-B*38:02H
MVDTSLSGFKL

SEQ ID NO: 5789 - protein, 11 aa, Severe acute respiratory syndrome coronavirus 2
  REGION 1..11: note = Table A: HLA-B*58:01H HLA-B*57:01H HLA-A*25:01M HLA-B*53:01M HLA-B*35:07H HLA-B*15:13H HLA-B*38:02H HLA-A*32:01M HLA-B*15:02H HLA-B*57:03M
TVYDDGARRVW

SEQ ID NO: 5790 - protein, 11 aa, Severe acute respiratory syndrome coronavirus 2
  REGION 1..11: note = Table A: HLA-B*57:03H
RVWTLMNVLTL

SEQ ID NO: 5791 - protein, 11 aa, Severe acute respiratory syndrome coronavirus 2
  REGION 1..11: note = Table A: HLA-A*03:02H HLA-A*11:01H HLA-A*11:02M HLA-A*34:02H
TLMNVLTLVYK

SEQ ID NO: 5792 - protein, 11 aa, Severe acute respiratory syndrome coronavirus 2
  REGION 1..11: note = Table A: HLA-A*02:11H HLA-A*02:05M HLA-A*02:06H HLA-A*02:08H
KVYYGNALDQA

SEQ ID NO: 5793 - protein, 11 aa, Severe acute respiratory syndrome coronavirus 2
  REGION 1..11: note = Table A: HLA-A*23:01H
VYYGNALDQAI

SEQ ID NO: 5794 - protein, 11 aa, Severe acute respiratory syndrome coronavirus 2
  REGION 1..11: note = Table A: HLA-A*02:07H
ALDQAISMWAL

SEQ ID NO: 5795 - protein, 11 aa, Severe acute respiratory syndrome coronavirus 2
  REGION 1..11: note = Table A: HLA-B*07:05H
SNYSGVVTTVM

SEQ ID NO: 5796 - protein, 11 aa, Severe acute respiratory syndrome coronavirus 2
  REGION 1..11: note = Table A: HLA-A*24:02H HLA-A*24:07M HLA-A*23:01M
NYSGVVTTVMF

SEQ ID NO: 5797 - protein, 11 aa, Severe acute respiratory syndrome coronavirus 2
  REGION 1..11: note = Table A: HLA-B*35:03H HLA-C*15:05M HLA-B*07:05H
CPIFFITGNTL

SEQ ID NO: 5798 - protein, 11 aa, Severe acute respiratory syndrome coronavirus 2
  REGION 1..11: note = Table A: HLA-B*38:02H
FRLTLGVYDYL

SEQ ID NO: 5799 - protein, 11 aa, Severe acute respiratory syndrome coronavirus 2
  REGION 1..11: note = Table A: HLA-C*04:01H HLA-C*04:03H HLA-A*24:02M HLA-A*24:07H HLA-C*08:01H HLA-A*23:01M
VYDYLVSTQEF

SEQ ID NO: 5800 - protein, 11 aa, Severe acute respiratory syndrome coronavirus 2
  REGION 1..11: note = Table A: HLA-B*27:02H
YDYLVSTQEFR

SEQ ID NO: 5801 - protein, 11 aa, Severe acute respiratory syndrome coronavirus 2
  REGION 1..11: note = Table A: HLA-A*02:11H HLA-A*02:02H
YLVSTQEFRYM

SEQ ID NO: 5802 - protein, 11 aa, Severe acute respiratory syndrome coronavirus 2
  REGION 1..11: note = Table A: HLA-A*03:01H HLA-A*03:02H
YMNSQGLLPPK

SEQ ID NO: 5803 - protein, 11 aa, Severe acute respiratory syndrome coronavirus 2
  REGION 1..11: note = Table A: HLA-B*13:02H
SQGLLPPKNSI

SEQ ID NO: 5804 - protein, 11 aa, Severe acute respiratory syndrome coronavirus 2
  REGION 1..11: note = Table A: HLA-A*02:07H HLA-A*24:07H
LLPPKNSIDAF

SEQ ID NO: 5805 - protein, 11 aa, Severe acute respiratory syndrome coronavirus 2
  REGION 1..11: note = Table A: HLA-A*74:01H
KLNIKLLGVGG

SEQ ID NO: 5806 - protein, 11 aa, Severe acute respiratory syndrome coronavirus 2
  REGION 1..11: note = Table A: HLA-A*11:01H HLA-A*11:02H HLA-C*07:27H
ATVQSKMSDVK

SEQ ID NO: 5807 - protein, 11 aa, Severe acute respiratory syndrome coronavirus 2
  REGION 1..11: note = Table A: HLA-A*68:02H HLA-A*02:04H
SVVLLSVLQQL

SEQ ID NO: 5808 - protein, 11 aa, Severe acute respiratory syndrome coronavirus 2
  REGION 1..11: note = Table A: HLA-A*03:01H HLA-A*03:02H HLA-A*11:01H HLA-A*11:02H
VQLHNDILLAK

SEQ ID NO: 5809 - protein, 11 aa, Severe acute respiratory syndrome coronavirus 2
  REGION 1..11: note = Table A: HLA-B*40:01H
TEAFEKMVSLL

SEQ ID NO: 5810 - protein, 11 aa, Severe acute respiratory syndrome coronavirus 2
  REGION 1..11: note = Table A: HLA-A*03:02H HLA-A*11:01H HLA-A*11:02H
LSMQGAVDINK

SEQ ID NO: 5811 - protein, 11 aa, Severe acute respiratory syndrome coronavirus 2
  REGION 1..11: note = Table A: HLA-B*44:05H HLA-A*02:11H HLA-A*02:04H HLA-A*02:02M HLA-B*38:02H
SMQGAVDINKL

SEQ ID NO: 5812 - protein, 11 aa, Severe acute respiratory syndrome coronavirus 2
  REGION 1..11: note = Table A: HLA-B*44:05H HLA-B*40:01H HLA-B*40:02H HLA-B*41:02H
CEEMLDNRATL

SEQ ID NO: 5813 - protein, 11 aa, Severe acute respiratory syndrome coronavirus 2
  REGION 1..11: note = Table A: HLA-A*02:11M HLA-A*02:07H HLA-A*02:01H HLA-A*02:02H HLA-B*38:02M HLA-B*13:02H
MLDNRATLQAI

SEQ ID NO: 5814 - protein, 11 aa, Severe acute respiratory syndrome coronavirus 2
  REGION 1..11: note = Table A: HLA-B*57:03H
RATLQAIASEF

SEQ ID NO: 5815 - protein, 11 aa, Severe acute respiratory syndrome coronavirus 2
  REGION 1..11: note = Table A: HLA-C*16:01H HLA-B*46:01H HLA-C*03:02H HLA-A*30:02H HLA-C*12:02H HLA-B*35:01H HLA-B*35:07H
IASEFSSLPSY

SEQ ID NO: 5816 - protein, 11 aa, Severe acute respiratory syndrome coronavirus 2
  REGION 1..11: note = Table A: HLA-B*45:01M HLA-B*40:06H HLA-B*50:01M
SEFSSLPSYAA

SEQ ID NO: 5817 - protein, 11 aa, Severe acute respiratory syndrome coronavirus 2
  REGION 1..11: note = Table A: HLA-A*02:05H HLA-A*02:06H HLA-A*02:07H HLA-A*02:01H HLA-A*02:02H
SLPSYAAFATA

SEQ ID NO: 5818 - protein, 11 aa, Severe acute respiratory syndrome coronavirus 2
  REGION 1..11: note = Table A: HLA-B*35:01M HLA-B*35:07H HLA-B*38:02H
YAAFATAQEAY

SEQ ID NO: 5819 - protein, 11 aa, Severe acute respiratory syndrome coronavirus 2
  REGION 1..11: note = Table A: HLA-A*68:02H
ATAQEAYEQAV

SEQ ID NO: 5820 - protein, 11 aa, Severe acute respiratory syndrome coronavirus 2
  REGION 1..11: note = Table A: HLA-A*02:08H
AVANGDSEVVL

SEQ ID NO: 5821 - protein, 11 aa, Severe acute respiratory syndrome coronavirus 2
  REGION 1..11: note = Table A: HLA-A*11:303H HLA-A*03:02M HLA-A*11:01M HLA-A*11:02H HLA-A*36:01H HLA-B*27:02M HLA-A*30:02H HLA-A*68:01M HLA-A*34:02H HLA-C*07:27H
VANGDSEVVLK

SEQ ID NO: 5822 - protein, 11 aa, Severe acute respiratory syndrome coronavirus 2
  REGION 1..11: note = Table A: HLA-B*15:03H
KKSLNVAKSEF

SEQ ID NO: 5823 - protein, 11 aa, Severe acute respiratory syndrome coronavirus 2
  REGION 1..11: note = Table A: HLA-A*74:01H
SLNVAKSEFDR

SEQ ID NO: 5824 - protein, 11 aa, Severe acute respiratory syndrome coronavirus 2
  REGION 1..11: note = Table A: HLA-A*74:01H HLA-A*33:01H HLA-A*33:03H HLA-A*26:03H HLA-A*68:01H HLA-A*34:02H HLA-A*31:01H HLA-A*66:01H
SEFDRDAAMQR

SEQ ID NO: 5825 - protein, 11 aa, Severe acute respiratory syndrome coronavirus 2
  REGION 1..11: note = Table A: HLA-A*03:01M HLA-A*03:02H HLA-A*36:01M HLA-A*29:01H HLA-A*29:02M HLA-A*30:02M HLA-A*02:02M HLA-B*38:02H HLA-B*15:01M HLA-B*15:03H HLA-B*07:05H
KMADQAMTQMY

SEQ ID NO: 5826 - protein, 11 aa, Severe acute respiratory syndrome coronavirus 2
  REGION 1..11: note = Table A: HLA-A*11:01H HLA-A*36:01H HLA-A*34:02M
MADQAMTQMYK

SEQ ID NO: 5827 - protein, 11 aa, Severe acute respiratory syndrome coronavirus 2
  REGION 1..11: note = Table A: HLA-B*45:01M HLA-B*50:01H
SEDKRAKVTSA

SEQ ID NO: 5828 - protein, 11 aa, Severe acute respiratory syndrome coronavirus 2
  REGION 1..11: note = Table A: HLA-B*07:04H
RAKVTSAMQTM

SEQ ID NO: 5829 - protein, 11 aa, Severe acute respiratory syndrome coronavirus 2
  REGION 1..11: note = Table A: HLA-B*58:01H HLA-C*15:05H HLA-B*57:03M
KVTSAMQTMLF

SEQ ID NO: 5830 - protein, 11 aa, Severe acute respiratory syndrome coronavirus 2
  REGION 1..11: note = Table A: HLA-A*74:01H
AMQTMLFTMLR

SEQ ID NO: 5831 - protein, 11 aa, Severe acute respiratory syndrome coronavirus 2
  REGION 1..11: note = Table A: HLA-B*13:01H
KLDNDALNNII

SEQ ID NO: 5832 - protein, 11 aa, Severe acute respiratory syndrome coronavirus 2
  REGION 1..11: note = Table A: HLA-A*33:01M HLA-A*33:03M HLA-B*27:02H HLA-A*68:01M HLA-A*34:01H HLA-A*34:02H HLA-A*66:01M
DALNNIINNAR

SEQ ID NO: 5833 - protein, 11 aa, Severe acute respiratory syndrome coronavirus 2
  REGION 1..11: note = Table A: HLA-B*56:01H HLA-B*55:02H HLA-C*15:05H HLA-B*55:01M HLA-C*08:01H HLA-B*54:01H HLA-B*07:05H
VPLNIIPLTTA

SEQ ID NO: 5834 - protein, 11 aa, Severe acute respiratory syndrome coronavirus 2
  REGION 1..11: note = Table A: HLA-A*03:02H HLA-A*11:01M HLA-A*11:02M HLA-A*36:01H HLA-B*27:02H HLA-A*68:01H HLA-A*34:02M HLA-C*07:27H HLA-A*66:01H
MVVIPDYNTYK

SEQ ID NO: 5835 - protein, 11 aa, Severe acute respiratory syndrome coronavirus 2
  REGION 1..11: note = Table A: HLA-A*68:02H
NTCDGTTFTYA

SEQ ID NO: 5836 - protein, 11 aa, Severe acute respiratory syndrome coronavirus 2
  REGION 1..11: note = Table A: HLA-A*02:11H HLA-A*02:01M HLA-A*02:02H
ALWEIQQVVDA

SEQ ID NO: 5837 - protein, 11 aa, Severe acute respiratory syndrome coronavirus 2
  REGION 1..11: note = Table A: HLA-C*04:03H HLA-A*02:11H HLA-A*02:06H HLA-A*02:07H HLA-A*02:08H HLA-C*08:01H HLA-C*08:02M HLA-C*05:01H HLA-B*13:01H
VVDADSKIVQL

SEQ ID NO: 5838 - protein, 11 aa, Severe acute respiratory syndrome coronavirus 2
  REGION 1..11: note = Table A: HLA-B*44:05M HLA-B*40:01H HLA-B*40:02M HLA-B*49:01H
SEISMDNSPNL

SEQ ID NO: 5839 - protein, 11 aa, Severe acute respiratory syndrome coronavirus 2
  REGION 1..11: note = Table A: HLA-B*58:01M HLA-B*57:01M HLA-A*32:01H HLA-B*57:03M
ISMDNSPNLAW

SEQ ID NO: 5840 - protein, 11 aa, Severe acute respiratory syndrome coronavirus 2
  REGION 1..11: note = Table A: HLA-B*57:03H
TALRANSAVKL

SEQ ID NO: 5841 - protein, 11 aa, Severe acute respiratory syndrome coronavirus 2
  REGION 1..11: note = Table A: HLA-B*39:01H
LQNNELSPVAL

SEQ ID NO: 5842 - protein, 11 aa, Severe acute respiratory syndrome coronavirus 2
  REGION 1..11: note = Table A: HLA-A*33:01H HLA-A*33:03M HLA-A*68:01H
QNNELSPVALR

SEQ ID NO: 5843 - protein, 11 aa, Severe acute respiratory syndrome coronavirus 2
  REGION 1..11: note = Table A: HLA-B*56:01M HLA-B*55:02M HLA-B*55:01H HLA-B*54:01H
SPVALRQMSCA

SEQ ID NO: 5844 - protein, 11 aa, Severe acute respiratory syndrome coronavirus 2
  REGION 1..11: note = Table A: HLA-B*35:01H
TACTDDNALAY

SEQ ID NO: 5845 - protein, 11 aa, Severe acute respiratory syndrome coronavirus 2
  REGION 1..11: note = Table A: HLA-A*66:01H
LAYYNTTKGGR

SEQ ID NO: 5846 - protein, 11 aa, Severe acute respiratory syndrome coronavirus 2
  REGION 1..11: note = Table A: HLA-C*14:03H HLA-A*30:02H HLA-A*24:07H HLA-A*23:01H
AYYNTTKGGRF

SEQ ID NO: 5847 - protein, 11 aa, Severe acute respiratory syndrome coronavirus 2
  REGION 1..11: note = Table A: HLA-B*07:04H
TTKGGRFVLAL

SEQ ID NO: 5848 - protein, 11 aa, Severe acute respiratory syndrome coronavirus 2
  REGION 1..11: note = Table A: HLA-B*58:01H HLA-B*57:01H HLA-B*44:03H HLA-B*57:03M HLA-B*13:01M
ALLSDLQDLKW

SEQ ID NO: 5849 - protein, 11 aa, Severe acute respiratory syndrome coronavirus 2
  REGION 1..11: note = Table A: HLA-A*02:02H
LLSDLQDLKWA

SEQ ID NO: 5850 - protein, 11 aa, Severe acute respiratory syndrome coronavirus 2
  REGION 1..11: note = Table A: HLA-B*46:01H HLA-B*53:01H HLA-B*35:03H HLA-B*35:01H HLA-B*35:08M HLA-B*35:07H HLA-B*38:02H HLA-B*54:01H HLA-B*07:04H HLA-B*15:02M HLA-B*15:11H
FPKSDGTGTIY

SEQ ID NO: 5851 - protein, 11 aa, Severe acute respiratory syndrome coronavirus 2
  REGION 1..11: note = Table A: HLA-A*24:07H
IYTELEPPCRF

SEQ ID NO: 5852 - protein, 11 aa, Severe acute respiratory syndrome coronavirus 2
  REGION 1..11: note = Table A: HLA-A*03:02H
VTDTPKGPKVK

SEQ ID NO: 5853 - protein, 11 aa, Severe acute respiratory syndrome coronavirus 2
  REGION 1..11: note = Table A: HLA-A*02:11M HLA-A*02:04H HLA-A*02:02M HLA-A*02:03H
YLYFIKGLNNL

SEQ ID NO: 5854 - protein, 11 aa, Severe acute respiratory syndrome coronavirus 2
  REGION 1..11: note = Table A: HLA-A*02:11H HLA-A*02:04H HLA-A*02:02H
GLNNLNRGMVL

SEQ ID NO: 5855 - protein, 11 aa, Severe acute respiratory syndrome coronavirus 2
  REGION 1..11: note = Table A: HLA-A*34:01H HLA-A*34:02H HLA-A*66:01H
MVLGSLAATVR

SEQ ID NO: 5856 - protein, 11 aa, Severe acute respiratory syndrome coronavirus 2
  REGION 1..11: note = Table A: HLA-A*02:11H HLA-A*02:04H HLA-A*02:01H
VLGSLAATVRL

SEQ ID NO: 5857 - protein, 11 aa, Severe acute respiratory syndrome coronavirus 2
  REGION 1..11: note = Table A: HLA-A*25:01H HLA-A*26:01H HLA-A*26:02H HLA-A*26:03M HLA-A*68:01H HLA-A*34:01H HLA-A*34:02H HLA-A*66:01H
EVPANSTVLSF

SEQ ID NO: 5858 - protein, 11 aa, Severe acute respiratory syndrome coronavirus 2
  REGION 1..11: note = Table A: HLA-B*46:01H
CAFAVDAAKAY

SEQ ID NO: 5859 - protein, 11 aa, Severe acute respiratory syndrome coronavirus 2
  REGION 1..11: note = Table A: HLA-A*03:02H
AFAVDAAKAYK

SEQ ID NO: 5860 - protein, 11 aa, Severe acute respiratory syndrome coronavirus 2
  REGION 1..11: note = Table A: HLA-A*36:01H
AVDAAKAYKDY

SEQ ID NO: 5861 - protein, 11 aa, Severe acute respiratory syndrome coronavirus 2
  REGION 1..11: note = Table A: HLA-A*68:02H
DAAKAYKDYLA

SEQ ID NO: 5862 - protein, 11 aa, Severe acute respiratory syndrome coronavirus 2
  REGION 1..11: note = Table A: HLA-C*08:03H HLA-B*40:02H
KDYLASGGQPI

SEQ ID NO: 5863 - protein, 11 aa, Severe acute respiratory syndrome coronavirus 2
  REGION 1..11: note = Table A: HLA-B*38:01H HLA-B*38:02M HLA-B*39:01H HLA-B*15:10H
THTGTGQAITV

SEQ ID NO: 5864 - protein, 11 aa, Severe acute respiratory syndrome coronavirus 2
  REGION 1..11: note = Table A: HLA-B*35:01H HLA-B*35:08H
TPEANMDQESF

SEQ ID NO: 5865 - protein, 11 aa, Severe acute respiratory syndrome coronavirus 2
  REGION 1..11: note = Table A: HLA-A*26:01H
ESFGGASCCLY

SEQ ID NO: 5866 - protein, 11 aa, Severe acute respiratory syndrome coronavirus 2
  REGION 1..11: note = Table A: HLA-B*38:02H
CHIDHPNPKGF

SEQ ID NO: 5867 - protein, 11 aa, Severe acute respiratory syndrome coronavirus 2
  REGION 1..11: note = Table A: HLA-B*38:02H
DHPNPKGFCDL

SEQ ID NO: 5868 - protein, 11 aa, Severe acute respiratory syndrome coronavirus 2
  REGION 1..11: note = Table A: HLA-A*11:01H HLA-A*34:02H
CANDPVGFTLK

SEQ ID NO: 5869 - protein, 11 aa, Severe acute respiratory syndrome coronavirus 2
  REGION 1..11: note = Table A: HLA-B*51:01H HLA-B*54:01H
DPVGFTLKNTV

SEQ ID NO: 5870 - protein, 11 aa, Severe acute respiratory syndrome coronavirus 2
  REGION 1..11: note = Table A: HLA-B*39:06H
DQLREPMLQSA

SEQ ID NO: 5871 - protein, 11 aa, Severe acute respiratory syndrome coronavirus 2
  REGION 1..11: note = Table A: HLA-A*74:01H HLA-A*11:01H HLA-A*11:02H HLA-A*33:01H HLA-A*33:03H HLA-A*26:03M HLA-A*68:01H HLA-A*34:01M HLA-A*34:02M HLA-A*31:01M HLA-A*66:01H
QSADAQSFLNR

SEQ ID NO: 5872 - protein, 11 aa, Severe acute respiratory syndrome coronavirus 2
  REGION 1..11: note = Table A: HLA-B*38:02H
SADAQSFLNRV

SEQ ID NO: 5873 - protein, 11 aa, Severe acute respiratory syndrome coronavirus 2
  REGION 1..11: note = Table A: HLA-A*33:01H HLA-B*54:01H
DAQSFLNRVCG

SEQ ID NO: 5874 - protein, 11 aa, Severe acute respiratory syndrome coronavirus 2
  REGION 1..11: note = Table A: HLA-A*74:01H HLA-A*03:02H HLA-A*11:01M HLA-A*11:02H HLA-A*68:01M HLA-A*31:01H
GTGTSTDVVYR

SEQ ID NO: 5875 - protein, 11 aa, Severe acute respiratory syndrome coronavirus 2
  REGION 1..11: note = Table A: HLA-B*57:01H HLA-B*57:03H
GTSTDVVYRAF

SEQ ID NO: 5876 - protein, 11 aa, Severe acute respiratory syndrome coronavirus 2
  REGION 1..11: note = Table A: HLA-A*33:03H HLA-A*30:02H
IYNDKVAGFAK

SEQ ID NO: 5877 - protein, 11 aa, Severe acute respiratory syndrome coronavirus 2
  REGION 1..11: note = Table A: HLA-A*74:01H
KVAGFAKFLKT

SEQ ID NO: 5878 - protein, 11 aa, Severe acute respiratory syndrome coronavirus 2
  REGION 1..11: note = Table A: HLA-B*44:05H
DEDDNLIDSYF

SEQ ID NO: 5879 - protein, 11 aa, Severe acute respiratory syndrome coronavirus 2
  REGION 1..11: note = Table A: HLA-A*74:01M HLA-A*33:01H HLA-A*68:01H HLA-A*34:01H HLA-A*66:01H
NLIDSYFVVKR

SEQ ID NO: 5880 - protein, 11 aa, Severe acute respiratory syndrome coronavirus 2
  REGION 1..11: note = Table A: HLA-A*66:01H
DSYFVVKRHTF

SEQ ID NO: 5881 - protein, 11 aa, Severe acute respiratory syndrome coronavirus 2
  REGION 1..11: note = Table A: HLA-A*02:11M HLA-A*02:04H HLA-A*02:05M HLA-A*02:06H HLA-A*02:07H HLA-A*02:02H HLA-A*24:07H HLA-C*08:01M HLA-B*38:01H HLA-B*38:02M HLA-B*40:06H HLA-B*13:01M HLA-B*13:02H
YQHEETIYNLL

SEQ ID NO: 5882 - protein, 11 aa, Severe acute respiratory syndrome coronavirus 2
  REGION 1..11: note = Table A: HLA-A*74:01M
AVAKHDFFKFR

SEQ ID NO: 5883 - protein, 11 aa, Severe acute respiratory syndrome coronavirus 2
  REGION 1..11: note = Table A: HLA-B*38:02H
FRIDGDMVPHI

SEQ ID NO: 5884 - protein, 11 aa, Severe acute respiratory syndrome coronavirus 2
  REGION 1..11: note = Table A: HLA-B*38:01M HLA-B*38:02H HLA-B*39:01M HLA-B*15:10H
RHFDEGNCDTL

SEQ ID NO: 5885 - protein, 11 aa, Severe acute respiratory syndrome coronavirus 2
  REGION 1..11: note = Table A: HLA-A*24:07H
DYFNKKDWYDF

SEQ ID NO: 5886 - protein, 11 aa, Severe acute respiratory syndrome coronavirus 2
  REGION 1..11: note = Table A: HLA-A*36:01H HLA-A*25:01H HLA-B*46:01H HLA-A*26:01H HLA-A*29:02H HLA-C*03:02H HLA-A*30:02H HLA-C*12:02H HLA-B*35:01H HLA-B*35:07H HLA-B*38:02H HLA-B*15:02H HLA-C*02:02H
FVENPDILRVY

SEQ ID NO: 5887 - protein, 11 aa, Severe acute respiratory syndrome coronavirus 2
  REGION 1..11: note = Table A: HLA-B*45:01M HLA-B*40:06H HLA-B*50:01H
VENPDILRVYA

SEQ ID NO: 5888 - protein, 11 aa, Severe acute respiratory syndrome coronavirus 2
  REGION 1..11: note = Table A: HLA-A*74:01H
ILRVYANLGER

SEQ ID NO: 5889 - protein, 11 aa, Severe acute respiratory syndrome coronavirus 2
  REGION 1..11: note = Table A: HLA-A*74:01H HLA-A*30:02H HLA-A*31:01H
RVYANLGERVR

SEQ ID NO: 5890 - protein, 11 aa, Severe acute respiratory syndrome coronavirus 2
  REGION 1..11: note = Table A: HLA-A*68:02M HLA-B*51:01H
DAMRNAGIVGV

SEQ ID NO: 5891 - protein, 11 aa, Severe acute respiratory syndrome coronavirus 2
  REGION 1..11: note = Table A: HLA-A*30:02H
GSGVPVVDSYY

SEQ ID NO: 5892 - protein, 11 aa, Severe acute respiratory syndrome coronavirus 2
  REGION 1..11: note = Table A: HLA-A*24:02H HLA-A*24:07H
YYSLLMPILTL

SEQ ID NO: 5893 - protein, 11 aa, Severe acute respiratory syndrome coronavirus 2
  REGION 1..11: note = Table A: HLA-A*02:11H HLA-A*02:02H
LLMPILTLTRA

SEQ ID NO: 5894 - protein, 11 aa, Severe acute respiratory syndrome coronavirus 2
  REGION 1..11: note = Table A: HLA-B*54:01H
MPILTLTRALT

SEQ ID NO: 5895 - protein, 11 aa, Severe acute respiratory syndrome coronavirus 2
  REGION 1..11: note = Table A: HLA-A*68:02H
LTAESHVDTDL

SEQ ID NO: 5896 - protein, 11 aa, Severe acute respiratory syndrome coronavirus 2
  REGION 1..11: note = Table A: HLA-A*02:07H HLA-B*38:02H HLA-B*13:01H
HVDTDLTKPYI

SEQ ID NO: 5897 - protein, 11 aa, Severe acute respiratory syndrome coronavirus 2
  REGION 1..11: note = Table A: HLA-A*33:01H
DLLKYDFTEER

SEQ ID NO: 5898 - protein, 11 aa, Severe acute respiratory syndrome coronavirus 2
  REGION 1..11: note = Table A: HLA-A*02:02M
LLKYDFTEERL

SEQ ID NO: 5899 - protein, 11 aa, Severe acute respiratory syndrome coronavirus 2
  REGION 1..11: note = Table A: HLA-A*74:01H
RLKLFDRYFKY

SEQ ID NO: 5900 - protein, 11 aa, Severe acute respiratory syndrome coronavirus 2
  REGION 1..11: note = Table A: HLA-C*14:03H HLA-A*24:07H
LFSTVFPPTSF

SEQ ID NO: 5901 - protein, 11 aa, Severe acute respiratory syndrome coronavirus 2
  REGION 1..11: note = Table A: HLA-C*03:03H HLA-A*02:11H HLA-C*03:02H HLA-C*03:04H HLA-A*68:02M HLA-A*02:08H HLA-A*34:01H HLA-A*34:02H HLA-C*08:01H HLA-C*08:03M HLA-B*38:02H HLA-A*66:01H
TVFPPTSFGPL

SEQ ID NO: 5902 - protein, 11 aa, Severe acute respiratory syndrome coronavirus 2
  REGION 1..11: note = Table A: HLA-A*29:02H HLA-A*24:07M HLA-A*23:01H
VFPPTSFGPLV

SEQ ID NO: 5903 - protein, 11 aa, Severe acute respiratory syndrome coronavirus 2
  REGION 1..11: note = Table A: HLA-A*02:11M HLA-B*13:02H
KIFVDGVPFVV

SEQ ID NO: 5904 - protein, 11 aa, Severe acute respiratory syndrome coronavirus 2
  REGION 1..11: note = Table A: HLA-B*53:01H HLA-B*35:01H HLA-A*24:07H HLA-B*35:07H
VPFVVSTGYHF

SEQ ID NO: 5905 - protein, 11 aa, Severe acute respiratory syndrome coronavirus 2
  REGION 1..11: note = Table A: HLA-B*40:02H HLA-B*49:01H
RELGVVHNQDV

SEQ ID NO: 5906 - protein, 11 aa, Severe acute respiratory syndrome coronavirus 2
  REGION 1..11: note = Table A: HLA-A*33:01M HLA-A*33:03M
HNQDVNLHSSR

SEQ ID NO: 5907 - protein, 11 aa, Severe acute respiratory syndrome coronavirus 2
  REGION 1..11: note = Table A: HLA-B*38:01H HLA-B*38:02M
NQDVNLHSSRL

SEQ ID NO: 5908 - protein, 11 aa, Severe acute respiratory syndrome coronavirus 2
  REGION 1..11: note = Table A: HLA-B*27:05M HLA-C*07:01H
SRLSFKELLVY

SEQ ID NO: 5909 - protein, 11 aa, Severe acute respiratory syndrome coronavirus 2
  REGION 1..11: note = Table A: HLA-A*02:02H
RLSFKELLVYA

SEQ ID NO: 5910 - protein, 11 aa, Severe acute respiratory syndrome coronavirus 2
  REGION 1..11: note = Table A: HLA-A*02:02H
VYAADPAMHAA

SEQ ID NO: 5911 - protein, 11 aa, Severe acute respiratory syndrome coronavirus 2
  REGION 1..11: note = Table A: HLA-A*68:02H HLA-A*34:02H
YAADPAMHAAS

SEQ ID NO: 5912 - protein, 11 aa, Severe acute respiratory syndrome coronavirus 2
  REGION 1..11: note = Table A: HLA-A*02:11H HLA-A*02:02H HLA-B*13:02H
AMHAASGNLLL

SEQ ID NO: 5913 - protein, 11 aa, Severe acute respiratory syndrome coronavirus 2
  REGION 1..11: note = Table A: HLA-A*36:01H HLA-B*27:02H HLA-A*68:01H HLA-A*34:02M
HAASGNLLLDK

SEQ ID NO: 5914 - protein, 11 aa, Severe acute respiratory syndrome coronavirus 2
  REGION 1..11: note = Table A: HLA-C*15:05H HLA-B*35:01H HLA-B*15:01H HLA-B*15:02H HLA-B*07:05H HLA-B*57:03H
SVAALTNNVAF

SEQ ID NO: 5915 - protein, 11 aa, Severe acute respiratory syndrome coronavirus 2
  REGION 1..11: note = Table A: HLA-A*02:04H HLA-A*02:01H HLA-B*38:02H HLA-B*13:02H
ALTNNVAFQTV

SEQ ID NO: 5916 - protein, 11 aa, Severe acute respiratory syndrome coronavirus 2
  REGION 1..11: note = Table A: HLA-A*11:01H HLA-A*11:02H
LTNNVAFQTVK

SEQ ID NO: 5917 - protein, 11 aa, Severe acute respiratory syndrome coronavirus 2
  REGION 1..11: note = Table A: HLA-C*12:02H HLA-B*57:03H
VAFQTVKPGNF

SEQ ID NO: 5918 - protein, 11 aa, Severe acute respiratory syndrome coronavirus 2
  REGION 1..11: note = Table A: HLA-B*07:04H
TVKPGNFNKDF

SEQ ID NO: 5919 - protein, 11 aa, Severe acute respiratory syndrome coronavirus 2
  REGION 1..11: note = Table A: HLA-A*36:01H HLA-A*29:02H HLA-C*04:01H HLA-C*04:03M
FYDFAVSKGFF

SEQ ID NO: 5920 - protein, 11 aa, Severe acute respiratory syndrome coronavirus 2
  REGION 1..11: note = Table A: HLA-C*14:03H HLA-A*02:02H HLA-C*08:03M
GFFKEGSSVEL

SEQ ID NO: 5921 - protein, 11 aa, Severe acute respiratory syndrome coronavirus 2
  REGION 1..11: note = Table A: HLA-A*33:03H
FFKEGSSVELK

SEQ ID NO: 5922 - protein, 11 aa, Severe acute respiratory syndrome coronavirus 2
  REGION 1..11: note = Table A: HLA-B*57:03H
GSSVELKHFFF

SEQ ID NO: 5923 - protein, 11 aa, Severe acute respiratory syndrome coronavirus 2
  REGION 1..11: note = Table A: HLA-C*14:03H
FFFAQDGNAAI

SEQ ID NO: 5924 - protein, 11 aa, Severe acute respiratory syndrome coronavirus 2
  REGION 1..11: note = Table A: HLA-A*30:02H HLA-B*15:01H HLA-B*39:01H
AQDGNAAISDY

SEQ ID NO: 5925 - protein, 11 aa, Severe acute respiratory syndrome coronavirus 2
  REGION 1..11: note = Table A: HLA-A*29:02H
GNAAISDYDYY

SEQ ID NO: 5926 - protein, 11 aa, Severe acute respiratory syndrome coronavirus 2
  REGION 1..11: note = Table A: HLA-A*36:01H HLA-A*30:02H
AAISDYDYYRY

SEQ ID NO: 5927 - protein, 11 aa, Severe acute respiratory syndrome coronavirus 2
  REGION 1..11: note = Table A: HLA-A*11:01H HLA-A*11:02H
SAGFPFNKWGK

SEQ ID NO: 5928 - protein, 11 aa, Severe acute respiratory syndrome coronavirus 2
  REGION 1..11: note = Table A: HLA-A*29:01H HLA-A*29:02H HLA-A*30:02H
SYEDQDALFAY

SEQ ID NO: 5929 - protein, 11 aa, Severe acute respiratory syndrome coronavirus 2
  REGION 1..11: note = Table A: HLA-B*27:02H
EDQDALFAYTK

SEQ ID NO: 5930 - protein, 11 aa, Severe acute respiratory syndrome coronavirus 2
  REGION 1..11: note = Table A: HLA-B*39:06H
TQMNLKYAISA

SEQ ID NO: 5931 - protein, 11 aa, Severe acute respiratory syndrome coronavirus 2
  REGION 1..11: note = Table A: HLA-A*33:01H HLA-A*33:03H
NLKYAISAKNR

SEQ ID NO: 5932 - protein, 11 aa, Severe acute respiratory syndrome coronavirus 2
  REGION 1..11: note = Table A: HLA-A*74:01H
KYAISAKNRAR

SEQ ID NO: 5933 - protein, 11 aa, Severe acute respiratory syndrome coronavirus 2
  REGION 1..11: note = Table A: HLA-B*38:02H HLA-B*15:02H
TVAGVSICSTM

SEQ ID NO: 5934 - protein, 11 aa, Severe acute respiratory syndrome coronavirus 2
  REGION 1..11: note = Table A: HLA-A*11:303M HLA-A*74:01H HLA-A*03:01H HLA-A*03:02M HLA-A*11:01H HLA-A*11:02H HLA-A*30:01H HLA-A*30:02H HLA-A*68:01H HLA-A*34:02M HLA-C*07:27M
STMTNRQFHQK

SEQ ID NO: 5935 - protein, 11 aa, Severe acute respiratory syndrome coronavirus 2
  REGION 1..11: note = Table A: HLA-B*07:04H HLA-B*13:02H
RQFHQKLLKSI

SEQ ID NO: 5936 - protein, 11 aa, Severe acute respiratory syndrome coronavirus 2
  REGION 1..11: note = Table A: HLA-A*02:03H
LLKSIAATRGA

SEQ ID NO: 5937 - protein, 11 aa, Severe acute respiratory syndrome coronavirus 2
  REGION 1..11: note = Table A: HLA-B*58:02M HLA-B*57:03H
KSIAATRGATV

SEQ ID NO: 5938 - protein, 11 aa, Severe acute respiratory syndrome coronavirus 2
  REGION 1..11: note = Table A: HLA-A*03:01H HLA-A*03:02M HLA-A*11:01H HLA-A*11:02H HLA-A*36:01H HLA-B*27:02H HLA-A*30:02H
RGATVVIGTSK

SEQ ID NO: 5939 - protein, 11 aa, Severe acute respiratory syndrome coronavirus 2
  REGION 1..11: note = Table A: HLA-B*57:03H
GATVVIGTSKF

SEQ ID NO: 5940 - protein, 11 aa, Severe acute respiratory syndrome coronavirus 2
  REGION 1..11: note = Table A: HLA-A*36:01H HLA-A*30:02M
ATVVIGTSKFY

SEQ ID NO: 5941 - protein, 11 aa, Severe acute respiratory syndrome coronavirus 2
  REGION 1..11: note = Table A: HLA-A*02:11M HLA-A*68:02H HLA-A*02:04M HLA-A*02:05M HLA-A*02:06M HLA-A*02:07H HLA-A*02:08M HLA-A*02:01H HLA-A*02:02M HLA-C*08:01H HLA-B*38:02H HLA-B*13:01H
TVYSDVENPHL

SEQ ID NO: 5942 - protein, 11 aa, Severe acute respiratory syndrome coronavirus 2
  REGION 1..11: note = Table A: HLA-C*14:03H HLA-A*02:02H HLA-A*24:02M HLA-A*24:07M HLA-C*08:01H HLA-A*23:01M
VYSDVENPHLM

SEQ ID NO: 5943 - protein, 11 aa, Severe acute respiratory syndrome coronavirus 2
  REGION 1..11: note = Table A: HLA-B*44:03H
SDVENPHLMGW

SEQ ID NO: 5944 - protein, 11 aa, Severe acute respiratory syndrome coronavirus 2
  REGION 1..11: note = Table A: HLA-B*44:03H HLA-A*30:02H
VENPHLMGWDY

SEQ ID NO: 5945 - protein, 11 aa, Severe acute respiratory syndrome coronavirus 2
  REGION 1..11: note = Table A: HLA-B*56:01H HLA-B*55:02M
RAMPNMLRIMA

SEQ ID NO: 5946 - protein, 11 aa, Severe acute respiratory syndrome coronavirus 2
  REGION 1..11: note = Table A: HLA-B*42:01H HLA-B*35:03H HLA-C*15:05H HLA-B*07:02M HLA-B*07:04M
MPNMLRIMASL

SEQ ID NO: 5947 - protein, 11 aa, Severe acute respiratory syndrome coronavirus 2
  REGION 1..11: note = Table A: HLA-A*74:01H HLA-A*03:02H HLA-A*11:02H
RIMASLVLARK

SEQ ID NO: 5948 - protein, 11 aa, Severe acute respiratory syndrome coronavirus 2
  REGION 1..11: note = Table A: HLA-A*11:02H HLA-A*34:02H
MVMCGGSLYVK

SEQ ID NO: 5949 - protein, 11 aa, Severe acute respiratory syndrome coronavirus 2
  REGION 1..11: note = Table A: HLA-B*38:02H
SLYVKPGGTSS

SEQ ID NO: 5950 - protein, 11 aa, Severe acute respiratory syndrome coronavirus 2
  REGION 1..11: note = Table A: HLA-A*36:01H HLA-A*29:02H HLA-A*30:02M HLA-B*15:01H
GTSSGDATTAY

SEQ ID NO: 5951 - protein, 11 aa, Severe acute respiratory syndrome coronavirus 2
  REGION 1..11: note = Table A: HLA-B*54:01H
YANSVFNICQA

SEQ ID NO: 5952 - protein, 11 aa, Severe acute respiratory syndrome coronavirus 2
  REGION 1..11: note = Table A: HLA-B*58:01H HLA-A*36:01H HLA-A*01:01H HLA-A*30:02H
STDGNKIADKY

SEQ ID NO: 5953 - protein, 11 aa, Severe acute respiratory syndrome coronavirus 2
  REGION 1..11: note = Table A: HLA-A*33:01M HLA-A*33:03H
DGNKIADKYVR

SEQ ID NO: 5954 - protein, 11 aa, Severe acute respiratory syndrome coronavirus 2
  REGION 1..11: note = Table A: HLA-A*30:02H
KYVRNLQHRLY

SEQ ID NO: 5955 - protein, 11 aa, Severe acute respiratory syndrome coronavirus 2
  REGION 1..11: note = Table A: HLA-B*44:05M HLA-B*40:02H
RDVDTDFVNEF

SEQ ID NO: 5956 - protein, 11 aa, Severe acute respiratory syndrome coronavirus 2
  REGION 1..11: note = Table A: HLA-A*36:01H HLA-A*01:01H
DVDTDFVNEFY

SEQ ID NO: 5957 - protein, 11 aa, Severe acute respiratory syndrome coronavirus 2
  REGION 1..11: note = Table A: HLA-A*36:01H HLA-A*01:01H
DTDFVNEFYAY

SEQ ID NO: 5958 - protein, 11 aa, Severe acute respiratory syndrome coronavirus 2
  REGION 1..11: note = Table A: HLA-A*24:02H HLA-A*23:01H
TYASQGLVASI

SEQ ID NO: 5959 - protein, 11 aa, Severe acute respiratory syndrome coronavirus 2
  REGION 1..11: note = Table A: HLA-A*34:02H
YASQGLVASIK

SEQ ID NO: 5960 - protein, 11 aa, Severe acute respiratory syndrome coronavirus 2
  REGION 1..11: note = Table A: HLA-A*30:02H HLA-B*57:03H
ASIKNFKSVLY

SEQ ID NO: 5961 - protein, 11 aa, Severe acute respiratory syndrome coronavirus 2
  REGION 1..11: note = Table A: HLA-A*30:02H HLA-C*02:02H
SIKNFKSVLYY

SEQ ID NO: 5962 - protein, 11 aa, Severe acute respiratory syndrome coronavirus 2
  REGION 1..11: note = Table A: HLA-B*58:02H HLA-B*57:03M
KSVLYYQNNVF

SEQ ID NO: 5963 - protein, 11 aa, Severe acute respiratory syndrome coronavirus 2
  REGION 1..11: note = Table A: HLA-B*27:02H
YQNNVFMSEAK

SEQ ID NO: 5964 - protein, 11 aa, Severe acute respiratory syndrome coronavirus 2
  REGION 1..11: note = Table A: HLA-A*36:01M HLA-A*01:01H HLA-A*30:02H
HTMLVKQGDDY

SEQ ID NO: 5965 - protein, 11 aa, Severe acute respiratory syndrome coronavirus 2
  REGION 1..11: note = Table A: HLA-A*36:01H
KQGDDYVYLPY

SEQ ID NO: 5966 - protein, 11 aa, Severe acute respiratory syndrome coronavirus 2
  REGION 1..11: note = Table A: HLA-A*74:01H HLA-A*66:01H
YVYLPYPDPSR

SEQ ID NO: 5967 - protein, 11 aa, Severe acute respiratory syndrome coronavirus 2
  REGION 1..11: note = Table A: HLA-C*14:03H HLA-A*24:02M HLA-A*24:07H HLA-A*23:01H
VYLPYPDPSRI

SEQ ID NO: 5968 - protein, 11 aa, Severe acute respiratory syndrome coronavirus 2
  REGION 1..11: note = Table A: HLA-A*02:11H HLA-A*02:07H
YLPYPDPSRIL

SEQ ID NO: 5969 - protein, 11 aa, Severe acute respiratory syndrome coronavirus 2
  REGION 1..11: note = Table A: HLA-B*56:01H HLA-B*53:01H HLA-B*55:02H HLA-C*15:05H HLA-B*35:01H HLA-B*35:07H HLA-B*54:01M
LPYPDPSRILG

SEQ ID NO: 5970 - protein, 11 aa, Severe acute respiratory syndrome coronavirus 2
  REGION 1..11: note = Table A: HLA-A*24:07H
PYPDPSRILGA

SEQ ID NO: 5971 - protein, 11 aa, Severe acute respiratory syndrome coronavirus 2
  REGION 1..11: note = Table A: HLA-A*02:11H HLA-A*02:07H
FVDDIVKTDGT

SEQ ID NO: 5972 - protein, 11 aa, Severe acute respiratory syndrome coronavirus 2
  REGION 1..11: note = Table A: HLA-A*36:01M HLA-C*04:03H HLA-B*57:03M
KTDGTLMIERF

SEQ ID NO: 5973 - protein, 11 aa, Severe acute respiratory syndrome coronavirus 2
  REGION 1..11: note = Table A: HLA-A*02:11H HLA-A*02:04H
GTLMIERFVSL

SEQ ID NO: 5974 - protein, 11 aa, Severe acute respiratory syndrome coronavirus 2
  REGION 1..11: note = Table A: HLA-B*27:02H HLA-B*38:02H HLA-B*39:01H
ERFVSLAIDAY

SEQ ID NO: 5975 - protein, 11 aa, Severe acute respiratory syndrome coronavirus 2
  REGION 1..11: note = Table A: HLA-A*03:02H HLA-A*11:01H HLA-B*27:02H
SLAIDAYPLTK

SEQ ID NO: 5976 - protein, 11 aa, Severe acute respiratory syndrome coronavirus 2
  REGION 1..11: note = Table A: HLA-A*29:02H HLA-B*53:01H HLA-B*55:02H HLA-C*15:05H HLA-B*35:01H HLA-B*35:08H HLA-B*35:07H HLA-B*38:02H HLA-B*54:01H HLA-B*15:02H HLA-B*07:05H HLA-B*15:11M
YPLTKHPNQEY

SEQ ID NO: 5977 - protein, 11 aa, Severe acute respiratory syndrome coronavirus 2
  REGION 1..11: note = Table A: HLA-B*38:02H
KHPNQEYADVF

SEQ ID NO: 5978 - protein, 11 aa, Severe acute respiratory syndrome coronavirus 2
  REGION 1..11: note = Table A: HLA-A*36:01H
YADVFHLYLQY

SEQ ID NO: 5979 - protein, 11 aa, Severe acute respiratory syndrome coronavirus 2
  REGION 1..11: note = Table A: HLA-A*74:01H HLA-A*02:11M HLA-A*30:02H HLA-A*02:04H HLA-A*02:05H HLA-A*02:08H HLA-A*02:02H HLA-C*08:01H HLA-B*38:02H HLA-B*13:01M
KLHDELTGHML

SEQ ID NO: 5980 - protein, 11 aa, Severe acute respiratory syndrome coronavirus 2
  REGION 1..11: note = Table A: HLA-A*11:303H HLA-A*74:01M HLA-A*03:02M HLA-A*11:01M HLA-A*11:02M HLA-A*33:03H HLA-A*68:01M HLA-A*34:01H HLA-A*34:02H HLA-C*07:27M HLA-A*31:01H HLA-A*66:01M
SVMLTNDNTSR

SEQ ID NO: 5981 - protein, 11 aa, Severe acute respiratory syndrome coronavirus 2
  REGION 1..11: note = Table A: HLA-A*29:02H HLA-A*30:02M HLA-B*15:01H
VMLTNDNTSRY

SEQ ID NO: 5982 - protein, 11 aa, Severe acute respiratory syndrome coronavirus 2
  REGION 1..11: note = Table A: HLA-A*02:11H HLA-C*08:01H
RYWEPEFYEAM

SEQ ID NO: 5983 - protein, 11 aa, Severe acute respiratory syndrome coronavirus 2
  REGION 1..11: note = Table A: HLA-B*45:01H HLA-B*40:01H HLA-B*40:02H HLA-B*50:01H
YEAMYTPHTVL

SEQ ID NO: 5984 - protein, 11 aa, Severe acute respiratory syndrome coronavirus 2
  REGION 1..11: note = Table A: HLA-A*02:11H HLA-A*02:02H HLA-A*02:03M
AMYTPHTVLQA

SEQ ID NO: 5985 - protein, 11 aa, Severe acute respiratory syndrome coronavirus 2
  REGION 1..11: note = Table A: HLA-A*68:02H
YTPHTVLQAVG

SEQ ID NO: 5986 - protein, 11 aa, Severe acute respiratory syndrome coronavirus 2
  REGION 1..11: note = Table A: HLA-B*56:01M HLA-B*55:02H HLA-B*55:01H HLA-B*54:01M
TPHTVLQAVGA

SEQ ID NO: 5987 - protein, 11 aa, Severe acute respiratory syndrome coronavirus 2
  REGION 1..11: note = Table A: HLA-B*07:04H
HVISTSHKLVL

SEQ ID NO: 5988 - protein, 11 aa, Severe acute respiratory syndrome coronavirus 2
  REGION 1..11: note = Table A: HLA-A*36:01H
GCDVTDVTQLY

SEQ ID NO: 5989 - protein, 11 aa, Severe acute respiratory syndrome coronavirus 2
  REGION 1..11: note = Table A: HLA-A*68:02H
DVTDVTQLYLG

SEQ ID NO: 5990 - protein, 11 aa, Severe acute respiratory syndrome coronavirus 2
  REGION 1..11: note = Table A: HLA-A*36:01H
VTQLYLGGMSY

SEQ ID NO: 5991 - protein, 11 aa, Severe acute respiratory syndrome coronavirus 2
  REGION 1..11: note = Table A: HLA-A*30:02H HLA-B*38:02H HLA-B*15:01H
TQLYLGGMSYY

SEQ ID NO: 5992 - protein, 11 aa, Severe acute respiratory syndrome coronavirus 2
  REGION 1..11: note = Table A: HLA-A*24:07H
SFPLCANGQVF

SEQ ID NO: 5993 - protein, 11 aa, Severe acute respiratory syndrome coronavirus 2
  REGION 1..11: note = Table A: HLA-A*68:02H HLA-A*02:05H HLA-A*02:08H
NVTDFNAIATC

SEQ ID NO: 5994 - protein, 11 aa, Severe acute respiratory syndrome coronavirus 2
  REGION 1..11: note = Table A: HLA-A*33:01M HLA-A*33:03M
DYILANTCTER

SEQ ID NO: 5995 - protein, 11 aa, Severe acute respiratory syndrome coronavirus 2
  REGION 1..11: note = Table A: HLA-A*74:01M HLA-A*30:01H
RLKLFAAETLK

SEQ ID NO: 5996 - protein, 11 aa, Severe acute respiratory syndrome coronavirus 2
  REGION 1..11: note = Table A: HLA-A*02:11H HLA-A*02:02H
KLFAAETLKAT

SEQ ID NO: 5997 - protein, 11 aa, Severe acute respiratory syndrome coronavirus 2
  REGION 1..11: note = Table A: HLA-B*44:02H HLA-B*44:05M HLA-B*44:03H
AETLKATEETF

SEQ ID NO: 5998 - protein, 11 aa, Severe acute respiratory syndrome coronavirus 2
  REGION 1..11: note = Table A: HLA-A*34:02M
ETLKATEETFK

SEQ ID NO: 5999 - protein, 11 aa, Severe acute respiratory syndrome coronavirus 2
  REGION 1..11: note = Table A: HLA-A*02:02H
TLKATEETFKL

SEQ ID NO: 6000 - protein, 11 aa, Severe acute respiratory syndrome coronavirus 2
  REGION 1..11: note = Table A: HLA-B*58:01H HLA-A*36:01M HLA-A*30:02H HLA-B*57:03H
KATEETFKLSY

SEQ ID NO: 6001 - protein, 11 aa, Severe acute respiratory syndrome coronavirus 2
  REGION 1..11: note = Table A: HLA-A*68:02H
ETFKLSYGIAT

SEQ ID NO: 6002 - protein, 11 aa, Severe acute respiratory syndrome coronavirus 2
  REGION 1..11: note = Table A: HLA-B*07:04H
TVREVLSDREL

SEQ ID NO: 6003 - protein, 11 aa, Severe acute respiratory syndrome coronavirus 2
  REGION 1..11: note = Table A: HLA-A*24:07H HLA-A*32:01M
VLSDRELHLSW

SEQ ID NO: 6004 - protein, 11 aa, Severe acute respiratory syndrome coronavirus 2
  REGION 1..11: note = Table A: HLA-A*33:01H HLA-A*33:03M HLA-A*68:01H HLA-A*34:01M HLA-A*34:02H HLA-A*66:01H
EVGKPRPPLNR

SEQ ID NO: 6005 - protein, 11 aa, Severe acute respiratory syndrome coronavirus 2
  REGION 1..11: note = Table A: HLA-B*55:01H HLA-B*07:02H HLA-B*07:04H
KPRPPLNRNYV

SEQ ID NO: 6006 - protein, 11 aa, Severe acute respiratory syndrome coronavirus 2
  REGION 1..11: note = Table A: HLA-A*24:07H
PRPPLNRNYVF

SEQ ID NO: 6007 - protein, 11 aa, Severe acute respiratory syndrome coronavirus 2
  REGION 1..11: note = Table A: HLA-B*15:03H
TKNSKVQIGEY

SEQ ID NO: 6008 - protein, 11 aa, Severe acute respiratory syndrome coronavirus 2
  REGION 1..11: note = Table A: HLA-B*57:03H
NSKVQIGEYTF

SEQ ID NO: 6009 - protein, 11 aa, Severe acute respiratory syndrome coronavirus 2
  REGION 1..11: note = Table A: HLA-A*03:02H HLA-A*11:01H HLA-A*11:02H HLA-A*36:01H
KVQIGEYTFEK

SEQ ID NO: 6010 - protein, 11 aa, Severe acute respiratory syndrome coronavirus 2
  REGION 1..11: note = Table A: HLA-A*36:01H
IGEYTFEKGDY

SEQ ID NO: 6011 - protein, 11 aa, Severe acute respiratory syndrome coronavirus 2
  REGION 1..11: note = Table A: HLA-B*49:01H
FEKGDYGDAVV

SEQ ID NO: 6012 - protein, 11 aa, Severe acute respiratory syndrome coronavirus 2
  REGION 1..11: note = Table A: HLA-A*74:01H HLA-A*36:01M HLA-A*31:01H
KGDYGDAVVYR

SEQ ID NO: 6013 - protein, 11 aa, Severe acute respiratory syndrome coronavirus 2
  REGION 1..11: note = Table A: HLA-A*25:01H HLA-A*26:01H HLA-B*35:01M HLA-B*35:07H HLA-B*38:02H HLA-B*15:02M HLA-B*07:05H HLA-B*15:11H
DAVVYRGTTTY

SEQ ID NO: 6014 - protein, 11 aa, Severe acute respiratory syndrome coronavirus 2
  REGION 1..11: note = Table A: HLA-A*11:01H HLA-A*11:02H HLA-A*34:02H
AVVYRGTTTYK

SEQ ID NO: 6015 - protein, 11 aa, Severe acute respiratory syndrome coronavirus 2
  REGION 1..11: note = Table A: HLA-A*02:02H
VVYRGTTTYKL

SEQ ID NO: 6016 - protein, 11 aa, Severe acute respiratory syndrome coronavirus 2
  REGION 1..11: note = Table A: HLA-A*02:11H HLA-B*57:03M
TTYKLNVGDYF

SEQ ID NO: 6017 - protein, 11 aa, Severe acute respiratory syndrome coronavirus 2
  REGION 1..11: note = Table A: HLA-A*68:02H HLA-B*57:03H
HTVMPLSAPTL

SEQ ID NO: 6018 - protein, 11 aa, Severe acute respiratory syndrome coronavirus 2
  REGION 1..11: note = Table A: HLA-A*02:11H HLA-A*68:02H
TVMPLSAPTLV

SEQ ID NO: 6019 - protein, 11 aa, Severe acute respiratory syndrome coronavirus 2
  REGION 1..11: note = Table A: HLA-B*56:01H HLA-B*55:02H
APTLVPQEHYV

SEQ ID NO: 6020 - protein, 11 aa, Severe acute respiratory syndrome coronavirus 2
  REGION 1..11: note = Table A: HLA-C*14:03H HLA-A*24:02H HLA-A*24:07H HLA-C*08:01H HLA-A*23:01H
LYPTLNISDEF

SEQ ID NO: 6021 - protein, 11 aa, Severe acute respiratory syndrome coronavirus 2
  REGION 1..11: note = Table A: HLA-A*33:03H HLA-B*27:02H
EFSSNVANYQK

SEQ ID NO: 6022 - protein, 11 aa, Severe acute respiratory syndrome coronavirus 2
  REGION 1..11: note = Table A: HLA-A*68:02M
FSSNVANYQKV

SEQ ID NO: 6023 - protein, 11 aa, Severe acute respiratory syndrome coronavirus 2
  REGION 1..11: note = Table A: HLA-A*03:02H HLA-A*11:01H HLA-A*34:02H
VANYQKVGMQK

SEQ ID NO: 6024 - protein, 11 aa, Severe acute respiratory syndrome coronavirus 2
  REGION 1..11: note = Table A: HLA-A*29:02H HLA-A*30:02M
ANYQKVGMQKY

SEQ ID NO: 6025 - protein, 11 aa, Severe acute respiratory syndrome coronavirus 2
  REGION 1..11: note = Table A: HLA-A*11:303M HLA-A*03:01M HLA-A*03:02H HLA-A*11:01H HLA-A*11:02H HLA-A*36:01H HLA-B*27:02H HLA-A*30:01H HLA-A*30:02H HLA-A*68:01H HLA-A*34:02H HLA-C*07:27M
STLQGPPGTGK

SEQ ID NO: 6026 - protein, 11 aa, Severe acute respiratory syndrome coronavirus 2
  REGION 1..11: note = Table A: HLA-A*24:07H HLA-B*57:03H
QGPPGTGKSHF

SEQ ID NO: 6027 - protein, 11 aa, Severe acute respiratory syndrome coronavirus 2
  REGION 1..11: note = Table A: HLA-B*58:01H HLA-B*58:02H HLA-A*36:01M HLA-A*30:02M HLA-B*57:03H
KSHFAIGLALY

SEQ ID NO: 6028 - protein, 11 aa, Severe acute respiratory syndrome coronavirus 2
  REGION 1..11: note = Table A: HLA-A*29:02H HLA-B*38:02H
SHFAIGLALYY

SEQ ID NO: 6029 - protein, 11 aa, Severe acute respiratory syndrome coronavirus 2
  REGION 1..11: note = Table A: HLA-B*46:01H HLA-A*29:02H HLA-A*30:02M HLA-B*38:02H HLA-A*32:01H HLA-B*15:01H HLA-B*15:02H HLA-B*15:03H
ALYYPSARIVY

SEQ ID NO: 6030 - protein, 11 aa, Severe acute respiratory syndrome coronavirus 2
  REGION 1..11: note = Table A: HLA-B*56:01H HLA-B*55:02H HLA-B*54:01H
YPSARIVYTAC

SEQ ID NO: 6031 - protein, 11 aa, Severe acute respiratory syndrome coronavirus 2
  REGION 1..11: note = Table A: HLA-B*35:03H HLA-C*08:01H HLA-B*38:02H
TACSHAAVDAL

SEQ ID NO: 6032 - protein, 11 aa, Severe acute respiratory syndrome coronavirus 2
  REGION 1..11: note = Table A: HLA-A*23:01H
KYLPIDKCSRI

SEQ ID NO: 6033 - protein, 11 aa, Severe acute respiratory syndrome coronavirus 2
  REGION 1..11: note = Table A: HLA-A*30:02M
KFKVNSTLEQY

SEQ ID NO: 6034 - protein, 11 aa, Severe acute respiratory syndrome coronavirus 2
  REGION 1..11: note = Table A: HLA-B*58:01H HLA-A*32:01H HLA-B*57:03H
KVNSTLEQYVF

SEQ ID NO: 6035 - protein, 11 aa, Severe acute respiratory syndrome coronavirus 2
  REGION 1..11: note = Table A: HLA-A*02:07H
ALPETTADIVV

SEQ ID NO: 6036 - protein, 11 aa, Severe acute respiratory syndrome coronavirus 2
  REGION 1..11: note = Table A: HLA-B*53:01H HLA-B*35:03M HLA-B*35:01M HLA-B*35:02H HLA-B*35:08M HLA-B*35:07H HLA-B*35:12M
LPETTADIVVF

SEQ ID NO: 6037 - protein, 11 aa, Severe acute respiratory syndrome coronavirus 2
  REGION 1..11: note = Table A: HLA-A*68:02M HLA-C*08:01H HLA-B*38:02H
TTADIVVFDEI

SEQ ID NO: 6038 - protein, 11 aa, Severe acute respiratory syndrome coronavirus 2
  REGION 1..11: note = Table A: HLA-A*29:01H HLA-A*29:02H
VFDEISMATNY

SEQ ID NO: 6039 - protein, 11 aa, Severe acute respiratory syndrome coronavirus 2
  REGION 1..11: note = Table A: HLA-A*33:01M HLA-A*33:03M HLA-A*68:01M HLA-A*34:01H HLA-A*66:01H
TNYDLSVVNAR

SEQ ID NO: 6040 - protein, 11 aa, Severe acute respiratory syndrome coronavirus 2
  REGION 1..11: note = Table A: HLA-C*04:01H HLA-C*04:03H
NYDLSVVNARL

SEQ ID NO: 6041 - protein, 11 aa, Severe acute respiratory syndrome coronavirus 2
  REGION 1..11: note = Table A: HLA-A*33:01H
YDLSVVNARLR

SEQ ID NO: 6042 - protein, 11 aa, Severe acute respiratory syndrome coronavirus 2
  REGION 1..11: note = Table A: HLA-C*14:03H HLA-A*24:02H HLA-A*24:07M HLA-C*08:01H HLA-C*08:03H HLA-A*23:01M HLA-B*38:02H
HYVYIGDPAQL

SEQ ID NO: 6043 - protein, 11 aa, Severe acute respiratory syndrome coronavirus 2
  REGION 1..11: note = Table A: HLA-A*36:01M HLA-A*33:03H HLA-C*03:03H HLA-A*68:01H
IGDPAQLPAPR

SEQ ID NO: 6044 - protein, 11 aa, Severe acute respiratory syndrome coronavirus 2
  REGION 1..11: note = Table A: HLA-C*15:05H HLA-B*07:02H HLA-B*07:04M
APRTLLTKGTL

SEQ ID NO: 6045 - protein, 11 aa, Severe acute respiratory syndrome coronavirus 2
  REGION 1..11: note = Table A: HLA-B*57:01H HLA-A*68:02H HLA-B*57:03M
LTKGTLEPEYF

SEQ ID NO: 6046 - protein, 11 aa, Severe acute respiratory syndrome coronavirus 2
  REGION 1..11: note = Table A: HLA-A*02:11M HLA-A*68:02H HLA-A*02:04M HLA-A*02:06M HLA-A*02:07H HLA-A*02:01M HLA-C*08:03H HLA-B*38:02H
GTLEPEYFNSV

SEQ ID NO: 6047 - protein, 11 aa, Severe acute respiratory syndrome coronavirus 2
  REGION 1..11: note = Table A: HLA-B*57:03H HLA-B*13:01M
RLMKTIGPDMF

SEQ ID NO: 6048 - protein, 11 aa, Severe acute respiratory syndrome coronavirus 2
  REGION 1..11: note = Table A: HLA-A*02:11M HLA-A*02:02M
LMKTIGPDMFL

SEQ ID NO: 6049 - protein, 11 aa, Severe acute respiratory syndrome coronavirus 2
  REGION 1..11: note = Table A: HLA-A*02:08H
KTIGPDMFLGT

SEQ ID NO: 6050 - protein, 11 aa, Severe acute respiratory syndrome coronavirus 2
  REGION 1..11: note = Table A: HLA-B*56:01M HLA-B*55:02M HLA-B*54:01H
CPAEIVDTVSA

SEQ ID NO: 6051 - protein, 11 aa, Severe acute respiratory syndrome coronavirus 2
  REGION 1..11: note = Table A: HLA-B*49:01H
AEIVDTVSALV

SEQ ID NO: 6052 - protein, 11 aa, Severe acute respiratory syndrome coronavirus 2
  REGION 1..11: note = Table A: HLA-B*38:02H
EIVDTVSALVY

SEQ ID NO: 6053 - protein, 11 aa, Severe acute respiratory syndrome coronavirus 2
  REGION 1..11: note = Table A: HLA-A*68:02H HLA-A*02:02H
TVSALVYDNKL

SEQ ID NO: 6054 - protein, 11 aa, Severe acute respiratory syndrome coronavirus 2
  REGION 1..11: note = Table A: HLA-A*11:02H HLA-A*34:02H
LVYDNKLKAHK

SEQ ID NO: 6055 - protein, 11 aa, Severe acute respiratory syndrome coronavirus 2
  REGION 1..11: note = Table A: HLA-A*74:01M HLA-A*03:02H HLA-A*11:01H HLA-A*11:02H HLA-B*57:01H HLA-A*33:01H HLA-A*33:03M HLA-A*26:03H HLA-A*30:02H HLA-A*68:01H HLA-A*34:01H HLA-A*34:02H HLA-A*31:01M HLA-A*66:01M
ITHDVSSAINR

SEQ ID NO: 6056 - protein, 11 aa, Severe acute respiratory syndrome coronavirus 2
  REGION 1..11: note = Table A: HLA-B*38:01H HLA-B*38:02M
THDVSSAINRP

SEQ ID NO: 6057 - protein, 11 aa, Severe acute respiratory syndrome coronavirus 2
  REGION 1..11: note = Table A: HLA-A*68:02H
DVSSAINRPQI

SEQ ID NO: 6058 - protein, 11 aa, Severe acute respiratory syndrome coronavirus 2
  REGION 1..11: note = Table A: HLA-A*74:01H HLA-A*31:01H
AINRPQIGVVR

SEQ ID NO: 6059 - protein, 11 aa, Severe acute respiratory syndrome coronavirus 2
  REGION 1..11: note = Table A: HLA-B*42:01H HLA-B*07:02H HLA-B*07:04H
RPQIGVVREFL

SEQ ID NO: 6060 - protein, 11 aa, Severe acute respiratory syndrome coronavirus 2
  REGION 1..11: note = Table A: HLA-A*68:02H HLA-A*02:05H HLA-A*02:08H HLA-A*02:02H HLA-B*38:02H
FISPYNSQNAV

SEQ ID NO: 6061 - protein, 11 aa, Severe acute respiratory syndrome coronavirus 2
  REGION 1..11: note = Table A: HLA-B*55:02H HLA-C*15:05H
SPYNSQNAVAS

SEQ ID NO: 6062 - protein, 11 aa, Severe acute respiratory syndrome coronavirus 2
  REGION 1..11: note = Table A: HLA-A*26:01H
QTVDSSQGSEY

SEQ ID NO: 6063 - protein, 11 aa, Severe acute respiratory syndrome coronavirus 2
  REGION 1..11: note = Table A: HLA-B*45:01M HLA-B*40:06H HLA-B*49:01H HLA-B*50:01M
SEYDYVIFTQT

SEQ ID NO: 6064 - protein, 11 aa, Severe acute respiratory syndrome coronavirus 2
  REGION 1..11: note = Table A: HLA-A*68:02H HLA-A*02:05H HLA-A*02:08H
YVIFTQTTETA

SEQ ID NO: 6065 - protein, 11 aa, Severe acute respiratory syndrome coronavirus 2
  REGION 1..11: note = Table A: HLA-B*46:01H
VIFTQTTETAH

SEQ ID NO: 6066 - protein, 11 aa, Severe acute respiratory syndrome coronavirus 2
  REGION 1..11: note = Table A: HLA-A*74:01M HLA-A*33:01M HLA-A*33:03M HLA-A*68:01M HLA-A*34:01H HLA-A*34:02H HLA-A*31:01H HLA-A*66:01H
NVNRFNVAITR

SEQ ID NO: 6067 - protein, 11 aa, Severe acute respiratory syndrome coronavirus 2
  REGION 1..11: note = Table A: HLA-A*02:11M HLA-A*02:02H
IMSDRDLYDKL

SEQ ID NO: 6068 - protein, 11 aa, Severe acute respiratory syndrome coronavirus 2
  REGION 1..11: note = Table A: HLA-A*25:01H HLA-A*26:02H HLA-B*08:01H HLA-A*68:02H HLA-B*14:02H HLA-B*38:02H
DLYDKLQFTSL

SEQ ID NO: 6069 - protein, 11 aa, Severe acute respiratory syndrome coronavirus 2
  REGION 1..11: note = Table A: HLA-A*74:01H HLA-A*03:02H HLA-A*36:01H HLA-A*31:01H
KLQFTSLEIPR

SEQ ID NO: 6070 - protein, 11 aa, Severe acute respiratory syndrome coronavirus 2
  REGION 1..11: note = Table A: HLA-B*40:02H
LEIPRRNVATL

SEQ ID NO: 6071 - protein, 11 aa, Severe acute respiratory syndrome coronavirus 2
  REGION 1..11: note = Table A: HLA-B*56:01H HLA-B*55:02H HLA-B*55:01H
IPRRNVATLQA

SEQ ID NO: 6072 - protein, 11 aa, Severe acute respiratory syndrome coronavirus 2
  REGION 1..11: note = Table A: HLA-A*11:01H HLA-A*02:08H
ATLQAENVTGL

SEQ ID NO: 6073 - protein, 11 aa, Severe acute respiratory syndrome coronavirus 2
  REGION 1..11: note = Table A: HLA-B*38:02H
TLQAENVTGLF

SEQ ID NO: 6074 - protein, 11 aa, Severe acute respiratory syndrome coronavirus 2
  REGION 1..11: note = Table A: HLA-A*03:01M HLA-A*03:02M HLA-A*11:01M HLA-A*11:02M HLA-A*36:01H HLA-B*27:02H HLA-A*34:02H HLA-C*07:27H
LQAENVTGLFK

SEQ ID NO: 6075 - protein, 11 aa, Severe acute respiratory syndrome coronavirus 2
  REGION 1..11: note = Table A: HLA-A*02:05H HLA-A*02:08H
KVITGLHPTQA

SEQ ID NO: 6076 - protein, 11 aa, Severe acute respiratory syndrome coronavirus 2
  REGION 1..11: note = Table A: HLA-A*02:11H HLA-A*02:02M HLA-A*02:03H HLA-B*38:02H
GLHPTQAPTHL

SEQ ID NO: 6077 - protein, 11 aa, Severe acute respiratory syndrome coronavirus 2
  REGION 1..11: note = Table A: HLA-B*56:01H HLA-B*55:02M HLA-B*35:03H HLA-C*15:05H HLA-B*54:01H
HPTQAPTHLSV

SEQ ID NO: 6078 - protein, 11 aa, Severe acute respiratory syndrome coronavirus 2
  REGION 1..11: note = Table A: HLA-B*56:01H HLA-B*53:01H HLA-B*35:01H HLA-B*35:07H HLA-B*07:05H
APTHLSVDTKF

SEQ ID NO: 6079 - protein, 11 aa, Severe acute respiratory syndrome coronavirus 2
  REGION 1..11: note = Table A: HLA-A*26:01H
DIPGIPKDMTY

SEQ ID NO: 6080 - protein, 11 aa, Severe acute respiratory syndrome coronavirus 2
  REGION 1..11: note = Table A: HLA-A*02:11H HLA-A*02:02M
SMMGFKMNYQV

SEQ ID NO: 6081 - protein, 11 aa, Severe acute respiratory syndrome coronavirus 2
  REGION 1..11: note = Table A: HLA-B*13:02H
YQVNGYPNMFI

SEQ ID NO: 6082 - protein, 11 aa, Severe acute respiratory syndrome coronavirus 2
  REGION 1..11: note = Table A: HLA-B*56:01M HLA-B*55:02M HLA-B*55:01H HLA-B*54:01M
YPNMFITREEA

SEQ ID NO: 6083 - protein, 11 aa, Severe acute respiratory syndrome coronavirus 2
  REGION 1..11: note = Table A: HLA-A*02:11H HLA-A*02:06H HLA-A*02:02H
FITREEAIRHV

SEQ ID NO: 6084 - protein, 11 aa, Severe acute respiratory syndrome coronavirus 2
  REGION 1..11: note = Table A: HLA-A*74:01M HLA-A*33:03H HLA-A*31:01H
ITREEAIRHVR

SEQ ID NO: 6085 - protein, 11 aa, Severe acute respiratory syndrome coronavirus 2
  REGION 1..11: note = Table A: HLA-B*38:02H HLA-B*39:01H
TREAVGTNLPL

SEQ ID NO: 6086 - protein, 11 aa, Severe acute respiratory syndrome coronavirus 2
  REGION 1..11: note = Table A: HLA-A*68:01H HLA-A*68:02H HLA-A*34:01H HLA-A*34:02H
EAVGTNLPLQL

SEQ ID NO: 6087 - protein, 11 aa, Severe acute respiratory syndrome coronavirus 2
  REGION 1..11: note = Table A: HLA-B*54:01H
LPLQLGFSTGV

SEQ ID NO: 6088 - protein, 11 aa, Severe acute respiratory syndrome coronavirus 2
  REGION 1..11: note = Table A: HLA-A*30:02H
GVNLVAVPTGY

SEQ ID NO: 6089 - protein, 11 aa, Severe acute respiratory syndrome coronavirus 2
  REGION 1..11: note = Table A: HLA-C*08:01H
VAVPTGYVDTP

SEQ ID NO: 6090 - protein, 11 aa, Severe acute respiratory syndrome coronavirus 2
  REGION 1..11: note = Table A: HLA-B*27:02H HLA-A*23:01H HLA-B*39:01H
GYVDTPNNTDF

SEQ ID NO: 6091 - protein, 11 aa, Severe acute respiratory syndrome coronavirus 2
  REGION 1..11: note = Table A: HLA-A*26:01H HLA-A*68:01H HLA-A*68:02H
DTPNNTDFSRV

SEQ ID NO: 6092 - protein, 11 aa, Severe acute respiratory syndrome coronavirus 2
  REGION 1..11: note = Table A: HLA-B*58:01H HLA-B*57:01H HLA-B*15:01H HLA-B*57:03M
VSAKPPPGDQF

SEQ ID NO: 6093 - protein, 11 aa, Severe acute respiratory syndrome coronavirus 2
  REGION 1..11: note = Table A: HLA-B*07:04H
KPPPGDQFKHL

SEQ ID NO: 6094 - protein, 11 aa, Severe acute respiratory syndrome coronavirus 2
  REGION 1..11: note = Table A: HLA-B*07:04H
LPWNVVRIKIV

SEQ ID NO: 6095 - protein, 11 aa, Severe acute respiratory syndrome coronavirus 2
  REGION 1..11: note = Table A: HLA-B*38:02H HLA-A*32:01H HLA-B*15:01H HLA-B*15:02H
TLKNLSDRVVF

SEQ ID NO: 6096 - protein, 11 aa, Severe acute respiratory syndrome coronavirus 2
  REGION 1..11: note = Table A: HLA-A*24:07H
NLSDRVVFVLW

SEQ ID NO: 6097 - protein, 11 aa, Severe acute respiratory syndrome coronavirus 2
  REGION 1..11: note = Table A: HLA-B*57:03H
RVVFVLWAHGF

SEQ ID NO: 6098 - protein, 11 aa, Severe acute respiratory syndrome coronavirus 2
  REGION 1..11: note = Table A: HLA-B*38:02H
AHGFELTSMKY

SEQ ID NO: 6099 - protein, 11 aa, Severe acute respiratory syndrome coronavirus 2
  REGION 1..11: note = Table A: HLA-A*36:01H HLA-A*30:02H
ATCFSTASDTY

SEQ ID NO: 6100 - protein, 11 aa, Severe acute respiratory syndrome coronavirus 2
  REGION 1..11: note = Table A: HLA-B*38:02H
WHHSIGFDYVY

SEQ ID NO: 6101 - protein, 11 aa, Severe acute respiratory syndrome coronavirus 2
  REGION 1..11: note = Table A: HLA-A*24:07H
PFMIDVQQWGF

SEQ ID NO: 6102 - protein, 11 aa, Severe acute respiratory syndrome coronavirus 2
  REGION 1..11: note = Table A: HLA-A*36:01H HLA-A*30:02M HLA-B*35:01H
TGNLQSNHDLY

SEQ ID NO: 6103 - protein, 11 aa, Severe acute respiratory syndrome coronavirus 2
  REGION 1..11: note = Table A: HLA-B*35:03H HLA-B*35:02H
NAHVASCDAIM

SEQ ID NO: 6104 - protein, 11 aa, Severe acute respiratory syndrome coronavirus 2
  REGION 1..11: note = Table A: HLA-A*74:01H HLA-A*33:03H HLA-A*26:03H HLA-A*68:01M HLA-A*34:01M HLA-A*34:02H HLA-A*66:01M
HVASCDAIMTR

SEQ ID NO: 6105 - protein, 11 aa, Severe acute respiratory syndrome coronavirus 2
  REGION 1..11: note = Table A: HLA-A*02:07H HLA-C*08:01H
TIEYPIIGDEL

SEQ ID NO: 6106 - protein, 11 aa, Severe acute respiratory syndrome coronavirus 2
  REGION 1..11: note = Table A: HLA-A*24:07H
EYPIIGDELKI

SEQ ID NO: 6107 - protein, 11 aa, Severe acute respiratory syndrome coronavirus 2
  REGION 1..11: note = Table A: HLA-A*34:02H
MVVKAALLADK

SEQ ID NO: 6108 - protein, 11 aa, Severe acute respiratory syndrome coronavirus 2
  REGION 1..11: note = Table A: HLA-A*34:01H HLA-A*34:02H HLA-A*66:01H
FPVLHDIGNPK

SEQ ID NO: 6109 - protein, 11 aa, Severe acute respiratory syndrome coronavirus 2
  REGION 1..11: note = Table A: HLA-A*02:11H HLA-A*02:02H HLA-A*02:03H
VLHDIGNPKAI

SEQ ID NO: 6110 - protein, 11 aa, Severe acute respiratory syndrome coronavirus 2
  REGION 1..11: note = Table A: HLA-A*30:02H
AYKIEELFYSY

SEQ ID NO: 6111 - protein, 11 aa, Severe acute respiratory syndrome coronavirus 2
  REGION 1..11: note = Table A: HLA-A*29:02H HLA-A*24:02H HLA-A*24:07M HLA-C*08:01H HLA-A*23:01H
FYSYATHSDKF

SEQ ID NO: 6112 - protein, 11 aa, Severe acute respiratory syndrome coronavirus 2
  REGION 1..11: note = Table A: HLA-A*33:01H HLA-A*33:03H
DRYPANSIVCR

SEQ ID NO: 6113 - protein, 11 aa, Severe acute respiratory syndrome coronavirus 2
  REGION 1..11: note = Table A: HLA-A*24:02H HLA-A*24:07M HLA-A*23:01H
RYPANSIVCRF

SEQ ID NO: 6114 - protein, 11 aa, Severe acute respiratory syndrome coronavirus 2
  REGION 1..11: note = Table A: HLA-A*03:02H
GCDGGSLYVNK

SEQ ID NO: 6115 - protein, 11 aa, Severe acute respiratory syndrome coronavirus 2
  REGION 1..11: note = Table A: HLA-B*38:02M HLA-B*15:10H
FHTPAFDKSAF

SEQ ID NO: 6116 - protein, 11 aa, Severe acute respiratory syndrome coronavirus 2
  REGION 1..11: note = Table A: HLA-A*02:11H HLA-A*68:02M HLA-A*02:05H HLA-A*02:08H
HTPAFDKSAFV

SEQ ID NO: 6117 - protein, 11 aa, Severe acute respiratory syndrome coronavirus 2
  REGION 1..11: note = Table A: HLA-C*08:01H
PAFDKSAFVNL

SEQ ID NO: 6118 - protein, 11 aa, Severe acute respiratory syndrome coronavirus 2
  REGION 1..11: note = Table A: HLA-A*24:07H
AFVNLKQLPFF

SEQ ID NO: 6119 - protein, 11 aa, Severe acute respiratory syndrome coronavirus 2
  REGION 1..11: note = Table A: HLA-A*29:02H
VNLKQLPFFYY

SEQ ID NO: 6120 - protein, 11 aa, Severe acute respiratory syndrome coronavirus 2
  REGION 1..11: note = Table A: HLA-B*56:01H HLA-B*55:02H HLA-C*15:05H HLA-B*55:01H HLA-B*07:04H
SPCESHGKQVV

SEQ ID NO: 6121 - protein, 11 aa, Severe acute respiratory syndrome coronavirus 2
  REGION 1..11: note = Table A: HLA-A*03:02M HLA-A*11:01M HLA-A*11:02M HLA-A*36:01H HLA-A*30:02H HLA-A*34:02H
VVSDIDYVPLK

SEQ ID NO: 6122 - protein, 11 aa, Severe acute respiratory syndrome coronavirus 2
  REGION 1..11: note = Table A: HLA-B*38:02M
RHHANEYRLYL

SEQ ID NO: 6123 - protein, 11 aa, Severe acute respiratory syndrome coronavirus 2
  REGION 1..11: note = Table A: HLA-A*02:11H HLA-B*13:01H HLA-B*13:02H
RLYLDAYNMMI

SEQ ID NO: 6124 - protein, 11 aa, Severe acute respiratory syndrome coronavirus 2
  REGION 1..11: note = Table A: HLA-A*30:02H
SLWVYKQFDTY

SEQ ID NO: 6125 - protein, 11 aa, Severe acute respiratory syndrome coronavirus 2
  REGION 1..11: note = Table A: HLA-A*24:02H HLA-A*24:07M HLA-A*23:01M
VYKQFDTYNLW

SEQ ID NO: 6126 - protein, 11 aa, Severe acute respiratory syndrome coronavirus 2
  REGION 1..11: note = Table A: HLA-A*33:01M HLA-A*66:01M
DTYNLWNTFTR

SEQ ID NO: 6127 - protein, 11 aa, Severe acute respiratory syndrome coronavirus 2
  REGION 1..11: note = Table A: HLA-B*27:05H HLA-B*27:02H HLA-B*38:01H HLA-B*38:02M HLA-B*39:01H
TRLQSLENVAF

SEQ ID NO: 6128 - protein, 11 aa, Severe acute respiratory syndrome coronavirus 2
  REGION 1..11: note = Table A: HLA-B*38:02H
QSLENVAFNVV

SEQ ID NO: 6129 - protein, 11 aa, Severe acute respiratory syndrome coronavirus 2
  REGION 1..11: note = Table A: HLA-C*12:02H HLA-B*57:03H HLA-C*02:02H
VAFNVVNKGHF

SEQ ID NO: 6130 - protein, 11 aa, Severe acute respiratory syndrome coronavirus 2
  REGION 1..11: note = Table A: HLA-B*38:02H HLA-B*39:01H HLA-B*15:10H
GHFDGQQGEVP

SEQ ID NO: 6131 - protein, 11 aa, Severe acute respiratory syndrome coronavirus 2
  REGION 1..11: note = Table A: HLA-A*68:02H
EVPVSIINNTV

SEQ ID NO: 6132 - protein, 11 aa, Severe acute respiratory syndrome coronavirus 2
  REGION 1..11: note = Table A: HLA-B*55:02H HLA-B*35:01H HLA-B*35:07H HLA-B*54:01H HLA-B*15:02H HLA-B*07:05H HLA-B*15:11M
VPVSIINNTVY

SEQ ID NO: 6133 - protein, 11 aa, Severe acute respiratory syndrome coronavirus 2
  REGION 1..11: note = Table A: HLA-A*68:02H
TVYTKVDGVDV

SEQ ID NO: 6134 - protein, 11 aa, Severe acute respiratory syndrome coronavirus 2
  REGION 1..11: note = Table A: HLA-B*57:03H
YTKVDGVDVEL

SEQ ID NO: 6135 - protein, 11 aa, Severe acute respiratory syndrome coronavirus 2
  REGION 1..11: note = Table A: HLA-B*38:01H HLA-B*38:02H
TKVDGVDVELF

SEQ ID NO: 6136 - protein, 11 aa, Severe acute respiratory syndrome coronavirus 2
  REGION 1..11: note = Table A: HLA-B*27:02H
DGVDVELFENK

SEQ ID NO: 6137 - protein, 11 aa, Severe acute respiratory syndrome coronavirus 2
  REGION 1..11: note = Table A: HLA-A*02:04H HLA-B*57:03H
TTLPVNVAFEL

SEQ ID NO: 6138 - protein, 11 aa, Severe acute respiratory syndrome coronavirus 2
  REGION 1..11: note = Table A: HLA-A*24:07H
TLPVNVAFELW

SEQ ID NO: 6139 - protein, 11 aa, Severe acute respiratory syndrome coronavirus 2
  REGION 1..11: note = Table A: HLA-A*36:01H HLA-A*68:02H
IAANTVIWDYK

SEQ ID NO: 6140 - protein, 11 aa, Severe acute respiratory syndrome coronavirus 2
  REGION 1..11: note = Table A: HLA-A*02:11H
VIWDYKRDAPA

SEQ ID NO: 6141 - protein, 11 aa, Severe acute respiratory syndrome coronavirus 2
  REGION 1..11: note = Table A: HLA-A*68:02H HLA-B*51:01H
DAPAHISTIGV

SEQ ID NO: 6142 - protein, 11 aa, Severe acute respiratory syndrome coronavirus 2
  REGION 1..11: note = Table A: HLA-B*56:01M HLA-B*55:02M HLA-C*15:05H HLA-B*55:01H HLA-B*54:01H HLA-B*07:02H
APAHISTIGVC

SEQ ID NO: 6143 - protein, 11 aa, Severe acute respiratory syndrome coronavirus 2
  REGION 1..11: note = Table A: HLA-B*38:02H
AHISTIGVCSM

SEQ ID NO: 6144 - protein, 11 aa, Severe acute respiratory syndrome coronavirus 2
  REGION 1..11: note = Table A: HLA-A*03:02M HLA-A*11:01H HLA-A*11:02H
GVCSMTDIAKK

SEQ ID NO: 6145 - protein, 11 aa, Severe acute respiratory syndrome coronavirus 2
  REGION 1..11: note = Table A: HLA-B*27:05H HLA-B*27:02H
GRVDGQVDLFR

SEQ ID NO: 6146 - protein, 11 aa, Severe acute respiratory syndrome coronavirus 2
  REGION 1..11: note = Table A: HLA-A*11:303H HLA-A*02:11M HLA-A*02:04M HLA-A*02:05H HLA-A*02:06H HLA-A*02:08M HLA-A*02:01M HLA-A*02:02H HLA-A*02:03M HLA-B*38:02H
VLITEGSVKGL

SEQ ID NO: 6147 - protein, 11 aa, Severe acute respiratory syndrome coronavirus 2
  REGION 1..11: note = Table A: HLA-A*02:03H
GLQPSVGPKQA

SEQ ID NO: 6148 - protein, 11 aa, Severe acute respiratory syndrome coronavirus 2
  REGION 1..11: note = Table A: HLA-B*42:01H HLA-C*15:05M HLA-B*07:02M HLA-B*07:04M HLA-B*07:05H
QPSVGPKQASL

SEQ ID NO: 6149 - protein, 11 aa, Severe acute respiratory syndrome coronavirus 2
  REGION 1..11: note = Table A: HLA-B*13:02H
KQASLNGVTLI

SEQ ID NO: 6150 - protein, 11 aa, Severe acute respiratory syndrome coronavirus 2
  REGION 1..11: note = Table A: HLA-A*02:02H
SLNGVTLIGEA

SEQ ID NO: 6151 - protein, 11 aa, Severe acute respiratory syndrome coronavirus 2
  REGION 1..11: note = Table A: HLA-B*38:02M HLA-B*15:01M HLA-B*15:02H HLA-B*13:01H
TLIGEAVKTQF

SEQ ID NO: 6152 - protein, 11 aa, Severe acute respiratory syndrome coronavirus 2
  REGION 1..11: note = Table A: HLA-A*36:01H
IGEAVKTQFNY

SEQ ID NO: 6153 - protein, 11 aa, Severe acute respiratory syndrome coronavirus 2
  REGION 1..11: note = Table A: HLA-B*44:02H HLA-B*44:03H
GEAVKTQFNYY

SEQ ID NO: 6154 - protein, 11 aa, Severe acute respiratory syndrome coronavirus 2
  REGION 1..11: note = Table A: HLA-A*34:02H
EAVKTQFNYYK

SEQ ID NO: 6155 - protein, 11 aa, Severe acute respiratory syndrome coronavirus 2
  REGION 1..11: note = Table A: HLA-B*35:01H
DGVVQQLPETY

SEQ ID NO: 6156 - protein, 11 aa, Severe acute respiratory syndrome coronavirus 2
  REGION 1..11: note = Table A: HLA-A*74:01H
QLPETYFTQSR

SEQ ID NO: 6157 - protein, 11 aa, Severe acute respiratory syndrome coronavirus 2
  REGION 1..11: note = Table A: HLA-A*24:07M
YFTQSRNLQEF

SEQ ID NO: 6158 - protein, 11 aa, Severe acute respiratory syndrome coronavirus 2
  REGION 1..11: note = Table A: HLA-A*33:03H
QSRNLQEFKPR

SEQ ID NO: 6159 - protein, 11 aa, Severe acute respiratory syndrome coronavirus 2
  REGION 1..11: note = Table A: HLA-B*49:01H
QEFKPRSQMEI

SEQ ID NO: 6160 - protein, 11 aa, Severe acute respiratory syndrome coronavirus 2
  REGION 1..11: note = Table A: HLA-C*15:05H HLA-B*07:04H
KPRSQMEIDFL

SEQ ID NO: 6161 - protein, 11 aa, Severe acute respiratory syndrome coronavirus 2
  REGION 1..11: note = Table A: HLA-A*02:11M HLA-A*02:07H HLA-A*02:02H
AMDEFIERYKL

SEQ ID NO: 6162 - protein, 11 aa, Severe acute respiratory syndrome coronavirus 2
  REGION 1..11: note = Table A: HLA-A*02:11H HLA-A*02:05H HLA-A*02:08H HLA-C*08:01H
IVYGDFSHSQL

SEQ ID NO: 6163 - protein, 11 aa, Severe acute respiratory syndrome coronavirus 2
  REGION 1..11: note = Table A: HLA-A*24:07H
VYGDFSHSQLG

SEQ ID NO: 6164 - protein, 11 aa, Severe acute respiratory syndrome coronavirus 2
  REGION 1..11: note = Table A: HLA-B*38:02H HLA-B*57:03H
FSHSQLGGLHL

SEQ ID NO: 6165 - protein, 11 aa, Severe acute respiratory syndrome coronavirus 2
  REGION 1..11: note = Table A: HLA-B*38:01H HLA-B*38:02M
SHSQLGGLHLL

SEQ ID NO: 6166 - protein, 11 aa, Severe acute respiratory syndrome coronavirus 2
  REGION 1..11: note = Table A: HLA-A*02:02H
QLGGLHLLIGL

SEQ ID NO: 6167 - protein, 11 aa, Severe acute respiratory syndrome coronavirus 2
  REGION 1..11: note = Table A: HLA-B*35:03H HLA-B*35:07H
SPFELEDFIPM

SEQ ID NO: 6168 - protein, 11 aa, Severe acute respiratory syndrome coronavirus 2
  REGION 1..11: note = Table A: HLA-B*42:01H HLA-B*53:01M HLA-B*35:03H HLA-C*15:05H HLA-B*35:01H HLA-A*24:07H HLA-B*35:07M HLA-B*07:04H
IPMDSTVKNYF

SEQ ID NO: 6169 - protein, 11 aa, Severe acute respiratory syndrome coronavirus 2
  REGION 1..11: note = Table A: HLA-A*11:303H HLA-A*03:02H HLA-A*36:01H HLA-A*26:03H HLA-C*03:03H HLA-B*27:02H HLA-A*68:01H HLA-A*34:01H HLA-A*34:02M HLA-A*66:01H
FITDAQTGSSK

SEQ ID NO: 6170 - protein, 11 aa, Severe acute respiratory syndrome coronavirus 2
  REGION 1..11: note = Table A: HLA-A*68:02H
SVIDLLLDDFV

SEQ ID NO: 6171 - protein, 11 aa, Severe acute respiratory syndrome coronavirus 2
  REGION 1..11: note = Table A: HLA-A*26:03H HLA-A*68:02M HLA-B*38:02H
EIIKSQDLSVV

SEQ ID NO: 6172 - protein, 11 aa, Severe acute respiratory syndrome coronavirus 2
  REGION 1..11: note = Table A: HLA-B*58:02H HLA-A*02:11H
KSQDLSVVSKV

SEQ ID NO: 6173 - protein, 11 aa, Severe acute respiratory syndrome coronavirus 2
  REGION 1..11: note = Table A: HLA-A*68:02H
DLSVVSKVVKV

SEQ ID NO: 6174 - protein, 11 aa, Severe acute respiratory syndrome coronavirus 2
  REGION 1..11: note = Table A: HLA-B*57:03H
KVTIDYTEISF

SEQ ID NO: 6175 - protein, 11 aa, Severe acute respiratory syndrome coronavirus 2
  REGION 1..11: note = Table A: HLA-A*24:02H HLA-A*24:07M HLA-A*23:01H
FYPKLQSSQAW

SEQ ID NO: 6176 - protein, 11 aa, Severe acute respiratory syndrome coronavirus 2
  REGION 1..11: note = Table A: HLA-A*74:01H
VAMPNLYKMQR

SEQ ID NO: 6177 - protein, 11 aa, Severe acute respiratory syndrome coronavirus 2
  REGION 1..11: note = Table A: HLA-B*07:04H
MPNLYKMQRML

SEQ ID NO: 6178 - protein, 11 aa, Severe acute respiratory syndrome coronavirus 2
  REGION 1..11: note = Table A: HLA-B*39:01H
DLQNYGDSATL

SEQ ID NO: 6179 - protein, 11 aa, Severe acute respiratory syndrome coronavirus 2
  REGION 1..11: note = Table A: HLA-B*27:02H HLA-A*34:02H
QNYGDSATLPK

SEQ ID NO: 6180 - protein, 11 aa, Severe acute respiratory syndrome coronavirus 2
  REGION 1..11: note = Table A: HLA-A*11:02H HLA-A*02:11M HLA-A*02:06H HLA-A*31:01H
ATLPKGIMMNV

SEQ ID NO: 6181 - protein, 11 aa, Severe acute respiratory syndrome coronavirus 2
  REGION 1..11: note = Table A: HLA-A*02:11M HLA-A*02:02H
IMMNVAKYTQL

SEQ ID NO: 6182 - protein, 11 aa, Severe acute respiratory syndrome coronavirus 2
  REGION 1..11: note = Table A: HLA-A*74:01H HLA-A*03:01H HLA-A*03:02H HLA-A*11:01H HLA-A*11:02H HLA-A*36:01H HLA-A*30:02H
RVIHFGAGSDK

SEQ ID NO: 6183 - protein, 11 aa, Severe acute respiratory syndrome coronavirus 2
  REGION 1..11: note = Table A: HLA-B*38:02H
IHFGAGSDKGV

SEQ ID NO: 6184 - protein, 11 aa, Severe acute respiratory syndrome coronavirus 2
  REGION 1..11: note = Table A: HLA-A*74:01H HLA-A*31:01H
KGVAPGTAVLR

SEQ ID NO: 6185 - protein, 11 aa, Severe acute respiratory syndrome coronavirus 2
  REGION 1..11: note = Table A: HLA-A*02:11H HLA-B*13:02H
RQWLPTGTLLV

SEQ ID NO: 6186 - protein, 11 aa, Severe acute respiratory syndrome coronavirus 2
  REGION 1..11: note = Table A: HLA-A*02:02H
LLVDSDLNDFV

SEQ ID NO: 6187 - protein, 11 aa, Severe acute respiratory syndrome coronavirus 2
  REGION 1..11: note = Table A: HLA-B*35:02H
DADSTLIGDCA

SEQ ID NO: 6188 - protein, 11 aa, Severe acute respiratory syndrome coronavirus 2
  REGION 1..11: note = Table A: HLA-B*27:02H
DLIISDMYDPK

SEQ ID NO: 6189 - protein, 11 aa, Severe acute respiratory syndrome coronavirus 2
  REGION 1..11: note = Table A: HLA-A*03:02H
IISDMYDPKTK

SEQ ID NO: 6190 - protein, 11 aa, Severe acute respiratory syndrome coronavirus 2
  REGION 1..11: note = Table A: HLA-A*03:02H HLA-A*36:01H HLA-A*33:01H HLA-A*33:03M HLA-A*34:02H
MYDPKTKNVTK

SEQ ID NO: 6191 - protein, 11 aa, Severe acute respiratory syndrome coronavirus 2
  REGION 1..11: note = Table A: HLA-B*57:03H
VTKENDSKEGF

SEQ ID NO: 6192 - protein, 11 aa, Severe acute respiratory syndrome coronavirus 2
  REGION 1..11: note = Table A: HLA-A*03:02H
KLALGGSVAIK

SEQ ID NO: 6193 - protein, 11 aa, Severe acute respiratory syndrome coronavirus 2
  REGION 1..11: note = Table A: HLA-B*58:01H HLA-B*57:01H HLA-A*32:01M HLA-B*57:03M
SVAIKITEHSW

SEQ ID NO: 6194 - protein, 11 aa, Severe acute respiratory syndrome coronavirus 2
  REGION 1..11: note = Table A: HLA-A*36:01M HLA-A*01:01H
ITEHSWNADLY

SEQ ID NO: 6195 - protein, 11 aa, Severe acute respiratory syndrome coronavirus 2
  REGION 1..11: note = Table A: HLA-B*38:01H HLA-B*38:02M
EHSWNADLYKL

SEQ ID NO: 6196 - protein, 11 aa, Severe acute respiratory syndrome coronavirus 2
  REGION 1..11: note = Table A: HLA-A*24:07H
LYKLMGHFAWW

SEQ ID NO: 6197 - protein, 11 aa, Severe acute respiratory syndrome coronavirus 2
  REGION 1..11: note = Table A: HLA-A*36:01H
SSEAFLIGCNY

SEQ ID NO: 6198 - protein, 11 aa, Severe acute respiratory syndrome coronavirus 2
  REGION 1..11: note = Table A: HLA-B*44:05H HLA-B*40:01H HLA-B*40:02H
SEAFLIGCNYL

SEQ ID NO: 6199 - protein, 11 aa, Severe acute respiratory syndrome coronavirus 2
  REGION 1..11: note = Table A: HLA-A*30:02H
LGKPREQIDGY

SEQ ID NO: 6200 - protein, 11 aa, Severe acute respiratory syndrome coronavirus 2
  REGION 1..11: note = Table A: HLA-B*42:01M HLA-B*56:01H HLA-B*55:02H HLA-C*15:05H HLA-B*55:01H HLA-B*35:07H HLA-B*07:02H HLA-B*07:04M
KPREQIDGYVM

SEQ ID NO: 6201 - protein, 11 aa, Severe acute respiratory syndrome coronavirus 2
  REGION 1..11: note = Table A: HLA-B*45:01H
REQIDGYVMHA

SEQ ID NO: 6202 - protein, 11 aa, Severe acute respiratory syndrome coronavirus 2
  REGION 1..11: note = Table A: HLA-A*24:07H
GYVMHANYIFW

SEQ ID NO: 6203 - protein, 11 aa, Severe acute respiratory syndrome coronavirus 2
  REGION 1..11: note = Table A: HLA-C*14:03H
NYIFWRNTNPI

SEQ ID NO: 6204 - protein, 11 aa, Severe acute respiratory syndrome coronavirus 2
  REGION 1..11: note = Table A: HLA-A*24:07M
IFWRNTNPIQL

SEQ ID NO: 6205 - protein, 11 aa, Severe acute respiratory syndrome coronavirus 2
  REGION 1..11: note = Table A: HLA-A*30:02H
RNTNPIQLSSY

SEQ ID NO: 6206 - protein, 11 aa, Severe acute respiratory syndrome coronavirus 2
  REGION 1..11: note = Table A: HLA-B*53:01M HLA-B*35:01H HLA-B*35:07H
NPIQLSSYSLF

SEQ ID NO: 6207 - protein, 11 aa, Severe acute respiratory syndrome coronavirus 2
  REGION 1..11: note = Table A: HLA-B*57:03H
SSYSLFDMSKF

SEQ ID NO: 6208 - protein, 11 aa, Severe acute respiratory syndrome coronavirus 2
  REGION 1..11: note = Table A: HLA-A*11:303H HLA-A*74:01M HLA-A*03:01M HLA-A*03:02M HLA-A*11:01M HLA-A*11:02H HLA-A*30:01H HLA-A*30:02H HLA-A*34:02M
SLFDMSKFPLK

SEQ ID NO: 6209 - protein, 11 aa, Severe acute respiratory syndrome coronavirus 2
  REGION 1..11: note = Table A: HLA-C*04:03H
LFDMSKFPLKL

SEQ ID NO: 6210 - protein, 11 aa, Severe acute respiratory syndrome coronavirus 2
  REGION 1..11: note = Table A: HLA-B*35:07H HLA-B*07:04H
FPLKLRGTAVM

SEQ ID NO: 6211 - protein, 11 aa, Severe acute respiratory syndrome coronavirus 2
  REGION 1..11: note = Table A: HLA-A*02:02M HLA-B*38:02H
SLKEGQINDMI

SEQ ID NO: 6212 - protein, 11 aa, Severe acute respiratory syndrome coronavirus 2
  REGION 1..11: note = Table A: HLA-A*02:05H HLA-B*13:01H
GQINDMILSLL

SEQ ID NO: 6213 - protein, 11 aa, Severe acute respiratory syndrome coronavirus 2
  REGION 1..11: note = Table A: HLA-A*74:01H
SLLSKGRLIIR

SEQ ID NO: 6214 - protein, 11 aa, Severe acute respiratory syndrome coronavirus 2
  REGION 1..11: note = Table A: HLA-A*68:02H HLA-A*02:05H HLA-A*02:08H HLA-A*31:01M
VVISSDVLVNN

SEQ ID NO: 6215 - protein, 8 aa, Severe acute respiratory syndrome coronavirus 2
  REGION 1..8: note = Table A: HLA-B*15:01H
AQSFLNGF

SEQ ID NO: 6216 - protein, 8 aa, Severe acute respiratory syndrome coronavirus 2
  REGION 1..8: note = Table A: HLA-C*14:02M HLA-C*14:03H HLA-C*15:05H HLA-B*07:05H
SFLNGFAV

SEQ ID NO: 6217 - protein, 9 aa, Severe acute respiratory syndrome coronavirus 2
  REGION 1..9: note = Table A: HLA-A*25:01H HLA-A*33:01M HLA-A*33:03H HLA-A*26:02H HLA-A*26:03H HLA-C*15:05H HLA-B*35:01H HLA-B*51:01H HLA-B*38:02H HLA-B*07:05H
DAQSFLNGF

SEQ ID NO: 6218 - protein, 9 aa, Severe acute respiratory syndrome coronavirus 2
  REGION 1..9: note = Table A: HLA-A*11:303H HLA-C*16:01H HLA-C*16:04H HLA-A*36:01H HLA-B*56:01H HLA-C*06:02H HLA-B*55:02H HLA-A*68:02M HLA-C*15:05M HLA-C*12:03H HLA-C*15:02H HLA-A*02:04H HLA-B*52:01H HLA-C*08:01H HLA-C*08:03M
  REGION 1..9: note = CONT. FROM ABOVE: HLA-B*38:02M HLA-B*39:06H HLA-B*40:06H HLA- B*54:01M HLA-B*39:01H HLA-B*07:05H HLA-B*13:02M
QSFLNGFAV

SEQ ID NO: 6219 - protein, 10 aa, Severe acute respiratory syndrome coronavirus 2
  REGION 1..10: note = Table A: HLA-B*44:05H
ADAQSFLNGF

SEQ ID NO: 6220 - protein, 10 aa, Severe acute respiratory syndrome coronavirus 2
  REGION 1..10: note = Table A: HLA-A*68:02H HLA-A*02:04H HLA-A*02:06H HLA-A*02:01H HLA-C*08:03H HLA-B*38:02H HLA-B*13:02M
AQSFLNGFAV

SEQ ID NO: 6221 - protein, 11 aa, Severe acute respiratory syndrome coronavirus 2
  REGION 1..11: note = Table A: HLA-A*33:01H HLA-A*68:02H HLA-B*54:01H
DAQSFLNGFAV

SEQ ID NO: 6222 - protein, 8 aa, Severe acute respiratory syndrome coronavirus 2
  REGION 1..8: note = Table A: HLA-C*15:05H HLA-B*51:01H HLA-B*54:01H
LPLVSSQC

SEQ ID NO: 6223 - protein, 8 aa, Severe acute respiratory syndrome coronavirus 2
  REGION 1..8: note = Table A: HLA-B*08:01H HLA-B*14:02H HLA-B*14:01H
NLTTRTQL

SEQ ID NO: 6224 - protein, 8 aa, Severe acute respiratory syndrome coronavirus 2
  REGION 1..8: note = Table A: HLA-B*39:06H
TRTQLPPA

SEQ ID NO: 6225 - protein, 8 aa, Severe acute respiratory syndrome coronavirus 2
  REGION 1..8: note = Table A: HLA-B*58:02H HLA-A*36:01H HLA-A*30:02M
RTQLPPAY

SEQ ID NO: 6226 - protein, 8 aa, Severe acute respiratory syndrome coronavirus 2
  REGION 1..8: note = Table A: HLA-C*15:05H
PPAYTNSF

SEQ ID NO: 6227 - protein, 8 aa, Severe acute respiratory syndrome coronavirus 2
  REGION 1..8: note = Table A: HLA-C*14:03H
SFTRGVYY

SEQ ID NO: 6228 - protein, 8 aa, Severe acute respiratory syndrome coronavirus 2
  REGION 1..8: note = Table A: HLA-C*14:02H HLA-C*14:03H
VYYPDKVF

SEQ ID NO: 6229 - protein, 8 aa, Severe acute respiratory syndrome coronavirus 2
  REGION 1..8: note = Table A: HLA-A*33:03H
YYPDKVFR

SEQ ID NO: 6230 - protein, 8 aa, Severe acute respiratory syndrome coronavirus 2
  REGION 1..8: note = Table A: HLA-B*38:02H
LHSTQDLF

SEQ ID NO: 6231 - protein, 8 aa, Severe acute respiratory syndrome coronavirus 2
  REGION 1..8: note = Table A: HLA-A*24:07H
PFFSNVTW

SEQ ID NO: 6232 - protein, 8 aa, Severe acute respiratory syndrome coronavirus 2
  REGION 1..8: note = Table A: HLA-C*14:03H
TWFHAIHV

SEQ ID NO: 6233 - protein, 8 aa, Severe acute respiratory syndrome coronavirus 2
  REGION 1..8: note = Table A: HLA-C*04:03H
RFDNPVLP

SEQ ID NO: 6234 - protein, 8 aa, Severe acute respiratory syndrome coronavirus 2
  REGION 1..8: note = Table A: HLA-B*37:01M
FDNPVLPF

SEQ ID NO: 6235 - protein, 8 aa, Severe acute respiratory syndrome coronavirus 2
  REGION 1..8: note = Table A: HLA-B*35:01H HLA-B*35:07H
LPFNDGVY

SEQ ID NO: 6236 - protein, 8 aa, Severe acute respiratory syndrome coronavirus 2
  REGION 1..8: note = Table A: HLA-C*14:03H
VYFASTEK

SEQ ID NO: 6237 - protein, 8 aa, Severe acute respiratory syndrome coronavirus 2
  REGION 1..8: note = Table A: HLA-B*58:01H HLA-B*58:02M HLA-B*57:01H HLA-B*57:03H
KSNIIRGW

SEQ ID NO: 6238 - protein, 8 aa, Severe acute respiratory syndrome coronavirus 2
  REGION 1..8: note = Table A: HLA-A*36:01H
FGTTLDSK

SEQ ID NO: 6239 - protein, 8 aa, Severe acute respiratory syndrome coronavirus 2
  REGION 1..8: note = Table A: HLA-B*37:01H HLA-B*40:02H HLA-B*41:02H
LDSKTQSL

SEQ ID NO: 6240 - protein, 8 aa, Severe acute respiratory syndrome coronavirus 2
  REGION 1..8: note = Table A: HLA-C*16:01H HLA-C*04:03H HLA-A*02:11H HLA-A*68:02H HLA-C*15:05M HLA-C*12:03H HLA-C*15:02M HLA-A*02:04H HLA-B*14:01H HLA-A*02:02H HLA-A*02:03H HLA-B*52:01H HLA-B*37:01H HLA-B*13:02H HLA-C*07:04H
ATNVVIKV

SEQ ID NO: 6241 - protein, 8 aa, Severe acute respiratory syndrome coronavirus 2
  REGION 1..8: note = Table A: HLA-B*39:06H
TNVVIKVC

SEQ ID NO: 6242 - protein, 8 aa, Severe acute respiratory syndrome coronavirus 2
  REGION 1..8: note = Table A: HLA-B*38:02H HLA-B*15:01H
VVIKVCEF

SEQ ID NO: 6243 - protein, 8 aa, Severe acute respiratory syndrome coronavirus 2
  REGION 1..8: note = Table A: HLA-B*18:01H HLA-B*53:01H HLA-A*34:01H HLA-B*35:01H HLA-B*51:01H HLA-B*35:07H HLA-B*38:02M HLA-B*15:02H HLA-B*07:05H HLA-B*15:11H
DPFLGVYY

SEQ ID NO: 6244 - protein, 8 aa, Severe acute respiratory syndrome coronavirus 2
  REGION 1..8: note = Table A: HLA-B*58:01H HLA-B*58:02H HLA-B*57:03M
KSWMESEF

SEQ ID NO: 6245 - protein, 8 aa, Severe acute respiratory syndrome coronavirus 2
  REGION 1..8: note = Table A: HLA-B*44:02H HLA-B*46:01H HLA-B*44:03H HLA-B*18:01H HLA-C*07:01H HLA-C*03:02H HLA-B*15:02H HLA-B*07:05H HLA-B*41:02H HLA-B*49:01H HLA-B*50:01H
MESEFRVY

SEQ ID NO: 6246 - protein, 8 aa, Severe acute respiratory syndrome coronavirus 2
  REGION 1..8: note = Table A: HLA-B*18:01H HLA-B*40:06H
SEFRVYSS

SEQ ID NO: 6247 - protein, 8 aa, Severe acute respiratory syndrome coronavirus 2
  REGION 1..8: note = Table A: HLA-B*46:01H HLA-B*18:01H HLA-B*37:01H HLA-B*07:05H
FEYVSQPF

SEQ ID NO: 6248 - protein, 8 aa, Severe acute respiratory syndrome coronavirus 2
  REGION 1..8: note = Table A: HLA-C*15:05H HLA-C*07:04H
YVSQPFLM

SEQ ID NO: 6249 - protein, 8 aa, Severe acute respiratory syndrome coronavirus 2
  REGION 1..8: note = Table A: HLA-B*57:03H
KNLREFVF

SEQ ID NO: 6250 - protein, 8 aa, Severe acute respiratory syndrome coronavirus 2
  REGION 1..8: note = Table A: HLA-A*34:02H
NLREFVFK

SEQ ID NO: 6251 - protein, 8 aa, Severe acute respiratory syndrome coronavirus 2
  REGION 1..8: note = Table A: HLA-B*52:01H HLA-B*40:02H HLA-B*40:06H HLA-B*49:01M
REFVFKNI

SEQ ID NO: 6252 - protein, 8 aa, Severe acute respiratory syndrome coronavirus 2
  REGION 1..8: note = Table A: HLA-A*30:02H
VFKNIDGY

SEQ ID NO: 6253 - protein, 8 aa, Severe acute respiratory syndrome coronavirus 2
  REGION 1..8: note = Table A: HLA-A*11:02H
GYFKIYSK

SEQ ID NO: 6254 - protein, 8 aa, Severe acute respiratory syndrome coronavirus 2
  REGION 1..8: note = Table A: HLA-B*39:06H
KHTPINLV

SEQ ID NO: 6255 - protein, 8 aa, Severe acute respiratory syndrome coronavirus 2
  REGION 1..8: note = Table A: HLA-C*15:05M HLA-B*07:02H HLA-B*07:05H
LPQGFSAL

SEQ ID NO: 6256 - protein, 8 aa, Severe acute respiratory syndrome coronavirus 2
  REGION 1..8: note = Table A: HLA-C*04:03H
LVDLPIGI

SEQ ID NO: 6257 - protein, 8 aa, Severe acute respiratory syndrome coronavirus 2
  REGION 1..8: note = Table A: HLA-B*51:01H
DLPIGINI

SEQ ID NO: 6258 - protein, 8 aa, Severe acute respiratory syndrome coronavirus 2
  REGION 1..8: note = Table A: HLA-C*14:03H
RFQTLLAL

SEQ ID NO: 6259 - protein, 8 aa, Severe acute respiratory syndrome coronavirus 2
  REGION 1..8: note = Table A: HLA-A*34:02H
QTLLALHR

SEQ ID NO: 6260 - protein, 8 aa, Severe acute respiratory syndrome coronavirus 2
  REGION 1..8: note = Table A: HLA-B*08:01H
LALHRSYL

SEQ ID NO: 6261 - protein, 8 aa, Severe acute respiratory syndrome coronavirus 2
  REGION 1..8: note = Table A: HLA-B*39:06H
SGWTAGAA

SEQ ID NO: 6262 - protein, 8 aa, Severe acute respiratory syndrome coronavirus 2
  REGION 1..8: note = Table A: HLA-B*58:01H HLA-B*35:01M HLA-B*38:02H
TAGAAAYY

SEQ ID NO: 6263 - protein, 8 aa, Severe acute respiratory syndrome coronavirus 2
  REGION 1..8: note = Table A: HLA-C*15:05H HLA-C*17:01H
AAYYVGYL

SEQ ID NO: 6264 - protein, 8 aa, Severe acute respiratory syndrome coronavirus 2
  REGION 1..8: note = Table A: HLA-B*52:01H
VGYLQPRT

SEQ ID NO: 6265 - protein, 8 aa, Severe acute respiratory syndrome coronavirus 2
  REGION 1..8: note = Table A: HLA-B*08:01H HLA-A*02:02H
YLQPRTFL

SEQ ID NO: 6266 - protein, 8 aa, Severe acute respiratory syndrome coronavirus 2
  REGION 1..8: note = Table A: HLA-A*36:01H
LDPLSETK

SEQ ID NO: 6267 - protein, 8 aa, Severe acute respiratory syndrome coronavirus 2
  REGION 1..8: note = Table A: HLA-B*35:02H
DPLSETKC

SEQ ID NO: 6268 - protein, 8 aa, Severe acute respiratory syndrome coronavirus 2
  REGION 1..8: note = Table A: HLA-B*18:01H HLA-B*40:02H HLA-B*41:02M
VEKGIYQT

SEQ ID NO: 6269 - protein, 8 aa, Severe acute respiratory syndrome coronavirus 2
  REGION 1..8: note = Table A: HLA-A*33:03H
IYQTSNFR

SEQ ID NO: 6270 - protein, 8 aa, Severe acute respiratory syndrome coronavirus 2
  REGION 1..8: note = Table A: HLA-B*52:01H HLA-B*13:02M
YQTSNFRV

SEQ ID NO: 6271 - protein, 8 aa, Severe acute respiratory syndrome coronavirus 2
  REGION 1..8: note = Table A: HLA-B*52:01H
VQPTESIV

SEQ ID NO: 6272 - protein, 8 aa, Severe acute respiratory syndrome coronavirus 2
  REGION 1..8: note = Table A: HLA-A*26:03H HLA-A*34:01M HLA-A*66:01H
EVFNATRF

SEQ ID NO: 6273 - protein, 8 aa, Severe acute respiratory syndrome coronavirus 2
  REGION 1..8: note = Table A: HLA-C*15:05H HLA-B*51:01M HLA-B*54:01H
NATRFASV

SEQ ID NO: 6274 - protein, 8 aa, Severe acute respiratory syndrome coronavirus 2
  REGION 1..8: note = Table A: HLA-B*46:01H HLA-A*30:02H HLA-B*15:01H HLA-B*15:03H
ATRFASVY

SEQ ID NO: 6275 - protein, 8 aa, Severe acute respiratory syndrome coronavirus 2
  REGION 1..8: note = Table A: HLA-B*58:01H
RFASVYAW

SEQ ID NO: 6276 - protein, 8 aa, Severe acute respiratory syndrome coronavirus 2
  REGION 1..8: note = Table A: HLA-A*74:01H HLA-A*11:02H HLA-A*31:01H
ASVYAWNR

SEQ ID NO: 6277 - protein, 8 aa, Severe acute respiratory syndrome coronavirus 2
  REGION 1..8: note = Table A: HLA-A*11:02H
SVYAWNRK

SEQ ID NO: 6278 - protein, 8 aa, Severe acute respiratory syndrome coronavirus 2
  REGION 1..8: note = Table A: HLA-B*58:01H HLA-A*36:01M HLA-A*01:01H HLA-C*04:03M HLA-B*35:01H HLA-B*35:08H HLA-B*38:02H
VADYSVLY

SEQ ID NO: 6279 - protein, 8 aa, Severe acute respiratory syndrome coronavirus 2
  REGION 1..8: note = Table A: HLA-B*54:01H
YSVLYNSA

SEQ ID NO: 6280 - protein, 8 aa, Severe acute respiratory syndrome coronavirus 2
  REGION 1..8: note = Table A: HLA-B*46:01H HLA-B*38:02H HLA-B*15:01H HLA-B*15:02H
VLYNSASF

SEQ ID NO: 6281 - protein, 8 aa, Severe acute respiratory syndrome coronavirus 2
  REGION 1..8: note = Table A: HLA-C*15:05H HLA-B*07:05H
NSASFSTF

SEQ ID NO: 6282 - protein, 8 aa, Severe acute respiratory syndrome coronavirus 2
  REGION 1..8: note = Table A: HLA-A*03:02H HLA-A*11:01H HLA-A*11:02H HLA-A*36:01H HLA-A*34:02M
SASFSTFK

SEQ ID NO: 6283 - protein, 8 aa, Severe acute respiratory syndrome coronavirus 2
  REGION 1..8: note = Table A: HLA-A*02:11H
STFKCYGV

SEQ ID NO: 6284 - protein, 8 aa, Severe acute respiratory syndrome coronavirus 2
  REGION 1..8: note = Table A: HLA-C*15:05H HLA-C*17:01H
YGVSPTKL

SEQ ID NO: 6285 - protein, 8 aa, Severe acute respiratory syndrome coronavirus 2
  REGION 1..8: note = Table A: HLA-C*15:05H HLA-B*55:01H HLA-B*07:02M HLA-B*07:04H HLA-B*07:05H
SPTKLNDL

SEQ ID NO: 6286 - protein, 8 aa, Severe acute respiratory syndrome coronavirus 2
  REGION 1..8: note = Table A: HLA-A*24:02H HLA-C*08:01H HLA-A*23:01H
VYADSFVI

SEQ ID NO: 6287 - protein, 8 aa, Severe acute respiratory syndrome coronavirus 2
  REGION 1..8: note = Table A: HLA-C*03:03H HLA-A*02:11H HLA-C*03:04H HLA-A*02:05H HLA-C*08:01H HLA-B*38:02M HLA-B*39:01H HLA-B*13:02H
FVIRGDEV

SEQ ID NO: 6288 - protein, 8 aa, Severe acute respiratory syndrome coronavirus 2
  REGION 1..8: note = Table A: HLA-B*58:02H
RGDEVRQI

SEQ ID NO: 6289 - protein, 8 aa, Severe acute respiratory syndrome coronavirus 2
  REGION 1..8: note = Table A: HLA-B*18:01H
DEVRQIAP

SEQ ID NO: 6290 - protein, 8 aa, Severe acute respiratory syndrome coronavirus 2
  REGION 1..8: note = Table A: HLA-C*15:05M
APGQTGKI

SEQ ID NO: 6291 - protein, 8 aa, Severe acute respiratory syndrome coronavirus 2
  REGION 1..8: note = Table A: HLA-B*15:03H
GKIADYNY

SEQ ID NO: 6292 - protein, 8 aa, Severe acute respiratory syndrome coronavirus 2
  REGION 1..8: note = Table A: HLA-C*04:03H HLA-B*35:02H HLA-C*08:01H HLA-C*08:02M HLA-B*35:12H HLA-C*05:01H
IADYNYKL

SEQ ID NO: 6293 - protein, 8 aa, Severe acute respiratory syndrome coronavirus 2
  REGION 1..8: note = Table A: HLA-A*26:01H HLA-B*38:02H HLA-B*15:02H
DSKVGGNY

SEQ ID NO: 6294 - protein, 8 aa, Severe acute respiratory syndrome coronavirus 2
  REGION 1..8: note = Table A: HLA-B*58:01H HLA-A*30:02H
KVGGNYNY

SEQ ID NO: 6295 - protein, 8 aa, Severe acute respiratory syndrome coronavirus 2
  REGION 1..8: note = Table A: HLA-A*33:01M HLA-A*33:03M HLA-A*31:01H
SNLKPFER

SEQ ID NO: 6296 - protein, 8 aa, Severe acute respiratory syndrome coronavirus 2
  REGION 1..8: note = Table A: HLA-B*39:06H HLA-B*54:01H
ISTEIYQA

SEQ ID NO: 6297 - protein, 8 aa, Severe acute respiratory syndrome coronavirus 2
  REGION 1..8: note = Table A: HLA-C*14:03H
CYFPLQSY

SEQ ID NO: 6298 - protein, 8 aa, Severe acute respiratory syndrome coronavirus 2
  REGION 1..8: note = Table A: HLA-B*27:02H HLA-B*53:01M HLA-B*35:01M HLA-B*35:07M HLA-B*38:02H HLA-B*15:02H HLA-B*07:05H
FPLQSYGF

SEQ ID NO: 6299 - protein, 8 aa, Severe acute respiratory syndrome coronavirus 2
  REGION 1..8: note = Table A: HLA-B*35:01H
QPTNGVGY

SEQ ID NO: 6300 - protein, 8 aa, Severe acute respiratory syndrome coronavirus 2
  REGION 1..8: note = Table A: HLA-B*51:01H HLA-B*52:01H
VGYQPYRV

SEQ ID NO: 6301 - protein, 8 aa, Severe acute respiratory syndrome coronavirus 2
  REGION 1..8: note = Table A: HLA-B*52:01H
YQPYRVVV

SEQ ID NO: 6302 - protein, 8 aa, Severe acute respiratory syndrome coronavirus 2
  REGION 1..8: note = Table A: HLA-B*42:01H HLA-B*08:01M HLA-B*35:03H HLA-C*15:05M HLA-B*14:02H HLA-B*55:01H HLA-B*51:01M HLA-B*35:07H HLA-B*52:01H HLA-C*08:01H HLA-B*38:02H HLA-B*07:02H HLA-B*07:04H HLA-B*15:02H HLA-B*07:05H
QPYRVVVL

SEQ ID NO: 6303 - protein, 8 aa, Severe acute respiratory syndrome coronavirus 2
  REGION 1..8: note = Table A: HLA-B*54:01H
LSFELLHA

SEQ ID NO: 6304 - protein, 8 aa, Severe acute respiratory syndrome coronavirus 2
  REGION 1..8: note = Table A: HLA-B*50:01H
FELLHAPA

SEQ ID NO: 6305 - protein, 8 aa, Severe acute respiratory syndrome coronavirus 2
  REGION 1..8: note = Table A: HLA-A*02:11M HLA-B*14:01H HLA-A*02:01H HLA-A*02:02H HLA-A*02:03M HLA-B*38:02H HLA-B*13:02H
LLHAPATV

SEQ ID NO: 6306 - protein, 8 aa, Severe acute respiratory syndrome coronavirus 2
  REGION 1..8: note = Table A: HLA-B*39:06M HLA-B*15:10M
LHAPATVC

SEQ ID NO: 6307 - protein, 8 aa, Severe acute respiratory syndrome coronavirus 2
  REGION 1..8: note = Table A: HLA-C*15:05H HLA-B*07:02H HLA-B*07:04H
GPKKSTNL

SEQ ID NO: 6308 - protein, 8 aa, Severe acute respiratory syndrome coronavirus 2
  REGION 1..8: note = Table A: HLA-B*14:01H
NGLTGTGV

SEQ ID NO: 6309 - protein, 8 aa, Severe acute respiratory syndrome coronavirus 2
  REGION 1..8: note = Table A: HLA-A*24:07H HLA-A*23:01H
KFLPFQQF

SEQ ID NO: 6310 - protein, 8 aa, Severe acute respiratory syndrome coronavirus 2
  REGION 1..8: note = Table A: HLA-A*34:01H
LPFQQFGR

SEQ ID NO: 6311 - protein, 8 aa, Severe acute respiratory syndrome coronavirus 2
  REGION 1..8: note = Table A: HLA-C*08:02H
IADTTDAV

SEQ ID NO: 6312 - protein, 8 aa, Severe acute respiratory syndrome coronavirus 2
  REGION 1..8: note = Table A: HLA-B*35:02H
DAVRDPQT

SEQ ID NO: 6313 - protein, 8 aa, Severe acute respiratory syndrome coronavirus 2
  REGION 1..8: note = Table A: HLA-C*15:05H
AVRDPQTL

SEQ ID NO: 6314 - protein, 8 aa, Severe acute respiratory syndrome coronavirus 2
  REGION 1..8: note = Table A: HLA-B*40:02H
LDITPCSF

SEQ ID NO: 6315 - protein, 8 aa, Severe acute respiratory syndrome coronavirus 2
  REGION 1..8: note = Table A: HLA-C*15:05H
TSNQVAVL

SEQ ID NO: 6316 - protein, 8 aa, Severe acute respiratory syndrome coronavirus 2
  REGION 1..8: note = Table A: HLA-C*04:03H
CTEVPVAI

SEQ ID NO: 6317 - protein, 8 aa, Severe acute respiratory syndrome coronavirus 2
  REGION 1..8: note = Table A: HLA-B*18:01M HLA-B*07:05M HLA-B*41:02H HLA-B*49:01H
TEVPVAIH

SEQ ID NO: 6318 - protein, 8 aa, Severe acute respiratory syndrome coronavirus 2
  REGION 1..8: note = Table A: HLA-C*08:01H HLA-B*35:12H
VAIHADQL

SEQ ID NO: 6319 - protein, 8 aa, Severe acute respiratory syndrome coronavirus 2
  REGION 1..8: note = Table A: HLA-B*44:02H HLA-B*44:05H HLA-B*44:03H HLA-B*37:01H
ADQLTPTW

SEQ ID NO: 6320 - protein, 8 aa, Severe acute respiratory syndrome coronavirus 2
  REGION 1..8: note = Table A: HLA-B*46:01H
LTPTWRVY

SEQ ID NO: 6321 - protein, 8 aa, Severe acute respiratory syndrome coronavirus 2
  REGION 1..8: note = Table A: HLA-C*14:03H
VYSTGSNV

SEQ ID NO: 6322 - protein, 8 aa, Severe acute respiratory syndrome coronavirus 2
  REGION 1..8: note = Table A: HLA-A*74:01H HLA-A*11:01H HLA-A*11:02H HLA-B*57:01H HLA-A*33:01H HLA-A*33:03M HLA-A*68:01H HLA-A*31:01M
GSNVFQTR

SEQ ID NO: 6323 - protein, 8 aa, Severe acute respiratory syndrome coronavirus 2
  REGION 1..8: note = Table A: HLA-B*44:02H HLA-B*44:05H HLA-B*46:01H HLA-B*44:03H HLA-B*18:01H HLA-B*07:05H
AEHVNNSY

SEQ ID NO: 6324 - protein, 8 aa, Severe acute respiratory syndrome coronavirus 2
  REGION 1..8: note = Table A: HLA-B*51:01M
DIPIGAGI

SEQ ID NO: 6325 - protein, 8 aa, Severe acute respiratory syndrome coronavirus 2
  REGION 1..8: note = Table A: HLA-C*15:05H
IPIGAGIC

SEQ ID NO: 6326 - protein, 8 aa, Severe acute respiratory syndrome coronavirus 2
  REGION 1..8: note = Table A: HLA-A*33:03H
QTQTNSPR

SEQ ID NO: 6327 - protein, 8 aa, Severe acute respiratory syndrome coronavirus 2
  REGION 1..8: note = Table A: HLA-B*07:02H HLA-B*07:04H
SPRRARSV

SEQ ID NO: 6328 - protein, 8 aa, Severe acute respiratory syndrome coronavirus 2
  REGION 1..8: note = Table A: HLA-B*58:02H
RSVASQSI

SEQ ID NO: 6329 - protein, 8 aa, Severe acute respiratory syndrome coronavirus 2
  REGION 1..8: note = Table A: HLA-A*30:02H HLA-B*15:01M
ASQSIIAY

SEQ ID NO: 6330 - protein, 8 aa, Severe acute respiratory syndrome coronavirus 2
  REGION 1..8: note = Table A: HLA-B*58:01H HLA-B*58:02M HLA-B*38:02H HLA-B*07:05H
QSIIAYTM

SEQ ID NO: 6331 - protein, 8 aa, Severe acute respiratory syndrome coronavirus 2
  REGION 1..8: note = Table A: HLA-C*15:05H
IIAYTMSL

SEQ ID NO: 6332 - protein, 8 aa, Severe acute respiratory syndrome coronavirus 2
  REGION 1..8: note = Table A: HLA-B*35:01H HLA-B*39:01H
GAENSVAY

SEQ ID NO: 6333 - protein, 8 aa, Severe acute respiratory syndrome coronavirus 2
  REGION 1..8: note = Table A: HLA-C*15:05H HLA-B*51:01M HLA-B*52:01H
VAYSNNSI

SEQ ID NO: 6334 - protein, 8 aa, Severe acute respiratory syndrome coronavirus 2
  REGION 1..8: note = Table A: HLA-C*15:05H
SIAIPTNF

SEQ ID NO: 6335 - protein, 8 aa, Severe acute respiratory syndrome coronavirus 2
  REGION 1..8: note = Table A: HLA-C*15:05H
PTNFTISV

SEQ ID NO: 6336 - protein, 8 aa, Severe acute respiratory syndrome coronavirus 2
  REGION 1..8: note = Table A: HLA-C*15:05H
VTTEILPV

SEQ ID NO: 6337 - protein, 8 aa, Severe acute respiratory syndrome coronavirus 2
  REGION 1..8: note = Table A: HLA-B*44:05H HLA-B*18:01H HLA-B*37:01H HLA-B*40:01M HLA-B*40:02M HLA-B*39:01H HLA-B*07:05H HLA-B*41:02M HLA-B*49:01H
TEILPVSM

SEQ ID NO: 6338 - protein, 8 aa, Severe acute respiratory syndrome coronavirus 2
  REGION 1..8: note = Table A: HLA-A*03:01H
ILPVSMTK

SEQ ID NO: 6339 - protein, 8 aa, Severe acute respiratory syndrome coronavirus 2
  REGION 1..8: note = Table A: HLA-B*51:01H HLA-B*54:01H
LPVSMTKT

SEQ ID NO: 6340 - protein, 8 aa, Severe acute respiratory syndrome coronavirus 2
  REGION 1..8: note = Table A: HLA-B*08:01H
VSMTKTSV

SEQ ID NO: 6341 - protein, 8 aa, Severe acute respiratory syndrome coronavirus 2
  REGION 1..8: note = Table A: HLA-C*15:05H
RALTGIAV

SEQ ID NO: 6342 - protein, 8 aa, Severe acute respiratory syndrome coronavirus 2
  REGION 1..8: note = Table A: HLA-B*52:01H HLA-B*39:06H HLA-B*39:01H
TQEVFAQV

SEQ ID NO: 6343 - protein, 8 aa, Severe acute respiratory syndrome coronavirus 2
  REGION 1..8: note = Table A: HLA-B*52:01H
VFAQVKQI

SEQ ID NO: 6344 - protein, 8 aa, Severe acute respiratory syndrome coronavirus 2
  REGION 1..8: note = Table A: HLA-C*16:01H HLA-B*46:01M HLA-B*08:01H HLA-C*03:02H HLA-C*12:03H HLA-B*35:01H HLA-B*35:07H HLA-B*38:02H HLA-B*15:02H
FAQVKQIY

SEQ ID NO: 6345 - protein, 8 aa, Severe acute respiratory syndrome coronavirus 2
  REGION 1..8: note = Table A: HLA-A*11:01H HLA-A*11:02H
AQVKQIYK

SEQ ID NO: 6346 - protein, 8 aa, Severe acute respiratory syndrome coronavirus 2
  REGION 1..8: note = Table A: HLA-B*52:01H
QIYKTPPI

SEQ ID NO: 6347 - protein, 8 aa, Severe acute respiratory syndrome coronavirus 2
  REGION 1..8: note = Table A: HLA-A*30:01H
IYKTPPIK

SEQ ID NO: 6348 - protein, 8 aa, Severe acute respiratory syndrome coronavirus 2
  REGION 1..8: note = Table A: HLA-B*37:01M
KDFGGFNF

SEQ ID NO: 6349 - protein, 8 aa, Severe acute respiratory syndrome coronavirus 2
  REGION 1..8: note = Table A: HLA-A*11:02H
PDPSKPSK

SEQ ID NO: 6350 - protein, 8 aa, Severe acute respiratory syndrome coronavirus 2
  REGION 1..8: note = Table A: HLA-B*18:01H
EDLLFNKV

SEQ ID NO: 6351 - protein, 8 aa, Severe acute respiratory syndrome coronavirus 2
  REGION 1..8: note = Table A: HLA-B*08:01M HLA-A*02:11M HLA-A*02:04H HLA-A*02:02H
LLFNKVTL

SEQ ID NO: 6352 - protein, 8 aa, Severe acute respiratory syndrome coronavirus 2
  REGION 1..8: note = Table A: HLA-B*18:01H HLA-C*07:01H HLA-C*12:03H HLA-A*34:01H HLA-B*35:01M HLA-B*51:01H HLA-B*35:07H HLA-B*38:02H HLA-B*15:02H HLA-B*07:05H
DAGFIKQY

SEQ ID NO: 6353 - protein, 8 aa, Severe acute respiratory syndrome coronavirus 2
  REGION 1..8: note = Table A: HLA-B*40:02H HLA-B*41:02H
GDIAARDL

SEQ ID NO: 6354 - protein, 8 aa, Severe acute respiratory syndrome coronavirus 2
  REGION 1..8: note = Table A: HLA-C*15:05H HLA-B*35:01H
PPLLTDEM

SEQ ID NO: 6355 - protein, 8 aa, Severe acute respiratory syndrome coronavirus 2
  REGION 1..8: note = Table A: HLA-B*18:01H
TDEMIAQY

SEQ ID NO: 6356 - protein, 8 aa, Severe acute respiratory syndrome coronavirus 2
  REGION 1..8: note = Table A: HLA-B*18:01H HLA-B*07:05H
DEMIAQYT

SEQ ID NO: 6357 - protein, 8 aa, Severe acute respiratory syndrome coronavirus 2
  REGION 1..8: note = Table A: HLA-C*03:03H HLA-C*03:04H HLA-C*15:05H
IAQYTSAL

SEQ ID NO: 6358 - protein, 8 aa, Severe acute respiratory syndrome coronavirus 2
  REGION 1..8: note = Table A: HLA-B*48:01H HLA-B*52:01M HLA-B*38:02H HLA-B*15:01H HLA-B*15:03H HLA-B*13:02H
AQYTSALL

SEQ ID NO: 6359 - protein, 8 aa, Severe acute respiratory syndrome coronavirus 2
  REGION 1..8: note = Table A: HLA-C*15:05H HLA-B*51:01M HLA-B*52:01H
SALLAGTI

SEQ ID NO: 6360 - protein, 8 aa, Severe acute respiratory syndrome coronavirus 2
  REGION 1..8: note = Table A: HLA-B*58:01H
AGTITSGW

SEQ ID NO: 6361 - protein, 8 aa, Severe acute respiratory syndrome coronavirus 2
  REGION 1..8: note = Table A: HLA-B*58:01H
TITSGWTF

SEQ ID NO: 6362 - protein, 8 aa, Severe acute respiratory syndrome coronavirus 2
  REGION 1..8: note = Table A: HLA-C*14:02H HLA-C*14:03H HLA-C*15:05H HLA-C*01:02H HLA-B*39:01H
TFGAGAAL

SEQ ID NO: 6363 - protein, 8 aa, Severe acute respiratory syndrome coronavirus 2
  REGION 1..8: note = Table A: HLA-B*56:01H HLA-B*55:02H HLA-B*55:01H HLA-B*51:01H HLA-B*54:01M
IPFAMQMA

SEQ ID NO: 6364 - protein, 8 aa, Severe acute respiratory syndrome coronavirus 2
  REGION 1..8: note = Table A: HLA-A*33:03H HLA-A*66:01H
FAMQMAYR

SEQ ID NO: 6365 - protein, 8 aa, Severe acute respiratory syndrome coronavirus 2
  REGION 1..8: note = Table A: HLA-B*51:01M HLA-B*52:01H HLA-B*38:02H
MAYRFNGI

SEQ ID NO: 6366 - protein, 8 aa, Severe acute respiratory syndrome coronavirus 2
  REGION 1..8: note = Table A: HLA-C*06:02H HLA-B*14:01H
YRFNGIGV

SEQ ID NO: 6367 - protein, 8 aa, Severe acute respiratory syndrome coronavirus 2
  REGION 1..8: note = Table A: HLA-A*02:11H HLA-B*14:01H HLA-A*02:02H HLA-B*38:02H
VLYENQKL

SEQ ID NO: 6368 - protein, 8 aa, Severe acute respiratory syndrome coronavirus 2
  REGION 1..8: note = Table A: HLA-B*45:01H HLA-B*50:01H
YENQKLIA

SEQ ID NO: 6369 - protein, 8 aa, Severe acute respiratory syndrome coronavirus 2
  REGION 1..8: note = Table A: HLA-B*15:03H
QKLIANQF

SEQ ID NO: 6370 - protein, 8 aa, Severe acute respiratory syndrome coronavirus 2
  REGION 1..8: note = Table A: HLA-B*39:01H
NQFNSAIG

SEQ ID NO: 6371 - protein, 8 aa, Severe acute respiratory syndrome coronavirus 2
  REGION 1..8: note = Table A: HLA-B*08:01H HLA-C*08:03H HLA-B*41:02H
IGKIQDSL

SEQ ID NO: 6372 - protein, 8 aa, Severe acute respiratory syndrome coronavirus 2
  REGION 1..8: note = Table A: HLA-C*15:05H
LSSTASAL

SEQ ID NO: 6373 - protein, 8 aa, Severe acute respiratory syndrome coronavirus 2
  REGION 1..8: note = Table A: HLA-C*15:05M
TASALGKL

SEQ ID NO: 6374 - protein, 8 aa, Severe acute respiratory syndrome coronavirus 2
  REGION 1..8: note = Table A: HLA-A*02:01H HLA-A*02:02H HLA-A*02:03H
ALGKLQDV

SEQ ID NO: 6375 - protein, 8 aa, Severe acute respiratory syndrome coronavirus 2
  REGION 1..8: note = Table A: HLA-B*52:01H HLA-B*13:02H
AQALNTLV

SEQ ID NO: 6376 - protein, 8 aa, Severe acute respiratory syndrome coronavirus 2
  REGION 1..8: note = Table A: HLA-A*11:01H HLA-A*11:02H HLA-A*36:01H HLA-A*34:02H
QALNTLVK

SEQ ID NO: 6377 - protein, 8 aa, Severe acute respiratory syndrome coronavirus 2
  REGION 1..8: note = Table A: HLA-B*46:01H HLA-C*03:03H HLA-C*03:02H HLA-C*03:04M HLA-C*15:05H HLA-B*14:01H HLA-C*07:27H HLA-B*39:01H HLA-B*15:10H
FGAISSVL

SEQ ID NO: 6378 - protein, 8 aa, Severe acute respiratory syndrome coronavirus 2
  REGION 1..8: note = Table A: HLA-A*74:01H HLA-A*11:02H
VLNDILSR

SEQ ID NO: 6379 - protein, 8 aa, Severe acute respiratory syndrome coronavirus 2
  REGION 1..8: note = Table A: HLA-C*04:03H
LNDILSRL

SEQ ID NO: 6380 - protein, 8 aa, Severe acute respiratory syndrome coronavirus 2
  REGION 1..8: note = Table A: HLA-A*02:02H
ILSRLDKV

SEQ ID NO: 6381 - protein, 8 aa, Severe acute respiratory syndrome coronavirus 2
  REGION 1..8: note = Table A: HLA-B*39:06H
SRLDKVEA

SEQ ID NO: 6382 - protein, 8 aa, Severe acute respiratory syndrome coronavirus 2
  REGION 1..8: note = Table A: HLA-B*41:02H
LDKVEAEV

SEQ ID NO: 6383 - protein, 8 aa, Severe acute respiratory syndrome coronavirus 2
  REGION 1..8: note = Table A: HLA-B*44:05H HLA-B*40:01H HLA-B*40:02M HLA-B*41:02M
AEVQIDRL

SEQ ID NO: 6384 - protein, 8 aa, Severe acute respiratory syndrome coronavirus 2
  REGION 1..8: note = Table A: HLA-B*14:02M HLA-B*14:01M
DRLITGRL

SEQ ID NO: 6385 - protein, 8 aa, Severe acute respiratory syndrome coronavirus 2
  REGION 1..8: note = Table A: HLA-C*03:04H HLA-C*15:05M HLA-C*15:02H HLA-B*57:03H
ITGRLQSL

SEQ ID NO: 6386 - protein, 8 aa, Severe acute respiratory syndrome coronavirus 2
  REGION 1..8: note = Table A: HLA-A*30:02H HLA-B*15:01H
RLQSLQTY

SEQ ID NO: 6387 - protein, 8 aa, Severe acute respiratory syndrome coronavirus 2
  REGION 1..8: note = Table A: HLA-C*15:05H HLA-B*52:01H HLA-C*08:03H
QTYVTQQL

SEQ ID NO: 6388 - protein, 8 aa, Severe acute respiratory syndrome coronavirus 2
  REGION 1..8: note = Table A: HLA-C*06:02H HLA-A*24:02H HLA-A*23:01H
TYVTQQLI

SEQ ID NO: 6389 - protein, 8 aa, Severe acute respiratory syndrome coronavirus 2
  REGION 1..8: note = Table A: HLA-B*39:06H
TQQLIRAA

SEQ ID NO: 6390 - protein, 8 aa, Severe acute respiratory syndrome coronavirus 2
  REGION 1..8: note = Table A: HLA-B*52:01H HLA-B*38:02H HLA-B*13:02H
QLIRAAEI

SEQ ID NO: 6391 - protein, 8 aa, Severe acute respiratory syndrome coronavirus 2
  REGION 1..8: note = Table A: HLA-A*03:02H HLA-A*11:01H
SANLAATK

SEQ ID NO: 6392 - protein, 8 aa, Severe acute respiratory syndrome coronavirus 2
  REGION 1..8: note = Table A: HLA-B*07:05H
ANLAATKM

SEQ ID NO: 6393 - protein, 8 aa, Severe acute respiratory syndrome coronavirus 2
  REGION 1..8: note = Table A: HLA-C*15:05H
APHGVVFL

SEQ ID NO: 6394 - protein, 8 aa, Severe acute respiratory syndrome coronavirus 2
  REGION 1..8: note = Table A: HLA-B*51:01H HLA-B*52:01H
HGVVFLHV

SEQ ID NO: 6395 - protein, 8 aa, Severe acute respiratory syndrome coronavirus 2
  REGION 1..8: note = Table A: HLA-B*46:01H HLA-B*38:02H HLA-B*15:01H HLA-B*15:02M
VVFLHVTY

SEQ ID NO: 6396 - protein, 8 aa, Severe acute respiratory syndrome coronavirus 2
  REGION 1..8: note = Table A: HLA-B*52:01H
VFLHVTYV

SEQ ID NO: 6397 - protein, 8 aa, Severe acute respiratory syndrome coronavirus 2
  REGION 1..8: note = Table A: HLA-B*27:02H
TYVPAQEK

SEQ ID NO: 6398 - protein, 8 aa, Severe acute respiratory syndrome coronavirus 2
  REGION 1..8: note = Table A: HLA-B*45:01M HLA-B*50:01M
QEKNFTTA

SEQ ID NO: 6399 - protein, 8 aa, Severe acute respiratory syndrome coronavirus 2
  REGION 1..8: note = Table A: HLA-B*52:01H HLA-B*07:05H
NFTTAPAI

SEQ ID NO: 6400 - protein, 8 aa, Severe acute respiratory syndrome coronavirus 2
  REGION 1..8: note = Table A: HLA-A*33:01H
DGKAHFPR

SEQ ID NO: 6401 - protein, 8 aa, Severe acute respiratory syndrome coronavirus 2
  REGION 1..8: note = Table A: HLA-B*39:06H
AHFPREGV

SEQ ID NO: 6402 - protein, 8 aa, Severe acute respiratory syndrome coronavirus 2
  REGION 1..8: note = Table A: HLA-C*15:05H HLA-B*55:01H HLA-A*34:01H HLA-B*51:01M HLA-B*38:02H HLA-B*54:01H HLA-B*07:02H HLA-B*07:04H
FPREGVFV

SEQ ID NO: 6403 - protein, 8 aa, Severe acute respiratory syndrome coronavirus 2
  REGION 1..8: note = Table A: HLA-B*53:01H HLA-B*15:13H
FVSNGTHW

SEQ ID NO: 6404 - protein, 8 aa, Severe acute respiratory syndrome coronavirus 2
  REGION 1..8: note = Table A: HLA-B*52:01H
NFYEPQII

SEQ ID NO: 6405 - protein, 8 aa, Severe acute respiratory syndrome coronavirus 2
  REGION 1..8: note = Table A: HLA-B*51:01H
IGIVNNTV

SEQ ID NO: 6406 - protein, 8 aa, Severe acute respiratory syndrome coronavirus 2
  REGION 1..8: note = Table A: HLA-B*40:02H HLA-B*41:02H
YDPLQPEL

SEQ ID NO: 6407 - protein, 8 aa, Severe acute respiratory syndrome coronavirus 2
  REGION 1..8: note = Table A: HLA-B*37:01H
LDSFKEEL

SEQ ID NO: 6408 - protein, 8 aa, Severe acute respiratory syndrome coronavirus 2
  REGION 1..8: note = Table A: HLA-B*35:02H HLA-B*35:12H
HTSPDVDL

SEQ ID NO: 6409 - protein, 8 aa, Severe acute respiratory syndrome coronavirus 2
  REGION 1..8: note = Table A: HLA-C*15:05H
ISGINASV

SEQ ID NO: 6410 - protein, 8 aa, Severe acute respiratory syndrome coronavirus 2
  REGION 1..8: note = Table A: HLA-A*11:01H HLA-A*11:02H
ASVVNIQK

SEQ ID NO: 6411 - protein, 8 aa, Severe acute respiratory syndrome coronavirus 2
  REGION 1..8: note = Table A: HLA-B*58:02H HLA-B*52:01H
VVNIQKEI

SEQ ID NO: 6412 - protein, 8 aa, Severe acute respiratory syndrome coronavirus 2
  REGION 1..8: note = Table A: HLA-A*02:05H HLA-B*52:01H HLA-B*15:01H
IQKEIDRL

SEQ ID NO: 6413 - protein, 8 aa, Severe acute respiratory syndrome coronavirus 2
  REGION 1..8: note = Table A: HLA-A*11:303H HLA-B*46:01H HLA-C*03:02H HLA-A*02:04M HLA-A*02:05H HLA-A*02:01H HLA-A*02:02H HLA-A*02:03H HLA-B*38:02H
SLIDLQEL

SEQ ID NO: 6414 - protein, 8 aa, Severe acute respiratory syndrome coronavirus 2
  REGION 1..8: note = Table A: HLA-A*02:04H
WLGFIAGL

SEQ ID NO: 6415 - protein, 8 aa, Severe acute respiratory syndrome coronavirus 2
  REGION 1..8: note = Table A: HLA-C*15:05H
IAGLIAIV

SEQ ID NO: 6416 - protein, 8 aa, Severe acute respiratory syndrome coronavirus 2
  REGION 1..8: note = Table A: HLA-B*13:02H
GLIAIVMV

SEQ ID NO: 6417 - protein, 8 aa, Severe acute respiratory syndrome coronavirus 2
  REGION 1..8: note = Table A: HLA-B*58:02H HLA-C*15:05H HLA-B*51:01H HLA-B*52:01M HLA-C*08:01H HLA-B*38:02H HLA-B*57:03H
IAIVMVTI

SEQ ID NO: 6418 - protein, 8 aa, Severe acute respiratory syndrome coronavirus 2
  REGION 1..8: note = Table A: HLA-C*15:05H
IVMVTIML

SEQ ID NO: 6419 - protein, 8 aa, Severe acute respiratory syndrome coronavirus 2
  REGION 1..8: note = Table A: HLA-B*35:02H HLA-B*35:12H
EDDSEPVL

SEQ ID NO: 6420 - protein, 8 aa, Severe acute respiratory syndrome coronavirus 2
  REGION 1..8: note = Table A: HLA-B*49:01H
SEPVLKGV

SEQ ID NO: 6421 - protein, 8 aa, Severe acute respiratory syndrome coronavirus 2
  REGION 1..8: note = Table A: HLA-C*15:05H
PVLKGVKL

SEQ ID NO: 6422 - protein, 9 aa, Severe acute respiratory syndrome coronavirus 2
  REGION 1..9: note = Table A: HLA-B*38:02H
VLLPLVSSQ

SEQ ID NO: 6423 - protein, 9 aa, Severe acute respiratory syndrome coronavirus 2
  REGION 1..9: note = Table A: HLA-B*56:01H HLA-B*55:02H HLA-C*15:05M HLA-B*51:01H HLA-B*54:01M HLA-B*07:05H
LPLVSSQCV

SEQ ID NO: 6424 - protein, 9 aa, Severe acute respiratory syndrome coronavirus 2
  REGION 1..9: note = Table A: HLA-A*74:01H HLA-A*31:01H
SQCVNLTTR

SEQ ID NO: 6425 - protein, 9 aa, Severe acute respiratory syndrome coronavirus 2
  REGION 1..9: note = Table A: HLA-B*55:01H
TTRTQLPPA

SEQ ID NO: 6426 - protein, 9 aa, Severe acute respiratory syndrome coronavirus 2
  REGION 1..9: note = Table A: HLA-B*27:05M HLA-C*07:02H HLA-B*27:02M HLA-B*38:02H HLA-B*39:06H HLA-B*39:01M
TRTQLPPAY

SEQ ID NO: 6427 - protein, 9 aa, Severe acute respiratory syndrome coronavirus 2
  REGION 1..9: note = Table A: HLA-B*38:02H HLA-B*39:01H
TQLPPAYTN

SEQ ID NO: 6428 - protein, 9 aa, Severe acute respiratory syndrome coronavirus 2
  REGION 1..9: note = Table A: HLA-C*14:03H HLA-B*53:01M HLA-B*35:03H HLA-C*15:05M HLA-B*35:01M HLA-B*35:02H HLA-B*35:08H HLA-B*51:01H HLA-B*35:07M HLA-B*35:12H HLA-B*38:02H HLA-B*15:02H HLA-B*07:05M HLA-B*15:11H
LPPAYTNSF

SEQ ID NO: 6429 - protein, 9 aa, Severe acute respiratory syndrome coronavirus 2
  REGION 1..9: note = Table A: HLA-A*68:01H HLA-A*34:01H HLA-A*66:01H
PAYTNSFTR

SEQ ID NO: 6430 - protein, 9 aa, Severe acute respiratory syndrome coronavirus 2
  REGION 1..9: note = Table A: HLA-A*02:11H HLA-A*68:02H HLA-C*15:02H HLA-A*02:02H HLA-A*02:03H
YTNSFTRGV

SEQ ID NO: 6431 - protein, 9 aa, Severe acute respiratory syndrome coronavirus 2
  REGION 1..9: note = Table A: HLA-A*30:02H
TNSFTRGVY

SEQ ID NO: 6432 - protein, 9 aa, Severe acute respiratory syndrome coronavirus 2
  REGION 1..9: note = Table A: HLA-C*16:01M HLA-C*12:02H HLA-C*12:03H
NSFTRGVYY

SEQ ID NO: 6433 - protein, 9 aa, Severe acute respiratory syndrome coronavirus 2
  REGION 1..9: note = Table A: HLA-B*38:02H HLA-B*07:04H HLA-B*15:01H HLA-B*15:02M HLA-B*15:03H
GVYYPDKVF

SEQ ID NO: 6434 - protein, 9 aa, Severe acute respiratory syndrome coronavirus 2
  REGION 1..9: note = Table A: HLA-C*14:03H HLA-A*74:01H HLA-A*11:01H HLA-A*11:02H HLA-A*33:01H HLA-A*33:03H HLA-A*29:02H HLA-A*30:02H HLA-A*34:01H HLA-A*34:02H HLA-A*24:07H HLA-A*31:01H HLA-A*66:01H
VYYPDKVFR

SEQ ID NO: 6435 - protein, 9 aa, Severe acute respiratory syndrome coronavirus 2
  REGION 1..9: note = Table A: HLA-B*54:01H
YPDKVFRSS

SEQ ID NO: 6436 - protein, 9 aa, Severe acute respiratory syndrome coronavirus 2
  REGION 1..9: note = Table A: HLA-B*14:02H
DKVFRSSVL

SEQ ID NO: 6437 - protein, 9 aa, Severe acute respiratory syndrome coronavirus 2
  REGION 1..9: note = Table A: HLA-B*39:06H
FRSSVLHST

SEQ ID NO: 6438 - protein, 9 aa, Severe acute respiratory syndrome coronavirus 2
  REGION 1..9: note = Table A: HLA-C*15:05H
SVLHSTQDL

SEQ ID NO: 6439 - protein, 9 aa, Severe acute respiratory syndrome coronavirus 2
  REGION 1..9: note = Table A: HLA-A*24:07H HLA-B*38:02H HLA-B*13:01H
VLHSTQDLF

SEQ ID NO: 6440 - protein, 9 aa, Severe acute respiratory syndrome coronavirus 2
  REGION 1..9: note = Table A: HLA-B*38:01M HLA-B*38:02H HLA-B*15:10H
LHSTQDLFL

SEQ ID NO: 6441 - protein, 9 aa, Severe acute respiratory syndrome coronavirus 2
  REGION 1..9: note = Table A: HLA-C*04:03H HLA-B*38:01H HLA-B*38:02H HLA-B*13:01H
TQDLFLPFF

SEQ ID NO: 6442 - protein, 9 aa, Severe acute respiratory syndrome coronavirus 2
  REGION 1..9: note = Table A: HLA-B*58:01H HLA-B*53:01H HLA-B*35:01H HLA-B*51:01H HLA-B*35:07M HLA-B*38:02H HLA-B*54:01H HLA-B*07:05H
LPFFSNVTW

SEQ ID NO: 6443 - protein, 9 aa, Severe acute respiratory syndrome coronavirus 2
  REGION 1..9: note = Table A: HLA-A*24:07H
PFFSNVTWF

SEQ ID NO: 6444 - protein, 9 aa, Severe acute respiratory syndrome coronavirus 2
  REGION 1..9: note = Table A: HLA-A*29:02H
FFSNVTWFH

SEQ ID NO: 6445 - protein, 9 aa, Severe acute respiratory syndrome coronavirus 2
  REGION 1..9: note = Table A: HLA-C*15:02H HLA-A*02:04H
SNVTWFHAI

SEQ ID NO: 6446 - protein, 9 aa, Severe acute respiratory syndrome coronavirus 2
  REGION 1..9: note = Table A: HLA-B*58:02H HLA-C*04:03H HLA-C*07:01H HLA-A*02:11H HLA-A*68:02M HLA-C*15:02M HLA-A*02:04H HLA-A*02:06H HLA-A*02:07H HLA-A*34:02H HLA-C*08:01H HLA-B*40:06H HLA-B*57:03M HLA-B*13:02H HLA-C*07:04H
VTWFHAIHV

SEQ ID NO: 6447 - protein, 9 aa, Severe acute respiratory syndrome coronavirus 2
  REGION 1..9: note = Table A: HLA-B*38:02M HLA-B*39:06H HLA-B*39:01H HLA-B*15:10H
FHAIHVSGT

SEQ ID NO: 6448 - protein, 9 aa, Severe acute respiratory syndrome coronavirus 2
  REGION 1..9: note = Table A: HLA-B*38:01H HLA-B*38:02H HLA-B*39:06H HLA-B*39:01H
IHVSGTNGT

SEQ ID NO: 6449 - protein, 9 aa, Severe acute respiratory syndrome coronavirus 2
  REGION 1..9: note = Table A: HLA-A*03:02H HLA-A*68:01H HLA-A*34:01H HLA-A*34:02M HLA-A*66:01H
HVSGTNGTK

SEQ ID NO: 6450 - protein, 9 aa, Severe acute respiratory syndrome coronavirus 2
  REGION 1..9: note = Table A: HLA-B*15:03M
TKRFDNPVL

SEQ ID NO: 6451 - protein, 9 aa, Severe acute respiratory syndrome coronavirus 2
  REGION 1..9: note = Table A: HLA-C*06:02H HLA-B*27:05H
KRFDNPVLP

SEQ ID NO: 6452 - protein, 9 aa, Severe acute respiratory syndrome coronavirus 2
  REGION 1..9: note = Table A: HLA-C*04:01H HLA-C*04:03M HLA-A*24:07H
RFDNPVLPF

SEQ ID NO: 6453 - protein, 9 aa, Severe acute respiratory syndrome coronavirus 2
  REGION 1..9: note = Table A: HLA-B*53:01H HLA-B*35:03H HLA-C*15:05H HLA-A*34:01H HLA-B*35:01M HLA-B*35:02H HLA-B*35:08H HLA-B*35:07H HLA-B*35:12H HLA-B*38:02H HLA-B*54:01H HLA-B*15:02H HLA-B*07:05H HLA-B*15:11H
LPFNDGVYF

SEQ ID NO: 6454 - protein, 9 aa, Severe acute respiratory syndrome coronavirus 2
  REGION 1..9: note = Table A: HLA-A*11:303M HLA-A*03:01H HLA-A*03:02H HLA-A*11:01H HLA-A*11:02H HLA-A*36:01H HLA-B*27:02H HLA-A*30:02H HLA-A*68:01H HLA-A*34:01H HLA-A*34:02H HLA-C*07:27M HLA-A*66:01H
GVYFASTEK

SEQ ID NO: 6455 - protein, 9 aa, Severe acute respiratory syndrome coronavirus 2
  REGION 1..9: note = Table A: HLA-A*68:01M HLA-A*34:02H HLA-A*66:01H
STEKSNIIR

SEQ ID NO: 6456 - protein, 9 aa, Severe acute respiratory syndrome coronavirus 2
  REGION 1..9: note = Table A: HLA-B*58:02H
KSNIIRGWI

SEQ ID NO: 6457 - protein, 9 aa, Severe acute respiratory syndrome coronavirus 2
  REGION 1..9: note = Table A: HLA-C*16:01H
SNIIRGWIF

SEQ ID NO: 6458 - protein, 9 aa, Severe acute respiratory syndrome coronavirus 2
  REGION 1..9: note = Table A: HLA-B*48:01H HLA-B*15:03H HLA-B*57:03H
RGWIFGTTL

SEQ ID NO: 6459 - protein, 9 aa, Severe acute respiratory syndrome coronavirus 2
  REGION 1..9: note = Table A: HLA-A*36:01H
IFGTTLDSK

SEQ ID NO: 6460 - protein, 9 aa, Severe acute respiratory syndrome coronavirus 2
  REGION 1..9: note = Table A: HLA-A*11:303M HLA-B*08:01H HLA-A*02:11M HLA-C*15:05H HLA-C*01:02H HLA-A*02:05H HLA-A*02:07H HLA-B*14:01M HLA-A*02:01M HLA-A*02:02H HLA-A*02:03H HLA-C*08:01H HLA-C*08:02M HLA-B*38:01H HLA-B*38:02H
  REGION 1..9: note = CONT. FROM ABOVE: HLA-B*07:02H HLA-B*15:02H HLA-B*39:01H HLA- B*07:05H HLA-C*05:01H HLA-B*13:01M
TLDSKTQSL

SEQ ID NO: 6461 - protein, 9 aa, Severe acute respiratory syndrome coronavirus 2
  REGION 1..9: note = Table A: HLA-C*15:05H HLA-B*51:01M
DSKTQSLLI

SEQ ID NO: 6462 - protein, 9 aa, Severe acute respiratory syndrome coronavirus 2
  REGION 1..9: note = Table A: HLA-C*15:05H HLA-A*02:03H HLA-B*38:02H
IVNNATNVV

SEQ ID NO: 6463 - protein, 9 aa, Severe acute respiratory syndrome coronavirus 2
  REGION 1..9: note = Table A: HLA-C*15:05H
VNNATNVVI

SEQ ID NO: 6464 - protein, 9 aa, Severe acute respiratory syndrome coronavirus 2
  REGION 1..9: note = Table A: HLA-A*68:01H HLA-A*34:02H
NNATNVVIK

SEQ ID NO: 6465 - protein, 9 aa, Severe acute respiratory syndrome coronavirus 2
  REGION 1..9: note = Table A: HLA-B*58:01H HLA-A*11:303H HLA-C*16:01M HLA-C*16:04H HLA-C*06:02M HLA-A*29:01H HLA-C*04:03H HLA-C*12:05H HLA-A*02:11M HLA-B*53:01M HLA-C*03:04H HLA-A*68:01M HLA-A*68:02H HLA-B*35:03H HLA-C*15:05M
  REGION 1..9: note = CONT. FROM ABOVE: HLA-C*12:02H HLA-C*12:03H HLA-C*15:02H HLA- A*02:04M HLA-A*02:05H HLA-A*02:06H HLA-A*02:07M HLA-A*02:08H HLA-A*02:01M HLA-A*02:02M HLA-A*02:03H HLA-A*34:02H HLA-B*35 :01M HLA-B*35:02H HLA-B*51:01M HLA-C*17:01M HLA-B*35:07H
  REGION 1..9: note = CONT. FROM ABOVE: HLA-C*08:01M HLA-B*38:02M HLA-B*54:01H HLA- B*07:05H HLA-B*57:03H HLA-C*02:02M HLA-B*13:02H HLA-C*07:04M
NATNVVIKV

SEQ ID NO: 6466 - protein, 9 aa, Severe acute respiratory syndrome coronavirus 2
  REGION 1..9: note = Table A: HLA-A*25:01M HLA-A*26:01H HLA-A*26:02M HLA-B*38:02H HLA-B*15:02H
NVVIKVCEF

SEQ ID NO: 6467 - protein, 9 aa, Severe acute respiratory syndrome coronavirus 2
  REGION 1..9: note = Table A: HLA-B*50:01H
CEFQFCNDP

SEQ ID NO: 6468 - protein, 9 aa, Severe acute respiratory syndrome coronavirus 2
  REGION 1..9: note = Table A: HLA-A*02:05H HLA-B*38:02H
FQFCNDPFL

SEQ ID NO: 6469 - protein, 9 aa, Severe acute respiratory syndrome coronavirus 2
  REGION 1..9: note = Table A: HLA-A*36:01H
CNDPFLGVY

SEQ ID NO: 6470 - protein, 9 aa, Severe acute respiratory syndrome coronavirus 2
  REGION 1..9: note = Table A: HLA-A*33:01H HLA-A*34:01H HLA-A*34:02H HLA-B*35:01H HLA-B*35:07H
DPFLGVYYH

SEQ ID NO: 6471 - protein, 9 aa, Severe acute respiratory syndrome coronavirus 2
  REGION 1..9: note = Table A: HLA-A*03:01M HLA-A*03:02H HLA-A*11:01M HLA-A*11:02M HLA-A*34:02M HLA-C*07:27H
GVYYHKNNK

SEQ ID NO: 6472 - protein, 9 aa, Severe acute respiratory syndrome coronavirus 2
  REGION 1..9: note = Table A: HLA-A*24:07M
YYHKNNKSW

SEQ ID NO: 6473 - protein, 9 aa, Severe acute respiratory syndrome coronavirus 2
  REGION 1..9: note = Table A: HLA-B*15:03H
NKSWMESEF

SEQ ID NO: 6474 - protein, 9 aa, Severe acute respiratory syndrome coronavirus 2
  REGION 1..9: note = Table A: HLA-A*74:01H HLA-A*36:01H
KSWMESEFR

SEQ ID NO: 6475 - protein, 9 aa, Severe acute respiratory syndrome coronavirus 2
  REGION 1..9: note = Table A: HLA-A*02:01H
SWMESEFRV

SEQ ID NO: 6476 - protein, 9 aa, Severe acute respiratory syndrome coronavirus 2
  REGION 1..9: note = Table A: HLA-A*36:01H HLA-B*38:02H HLA-B*15:02M
WMESEFRVY

SEQ ID NO: 6477 - protein, 9 aa, Severe acute respiratory syndrome coronavirus 2
  REGION 1..9: note = Table A: HLA-B*45:01M HLA-B*44:03H HLA-B*18:01H HLA-A*68:02H HLA-B*40:06H HLA-B*49:01H HLA-B*50:01M
MESEFRVYS

SEQ ID NO: 6478 - protein, 9 aa, Severe acute respiratory syndrome coronavirus 2
  REGION 1..9: note = Table A: HLA-B*56:01H HLA-B*45:01H HLA-B*18:01H HLA-B*55:02H HLA-B*39:06H HLA-B*40:02M HLA-B*40:06H HLA-B*54:01H HLA-B*07:05H HLA-B*41:02H HLA-B*49:01H HLA-B*50:01H
SEFRVYSSA

SEQ ID NO: 6479 - protein, 9 aa, Severe acute respiratory syndrome coronavirus 2
  REGION 1..9: note = Table A: HLA-A*02:08H
RVYSSANNC

SEQ ID NO: 6480 - protein, 9 aa, Severe acute respiratory syndrome coronavirus 2
  REGION 1..9: note = Table A: HLA-C*15:05H
YSSANNCTF

SEQ ID NO: 6481 - protein, 9 aa, Severe acute respiratory syndrome coronavirus 2
  REGION 1..9: note = Table A: HLA-B*58:01H HLA-A*11:303H HLA-C*16:01H HLA-C*16:04M HLA-A*11:01H HLA-B*46:01M HLA-A*29:01M HLA-A*29:02H HLA-C*03:02H HLA-A*30:02H HLA-C*15:05H HLA-C*12:02H HLA-C*12:03H HLA-C*07:27H HLA-B*35:01H
  REGION 1..9: note = CONT. FROM ABOVE: HLA-B*35:08H HLA-B*35:07H HLA-B*38:02M HLA- B*15:01H HLA-B*15:02H HLA-B*07:05H HLA-C*02:02H
SANNCTFEY

SEQ ID NO: 6482 - protein, 9 aa, Severe acute respiratory syndrome coronavirus 2
  REGION 1..9: note = Table A: HLA-C*14:03H HLA-A*29:02H HLA-C*04:01H HLA-C*04:03H
TFEYVSQPF

SEQ ID NO: 6483 - protein, 9 aa, Severe acute respiratory syndrome coronavirus 2
  REGION 1..9: note = Table A: HLA-B*40:01M HLA-B*40:02M HLA-B*40:06H HLA-B*41:02H HLA-B*49:01M HLA-B*50:01H
FEYVSQPFL

SEQ ID NO: 6484 - protein, 9 aa, Severe acute respiratory syndrome coronavirus 2
  REGION 1..9: note = Table A: HLA-A*24:02H HLA-A*24:07M HLA-A*23:01H
EYVSQPFLM

SEQ ID NO: 6485 - protein, 9 aa, Severe acute respiratory syndrome coronavirus 2
  REGION 1..9: note = Table A: HLA-C*03:03H HLA-C*03:02H HLA-C*03:04H HLA-C*15:05H HLA-C*15:02M HLA-C*08:01H
VSQPFLMDL

SEQ ID NO: 6486 - protein, 9 aa, Severe acute respiratory syndrome coronavirus 2
  REGION 1..9: note = Table A: HLA-B*54:01H
QPFLMDLEG

SEQ ID NO: 6487 - protein, 9 aa, Severe acute respiratory syndrome coronavirus 2
  REGION 1..9: note = Table A: HLA-A*74:01M HLA-A*31:01H
KQGNFKNLR

SEQ ID NO: 6488 - protein, 9 aa, Severe acute respiratory syndrome coronavirus 2
  REGION 1..9: note = Table A: HLA-B*15:03H
FKNLREFVF

SEQ ID NO: 6489 - protein, 9 aa, Severe acute respiratory syndrome coronavirus 2
  REGION 1..9: note = Table A: HLA-A*36:01H HLA-A*26:01M HLA-A*26:02H HLA-A*29:01H HLA-A*29:02H HLA-A*30:02H HLA-A*34:02H HLA-B*35:01M HLA-B*35:07M HLA-B*38:02M HLA-B*15:01H HLA-B*15:02M
FVFKNIDGY

SEQ ID NO: 6490 - protein, 9 aa, Severe acute respiratory syndrome coronavirus 2
  REGION 1..9: note = Table A: HLA-C*14:02H HLA-C*14:03H HLA-A*29:02H HLA-A*30:02H HLA-A*24:02H HLA-A*24:07M HLA-A*23:01H
VFKNIDGYF

SEQ ID NO: 6491 - protein, 9 aa, Severe acute respiratory syndrome coronavirus 2
  REGION 1..9: note = Table A: HLA-C*15:02H HLA-B*57:03H
KNIDGYFKI

SEQ ID NO: 6492 - protein, 9 aa, Severe acute respiratory syndrome coronavirus 2
  REGION 1..9: note = Table A: HLA-A*36:01H HLA-A*02:07H
NIDGYFKIY

SEQ ID NO: 6493 - protein, 9 aa, Severe acute respiratory syndrome coronavirus 2
  REGION 1..9: note = Table A: HLA-A*33:01H HLA-A*33:03H HLA-A*34:02M
DGYFKIYSK

SEQ ID NO: 6494 - protein, 9 aa, Severe acute respiratory syndrome coronavirus 2
  REGION 1..9: note = Table A: HLA-B*58:02M HLA-C*16:01H HLA-B*08:01H HLA-C*03:04H HLA-A*68:02H HLA-C*12:02H HLA-C*12:03H HLA-C*15:02H HLA-C*17:01M HLA-B*07:04H HLA-B*57:03M HLA-C*02:02H HLA-C*07:04H
YSKHTPINL

SEQ ID NO: 6495 - protein, 9 aa, Severe acute respiratory syndrome coronavirus 2
  REGION 1..9: note = Table A: HLA-B*42:01H HLA-B*53:01H HLA-B*35:03M HLA-C*15:05M HLA-B*35:01H HLA-B*35:07H HLA-B*07:02H HLA-B*07:04M HLA-B*07:05H
TPINLVRDL

SEQ ID NO: 6496 - protein, 9 aa, Severe acute respiratory syndrome coronavirus 2
  REGION 1..9: note = Table A: HLA-B*38:02H HLA-B*15:01H HLA-B*57:03H
LVRDLPQGF

SEQ ID NO: 6497 - protein, 9 aa, Severe acute respiratory syndrome coronavirus 2
  REGION 1..9: note = Table A: HLA-B*40:06H HLA-B*50:01H
RDLPQGFSA

SEQ ID NO: 6498 - protein, 9 aa, Severe acute respiratory syndrome coronavirus 2
  REGION 1..9: note = Table A: HLA-A*25:01M HLA-A*26:01H HLA-A*26:02M HLA-A*26:03H HLA-B*08:01H HLA-A*68:02H HLA-C*01:02M HLA-B*14:01H HLA-A*34:01M HLA-A*34:02H HLA-B*38:02H HLA-B*15:02H HLA-B*07:05H HLA-A*66:01H
DLPQGFSAL

SEQ ID NO: 6499 - protein, 9 aa, Severe acute respiratory syndrome coronavirus 2
  REGION 1..9: note = Table A: HLA-A*11:303H HLA-C*03:03H HLA-C*03:04H HLA-C*17:01H HLA-C*08:01H
SALEPLVDL

SEQ ID NO: 6500 - protein, 9 aa, Severe acute respiratory syndrome coronavirus 2
  REGION 1..9: note = Table A: HLA-A*02:01H HLA-B*13:02H
PLVDLPIGI

SEQ ID NO: 6501 - protein, 9 aa, Severe acute respiratory syndrome coronavirus 2
  REGION 1..9: note = Table A: HLA-A*33:01H HLA-A*33:03H HLA-A*26:03H HLA-A*68:01M HLA-A*34:01H HLA-A*34:02H HLA-A*66:01M
LPIGINITR

SEQ ID NO: 6502 - protein, 9 aa, Severe acute respiratory syndrome coronavirus 2
  REGION 1..9: note = Table A: HLA-C*15:02H
INITRFQTL

SEQ ID NO: 6503 - protein, 9 aa, Severe acute respiratory syndrome coronavirus 2
  REGION 1..9: note = Table A: HLA-C*17:01H
NITRFQTLL

SEQ ID NO: 6504 - protein, 9 aa, Severe acute respiratory syndrome coronavirus 2
  REGION 1..9: note = Table A: HLA-C*06:02H HLA-B*27:05M HLA-C*07:01H HLA-B*27:02H HLA-B*14:02M HLA-B*14:01M HLA-B*38:02M HLA-B*39:01H HLA-B*15:10H
TRFQTLLAL

SEQ ID NO: 6505 - protein, 9 aa, Severe acute respiratory syndrome coronavirus 2
  REGION 1..9: note = Table A: HLA-A*30:02H
RFQTLLALH

SEQ ID NO: 6506 - protein, 9 aa, Severe acute respiratory syndrome coronavirus 2
  REGION 1..9: note = Table A: HLA-A*29:02H HLA-A*30:02H HLA-B*38:02H HLA-B*15:02M
TLLALHRSY

SEQ ID NO: 6507 - protein, 9 aa, Severe acute respiratory syndrome coronavirus 2
  REGION 1..9: note = Table A: HLA-A*02:11H HLA-A*02:02M
LLALHRSYL

SEQ ID NO: 6508 - protein, 9 aa, Severe acute respiratory syndrome coronavirus 2
  REGION 1..9: note = Table A: HLA-B*53:01H HLA-B*15:13H
TPGDSSSGW

SEQ ID NO: 6509 - protein, 9 aa, Severe acute respiratory syndrome coronavirus 2
  REGION 1..9: note = Table A: HLA-B*39:06H
SGWTAGAAA

SEQ ID NO: 6510 - protein, 9 aa, Severe acute respiratory syndrome coronavirus 2
  REGION 1..9: note = Table A: HLA-A*26:01M HLA-A*26:03H HLA-A*29:02M HLA-A*34:02H HLA-B*38:02H HLA-A*66:01H
WTAGAAAYY

SEQ ID NO: 6511 - protein, 9 aa, Severe acute respiratory syndrome coronavirus 2
  REGION 1..9: note = Table A: HLA-B*35:01M HLA-B*35:07H HLA-B*38:02H HLA-B*15:01H
GAAAYYVGY

SEQ ID NO: 6512 - protein, 9 aa, Severe acute respiratory syndrome coronavirus 2
  REGION 1..9: note = Table A: HLA-C*03:04H HLA-C*12:03H HLA-C*17:01M
AAAYYVGYL

SEQ ID NO: 6513 - protein, 9 aa, Severe acute respiratory syndrome coronavirus 2
  REGION 1..9: note = Table A: HLA-A*33:01M HLA-A*33:03H HLA-A*34:01H HLA-A*31:01H HLA-A*66:01H
YYVGYLQPR

SEQ ID NO: 6514 - protein, 9 aa, Severe acute respiratory syndrome coronavirus 2
  REGION 1..9: note = Table A: HLA-B*58:02M HLA-C*16:01H HLA-B*46:01H HLA-C*03:02H HLA-C*15:05H HLA-C*12:02H HLA-C*12:03H HLA-B*51:01H HLA-B*52:01H HLA-B*15:03H
VGYLQPRTF

SEQ ID NO: 6515 - protein, 9 aa, Severe acute respiratory syndrome coronavirus 2
  REGION 1..9: note = Table A: HLA-A*24:07H HLA-A*23:01H
GYLQPRTFL

SEQ ID NO: 6516 - protein, 9 aa, Severe acute respiratory syndrome coronavirus 2
  REGION 1..9: note = Table A: HLA-A*74:01H HLA-B*08:01H HLA-A*02:11M HLA-C*03:02H HLA-C*03:04H HLA-C*15:02H HLA-A*02:04H HLA-A*02:05H HLA-A*02:07H HLA-A*02:01H HLA-A*02:02H HLA-A*02:03H HLA-C*17:01H HLA-A*24:07H HLA-C*08:01H HLA-B*38:02H
  REGION 1..9: note = CONT. FROM ABOVE: HLA-B*40:06H HLA-C*07:04H
YLQPRTFLL

SEQ ID NO: 6517 - protein, 9 aa, Severe acute respiratory syndrome coronavirus 2
  REGION 1..9: note = Table A: HLA-B*35:07H HLA-B*38:02H HLA-B*07:04H
QPRTFLLKY

SEQ ID NO: 6518 - protein, 9 aa, Severe acute respiratory syndrome coronavirus 2
  REGION 1..9: note = Table A: HLA-B*45:01M HLA-B*50:01H
NENGTITDA

SEQ ID NO: 6519 - protein, 9 aa, Severe acute respiratory syndrome coronavirus 2
  REGION 1..9: note = Table A: HLA-A*02:05H HLA-A*02:08H HLA-B*39:01H
TITDAVDCA

SEQ ID NO: 6520 - protein, 9 aa, Severe acute respiratory syndrome coronavirus 2
  REGION 1..9: note = Table A: HLA-C*04:03M HLA-A*02:07H HLA-B*35:02M HLA-C*08:01H HLA-C*08:02M HLA-B*35:12H HLA-B*38:02H HLA-C*05:01H
ITDAVDCAL

SEQ ID NO: 6521 - protein, 9 aa, Severe acute respiratory syndrome coronavirus 2
  REGION 1..9: note = Table A: HLA-A*11:303H HLA-A*03:01H HLA-A*03:02M HLA-A*11:01H HLA-A*11:02H HLA-A*36:01M HLA-B*27:02H HLA-A*02:07H HLA-B*38:02H
ALDPLSETK

SEQ ID NO: 6522 - protein, 9 aa, Severe acute respiratory syndrome coronavirus 2
  REGION 1..9: note = Table A: HLA-A*02:02M
PLSETKCTL

SEQ ID NO: 6523 - protein, 9 aa, Severe acute respiratory syndrome coronavirus 2
  REGION 1..9: note = Table A: HLA-A*25:01H
ETKCTLKSF

SEQ ID NO: 6524 - protein, 9 aa, Severe acute respiratory syndrome coronavirus 2
  REGION 1..9: note = Table A: HLA-A*74:01M HLA-A*03:01M HLA-A*03:02M HLA-A*11:01H HLA-A*11:02H HLA-A*33:01H HLA-A*33:03H HLA-B*46:01H HLA-A*30:01M HLA-A*30:02H HLA-A*68:01H HLA-A*34:01H HLA-A*34:02M HLA-B*38:02H HLA-B*15:02H HLA-A*31:01H
  REGION 1..9: note = CONT. FROM ABOVE: HLA-A*66:01H
TLKSFTVEK

SEQ ID NO: 6525 - protein, 9 aa, Severe acute respiratory syndrome coronavirus 2
  REGION 1..9: note = Table A: HLA-B*58:01H HLA-B*58:02H HLA-A*02:11H HLA-B*57:03M HLA-B*13:02H
KSFTVEKGI

SEQ ID NO: 6526 - protein, 9 aa, Severe acute respiratory syndrome coronavirus 2
  REGION 1..9: note = Table A: HLA-A*34:01H HLA-A*66:01M
FTVEKGIYQ

SEQ ID NO: 6527 - protein, 9 aa, Severe acute respiratory syndrome coronavirus 2
  REGION 1..9: note = Table A: HLA-A*02:05H HLA-A*02:08H HLA-B*39:01H
TVEKGIYQT

SEQ ID NO: 6528 - protein, 9 aa, Severe acute respiratory syndrome coronavirus 2
  REGION 1..9: note = Table A: HLA-B*58:01H HLA-B*58:02H HLA-B*46:01H HLA-A*30:02H HLA-C*15:05H HLA-C*12:02H HLA-A*24:02H HLA-A*23:01H HLA-B*15:01M HLA-B*15:03H HLA-B*57:03M
KGIYQTSNF

SEQ ID NO: 6529 - protein, 9 aa, Severe acute respiratory syndrome coronavirus 2
  REGION 1..9: note = Table A: HLA-A*74:01H HLA-A*03:01H HLA-A*34:01H HLA-A*66:01H
GIYQTSNFR

SEQ ID NO: 6530 - protein, 9 aa, Severe acute respiratory syndrome coronavirus 2
  REGION 1..9: note = Table A: HLA-C*14:03H HLA-A*24:07H
IYQTSNFRV

SEQ ID NO: 6531 - protein, 9 aa, Severe acute respiratory syndrome coronavirus 2
  REGION 1..9: note = Table A: HLA-C*08:03H
TSNFRVQPT

SEQ ID NO: 6532 - protein, 9 aa, Severe acute respiratory syndrome coronavirus 2
  REGION 1..9: note = Table A: HLA-C*06:02H HLA-B*27:05H HLA-C*07:02H HLA-B*27:02M HLA-B*14:02M HLA-B*14:01M HLA-B*38:01M HLA-B*38:02H HLA-B*39:01M HLA-B*15:10H
FRVQPTESI

SEQ ID NO: 6533 - protein, 9 aa, Severe acute respiratory syndrome coronavirus 2
  REGION 1..9: note = Table A: HLA-C*15:05H HLA-B*38:02H HLA-B*13:02H
RVQPTESIV

SEQ ID NO: 6534 - protein, 9 aa, Severe acute respiratory syndrome coronavirus 2
  REGION 1..9: note = Table A: HLA-B*42:01H HLA-B*56:01H HLA-B*27:02H HLA-B*53:01H HLA-B*55:02H HLA-B*35:03M HLA-C*15:05M HLA-B*55:01H HLA-A*34:01H HLA-B*35:01H HLA-B*35:02M HLA-B*35:08M HLA-B*35:07H HLA-B*35:12M HLA-B*38:02H HLA-B*54:01H
  REGION 1..9: note = CONT. FROM ABOVE: HLA-B*07:02H HLA-B*07:04H HLA-B*07:05M HLA- B*57:03H
QPTESIVRF

SEQ ID NO: 6535 - protein, 9 aa, Severe acute respiratory syndrome coronavirus 2
  REGION 1..9: note = Table A: HLA-A*68:02H
ESIVRFPNI

SEQ ID NO: 6536 - protein, 9 aa, Severe acute respiratory syndrome coronavirus 2
  REGION 1..9: note = Table A: HLA-C*06:02H HLA-B*27:05H HLA-C*07:01M HLA-C*07:02M HLA-B*27:02H HLA-B*14:02H HLA-A*02:04H HLA-B*14:01M HLA-C*17:01H HLA-A*23:01H HLA-B*38:02M HLA-B*39:01M HLA-B*15:10H HLA-C*07:04M
VRFPNITNL

SEQ ID NO: 6537 - protein, 9 aa, Severe acute respiratory syndrome coronavirus 2
  REGION 1..9: note = Table A: HLA-B*38:02H HLA-B*15:02M
NLCPFGEVF

SEQ ID NO: 6538 - protein, 9 aa, Severe acute respiratory syndrome coronavirus 2
  REGION 1..9: note = Table A: HLA-B*56:01M HLA-B*55:02M HLA-B*54:01M
CPFGEVFNA

SEQ ID NO: 6539 - protein, 9 aa, Severe acute respiratory syndrome coronavirus 2
  REGION 1..9: note = Table A: HLA-B*44:02H HLA-B*44:05H HLA-B*44:03M HLA-B*40:01H HLA-B*40:02M HLA-B*07:05H HLA-B*41:02H HLA-B*49:01H
GEVFNATRF

SEQ ID NO: 6540 - protein, 9 aa, Severe acute respiratory syndrome coronavirus 2
  REGION 1..9: note = Table A: HLA-A*26:03H HLA-A*68:02H HLA-A*34:01M HLA-A*66:01H
EVFNATRFA

SEQ ID NO: 6541 - protein, 9 aa, Severe acute respiratory syndrome coronavirus 2
  REGION 1..9: note = Table A: HLA-C*16:01H HLA-B*08:01H HLA-C*15:02H HLA-A*02:03H
FNATRFASV

SEQ ID NO: 6542 - protein, 9 aa, Severe acute respiratory syndrome coronavirus 2
  REGION 1..9: note = Table A: HLA-C*16:01H HLA-C*16:04H HLA-B*53:01H HLA-C*03:02H HLA-C*12:02H HLA-C*12:03H HLA-B*35:01H HLA-B*35:07H HLA-B*38:02H HLA-B*15:02M HLA-B*07:05H HLA-C*02:02H
NATRFASVY

SEQ ID NO: 6543 - protein, 9 aa, Severe acute respiratory syndrome coronavirus 2
  REGION 1..9: note = Table A: HLA-B*27:05M HLA-C*07:01H HLA-B*27:02M HLA-B*14:02H HLA-B*38:01H HLA-B*38:02M
TRFASVYAW

SEQ ID NO: 6544 - protein, 9 aa, Severe acute respiratory syndrome coronavirus 2
  REGION 1..9: note = Table A: HLA-A*33:03H HLA-A*68:01H HLA-A*66:01H
FASVYAWNR

SEQ ID NO: 6545 - protein, 9 aa, Severe acute respiratory syndrome coronavirus 2
  REGION 1..9: note = Table A: HLA-A*74:01H HLA-A*11:02H HLA-A*33:01H HLA-A*33:03H HLA-A*34:01M HLA-A*34:02M HLA-A*31:01H HLA-A*66:01M
SVYAWNRKR

SEQ ID NO: 6546 - protein, 9 aa, Severe acute respiratory syndrome coronavirus 2
  REGION 1..9: note = Table A: HLA-A*24:07H
VYAWNRKRI

SEQ ID NO: 6547 - protein, 9 aa, Severe acute respiratory syndrome coronavirus 2
  REGION 1..9: note = Table A: HLA-A*30:02M HLA-B*15:01H
RISNCVADY

SEQ ID NO: 6548 - protein, 9 aa, Severe acute respiratory syndrome coronavirus 2
  REGION 1..9: note = Table A: HLA-A*26:01H HLA-A*29:01M HLA-A*29:02M HLA-A*30:02H HLA-B*35:01H HLA-B*35:07H HLA-B*38:02M HLA-B*15:01H HLA-B*15:02H HLA-B*07:05H
CVADYSVLY

SEQ ID NO: 6549 - protein, 9 aa, Severe acute respiratory syndrome coronavirus 2
  REGION 1..9: note = Table A: HLA-A*11:303H HLA-A*25:01H HLA-B*46:01H HLA-A*26:03H HLA-C*15:05H HLA-A*34:01H HLA-A*34:02H HLA-B*35:01H HLA-B*38:02H HLA-B*15:01M HLA-B*15:02M HLA-B*07:05M HLA-A*66:01H
SVLYNSASF

SEQ ID NO: 6550 - protein, 9 aa, Severe acute respiratory syndrome coronavirus 2
  REGION 1..9: note = Table A: HLA-C*15:05H HLA-B*38:02H HLA-B*07:05H
YNSASFSTF

SEQ ID NO: 6551 - protein, 9 aa, Severe acute respiratory syndrome coronavirus 2
  REGION 1..9: note = Table A: HLA-A*11:01M HLA-A*11:02H HLA-A*33:03H HLA-A*68:01H HLA-A*34:01H HLA-A*34:02H HLA-C*07:27H HLA-A*66:01M
NSASFSTFK

SEQ ID NO: 6552 - protein, 9 aa, Severe acute respiratory syndrome coronavirus 2
  REGION 1..9: note = Table A: HLA-A*30:02M HLA-B*15:01H
ASFSTFKCY

SEQ ID NO: 6553 - protein, 9 aa, Severe acute respiratory syndrome coronavirus 2
  REGION 1..9: note = Table A: HLA-A*31:01H
SFSTFKCYG

SEQ ID NO: 6554 - protein, 9 aa, Severe acute respiratory syndrome coronavirus 2
  REGION 1..9: note = Table A: HLA-A*03:01H
KCYGVSPTK

SEQ ID NO: 6555 - protein, 9 aa, Severe acute respiratory syndrome coronavirus 2
  REGION 1..9: note = Table A: HLA-A*24:02H HLA-A*23:01H
CYGVSPTKL

SEQ ID NO: 6556 - protein, 9 aa, Severe acute respiratory syndrome coronavirus 2
  REGION 1..9: note = Table A: HLA-C*01:02M
VSPTKLNDL

SEQ ID NO: 6557 - protein, 9 aa, Severe acute respiratory syndrome coronavirus 2
  REGION 1..9: note = Table A: HLA-B*18:01M HLA-B*07:05H
NDLCFTNVY

SEQ ID NO: 6558 - protein, 9 aa, Severe acute respiratory syndrome coronavirus 2
  REGION 1..9: note = Table A: HLA-B*58:01H HLA-C*14:03H HLA-C*16:01H HLA-B*46:01H HLA-B*35:01H HLA-B*38:02H
FTNVYADSF

SEQ ID NO: 6559 - protein, 9 aa, Severe acute respiratory syndrome coronavirus 2
  REGION 1..9: note = Table A: HLA-A*68:02H HLA-C*08:01H HLA-B*38:02H
NVYADSFVI

SEQ ID NO: 6560 - protein, 9 aa, Severe acute respiratory syndrome coronavirus 2
  REGION 1..9: note = Table A: HLA-A*74:01H HLA-A*11:01H HLA-A*11:02H HLA-A*33:01M HLA-A*33:03H HLA-A*30:02H HLA-A*68:01H HLA-A*34:01H HLA-A*34:02H HLA-A*23:01H HLA-A*31:01M HLA-A*66:01H
VYADSFVIR

SEQ ID NO: 6561 - protein, 9 aa, Severe acute respiratory syndrome coronavirus 2
  REGION 1..9: note = Table A: HLA-C*04:03M
YADSFVIRG

SEQ ID NO: 6562 - protein, 9 aa, Severe acute respiratory syndrome coronavirus 2
  REGION 1..9: note = Table A: HLA-C*14:02H HLA-C*14:03H HLA-B*38:02H
SFVIRGDEV

SEQ ID NO: 6563 - protein, 9 aa, Severe acute respiratory syndrome coronavirus 2
  REGION 1..9: note = Table A: HLA-A*26:03H HLA-A*68:01H HLA-A*34:01M HLA-A*66:01M
FVIRGDEVR

SEQ ID NO: 6564 - protein, 9 aa, Severe acute respiratory syndrome coronavirus 2
  REGION 1..9: note = Table A: HLA-C*06:02M HLA-B*38:02H
IRGDEVRQI

SEQ ID NO: 6565 - protein, 9 aa, Severe acute respiratory syndrome coronavirus 2
  REGION 1..9: note = Table A: HLA-B*45:01H
GDEVRQIAP

SEQ ID NO: 6566 - protein, 9 aa, Severe acute respiratory syndrome coronavirus 2
  REGION 1..9: note = Table A: HLA-B*15:01H HLA-B*15:03H HLA-B*13:02H
RQIAPGQTG

SEQ ID NO: 6567 - protein, 9 aa, Severe acute respiratory syndrome coronavirus 2
  REGION 1..9: note = Table A: HLA-A*03:01H HLA-A*03:02H HLA-A*34:02H
QIAPGQTGK

SEQ ID NO: 6568 - protein, 9 aa, Severe acute respiratory syndrome coronavirus 2
  REGION 1..9: note = Table A: HLA-C*15:05H HLA-B*51:01H
IAPGQTGKI

SEQ ID NO: 6569 - protein, 9 aa, Severe acute respiratory syndrome coronavirus 2
  REGION 1..9: note = Table A: HLA-B*56:01H HLA-B*55:02H HLA-B*55:01H HLA-B*07:04M
APGQTGKIA

SEQ ID NO: 6570 - protein, 9 aa, Severe acute respiratory syndrome coronavirus 2
  REGION 1..9: note = Table A: HLA-B*27:02H HLA-A*30:02M HLA-B*15:01H HLA-B*15:03M
GQTGKIADY

SEQ ID NO: 6571 - protein, 9 aa, Severe acute respiratory syndrome coronavirus 2
  REGION 1..9: note = Table A: HLA-A*30:02H
TGKIADYNY

SEQ ID NO: 6572 - protein, 9 aa, Severe acute respiratory syndrome coronavirus 2
  REGION 1..9: note = Table A: HLA-B*58:01H HLA-A*74:01H HLA-A*02:11M HLA-A*02:04M HLA-A*02:05H HLA-A*02:06M HLA-A*02:08H HLA-A*02:01M HLA-A*02:02H HLA-A*32:01H HLA-B*57:03M HLA-B*13:01H HLA-B*13:02H
KIADYNYKL

SEQ ID NO: 6573 - protein, 9 aa, Severe acute respiratory syndrome coronavirus 2
  REGION 1..9: note = Table A: HLA-A*02:11H HLA-A*02:05H HLA-A*02:06M HLA-A*02:07M HLA-A*02:08H HLA-A*02:01M HLA-A*02:02H HLA-A*02:03H
KLPDDFTGC

SEQ ID NO: 6574 - protein, 9 aa, Severe acute respiratory syndrome coronavirus 2
  REGION 1..9: note = Table A: HLA-C*15:05M
LPDDFTGCV

SEQ ID NO: 6575 - protein, 9 aa, Severe acute respiratory syndrome coronavirus 2
  REGION 1..9: note = Table A: HLA-A*02:05H HLA-A*02:02M
VIAWNSNNL

SEQ ID NO: 6576 - protein, 9 aa, Severe acute respiratory syndrome coronavirus 2
  REGION 1..9: note = Table A: HLA-A*36:01M HLA-A*30:02H
LDSKVGGNY

SEQ ID NO: 6577 - protein, 9 aa, Severe acute respiratory syndrome coronavirus 2
  REGION 1..9: note = Table A: HLA-B*38:02H HLA-B*15:03H
SKVGGNYNY

SEQ ID NO: 6578 - protein, 9 aa, Severe acute respiratory syndrome coronavirus 2
  REGION 1..9: note = Table A: HLA-A*02:05H HLA-A*02:08H HLA-A*02:02H
KVGGNYNYL

SEQ ID NO: 6579 - protein, 9 aa, Severe acute respiratory syndrome coronavirus 2
  REGION 1..9: note = Table A: HLA-A*29:02H HLA-A*30:02H
VGGNYNYLY

SEQ ID NO: 6580 - protein, 9 aa, Severe acute respiratory syndrome coronavirus 2
  REGION 1..9: note = Table A: HLA-A*31:01H
GGNYNYLYR

SEQ ID NO: 6581 - protein, 9 aa, Severe acute respiratory syndrome coronavirus 2
  REGION 1..9: note = Table A: HLA-A*02:04H
GNYNYLYRL

SEQ ID NO: 6582 - protein, 9 aa, Severe acute respiratory syndrome coronavirus 2
  REGION 1..9: note = Table A: HLA-A*24:02H HLA-A*24:07M HLA-A*23:01H
NYNYLYRLF

SEQ ID NO: 6583 - protein, 9 aa, Severe acute respiratory syndrome coronavirus 2
  REGION 1..9: note = Table A: HLA-A*66:01H
YNYLYRLFR

SEQ ID NO: 6584 - protein, 9 aa, Severe acute respiratory syndrome coronavirus 2
  REGION 1..9: note = Table A: HLA-B*14:02M
YRLFRKSNL

SEQ ID NO: 6585 - protein, 9 aa, Severe acute respiratory syndrome coronavirus 2
  REGION 1..9: note = Table A: HLA-A*74:01H
RLFRKSNLK

SEQ ID NO: 6586 - protein, 9 aa, Severe acute respiratory syndrome coronavirus 2
  REGION 1..9: note = Table A: HLA-A*74:01H HLA-A*36:01H HLA-A*33:03H HLA-A*31:01M
KSNLKPFER

SEQ ID NO: 6587 - protein, 9 aa, Severe acute respiratory syndrome coronavirus 2
  REGION 1..9: note = Table A: HLA-A*02:02H HLA-B*38:02H
NLKPFERDI

SEQ ID NO: 6588 - protein, 9 aa, Severe acute respiratory syndrome coronavirus 2
  REGION 1..9: note = Table A: HLA-B*42:01H HLA-B*56:01M HLA-B*55:02M HLA-C*15:05H HLA-B*14:02H HLA-B*55:01H HLA-B*39:06H HLA-B*54:01H HLA-B*07:02H HLA-B*07:04M
KPFERDIST

SEQ ID NO: 6589 - protein, 9 aa, Severe acute respiratory syndrome coronavirus 2
  REGION 1..9: note = Table A: HLA-B*38:02H HLA-B*40:02H HLA-B*41:02M HLA-B*49:01H HLA-B*50:01H
FERDISTEI

SEQ ID NO: 6590 - protein, 9 aa, Severe acute respiratory syndrome coronavirus 2
  REGION 1..9: note = Table A: HLA-B*39:01H
ERDISTEIY

SEQ ID NO: 6591 - protein, 9 aa, Severe acute respiratory syndrome coronavirus 2
  REGION 1..9: note = Table A: HLA-A*68:02M
DISTEIYQA

SEQ ID NO: 6592 - protein, 9 aa, Severe acute respiratory syndrome coronavirus 2
  REGION 1..9: note = Table A: HLA-C*14:03H
IYQAGSTPC

SEQ ID NO: 6593 - protein, 9 aa, Severe acute respiratory syndrome coronavirus 2
  REGION 1..9: note = Table A: HLA-B*53:01H HLA-B*35:01H
TPCNGVEGF

SEQ ID NO: 6594 - protein, 9 aa, Severe acute respiratory syndrome coronavirus 2
  REGION 1..9: note = Table A: HLA-B*35:01H
NGVEGFNCY

SEQ ID NO: 6595 - protein, 9 aa, Severe acute respiratory syndrome coronavirus 2
  REGION 1..9: note = Table A: HLA-B*46:01H HLA-B*38:02H HLA-B*15:02M
NCYFPLQSY

SEQ ID NO: 6596 - protein, 9 aa, Severe acute respiratory syndrome coronavirus 2
  REGION 1..9: note = Table A: HLA-C*14:02M HLA-C*14:03M HLA-A*29:02H HLA-C*04:03H HLA-A*24:02H HLA-A*24:07H HLA-A*23:01H
YFPLQSYGF

SEQ ID NO: 6597 - protein, 9 aa, Severe acute respiratory syndrome coronavirus 2
  REGION 1..9: note = Table A: HLA-A*02:11H HLA-A*68:02H HLA-A*02:05H HLA-B*14:01H HLA-A*02:03H HLA-B*51:01H HLA-B*52:01H HLA-B*38:02H HLA-B*54:01H HLA-B*13:02H HLA-B*49:01H
YGFQPTNGV

SEQ ID NO: 6598 - protein, 9 aa, Severe acute respiratory syndrome coronavirus 2
  REGION 1..9: note = Table A: HLA-C*14:03H HLA-B*46:01H HLA-A*29:01H HLA-A*30:02H HLA-B*38:02M HLA-B*15:01H HLA-B*15:02M HLA-B*15:03M HLA-B*39:01H
FQPTNGVGY

SEQ ID NO: 6599 - protein, 9 aa, Severe acute respiratory syndrome coronavirus 2
  REGION 1..9: note = Table A: HLA-A*02:11H
GVGYQPYRV

SEQ ID NO: 6600 - protein, 9 aa, Severe acute respiratory syndrome coronavirus 2
  REGION 1..9: note = Table A: HLA-B*51:01H HLA-B*52:01H
VGYQPYRVV

SEQ ID NO: 6601 - protein, 9 aa, Severe acute respiratory syndrome coronavirus 2
  REGION 1..9: note = Table A: HLA-C*14:03H
GYQPYRVVV

SEQ ID NO: 6602 - protein, 9 aa, Severe acute respiratory syndrome coronavirus 2
  REGION 1..9: note = Table A: HLA-C*14:02H HLA-C*14:03H HLA-C*06:02H HLA-B*08:01H HLA-B*14:02H HLA-C*12:03H HLA-C*17:01H HLA-B*38:02H HLA-C*07:04H
YQPYRVVVL

SEQ ID NO: 6603 - protein, 9 aa, Severe acute respiratory syndrome coronavirus 2
  REGION 1..9: note = Table A: HLA-A*24:07M
PYRVVVLSF

SEQ ID NO: 6604 - protein, 9 aa, Severe acute respiratory syndrome coronavirus 2
  REGION 1..9: note = Table A: HLA-A*02:06H HLA-B*40:06H HLA-B*57:03M
RVVVLSFEL

SEQ ID NO: 6605 - protein, 9 aa, Severe acute respiratory syndrome coronavirus 2
  REGION 1..9: note = Table A: HLA-A*02:06H HLA-C*08:01H
VVVLSFELL

SEQ ID NO: 6606 - protein, 9 aa, Severe acute respiratory syndrome coronavirus 2
  REGION 1..9: note = Table A: HLA-A*11:02H HLA-A*34:02H
VVLSFELLH

SEQ ID NO: 6607 - protein, 9 aa, Severe acute respiratory syndrome coronavirus 2
  REGION 1..9: note = Table A: HLA-A*02:02H HLA-A*02:03H
VLSFELLHA

SEQ ID NO: 6608 - protein, 9 aa, Severe acute respiratory syndrome coronavirus 2
  REGION 1..9: note = Table A: HLA-B*45:01H HLA-B*40:02H HLA-B*40:06M HLA-B*41:02H HLA-B*49:01H HLA-B*50:01M
FELLHAPAT

SEQ ID NO: 6609 - protein, 9 aa, Severe acute respiratory syndrome coronavirus 2
  REGION 1..9: note = Table A: HLA-A*26:03H HLA-A*02:11H HLA-A*68:02M HLA-A*02:04H HLA-B*14:01H HLA-A*02:01H HLA-A*02:03M HLA-B*38:02M HLA-B*39:01H HLA-B*13:02H
ELLHAPATV

SEQ ID NO: 6610 - protein, 9 aa, Severe acute respiratory syndrome coronavirus 2
  REGION 1..9: note = Table A: HLA-B*38:02H
LLHAPATVC

SEQ ID NO: 6611 - protein, 9 aa, Severe acute respiratory syndrome coronavirus 2
  REGION 1..9: note = Table A: HLA-B*38:02H HLA-B*39:06H HLA-B*39:01H HLA-B*15:10M
LHAPATVCG

SEQ ID NO: 6612 - protein, 9 aa, Severe acute respiratory syndrome coronavirus 2
  REGION 1..9: note = Table A: HLA-A*34:02H
APATVCGPK

SEQ ID NO: 6613 - protein, 9 aa, Severe acute respiratory syndrome coronavirus 2
  REGION 1..9: note = Table A: HLA-C*15:05H HLA-B*55:01H HLA-B*07:02H HLA-B*07:04M
GPKKSTNLV

SEQ ID NO: 6614 - protein, 9 aa, Severe acute respiratory syndrome coronavirus 2
  REGION 1..9: note = Table A: HLA-A*11:01H HLA-A*30:01H
KSTNLVKNK

SEQ ID NO: 6615 - protein, 9 aa, Severe acute respiratory syndrome coronavirus 2
  REGION 1..9: note = Table A: HLA-C*15:05H
CVNFNFNGL

SEQ ID NO: 6616 - protein, 9 aa, Severe acute respiratory syndrome coronavirus 2
  REGION 1..9: note = Table A: HLA-B*39:01H
NGLTGTGVL

SEQ ID NO: 6617 - protein, 9 aa, Severe acute respiratory syndrome coronavirus 2
  REGION 1..9: note = Table A: HLA-B*45:01M HLA-B*50:01H
TESNKKFLP

SEQ ID NO: 6618 - protein, 9 aa, Severe acute respiratory syndrome coronavirus 2
  REGION 1..9: note = Table A: HLA-A*25:01H HLA-A*34:02H HLA-A*66:01H
ESNKKFLPF

SEQ ID NO: 6619 - protein, 9 aa, Severe acute respiratory syndrome coronavirus 2
  REGION 1..9: note = Table A: HLA-B*15:03H
KKFLPFQQF

SEQ ID NO: 6620 - protein, 9 aa, Severe acute respiratory syndrome coronavirus 2
  REGION 1..9: note = Table A: HLA-B*50:01H
RDIADTTDA

SEQ ID NO: 6621 - protein, 9 aa, Severe acute respiratory syndrome coronavirus 2
  REGION 1..9: note = Table A: HLA-A*26:03H HLA-A*68:02M HLA-A*02:05H HLA-B*14:01H HLA-B*35:02H HLA-B*38:02H HLA-B*39:01M
DIADTTDAV

SEQ ID NO: 6622 - protein, 9 aa, Severe acute respiratory syndrome coronavirus 2
  REGION 1..9: note = Table A: HLA-B*53:01H HLA-A*68:02H HLA-B*35:03M HLA-C*15:05H HLA-A*34:01H HLA-B*35:01H HLA-B*35:02H HLA-B*51:01M HLA-C*08:01H HLA-B*35:12H HLA-B*38:02H HLA-B*39:01H
DAVRDPQTL

SEQ ID NO: 6623 - protein, 9 aa, Severe acute respiratory syndrome coronavirus 2
  REGION 1..9: note = Table A: HLA-C*06:02H HLA-C*07:02H HLA-C*15:05H HLA-C*15:02H HLA-B*14:01H HLA-C*08:01H HLA-B*38:01M HLA-B*38:02H HLA-B*39:01M HLA-B*13:02H
VRDPQTLEI

SEQ ID NO: 6624 - protein, 9 aa, Severe acute respiratory syndrome coronavirus 2
  REGION 1..9: note = Table A: HLA-B*13:02H
PQTLEILDI

SEQ ID NO: 6625 - protein, 9 aa, Severe acute respiratory syndrome coronavirus 2
  REGION 1..9: note = Table A: HLA-B*50:01H
LEILDITPC

SEQ ID NO: 6626 - protein, 9 aa, Severe acute respiratory syndrome coronavirus 2
  REGION 1..9: note = Table A: HLA-C*04:01H HLA-C*04:03M HLA-A*02:07M HLA-C*08:02H HLA-B*38:02M HLA-B*07:05H HLA-C*05:01H HLA-B*13:01H
ILDITPCSF

SEQ ID NO: 6627 - protein, 9 aa, Severe acute respiratory syndrome coronavirus 2
  REGION 1..9: note = Table A: HLA-B*13:02H
GVSVITPGT

SEQ ID NO: 6628 - protein, 9 aa, Severe acute respiratory syndrome coronavirus 2
  REGION 1..9: note = Table A: HLA-A*11:303H HLA-C*15:05H HLA-A*34:01H
SVITPGTNT

SEQ ID NO: 6629 - protein, 9 aa, Severe acute respiratory syndrome coronavirus 2
  REGION 1..9: note = Table A: HLA-A*68:02M HLA-B*35:03H HLA-C*15:05H
NTSNQVAVL

SEQ ID NO: 6630 - protein, 9 aa, Severe acute respiratory syndrome coronavirus 2
  REGION 1..9: note = Table A: HLA-B*58:01H HLA-A*11:01H HLA-A*36:01H HLA-B*57:01H HLA-A*29:01H HLA-A*29:02H HLA-A*30:02M HLA-C*15:05H HLA-B*35:01M HLA-B*35:07H HLA-B*38:02H HLA-B*15:01H HLA-B*07:05M HLA-B*57:03H
TSNQVAVLY

SEQ ID NO: 6631 - protein, 9 aa, Severe acute respiratory syndrome coronavirus 2
  REGION 1..9: note = Table A: HLA-A*68:02M HLA-A*02:05H HLA-B*38:02H HLA-B*13:02H
QVAVLYQDV

SEQ ID NO: 6632 - protein, 9 aa, Severe acute respiratory syndrome coronavirus 2
  REGION 1..9: note = Table A: HLA-B*14:01H HLA-A*02:03H HLA-B*38:02H
VLYQDVNCT

SEQ ID NO: 6633 - protein, 9 aa, Severe acute respiratory syndrome coronavirus 2
  REGION 1..9: note = Table A: HLA-A*02:06H HLA-A*02:07H HLA-A*02:01H HLA-C*08:02H HLA-B*38:02H HLA-B*39:01H HLA-C*05:01H HLA-B*13:02H
YQDVNCTEV

SEQ ID NO: 6634 - protein, 9 aa, Severe acute respiratory syndrome coronavirus 2
  REGION 1..9: note = Table A: HLA-A*68:02H
DVNCTEVPV

SEQ ID NO: 6635 - protein, 9 aa, Severe acute respiratory syndrome coronavirus 2
  REGION 1..9: note = Table A: HLA-B*35:03H HLA-C*08:01H HLA-B*38:02H
NCTEVPVAI

SEQ ID NO: 6636 - protein, 9 aa, Severe acute respiratory syndrome coronavirus 2
  REGION 1..9: note = Table A: HLA-B*44:05H HLA-B*45:01H HLA-B*39:06H HLA-B*40:02M HLA-B*40:06H HLA-B*07:05H HLA-B*41:02H HLA-B*49:01H HLA-B*50:01H
TEVPVAIHA

SEQ ID NO: 6637 - protein, 9 aa, Severe acute respiratory syndrome coronavirus 2
  REGION 1..9: note = Table A: HLA-A*02:05H HLA-A*02:08H
PVAIHADQL

SEQ ID NO: 6638 - protein, 9 aa, Severe acute respiratory syndrome coronavirus 2
  REGION 1..9: note = Table A: HLA-B*58:01H HLA-B*57:01H HLA-C*04:03H HLA-B*53:01H HLA-B*35:03H HLA-B*35:01H HLA-B*35:02M HLA-B*35:08M HLA-B*35:07M HLA-C*08:02H HLA-B*35:12H HLA-B*38:01H HLA-B*38:02M HLA-B*57:03H HLA-B*13:01H
HADQLTPTW

SEQ ID NO: 6639 - protein, 9 aa, Severe acute respiratory syndrome coronavirus 2
  REGION 1..9: note = Table A: HLA-A*68:02H HLA-B*38:02H HLA-B*13:02H
DQLTPTWRV

SEQ ID NO: 6640 - protein, 9 aa, Severe acute respiratory syndrome coronavirus 2
  REGION 1..9: note = Table A: HLA-C*16:01H HLA-B*46:01H HLA-A*30:02H HLA-B*38:02H HLA-B*15:02H
QLTPTWRVY

SEQ ID NO: 6641 - protein, 9 aa, Severe acute respiratory syndrome coronavirus 2
  REGION 1..9: note = Table A: HLA-B*42:01H HLA-B*56:01M HLA-B*08:01H HLA-B*55:02M HLA-B*55:01H HLA-B*54:01H HLA-B*07:02H HLA-B*07:04H
TPTWRVYST

SEQ ID NO: 6642 - protein, 9 aa, Severe acute respiratory syndrome coronavirus 2
  REGION 1..9: note = Table A: HLA-A*02:11H HLA-A*02:08H HLA-B*13:02H
RVYSTGSNV

SEQ ID NO: 6643 - protein, 9 aa, Severe acute respiratory syndrome coronavirus 2
  REGION 1..9: note = Table A: HLA-C*14:02H HLA-C*14:03H HLA-C*07:02H HLA-A*24:02H HLA-A*24:07H HLA-A*23:01M
VYSTGSNVF

SEQ ID NO: 6644 - protein, 9 aa, Severe acute respiratory syndrome coronavirus 2
  REGION 1..9: note = Table A: HLA-A*74:01M HLA-C*16:04H HLA-A*03:02H HLA-A*11:01H HLA-A*11:02H HLA-A*36:01H HLA-B*57:01H HLA-A*33:01M HLA-A*33:03H HLA-C*06:02H HLA-A*26:03H HLA-C*03:03H HLA-B*27:02H HLA-A*30:02H HLA-A*68:01H HLA-A*68:02M
  REGION 1..9: note = CONT. FROM ABOVE: HLA-A*34:01H HLA-A*34:02M HLA-B*35:01H HLA- B*38:02H HLA-A*31:01H HLA-B*13:02H HLA-B*49:01H HLA-A*66:01M
TGSNVFQTR

SEQ ID NO: 6645 - protein, 9 aa, Severe acute respiratory syndrome coronavirus 2
  REGION 1..9: note = Table A: HLA-C*14:02M HLA-C*14:03M
VFQTRAGCL

SEQ ID NO: 6646 - protein, 9 aa, Severe acute respiratory syndrome coronavirus 2
  REGION 1..9: note = Table A: HLA-B*38:02H HLA-B*13:01H HLA-B*13:02M
FQTRAGCLI

SEQ ID NO: 6647 - protein, 9 aa, Severe acute respiratory syndrome coronavirus 2
  REGION 1..9: note = Table A: HLA-B*39:06H
TRAGCLIGA

SEQ ID NO: 6648 - protein, 9 aa, Severe acute respiratory syndrome coronavirus 2
  REGION 1..9: note = Table A: HLA-B*58:01H HLA-A*36:01H HLA-A*01:01H HLA-B*35:01H
GAEHVNNSY

SEQ ID NO: 6649 - protein, 9 aa, Severe acute respiratory syndrome coronavirus 2
  REGION 1..9: note = Table A: HLA-B*38:02M HLA-B*39:06M HLA-B*39:01M HLA-B*15:10H
EHVNNSYEC

SEQ ID NO: 6650 - protein, 9 aa, Severe acute respiratory syndrome coronavirus 2
  REGION 1..9: note = Table A: HLA-B*45:01M HLA-B*39:06M HLA-B*40:06M HLA-B*54:01H HLA-B*50:01M
YECDIPIGA

SEQ ID NO: 6651 - protein, 9 aa, Severe acute respiratory syndrome coronavirus 2
  REGION 1..9: note = Table A: HLA-B*44:05H
CDIPIGAGI

SEQ ID NO: 6652 - protein, 9 aa, Severe acute respiratory syndrome coronavirus 2
  REGION 1..9: note = Table A: HLA-B*56:01H HLA-B*55:02H HLA-C*15:05M HLA-B*55:01M HLA-B*54:01H HLA-B*07:05H
IPIGAGICA

SEQ ID NO: 6653 - protein, 9 aa, Severe acute respiratory syndrome coronavirus 2
  REGION 1..9: note = Table A: HLA-B*46:01H HLA-A*29:02H HLA-A*30:02M HLA-B*35:01H HLA-B*15:01M HLA-B*15:02H HLA-B*07:05H
IGAGICASY

SEQ ID NO: 6654 - protein, 9 aa, Severe acute respiratory syndrome coronavirus 2
  REGION 1..9: note = Table A: HLA-C*14:02H HLA-C*14:03H
SYQTQTNSP

SEQ ID NO: 6655 - protein, 9 aa, Severe acute respiratory syndrome coronavirus 2
  REGION 1..9: note = Table A: HLA-A*74:01M HLA-A*11:01H HLA-A*33:03H HLA-A*26:03M HLA-B*27:02H HLA-A*68:01M HLA-A*34:01H HLA-A*34:02H HLA-A*31:01H HLA-A*66:01M
YQTQTNSPR

SEQ ID NO: 6656 - protein, 9 aa, Severe acute respiratory syndrome coronavirus 2
  REGION 1..9: note = Table A: HLA-A*74:01H HLA-A*11:01H HLA-A*33:03H HLA-A*30:02H HLA-A*68:01H HLA-A*34:02H HLA-C*07:27H HLA-A*66:01H
QTQTNSPRR

SEQ ID NO: 6657 - protein, 9 aa, Severe acute respiratory syndrome coronavirus 2
  REGION 1..9: note = Table A: HLA-A*74:01H HLA-A*33:03H HLA-A*66:01H
QTNSPRRAR

SEQ ID NO: 6658 - protein, 9 aa, Severe acute respiratory syndrome coronavirus 2
  REGION 1..9: note = Table A: HLA-B*55:01H HLA-B*07:02H HLA-B*07:04H
SPRRARSVA

SEQ ID NO: 6659 - protein, 9 aa, Severe acute respiratory syndrome coronavirus 2
  REGION 1..9: note = Table A: HLA-B*38:02H
ARSVASQSI

SEQ ID NO: 6660 - protein, 9 aa, Severe acute respiratory syndrome coronavirus 2
  REGION 1..9: note = Table A: HLA-B*58:01H HLA-B*58:02H HLA-B*57:03H
RSVASQSII

SEQ ID NO: 6661 - protein, 9 aa, Severe acute respiratory syndrome coronavirus 2
  REGION 1..9: note = Table A: HLA-B*58:01H HLA-A*11:303M HLA-C*16:01H HLA-C*16:04H HLA-A*11:01H HLA-A*11:02H HLA-A*36:01H HLA-B*46:01M HLA-A*29:01H HLA-A*29:02H HLA-C*12:05H HLA-B*53:01H HLA-C*03:02M HLA-A*30:02M HLA-C*15:05H
  REGION 1..9: note = CONT. FROM ABOVE: HLA-C*12:02M HLA-C*12:03M HLA-A*34:02H HLA- C*07:27M HLA-B*35:01H HLA-B*35:08M HLA-B*35:07H HLA-B*38:02M HLA-B*15:01H HLA-B*15:02M HLA-B*15:03H HLA-B*39:01H HLA-B*07 :05M HLA-C*02:02M HLA-B*15:11M HLA-C*07:04H
VASQSIIAY

SEQ ID NO: 6662 - protein, 9 aa, Severe acute respiratory syndrome coronavirus 2
  REGION 1..9: note = Table A: HLA-B*48:01H HLA-B*44:05H HLA-C*16:04M HLA-A*30:02H HLA-A*68:02H HLA-A*02:04H HLA-A*02:05M HLA-A*02:06H HLA-A*02:08H HLA-A*02:02M HLA-B*35:01H HLA-B*38:01H HLA-B*38:02M HLA-B*15:01M HLA-B*15:02H HLA-B*39:01H
  REGION 1..9: note = CONT. FROM ABOVE: HLA-B*07:05H HLA-B*13:01M HLA-B*13:02M HLA- C*07:04H
SQSIIAYTM

SEQ ID NO: 6663 - protein, 9 aa, Severe acute respiratory syndrome coronavirus 2
  REGION 1..9: note = Table A: HLA-C*14:03H HLA-A*11:303M HLA-A*11:02H HLA-A*25:01H HLA-B*46:01M HLA-C*03:03M HLA-A*02:11H HLA-C*03:02H HLA-C*03:04M HLA-A*68:02H HLA-B*35:03H HLA-C*15:05M HLA-C*01:02M HLA-C*15:02H HLA-A*02:04M
  REGION 1..9: note = CONT. FROM ABOVE: HLA-A*02:05M HLA-A*02:06H HLA-A*02:07H HLA- A*02:08H HLA-A*02:01H HLA-A*02:02H HLA-A*02:03M HLA-C*07:27H HLA-C*17:01H HLA-C*08:01M HLA-B*38:02H HLA-B*40:06H HLA-B*07 :02H HLA-B*15:01H HLA-B*07:05H HLA-C*07:04H
SIIAYTMSL

SEQ ID NO: 6664 - protein, 9 aa, Severe acute respiratory syndrome coronavirus 2
  REGION 1..9: note = Table A: HLA-B*54:01H
IAYTMSLGA

SEQ ID NO: 6665 - protein, 9 aa, Severe acute respiratory syndrome coronavirus 2
  REGION 1..9: note = Table A: HLA-B*38:02H
MSLGAENSV

SEQ ID NO: 6666 - protein, 9 aa, Severe acute respiratory syndrome coronavirus 2
  REGION 1..9: note = Table A: HLA-A*11:303M HLA-C*16:04H HLA-B*46:01M HLA-B*18:01H HLA-C*03:02H HLA-A*30:02H HLA-C*07:27H HLA-B*35:01H HLA-B*35:08M HLA-B*35:07M HLA-B*38:02M HLA-B*15:01M HLA-B*15:02M HLA-B*15:03M HLA-B*39:01M
  REGION 1..9: note = CONT. FROM ABOVE: HLA-B*07:05H HLA-B*15:11M
LGAENSVAY

SEQ ID NO: 6667 - protein, 9 aa, Severe acute respiratory syndrome coronavirus 2
  REGION 1..9: note = Table A: HLA-C*15:05H HLA-A*02:05H HLA-A*02:08M HLA-A*02:03H HLA-B*38:02M HLA-B*13:02H
SVAYSNNSI

SEQ ID NO: 6668 - protein, 9 aa, Severe acute respiratory syndrome coronavirus 2
  REGION 1..9: note = Table A: HLA-B*58:01M HLA-C*16:04H HLA-B*57:01H HLA-B*46:01H HLA-A*26:01H HLA-A*68:02H HLA-C*15:05M HLA-C*12:02M HLA-C*12:03H HLA-A*24:02H HLA-B*35:01H HLA-C*17:01H HLA-A*23:01H HLA-B*38:02H HLA-B*07:05M HLA-B*57:03M
  REGION 1..9: note = CONT. FROM ABOVE: HLA-C*02:02H
NSIAIPTNF

SEQ ID NO: 6669 - protein, 9 aa, Severe acute respiratory syndrome coronavirus 2
  REGION 1..9: note = Table A: HLA-B*58:01H HLA-B*58:02H HLA-A*11:303H HLA-B*57:01M HLA-C*03:03H HLA-C*12:05H HLA-A*02:11H HLA-B*53:01M HLA-C*03:02H HLA-C*03:04H HLA-A*68:02H HLA-B*35:03H HLA-C*15:05M HLA-C*12:03H HLA-C*15:02H
  REGION 1..9: note = CONT. FROM ABOVE: HLA-A*02:05H HLA-A*02:06H HLA-A*02:02H HLA- B*51:01M HLA-C*08:01M HLA-B*38:02M HLA-B*57:03H HLA-B*13:02H
IAIPTNFTI

SEQ ID NO: 6670 - protein, 9 aa, Severe acute respiratory syndrome coronavirus 2
  REGION 1..9: note = Table A: HLA-B*42:01H HLA-B*56:01H HLA-B*55:02H HLA-A*68:02H HLA-B*35:03H HLA-C*15:05H HLA-B*55:01H HLA-B*35:01H HLA-B*51:01M HLA-B*39:06H HLA-B*54:01H HLA-B*07:02H HLA-B*07:04H HLA-B*07:05M
IPTNFTISV

SEQ ID NO: 6671 - protein, 9 aa, Severe acute respiratory syndrome coronavirus 2
  REGION 1..9: note = Table A: HLA-A*11:303H HLA-C*16:04H HLA-A*25:01H HLA-B*46:01H HLA-C*03:03M HLA-A*02:11H HLA-C*03:02H HLA-C*03:04M HLA-A*68:02H HLA-B*35:03H HLA-C*15:05H HLA-C*12:03H HLA-C*15:02H HLA-A*02:05M HLA-A*02:06H
  REGION 1..9: note = CONT. FROM ABOVE: HLA-A*02:08H HLA-A*02:01H HLA-A*02:02H HLA- A*02:03H HLA-C*17:01H HLA-C*08:01H HLA-B*38:02M HLA-B*57:03H HLA-B*13:02H HLA-A*66:01H
FTISVTTEI

SEQ ID NO: 6672 - protein, 9 aa, Severe acute respiratory syndrome coronavirus 2
  REGION 1..9: note = Table A: HLA-B*35:03H
TISVTTEIL

SEQ ID NO: 6673 - protein, 9 aa, Severe acute respiratory syndrome coronavirus 2
  REGION 1..9: note = Table A: HLA-A*68:02H HLA-A*02:06H HLA-B*38:02H HLA-B*13:02H
SVTTEILPV

SEQ ID NO: 6674 - protein, 9 aa, Severe acute respiratory syndrome coronavirus 2
  REGION 1..9: note = Table A: HLA-C*04:01H HLA-C*04:03M HLA-B*18:01H HLA-B*35:03H HLA-C*15:05H HLA-B*35:01H HLA-B*35:02M HLA-B*35:08H HLA-B*35:12M HLA-B*39:01M HLA-B*07:05H
TTEILPVSM

SEQ ID NO: 6675 - protein, 9 aa, Severe acute respiratory syndrome coronavirus 2
  REGION 1..9: note = Table A: HLA-B*45:01H HLA-B*40:02H HLA-B*40:06H HLA-B*41:02H HLA-B*49:01M HLA-B*50:01H
TEILPVSMT

SEQ ID NO: 6676 - protein, 9 aa, Severe acute respiratory syndrome coronavirus 2
  REGION 1..9: note = Table A: HLA-A*03:01H HLA-A*03:02H HLA-A*11:01H HLA-A*11:02H HLA-A*36:01H HLA-A*33:03H HLA-A*26:03H HLA-A*68:01H HLA-A*34:01H HLA-A*34:02H HLA-A*66:01M
EILPVSMTK

SEQ ID NO: 6677 - protein, 9 aa, Severe acute respiratory syndrome coronavirus 2
  REGION 1..9: note = Table A: HLA-B*38:02H HLA-B*15:03H
TKTSVDCTM

SEQ ID NO: 6678 - protein, 9 aa, Severe acute respiratory syndrome coronavirus 2
  REGION 1..9: note = Table A: HLA-B*58:01H HLA-A*36:01M HLA-A*01:01H HLA-A*30:02H
KTSVDCTMY

SEQ ID NO: 6679 - protein, 9 aa, Severe acute respiratory syndrome coronavirus 2
  REGION 1..9: note = Table A: HLA-A*68:02H HLA-C*15:05H HLA-C*15:02H
TSVDCTMYI

SEQ ID NO: 6680 - protein, 9 aa, Severe acute respiratory syndrome coronavirus 2
  REGION 1..9: note = Table A: HLA-A*26:01H HLA-A*34:02M HLA-B*35:01H HLA-B*38:02H
ECSNLLLQY

SEQ ID NO: 6681 - protein, 9 aa, Severe acute respiratory syndrome coronavirus 2
  REGION 1..9: note = Table A: HLA-A*24:02H
QYGSFCTQL

SEQ ID NO: 6682 - protein, 9 aa, Severe acute respiratory syndrome coronavirus 2
  REGION 1..9: note = Table A: HLA-A*03:01H HLA-A*11:01H HLA-A*11:02H
GSFCTQLNR

SEQ ID NO: 6683 - protein, 9 aa, Severe acute respiratory syndrome coronavirus 2
  REGION 1..9: note = Table A: HLA-A*11:303H HLA-C*16:01M HLA-C*03:03H HLA-C*03:02H HLA-C*03:04M
FCTQLNRAL

SEQ ID NO: 6684 - protein, 9 aa, Severe acute respiratory syndrome coronavirus 2
  REGION 1..9: note = Table A: HLA-A*02:11H HLA-A*02:04H HLA-A*02:02M HLA-A*02:03M HLA-B*38:02M HLA-B*13:02H
QLNRALTGI

SEQ ID NO: 6685 - protein, 9 aa, Severe acute respiratory syndrome coronavirus 2
  REGION 1..9: note = Table A: HLA-B*14:02M HLA-B*14:01H HLA-B*38:02H HLA-B*39:06H HLA-B*39:01M HLA-B*15:10H
NRALTGIAV

SEQ ID NO: 6686 - protein, 9 aa, Severe acute respiratory syndrome coronavirus 2
  REGION 1..9: note = Table A: HLA-B*38:02H HLA-B*39:01H HLA-B*13:02H
EQDKNTQEV

SEQ ID NO: 6687 - protein, 9 aa, Severe acute respiratory syndrome coronavirus 2
  REGION 1..9: note = Table A: HLA-B*44:05H HLA-B*37:01H HLA-B*38:02H HLA-B*41:02H
QDKNTQEVF

SEQ ID NO: 6688 - protein, 9 aa, Severe acute respiratory syndrome coronavirus 2
  REGION 1..9: note = Table A: HLA-B*39:06H
DKNTQEVFA

SEQ ID NO: 6689 - protein, 9 aa, Severe acute respiratory syndrome coronavirus 2
  REGION 1..9: note = Table A: HLA-A*11:303H HLA-A*33:03H HLA-A*26:03H HLA-A*02:11M HLA-A*68:01H HLA-A*68:02H HLA-C*15:05H HLA-C*15:02H HLA-A*02:04M HLA-A*02:05M HLA-A*02:06H HLA-A*02:07M HLA-A*02:08H HLA-B*14:01H HLA-A*02:01M
  REGION 1..9: note = CONT. FROM ABOVE: HLA-A*02:03H HLA-C*08:01H HLA-B*38:02H HLA- B*39:01H HLA-B*13:02H
NTQEVFAQV

SEQ ID NO: 6690 - protein, 9 aa, Severe acute respiratory syndrome coronavirus 2
  REGION 1..9: note = Table A: HLA-B*27:02H
TQEVFAQVK

SEQ ID NO: 6691 - protein, 9 aa, Severe acute respiratory syndrome coronavirus 2
  REGION 1..9: note = Table A: HLA-A*25:01M HLA-A*26:01H HLA-A*26:02M HLA-A*26:03M HLA-A*68:01H HLA-A*68:02H HLA-A*02:08H HLA-A*34:01M HLA-A*34:02H HLA-B*51:01H HLA-B*38:02H
EVFAQVKQI

SEQ ID NO: 6692 - protein, 9 aa, Severe acute respiratory syndrome coronavirus 2
  REGION 1..9: note = Table A: HLA-C*14:02H HLA-C*14:03M HLA-C*16:01H HLA-A*29:01M HLA-A*29:02M HLA-A*30:02M HLA-A*24:02H HLA-A*24:07H HLA-A*23:01H HLA-B*15:01H HLA-B*15:02H HLA-B*07:05H
VFAQVKQIY

SEQ ID NO: 6693 - protein, 9 aa, Severe acute respiratory syndrome coronavirus 2
  REGION 1..9: note = Table A: HLA-A*11:02H HLA-A*33:03H HLA-A*34:02M
FAQVKQIYK

SEQ ID NO: 6694 - protein, 9 aa, Severe acute respiratory syndrome coronavirus 2
  REGION 1..9: note = Table A: HLA-A*02:05H HLA-A*02:08H HLA-B*13:02M
AQVKQIYKT

SEQ ID NO: 6695 - protein, 9 aa, Severe acute respiratory syndrome coronavirus 2
  REGION 1..9: note = Table A: HLA-A*74:01H HLA-B*52:01H HLA-B*38:02H HLA-B*15:01H HLA-B*15:03H HLA-B*13:01H HLA-B*13:02H
KQIYKTPPI

SEQ ID NO: 6696 - protein, 9 aa, Severe acute respiratory syndrome coronavirus 2
  REGION 1..9: note = Table A: HLA-A*11:303H HLA-A*74:01H HLA-A*03:01M HLA-A*03:02M HLA-A*11:01M HLA-A*11:02M HLA-A*30:01H HLA-A*34:02M HLA-C*07:27H
QIYKTPPIK

SEQ ID NO: 6697 - protein, 9 aa, Severe acute respiratory syndrome coronavirus 2
  REGION 1..9: note = Table A: HLA-B*15:03M
YKTPPIKDF

SEQ ID NO: 6698 - protein, 9 aa, Severe acute respiratory syndrome coronavirus 2
  REGION 1..9: note = Table A: HLA-A*11:01H HLA-A*11:02H HLA-B*13:02H
SQILPDPSK

SEQ ID NO: 6699 - protein, 9 aa, Severe acute respiratory syndrome coronavirus 2
  REGION 1..9: note = Table A: HLA-B*56:01H HLA-B*53:01H HLA-B*55:01H HLA-A*34:02H HLA-B*54:01H
LPDPSKPSK

SEQ ID NO: 6700 - protein, 9 aa, Severe acute respiratory syndrome coronavirus 2
  REGION 1..9: note = Table A: HLA-B*07:04H
PSKPSKRSF

SEQ ID NO: 6701 - protein, 9 aa, Severe acute respiratory syndrome coronavirus 2
  REGION 1..9: note = Table A: HLA-B*58:01H HLA-B*58:02H HLA-B*57:01H HLA-C*15:02H HLA-B*57:03H HLA-B*13:01H
RSFIEDLLF

SEQ ID NO: 6702 - protein, 9 aa, Severe acute respiratory syndrome coronavirus 2
  REGION 1..9: note = Table A: HLA-B*45:01H HLA-B*18:01H HLA-A*02:07H HLA-B*40:02H HLA-B*07:05H HLA-B*49:01H HLA-B*50:01H
IEDLLFNKV

SEQ ID NO: 6703 - protein, 9 aa, Severe acute respiratory syndrome coronavirus 2
  REGION 1..9: note = Table A: HLA-B*08:01H HLA-B*14:01H HLA-B*38:02H HLA-B*15:02H
DLLFNKVTL

SEQ ID NO: 6704 - protein, 9 aa, Severe acute respiratory syndrome coronavirus 2
  REGION 1..9: note = Table A: HLA-A*02:11M HLA-A*02:04H HLA-A*02:05H HLA-A*02:01H HLA-A*02:02H HLA-A*02:03M HLA-B*38:02H
LLFNKVTLA

SEQ ID NO: 6705 - protein, 9 aa, Severe acute respiratory syndrome coronavirus 2
  REGION 1..9: note = Table A: HLA-B*15:01H HLA-B*57:03H HLA-B*13:01H
KVTLADAGF

SEQ ID NO: 6706 - protein, 9 aa, Severe acute respiratory syndrome coronavirus 2
  REGION 1..9: note = Table A: HLA-A*03:01H HLA-A*03:02H HLA-A*11:01H HLA-A*11:02H HLA-A*36:01H HLA-A*34:01H HLA-A*34:02M
TLADAGFIK

SEQ ID NO: 6707 - protein, 9 aa, Severe acute respiratory syndrome coronavirus 2
  REGION 1..9: note = Table A: HLA-B*44:02M HLA-C*16:04H HLA-C*06:02H HLA-B*44:03M HLA-C*07:01H HLA-A*30:02H HLA-B*07:05H HLA-B*41:02H
ADAGFIKQY

SEQ ID NO: 6708 - protein, 9 aa, Severe acute respiratory syndrome coronavirus 2
  REGION 1..9: note = Table A: HLA-A*33:01H HLA-A*33:03H HLA-A*34:01H
DAGFIKQYG

SEQ ID NO: 6709 - protein, 9 aa, Severe acute respiratory syndrome coronavirus 2
  REGION 1..9: note = Table A: HLA-B*08:01H HLA-A*02:05H HLA-B*38:02H
FIKQYGDCL

SEQ ID NO: 6710 - protein, 9 aa, Severe acute respiratory syndrome coronavirus 2
  REGION 1..9: note = Table A: HLA-A*33:01H HLA-A*33:03M HLA-A*26:03H HLA-A*34:01M HLA-A*34:02H HLA-A*66:01H
DCLGDIAAR

SEQ ID NO: 6711 - protein, 9 aa, Severe acute respiratory syndrome coronavirus 2
  REGION 1..9: note = Table A: HLA-B*41:02H HLA-B*49:01H
GDIAARDLI

SEQ ID NO: 6712 - protein, 9 aa, Severe acute respiratory syndrome coronavirus 2
  REGION 1..9: note = Table A: HLA-A*02:05H HLA-B*54:01H
IAARDLICA

SEQ ID NO: 6713 - protein, 9 aa, Severe acute respiratory syndrome coronavirus 2
  REGION 1..9: note = Table A: HLA-B*37:01H
RDLICAQKF

SEQ ID NO: 6714 - protein, 9 aa, Severe acute respiratory syndrome coronavirus 2
  REGION 1..9: note = Table A: HLA-A*02:03H HLA-B*52:01M HLA-B*38:02H HLA-B*15:01H HLA-B*13:02M
AQKFNGLTV

SEQ ID NO: 6715 - protein, 9 aa, Severe acute respiratory syndrome coronavirus 2
  REGION 1..9: note = Table A: HLA-B*48:01H HLA-B*15:03H
QKFNGLTVL

SEQ ID NO: 6716 - protein, 9 aa, Severe acute respiratory syndrome coronavirus 2
  REGION 1..9: note = Table A: HLA-A*02:04M HLA-A*02:01H HLA-A*02:02H HLA-B*40:06H HLA-B*13:02H
GLTVLPPLL

SEQ ID NO: 6717 - protein, 9 aa, Severe acute respiratory syndrome coronavirus 2
  REGION 1..9: note = Table A: HLA-B*35:03H HLA-C*15:05H HLA-B*35:01H HLA-B*35:02H HLA-B*35:08H HLA-B*35:07H HLA-B*35:12M HLA-B*07:05M
LPPLLTDEM

SEQ ID NO: 6718 - protein, 9 aa, Severe acute respiratory syndrome coronavirus 2
  REGION 1..9: note = Table A: HLA-B*58:01H HLA-A*36:01H HLA-A*29:01H HLA-A*29:02H HLA-A*01:01H HLA-C*04:03H HLA-A*30:02H HLA-B*35:01H HLA-B*35:08H HLA-B*38:02H HLA-B*39:01H HLA-B*07:05H
LTDEMIAQY

SEQ ID NO: 6719 - protein, 9 aa, Severe acute respiratory syndrome coronavirus 2
  REGION 1..9: note = Table A: HLA-A*26:03M HLA-A*68:02H HLA-B*38:02H HLA-B*39:06M HLA-B*54:01M HLA-B*39:01H HLA-B*50:01H
EMIAQYTSA

SEQ ID NO: 6720 - protein, 9 aa, Severe acute respiratory syndrome coronavirus 2
  REGION 1..9: note = Table A: HLA-A*11:303H HLA-B*46:01H HLA-A*26:03H HLA-B*08:01M HLA-A*68:02H HLA-B*35:03M HLA-C*15:05H HLA-C*01:02H HLA-A*02:05H HLA-A*02:08H HLA-B*14:01H HLA-A*02:02H HLA-A*02:03H HLA-A*34:01H HLA-C*07:27H
  REGION 1..9: note = CONT. FROM ABOVE: HLA-B*35:01H HLA-B*35:02H HLA-B*38:02M HLA- B*07:02H HLA-B*15:01H HLA-B*15:02M HLA-B*39:01H HLA-B*07:05H
MIAQYTSAL

SEQ ID NO: 6721 - protein, 9 aa, Severe acute respiratory syndrome coronavirus 2
  REGION 1..9: note = Table A: HLA-A*11:303H HLA-C*03:03H HLA-C*03:04H HLA-C*15:05H HLA-C*17:01H HLA-C*08:01H HLA-B*38:02H
IAQYTSALL

SEQ ID NO: 6722 - protein, 9 aa, Severe acute respiratory syndrome coronavirus 2
  REGION 1..9: note = Table A: HLA-B*38:02H HLA-B*13:02H
AQYTSALLA

SEQ ID NO: 6723 - protein, 9 aa, Severe acute respiratory syndrome coronavirus 2
  REGION 1..9: note = Table A: HLA-A*68:02H
YTSALLAGT

SEQ ID NO: 6724 - protein, 9 aa, Severe acute respiratory syndrome coronavirus 2
  REGION 1..9: note = Table A: HLA-C*15:05H
TSALLAGTI

SEQ ID NO: 6725 - protein, 9 aa, Severe acute respiratory syndrome coronavirus 2
  REGION 1..9: note = Table A: HLA-B*58:01M HLA-B*57:01M HLA-A*25:01H HLA-B*53:01M HLA-B*57:03M
LAGTITSGW

SEQ ID NO: 6726 - protein, 9 aa, Severe acute respiratory syndrome coronavirus 2
  REGION 1..9: note = Table A: HLA-B*58:01H HLA-B*58:02H HLA-A*11:303H HLA-B*57:01M HLA-A*25:01H HLA-B*46:01M HLA-A*26:01H HLA-A*29:02H HLA-C*07:01H HLA-C*03:02H HLA-C*03:04H HLA-A*30:02H HLA-C*15:05H HLA-C*12:02H HLA-A*24:07H
  REGION 1..9: note = CONT. FROM ABOVE: HLA-A*23:01H HLA-B*38:02H HLA-A*32:01H HLA- B*15:01M HLA-B*15:03H HLA-B*39:01H HLA-B*07:05H HLA-B*57:03H HLA-C*02:02H
GTITSGWTF

SEQ ID NO: 6727 - protein, 9 aa, Severe acute respiratory syndrome coronavirus 2
  REGION 1..9: note = Table A: HLA-B*39:06H
SGWTFGAGA

SEQ ID NO: 6728 - protein, 9 aa, Severe acute respiratory syndrome coronavirus 2
  REGION 1..9: note = Table A: HLA-A*26:03H HLA-C*03:03H HLA-C*03:04H HLA-A*68:02H HLA-C*15:05H HLA-B*38:02H HLA-A*66:01H
WTFGAGAAL

SEQ ID NO: 6729 - protein, 9 aa, Severe acute respiratory syndrome coronavirus 2
  REGION 1..9: note = Table A: HLA-C*16:04H HLA-C*12:05H HLA-B*35:03H HLA-C*15:05H HLA-B*35:01H HLA-B*38:02H HLA-B*07:05H
AALQIPFAM

SEQ ID NO: 6730 - protein, 9 aa, Severe acute respiratory syndrome coronavirus 2
  REGION 1..9: note = Table A: HLA-A*11:303H HLA-B*46:01H HLA-C*03:02H HLA-C*15:05H HLA-C*12:03H HLA-A*02:04H HLA-A*02:05H HLA-C*08:01H HLA-B*38:02H HLA-B*15:01M HLA-B*15:02H HLA-B*15:03H HLA-B*13:02H
LQIPFAMQM

SEQ ID NO: 6731 - protein, 9 aa, Severe acute respiratory syndrome coronavirus 2
  REGION 1..9: note = Table A: HLA-A*29:02H HLA-B*18:01H HLA-B*53:01H HLA-C*15:05H HLA-B*35:01H HLA-B*35:08H HLA-B*35:07H HLA-B*38:02M HLA-B*54:01H HLA-B*15:02M HLA-B*15:03H HLA-B*07:05M HLA-B*15:11H
IPFAMQMAY

SEQ ID NO: 6732 - protein, 9 aa, Severe acute respiratory syndrome coronavirus 2
  REGION 1..9: note = Table A: HLA-B*53:01H HLA-B*35:07H HLA-B*57:03H
FAMQMAYRF

SEQ ID NO: 6733 - protein, 9 aa, Severe acute respiratory syndrome coronavirus 2
  REGION 1..9: note = Table A: HLA-A*30:01H
AYRFNGIGV

SEQ ID NO: 6734 - protein, 9 aa, Severe acute respiratory syndrome coronavirus 2
  REGION 1..9: note = Table A: HLA-C*06:02H HLA-B*39:01H
YRFNGIGVT

SEQ ID NO: 6735 - protein, 9 aa, Severe acute respiratory syndrome coronavirus 2
  REGION 1..9: note = Table A: HLA-C*12:05H HLA-A*02:11H HLA-A*68:02M HLA-C*15:05H HLA-A*02:05M HLA-A*02:06H HLA-A*02:03H HLA-B*51:01H HLA-C*08:01H HLA-B*38:02H HLA-B*13:02M
NGIGVTQNV

SEQ ID NO: 6736 - protein, 9 aa, Severe acute respiratory syndrome coronavirus 2
  REGION 1..9: note = Table A: HLA-A*02:11M HLA-A*02:04H HLA-A*02:01H HLA-A*02:02M HLA-A*02:03M HLA-B*51:01H HLA-B*52:01M HLA-B*38:02M HLA-B*13:02H
VLYENQKLI

SEQ ID NO: 6737 - protein, 9 aa, Severe acute respiratory syndrome coronavirus 2
  REGION 1..9: note = Table A: HLA-B*50:01H
YENQKLIAN

SEQ ID NO: 6738 - protein, 9 aa, Severe acute respiratory syndrome coronavirus 2
  REGION 1..9: note = Table A: HLA-B*46:01H HLA-B*08:01H HLA-B*18:01H HLA-C*12:02H HLA-A*24:02H HLA-B*38:02M HLA-B*15:01H HLA-B*15:02H HLA-B*15:03M HLA-B*07:05H HLA-C*02:02H
NQKLIANQF

SEQ ID NO: 6739 - protein, 9 aa, Severe acute respiratory syndrome coronavirus 2
  REGION 1..9: note = Table A: HLA-B*54:01H
LIANQFNSA

SEQ ID NO: 6740 - protein, 9 aa, Severe acute respiratory syndrome coronavirus 2
  REGION 1..9: note = Table A: HLA-C*15:05M HLA-B*51:01M HLA-B*38:02H
IANQFNSAI

SEQ ID NO: 6741 - protein, 9 aa, Severe acute respiratory syndrome coronavirus 2
  REGION 1..9: note = Table A: HLA-A*11:01H HLA-A*11:02H HLA-A*34:02H
NQFNSAIGK

SEQ ID NO: 6742 - protein, 9 aa, Severe acute respiratory syndrome coronavirus 2
  REGION 1..9: note = Table A: HLA-B*48:01H HLA-C*15:05H HLA-A*02:05H HLA-A*02:08H HLA-A*02:02H HLA-B*13:01H
AIGKIQDSL

SEQ ID NO: 6743 - protein, 9 aa, Severe acute respiratory syndrome coronavirus 2
  REGION 1..9: note = Table A: HLA-A*11:303H HLA-C*15:05H HLA-C*01:02H HLA-A*02:04H HLA-A*02:05H HLA-B*14:01H HLA-A*02:01H HLA-A*02:02H HLA-A*02:03M HLA-B*38:02M HLA-B*15:01H HLA-B*15:02H HLA-B*39:01H HLA-B*07:05H
SLSSTASAL

SEQ ID NO: 6744 - protein, 9 aa, Severe acute respiratory syndrome coronavirus 2
  REGION 1..9: note = Table A: HLA-A*11:01H HLA-A*11:02H HLA-A*34:02M HLA-C*07:27H
SSTASALGK

SEQ ID NO: 6745 - protein, 9 aa, Severe acute respiratory syndrome coronavirus 2
  REGION 1..9: note = Table A: HLA-A*11:01H HLA-A*25:01H HLA-A*26:01H HLA-A*26:02M HLA-A*26:03H HLA-A*68:01H HLA-A*68:02H HLA-C*15:05H HLA-A*02:05H HLA-A*02:08H HLA-A*34:01H HLA-A*34:02M HLA-A*66:01H
STASALGKL

SEQ ID NO: 6746 - protein, 9 aa, Severe acute respiratory syndrome coronavirus 2
  REGION 1..9: note = Table A: HLA-A*02:11H HLA-A*02:06H HLA-B*38:02H
SALGKLQDV

SEQ ID NO: 6747 - protein, 9 aa, Severe acute respiratory syndrome coronavirus 2
  REGION 1..9: note = Table A: HLA-A*02:11H HLA-A*02:02M HLA-B*13:02H
ALGKLQDVV

SEQ ID NO: 6748 - protein, 9 aa, Severe acute respiratory syndrome coronavirus 2
  REGION 1..9: note = Table A: HLA-A*02:11H HLA-A*02:01H HLA-A*02:02H
KLQDVVNQN

SEQ ID NO: 6749 - protein, 9 aa, Severe acute respiratory syndrome coronavirus 2
  REGION 1..9: note = Table A: HLA-A*02:11H HLA-A*02:05H HLA-A*02:06H HLA-A*02:07H HLA-A*02:01H HLA-C*08:02H HLA-B*38:02H
LQDVVNQNA

SEQ ID NO: 6750 - protein, 9 aa, Severe acute respiratory syndrome coronavirus 2
  REGION 1..9: note = Table A: HLA-A*26:03H
DVVNQNAQA

SEQ ID NO: 6751 - protein, 9 aa, Severe acute respiratory syndrome coronavirus 2
  REGION 1..9: note = Table A: HLA-A*11:303M HLA-C*16:04H HLA-A*03:02H HLA-B*46:01H HLA-A*26:03H HLA-B*08:01H HLA-C*03:04H HLA-B*35:03H HLA-C*15:05M HLA-C*01:02M HLA-A*02:05M HLA-A*02:08M HLA-B*14:01H HLA-A*02:02H HLA-C*07:27H
  REGION 1..9: note = CONT. FROM ABOVE: HLA-C*08:01H HLA-B*38:02M HLA-B*07:02H HLA- B*15:01M HLA-B*15:02H HLA-B*39:01H HLA-B*07:05M HLA-C*07:04H
VVNQNAQAL

SEQ ID NO: 6752 - protein, 9 aa, Severe acute respiratory syndrome coronavirus 2
  REGION 1..9: note = Table A: HLA-C*15:05H
QNAQALNTL

SEQ ID NO: 6753 - protein, 9 aa, Severe acute respiratory syndrome coronavirus 2
  REGION 1..9: note = Table A: HLA-C*15:05H HLA-B*51:01H
NAQALNTLV

SEQ ID NO: 6754 - protein, 9 aa, Severe acute respiratory syndrome coronavirus 2
  REGION 1..9: note = Table A: HLA-A*03:01H HLA-A*03:02H HLA-A*11:01M HLA-A*11:02M HLA-A*36:01H HLA-C*07:27H HLA-B*13:02H
AQALNTLVK

SEQ ID NO: 6755 - protein, 9 aa, Severe acute respiratory syndrome coronavirus 2
  REGION 1..9: note = Table A: HLA-A*11:303H HLA-B*44:02H HLA-B*44:05H HLA-A*03:01H HLA-C*06:02H HLA-B*08:01H HLA-B*44:03H HLA-C*07:01H HLA-A*02:11H HLA-C*15:05H HLA-C*15:02H HLA-A*02:04H HLA-A*02:05H HLA-A*02:07H HLA-A*02:08M
  REGION 1..9: note = CONT. FROM ABOVE: HLA-B*14:01M HLA-A*02:01M HLA-A*02:02H HLA- A*02:03H HLA-B*38:02M HLA-A*32:01H HLA-B*07:04M HLA-B*15:01H HLA-B*07:05H HLA-B*41:02H HLA-B*13:02H HLA-C*07:04H
ALNTLVKQL

SEQ ID NO: 6756 - protein, 9 aa, Severe acute respiratory syndrome coronavirus 2
  REGION 1..9: note = Table A: HLA-B*38:02H HLA-B*15:01H HLA-B*15:02H HLA-B*57:03H
LVKQLSSNF

SEQ ID NO: 6757 - protein, 9 aa, Severe acute respiratory syndrome coronavirus 2
  REGION 1..9: note = Table A: HLA-B*38:02H
QLSSNFGAI

SEQ ID NO: 6758 - protein, 9 aa, Severe acute respiratory syndrome coronavirus 2
  REGION 1..9: note = Table A: HLA-A*68:02M HLA-C*15:05H HLA-A*02:05H HLA-B*14:01H HLA-A*02:03H HLA-B*38:02H HLA-B*39:06H HLA-B*07:05H
SNFGAISSV

SEQ ID NO: 6759 - protein, 9 aa, Severe acute respiratory syndrome coronavirus 2
  REGION 1..9: note = Table A: HLA-C*14:02H HLA-C*14:03M HLA-B*07:05H
NFGAISSVL

SEQ ID NO: 6760 - protein, 9 aa, Severe acute respiratory syndrome coronavirus 2
  REGION 1..9: note = Table A: HLA-C*08:01H HLA-B*57:03H
ISSVLNDIL

SEQ ID NO: 6761 - protein, 9 aa, Severe acute respiratory syndrome coronavirus 2
  REGION 1..9: note = Table A: HLA-A*11:303M HLA-A*74:01M HLA-A*03:01H HLA-A*03:02H HLA-A*11:01H HLA-A*11:02H HLA-A*33:01H HLA-A*33:03M HLA-A*26:03M HLA-A*30:02H HLA-A*68:01M HLA-A*34:01M HLA-A*34:02M HLA-C*07:27M HLA-A*31:01M
  REGION 1..9: note = CONT. FROM ABOVE: HLA-A*66:01H
SVLNDILSR

SEQ ID NO: 6762 - protein, 9 aa, Severe acute respiratory syndrome coronavirus 2
  REGION 1..9: note = Table A: HLA-A*11:303H HLA-A*74:01M HLA-A*03:01H HLA-B*46:01H HLA-C*04:03H HLA-A*02:11H HLA-A*30:02H HLA-A*68:02H HLA-C*15:05H HLA-C*01:02H HLA-C*15:02H HLA-A*02:04H HLA-A*02:05M HLA-A*02:06H HLA-A*02:07H
  REGION 1..9: note = CONT. FROM ABOVE: HLA-B*14:01H HLA-A*02:01M HLA-A*02:02H HLA- A*02:03H HLA-C*08:01H HLA-B*38:02M HLA-B*15:01H HLA-B*13:02H
VLNDILSRL

SEQ ID NO: 6763 - protein, 9 aa, Severe acute respiratory syndrome coronavirus 2
  REGION 1..9: note = Table A: HLA-A*02:11M HLA-A*02:07M HLA-A*02:01M HLA-A*02:02M HLA-B*38:02H HLA-B*13:01M HLA-B*13:02H
RLDKVEAEV

SEQ ID NO: 6764 - protein, 9 aa, Severe acute respiratory syndrome coronavirus 2
  REGION 1..9: note = Table A: HLA-B*38:02H
DKVEAEVQI

SEQ ID NO: 6765 - protein, 9 aa, Severe acute respiratory syndrome coronavirus 2
  REGION 1..9: note = Table A: HLA-B*27:02H HLA-A*68:01H
VEAEVQIDR

SEQ ID NO: 6766 - protein, 9 aa, Severe acute respiratory syndrome coronavirus 2
  REGION 1..9: note = Table A: HLA-B*35:02H HLA-B*35:12H HLA-B*39:01H
EAEVQIDRL

SEQ ID NO: 6767 - protein, 9 aa, Severe acute respiratory syndrome coronavirus 2
  REGION 1..9: note = Table A: HLA-B*44:02H HLA-B*44:05M HLA-B*44:03M HLA-B*40:02H HLA-B*41:02H HLA-B*49:01M
AEVQIDRLI

SEQ ID NO: 6768 - protein, 9 aa, Severe acute respiratory syndrome coronavirus 2
  REGION 1..9: note = Table A: HLA-A*02:05H
VQIDRLITG

SEQ ID NO: 6769 - protein, 9 aa, Severe acute respiratory syndrome coronavirus 2
  REGION 1..9: note = Table A: HLA-A*74:01H HLA-A*33:01H HLA-A*33:03H HLA-A*68:01H HLA-A*34:01H
QIDRLITGR

SEQ ID NO: 6770 - protein, 9 aa, Severe acute respiratory syndrome coronavirus 2
  REGION 1..9: note = Table A: HLA-B*08:01M HLA-C*03:03H HLA-C*03:02H HLA-C*03:04H HLA-B*14:02H HLA-A*02:04H HLA-A*02:02H HLA-B*07:04H
LITGRLQSL

SEQ ID NO: 6771 - protein, 9 aa, Severe acute respiratory syndrome coronavirus 2
  REGION 1..9: note = Table A: HLA-C*16:04H HLA-B*27:05H HLA-B*27:02H HLA-B*38:02H HLA-B*39:01H
GRLQSLQTY

SEQ ID NO: 6772 - protein, 9 aa, Severe acute respiratory syndrome coronavirus 2
  REGION 1..9: note = Table A: HLA-A*02:11H HLA-A*02:04M HLA-A*02:07H HLA-A*02:01M HLA-A*02:02M HLA-A*02:03H HLA-B*38:02H HLA-B*13:02M
RLQSLQTYV

SEQ ID NO: 6773 - protein, 9 aa, Severe acute respiratory syndrome coronavirus 2
  REGION 1..9: note = Table A: HLA-B*48:01M HLA-A*02:11H HLA-A*68:02H HLA-A*02:04H HLA-A*02:05H HLA-A*02:06M HLA-A*02:08M HLA-A*02:02M HLA-C*08:01H HLA-B*38:02M HLA-B*15:01H HLA-B*39:01H HLA-B*13:01H HLA-B*13:02H
LQTYVTQQL

SEQ ID NO: 6774 - protein, 9 aa, Severe acute respiratory syndrome coronavirus 2
  REGION 1..9: note = Table A: HLA-B*58:01H HLA-B*58:02H HLA-B*57:01H HLA-A*68:02H HLA-C*15:05H HLA-C*15:02H HLA-B*38:02H HLA-B*57:03M HLA-B*13:02H
QTYVTQQLI

SEQ ID NO: 6775 - protein, 9 aa, Severe acute respiratory syndrome coronavirus 2
  REGION 1..9: note = Table A: HLA-A*33:03H
TYVTQQLIR

SEQ ID NO: 6776 - protein, 9 aa, Severe acute respiratory syndrome coronavirus 2
  REGION 1..9: note = Table A: HLA-B*56:01H HLA-A*02:11H HLA-B*55:02H HLA-A*68:02H HLA-A*02:05M HLA-A*02:06M HLA-A*02:08H HLA-A*02:02H HLA-A*02:03H HLA-B*38:02H HLA-B*40:06H HLA-B*54:01M
YVTQQLIRA

SEQ ID NO: 6777 - protein, 9 aa, Severe acute respiratory syndrome coronavirus 2
  REGION 1..9: note = Table A: HLA-B*08:01H HLA-B*14:02M HLA-A*02:06H HLA-B*14:01H HLA-B*52:01M HLA-B*38:02H HLA-B*13:01H HLA-B*13:02M
QQLIRAAEI

SEQ ID NO: 6778 - protein, 9 aa, Severe acute respiratory syndrome coronavirus 2
  REGION 1..9: note = Table A: HLA-A*34:01H
QLIRAAEIR

SEQ ID NO: 6779 - protein, 9 aa, Severe acute respiratory syndrome coronavirus 2
  REGION 1..9: note = Table A: HLA-B*56:01M HLA-A*02:11M HLA-B*55:02M HLA-C*15:05H HLA-B*55:01M HLA-A*02:05H HLA-A*02:08H HLA-A*02:02H HLA-B*38:02H HLA-B*39:06H HLA-B*54:01M HLA-B*07:02H HLA-B*07:04H HLA-B*07:05H HLA-B*50:01H
RAAEIRASA

SEQ ID NO: 6780 - protein, 9 aa, Severe acute respiratory syndrome coronavirus 2
  REGION 1..9: note = Table A: HLA-B*44:02M HLA-B*44:05H HLA-C*16:04H HLA-B*45:01M HLA-B*44:03H HLA-B*37:01H HLA-B*38:02H HLA-B*40:01H HLA-B*40:02H HLA-B*41:02H HLA-B*49:01H HLA-B*50:01H
AEIRASANL

SEQ ID NO: 6781 - protein, 9 aa, Severe acute respiratory syndrome coronavirus 2
  REGION 1..9: note = Table A: HLA-B*14:01H HLA-B*39:06H
IRASANLAA

SEQ ID NO: 6782 - protein, 9 aa, Severe acute respiratory syndrome coronavirus 2
  REGION 1..9: note = Table A: HLA-A*11:303H HLA-A*03:01H HLA-A*03:02M HLA-A*11:01H HLA-A*11:02M HLA-A*30:02H HLA-A*68:01H HLA-A*34:02M HLA-C*07:27M
ASANLAATK

SEQ ID NO: 6783 - protein, 9 aa, Severe acute respiratory syndrome coronavirus 2
  REGION 1..9: note = Table A: HLA-A*11:303M HLA-B*44:05H HLA-C*16:01H HLA-B*46:01H HLA-B*53:01H HLA-C*03:04H HLA-B*35:03M HLA-C*15:05H HLA-C*12:02H HLA-C*12:03H HLA-A*34:01H HLA-C*07:27H HLA-B*35:01M HLA-B*35:02H HLA-B*35:08H
  REGION 1..9: note = CONT. FROM ABOVE: HLA-B*51:01H HLA-B*35:07H HLA-B*35:12H HLA- B*38:02H HLA-B*07:02H HLA-B*15:01H HLA-B*15:02M HLA-B*07:05M HLA-C*02:02H HLA-C*07:04M
SANLAATKM

SEQ ID NO: 6784 - protein, 9 aa, Severe acute respiratory syndrome coronavirus 2
  REGION 1..9: note = Table A: HLA-A*34:01M HLA-A*66:01H
ECVLGQSKR

SEQ ID NO: 6785 - protein, 9 aa, Severe acute respiratory syndrome coronavirus 2
  REGION 1..9: note = Table A: HLA-A*36:01M
RVDFCGKGY

SEQ ID NO: 6786 - protein, 9 aa, Severe acute respiratory syndrome coronavirus 2
  REGION 1..9: note = Table A: HLA-B*15:03M
GKGYHLMSF

SEQ ID NO: 6787 - protein, 9 aa, Severe acute respiratory syndrome coronavirus 2
  REGION 1..9: note = Table A: HLA-B*56:01H HLA-A*02:11M HLA-B*55:02M HLA-B*55:01H HLA-B*14:01H HLA-A*02:01H HLA-A*02:02H HLA-A*02:03M HLA-B*38:02M HLA-B*39:06M HLA-B*54:01M HLA-B*13:02H HLA-B*50:01H
HLMSFPQSA

SEQ ID NO: 6788 - protein, 9 aa, Severe acute respiratory syndrome coronavirus 2
  REGION 1..9: note = Table A: HLA-B*46:01H HLA-C*03:02H HLA-C*12:02H HLA-A*34:01H HLA-A*34:02M HLA-C*08:03H HLA-A*66:01H
MSFPQSAPH

SEQ ID NO: 6789 - protein, 9 aa, Severe acute respiratory syndrome coronavirus 2
  REGION 1..9: note = Table A: HLA-B*56:01M HLA-A*02:11H HLA-B*55:02M HLA-C*15:05H HLA-B*55:01H HLA-A*02:03H HLA-B*51:01H HLA-B*54:01M HLA-B*07:04H
FPQSAPHGV

SEQ ID NO: 6790 - protein, 9 aa, Severe acute respiratory syndrome coronavirus 2
  REGION 1..9: note = Table A: HLA-B*58:01M HLA-B*58:02H HLA-B*57:01H HLA-B*46:01H HLA-C*15:05H HLA-C*12:02H HLA-C*12:03H HLA-B*35:01H HLA-B*38:02H HLA-B*15:01M HLA-B*15:02M HLA-B*15:03H HLA-B*07:05H HLA-B*57:03H HLA-C*07:04H
QSAPHGVVF

SEQ ID NO: 6791 - protein, 9 aa, Severe acute respiratory syndrome coronavirus 2
  REGION 1..9: note = Table A: HLA-C*14:03H HLA-C*04:03H HLA-A*02:11H HLA-B*53:01H HLA-A*68:02H HLA-C*01:02M HLA-C*12:02H HLA-A*02:05H HLA-C*17:01M HLA-C*08:01H HLA-C*07:04M
SAPHGVVFL

SEQ ID NO: 6792 - protein, 9 aa, Severe acute respiratory syndrome coronavirus 2
  REGION 1..9: note = Table A: HLA-B*38:02H
PHGVVFLHV

SEQ ID NO: 6793 - protein, 9 aa, Severe acute respiratory syndrome coronavirus 2
  REGION 1..9: note = Table A: HLA-A*29:01H HLA-A*29:02H HLA-A*30:02H HLA-B*35:01H HLA-B*35:07H HLA-B*38:02H HLA-B*15:01H HLA-B*15:02H HLA-B*15:03H HLA-B*07:05H
GVVFLHVTY

SEQ ID NO: 6794 - protein, 9 aa, Severe acute respiratory syndrome coronavirus 2
  REGION 1..9: note = Table A: HLA-A*02:11M HLA-A*68:02H HLA-C*15:02H HLA-A*02:04H HLA-A*02:05H HLA-A*02:06H HLA-A*02:07H HLA-A*02:02H HLA-A*02:03M HLA-B*38:02H
VVFLHVTYV

SEQ ID NO: 6795 - protein, 9 aa, Severe acute respiratory syndrome coronavirus 2
  REGION 1..9: note = Table A: HLA-A*68:02H
HVTYVPAQE

SEQ ID NO: 6796 - protein, 9 aa, Severe acute respiratory syndrome coronavirus 2
  REGION 1..9: note = Table A: HLA-A*11:303M HLA-A*74:01H HLA-A*03:01H HLA-A*03:02H HLA-A*11:01H HLA-A*11:02H HLA-A*36:01H HLA-A*33:03H HLA-A*30:01H HLA-A*30:02H HLA-A*68:01H HLA-A*34:01H HLA-A*34:02H HLA-C*07:27H HLA-A*31:01H
  REGION 1..9: note = CONT. FROM ABOVE: HLA-A*66:01H
VTYVPAQEK

SEQ ID NO: 6797 - protein, 9 aa, Severe acute respiratory syndrome coronavirus 2
  REGION 1..9: note = Table A: HLA-B*45:01H HLA-B*50:01H
AQEKNFTTA

SEQ ID NO: 6798 - protein, 9 aa, Severe acute respiratory syndrome coronavirus 2
  REGION 1..9: note = Table A: HLA-B*45:01H HLA-B*40:06M HLA-B*41:02H HLA-B*50:01H
QEKNFTTAP

SEQ ID NO: 6799 - protein, 9 aa, Severe acute respiratory syndrome coronavirus 2
  REGION 1..9: note = Table A: HLA-B*58:02H HLA-B*57:03H HLA-B*13:02H
KNFTTAPAI

SEQ ID NO: 6800 - protein, 9 aa, Severe acute respiratory syndrome coronavirus 2
  REGION 1..9: note = Table A: HLA-A*34:02M
FTTAPAICH

SEQ ID NO: 6801 - protein, 9 aa, Severe acute respiratory syndrome coronavirus 2
  REGION 1..9: note = Table A: HLA-A*02:11H HLA-B*07:04H
KAHFPREGV

SEQ ID NO: 6802 - protein, 9 aa, Severe acute respiratory syndrome coronavirus 2
  REGION 1..9: note = Table A: HLA-B*38:02M HLA-B*15:03M HLA-B*15:10M
AHFPREGVF

SEQ ID NO: 6803 - protein, 9 aa, Severe acute respiratory syndrome coronavirus 2
  REGION 1..9: note = Table A: HLA-C*04:03H
HFPREGVFV

SEQ ID NO: 6804 - protein, 9 aa, Severe acute respiratory syndrome coronavirus 2
  REGION 1..9: note = Table A: HLA-B*54:01H
FPREGVFVS

SEQ ID NO: 6805 - protein, 9 aa, Severe acute respiratory syndrome coronavirus 2
  REGION 1..9: note = Table A: HLA-C*14:03H HLA-A*24:02M HLA-A*24:07H HLA-A*23:01M
VFVSNGTHW

SEQ ID NO: 6806 - protein, 9 aa, Severe acute respiratory syndrome coronavirus 2
  REGION 1..9: note = Table A: HLA-C*15:02H
VSNGTHWFV

SEQ ID NO: 6807 - protein, 9 aa, Severe acute respiratory syndrome coronavirus 2
  REGION 1..9: note = Table A: HLA-A*11:303H HLA-A*74:01H HLA-A*03:01M HLA-A*03:02H HLA-A*11:01M HLA-A*11:02H HLA-A*36:01H HLA-B*57:01H HLA-A*33:01M HLA-A*33:03M HLA-A*26:03H HLA-B*27:05H HLA-A*30:01H HLA-A*30:02H HLA-A*68:01M
  REGION 1..9: note = CONT. FROM ABOVE: HLA-A*68:02H HLA-A*34:01M HLA-A*34:02H HLA- C*07:27M HLA-A*31:01H HLA-A*66:01H
GTHWFVTQR

SEQ ID NO: 6808 - protein, 9 aa, Severe acute respiratory syndrome coronavirus 2
  REGION 1..9: note = Table A: HLA-A*29:02H
WFVTQRNFY

SEQ ID NO: 6809 - protein, 9 aa, Severe acute respiratory syndrome coronavirus 2
  REGION 1..9: note = Table A: HLA-B*38:02H
QRNFYEPQI

SEQ ID NO: 6810 - protein, 9 aa, Severe acute respiratory syndrome coronavirus 2
  REGION 1..9: note = Table A: HLA-C*15:02M HLA-B*57:03H
RNFYEPQII

SEQ ID NO: 6811 - protein, 9 aa, Severe acute respiratory syndrome coronavirus 2
  REGION 1..9: note = Table A: HLA-B*39:01H
FYEPQIITT

SEQ ID NO: 6812 - protein, 9 aa, Severe acute respiratory syndrome coronavirus 2
  REGION 1..9: note = Table A: HLA-B*58:01H HLA-B*46:01H HLA-B*35:02H HLA-B*38:02M HLA-B*15:01M HLA-B*15:02M HLA-B*57:03H
QIITTDNTF

SEQ ID NO: 6813 - protein, 9 aa, Severe acute respiratory syndrome coronavirus 2
  REGION 1..9: note = Table A: HLA-A*02:11H HLA-A*68:02H HLA-A*02:05M HLA-A*02:06H HLA-A*02:08M
VVIGIVNNT

SEQ ID NO: 6814 - protein, 9 aa, Severe acute respiratory syndrome coronavirus 2
  REGION 1..9: note = Table A: HLA-B*46:01H HLA-B*35:01H HLA-B*15:01H HLA-B*15:02H HLA-B*15:03H HLA-B*15:11H
IGIVNNTVY

SEQ ID NO: 6815 - protein, 9 aa, Severe acute respiratory syndrome coronavirus 2
  REGION 1..9: note = Table A: HLA-B*58:01H HLA-C*14:02H HLA-C*14:03H HLA-A*11:303H HLA-B*44:05H HLA-A*36:01H HLA-C*06:02H HLA-A*29:01H HLA-A*29:02H HLA-C*04:01H HLA-C*04:03H HLA-C*03:03H HLA-C*07:01H HLA-C*07:02H HLA-A*02:11H
  REGION 1..9: note = CONT. FROM ABOVE: HLA-C*03:04H HLA-B*35:03M HLA-C*15:05M HLA- A*02:04H HLA-A*02:06H HLA-A*02:07H HLA-A*02:01H HLA-A*24:02H HLA-B*35:01H HLA-B*35:02M HLA-A*24:07H HLA-C*08:01H HLA-C*08 :02M HLA-A*23:01H HLA-B*35:12M HLA-B*38:01M HLA-B*38:02M
  REGION 1..9: note = CONT. FROM ABOVE: HLA-B*40:01H HLA-B*40:02H HLA-B*39:01H HLA- B*07:05H HLA-C*05:01M HLA-C*07:04H
VYDPLQPEL

SEQ ID NO: 6816 - protein, 9 aa, Severe acute respiratory syndrome coronavirus 2
  REGION 1..9: note = Table A: HLA-A*02:07M HLA-B*38:02H
ELDSFKEEL

SEQ ID NO: 6817 - protein, 9 aa, Severe acute respiratory syndrome coronavirus 2
  REGION 1..9: note = Table A: HLA-A*29:02H HLA-A*30:02M
SFKEELDKY

SEQ ID NO: 6818 - protein, 9 aa, Severe acute respiratory syndrome coronavirus 2
  REGION 1..9: note = Table A: HLA-B*38:01M HLA-B*38:02H HLA-B*39:01H HLA-B*15:10M
NHTSPDVDL

SEQ ID NO: 6819 - protein, 9 aa, Severe acute respiratory syndrome coronavirus 2
  REGION 1..9: note = Table A: HLA-A*26:03H HLA-A*68:02H HLA-C*15:05H HLA-B*14:01H HLA-B*38:02M HLA-B*39:01H HLA-B*07:05H
DISGINASV

SEQ ID NO: 6820 - protein, 9 aa, Severe acute respiratory syndrome coronavirus 2
  REGION 1..9: note = Table A: HLA-C*15:05H HLA-A*02:04H HLA-A*02:03H HLA-B*13:02H
GINASVVNI

SEQ ID NO: 6821 - protein, 9 aa, Severe acute respiratory syndrome coronavirus 2
  REGION 1..9: note = Table A: HLA-A*11:303H HLA-A*03:02H HLA-A*11:01M HLA-A*11:02H HLA-A*33:03H HLA-A*68:01H HLA-A*68:02H HLA-A*34:01H HLA-A*34:02H HLA-C*07:27H HLA-A*66:01H
NASVVNIQK

SEQ ID NO: 6822 - protein, 9 aa, Severe acute respiratory syndrome coronavirus 2
  REGION 1..9: note = Table A: HLA-A*02:11H HLA-A*68:02M HLA-A*02:05M HLA-A*02:06H HLA-A*02:08M HLA-A*02:02H HLA-B*38:02H HLA-B*40:06H HLA-B*57:03H HLA-B*13:02H
SVVNIQKEI

SEQ ID NO: 6823 - protein, 9 aa, Severe acute respiratory syndrome coronavirus 2
  REGION 1..9: note = Table A: HLA-B*44:05H HLA-B*46:01H HLA-B*45:01H HLA-A*02:11M HLA-A*68:02H HLA-C*15:02H HLA-A*02:05M HLA-A*02:06H HLA-A*02:07H HLA-A*02:08H HLA-B*14:01H HLA-A*02:01H HLA-A*02:02H HLA-A*02:03H HLA-B*37:01H HLA-B*38:02H
  REGION 1..9: note = CONT. FROM ABOVE: HLA-B*40:01H HLA-B*40:02H HLA-B*40:06H HLA- B*41:02M HLA-B*13:02H HLA-B*49:01H HLA-B*50:01H
KEIDRLNEV

SEQ ID NO: 6824 - protein, 9 aa, Severe acute respiratory syndrome coronavirus 2
  REGION 1..9: note = Table A: HLA-A*74:01H HLA-A*02:11H HLA-C*15:02H HLA-A*02:04M HLA-A*02:07H HLA-A*02:01H HLA-A*02:02H HLA-A*02:03H HLA-B*38:02H HLA-B*07:04H HLA-B*13:01H HLA-B*13:02H
RLNEVAKNL

SEQ ID NO: 6825 - protein, 9 aa, Severe acute respiratory syndrome coronavirus 2
  REGION 1..9: note = Table A: HLA-A*26:03H HLA-A*34:01H
EVAKNLNES

SEQ ID NO: 6826 - protein, 9 aa, Severe acute respiratory syndrome coronavirus 2
  REGION 1..9: note = Table A: HLA-A*11:303H HLA-C*16:01H HLA-B*46:01H HLA-B*08:01H HLA-C*03:04H HLA-C*12:02H HLA-C*12:03H HLA-A*02:05H HLA-A*02:02H HLA-C*08:01H HLA-B*38:02H HLA-B*07:04H HLA-B*15:01H HLA-B*57:03H
VAKNLNESL

SEQ ID NO: 6827 - protein, 9 aa, Severe acute respiratory syndrome coronavirus 2
  REGION 1..9: note = Table A: HLA-A*02:04M HLA-B*14:01H HLA-A*02:01H HLA-A*02:02H HLA-A*02:03H HLA-B*38:02H
NLNESLIDL

SEQ ID NO: 6828 - protein, 9 aa, Severe acute respiratory syndrome coronavirus 2
  REGION 1..9: note = Table A: HLA-A*68:02H
ESLIDLQEL

SEQ ID NO: 6829 - protein, 9 aa, Severe acute respiratory syndrome coronavirus 2
  REGION 1..9: note = Table A: HLA-A*36:01M
LIDLQELGK

SEQ ID NO: 6830 - protein, 9 aa, Severe acute respiratory syndrome coronavirus 2
  REGION 1..9: note = Table A: HLA-B*44:02M HLA-B*44:05H HLA-C*16:04H HLA-B*44:03H HLA-B*18:01M HLA-B*35:01H HLA-B*38:02H HLA-B*07:05M
QELGKYEQY

SEQ ID NO: 6831 - protein, 9 aa, Severe acute respiratory syndrome coronavirus 2
  REGION 1..9: note = Table A: HLA-B*15:03M
GKYEQYIKW

SEQ ID NO: 6832 - protein, 9 aa, Severe acute respiratory syndrome coronavirus 2
  REGION 1..9: note = Table A: HLA-C*06:02H HLA-A*24:02M HLA-A*24:07H HLA-A*23:01M
QYIKWPWYI

SEQ ID NO: 6833 - protein, 9 aa, Severe acute respiratory syndrome coronavirus 2
  REGION 1..9: note = Table A: HLA-C*14:03H
GFIAGLIAI

SEQ ID NO: 6834 - protein, 9 aa, Severe acute respiratory syndrome coronavirus 2
  REGION 1..9: note = Table A: HLA-A*02:11H HLA-A*68:02M HLA-A*02:04H HLA-A*02:05H HLA-A*02:02H HLA-A*02:03H HLA-B*38:02H
FIAGLIAIV

SEQ ID NO: 6835 - protein, 9 aa, Severe acute respiratory syndrome coronavirus 2
  REGION 1..9: note = Table A: HLA-B*35:03H HLA-C*15:05H HLA-B*35:01H HLA-C*07:04H
IAGLIAIVM

SEQ ID NO: 6836 - protein, 9 aa, Severe acute respiratory syndrome coronavirus 2
  REGION 1..9: note = Table A: HLA-A*68:02H HLA-B*57:03H
LIAIVMVTI

SEQ ID NO: 6837 - protein, 9 aa, Severe acute respiratory syndrome coronavirus 2
  REGION 1..9: note = Table A: HLA-B*46:01H HLA-C*03:02H HLA-C*03:04H HLA-B*35:03M HLA-C*15:05H HLA-C*12:03H HLA-B*35:01H HLA-C*17:01H HLA-B*35:07H HLA-B*38:02H HLA-B*15:02H
IAIVMVTIM

SEQ ID NO: 6838 - protein, 9 aa, Severe acute respiratory syndrome coronavirus 2
  REGION 1..9: note = Table A: HLA-A*34:02H
MTSCCSCLK

SEQ ID NO: 6839 - protein, 9 aa, Severe acute respiratory syndrome coronavirus 2
  REGION 1..9: note = Table A: HLA-B*44:05H HLA-B*35:02M HLA-B*35:12M HLA-B*38:01H HLA-B*38:02H HLA-B*40:01M HLA-B*40:02H HLA-B*39:01M HLA-B*07:05H HLA-B*41:02H HLA-B*49:01H
DEDDSEPVL

SEQ ID NO: 6840 - protein, 9 aa, Severe acute respiratory syndrome coronavirus 2
  REGION 1..9: note = Table A: HLA-A*68:02H
DSEPVLKGV

SEQ ID NO: 6841 - protein, 9 aa, Severe acute respiratory syndrome coronavirus 2
  REGION 1..9: note = Table A: HLA-A*34:01H HLA-B*07:04H
EPVLKGVKL

SEQ ID NO: 6842 - protein, 9 aa, Severe acute respiratory syndrome coronavirus 2
  REGION 1..9: note = Table A: HLA-A*29:02H HLA-A*30:02H HLA-B*38:02H
VLKGVKLHY

SEQ ID NO: 6843 - protein, 10 aa, Severe acute respiratory syndrome coronavirus 2
  REGION 1..10: note = Table A: HLA-A*30:01H HLA-A*30:02M
TTRTQLPPAY

SEQ ID NO: 6844 - protein, 10 aa, Severe acute respiratory syndrome coronavirus 2
  REGION 1..10: note = Table A: HLA-B*44:05H HLA-A*25:01H HLA-B*46:01H HLA-A*24:07H HLA-B*38:01H HLA-B*38:02M HLA-B*15:01H HLA-B*15:02M
QLPPAYTNSF

SEQ ID NO: 6845 - protein, 10 aa, Severe acute respiratory syndrome coronavirus 2
  REGION 1..10: note = Table A: HLA-A*26:01H HLA-A*30:02M
YTNSFTRGVY

SEQ ID NO: 6846 - protein, 10 aa, Severe acute respiratory syndrome coronavirus 2
  REGION 1..10: note = Table A: HLA-A*11:303H HLA-A*74:01H HLA-A*03:01H HLA-A*03:02H HLA-A*11:01M HLA-A*11:02H HLA-A*33:01M HLA-A*33:03H HLA-A*26:03H HLA-A*30:02H HLA-A*68:01M HLA-A*68:02H HLA-A*34:01M HLA-A*34:02M HLA-C*07:27H
  REGION 1..10: note = CONT. FROM ABOVE: HLA-A*31:01M HLA-A*66:01H
GVYYPDKVFR

SEQ ID NO: 6847 - protein, 10 aa, Severe acute respiratory syndrome coronavirus 2
  REGION 1..10: note = Table A: HLA-C*15:05H
YPDKVFRSSV

SEQ ID NO: 6848 - protein, 10 aa, Severe acute respiratory syndrome coronavirus 2
  REGION 1..10: note = Table A: HLA-A*02:04H HLA-A*02:01H HLA-A*02:02M
VLHSTQDLFL

SEQ ID NO: 6849 - protein, 10 aa, Severe acute respiratory syndrome coronavirus 2
  REGION 1..10: note = Table A: HLA-A*02:04H
STQDLFLPFF

SEQ ID NO: 6850 - protein, 10 aa, Severe acute respiratory syndrome coronavirus 2
  REGION 1..10: note = Table A: HLA-A*68:02H
DLFLPFFSNV

SEQ ID NO: 6851 - protein, 10 aa, Severe acute respiratory syndrome coronavirus 2
  REGION 1..10: note = Table A: HLA-B*38:02H
FLPFFSNVTW

SEQ ID NO: 6852 - protein, 10 aa, Severe acute respiratory syndrome coronavirus 2
  REGION 1..10: note = Table A: HLA-B*35:07H
LPFFSNVTWF

SEQ ID NO: 6853 - protein, 10 aa, Severe acute respiratory syndrome coronavirus 2
  REGION 1..10: note = Table A: HLA-A*68:02H
NVTWFHAIHV

SEQ ID NO: 6854 - protein, 10 aa, Severe acute respiratory syndrome coronavirus 2
  REGION 1..10: note = Table A: HLA-A*66:01H
HAIHVSGTNG

SEQ ID NO: 6855 - protein, 10 aa, Severe acute respiratory syndrome coronavirus 2
  REGION 1..10: note = Table A: HLA-A*26:03M HLA-A*68:01M HLA-A*34:01M HLA-A*34:02H HLA-A*66:01M
HVSGTNGTKR

SEQ ID NO: 6856 - protein, 10 aa, Severe acute respiratory syndrome coronavirus 2
  REGION 1..10: note = Table A: HLA-A*30:01H HLA-B*57:03H
GTKRFDNPVL

SEQ ID NO: 6857 - protein, 10 aa, Severe acute respiratory syndrome coronavirus 2
  REGION 1..10: note = Table A: HLA-B*27:05M HLA-C*07:01H HLA-C*07:02H HLA-B*27:02H
KRFDNPVLPF

SEQ ID NO: 6858 - protein, 10 aa, Severe acute respiratory syndrome coronavirus 2
  REGION 1..10: note = Table A: HLA-A*24:07H
VLPFNDGVYF

SEQ ID NO: 6859 - protein, 10 aa, Severe acute respiratory syndrome coronavirus 2
  REGION 1..10: note = Table A: HLA-B*56:01H HLA-B*55:02H HLA-B*54:01H
LPFNDGVYFA

SEQ ID NO: 6860 - protein, 10 aa, Severe acute respiratory syndrome coronavirus 2
  REGION 1..10: note = Table A: HLA-B*44:02H HLA-B*44:03M
TEKSNIIRGW

SEQ ID NO: 6861 - protein, 10 aa, Severe acute respiratory syndrome coronavirus 2
  REGION 1..10: note = Table A: HLA-B*58:02M HLA-B*57:03M
KSNIIRGWIF

SEQ ID NO: 6862 - protein, 10 aa, Severe acute respiratory syndrome coronavirus 2
  REGION 1..10: note = Table A: HLA-A*34:02H
WIFGTTLDSK

SEQ ID NO: 6863 - protein, 10 aa, Severe acute respiratory syndrome coronavirus 2
  REGION 1..10: note = Table A: HLA-A*25:01H HLA-A*26:03H HLA-A*68:02H HLA-C*15:05H HLA-A*02:08H HLA-A*34:02H HLA-B*38:02H HLA-B*57:03H
TTLDSKTQSL

SEQ ID NO: 6864 - protein, 10 aa, Severe acute respiratory syndrome coronavirus 2
  REGION 1..10: note = Table A: HLA-C*15:05H
IVNNATNVVI

SEQ ID NO: 6865 - protein, 10 aa, Severe acute respiratory syndrome coronavirus 2
  REGION 1..10: note = Table A: HLA-B*57:03H
VVIKVCEFQF

SEQ ID NO: 6866 - protein, 10 aa, Severe acute respiratory syndrome coronavirus 2
  REGION 1..10: note = Table A: HLA-B*46:01H
FCNDPFLGVY

SEQ ID NO: 6867 - protein, 10 aa, Severe acute respiratory syndrome coronavirus 2
  REGION 1..10: note = Table A: HLA-A*36:01H
CNDPFLGVYY

SEQ ID NO: 6868 - protein, 10 aa, Severe acute respiratory syndrome coronavirus 2
  REGION 1..10: note = Table A: HLA-A*24:07H
VYYHKNNKSW

SEQ ID NO: 6869 - protein, 10 aa, Severe acute respiratory syndrome coronavirus 2
  REGION 1..10: note = Table A: HLA-C*14:03H HLA-A*30:02H
SWMESEFRVY

SEQ ID NO: 6870 - protein, 10 aa, Severe acute respiratory syndrome coronavirus 2
  REGION 1..10: note = Table A: HLA-B*45:01H HLA-B*50:01H
MESEFRVYSS

SEQ ID NO: 6871 - protein, 10 aa, Severe acute respiratory syndrome coronavirus 2
  REGION 1..10: note = Table A: HLA-C*14:02H HLA-C*14:03H HLA-A*24:02H HLA-A*24:07M HLA-A*23:01M
VYSSANNCTF

SEQ ID NO: 6872 - protein, 10 aa, Severe acute respiratory syndrome coronavirus 2
  REGION 1..10: note = Table A: HLA-C*04:01H HLA-C*04:03H
TFEYVSQPFL

SEQ ID NO: 6873 - protein, 10 aa, Severe acute respiratory syndrome coronavirus 2
  REGION 1..10: note = Table A: HLA-B*49:01H
FEYVSQPFLM

SEQ ID NO: 6874 - protein, 10 aa, Severe acute respiratory syndrome coronavirus 2
  REGION 1..10: note = Table A: HLA-A*68:02H
YVSQPFLMDL

SEQ ID NO: 6875 - protein, 10 aa, Severe acute respiratory syndrome coronavirus 2
  REGION 1..10: note = Table A: HLA-B*37:01H
MDLEGKQGNF

SEQ ID NO: 6876 - protein, 10 aa, Severe acute respiratory syndrome coronavirus 2
  REGION 1..10: note = Table A: HLA-A*24:07M
NFKNLREFVF

SEQ ID NO: 6877 - protein, 10 aa, Severe acute respiratory syndrome coronavirus 2
  REGION 1..10: note = Table A: HLA-B*40:06H
REFVFKNIDG

SEQ ID NO: 6878 - protein, 10 aa, Severe acute respiratory syndrome coronavirus 2
  REGION 1..10: note = Table A: HLA-A*30:01H HLA-A*30:02H HLA-A*23:01H
VFKNIDGYFK

SEQ ID NO: 6879 - protein, 10 aa, Severe acute respiratory syndrome coronavirus 2
  REGION 1..10: note = Table A: HLA-A*30:02H
KNIDGYFKIY

SEQ ID NO: 6880 - protein, 10 aa, Severe acute respiratory syndrome coronavirus 2
  REGION 1..10: note = Table A: HLA-A*24:02H HLA-A*24:07M HLA-A*23:01H
IYSKHTPINL

SEQ ID NO: 6881 - protein, 10 aa, Severe acute respiratory syndrome coronavirus 2
  REGION 1..10: note = Table A: HLA-A*68:02H
YSKHTPINLV

SEQ ID NO: 6882 - protein, 10 aa, Severe acute respiratory syndrome coronavirus 2
  REGION 1..10: note = Table A: HLA-A*02:07H
LVDLPIGINI

SEQ ID NO: 6883 - protein, 10 aa, Severe acute respiratory syndrome coronavirus 2
  REGION 1..10: note = Table A: HLA-A*26:03H HLA-A*68:01H HLA-A*34:01H
DLPIGINITR

SEQ ID NO: 6884 - protein, 10 aa, Severe acute respiratory syndrome coronavirus 2
  REGION 1..10: note = Table A: HLA-A*25:01H HLA-B*56:01H HLA-B*53:01H HLA-B*55:02H HLA-A*68:01H HLA-B*35:03H HLA-C*15:05M HLA-A*34:01M HLA-B*35:01M HLA-B*51:01H HLA-B*35:07H HLA-B*54:01H HLA-B*07:02H HLA-B*07:04H HLA-B*07:05H HLA-B*15:11H
LPIGINITRF

SEQ ID NO: 6885 - protein, 10 aa, Severe acute respiratory syndrome coronavirus 2
  REGION 1..10: note = Table A: HLA-A*02:11H HLA-A*02:04H
TLLALHRSYL

SEQ ID NO: 6886 - protein, 10 aa, Severe acute respiratory syndrome coronavirus 2
  REGION 1..10: note = Table A: HLA-B*58:01H HLA-A*25:01M HLA-A*26:03H HLA-B*57:03H
LTPGDSSSGW

SEQ ID NO: 6887 - protein, 10 aa, Severe acute respiratory syndrome coronavirus 2
  REGION 1..10: note = Table A: HLA-A*30:02H HLA-B*35:01H HLA-B*39:01H HLA-B*15:11H
SGWTAGAAAY

SEQ ID NO: 6888 - protein, 10 aa, Severe acute respiratory syndrome coronavirus 2
  REGION 1..10: note = Table A: HLA-A*29:02H
GWTAGAAAYY

SEQ ID NO: 6889 - protein, 10 aa, Severe acute respiratory syndrome coronavirus 2
  REGION 1..10: note = Table A: HLA-A*68:02H
WTAGAAAYYV

SEQ ID NO: 6890 - protein, 10 aa, Severe acute respiratory syndrome coronavirus 2
  REGION 1..10: note = Table A: HLA-C*14:03H HLA-A*74:01H HLA-A*33:01H HLA-A*33:03H HLA-A*31:01H
AYYVGYLQPR

SEQ ID NO: 6891 - protein, 10 aa, Severe acute respiratory syndrome coronavirus 2
  REGION 1..10: note = Table A: HLA-A*24:07H HLA-A*23:01H
GYLQPRTFLL

SEQ ID NO: 6892 - protein, 10 aa, Severe acute respiratory syndrome coronavirus 2
  REGION 1..10: note = Table A: HLA-A*34:02H
YLQPRTFLLK

SEQ ID NO: 6893 - protein, 10 aa, Severe acute respiratory syndrome coronavirus 2
  REGION 1..10: note = Table A: HLA-A*30:02H
LQPRTFLLKY

SEQ ID NO: 6894 - protein, 10 aa, Severe acute respiratory syndrome coronavirus 2
  REGION 1..10: note = Table A: HLA-A*02:05H HLA-A*02:08M
GTITDAVDCA

SEQ ID NO: 6895 - protein, 10 aa, Severe acute respiratory syndrome coronavirus 2
  REGION 1..10: note = Table A: HLA-B*35:03H HLA-B*35:02M HLA-B*35:12H HLA-B*38:02H HLA-B*39:01H
TITDAVDCAL

SEQ ID NO: 6896 - protein, 10 aa, Severe acute respiratory syndrome coronavirus 2
  REGION 1..10: note = Table A: HLA-A*02:11H HLA-A*02:07H HLA-A*02:01H HLA-B*38:02H
ALDPLSETKC

SEQ ID NO: 6897 - protein, 10 aa, Severe acute respiratory syndrome coronavirus 2
  REGION 1..10: note = Table A: HLA-B*35:03H HLA-C*15:05M HLA-B*35:02H HLA-B*35:12H HLA-B*07:05H
DPLSETKCTL

SEQ ID NO: 6898 - protein, 10 aa, Severe acute respiratory syndrome coronavirus 2
  REGION 1..10: note = Table A: HLA-B*44:03H
SETKCTLKSF

SEQ ID NO: 6899 - protein, 10 aa, Severe acute respiratory syndrome coronavirus 2
  REGION 1..10: note = Table A: HLA-A*11:01H HLA-A*11:02H HLA-A*34:02H
CTLKSFTVEK

SEQ ID NO: 6900 - protein, 10 aa, Severe acute respiratory syndrome coronavirus 2
  REGION 1..10: note = Table A: HLA-A*02:02H HLA-A*02:03H
TLKSFTVEKG

SEQ ID NO: 6901 - protein, 10 aa, Severe acute respiratory syndrome coronavirus 2
  REGION 1..10: note = Table A: HLA-B*58:01H HLA-A*36:01M HLA-B*57:01H HLA-A*30:02M HLA-B*15:01H HLA-B*57:03H
KSFTVEKGIY

SEQ ID NO: 6902 - protein, 10 aa, Severe acute respiratory syndrome coronavirus 2
  REGION 1..10: note = Table A: HLA-A*02:11H HLA-A*68:02M HLA-A*02:05M HLA-A*02:06H HLA-A*02:08H HLA-A*02:02H
FTVEKGIYQT

SEQ ID NO: 6903 - protein, 10 aa, Severe acute respiratory syndrome coronavirus 2
  REGION 1..10: note = Table A: HLA-A*11:303H HLA-A*74:01H HLA-A*03:01H HLA-A*03:02M HLA-A*11:01M HLA-A*11:02M HLA-A*36:01H HLA-A*30:02H HLA-A*31:01H
RVQPTESIVR

SEQ ID NO: 6904 - protein, 10 aa, Severe acute respiratory syndrome coronavirus 2
  REGION 1..10: note = Table A: HLA-A*23:01H HLA-B*15:01M HLA-B*13:01H
VQPTESIVRF

SEQ ID NO: 6905 - protein, 10 aa, Severe acute respiratory syndrome coronavirus 2
  REGION 1..10: note = Table A: HLA-B*07:02H HLA-B*07:04M
IVRFPNITNL

SEQ ID NO: 6906 - protein, 10 aa, Severe acute respiratory syndrome coronavirus 2
  REGION 1..10: note = Table A: HLA-B*56:01H HLA-B*55:02H
CPFGEVFNAT

SEQ ID NO: 6907 - protein, 10 aa, Severe acute respiratory syndrome coronavirus 2
  REGION 1..10: note = Table A: HLA-B*45:01H HLA-B*40:06H HLA-B*50:01M
GEVFNATRFA

SEQ ID NO: 6908 - protein, 10 aa, Severe acute respiratory syndrome coronavirus 2
  REGION 1..10: note = Table A: HLA-B*57:01H HLA-A*32:01H HLA-B*57:03M
ATRFASVYAW

SEQ ID NO: 6909 - protein, 10 aa, Severe acute respiratory syndrome coronavirus 2
  REGION 1..10: note = Table A: HLA-A*74:01M HLA-A*31:01H
RFASVYAWNR

SEQ ID NO: 6910 - protein, 10 aa, Severe acute respiratory syndrome coronavirus 2
  REGION 1..10: note = Table A: HLA-B*35:01H
NCVADYSVLY

SEQ ID NO: 6911 - protein, 10 aa, Severe acute respiratory syndrome coronavirus 2
  REGION 1..10: note = Table A: HLA-B*50:01H
ADYSVLYNSA

SEQ ID NO: 6912 - protein, 10 aa, Severe acute respiratory syndrome coronavirus 2
  REGION 1..10: note = Table A: HLA-C*14:02H HLA-C*14:03H HLA-A*24:02M HLA-A*24:07M HLA-A*23:01M
LYNSASFSTF

SEQ ID NO: 6913 - protein, 10 aa, Severe acute respiratory syndrome coronavirus 2
  REGION 1..10: note = Table A: HLA-A*34:02H
YNSASFSTFK

SEQ ID NO: 6914 - protein, 10 aa, Severe acute respiratory syndrome coronavirus 2
  REGION 1..10: note = Table A: HLA-A*68:02H HLA-A*31:01H
ASFSTFKCYG

SEQ ID NO: 6915 - protein, 10 aa, Severe acute respiratory syndrome coronavirus 2
  REGION 1..10: note = Table A: HLA-A*03:01H HLA-A*02:08H
KCYGVSPTKL

SEQ ID NO: 6916 - protein, 10 aa, Severe acute respiratory syndrome coronavirus 2
  REGION 1..10: note = Table A: HLA-A*02:02H
GVSPTKLNDL

SEQ ID NO: 6917 - protein, 10 aa, Severe acute respiratory syndrome coronavirus 2
  REGION 1..10: note = Table A: HLA-C*15:05H
SPTKLNDLCF

SEQ ID NO: 6918 - protein, 10 aa, Severe acute respiratory syndrome coronavirus 2
  REGION 1..10: note = Table A: HLA-A*02:11H HLA-A*02:03H
KLNDLCFTNV

SEQ ID NO: 6919 - protein, 10 aa, Severe acute respiratory syndrome coronavirus 2
  REGION 1..10: note = Table A: HLA-A*33:01H HLA-A*33:03H HLA-A*68:01M HLA-A*68:02H HLA-A*34:01M HLA-A*34:02M HLA-A*66:01M
NVYADSFVIR

SEQ ID NO: 6920 - protein, 10 aa, Severe acute respiratory syndrome coronavirus 2
  REGION 1..10: note = Table A: HLA-A*68:02M HLA-B*38:02H
DSFVIRGDEV

SEQ ID NO: 6921 - protein, 10 aa, Severe acute respiratory syndrome coronavirus 2
  REGION 1..10: note = Table A: HLA-A*02:03H HLA-B*07:04H
VIRGDEVRQI

SEQ ID NO: 6922 - protein, 10 aa, Severe acute respiratory syndrome coronavirus 2
  REGION 1..10: note = Table A: HLA-A*03:01H HLA-A*03:02H HLA-A*11:01H HLA-A*11:02H
RQIAPGQTGK

SEQ ID NO: 6923 - protein, 10 aa, Severe acute respiratory syndrome coronavirus 2
  REGION 1..10: note = Table A: HLA-B*53:01H HLA-B*55:02H HLA-B*35:03M HLA-C*15:05M HLA-B*35:01H HLA-B*35:02M HLA-B*35:08H HLA-B*51:01H HLA-C*08:01H HLA-B*35:12M HLA-B*38:02M HLA-B*54:01H HLA-B*07:05H
LPDDFTGCVI

SEQ ID NO: 6924 - protein, 10 aa, Severe acute respiratory syndrome coronavirus 2
  REGION 1..10: note = Table A: HLA-A*36:01M HLA-A*01:01M HLA-A*30:02H
NLDSKVGGNY

SEQ ID NO: 6925 - protein, 10 aa, Severe acute respiratory syndrome coronavirus 2
  REGION 1..10: note = Table A: HLA-A*36:01H HLA-A*29:02H HLA-A*30:02H
KVGGNYNYLY

SEQ ID NO: 6926 - protein, 10 aa, Severe acute respiratory syndrome coronavirus 2
  REGION 1..10: note = Table A: HLA-B*18:01H
FERDISTEIY

SEQ ID NO: 6927 - protein, 10 aa, Severe acute respiratory syndrome coronavirus 2
  REGION 1..10: note = Table A: HLA-B*40:06H
RDISTEIYQA

SEQ ID NO: 6928 - protein, 10 aa, Severe acute respiratory syndrome coronavirus 2
  REGION 1..10: note = Table A: HLA-A*68:02H
DISTEIYQAG

SEQ ID NO: 6929 - protein, 10 aa, Severe acute respiratory syndrome coronavirus 2
  REGION 1..10: note = Table A: HLA-B*50:01H
TEIYQAGSTP

SEQ ID NO: 6930 - protein, 10 aa, Severe acute respiratory syndrome coronavirus 2
  REGION 1..10: note = Table A: HLA-B*39:01H
YQAGSTPCNG

SEQ ID NO: 6931 - protein, 10 aa, Severe acute respiratory syndrome coronavirus 2
  REGION 1..10: note = Table A: HLA-A*24:02H HLA-A*24:07M HLA-A*23:01H
CYFPLQSYGF

SEQ ID NO: 6932 - protein, 10 aa, Severe acute respiratory syndrome coronavirus 2
  REGION 1..10: note = Table A: HLA-A*29:01H HLA-A*29:02H HLA-B*27:02H HLA-A*30:02M HLA-B*15:01H HLA-B*39:01H HLA-B*07:05H
GFQPTNGVGY

SEQ ID NO: 6933 - protein, 10 aa, Severe acute respiratory syndrome coronavirus 2
  REGION 1..10: note = Table A: HLA-B*55:02H
QPTNGVGYQP

SEQ ID NO: 6934 - protein, 10 aa, Severe acute respiratory syndrome coronavirus 2
  REGION 1..10: note = Table A: HLA-B*52:01H
VGYQPYRVVV

SEQ ID NO: 6935 - protein, 10 aa, Severe acute respiratory syndrome coronavirus 2
  REGION 1..10: note = Table A: HLA-C*15:05H
QPYRVVVLSF

SEQ ID NO: 6936 - protein, 10 aa, Severe acute respiratory syndrome coronavirus 2
  REGION 1..10: note = Table A: HLA-B*57:03H
RVVVLSFELL

SEQ ID NO: 6937 - protein, 10 aa, Severe acute respiratory syndrome coronavirus 2
  REGION 1..10: note = Table A: HLA-A*02:11H HLA-A*02:05H HLA-A*02:06M HLA-A*02:01H HLA-A*02:03H
VVLSFELLHA

SEQ ID NO: 6938 - protein, 10 aa, Severe acute respiratory syndrome coronavirus 2
  REGION 1..10: note = Table A: HLA-A*02:03H HLA-B*40:02H HLA-B*40:06H HLA-B*49:01H HLA-B*50:01H
FELLHAPATV

SEQ ID NO: 6939 - protein, 10 aa, Severe acute respiratory syndrome coronavirus 2
  REGION 1..10: note = Table A: HLA-A*02:11H HLA-A*02:01H HLA-A*02:02H
LLHAPATVCG

SEQ ID NO: 6940 - protein, 10 aa, Severe acute respiratory syndrome coronavirus 2
  REGION 1..10: note = Table A: HLA-A*34:02H
HAPATVCGPK

SEQ ID NO: 6941 - protein, 10 aa, Severe acute respiratory syndrome coronavirus 2
  REGION 1..10: note = Table A: HLA-A*03:02M HLA-A*11:01M HLA-C*07:27H
GTGVLTESNK

SEQ ID NO: 6942 - protein, 10 aa, Severe acute respiratory syndrome coronavirus 2
  REGION 1..10: note = Table A: HLA-A*74:01M HLA-A*31:01H
KFLPFQQFGR

SEQ ID NO: 6943 - protein, 10 aa, Severe acute respiratory syndrome coronavirus 2
  REGION 1..10: note = Table A: HLA-C*15:05H HLA-B*51:01H HLA-B*07:04H
LPFQQFGRDI

SEQ ID NO: 6944 - protein, 10 aa, Severe acute respiratory syndrome coronavirus 2
  REGION 1..10: note = Table A: HLA-A*33:01H HLA-A*26:03M HLA-A*68:01M HLA-A*68:02H HLA-A*34:01H HLA-A*34:02H HLA-A*66:01M
DIADTTDAVR

SEQ ID NO: 6945 - protein, 10 aa, Severe acute respiratory syndrome coronavirus 2
  REGION 1..10: note = Table A: HLA-C*15:05H HLA-B*38:02H HLA-B*07:02H HLA-B*07:04H
AVRDPQTLEI

SEQ ID NO: 6946 - protein, 10 aa, Severe acute respiratory syndrome coronavirus 2
  REGION 1..10: note = Table A: HLA-B*38:02H
VRDPQTLEIL

SEQ ID NO: 6947 - protein, 10 aa, Severe acute respiratory syndrome coronavirus 2
  REGION 1..10: note = Table A: HLA-A*25:01H HLA-A*26:01H HLA-A*26:02H HLA-A*26:03M HLA-A*68:02H HLA-A*34:02H HLA-B*38:02H HLA-B*39:01H
EILDITPCSF

SEQ ID NO: 6948 - protein, 10 aa, Severe acute respiratory syndrome coronavirus 2
  REGION 1..10: note = Table A: HLA-B*56:01M HLA-B*55:02M HLA-C*15:05H HLA-B*55:01H HLA-B*54:01M HLA-B*07:05H
TPCSFGGVSV

SEQ ID NO: 6949 - protein, 10 aa, Severe acute respiratory syndrome coronavirus 2
  REGION 1..10: note = Table A: HLA-A*02:08H
SVITPGTNTS

SEQ ID NO: 6950 - protein, 10 aa, Severe acute respiratory syndrome coronavirus 2
  REGION 1..10: note = Table A: HLA-A*29:02H
NTSNQVAVLY

SEQ ID NO: 6951 - protein, 10 aa, Severe acute respiratory syndrome coronavirus 2
  REGION 1..10: note = Table A: HLA-B*53:01H HLA-B*35:03M HLA-C*15:05H HLA-B*35:01M HLA-B*35:02M HLA-B*35:08H HLA-B*35:07M HLA-C*08:01H HLA-B*35:12M HLA-B*38:02H HLA-B*07:02H HLA-B*07:05M
VPVAIHADQL

SEQ ID NO: 6952 - protein, 10 aa, Severe acute respiratory syndrome coronavirus 2
  REGION 1..10: note = Table A: HLA-B*38:01M HLA-B*38:02M HLA-B*39:01H
IHADQLTPTW

SEQ ID NO: 6953 - protein, 10 aa, Severe acute respiratory syndrome coronavirus 2
  REGION 1..10: note = Table A: HLA-B*15:02H
DQLTPTWRVY

SEQ ID NO: 6954 - protein, 10 aa, Severe acute respiratory syndrome coronavirus 2
  REGION 1..10: note = Table A: HLA-A*30:02H HLA-C*15:05H HLA-B*38:02H HLA-A*32:01H HLA-B*15:01M HLA-B*15:03H HLA-B*07:05H HLA-B*57:03M HLA-B*13:01H
RVYSTGSNVF

SEQ ID NO: 6955 - protein, 10 aa, Severe acute respiratory syndrome coronavirus 2
  REGION 1..10: note = Table A: HLA-A*11:303H HLA-A*74:01M HLA-A*03:01H HLA-A*03:02H HLA-A*11:01H HLA-A*11:02M HLA-A*36:01H HLA-B*57:01H HLA-A*33:01H HLA-A*33:03H HLA-A*26:03M HLA-B*27:02H HLA-A*30:02H HLA-A*68:01H HLA-A*68:02M
  REGION 1..10: note = CONT. FROM ABOVE: HLA-A*34:01M HLA-A*34:02M HLA-C*07:27H HLA- A*31:01M HLA-A*66:01M
STGSNVFQTR

SEQ ID NO: 6956 - protein, 10 aa, Severe acute respiratory syndrome coronavirus 2
  REGION 1..10: note = Table A: HLA-B*58:01H HLA-B*46:01M HLA-A*30:02M HLA-B*35:01H HLA-B*38:02M HLA-B*15:01M HLA-B*15:02H HLA-B*15:03H HLA-B*07:05H HLA-B*15:11H
IGAEHVNNSY

SEQ ID NO: 6957 - protein, 10 aa, Severe acute respiratory syndrome coronavirus 2
  REGION 1..10: note = Table A: HLA-B*45:01H
AEHVNNSYEC

SEQ ID NO: 6958 - protein, 10 aa, Severe acute respiratory syndrome coronavirus 2
  REGION 1..10: note = Table A: HLA-B*56:01H HLA-B*55:02H
IPIGAGICAS

SEQ ID NO: 6959 - protein, 10 aa, Severe acute respiratory syndrome coronavirus 2
  REGION 1..10: note = Table A: HLA-C*14:02H HLA-C*14:03H HLA-A*03:02H HLA-A*11:01H HLA-A*33:01M HLA-A*33:03H HLA-B*27:02H HLA-A*30:02H HLA-A*68:01H HLA-A*31:01M HLA-A*66:01H
SYQTQTNSPR

SEQ ID NO: 6960 - protein, 10 aa, Severe acute respiratory syndrome coronavirus 2
  REGION 1..10: note = Table A: HLA-A*03:01H HLA-A*03:02H HLA-A*11:01M HLA-A*11:02H HLA-A*25:01M HLA-B*46:01H HLA-A*26:01M HLA-A*26:02M HLA-A*26:03H HLA-A*29:01H HLA-A*29:02H HLA-A*30:02M HLA-A*68:01H HLA-C*15:05H HLA-A*34:02H HLA-C*07:27H
  REGION 1..10: note = CONT. FROM ABOVE: HLA-B*35:01M HLA-B*35:07H HLA-B*38:02M HLA- B*15:01M HLA-B*15:02M HLA-B*39:01H HLA-B*07:05M
SVASQSIIAY

SEQ ID NO: 6961 - protein, 10 aa, Severe acute respiratory syndrome coronavirus 2
  REGION 1..10: note = Table A: HLA-A*68:02H
VASQSIIAYT

SEQ ID NO: 6962 - protein, 10 aa, Severe acute respiratory syndrome coronavirus 2
  REGION 1..10: note = Table A: HLA-B*38:02H
TMSLGAENSV

SEQ ID NO: 6963 - protein, 10 aa, Severe acute respiratory syndrome coronavirus 2
  REGION 1..10: note = Table A: HLA-B*38:02H HLA-B*15:01M HLA-B*15:02M
SLGAENSVAY

SEQ ID NO: 6964 - protein, 10 aa, Severe acute respiratory syndrome coronavirus 2
  REGION 1..10: note = Table A: HLA-C*15:05H
VAYSNNSIAI

SEQ ID NO: 6965 - protein, 10 aa, Severe acute respiratory syndrome coronavirus 2
  REGION 1..10: note = Table A: HLA-B*55:02H
IPTNFTISVT

SEQ ID NO: 6966 - protein, 10 aa, Severe acute respiratory syndrome coronavirus 2
  REGION 1..10: note = Table A: HLA-A*68:02H
FTISVTTEIL

SEQ ID NO: 6967 - protein, 10 aa, Severe acute respiratory syndrome coronavirus 2
  REGION 1..10: note = Table A: HLA-A*68:02H HLA-C*15:05H HLA-B*57:03H
VTTEILPVSM

SEQ ID NO: 6968 - protein, 10 aa, Severe acute respiratory syndrome coronavirus 2
  REGION 1..10: note = Table A: HLA-B*56:01H HLA-B*55:02H HLA-C*15:05H HLA-B*51:01H HLA-B*54:01H
LPVSMTKTSV

SEQ ID NO: 6969 - protein, 10 aa, Severe acute respiratory syndrome coronavirus 2
  REGION 1..10: note = Table A: HLA-B*57:03H
KTSVDCTMYI

SEQ ID NO: 6970 - protein, 10 aa, Severe acute respiratory syndrome coronavirus 2
  REGION 1..10: note = Table A: HLA-B*44:03H HLA-B*07:05H
TECSNLLLQY

SEQ ID NO: 6971 - protein, 10 aa, Severe acute respiratory syndrome coronavirus 2
  REGION 1..10: note = Table A: HLA-A*02:06H HLA-A*02:03H HLA-B*38:02H HLA-B*13:02M
TQLNRALTGI

SEQ ID NO: 6972 - protein, 10 aa, Severe acute respiratory syndrome coronavirus 2
  REGION 1..10: note = Table A: HLA-B*45:01H HLA-B*41:02H HLA-B*49:01H
VEQDKNTQEV

SEQ ID NO: 6973 - protein, 10 aa, Severe acute respiratory syndrome coronavirus 2
  REGION 1..10: note = Table A: HLA-B*44:05H HLA-B*38:01M HLA-B*38:02M HLA-B*15:02H HLA-B*39:01M HLA-B*13:01M
EQDKNTQEVF

SEQ ID NO: 6974 - protein, 10 aa, Severe acute respiratory syndrome coronavirus 2
  REGION 1..10: note = Table A: HLA-A*03:02H HLA-A*11:01H HLA-A*11:02H HLA-A*36:01H HLA-A*68:01H HLA-A*34:02M
NTQEVFAQVK

SEQ ID NO: 6975 - protein, 10 aa, Severe acute respiratory syndrome coronavirus 2
  REGION 1..10: note = Table A: HLA-B*44:02H HLA-B*44:05M HLA-B*44:03M HLA-B*40:02H HLA-B*49:01M
QEVFAQVKQI

SEQ ID NO: 6976 - protein, 10 aa, Severe acute respiratory syndrome coronavirus 2
  REGION 1..10: note = Table A: HLA-A*25:01M HLA-A*26:01M HLA-A*26:02M HLA-A*26:03H HLA-A*34:01H HLA-A*34:02H HLA-B*35:01H HLA-B*35:07H HLA-B*38:02H HLA-B*15:02M
EVFAQVKQIY

SEQ ID NO: 6977 - protein, 10 aa, Severe acute respiratory syndrome coronavirus 2
  REGION 1..10: note = Table A: HLA-A*30:01H HLA-A*34:02H
VFAQVKQIYK

SEQ ID NO: 6978 - protein, 10 aa, Severe acute respiratory syndrome coronavirus 2
  REGION 1..10: note = Table A: HLA-A*30:01H
KQIYKTPPIK

SEQ ID NO: 6979 - protein, 10 aa, Severe acute respiratory syndrome coronavirus 2
  REGION 1..10: note = Table A: HLA-C*14:03H HLA-A*24:07H
IYKTPPIKDF

SEQ ID NO: 6980 - protein, 10 aa, Severe acute respiratory syndrome coronavirus 2
  REGION 1..10: note = Table A: HLA-A*11:01H
FSQILPDPSK

SEQ ID NO: 6981 - protein, 10 aa, Severe acute respiratory syndrome coronavirus 2
  REGION 1..10: note = Table A: HLA-A*74:01H HLA-A*03:01H HLA-A*03:02H HLA-A*11:01H HLA-A*11:02H HLA-A*30:02H
ILPDPSKPSK

SEQ ID NO: 6982 - protein, 10 aa, Severe acute respiratory syndrome coronavirus 2
  REGION 1..10: note = Table A: HLA-A*34:01H
LPDPSKPSKR

SEQ ID NO: 6983 - protein, 10 aa, Severe acute respiratory syndrome coronavirus 2
  REGION 1..10: note = Table A: HLA-A*02:11H HLA-A*02:06H HLA-A*02:07M
FIEDLLFNKV

SEQ ID NO: 6984 - protein, 10 aa, Severe acute respiratory syndrome coronavirus 2
  REGION 1..10: note = Table A: HLA-B*44:05H
EDLLFNKVTL

SEQ ID NO: 6985 - protein, 10 aa, Severe acute respiratory syndrome coronavirus 2
  REGION 1..10: note = Table A: HLA-A*11:01H HLA-A*11:02H HLA-A*36:01H HLA-A*34:02H
VTLADAGFIK

SEQ ID NO: 6986 - protein, 10 aa, Severe acute respiratory syndrome coronavirus 2
  REGION 1..10: note = Table A: HLA-A*36:01H
LADAGFIKQY

SEQ ID NO: 6987 - protein, 10 aa, Severe acute respiratory syndrome coronavirus 2
  REGION 1..10: note = Table A: HLA-A*68:02H HLA-A*02:02H
ADAGFIKQYG

SEQ ID NO: 6988 - protein, 10 aa, Severe acute respiratory syndrome coronavirus 2
  REGION 1..10: note = Table A: HLA-B*15:01H
AQKFNGLTVL

SEQ ID NO: 6989 - protein, 10 aa, Severe acute respiratory syndrome coronavirus 2
  REGION 1..10: note = Table A: HLA-B*45:01H HLA-B*18:01H HLA-B*07:05H HLA-B*50:01H
DEMIAQYTSA

SEQ ID NO: 6990 - protein, 10 aa, Severe acute respiratory syndrome coronavirus 2
  REGION 1..10: note = Table A: HLA-A*26:03H HLA-B*38:02H
EMIAQYTSAL

SEQ ID NO: 6991 - protein, 10 aa, Severe acute respiratory syndrome coronavirus 2
  REGION 1..10: note = Table A: HLA-A*68:02H HLA-A*34:01H
MIAQYTSALL

SEQ ID NO: 6992 - protein, 10 aa, Severe acute respiratory syndrome coronavirus 2
  REGION 1..10: note = Table A: HLA-A*68:02H
YTSALLAGTI

SEQ ID NO: 6993 - protein, 10 aa, Severe acute respiratory syndrome coronavirus 2
  REGION 1..10: note = Table A: HLA-A*25:01H HLA-B*15:13H HLA-B*38:02H
LLAGTITSGW

SEQ ID NO: 6994 - protein, 10 aa, Severe acute respiratory syndrome coronavirus 2
  REGION 1..10: note = Table A: HLA-C*08:03H
GAGAALQIPF

SEQ ID NO: 6995 - protein, 10 aa, Severe acute respiratory syndrome coronavirus 2
  REGION 1..10: note = Table A: HLA-A*02:05H
LQIPFAMQMA

SEQ ID NO: 6996 - protein, 10 aa, Severe acute respiratory syndrome coronavirus 2
  REGION 1..10: note = Table A: HLA-A*36:01H
QIPFAMQMAY

SEQ ID NO: 6997 - protein, 10 aa, Severe acute respiratory syndrome coronavirus 2
  REGION 1..10: note = Table A: HLA-A*34:01H
IPFAMQMAYR

SEQ ID NO: 6998 - protein, 10 aa, Severe acute respiratory syndrome coronavirus 2
  REGION 1..10: note = Table A: HLA-A*24:07H
PFAMQMAYRF

SEQ ID NO: 6999 - protein, 10 aa, Severe acute respiratory syndrome coronavirus 2
  REGION 1..10: note = Table A: HLA-A*02:11H HLA-A*68:02H HLA-B*54:01H
MAYRFNGIGV

SEQ ID NO: 7000 - protein, 10 aa, Severe acute respiratory syndrome coronavirus 2
  REGION 1..10: note = Table A: HLA-B*27:05M HLA-B*27:02H
YRFNGIGVTQ

SEQ ID NO: 7001 - protein, 10 aa, Severe acute respiratory syndrome coronavirus 2
  REGION 1..10: note = Table A: HLA-B*35:03H
NGIGVTQNVL

SEQ ID NO: 7002 - protein, 10 aa, Severe acute respiratory syndrome coronavirus 2
  REGION 1..10: note = Table A: HLA-B*27:02H
TQNVLYENQK

SEQ ID NO: 7003 - protein, 10 aa, Severe acute respiratory syndrome coronavirus 2
  REGION 1..10: note = Table A: HLA-B*56:01H HLA-A*02:11H HLA-B*55:02H HLA-B*55:01H HLA-B*14:01H HLA-A*02:01H HLA-A*02:02M HLA-A*02:03M HLA-C*08:01H HLA-B*38:02H HLA-B*54:01H HLA-B*13:02H HLA-B*50:01H
VLYENQKLIA

SEQ ID NO: 7004 - protein, 10 aa, Severe acute respiratory syndrome coronavirus 2
  REGION 1..10: note = Table A: HLA-B*56:01H HLA-A*02:11H HLA-B*55:02H HLA-A*02:05H HLA-A*02:06H HLA-A*02:08M HLA-A*02:02H HLA-A*02:03H HLA-B*38:02H HLA-B*40:06H HLA-B*50:01H
KLIANQFNSA

SEQ ID NO: 7005 - protein, 10 aa, Severe acute respiratory syndrome coronavirus 2
  REGION 1..10: note = Table A: HLA-A*03:02H HLA-A*11:01H
ANQFNSAIGK

SEQ ID NO: 7006 - protein, 10 aa, Severe acute respiratory syndrome coronavirus 2
  REGION 1..10: note = Table A: HLA-A*02:05H HLA-A*02:08H HLA-B*38:02H HLA-B*13:02H
NQFNSAIGKI

SEQ ID NO: 7007 - protein, 10 aa, Severe acute respiratory syndrome coronavirus 2
  REGION 1..10: note = Table A: HLA-A*11:303H HLA-C*03:03H HLA-C*12:05H HLA-C*03:04H HLA-A*68:02H HLA-B*35:03H HLA-C*15:05H HLA-A*02:05H HLA-A*02:08H HLA-B*35:02H HLA-C*08:01M HLA-C*08:03H HLA-B*35:12H HLA-B*38:02M HLA-B*07:05H
  REGION 1..10: note = CONT. FROM ABOVE: HLA-B*57:03H
SAIGKIQDSL

SEQ ID NO: 7008 - protein, 10 aa, Severe acute respiratory syndrome coronavirus 2
  REGION 1..10: note = Table A: HLA-A*34:02H
LSSTASALGK

SEQ ID NO: 7009 - protein, 10 aa, Severe acute respiratory syndrome coronavirus 2
  REGION 1..10: note = Table A: HLA-A*03:02H HLA-A*02:11H HLA-A*02:04H HLA-A*02:05H HLA-A*02:08M HLA-A*02:01M HLA-A*02:02H HLA-A*02:03M HLA-B*38:02H HLA-B*13:02H
KLQDVVNQNA

SEQ ID NO: 7010 - protein, 10 aa, Severe acute respiratory syndrome coronavirus 2
  REGION 1..10: note = Table A: HLA-A*25:01H HLA-A*26:02H HLA-A*26:03M HLA-A*68:01H HLA-A*68:02H
DVVNQNAQAL

SEQ ID NO: 7011 - protein, 10 aa, Severe acute respiratory syndrome coronavirus 2
  REGION 1..10: note = Table A: HLA-B*38:02H HLA-B*39:01H
NQNAQALNTL

SEQ ID NO: 7012 - protein, 10 aa, Severe acute respiratory syndrome coronavirus 2
  REGION 1..10: note = Table A: HLA-B*38:02H
TLVKQLSSNF

SEQ ID NO: 7013 - protein, 10 aa, Severe acute respiratory syndrome coronavirus 2
  REGION 1..10: note = Table A: HLA-A*68:02H HLA-C*15:05H
SSNFGAISSV

SEQ ID NO: 7014 - protein, 10 aa, Severe acute respiratory syndrome coronavirus 2
  REGION 1..10: note = Table A: HLA-A*11:02H HLA-A*02:11H HLA-A*68:02H HLA-A*02:04H HLA-A*02:05H HLA-A*02:06H HLA-A*02:08H HLA-A*02:02H HLA-A*34:01H HLA-A*34:02H HLA-A*66:01H
SVLNDILSRL

SEQ ID NO: 7015 - protein, 10 aa, Severe acute respiratory syndrome coronavirus 2
  REGION 1..10: note = Table A: HLA-B*44:05M HLA-B*44:03H HLA-A*68:02H HLA-B*38:02H HLA-B*40:01H HLA-B*40:02M HLA-B*41:02H HLA-B*49:01H
VEAEVQIDRL

SEQ ID NO: 7016 - protein, 10 aa, Severe acute respiratory syndrome coronavirus 2
  REGION 1..10: note = Table A: HLA-B*45:01H HLA-B*40:02H HLA-B*40:06H HLA-B*41:02H HLA-B*49:01H HLA-B*50:01H
AEVQIDRLIT

SEQ ID NO: 7017 - protein, 10 aa, Severe acute respiratory syndrome coronavirus 2
  REGION 1..10: note = Table A: HLA-A*74:01M HLA-A*31:01M
VQIDRLITGR

SEQ ID NO: 7018 - protein, 10 aa, Severe acute respiratory syndrome coronavirus 2
  REGION 1..10: note = Table A: HLA-A*74:01H HLA-B*46:01H HLA-B*08:01H HLA-A*02:11H HLA-C*01:02H HLA-A*02:04M HLA-A*02:05H HLA-A*02:08H HLA-A*02:01H HLA-A*02:02M HLA-A*02:03M HLA-B*38:02H HLA-B*07:04H HLA-B*13:01H HLA-B*13:02H
RLITGRLQSL

SEQ ID NO: 7019 - protein, 10 aa, Severe acute respiratory syndrome coronavirus 2
  REGION 1..10: note = Table A: HLA-A*02:04H HLA-A*02:02H HLA-B*38:02H
SLQTYVTQQL

SEQ ID NO: 7020 - protein, 10 aa, Severe acute respiratory syndrome coronavirus 2
  REGION 1..10: note = Table A: HLA-B*13:02H
LQTYVTQQLI

SEQ ID NO: 7021 - protein, 10 aa, Severe acute respiratory syndrome coronavirus 2
  REGION 1..10: note = Table A: HLA-A*74:01H HLA-A*36:01H HLA-A*68:01H HLA-A*34:01H HLA-A*34:02H HLA-A*66:01H
QTYVTQQLIR

SEQ ID NO: 7022 - protein, 10 aa, Severe acute respiratory syndrome coronavirus 2
  REGION 1..10: note = Table A: HLA-B*56:01H HLA-B*55:02H HLA-B*55:01H HLA-A*02:08H HLA-B*54:01H
YVTQQLIRAA

SEQ ID NO: 7023 - protein, 10 aa, Severe acute respiratory syndrome coronavirus 2
  REGION 1..10: note = Table A: HLA-B*38:02H
TQQLIRAAEI

SEQ ID NO: 7024 - protein, 10 aa, Severe acute respiratory syndrome coronavirus 2
  REGION 1..10: note = Table A: HLA-B*44:05H HLA-B*45:01H HLA-B*40:02H HLA-B*40:06M HLA-B*41:02H HLA-B*49:01M HLA-B*50:01H
AEIRASANLA

SEQ ID NO: 7025 - protein, 10 aa, Severe acute respiratory syndrome coronavirus 2
  REGION 1..10: note = Table A: HLA-A*03:01H HLA-A*03:02M
RASANLAATK

SEQ ID NO: 7026 - protein, 10 aa, Severe acute respiratory syndrome coronavirus 2
  REGION 1..10: note = Table A: HLA-A*68:01H HLA-C*15:05H HLA-B*57:03H
ASANLAATKM

SEQ ID NO: 7027 - protein, 10 aa, Severe acute respiratory syndrome coronavirus 2
  REGION 1..10: note = Table A: HLA-A*36:01H
MSECVLGQSK

SEQ ID NO: 7028 - protein, 10 aa, Severe acute respiratory syndrome coronavirus 2
  REGION 1..10: note = Table A: HLA-B*13:02H
GQSKRVDFCG

SEQ ID NO: 7029 - protein, 10 aa, Severe acute respiratory syndrome coronavirus 2
  REGION 1..10: note = Table A: HLA-B*27:05H
KRVDFCGKGY

SEQ ID NO: 7030 - protein, 10 aa, Severe acute respiratory syndrome coronavirus 2
  REGION 1..10: note = Table A: HLA-A*02:02H
VDFCGKGYHL

SEQ ID NO: 7031 - protein, 10 aa, Severe acute respiratory syndrome coronavirus 2
  REGION 1..10: note = Table A: HLA-B*39:06M
YHLMSFPQSA

SEQ ID NO: 7032 - protein, 10 aa, Severe acute respiratory syndrome coronavirus 2
  REGION 1..10: note = Table A: HLA-B*55:02H HLA-B*54:01H
FPQSAPHGVV

SEQ ID NO: 7033 - protein, 10 aa, Severe acute respiratory syndrome coronavirus 2
  REGION 1..10: note = Table A: HLA-B*15:01H
PQSAPHGVVF

SEQ ID NO: 7034 - protein, 10 aa, Severe acute respiratory syndrome coronavirus 2
  REGION 1..10: note = Table A: HLA-C*15:02H HLA-B*57:03H
QSAPHGVVFL

SEQ ID NO: 7035 - protein, 10 aa, Severe acute respiratory syndrome coronavirus 2
  REGION 1..10: note = Table A: HLA-B*56:01M HLA-B*55:02M HLA-C*15:05H HLA-B*55:01H HLA-B*07:04H
APHGVVFLHV

SEQ ID NO: 7036 - protein, 10 aa, Severe acute respiratory syndrome coronavirus 2
  REGION 1..10: note = Table A: HLA-A*03:01H HLA-A*03:02M HLA-A*11:01H HLA-A*11:02H HLA-A*36:01H HLA-B*27:02H HLA-A*68:01M HLA-A*68:02H HLA-A*34:01H HLA-A*34:02H HLA-A*66:01H
HVTYVPAQEK

SEQ ID NO: 7037 - protein, 10 aa, Severe acute respiratory syndrome coronavirus 2
  REGION 1..10: note = Table A: HLA-A*24:02H HLA-A*24:07M HLA-A*23:01M
TYVPAQEKNF

SEQ ID NO: 7038 - protein, 10 aa, Severe acute respiratory syndrome coronavirus 2
  REGION 1..10: note = Table A: HLA-A*68:02H
TTAPAICHDG

SEQ ID NO: 7039 - protein, 10 aa, Severe acute respiratory syndrome coronavirus 2
  REGION 1..10: note = Table A: HLA-C*06:02H HLA-A*02:11H HLA-A*68:02H HLA-A*02:05H HLA-A*02:02H HLA-B*38:01H HLA-B*38:02M HLA-B*39:06H HLA-B*39:01H HLA-B*15:10M
AHFPREGVFV

SEQ ID NO: 7040 - protein, 10 aa, Severe acute respiratory syndrome coronavirus 2
  REGION 1..10: note = Table A: HLA-B*56:01H HLA-B*55:02H HLA-B*54:01H
FPREGVFVSN

SEQ ID NO: 7041 - protein, 10 aa, Severe acute respiratory syndrome coronavirus 2
  REGION 1..10: note = Table A: HLA-B*58:01H HLA-B*57:01H HLA-A*25:01H HLA-B*15:13M HLA-A*32:01H HLA-B*57:03M
GVFVSNGTHW

SEQ ID NO: 7042 - protein, 10 aa, Severe acute respiratory syndrome coronavirus 2
  REGION 1..10: note = Table A: HLA-C*14:02H HLA-C*14:03H HLA-A*24:07M HLA-A*23:01H
VFVSNGTHWF

SEQ ID NO: 7043 - protein, 10 aa, Severe acute respiratory syndrome coronavirus 2
  REGION 1..10: note = Table A: HLA-A*68:02M HLA-A*02:02H
FVSNGTHWFV

SEQ ID NO: 7044 - protein, 10 aa, Severe acute respiratory syndrome coronavirus 2
  REGION 1..10: note = Table A: HLA-C*14:03H HLA-A*29:02H
HWFVTQRNFY

SEQ ID NO: 7045 - protein, 10 aa, Severe acute respiratory syndrome coronavirus 2
  REGION 1..10: note = Table A: HLA-B*52:01H HLA-B*13:02H
TQRNFYEPQI

SEQ ID NO: 7046 - protein, 10 aa, Severe acute respiratory syndrome coronavirus 2
  REGION 1..10: note = Table A: HLA-A*02:11H HLA-A*68:02H HLA-A*02:05M HLA-A*02:06H HLA-A*02:07H HLA-A*02:08M HLA-A*02:01H HLA-A*02:02H HLA-A*02:03H HLA-C*08:01H HLA-B*38:02H HLA-B*13:02H
VVIGIVNNTV

SEQ ID NO: 7047 - protein, 10 aa, Severe acute respiratory syndrome coronavirus 2
  REGION 1..10: note = Table A: HLA-A*11:303H HLA-A*03:01H HLA-A*03:02H HLA-A*11:01H HLA-A*11:02H HLA-A*02:11H HLA-C*03:04H HLA-A*30:02H HLA-A*68:01H HLA-A*68:02H HLA-B*35:03H HLA-C*15:05H HLA-A*02:04H HLA-A*02:05H HLA-A*02:06H
  REGION 1..10: note = CONT. FROM ABOVE: HLA-A*02:07H HLA-A*02:08H HLA-A*02:01H HLA- A*02:02H HLA-A*34:02H HLA-B*35:01H HLA-C*08:01H HLA-C*08:03H HLA-B*38:02H HLA-B*39:01H HLA-B*07:05H
TVYDPLQPEL

SEQ ID NO: 7048 - protein, 10 aa, Severe acute respiratory syndrome coronavirus 2
  REGION 1..10: note = Table A: HLA-B*35:01M HLA-B*35:02H HLA-B*35:08M HLA-B*35:07H HLA-B*35:12H HLA-B*38:02H HLA-B*39:01H HLA-B*07:05H
DPLQPELDSF

SEQ ID NO: 7049 - protein, 10 aa, Severe acute respiratory syndrome coronavirus 2
  REGION 1..10: note = Table A: HLA-B*35:01H
DSFKEELDKY

SEQ ID NO: 7050 - protein, 10 aa, Severe acute respiratory syndrome coronavirus 2
  REGION 1..10: note = Table A: HLA-B*39:01H
NHTSPDVDLG

SEQ ID NO: 7051 - protein, 10 aa, Severe acute respiratory syndrome coronavirus 2
  REGION 1..10: note = Table A: HLA-B*40:02H
GDISGINASV

SEQ ID NO: 7052 - protein, 10 aa, Severe acute respiratory syndrome coronavirus 2
  REGION 1..10: note = Table A: HLA-A*68:02H
DISGINASVV

SEQ ID NO: 7053 - protein, 10 aa, Severe acute respiratory syndrome coronavirus 2
  REGION 1..10: note = Table A: HLA-A*03:02H HLA-A*68:01H HLA-A*34:02H
INASVVNIQK

SEQ ID NO: 7054 - protein, 10 aa, Severe acute respiratory syndrome coronavirus 2
  REGION 1..10: note = Table A: HLA-B*45:01M HLA-B*40:02H HLA-B*40:06M HLA-B*50:01H
KEIDRLNEVA

SEQ ID NO: 7055 - protein, 10 aa, Severe acute respiratory syndrome coronavirus 2
  REGION 1..10: note = Table A: HLA-A*36:01H HLA-A*68:01H HLA-A*68:02H HLA-A*34:02H
EIDRLNEVAK

SEQ ID NO: 7056 - protein, 10 aa, Severe acute respiratory syndrome coronavirus 2
  REGION 1..10: note = Table A: HLA-A*68:02H HLA-A*02:08H
EVAKNLNESL

SEQ ID NO: 7057 - protein, 10 aa, Severe acute respiratory syndrome coronavirus 2
  REGION 1..10: note = Table A: HLA-B*44:05M HLA-B*40:01H HLA-B*40:02H
NESLIDLQEL

SEQ ID NO: 7058 - protein, 10 aa, Severe acute respiratory syndrome coronavirus 2
  REGION 1..10: note = Table A: HLA-A*03:02H HLA-A*11:01H HLA-A*11:02H HLA-B*27:02H
SLIDLQELGK

SEQ ID NO: 7059 - protein, 10 aa, Severe acute respiratory syndrome coronavirus 2
  REGION 1..10: note = Table A: HLA-A*36:01M HLA-A*01:01M
LIDLQELGKY

SEQ ID NO: 7060 - protein, 10 aa, Severe acute respiratory syndrome coronavirus 2
  REGION 1..10: note = Table A: HLA-A*36:01H HLA-A*01:01H
LQELGKYEQY

SEQ ID NO: 7061 - protein, 10 aa, Severe acute respiratory syndrome coronavirus 2
  REGION 1..10: note = Table A: HLA-B*49:01H
QELGKYEQYI

SEQ ID NO: 7062 - protein, 10 aa, Severe acute respiratory syndrome coronavirus 2
  REGION 1..10: note = Table A: HLA-A*24:07M
QYIKWPWYIW

SEQ ID NO: 7063 - protein, 10 aa, Severe acute respiratory syndrome coronavirus 2
  REGION 1..10: note = Table A: HLA-A*24:07M
KWPWYIWLGF

SEQ ID NO: 7064 - protein, 10 aa, Severe acute respiratory syndrome coronavirus 2
  REGION 1..10: note = Table A: HLA-B*39:01H
FDEDDSEPVL

SEQ ID NO: 7065 - protein, 10 aa, Severe acute respiratory syndrome coronavirus 2
  REGION 1..10: note = Table A: HLA-B*44:05H HLA-B*40:01H HLA-B*40:02M
SEPVLKGVKL

SEQ ID NO: 7066 - protein, 10 aa, Severe acute respiratory syndrome coronavirus 2
  REGION 1..10: note = Table A: HLA-A*02:02M HLA-A*02:03H
VLKGVKLHYT

SEQ ID NO: 7067 - protein, 11 aa, Severe acute respiratory syndrome coronavirus 2
  REGION 1..11: note = Table A: HLA-A*02:11H HLA-A*02:01H
VLLPLVSSQCV

SEQ ID NO: 7068 - protein, 11 aa, Severe acute respiratory syndrome coronavirus 2
  REGION 1..11: note = Table A: HLA-A*36:01H
LTTRTQLPPAY

SEQ ID NO: 7069 - protein, 11 aa, Severe acute respiratory syndrome coronavirus 2
  REGION 1..11: note = Table A: HLA-B*44:05H HLA-A*24:02H HLA-A*23:01H HLA-B*38:01H HLA-B*38:02M HLA-B*15:01M HLA-B*15:02H HLA-B*15:03H HLA-B*39:01H HLA-B*13:01H
TQLPPAYTNSF

SEQ ID NO: 7070 - protein, 11 aa, Severe acute respiratory syndrome coronavirus 2
  REGION 1..11: note = Table A: HLA-A*74:01M HLA-A*31:01H
RGVYYPDKVFR

SEQ ID NO: 7071 - protein, 11 aa, Severe acute respiratory syndrome coronavirus 2
  REGION 1..11: note = Table A: HLA-C*14:03H
YYPDKVFRSSV

SEQ ID NO: 7072 - protein, 11 aa, Severe acute respiratory syndrome coronavirus 2
  REGION 1..11: note = Table A: HLA-B*35:03H HLA-C*15:05H HLA-B*07:02H HLA-B*07:04H
YPDKVFRSSVL

SEQ ID NO: 7073 - protein, 11 aa, Severe acute respiratory syndrome coronavirus 2
  REGION 1..11: note = Table A: HLA-A*02:11H HLA-A*02:08H
KVFRSSVLHST

SEQ ID NO: 7074 - protein, 11 aa, Severe acute respiratory syndrome coronavirus 2
  REGION 1..11: note = Table A: HLA-B*58:01H HLA-B*57:03H
SSVLHSTQDLF

SEQ ID NO: 7075 - protein, 11 aa, Severe acute respiratory syndrome coronavirus 2
  REGION 1..11: note = Table A: HLA-B*57:03H
HSTQDLFLPFF

SEQ ID NO: 7076 - protein, 11 aa, Severe acute respiratory syndrome coronavirus 2
  REGION 1..11: note = Table A: HLA-A*24:07H HLA-A*23:01H
LFLPFFSNVTW

SEQ ID NO: 7077 - protein, 11 aa, Severe acute respiratory syndrome coronavirus 2
  REGION 1..11: note = Table A: HLA-C*08:03H
HAIHVSGTNGT

SEQ ID NO: 7078 - protein, 11 aa, Severe acute respiratory syndrome coronavirus 2
  REGION 1..11: note = Table A: HLA-A*03:02H HLA-A*36:01H HLA-A*30:02H
AIHVSGTNGTK

SEQ ID NO: 7079 - protein, 11 aa, Severe acute respiratory syndrome coronavirus 2
  REGION 1..11: note = Table A: HLA-A*34:01H
HVSGTNGTKRF

SEQ ID NO: 7080 - protein, 11 aa, Severe acute respiratory syndrome coronavirus 2
  REGION 1..11: note = Table A: HLA-B*35:01H
NPVLPFNDGVY

SEQ ID NO: 7081 - protein, 11 aa, Severe acute respiratory syndrome coronavirus 2
  REGION 1..11: note = Table A: HLA-A*24:07H HLA-B*57:03H
PVLPFNDGVYF

SEQ ID NO: 7082 - protein, 11 aa, Severe acute respiratory syndrome coronavirus 2
  REGION 1..11: note = Table A: HLA-A*24:02H HLA-A*24:07H HLA-A*23:01H
VYFASTEKSNI

SEQ ID NO: 7083 - protein, 11 aa, Severe acute respiratory syndrome coronavirus 2
  REGION 1..11: note = Table A: HLA-A*68:01H
FASTEKSNIIR

SEQ ID NO: 7084 - protein, 11 aa, Severe acute respiratory syndrome coronavirus 2
  REGION 1..11: note = Table A: HLA-B*58:01H HLA-B*57:01H HLA-B*57:03M
STEKSNIIRGW

SEQ ID NO: 7085 - protein, 11 aa, Severe acute respiratory syndrome coronavirus 2
  REGION 1..11: note = Table A: HLA-C*08:03H
GTTLDSKTQSL

SEQ ID NO: 7086 - protein, 11 aa, Severe acute respiratory syndrome coronavirus 2
  REGION 1..11: note = Table A: HLA-A*34:02H HLA-C*08:03H
TTLDSKTQSLL

SEQ ID NO: 7087 - protein, 11 aa, Severe acute respiratory syndrome coronavirus 2
  REGION 1..11: note = Table A: HLA-A*02:08H
KTQSLLIVNNA

SEQ ID NO: 7088 - protein, 11 aa, Severe acute respiratory syndrome coronavirus 2
  REGION 1..11: note = Table A: HLA-A*03:02M HLA-A*11:01M HLA-A*11:02H HLA-A*36:01H HLA-A*68:01H HLA-A*34:02H
IVNNATNVVIK

SEQ ID NO: 7089 - protein, 11 aa, Severe acute respiratory syndrome coronavirus 2
  REGION 1..11: note = Table A: HLA-B*57:03H
ATNVVIKVCEF

SEQ ID NO: 7090 - protein, 11 aa, Severe acute respiratory syndrome coronavirus 2
  REGION 1..11: note = Table A: HLA-C*12:02H
FCNDPFLGVYY

SEQ ID NO: 7091 - protein, 11 aa, Severe acute respiratory syndrome coronavirus 2
  REGION 1..11: note = Table A: HLA-A*33:01H
NNKSWMESEFR

SEQ ID NO: 7092 - protein, 11 aa, Severe acute respiratory syndrome coronavirus 2
  REGION 1..11: note = Table A: HLA-B*58:01H HLA-B*58:02M HLA-A*74:01H HLA-A*36:01M HLA-B*57:01H HLA-A*30:02H HLA-A*32:01M HLA-B*15:03H HLA-B*57:03H
KSWMESEFRVY

SEQ ID NO: 7093 - protein, 11 aa, Severe acute respiratory syndrome coronavirus 2
  REGION 1..11: note = Table A: HLA-B*45:01M HLA-B*40:06H HLA-B*50:01H
MESEFRVYSSA

SEQ ID NO: 7094 - protein, 11 aa, Severe acute respiratory syndrome coronavirus 2
  REGION 1..11: note = Table A: HLA-A*32:01H HLA-B*57:03H
RVYSSANNCTF

SEQ ID NO: 7095 - protein, 11 aa, Severe acute respiratory syndrome coronavirus 2
  REGION 1..11: note = Table A: HLA-C*04:03H
TFEYVSQPFLM

SEQ ID NO: 7096 - protein, 11 aa, Severe acute respiratory syndrome coronavirus 2
  REGION 1..11: note = Table A: HLA-A*34:02H
MDLEGKQGNFK

SEQ ID NO: 7097 - protein, 11 aa, Severe acute respiratory syndrome coronavirus 2
  REGION 1..11: note = Table A: HLA-A*11:01H HLA-A*11:02H HLA-A*34:02H
FVFKNIDGYFK

SEQ ID NO: 7098 - protein, 11 aa, Severe acute respiratory syndrome coronavirus 2
  REGION 1..11: note = Table A: HLA-A*24:07M HLA-A*23:01H
VFKNIDGYFKI

SEQ ID NO: 7099 - protein, 11 aa, Severe acute respiratory syndrome coronavirus 2
  REGION 1..11: note = Table A: HLA-B*58:02H HLA-A*74:01H HLA-A*02:11H HLA-A*02:08H HLA-B*57:03H
KIYSKHTPINL

SEQ ID NO: 7100 - protein, 11 aa, Severe acute respiratory syndrome coronavirus 2
  REGION 1..11: note = Table A: HLA-B*56:01H HLA-B*55:02H HLA-B*54:01H
LVRDLPQGFSA

SEQ ID NO: 7101 - protein, 11 aa, Severe acute respiratory syndrome coronavirus 2
  REGION 1..11: note = Table A: HLA-B*35:03H
LPQGFSALEPL

SEQ ID NO: 7102 - protein, 11 aa, Severe acute respiratory syndrome coronavirus 2
  REGION 1..11: note = Table A: HLA-A*26:01H
DLPIGINITRF

SEQ ID NO: 7103 - protein, 11 aa, Severe acute respiratory syndrome coronavirus 2
  REGION 1..11: note = Table A: HLA-A*25:01M HLA-B*15:13M HLA-B*38:02H
YLTPGDSSSGW

SEQ ID NO: 7104 - protein, 11 aa, Severe acute respiratory syndrome coronavirus 2
  REGION 1..11: note = Table A: HLA-B*56:01H HLA-B*55:02M
TPGDSSSGWTA

SEQ ID NO: 7105 - protein, 11 aa, Severe acute respiratory syndrome coronavirus 2
  REGION 1..11: note = Table A: HLA-A*29:02H HLA-A*30:02H
SGWTAGAAAYY

SEQ ID NO: 7106 - protein, 11 aa, Severe acute respiratory syndrome coronavirus 2
  REGION 1..11: note = Table A: HLA-A*74:01H
AAYYVGYLQPR

SEQ ID NO: 7107 - protein, 11 aa, Severe acute respiratory syndrome coronavirus 2
  REGION 1..11: note = Table A: HLA-C*14:02H HLA-C*14:03M HLA-A*24:02M HLA-A*24:07H HLA-A*23:01M
YYVGYLQPRTF

SEQ ID NO: 7108 - protein, 11 aa, Severe acute respiratory syndrome coronavirus 2
  REGION 1..11: note = Table A: HLA-A*29:02H
YLQPRTFLLKY

SEQ ID NO: 7109 - protein, 11 aa, Severe acute respiratory syndrome coronavirus 2
  REGION 1..11: note = Table A: HLA-B*57:03H
KSFTVEKGIYQ

SEQ ID NO: 7110 - protein, 11 aa, Severe acute respiratory syndrome coronavirus 2
  REGION 1..11: note = Table A: HLA-A*68:02H
FTVEKGIYQTS

SEQ ID NO: 7111 - protein, 11 aa, Severe acute respiratory syndrome coronavirus 2
  REGION 1..11: note = Table A: HLA-B*27:05H
FRVQPTESIVR

SEQ ID NO: 7112 - protein, 11 aa, Severe acute respiratory syndrome coronavirus 2
  REGION 1..11: note = Table A: HLA-B*58:01H HLA-A*74:01M HLA-A*03:02M HLA-A*11:01H HLA-A*11:02H HLA-B*57:01H HLA-A*30:02M HLA-A*32:01H HLA-B*15:01H HLA-A*31:01H HLA-B*57:03H HLA-B*13:01H
RVQPTESIVRF

SEQ ID NO: 7113 - protein, 11 aa, Severe acute respiratory syndrome coronavirus 2
  REGION 1..11: note = Table A: HLA-A*24:07M HLA-A*23:01H
PFGEVFNATRF

SEQ ID NO: 7114 - protein, 11 aa, Severe acute respiratory syndrome coronavirus 2
  REGION 1..11: note = Table A: HLA-A*25:01H HLA-A*26:01M HLA-A*26:02H HLA-A*26:03H HLA-A*68:02M HLA-A*34:01H HLA-A*34:02H HLA-A*66:01H
EVFNATRFASV

SEQ ID NO: 7115 - protein, 11 aa, Severe acute respiratory syndrome coronavirus 2
  REGION 1..11: note = Table A: HLA-C*14:03H
VFNATRFASVY

SEQ ID NO: 7116 - protein, 11 aa, Severe acute respiratory syndrome coronavirus 2
  REGION 1..11: note = Table A: HLA-B*27:05H
TRFASVYAWNR

SEQ ID NO: 7117 - protein, 11 aa, Severe acute respiratory syndrome coronavirus 2
  REGION 1..11: note = Table A: HLA-B*46:01H HLA-A*24:07H HLA-A*23:01H HLA-B*38:02H HLA-B*15:01H
VLYNSASFSTF

SEQ ID NO: 7118 - protein, 11 aa, Severe acute respiratory syndrome coronavirus 2
  REGION 1..11: note = Table A: HLA-C*03:04H
YGVSPTKLNDL

SEQ ID NO: 7119 - protein, 11 aa, Severe acute respiratory syndrome coronavirus 2
  REGION 1..11: note = Table A: HLA-A*68:02H
ADSFVIRGDEV

SEQ ID NO: 7120 - protein, 11 aa, Severe acute respiratory syndrome coronavirus 2
  REGION 1..11: note = Table A: HLA-A*33:01H HLA-A*68:01H HLA-A*68:02H
DSFVIRGDEVR

SEQ ID NO: 7121 - protein, 11 aa, Severe acute respiratory syndrome coronavirus 2
  REGION 1..11: note = Table A: HLA-A*25:01H HLA-A*02:11H HLA-A*68:02M HLA-A*02:05M HLA-A*02:06M HLA-A*02:08M HLA-A*02:02H HLA-A*02:03H HLA-B*38:02H
FVIRGDEVRQI

SEQ ID NO: 7122 - protein, 11 aa, Severe acute respiratory syndrome coronavirus 2
  REGION 1..11: note = Table A: HLA-A*33:03H HLA-A*34:01H
EVRQIAPGQTG

SEQ ID NO: 7123 - protein, 11 aa, Severe acute respiratory syndrome coronavirus 2
  REGION 1..11: note = Table A: HLA-A*30:02H HLA-B*38:02H HLA-B*13:01M HLA-B*13:02M
RQIAPGQTGKI

SEQ ID NO: 7124 - protein, 11 aa, Severe acute respiratory syndrome coronavirus 2
  REGION 1..11: note = Table A: HLA-B*35:01H
APGQTGKIADY

SEQ ID NO: 7125 - protein, 11 aa, Severe acute respiratory syndrome coronavirus 2
  REGION 1..11: note = Table A: HLA-A*30:02H
GQTGKIADYNY

SEQ ID NO: 7126 - protein, 11 aa, Severe acute respiratory syndrome coronavirus 2
  REGION 1..11: note = Table A: HLA-A*02:11H HLA-A*02:07H HLA-B*13:02H
KLPDDFTGCVI

SEQ ID NO: 7127 - protein, 11 aa, Severe acute respiratory syndrome coronavirus 2
  REGION 1..11: note = Table A: HLA-B*54:01H
LPDDFTGCVIA

SEQ ID NO: 7128 - protein, 11 aa, Severe acute respiratory syndrome coronavirus 2
  REGION 1..11: note = Table A: HLA-A*36:01H
IAWNSNNLDSK

SEQ ID NO: 7129 - protein, 11 aa, Severe acute respiratory syndrome coronavirus 2
  REGION 1..11: note = Table A: HLA-A*29:02H HLA-A*30:02H
NNLDSKVGGNY

SEQ ID NO: 7130 - protein, 11 aa, Severe acute respiratory syndrome coronavirus 2
  REGION 1..11: note = Table A: HLA-A*33:01H HLA-A*33:03H
DSKVGGNYNYL

SEQ ID NO: 7131 - protein, 11 aa, Severe acute respiratory syndrome coronavirus 2
  REGION 1..11: note = Table A: HLA-A*74:01H
KVGGNYNYLYR

SEQ ID NO: 7132 - protein, 11 aa, Severe acute respiratory syndrome coronavirus 2
  REGION 1..11: note = Table A: HLA-A*74:01H HLA-A*32:01H
RLFRKSNLKPF

SEQ ID NO: 7133 - protein, 11 aa, Severe acute respiratory syndrome coronavirus 2
  REGION 1..11: note = Table A: HLA-B*42:01H HLA-B*56:01H HLA-A*02:11H HLA-B*53:01H HLA-B*55:02H HLA-C*15:05M HLA-B*55:01H HLA-C*08:01H HLA-B*38:02H HLA-B*07:02H HLA-B*07:04H HLA-B*07:05H HLA-B*57:03H
KPFERDISTEI

SEQ ID NO: 7134 - protein, 11 aa, Severe acute respiratory syndrome coronavirus 2
  REGION 1..11: note = Table A: HLA-B*50:01H
TEIYQAGSTPC

SEQ ID NO: 7135 - protein, 11 aa, Severe acute respiratory syndrome coronavirus 2
  REGION 1..11: note = Table A: HLA-B*13:02H
YQAGSTPCNGV

SEQ ID NO: 7136 - protein, 11 aa, Severe acute respiratory syndrome coronavirus 2
  REGION 1..11: note = Table A: HLA-A*11:303H HLA-C*16:04H HLA-B*46:01M HLA-A*26:01H HLA-A*29:01H HLA-A*29:02H HLA-B*27:02H HLA-C*03:02H HLA-A*30:02H HLA-C*12:02H HLA-C*12:03H HLA-B*35:01H HLA-B*35:07H HLA-C*08:03H HLA-B*38:02H
  REGION 1..11: note = CONT. FROM ABOVE: HLA-B*15:01M HLA-B*15:02H HLA-B*15:03H HLA- B*39:01H HLA-C*02:02H HLA-B*15:11H
YGFQPTNGVGY

SEQ ID NO: 7137 - protein, 11 aa, Severe acute respiratory syndrome coronavirus 2
  REGION 1..11: note = Table A: HLA-B*35:01H
QPTNGVGYQPY

SEQ ID NO: 7138 - protein, 11 aa, Severe acute respiratory syndrome coronavirus 2
  REGION 1..11: note = Table A: HLA-A*68:02H HLA-A*02:03H HLA-B*38:02H
FNFNGLTGTGV

SEQ ID NO: 7139 - protein, 11 aa, Severe acute respiratory syndrome coronavirus 2
  REGION 1..11: note = Table A: HLA-C*08:03H
NFNGLTGTGVL

SEQ ID NO: 7140 - protein, 11 aa, Severe acute respiratory syndrome coronavirus 2
  REGION 1..11: note = Table A: HLA-B*27:02H
TGTGVLTESNK

SEQ ID NO: 7141 - protein, 11 aa, Severe acute respiratory syndrome coronavirus 2
  REGION 1..11: note = Table A: HLA-B*56:01M HLA-B*55:02H HLA-B*54:01H
LPFQQFGRDIA

SEQ ID NO: 7142 - protein, 11 aa, Severe acute respiratory syndrome coronavirus 2
  REGION 1..11: note = Table A: HLA-C*15:05H HLA-C*08:02H HLA-B*07:02H
TTDAVRDPQTL

SEQ ID NO: 7143 - protein, 11 aa, Severe acute respiratory syndrome coronavirus 2
  REGION 1..11: note = Table A: HLA-B*38:02H HLA-B*07:04H
AVRDPQTLEIL

SEQ ID NO: 7144 - protein, 11 aa, Severe acute respiratory syndrome coronavirus 2
  REGION 1..11: note = Table A: HLA-B*55:02H
TPGTNTSNQVA

SEQ ID NO: 7145 - protein, 11 aa, Severe acute respiratory syndrome coronavirus 2
  REGION 1..11: note = Table A: HLA-A*02:01H
VLYQDVNCTEV

SEQ ID NO: 7146 - protein, 11 aa, Severe acute respiratory syndrome coronavirus 2
  REGION 1..11: note = Table A: HLA-A*68:02H
EVPVAIHADQL

SEQ ID NO: 7147 - protein, 11 aa, Severe acute respiratory syndrome coronavirus 2
  REGION 1..11: note = Table A: HLA-B*58:01H HLA-B*57:03H
AIHADQLTPTW

SEQ ID NO: 7148 - protein, 11 aa, Severe acute respiratory syndrome coronavirus 2
  REGION 1..11: note = Table A: HLA-A*36:01H HLA-A*33:01H HLA-A*33:03M HLA-A*26:03H HLA-B*27:02H HLA-A*68:01M HLA-A*68:02H HLA-A*34:02H HLA-A*31:01H HLA-A*66:01M
YSTGSNVFQTR

SEQ ID NO: 7149 - protein, 11 aa, Severe acute respiratory syndrome coronavirus 2
  REGION 1..11: note = Table A: HLA-B*38:02M HLA-B*39:01H
EHVNNSYECDI

SEQ ID NO: 7150 - protein, 11 aa, Severe acute respiratory syndrome coronavirus 2
  REGION 1..11: note = Table A: HLA-B*49:01H
YECDIPIGAGI

SEQ ID NO: 7151 - protein, 11 aa, Severe acute respiratory syndrome coronavirus 2
  REGION 1..11: note = Table A: HLA-A*26:01H HLA-A*29:01H HLA-A*29:02H HLA-A*30:02H HLA-B*35:01H HLA-B*35:08H HLA-B*35:07M HLA-B*38:02H HLA-B*15:02H HLA-B*07:05H HLA-B*15:11M
IPIGAGICASY

SEQ ID NO: 7152 - protein, 11 aa, Severe acute respiratory syndrome coronavirus 2
  REGION 1..11: note = Table A: HLA-A*74:01M HLA-A*03:01H HLA-A*03:02H HLA-A*11:01M HLA-A*11:02M HLA-A*36:01H HLA-A*33:03H HLA-A*68:01M HLA-A*34:01H HLA-A*34:02H HLA-C*07:27H HLA-A*31:01H HLA-A*66:01M
ASYQTQTNSPR

SEQ ID NO: 7153 - protein, 11 aa, Severe acute respiratory syndrome coronavirus 2
  REGION 1..11: note = Table A: HLA-A*33:01H HLA-A*33:03H HLA-A*30:02H
SYQTQTNSPRR

SEQ ID NO: 7154 - protein, 11 aa, Severe acute respiratory syndrome coronavirus 2
  REGION 1..11: note = Table A: HLA-B*58:01H HLA-A*36:01H HLA-A*30:02H HLA-B*15:01H HLA-B*57:03H
RSVASQSIIAY

SEQ ID NO: 7155 - protein, 11 aa, Severe acute respiratory syndrome coronavirus 2
  REGION 1..11: note = Table A: HLA-A*68:02H HLA-A*02:05H HLA-A*02:08H
SVASQSIIAYT

SEQ ID NO: 7156 - protein, 11 aa, Severe acute respiratory syndrome coronavirus 2
  REGION 1..11: note = Table A: HLA-A*68:02H
YTMSLGAENSV

SEQ ID NO: 7157 - protein, 11 aa, Severe acute respiratory syndrome coronavirus 2
  REGION 1..11: note = Table A: HLA-A*36:01H HLA-A*29:01H HLA-A*30:02H HLA-A*34:02H HLA-B*35:01M HLA-B*35:08H HLA-B*35:07H HLA-B*38:02H HLA-B*15:01H HLA-B*15:02H HLA-B*39:01H
MSLGAENSVAY

SEQ ID NO: 7158 - protein, 11 aa, Severe acute respiratory syndrome coronavirus 2
  REGION 1..11: note = Table A: HLA-A*68:02H HLA-B*57:03H
NSIAIPTNFTI

SEQ ID NO: 7159 - protein, 11 aa, Severe acute respiratory syndrome coronavirus 2
  REGION 1..11: note = Table A: HLA-A*03:02H HLA-A*36:01H
TTEILPVSMTK

SEQ ID NO: 7160 - protein, 11 aa, Severe acute respiratory syndrome coronavirus 2
  REGION 1..11: note = Table A: HLA-A*36:01M HLA-A*01:01H
STECSNLLLQY

SEQ ID NO: 7161 - protein, 11 aa, Severe acute respiratory syndrome coronavirus 2
  REGION 1..11: note = Table A: HLA-B*27:02H
ALTGIAVEQDK

SEQ ID NO: 7162 - protein, 11 aa, Severe acute respiratory syndrome coronavirus 2
  REGION 1..11: note = Table A: HLA-B*44:02H HLA-B*44:05H HLA-B*44:03H HLA-B*40:01H HLA-B*40:02H HLA-B*41:02H
VEQDKNTQEVF

SEQ ID NO: 7163 - protein, 11 aa, Severe acute respiratory syndrome coronavirus 2
  REGION 1..11: note = Table A: HLA-B*44:02H HLA-B*44:03M
QEVFAQVKQIY

SEQ ID NO: 7164 - protein, 11 aa, Severe acute respiratory syndrome coronavirus 2
  REGION 1..11: note = Table A: HLA-A*03:02H HLA-A*11:01H HLA-A*11:02H HLA-A*33:01H HLA-A*33:03H HLA-A*68:01M HLA-A*68:02H HLA-A*34:01H HLA-A*34:02H HLA-A*66:01H
EVFAQVKQIYK

SEQ ID NO: 7165 - protein, 11 aa, Severe acute respiratory syndrome coronavirus 2
  REGION 1..11: note = Table A: HLA-A*74:01H HLA-A*36:01H HLA-A*30:02H HLA-B*57:03M
KTPPIKDFGGF

SEQ ID NO: 7166 - protein, 11 aa, Severe acute respiratory syndrome coronavirus 2
  REGION 1..11: note = Table A: HLA-A*03:02H HLA-A*11:01H HLA-A*11:02M HLA-A*30:01H HLA-A*30:02H
QILPDPSKPSK

SEQ ID NO: 7167 - protein, 11 aa, Severe acute respiratory syndrome coronavirus 2
  REGION 1..11: note = Table A: HLA-A*74:01M HLA-A*26:03H HLA-A*68:01H HLA-A*34:01H
ILPDPSKPSKR

SEQ ID NO: 7168 - protein, 11 aa, Severe acute respiratory syndrome coronavirus 2
  REGION 1..11: note = Table A: HLA-B*07:04H
KPSKRSFIEDL

SEQ ID NO: 7169 - protein, 11 aa, Severe acute respiratory syndrome coronavirus 2
  REGION 1..11: note = Table A: HLA-A*11:01H HLA-A*11:02H
RSFIEDLLFNK

SEQ ID NO: 7170 - protein, 11 aa, Severe acute respiratory syndrome coronavirus 2
  REGION 1..11: note = Table A: HLA-B*44:05H HLA-B*40:01M HLA-B*40:02M HLA-B*41:02H
IEDLLFNKVTL

SEQ ID NO: 7171 - protein, 11 aa, Severe acute respiratory syndrome coronavirus 2
  REGION 1..11: note = Table A: HLA-A*02:02M HLA-A*02:03H
LLFNKVTLADA

SEQ ID NO: 7172 - protein, 11 aa, Severe acute respiratory syndrome coronavirus 2
  REGION 1..11: note = Table A: HLA-A*11:01H HLA-A*36:01H
KVTLADAGFIK

SEQ ID NO: 7173 - protein, 11 aa, Severe acute respiratory syndrome coronavirus 2
  REGION 1..11: note = Table A: HLA-A*25:01H HLA-B*46:01H HLA-A*26:01M HLA-A*26:02H HLA-A*29:02H HLA-B*44:03H HLA-A*30:02M HLA-A*02:04H HLA-A*02:02H HLA-A*02:03H HLA-B*35:01H HLA-B*38:02M HLA-B*15:01H HLA-B*15:02M
TLADAGFIKQY

SEQ ID NO: 7174 - protein, 11 aa, Severe acute respiratory syndrome coronavirus 2
  REGION 1..11: note = Table A: HLA-A*02:11H HLA-A*02:02H
CLGDIAARDLI

SEQ ID NO: 7175 - protein, 11 aa, Severe acute respiratory syndrome coronavirus 2
  REGION 1..11: note = Table A: HLA-B*44:05H HLA-B*18:01H HLA-B*07:05H
DEMIAQYTSAL

SEQ ID NO: 7176 - protein, 11 aa, Severe acute respiratory syndrome coronavirus 2
  REGION 1..11: note = Table A: HLA-B*38:02H HLA-A*32:01H
ALLAGTITSGW

SEQ ID NO: 7177 - protein, 11 aa, Severe acute respiratory syndrome coronavirus 2
  REGION 1..11: note = Table A: HLA-A*30:02H HLA-B*15:01H
LQIPFAMQMAY

SEQ ID NO: 7178 - protein, 11 aa, Severe acute respiratory syndrome coronavirus 2
  REGION 1..11: note = Table A: HLA-B*35:01H
NGIGVTQNVLY

SEQ ID NO: 7179 - protein, 11 aa, Severe acute respiratory syndrome coronavirus 2
  REGION 1..11: note = Table A: HLA-A*03:02H HLA-A*11:01M HLA-A*11:02H
VTQNVLYENQK

SEQ ID NO: 7180 - protein, 11 aa, Severe acute respiratory syndrome coronavirus 2
  REGION 1..11: note = Table A: HLA-B*38:02H
TQNVLYENQKL

SEQ ID NO: 7181 - protein, 11 aa, Severe acute respiratory syndrome coronavirus 2
  REGION 1..11: note = Table A: HLA-B*54:01H
NVLYENQKLIA

SEQ ID NO: 7182 - protein, 11 aa, Severe acute respiratory syndrome coronavirus 2
  REGION 1..11: note = Table A: HLA-A*02:03H
VLYENQKLIAN

SEQ ID NO: 7183 - protein, 11 aa, Severe acute respiratory syndrome coronavirus 2
  REGION 1..11: note = Table A: HLA-B*44:05H
YENQKLIANQF

SEQ ID NO: 7184 - protein, 11 aa, Severe acute respiratory syndrome coronavirus 2
  REGION 1..11: note = Table A: HLA-A*03:02H HLA-A*34:02H
IANQFNSAIGK

SEQ ID NO: 7185 - protein, 11 aa, Severe acute respiratory syndrome coronavirus 2
  REGION 1..11: note = Table A: HLA-A*03:01M HLA-A*03:02M HLA-A*11:01H
SLSSTASALGK

SEQ ID NO: 7186 - protein, 11 aa, Severe acute respiratory syndrome coronavirus 2
  REGION 1..11: note = Table A: HLA-A*03:02H
KLQDVVNQNAQ

SEQ ID NO: 7187 - protein, 11 aa, Severe acute respiratory syndrome coronavirus 2
  REGION 1..11: note = Table A: HLA-B*44:05H HLA-B*40:02H
QDVVNQNAQAL

SEQ ID NO: 7188 - protein, 11 aa, Severe acute respiratory syndrome coronavirus 2
  REGION 1..11: note = Table A: HLA-A*02:08H
AQALNTLVKQL

SEQ ID NO: 7189 - protein, 11 aa, Severe acute respiratory syndrome coronavirus 2
  REGION 1..11: note = Table A: HLA-A*68:02H
LSSNFGAISSV

SEQ ID NO: 7190 - protein, 11 aa, Severe acute respiratory syndrome coronavirus 2
  REGION 1..11: note = Table A: HLA-C*15:05H HLA-C*08:03H
SSNFGAISSVL

SEQ ID NO: 7191 - protein, 11 aa, Severe acute respiratory syndrome coronavirus 2
  REGION 1..11: note = Table A: HLA-C*08:01H HLA-C*08:03H HLA-B*35:12H
GAISSVLNDIL

SEQ ID NO: 7192 - protein, 11 aa, Severe acute respiratory syndrome coronavirus 2
  REGION 1..11: note = Table A: HLA-B*13:01H
RLDKVEAEVQI

SEQ ID NO: 7193 - protein, 11 aa, Severe acute respiratory syndrome coronavirus 2
  REGION 1..11: note = Table A: HLA-B*44:03H HLA-B*49:01H
VEAEVQIDRLI

SEQ ID NO: 7194 - protein, 11 aa, Severe acute respiratory syndrome coronavirus 2
  REGION 1..11: note = Table A: HLA-B*45:01H HLA-B*40:02H HLA-B*40:06H HLA-B*50:01H
AEVQIDRLITG

SEQ ID NO: 7195 - protein, 11 aa, Severe acute respiratory syndrome coronavirus 2
  REGION 1..11: note = Table A: HLA-A*33:01H HLA-A*33:03H HLA-A*26:03M HLA-A*68:01M HLA-A*34:01M HLA-A*34:02H HLA-A*66:01M
EVQIDRLITGR

SEQ ID NO: 7196 - protein, 11 aa, Severe acute respiratory syndrome coronavirus 2
  REGION 1..11: note = Table A: HLA-B*14:02H HLA-B*14:01H
DRLITGRLQSL

SEQ ID NO: 7197 - protein, 11 aa, Severe acute respiratory syndrome coronavirus 2
  REGION 1..11: note = Table A: HLA-B*57:03H
ITGRLQSLQTY

SEQ ID NO: 7198 - protein, 11 aa, Severe acute respiratory syndrome coronavirus 2
  REGION 1..11: note = Table A: HLA-A*02:05H HLA-A*02:08H
QTYVTQQLIRA

SEQ ID NO: 7199 - protein, 11 aa, Severe acute respiratory syndrome coronavirus 2
  REGION 1..11: note = Table A: HLA-B*57:03H
VTQQLIRAAEI

SEQ ID NO: 7200 - protein, 11 aa, Severe acute respiratory syndrome coronavirus 2
  REGION 1..11: note = Table A: HLA-A*02:11H HLA-C*15:05H HLA-A*02:05H HLA-A*02:02H HLA-B*07:02H HLA-B*07:04H HLA-B*57:03H
RAAEIRASANL

SEQ ID NO: 7201 - protein, 11 aa, Severe acute respiratory syndrome coronavirus 2
  REGION 1..11: note = Table A: HLA-B*45:01H HLA-B*40:02H HLA-B*40:06M HLA-B*50:01H
AEIRASANLAA

SEQ ID NO: 7202 - protein, 11 aa, Severe acute respiratory syndrome coronavirus 2
  REGION 1..11: note = Table A: HLA-C*15:05H HLA-B*57:03H
RASANLAATKM

SEQ ID NO: 7203 - protein, 11 aa, Severe acute respiratory syndrome coronavirus 2
  REGION 1..11: note = Table A: HLA-A*03:02H
KMSECVLGQSK

SEQ ID NO: 7204 - protein, 11 aa, Severe acute respiratory syndrome coronavirus 2
  REGION 1..11: note = Table A: HLA-A*02:11M HLA-A*68:02M HLA-A*02:05H HLA-A*02:08H HLA-A*02:02H HLA-A*02:03H
MSFPQSAPHGV

SEQ ID NO: 7205 - protein, 11 aa, Severe acute respiratory syndrome coronavirus 2
  REGION 1..11: note = Table A: HLA-B*42:01H HLA-B*56:01H HLA-B*53:01M HLA-B*55:02M HLA-B*35:03M HLA-C*15:05M HLA-B*35:01H HLA-B*35:02H HLA-B*35:08M HLA-B*35:07H HLA-B*35:12H HLA-B*38:02H HLA-B*54:01H HLA-B*07:02H HLA-B*07:04M HLA-B*15:02H
  REGION 1..11: note = CONT. FROM ABOVE: HLA-B*07:05H HLA-B*15:11M
FPQSAPHGVVF

SEQ ID NO: 7206 - protein, 11 aa, Severe acute respiratory syndrome coronavirus 2
  REGION 1..11: note = Table A: HLA-B*56:01H HLA-B*55:02H
APHGVVFLHVT

SEQ ID NO: 7207 - protein, 11 aa, Severe acute respiratory syndrome coronavirus 2
  REGION 1..11: note = Table A: HLA-B*57:01H HLA-B*57:03H
VTYVPAQEKNF

SEQ ID NO: 7208 - protein, 11 aa, Severe acute respiratory syndrome coronavirus 2
  REGION 1..11: note = Table A: HLA-B*56:01M HLA-B*55:02H HLA-C*15:05M HLA-B*55:01M HLA-B*54:01M HLA-B*07:02H HLA-B*07:04H HLA-B*07:05H
VPAQEKNFTTA

SEQ ID NO: 7209 - protein, 11 aa, Severe acute respiratory syndrome coronavirus 2
  REGION 1..11: note = Table A: HLA-A*03:02H
TTAPAICHDGK

SEQ ID NO: 7210 - protein, 11 aa, Severe acute respiratory syndrome coronavirus 2
  REGION 1..11: note = Table A: HLA-B*15:03H
GKAHFPREGVF

SEQ ID NO: 7211 - protein, 11 aa, Severe acute respiratory syndrome coronavirus 2
  REGION 1..11: note = Table A: HLA-A*02:11H HLA-C*15:02H HLA-C*08:01H
KAHFPREGVFV

SEQ ID NO: 7212 - protein, 11 aa, Severe acute respiratory syndrome coronavirus 2
  REGION 1..11: note = Table A: HLA-B*44:03H
EGVFVSNGTHW

SEQ ID NO: 7213 - protein, 11 aa, Severe acute respiratory syndrome coronavirus 2
  REGION 1..11: note = Table A: HLA-B*44:05H HLA-B*53:01H HLA-B*35:01H
EPQIITTDNTF

SEQ ID NO: 7214 - protein, 11 aa, Severe acute respiratory syndrome coronavirus 2
  REGION 1..11: note = Table A: HLA-A*68:02H
DVVIGIVNNTV

SEQ ID NO: 7215 - protein, 11 aa, Severe acute respiratory syndrome coronavirus 2
  REGION 1..11: note = Table A: HLA-B*46:01H HLA-A*29:02H HLA-A*30:02H HLA-C*15:05H HLA-B*35:01H HLA-B*38:02H HLA-B*15:01M HLA-B*15:02H HLA-B*07:05H
VVIGIVNNTVY

SEQ ID NO: 7216 - protein, 11 aa, Severe acute respiratory syndrome coronavirus 2
  REGION 1..11: note = Table A: HLA-C*08:03H
GIVNNTVYDPL

SEQ ID NO: 7217 - protein, 11 aa, Severe acute respiratory syndrome coronavirus 2
  REGION 1..11: note = Table A: HLA-A*11:303H HLA-A*03:01H HLA-A*03:02H HLA-A*11:01H HLA-A*11:02H HLA-B*27:02H
GINASVVNIQK

SEQ ID NO: 7218 - protein, 11 aa, Severe acute respiratory syndrome coronavirus 2
  REGION 1..11: note = Table A: HLA-A*68:01M HLA-A*68:02H
SVVNIQKEIDR

SEQ ID NO: 7219 - protein, 11 aa, Severe acute respiratory syndrome coronavirus 2
  REGION 1..11: note = Table A: HLA-A*02:11H HLA-A*02:05H HLA-A*02:06H HLA-A*02:02M HLA-A*02:03H HLA-B*52:01H HLA-B*38:02H
IQKEIDRLNEV

SEQ ID NO: 7220 - protein, 11 aa, Severe acute respiratory syndrome coronavirus 2
  REGION 1..11: note = Table A: HLA-B*46:01H HLA-A*26:01M HLA-A*26:02M HLA-A*29:02H HLA-A*30:02M HLA-B*38:02H HLA-B*15:01H
SLIDLQELGKY

SEQ ID NO: 7221 - protein, 11 aa, Severe acute respiratory syndrome coronavirus 2
  REGION 1..11: note = Table A: HLA-B*38:02H
DLQELGKYEQY

SEQ ID NO: 7222 - protein, 11 aa, Severe acute respiratory syndrome coronavirus 2
  REGION 1..11: note = Table A: HLA-A*68:02H HLA-A*02:04H
FIAGLIAIVMV

SEQ ID NO: 7223 - protein, 8 aa, Severe acute respiratory syndrome coronavirus 2
  REGION 1..8: note = Table A: HLA-B*52:01H
LFMRIFTI

SEQ ID NO: 7224 - protein, 8 aa, Severe acute respiratory syndrome coronavirus 2
  REGION 1..8: note = Table A: HLA-A*02:11H HLA-B*52:01H HLA-B*13:02H
RIFTIGTV

SEQ ID NO: 7225 - protein, 8 aa, Severe acute respiratory syndrome coronavirus 2
  REGION 1..8: note = Table A: HLA-C*03:03H HLA-C*03:04M HLA-A*68:02H HLA-C*15:05H HLA-C*15:02H HLA-C*17:01H HLA-C*08:01H HLA-B*38:02H HLA-B*57:03H HLA-C*07:04H
FTIGTVTL

SEQ ID NO: 7226 - protein, 8 aa, Severe acute respiratory syndrome coronavirus 2
  REGION 1..8: note = Table A: HLA-A*03:01M HLA-A*03:02M HLA-A*11:01H HLA-A*11:02H HLA-A*36:01H HLA-A*34:02M
TIGTVTLK

SEQ ID NO: 7227 - protein, 8 aa, Severe acute respiratory syndrome coronavirus 2
  REGION 1..8: note = Table A: HLA-B*58:02H HLA-C*15:05H
VTLKQGEI

SEQ ID NO: 7228 - protein, 8 aa, Severe acute respiratory syndrome coronavirus 2
  REGION 1..8: note = Table A: HLA-B*50:01H
GEIKDATP

SEQ ID NO: 7229 - protein, 8 aa, Severe acute respiratory syndrome coronavirus 2
  REGION 1..8: note = Table A: HLA-B*51:01H
DATPSDFV

SEQ ID NO: 7230 - protein, 8 aa, Severe acute respiratory syndrome coronavirus 2
  REGION 1..8: note = Table A: HLA-B*56:01H HLA-B*55:02H HLA-B*55:01M HLA-B*54:01H
TPSDFVRA

SEQ ID NO: 7231 - protein, 8 aa, Severe acute respiratory syndrome coronavirus 2
  REGION 1..8: note = Table A: HLA-B*39:06H HLA-B*50:01H
SDFVRATA

SEQ ID NO: 7232 - protein, 8 aa, Severe acute respiratory syndrome coronavirus 2
  REGION 1..8: note = Table A: HLA-B*52:01H
FVRATATI

SEQ ID NO: 7233 - protein, 8 aa, Severe acute respiratory syndrome coronavirus 2
  REGION 1..8: note = Table A: HLA-C*15:05H HLA-B*39:06H HLA-B*54:01H
TATIPIQA

SEQ ID NO: 7234 - protein, 8 aa, Severe acute respiratory syndrome coronavirus 2
  REGION 1..8: note = Table A: HLA-B*58:01H HLA-B*53:01H
QASLPFGW

SEQ ID NO: 7235 - protein, 8 aa, Severe acute respiratory syndrome coronavirus 2
  REGION 1..8: note = Table A: HLA-B*51:01M HLA-B*54:01H
LPFGWLIV

SEQ ID NO: 7236 - protein, 8 aa, Severe acute respiratory syndrome coronavirus 2
  REGION 1..8: note = Table A: HLA-B*51:01H
FGWLIVGV

SEQ ID NO: 7237 - protein, 8 aa, Severe acute respiratory syndrome coronavirus 2
  REGION 1..8: note = Table A: HLA-A*03:02H HLA-A*11:02H
AVFQSASK

SEQ ID NO: 7238 - protein, 8 aa, Severe acute respiratory syndrome coronavirus 2
  REGION 1..8: note = Table A: HLA-B*52:01H
VFQSASKI

SEQ ID NO: 7239 - protein, 8 aa, Severe acute respiratory syndrome coronavirus 2
  REGION 1..8: note = Table A: HLA-B*52:01H
FQSASKII

SEQ ID NO: 7240 - protein, 8 aa, Severe acute respiratory syndrome coronavirus 2
  REGION 1..8: note = Table A: HLA-B*48:01H HLA-B*58:01H HLA-A*11:303H HLA-C*16:01H HLA-C*03:03H HLA-C*12:05H HLA-C*03:04H HLA-A*68:02H HLA-B*35:03H HLA-C*15:05H HLA-C*12:03H HLA-C*15:02M HLA-A*02:02H HLA-C*17:01H HLA-C*08:01H
  REGION 1..8: note = CONT. FROM ABOVE: HLA-B*38:02H HLA-B*40:01H HLA-B*40:02H HLA- B*07:02H HLA-B*07:04H HLA-B*07:05H HLA-B*41:02H HLA-B*57:03H HLA-C*07:04M
SASKIITL

SEQ ID NO: 7241 - protein, 8 aa, Severe acute respiratory syndrome coronavirus 2
  REGION 1..8: note = Table A: HLA-A*30:01H
ASKIITLK

SEQ ID NO: 7242 - protein, 8 aa, Severe acute respiratory syndrome coronavirus 2
  REGION 1..8: note = Table A: HLA-B*08:01M
TLKKRWQL

SEQ ID NO: 7243 - protein, 8 aa, Severe acute respiratory syndrome coronavirus 2
  REGION 1..8: note = Table A: HLA-B*38:02H HLA-B*15:02H
LLLFVTVY

SEQ ID NO: 7244 - protein, 8 aa, Severe acute respiratory syndrome coronavirus 2
  REGION 1..8: note = Table A: HLA-C*17:01H
FVTVYSHL

SEQ ID NO: 7245 - protein, 8 aa, Severe acute respiratory syndrome coronavirus 2
  REGION 1..8: note = Table A: HLA-B*58:02H HLA-C*15:02H HLA-B*57:03H
VTVYSHLL

SEQ ID NO: 7246 - protein, 8 aa, Severe acute respiratory syndrome coronavirus 2
  REGION 1..8: note = Table A: HLA-C*03:02H HLA-B*54:01H
YSHLLLVA

SEQ ID NO: 7247 - protein, 8 aa, Severe acute respiratory syndrome coronavirus 2
  REGION 1..8: note = Table A: HLA-B*55:02H HLA-B*39:06H HLA-B*54:01H
SHLLLVAA

SEQ ID NO: 7248 - protein, 8 aa, Severe acute respiratory syndrome coronavirus 2
  REGION 1..8: note = Table A: HLA-B*18:01H HLA-B*40:01H HLA-B*40:02H HLA-B*49:01M
LEAPFLYL

SEQ ID NO: 7249 - protein, 8 aa, Severe acute respiratory syndrome coronavirus 2
  REGION 1..8: note = Table A: HLA-C*14:03H
LYLYALVY

SEQ ID NO: 7250 - protein, 8 aa, Severe acute respiratory syndrome coronavirus 2
  REGION 1..8: note = Table A: HLA-C*14:02H HLA-C*14:03H
YFLQSINF

SEQ ID NO: 7251 - protein, 8 aa, Severe acute respiratory syndrome coronavirus 2
  REGION 1..8: note = Table A: HLA-A*02:04H
FLQSINFV

SEQ ID NO: 7252 - protein, 8 aa, Severe acute respiratory syndrome coronavirus 2
  REGION 1..8: note = Table A: HLA-B*58:02H HLA-B*52:01H
QSINFVRI

SEQ ID NO: 7253 - protein, 8 aa, Severe acute respiratory syndrome coronavirus 2
  REGION 1..8: note = Table A: HLA-B*58:02H
SINFVRII

SEQ ID NO: 7254 - protein, 8 aa, Severe acute respiratory syndrome coronavirus 2
  REGION 1..8: note = Table A: HLA-B*58:01H HLA-B*58:02H HLA-A*36:01H HLA-B*57:01H HLA-A*30:02H HLA-B*57:03H
RSKNPLLY

SEQ ID NO: 7255 - protein, 8 aa, Severe acute respiratory syndrome coronavirus 2
  REGION 1..8: note = Table A: HLA-C*04:01H
LYDANYFL

SEQ ID NO: 7256 - protein, 8 aa, Severe acute respiratory syndrome coronavirus 2
  REGION 1..8: note = Table A: HLA-B*35:01H HLA-B*35:08H
SPISEHDY

SEQ ID NO: 7257 - protein, 8 aa, Severe acute respiratory syndrome coronavirus 2
  REGION 1..8: note = Table A: HLA-B*18:01H HLA-B*38:02H HLA-B*15:02H
HDYQIGGY

SEQ ID NO: 7258 - protein, 8 aa, Severe acute respiratory syndrome coronavirus 2
  REGION 1..8: note = Table A: HLA-B*58:01M HLA-B*53:01H HLA-B*57:03H
IGGYTEKW

SEQ ID NO: 7259 - protein, 8 aa, Severe acute respiratory syndrome coronavirus 2
  REGION 1..8: note = Table A: HLA-B*18:01H HLA-B*15:02H
DCVVLHSY

SEQ ID NO: 7260 - protein, 8 aa, Severe acute respiratory syndrome coronavirus 2
  REGION 1..8: note = Table A: HLA-C*14:02M HLA-C*14:03M HLA-A*29:02H HLA-A*30:02H HLA-B*39:01H
SYFTSDYY

SEQ ID NO: 7261 - protein, 8 aa, Severe acute respiratory syndrome coronavirus 2
  REGION 1..8: note = Table A: HLA-A*36:01M HLA-A*01:01H
TSDYYQLY

SEQ ID NO: 7262 - protein, 8 aa, Severe acute respiratory syndrome coronavirus 2
  REGION 1..8: note = Table A: HLA-B*48:01H HLA-B*14:01H HLA-B*52:01H HLA-B*38:02H HLA-B*15:01H HLA-B*15:02H HLA-B*15:03H HLA-B*39:01H HLA-B*13:02H HLA-B*15:10H
YQLYSTQL

SEQ ID NO: 7263 - protein, 8 aa, Severe acute respiratory syndrome coronavirus 2
  REGION 1..8: note = Table A: HLA-B*08:01H HLA-B*14:02H HLA-B*35:01H HLA-B*38:02H HLA-B*15:02H HLA-C*07:04H
TGVEHVTF

SEQ ID NO: 7264 - protein, 8 aa, Severe acute respiratory syndrome coronavirus 2
  REGION 1..8: note = Table A: HLA-B*49:01H
VEHVTFFI

SEQ ID NO: 7265 - protein, 8 aa, Severe acute respiratory syndrome coronavirus 2
  REGION 1..8: note = Table A: HLA-B*38:02H
EHVTFFIY

SEQ ID NO: 7266 - protein, 8 aa, Severe acute respiratory syndrome coronavirus 2
  REGION 1..8: note = Table A: HLA-A*11:02H
VTFFIYNK

SEQ ID NO: 7267 - protein, 8 aa, Severe acute respiratory syndrome coronavirus 2
  REGION 1..8: note = Table A: HLA-B*38:01M HLA-B*38:02M HLA-B*39:06M HLA-B*39:01H HLA-B*15:10H
EHVQIHTI

SEQ ID NO: 7268 - protein, 8 aa, Severe acute respiratory syndrome coronavirus 2
  REGION 1..8: note = Table A: HLA-C*08:02H
TIDGSSGV

SEQ ID NO: 7269 - protein, 8 aa, Severe acute respiratory syndrome coronavirus 2
  REGION 1..8: note = Table A: HLA-B*15:02H HLA-B*07:05H
SGVVNPVM

SEQ ID NO: 7270 - protein, 8 aa, Severe acute respiratory syndrome coronavirus 2
  REGION 1..8: note = Table A: HLA-C*15:05H HLA-B*51:01H
EPTTTTSV

SEQ ID NO: 7271 - protein, 8 aa, Severe acute respiratory syndrome coronavirus 2
  REGION 1..8: note = Table A: HLA-C*03:04H HLA-B*35:03H HLA-C*15:05H HLA-C*08:03H HLA-B*39:01H
TTTTSVPL

SEQ ID NO: 7272 - protein, 9 aa, Severe acute respiratory syndrome coronavirus 2
  REGION 1..9: note = Table A: HLA-B*08:01M HLA-A*02:11H HLA-A*68:02M HLA-B*14:02H HLA-A*02:04M HLA-A*02:02H HLA-B*51:01H HLA-B*38:02H HLA-B*40:06H
DLFMRIFTI

SEQ ID NO: 7273 - protein, 9 aa, Severe acute respiratory syndrome coronavirus 2
  REGION 1..9: note = Table A: HLA-B*38:02H HLA-B*39:01H
MRIFTIGTV

SEQ ID NO: 7274 - protein, 9 aa, Severe acute respiratory syndrome coronavirus 2
  REGION 1..9: note = Table A: HLA-C*14:02M HLA-C*14:03M HLA-C*04:03H HLA-A*24:02M HLA-A*24:07M HLA-A*23:01M
IFTIGTVTL

SEQ ID NO: 7275 - protein, 9 aa, Severe acute respiratory syndrome coronavirus 2
  REGION 1..9: note = Table A: HLA-A*11:303H HLA-A*03:01H HLA-A*03:02H HLA-A*11:01M HLA-A*11:02M HLA-A*33:03H HLA-A*26:03M HLA-A*68:01M HLA-A*68:02H HLA-A*34:01M HLA-A*34:02H HLA-C*07:27H HLA-A*66:01H
FTIGTVTLK

SEQ ID NO: 7276 - protein, 9 aa, Severe acute respiratory syndrome coronavirus 2
  REGION 1..9: note = Table A: HLA-A*11:01H HLA-A*34:02H
VTLKQGEIK

SEQ ID NO: 7277 - protein, 9 aa, Severe acute respiratory syndrome coronavirus 2
  REGION 1..9: note = Table A: HLA-B*50:01H
GEIKDATPS

SEQ ID NO: 7278 - protein, 9 aa, Severe acute respiratory syndrome coronavirus 2
  REGION 1..9: note = Table A: HLA-B*15:03H
IKDATPSDF

SEQ ID NO: 7279 - protein, 9 aa, Severe acute respiratory syndrome coronavirus 2
  REGION 1..9: note = Table A: HLA-A*33:01H HLA-A*68:01M HLA-A*34:01M HLA-A*34:02H HLA-B*35:02H HLA-A*66:01M
DATPSDFVR

SEQ ID NO: 7280 - protein, 9 aa, Severe acute respiratory syndrome coronavirus 2
  REGION 1..9: note = Table A: HLA-A*02:05H HLA-A*02:06H HLA-A*02:07H HLA-A*02:08H
ATPSDFVRA

SEQ ID NO: 7281 - protein, 9 aa, Severe acute respiratory syndrome coronavirus 2
  REGION 1..9: note = Table A: HLA-B*42:01H HLA-B*56:01M HLA-B*55:02M HLA-C*15:05H HLA-B*55:01M HLA-B*54:01H HLA-B*07:02H HLA-B*07:04M HLA-B*07:05H
TPSDFVRAT

SEQ ID NO: 7282 - protein, 9 aa, Severe acute respiratory syndrome coronavirus 2
  REGION 1..9: note = Table A: HLA-B*37:01H
SDFVRATAT

SEQ ID NO: 7283 - protein, 9 aa, Severe acute respiratory syndrome coronavirus 2
  REGION 1..9: note = Table A: HLA-B*51:01H
DFVRATATI

SEQ ID NO: 7284 - protein, 9 aa, Severe acute respiratory syndrome coronavirus 2
  REGION 1..9: note = Table A: HLA-C*16:04H HLA-A*11:01H HLA-C*12:05H HLA-A*68:02M HLA-C*15:05H HLA-A*02:05H HLA-A*02:08M HLA-A*02:03H HLA-B*13:02H
ATATIPIQA

SEQ ID NO: 7285 - protein, 9 aa, Severe acute respiratory syndrome coronavirus 2
  REGION 1..9: note = Table A: HLA-B*48:01H HLA-B*58:01M HLA-B*58:02H HLA-A*11:303M HLA-B*44:05H HLA-B*57:01H HLA-B*46:01H HLA-A*26:03H HLA-C*03:03M HLA-C*12:05H HLA-A*02:11H HLA-C*03:04M HLA-A*30:02H HLA-A*68:02M HLA-C*15:05M
  REGION 1..9: note = CONT. FROM ABOVE: HLA-C*15:02H HLA-A*02:04H HLA-A*02:05M HLA- A*02:06H HLA-A*02:08M HLA-A*02:01H HLA-A*02:02H HLA-A*02:03H HLA-C*07:27H HLA-C*17:01H HLA-C*08:01H HLA-B*38:02H HLA-B*15 :01H HLA-B*39:01H HLA-B*07:05H HLA-B*57:03H HLA-B*13:02H
ATIPIQASL

SEQ ID NO: 7286 - protein, 9 aa, Severe acute respiratory syndrome coronavirus 2
  REGION 1..9: note = Table A: HLA-B*53:01H HLA-B*35:03H HLA-C*15:05H HLA-B*35:01H HLA-B*35:07M HLA-B*38:02H HLA-B*15:02H HLA-B*15:11H
IPIQASLPF

SEQ ID NO: 7287 - protein, 9 aa, Severe acute respiratory syndrome coronavirus 2
  REGION 1..9: note = Table A: HLA-B*58:01H HLA-B*57:03H HLA-B*13:01H
IQASLPFGW

SEQ ID NO: 7288 - protein, 9 aa, Severe acute respiratory syndrome coronavirus 2
  REGION 1..9: note = Table A: HLA-B*58:02H HLA-A*02:04H HLA-B*57:03H
ASLPFGWLI

SEQ ID NO: 7289 - protein, 9 aa, Severe acute respiratory syndrome coronavirus 2
  REGION 1..9: note = Table A: HLA-B*54:01H
LPFGWLIVG

SEQ ID NO: 7290 - protein, 9 aa, Severe acute respiratory syndrome coronavirus 2
  REGION 1..9: note = Table A: HLA-A*02:04H HLA-A*02:02H HLA-A*02:03H HLA-C*17:01H HLA-B*38:02H
WLIVGVALL

SEQ ID NO: 7291 - protein, 9 aa, Severe acute respiratory syndrome coronavirus 2
  REGION 1..9: note = Table A: HLA-A*11:303H HLA-B*45:01H HLA-A*02:11H HLA-B*55:02H HLA-A*02:04H HLA-A*02:06H HLA-A*02:07H HLA-B*14:01H HLA-A*02:01M HLA-A*02:03H HLA-B*38:02H HLA-B*39:06H HLA-B*40:06H HLA-B*54:01H HLA-B*13:02H
  REGION 1..9: note = CONT. FROM ABOVE: HLA-B*50:01H
ALLAVFQSA

SEQ ID NO: 7292 - protein, 9 aa, Severe acute respiratory syndrome coronavirus 2
  REGION 1..9: note = Table A: HLA-A*36:01H HLA-C*03:03H HLA-A*68:01H HLA-A*34:01H HLA-A*34:02M HLA-A*66:01H
LAVFQSASK

SEQ ID NO: 7293 - protein, 9 aa, Severe acute respiratory syndrome coronavirus 2
  REGION 1..9: note = Table A: HLA-A*02:05H HLA-A*02:08H HLA-B*38:02H HLA-B*13:02H
AVFQSASKI

SEQ ID NO: 7294 - protein, 9 aa, Severe acute respiratory syndrome coronavirus 2
  REGION 1..9: note = Table A: HLA-C*14:03H
VFQSASKII

SEQ ID NO: 7295 - protein, 9 aa, Severe acute respiratory syndrome coronavirus 2
  REGION 1..9: note = Table A: HLA-B*58:01H HLA-B*58:02H HLA-C*16:01H HLA-B*08:01H HLA-C*03:04H HLA-A*68:02M HLA-C*15:05M HLA-C*12:03H HLA-C*15:02M HLA-A*02:05H HLA-A*02:08H HLA-A*02:02H HLA-A*02:03H HLA-C*17:01H HLA-C*08:01H HLA-B*38:02M
  REGION 1..9: note = CONT. FROM ABOVE: HLA-B*07:04H HLA-B*39:01H HLA-B*57:03H HLA- C*07:04M
QSASKIITL

SEQ ID NO: 7296 - protein, 9 aa, Severe acute respiratory syndrome coronavirus 2
  REGION 1..9: note = Table A: HLA-A*11:303M HLA-A*74:01H HLA-A*03:01M HLA-A*03:02H HLA-A*11:01H HLA-A*11:02H HLA-A*36:01H HLA-B*57:01H HLA-A*33:03H HLA-C*06:02H HLA-A*30:01H HLA-A*30:02H HLA-A*68:01H HLA-A*68:02M HLA-A*02:05H
  REGION 1..9: note = CONT. FROM ABOVE: HLA-A*34:01M HLA-A*34:02H HLA-C*07:27H HLA- C*17:01H HLA-B*57:03H HLA-C*02:02H HLA-B*13:02H HLA-A*66:01M
SASKIITLK

SEQ ID NO: 7297 - protein, 9 aa, Severe acute respiratory syndrome coronavirus 2
  REGION 1..9: note = Table A: HLA-A*11:02H HLA-A*30:01M
ASKIITLKK

SEQ ID NO: 7298 - protein, 9 aa, Severe acute respiratory syndrome coronavirus 2
  REGION 1..9: note = Table A: HLA-B*57:03H
KIITLKKRW

SEQ ID NO: 7299 - protein, 9 aa, Severe acute respiratory syndrome coronavirus 2
  REGION 1..9: note = Table A: HLA-B*58:02H HLA-A*02:11H HLA-A*02:04H HLA-A*32:01H HLA-B*57:03M
ITLKKRWQL

SEQ ID NO: 7300 - protein, 9 aa, Severe acute respiratory syndrome coronavirus 2
  REGION 1..9: note = Table A: HLA-B*27:05M
KRWQLALSK

SEQ ID NO: 7301 - protein, 9 aa, Severe acute respiratory syndrome coronavirus 2
  REGION 1..9: note = Table A: HLA-B*13:02H
WQLALSKGV

SEQ ID NO: 7302 - protein, 9 aa, Severe acute respiratory syndrome coronavirus 2
  REGION 1..9: note = Table A: HLA-B*57:03H
LALSKGVHF

SEQ ID NO: 7303 - protein, 9 aa, Severe acute respiratory syndrome coronavirus 2
  REGION 1..9: note = Table A: HLA-A*02:11H HLA-A*68:02H HLA-C*15:02H HLA-A*02:04H HLA-A*02:05M HLA-A*02:06M HLA-A*02:08M HLA-A*02:01H HLA-A*02:02H HLA-A*02:03H HLA-B*38:02M HLA-B*13:02M
ALSKGVHFV

SEQ ID NO: 7304 - protein, 9 aa, Severe acute respiratory syndrome coronavirus 2
  REGION 1..9: note = Table A: HLA-B*38:02H
VHFVCNLLL

SEQ ID NO: 7305 - protein, 9 aa, Severe acute respiratory syndrome coronavirus 2
  REGION 1..9: note = Table A: HLA-A*02:11H HLA-A*02:04H HLA-A*02:06H HLA-A*02:07H
NLLLLFVTV

SEQ ID NO: 7306 - protein, 9 aa, Severe acute respiratory syndrome coronavirus 2
  REGION 1..9: note = Table A: HLA-B*38:02M HLA-B*15:02M
LLLLFVTVY

SEQ ID NO: 7307 - protein, 9 aa, Severe acute respiratory syndrome coronavirus 2
  REGION 1..9: note = Table A: HLA-C*14:02H HLA-C*14:03H HLA-A*24:07H HLA-A*23:01H
LFVTVYSHL

SEQ ID NO: 7308 - protein, 9 aa, Severe acute respiratory syndrome coronavirus 2
  REGION 1..9: note = Table A: HLA-A*02:11H HLA-C*03:04H HLA-A*68:02H HLA-C*15:02H HLA-A*02:04H HLA-A*02:05H HLA-A*02:06H HLA-A*02:02M HLA-C*17:01H HLA-C*08:01H
FVTVYSHLL

SEQ ID NO: 7309 - protein, 9 aa, Severe acute respiratory syndrome coronavirus 2
  REGION 1..9: note = Table A: HLA-C*15:02M HLA-B*57:03H
VTVYSHLLL

SEQ ID NO: 7310 - protein, 9 aa, Severe acute respiratory syndrome coronavirus 2
  REGION 1..9: note = Table A: HLA-A*03:01H HLA-A*11:02H HLA-C*06:02H HLA-A*29:02H HLA-A*02:11M HLA-A*68:02M HLA-C*15:05H HLA-C*15:02H HLA-A*02:04M HLA-A*02:05H HLA-A*02:06H HLA-A*02:07M HLA-A*02:01H HLA-A*02:02H HLA-A*02:03M HLA-A*34:01H
  REGION 1..9: note = CONT. FROM ABOVE: HLA-A*34:02M HLA-B*51:01H HLA-C*08:01M HLA- B*38:02M HLA-B*40:06H HLA-B*13:02M
TVYSHLLLV

SEQ ID NO: 7311 - protein, 9 aa, Severe acute respiratory syndrome coronavirus 2
  REGION 1..9: note = Table A: HLA-A*29:02H
VYSHLLLVA

SEQ ID NO: 7312 - protein, 9 aa, Severe acute respiratory syndrome coronavirus 2
  REGION 1..9: note = Table A: HLA-B*56:01M HLA-B*55:02M HLA-B*55:01H HLA-C*08:01H HLA-B*39:06M HLA-B*40:06H HLA-B*54:01H
YSHLLLVAA

SEQ ID NO: 7313 - protein, 9 aa, Severe acute respiratory syndrome coronavirus 2
  REGION 1..9: note = Table A: HLA-B*39:06H HLA-B*39:01H
SHLLLVAAG

SEQ ID NO: 7314 - protein, 9 aa, Severe acute respiratory syndrome coronavirus 2
  REGION 1..9: note = Table A: HLA-A*02:11H HLA-A*02:04H
HLLLVAAGL

SEQ ID NO: 7315 - protein, 9 aa, Severe acute respiratory syndrome coronavirus 2
  REGION 1..9: note = Table A: HLA-B*38:02H
LLVAAGLEA

SEQ ID NO: 7316 - protein, 9 aa, Severe acute respiratory syndrome coronavirus 2
  REGION 1..9: note = Table A: HLA-B*35:01H HLA-B*35:02H HLA-B*35:08H HLA-B*35:07H
VAAGLEAPF

SEQ ID NO: 7317 - protein, 9 aa, Severe acute respiratory syndrome coronavirus 2
  REGION 1..9: note = Table A: HLA-A*29:01H HLA-A*29:02H HLA-C*07:01H HLA-A*30:02H
AGLEAPFLY

SEQ ID NO: 7318 - protein, 9 aa, Severe acute respiratory syndrome coronavirus 2
  REGION 1..9: note = Table A: HLA-A*02:07H
GLEAPFLYL

SEQ ID NO: 7319 - protein, 9 aa, Severe acute respiratory syndrome coronavirus 2
  REGION 1..9: note = Table A: HLA-A*29:02H HLA-B*44:03H HLA-B*18:01H HLA-C*07:01H HLA-B*07:05H
LEAPFLYLY

SEQ ID NO: 7320 - protein, 9 aa, Severe acute respiratory syndrome coronavirus 2
  REGION 1..9: note = Table A: HLA-C*15:05H HLA-B*07:05H
APFLYLYAL

SEQ ID NO: 7321 - protein, 9 aa, Severe acute respiratory syndrome coronavirus 2
  REGION 1..9: note = Table A: HLA-B*38:02H HLA-B*15:02H
FLYLYALVY

SEQ ID NO: 7322 - protein, 9 aa, Severe acute respiratory syndrome coronavirus 2
  REGION 1..9: note = Table A: HLA-A*02:11M HLA-A*02:04M HLA-A*02:07H HLA-A*02:01H HLA-A*02:02M
YLYALVYFL

SEQ ID NO: 7323 - protein, 9 aa, Severe acute respiratory syndrome coronavirus 2
  REGION 1..9: note = Table A: HLA-A*02:04M HLA-A*02:02H HLA-A*02:03H HLA-B*38:02H HLA-B*13:02H
ALVYFLQSI

SEQ ID NO: 7324 - protein, 9 aa, Severe acute respiratory syndrome coronavirus 2
  REGION 1..9: note = Table A: HLA-C*14:02M HLA-C*14:03H HLA-A*29:02H HLA-C*07:02H HLA-A*24:02H HLA-A*24:07H HLA-C*08:01H HLA-A*23:01M
VYFLQSINF

SEQ ID NO: 7325 - protein, 9 aa, Severe acute respiratory syndrome coronavirus 2
  REGION 1..9: note = Table A: HLA-C*14:03H
YFLQSINFV

SEQ ID NO: 7326 - protein, 9 aa, Severe acute respiratory syndrome coronavirus 2
  REGION 1..9: note = Table A: HLA-A*74:01M
FLQSINFVR

SEQ ID NO: 7327 - protein, 9 aa, Severe acute respiratory syndrome coronavirus 2
  REGION 1..9: note = Table A: HLA-B*13:01H HLA-B*13:02H
LQSINFVRI

SEQ ID NO: 7328 - protein, 9 aa, Severe acute respiratory syndrome coronavirus 2
  REGION 1..9: note = Table A: HLA-B*58:02H HLA-C*16:01H HLA-C*06:02M HLA-A*68:02H HLA-C*12:03M HLA-C*15:02M
QSINFVRII

SEQ ID NO: 7329 - protein, 9 aa, Severe acute respiratory syndrome coronavirus 2
  REGION 1..9: note = Table A: HLA-C*15:05H HLA-B*07:04M HLA-C*07:04H
SINFVRIIM

SEQ ID NO: 7330 - protein, 9 aa, Severe acute respiratory syndrome coronavirus 2
  REGION 1..9: note = Table A: HLA-A*36:01H HLA-B*27:05H
CRSKNPLLY

SEQ ID NO: 7331 - protein, 9 aa, Severe acute respiratory syndrome coronavirus 2
  REGION 1..9: note = Table A: HLA-B*39:06H
SKNPLLYDA

SEQ ID NO: 7332 - protein, 9 aa, Severe acute respiratory syndrome coronavirus 2
  REGION 1..9: note = Table A: HLA-B*35:01M HLA-B*35:08H HLA-B*35:07H
NPLLYDANY

SEQ ID NO: 7333 - protein, 9 aa, Severe acute respiratory syndrome coronavirus 2
  REGION 1..9: note = Table A: HLA-A*02:11M HLA-A*02:04M HLA-A*02:07H HLA-A*02:01M HLA-A*02:02M
LLYDANYFL

SEQ ID NO: 7334 - protein, 9 aa, Severe acute respiratory syndrome coronavirus 2
  REGION 1..9: note = Table A: HLA-B*56:01H HLA-B*55:02H HLA-C*15:05H HLA-B*54:01H
IPYNSVTSS

SEQ ID NO: 7335 - protein, 9 aa, Severe acute respiratory syndrome coronavirus 2
  REGION 1..9: note = Table A: HLA-A*24:02H HLA-A*23:01H
PYNSVTSSI

SEQ ID NO: 7336 - protein, 9 aa, Severe acute respiratory syndrome coronavirus 2
  REGION 1..9: note = Table A: HLA-A*68:01H HLA-A*68:02H
VTSSIVITS

SEQ ID NO: 7337 - protein, 9 aa, Severe acute respiratory syndrome coronavirus 2
  REGION 1..9: note = Table A: HLA-C*08:02H
SGDGTTSPI

SEQ ID NO: 7338 - protein, 9 aa, Severe acute respiratory syndrome coronavirus 2
  REGION 1..9: note = Table A: HLA-A*11:01H HLA-C*07:27H
GTTSPISEH

SEQ ID NO: 7339 - protein, 9 aa, Severe acute respiratory syndrome coronavirus 2
  REGION 1..9: note = Table A: HLA-A*30:02H
TSPISEHDY

SEQ ID NO: 7340 - protein, 9 aa, Severe acute respiratory syndrome coronavirus 2
  REGION 1..9: note = Table A: HLA-A*02:05H HLA-A*02:02H
PISEHDYQI

SEQ ID NO: 7341 - protein, 9 aa, Severe acute respiratory syndrome coronavirus 2
  REGION 1..9: note = Table A: HLA-B*38:02H HLA-B*39:01M
EHDYQIGGY

SEQ ID NO: 7342 - protein, 9 aa, Severe acute respiratory syndrome coronavirus 2
  REGION 1..9: note = Table A: HLA-A*11:01H HLA-A*11:02H HLA-A*26:03H HLA-A*34:01H HLA-A*34:02H HLA-A*66:01H
YQIGGYTEK

SEQ ID NO: 7343 - protein, 9 aa, Severe acute respiratory syndrome coronavirus 2
  REGION 1..9: note = Table A: HLA-B*58:01H HLA-B*53:01M HLA-B*57:03H HLA-B*13:01H
QIGGYTEKW

SEQ ID NO: 7344 - protein, 9 aa, Severe acute respiratory syndrome coronavirus 2
  REGION 1..9: note = Table A: HLA-A*02:11H HLA-A*68:02H
YTEKWESGV

SEQ ID NO: 7345 - protein, 9 aa, Severe acute respiratory syndrome coronavirus 2
  REGION 1..9: note = Table A: HLA-B*49:01H
WESGVKDCV

SEQ ID NO: 7346 - protein, 9 aa, Severe acute respiratory syndrome coronavirus 2
  REGION 1..9: note = Table A: HLA-B*58:01M HLA-A*36:01H HLA-A*29:02H HLA-A*01:01M HLA-A*30:02M HLA-A*34:02H HLA-B*35:07H HLA-B*38:02M HLA-B*15:02H
HSYFTSDYY

SEQ ID NO: 7347 - protein, 9 aa, Severe acute respiratory syndrome coronavirus 2
  REGION 1..9: note = Table A: HLA-A*24:02H HLA-A*24:07M HLA-A*23:01H
YFTSDYYQL

SEQ ID NO: 7348 - protein, 9 aa, Severe acute respiratory syndrome coronavirus 2
  REGION 1..9: note = Table A: HLA-C*16:01H HLA-C*16:04H HLA-A*36:01M HLA-C*06:02H HLA-A*26:01M HLA-A*29:01M HLA-A*29:02M HLA-A*01:01H HLA-C*07:01H HLA-A*30:02H HLA-C*15:05H HLA-C*12:03H HLA-A*34:02M HLA-B*35:01H HLA-B*35:07H HLA-B*38:02H
  REGION 1..9: note = CONT. FROM ABOVE: HLA-C*02:02H HLA-A*66:01H
FTSDYYQLY

SEQ ID NO: 7349 - protein, 9 aa, Severe acute respiratory syndrome coronavirus 2
  REGION 1..9: note = Table A: HLA-C*14:02H HLA-C*14:03H HLA-C*04:01H HLA-C*07:01H HLA-C*07:02M HLA-A*24:02H HLA-A*24:07M HLA-C*08:01H HLA-A*23:01M HLA-B*39:01H
YYQLYSTQL

SEQ ID NO: 7350 - protein, 9 aa, Severe acute respiratory syndrome coronavirus 2
  REGION 1..9: note = Table A: HLA-B*38:02H HLA-B*13:02H
QLYSTQLST

SEQ ID NO: 7351 - protein, 9 aa, Severe acute respiratory syndrome coronavirus 2
  REGION 1..9: note = Table A: HLA-B*38:02H HLA-B*13:02M
TQLSTDTGV

SEQ ID NO: 7352 - protein, 9 aa, Severe acute respiratory syndrome coronavirus 2
  REGION 1..9: note = Table A: HLA-A*11:303H HLA-B*46:01H
LSTDTGVEH

SEQ ID NO: 7353 - protein, 9 aa, Severe acute respiratory syndrome coronavirus 2
  REGION 1..9: note = Table A: HLA-A*01:01H HLA-C*04:03M HLA-A*02:11M HLA-A*68:02M HLA-A*02:05H HLA-A*02:06M HLA-A*02:07M HLA-A*02:01H HLA-C*08:02M HLA-B*38:02H HLA-C*05:01M
STDTGVEHV

SEQ ID NO: 7354 - protein, 9 aa, Severe acute respiratory syndrome coronavirus 2
  REGION 1..9: note = Table A: HLA-A*25:01H HLA-A*26:02H HLA-B*35:01H HLA-B*15:02H
DTGVEHVTF

SEQ ID NO: 7355 - protein, 9 aa, Severe acute respiratory syndrome coronavirus 2
  REGION 1..9: note = Table A: HLA-C*12:02H HLA-C*12:03H HLA-C*17:01H HLA-B*38:02H HLA-B*57:03H HLA-C*07:04M
TGVEHVTFF

SEQ ID NO: 7356 - protein, 9 aa, Severe acute respiratory syndrome coronavirus 2
  REGION 1..9: note = Table A: HLA-B*44:03H HLA-B*18:01H HLA-B*07:05H
VEHVTFFIY

SEQ ID NO: 7357 - protein, 9 aa, Severe acute respiratory syndrome coronavirus 2
  REGION 1..9: note = Table A: HLA-A*11:01H HLA-A*11:02H HLA-A*36:01H HLA-A*34:02M
HVTFFIYNK

SEQ ID NO: 7358 - protein, 9 aa, Severe acute respiratory syndrome coronavirus 2
  REGION 1..9: note = Table A: HLA-B*58:02H HLA-A*02:11H HLA-A*68:02H HLA-B*57:03M
VTFFIYNKI

SEQ ID NO: 7359 - protein, 9 aa, Severe acute respiratory syndrome coronavirus 2
  REGION 1..9: note = Table A: HLA-C*04:01H HLA-C*04:03H HLA-A*02:11H HLA-A*68:02H HLA-A*02:06M HLA-A*02:07H HLA-A*02:01H HLA-B*35:02H HLA-C*08:01H HLA-C*08:02H HLA-B*35:12H HLA-B*38:02H HLA-C*05:01H HLA-B*13:01H
IVDEPEEHV

SEQ ID NO: 7360 - protein, 9 aa, Severe acute respiratory syndrome coronavirus 2
  REGION 1..9: note = Table A: HLA-B*44:05H
DEPEEHVQI

SEQ ID NO: 7361 - protein, 9 aa, Severe acute respiratory syndrome coronavirus 2
  REGION 1..9: note = Table A: HLA-B*35:01H HLA-B*35:02H
EPEEHVQIH

SEQ ID NO: 7362 - protein, 9 aa, Severe acute respiratory syndrome coronavirus 2
  REGION 1..9: note = Table A: HLA-B*44:02M HLA-B*44:05H HLA-B*45:01M HLA-B*44:03M HLA-B*18:01H HLA-A*68:02H HLA-B*40:02M HLA-B*40:06H HLA-B*41:02M HLA-B*49:01H
EEHVQIHTI

SEQ ID NO: 7363 - protein, 9 aa, Severe acute respiratory syndrome coronavirus 2
  REGION 1..9: note = Table A: HLA-A*11:303H HLA-A*25:01H HLA-A*26:01M HLA-A*26:02M HLA-A*26:03M HLA-A*02:11H HLA-A*68:02M HLA-C*15:05H HLA-C*15:02H HLA-A*02:05M HLA-A*02:06M HLA-A*02:08M HLA-A*02:01H HLA-A*02:02H HLA-A*02:03M
  REGION 1..9: note = CONT. FROM ABOVE: HLA-A*34:01H HLA-B*38:02M HLA-B*39:01H HLA- B*13:02H HLA-A*66:01M
HTIDGSSGV

SEQ ID NO: 7364 - protein, 9 aa, Severe acute respiratory syndrome coronavirus 2
  REGION 1..9: note = Table A: HLA-C*08:02H HLA-B*39:01H
TIDGSSGVV

SEQ ID NO: 7365 - protein, 9 aa, Severe acute respiratory syndrome coronavirus 2
  REGION 1..9: note = Table A: HLA-A*68:02H HLA-C*08:03H
GSSGVVNPV

SEQ ID NO: 7366 - protein, 9 aa, Severe acute respiratory syndrome coronavirus 2
  REGION 1..9: note = Table A: HLA-B*58:01H HLA-A*11:303H HLA-B*35:03H HLA-C*15:05M HLA-B*35:01H HLA-B*40:02H HLA-B*07:05H HLA-B*57:03H HLA-C*07:04H
SSGVVNPVM

SEQ ID NO: 7367 - protein, 9 aa, Severe acute respiratory syndrome coronavirus 2
  REGION 1..9: note = Table A: HLA-A*02:11H HLA-A*68:02H HLA-C*15:05H HLA-A*02:05H HLA-A*02:06H HLA-A*02:07H HLA-A*02:08H HLA-C*08:01H HLA-B*38:02H
VVNPVMEPI

SEQ ID NO: 7368 - protein, 9 aa, Severe acute respiratory syndrome coronavirus 2
  REGION 1..9: note = Table A: HLA-B*35:03H HLA-B*35:02M HLA-B*35:08H HLA-B*35:12H
EPIYDEPTT

SEQ ID NO: 7369 - protein, 9 aa, Severe acute respiratory syndrome coronavirus 2
  REGION 1..9: note = Table A: HLA-C*04:01H
IYDEPTTTT

SEQ ID NO: 7370 - protein, 9 aa, Severe acute respiratory syndrome coronavirus 2
  REGION 1..9: note = Table A: HLA-B*51:01H HLA-B*07:05M HLA-B*49:01H
DEPTTTTSV

SEQ ID NO: 7371 - protein, 9 aa, Severe acute respiratory syndrome coronavirus 2
  REGION 1..9: note = Table A: HLA-A*68:02H HLA-C*15:05H HLA-C*08:03H
PTTTTSVPL

SEQ ID NO: 7372 - protein, 10 aa, Severe acute respiratory syndrome coronavirus 2
  REGION 1..10: note = Table A: HLA-A*02:03H
FMRIFTIGTV

SEQ ID NO: 7373 - protein, 10 aa, Severe acute respiratory syndrome coronavirus 2
  REGION 1..10: note = Table A: HLA-B*48:01H HLA-B*58:02H HLA-A*74:01H HLA-A*02:11M HLA-A*68:02H HLA-C*15:05H HLA-C*15:02H HLA-A*02:04H HLA-A*02:05M HLA-A*02:08H HLA-A*02:02M HLA-A*02:03H HLA-C*08:01H HLA-C*08:03H HLA-A*32:01M HLA-B*40:02H
  REGION 1..10: note = CONT. FROM ABOVE: HLA-B*40:06H HLA-B*15:01H HLA-B*57:03M HLA- B*13:01H HLA-B*13:02H
RIFTIGTVTL

SEQ ID NO: 7374 - protein, 10 aa, Severe acute respiratory syndrome coronavirus 2
  REGION 1..10: note = Table A: HLA-A*34:02H
FTIGTVTLKQ

SEQ ID NO: 7375 - protein, 10 aa, Severe acute respiratory syndrome coronavirus 2
  REGION 1..10: note = Table A: HLA-C*08:03H
GTVTLKQGEI

SEQ ID NO: 7376 - protein, 10 aa, Severe acute respiratory syndrome coronavirus 2
  REGION 1..10: note = Table A: HLA-A*02:02H HLA-A*02:03H
TLKQGEIKDA

SEQ ID NO: 7377 - protein, 10 aa, Severe acute respiratory syndrome coronavirus 2
  REGION 1..10: note = Table A: HLA-A*25:01M HLA-A*26:01M HLA-A*26:02H HLA-A*26:03M HLA-A*34:01H
EIKDATPSDF

SEQ ID NO: 7378 - protein, 10 aa, Severe acute respiratory syndrome coronavirus 2
  REGION 1..10: note = Table A: HLA-A*68:02H
DATPSDFVRA

SEQ ID NO: 7379 - protein, 10 aa, Severe acute respiratory syndrome coronavirus 2
  REGION 1..10: note = Table A: HLA-B*42:01H HLA-B*56:01H HLA-B*55:02H HLA-A*68:02H HLA-C*15:05M HLA-B*55:01H HLA-B*39:06H HLA-B*54:01M HLA-B*07:02M HLA-B*07:04M HLA-B*07:05H HLA-B*50:01H
TPSDFVRATA

SEQ ID NO: 7380 - protein, 10 aa, Severe acute respiratory syndrome coronavirus 2
  REGION 1..10: note = Table A: HLA-B*56:01H HLA-B*55:02H
RATATIPIQA

SEQ ID NO: 7381 - protein, 10 aa, Severe acute respiratory syndrome coronavirus 2
  REGION 1..10: note = Table A: HLA-B*56:01H HLA-B*55:02M HLA-A*68:02H HLA-B*51:01H HLA-B*54:01M
LPFGWLIVGV

SEQ ID NO: 7382 - protein, 10 aa, Severe acute respiratory syndrome coronavirus 2
  REGION 1..10: note = Table A: HLA-B*55:02H HLA-B*54:01H
VALLAVFQSA

SEQ ID NO: 7383 - protein, 10 aa, Severe acute respiratory syndrome coronavirus 2
  REGION 1..10: note = Table A: HLA-A*03:01H HLA-A*03:02H
LLAVFQSASK

SEQ ID NO: 7384 - protein, 10 aa, Severe acute respiratory syndrome coronavirus 2
  REGION 1..10: note = Table A: HLA-A*02:02H HLA-B*38:02H HLA-B*13:01H
FQSASKIITL

SEQ ID NO: 7385 - protein, 10 aa, Severe acute respiratory syndrome coronavirus 2
  REGION 1..10: note = Table A: HLA-A*03:01H HLA-A*03:02H HLA-A*11:01M HLA-A*11:02H HLA-A*68:01H HLA-A*34:02H HLA-C*07:27H
QSASKIITLK

SEQ ID NO: 7386 - protein, 10 aa, Severe acute respiratory syndrome coronavirus 2
  REGION 1..10: note = Table A: HLA-A*03:02H HLA-A*11:01H HLA-A*11:02H HLA-A*68:01H HLA-A*34:02H
SASKIITLKK

SEQ ID NO: 7387 - protein, 10 aa, Severe acute respiratory syndrome coronavirus 2
  REGION 1..10: note = Table A: HLA-B*15:02H
NLLLLFVTVY

SEQ ID NO: 7388 - protein, 10 aa, Severe acute respiratory syndrome coronavirus 2
  REGION 1..10: note = Table A: HLA-A*02:02H
LLFVTVYSHL

SEQ ID NO: 7389 - protein, 10 aa, Severe acute respiratory syndrome coronavirus 2
  REGION 1..10: note = Table A: HLA-A*24:07H
LFVTVYSHLL

SEQ ID NO: 7390 - protein, 10 aa, Severe acute respiratory syndrome coronavirus 2
  REGION 1..10: note = Table A: HLA-C*15:02H
VTVYSHLLLV

SEQ ID NO: 7391 - protein, 10 aa, Severe acute respiratory syndrome coronavirus 2
  REGION 1..10: note = Table A: HLA-B*55:02H HLA-B*55:01H
TVYSHLLLVA

SEQ ID NO: 7392 - protein, 10 aa, Severe acute respiratory syndrome coronavirus 2
  REGION 1..10: note = Table A: HLA-B*55:02H
VYSHLLLVAA

SEQ ID NO: 7393 - protein, 10 aa, Severe acute respiratory syndrome coronavirus 2
  REGION 1..10: note = Table A: HLA-B*38:02H
SHLLLVAAGL

SEQ ID NO: 7394 - protein, 10 aa, Severe acute respiratory syndrome coronavirus 2
  REGION 1..10: note = Table A: HLA-A*36:01H HLA-A*29:02H
GLEAPFLYLY

SEQ ID NO: 7395 - protein, 10 aa, Severe acute respiratory syndrome coronavirus 2
  REGION 1..10: note = Table A: HLA-B*45:01H HLA-B*50:01H
LEAPFLYLYA

SEQ ID NO: 7396 - protein, 10 aa, Severe acute respiratory syndrome coronavirus 2
  REGION 1..10: note = Table A: HLA-A*02:11H HLA-A*02:04H
FLQSINFVRI

SEQ ID NO: 7397 - protein, 10 aa, Severe acute respiratory syndrome coronavirus 2
  REGION 1..10: note = Table A: HLA-A*74:01H
SINFVRIIMR

SEQ ID NO: 7398 - protein, 10 aa, Severe acute respiratory syndrome coronavirus 2
  REGION 1..10: note = Table A: HLA-A*36:01H HLA-A*30:02H
KNPLLYDANY

SEQ ID NO: 7399 - protein, 10 aa, Severe acute respiratory syndrome coronavirus 2
  REGION 1..10: note = Table A: HLA-A*68:02H
YDYCIPYNSV

SEQ ID NO: 7400 - protein, 10 aa, Severe acute respiratory syndrome coronavirus 2
  REGION 1..10: note = Table A: HLA-B*56:01H HLA-B*55:02H HLA-C*15:05H HLA-B*55:01H HLA-B*51:01H HLA-B*54:01H HLA-B*07:02H HLA-B*07:05M
IPYNSVTSSI

SEQ ID NO: 7401 - protein, 10 aa, Severe acute respiratory syndrome coronavirus 2
  REGION 1..10: note = Table A: HLA-A*68:02H
VTSSIVITSG

SEQ ID NO: 7402 - protein, 10 aa, Severe acute respiratory syndrome coronavirus 2
  REGION 1..10: note = Table A: HLA-A*36:01M HLA-A*01:01H HLA-A*30:02H HLA-A*68:02H
TTSPISEHDY

SEQ ID NO: 7403 - protein, 10 aa, Severe acute respiratory syndrome coronavirus 2
  REGION 1..10: note = Table A: HLA-B*53:01H HLA-B*35:03M HLA-C*15:05H HLA-B*35:02M HLA-B*35:12M
SPISEHDYQI

SEQ ID NO: 7404 - protein, 10 aa, Severe acute respiratory syndrome coronavirus 2
  REGION 1..10: note = Table A: HLA-B*44:02H HLA-B*44:05H HLA-B*44:03M HLA-B*18:01H
SEHDYQIGGY

SEQ ID NO: 7405 - protein, 10 aa, Severe acute respiratory syndrome coronavirus 2
  REGION 1..10: note = Table A: HLA-B*39:01H
EHDYQIGGYT

SEQ ID NO: 7406 - protein, 10 aa, Severe acute respiratory syndrome coronavirus 2
  REGION 1..10: note = Table A: HLA-A*33:03H
DYQIGGYTEK

SEQ ID NO: 7407 - protein, 10 aa, Severe acute respiratory syndrome coronavirus 2
  REGION 1..10: note = Table A: HLA-B*58:01H HLA-B*57:01H HLA-A*25:01M HLA-B*44:03H HLA-B*27:02H HLA-B*53:01M HLA-B*15:13M HLA-B*38:01H HLA-B*38:02M HLA-B*15:01H HLA-B*57:03H HLA-B*13:01H
YQIGGYTEKW

SEQ ID NO: 7408 - protein, 10 aa, Severe acute respiratory syndrome coronavirus 2
  REGION 1..10: note = Table A: HLA-B*38:02H
LHSYFTSDYY

SEQ ID NO: 7409 - protein, 10 aa, Severe acute respiratory syndrome coronavirus 2
  REGION 1..10: note = Table A: HLA-A*02:02H HLA-A*24:02H HLA-A*24:07H HLA-A*23:01H
SYFTSDYYQL

SEQ ID NO: 7410 - protein, 10 aa, Severe acute respiratory syndrome coronavirus 2
  REGION 1..10: note = Table A: HLA-A*29:01H HLA-A*29:02M
YFTSDYYQLY

SEQ ID NO: 7411 - protein, 10 aa, Severe acute respiratory syndrome coronavirus 2
  REGION 1..10: note = Table A: HLA-A*33:03H
DYYQLYSTQL

SEQ ID NO: 7412 - protein, 10 aa, Severe acute respiratory syndrome coronavirus 2
  REGION 1..10: note = Table A: HLA-A*68:02H
LSTDTGVEHV

SEQ ID NO: 7413 - protein, 10 aa, Severe acute respiratory syndrome coronavirus 2
  REGION 1..10: note = Table A: HLA-B*44:05M HLA-B*18:01H HLA-B*35:01H HLA-C*08:03H HLA-B*38:01H HLA-B*38:02H HLA-B*39:01H
TDTGVEHVTF

SEQ ID NO: 7414 - protein, 10 aa, Severe acute respiratory syndrome coronavirus 2
  REGION 1..10: note = Table A: HLA-A*02:11H HLA-A*02:05H HLA-A*02:06H HLA-A*02:08H HLA-A*02:02H
KIVDEPEEHV

SEQ ID NO: 7415 - protein, 10 aa, Severe acute respiratory syndrome coronavirus 2
  REGION 1..10: note = Table A: HLA-B*38:02H HLA-B*39:01H
EHVQIHTIDG

SEQ ID NO: 7416 - protein, 10 aa, Severe acute respiratory syndrome coronavirus 2
  REGION 1..10: note = Table A: HLA-A*26:01H HLA-A*68:02H HLA-A*66:01H
HTIDGSSGVV

SEQ ID NO: 7417 - protein, 10 aa, Severe acute respiratory syndrome coronavirus 2
  REGION 1..10: note = Table A: HLA-A*68:02H
DGSSGVVNPV

SEQ ID NO: 7418 - protein, 10 aa, Severe acute respiratory syndrome coronavirus 2
  REGION 1..10: note = Table A: HLA-C*15:05H HLA-C*08:03H
GSSGVVNPVM

SEQ ID NO: 7419 - protein, 10 aa, Severe acute respiratory syndrome coronavirus 2
  REGION 1..10: note = Table A: HLA-A*30:02H
VVNPVMEPIY

SEQ ID NO: 7420 - protein, 10 aa, Severe acute respiratory syndrome coronavirus 2
  REGION 1..10: note = Table A: HLA-A*68:02H HLA-B*35:03H HLA-C*15:05H
EPTTTTSVPL

SEQ ID NO: 7421 - protein, 11 aa, Severe acute respiratory syndrome coronavirus 2
  REGION 1..11: note = Table A: HLA-B*27:05H
MRIFTIGTVTL

SEQ ID NO: 7422 - protein, 11 aa, Severe acute respiratory syndrome coronavirus 2
  REGION 1..11: note = Table A: HLA-A*74:01M HLA-A*03:01M HLA-A*03:02M HLA-A*11:01H HLA-A*11:02M HLA-A*36:01H HLA-A*30:01H HLA-A*30:02H
RIFTIGTVTLK

SEQ ID NO: 7423 - protein, 11 aa, Severe acute respiratory syndrome coronavirus 2
  REGION 1..11: note = Table A: HLA-A*66:01H
FTIGTVTLKQG

SEQ ID NO: 7424 - protein, 11 aa, Severe acute respiratory syndrome coronavirus 2
  REGION 1..11: note = Table A: HLA-B*44:05M HLA-B*27:02H HLA-B*40:01H HLA-B*40:02H
GEIKDATPSDF

SEQ ID NO: 7425 - protein, 11 aa, Severe acute respiratory syndrome coronavirus 2
  REGION 1..11: note = Table A: HLA-A*68:02M
EIKDATPSDFV

SEQ ID NO: 7426 - protein, 11 aa, Severe acute respiratory syndrome coronavirus 2
  REGION 1..11: note = Table A: HLA-B*55:02H HLA-B*07:02H
TPSDFVRATAT

SEQ ID NO: 7427 - protein, 11 aa, Severe acute respiratory syndrome coronavirus 2
  REGION 1..11: note = Table A: HLA-B*53:01M
IPIQASLPFGW

SEQ ID NO: 7428 - protein, 11 aa, Severe acute respiratory syndrome coronavirus 2
  REGION 1..11: note = Table A: HLA-A*02:11H HLA-A*68:02H HLA-A*02:04H HLA-A*02:07H
SLPFGWLIVGV

SEQ ID NO: 7429 - protein, 11 aa, Severe acute respiratory syndrome coronavirus 2
  REGION 1..11: note = Table A: HLA-B*55:02H HLA-B*54:01H
LPFGWLIVGVA

SEQ ID NO: 7430 - protein, 11 aa, Severe acute respiratory syndrome coronavirus 2
  REGION 1..11: note = Table A: HLA-A*03:02H
ALLAVFQSASK

SEQ ID NO: 7431 - protein, 11 aa, Severe acute respiratory syndrome coronavirus 2
  REGION 1..11: note = Table A: HLA-C*14:02M HLA-C*14:03M HLA-A*24:02M HLA-A*24:07H HLA-A*23:01M
VFQSASKIITL

SEQ ID NO: 7432 - protein, 11 aa, Severe acute respiratory syndrome coronavirus 2
  REGION 1..11: note = Table A: HLA-A*74:01H
KIITLKKRWQL

SEQ ID NO: 7433 - protein, 11 aa, Severe acute respiratory syndrome coronavirus 2
  REGION 1..11: note = Table A: HLA-A*02:02H
LLFVTVYSHLL

SEQ ID NO: 7434 - protein, 11 aa, Severe acute respiratory syndrome coronavirus 2
  REGION 1..11: note = Table A: HLA-B*56:01H HLA-B*55:02M HLA-B*55:01H HLA-A*02:05H HLA-A*02:08H HLA-B*54:01H
TVYSHLLLVAA

SEQ ID NO: 7435 - protein, 11 aa, Severe acute respiratory syndrome coronavirus 2
  REGION 1..11: note = Table A: HLA-A*29:02H
VAAGLEAPFLY

SEQ ID NO: 7436 - protein, 11 aa, Severe acute respiratory syndrome coronavirus 2
  REGION 1..11: note = Table A: HLA-A*24:07H
YFLQSINFVRI

SEQ ID NO: 7437 - protein, 11 aa, Severe acute respiratory syndrome coronavirus 2
  REGION 1..11: note = Table A: HLA-A*74:01H
QSINFVRIIMR

SEQ ID NO: 7438 - protein, 11 aa, Severe acute respiratory syndrome coronavirus 2
  REGION 1..11: note = Table A: HLA-B*55:02H HLA-C*15:05H HLA-B*51:01H
IPYNSVTSSIV

SEQ ID NO: 7439 - protein, 11 aa, Severe acute respiratory syndrome coronavirus 2
  REGION 1..11: note = Table A: HLA-A*24:07H
PYNSVTSSIVI

SEQ ID NO: 7440 - protein, 11 aa, Severe acute respiratory syndrome coronavirus 2
  REGION 1..11: note = Table A: HLA-A*02:08H
IVITSGDGTTS

SEQ ID NO: 7441 - protein, 11 aa, Severe acute respiratory syndrome coronavirus 2
  REGION 1..11: note = Table A: HLA-A*36:01H HLA-A*30:02H
GTTSPISEHDY

SEQ ID NO: 7442 - protein, 11 aa, Severe acute respiratory syndrome coronavirus 2
  REGION 1..11: note = Table A: HLA-A*68:02H
TTSPISEHDYQ

SEQ ID NO: 7443 - protein, 11 aa, Severe acute respiratory syndrome coronavirus 2
  REGION 1..11: note = Table A: HLA-A*36:01H HLA-A*01:01H
ISEHDYQIGGY

SEQ ID NO: 7444 - protein, 11 aa, Severe acute respiratory syndrome coronavirus 2
  REGION 1..11: note = Table A: HLA-B*27:02H HLA-A*34:02H
HDYQIGGYTEK

SEQ ID NO: 7445 - protein, 11 aa, Severe acute respiratory syndrome coronavirus 2
  REGION 1..11: note = Table A: HLA-B*40:01H
WESGVKDCVVL

SEQ ID NO: 7446 - protein, 11 aa, Severe acute respiratory syndrome coronavirus 2
  REGION 1..11: note = Table A: HLA-A*30:02M
GVKDCVVLHSY

SEQ ID NO: 7447 - protein, 11 aa, Severe acute respiratory syndrome coronavirus 2
  REGION 1..11: note = Table A: HLA-A*30:02H
VLHSYFTSDYY

SEQ ID NO: 7448 - protein, 11 aa, Severe acute respiratory syndrome coronavirus 2
  REGION 1..11: note = Table A: HLA-A*29:02M
SYFTSDYYQLY

SEQ ID NO: 7449 - protein, 11 aa, Severe acute respiratory syndrome coronavirus 2
  REGION 1..11: note = Table A: HLA-A*02:11H HLA-A*02:02M
QLSTDTGVEHV

SEQ ID NO: 7450 - protein, 11 aa, Severe acute respiratory syndrome coronavirus 2
  REGION 1..11: note = Table A: HLA-B*58:01H HLA-B*44:05H HLA-B*57:01H HLA-C*04:03M HLA-C*15:05H HLA-B*35:08H HLA-C*08:01H HLA-C*08:02H HLA-B*38:01H HLA-B*38:02H HLA-B*57:03M HLA-C*05:01H
STDTGVEHVTF

SEQ ID NO: 7451 - protein, 11 aa, Severe acute respiratory syndrome coronavirus 2
  REGION 1..11: note = Table A: HLA-B*38:02H
EHVTFFIYNKI

SEQ ID NO: 7452 - protein, 11 aa, Severe acute respiratory syndrome coronavirus 2
  REGION 1..11: note = Table A: HLA-C*04:03M HLA-A*02:11M HLA-A*02:06H HLA-A*02:07H HLA-C*08:01H HLA-C*08:02M HLA-B*38:02H HLA-C*05:01M
IVDEPEEHVQI

SEQ ID NO: 7453 - protein, 11 aa, Severe acute respiratory syndrome coronavirus 2
  REGION 1..11: note = Table A: HLA-C*04:01H HLA-C*04:03H
IYDEPTTTTSV

SEQ ID NO: 7454 - protein, 11 aa, Severe acute respiratory syndrome coronavirus 2
  REGION 1..11: note = Table A: HLA-B*44:05H HLA-C*07:01H HLA-A*68:02H HLA-C*08:03H HLA-B*07:05H
DEPTTTTSVPL

SEQ ID NO: 7455 - protein, 8 aa, Severe acute respiratory syndrome coronavirus 2
  REGION 1..8: note = Table A: HLA-C*08:01H
YSFVSEET

SEQ ID NO: 7456 - protein, 8 aa, Severe acute respiratory syndrome coronavirus 2
  REGION 1..8: note = Table A: HLA-C*08:02H
VSEETGTL

SEQ ID NO: 7457 - protein, 8 aa, Severe acute respiratory syndrome coronavirus 2
  REGION 1..8: note = Table A: HLA-B*49:01H
SEETGTLI

SEQ ID NO: 7458 - protein, 8 aa, Severe acute respiratory syndrome coronavirus 2
  REGION 1..8: note = Table A: HLA-B*14:01H
TLIVNSVL

SEQ ID NO: 7459 - protein, 8 aa, Severe acute respiratory syndrome coronavirus 2
  REGION 1..8: note = Table A: HLA-A*02:04H
FLAFVVFL

SEQ ID NO: 7460 - protein, 8 aa, Severe acute respiratory syndrome coronavirus 2
  REGION 1..8: note = Table A: HLA-C*15:05H HLA-C*08:01H
VVFLLVTL

SEQ ID NO: 7461 - protein, 8 aa, Severe acute respiratory syndrome coronavirus 2
  REGION 1..8: note = Table A: HLA-C*15:05H HLA-A*02:04H HLA-B*14:01H HLA-B*38:02H
TLAILTAL

SEQ ID NO: 7462 - protein, 8 aa, Severe acute respiratory syndrome coronavirus 2
  REGION 1..8: note = Table A: HLA-A*34:01H HLA-A*66:01H
LAILTALR

SEQ ID NO: 7463 - protein, 8 aa, Severe acute respiratory syndrome coronavirus 2
  REGION 1..8: note = Table A: HLA-C*15:05H
AILTALRL

SEQ ID NO: 7464 - protein, 8 aa, Severe acute respiratory syndrome coronavirus 2
  REGION 1..8: note = Table A: HLA-B*38:02H HLA-B*15:02H
TALRLCAY

SEQ ID NO: 7465 - protein, 8 aa, Severe acute respiratory syndrome coronavirus 2
  REGION 1..8: note = Table A: HLA-A*03:01H HLA-A*36:01H
IVNVSLVK

SEQ ID NO: 7466 - protein, 8 aa, Severe acute respiratory syndrome coronavirus 2
  REGION 1..8: note = Table A: HLA-B*58:02H HLA-C*16:01M HLA-B*57:03H
VSLVKPSF

SEQ ID NO: 7467 - protein, 8 aa, Severe acute respiratory syndrome coronavirus 2
  REGION 1..8: note = Table A: HLA-A*02:11H
LVKPSFYV

SEQ ID NO: 7468 - protein, 8 aa, Severe acute respiratory syndrome coronavirus 2
  REGION 1..8: note = Table A: HLA-B*15:03H
VKPSFYVY

SEQ ID NO: 7469 - protein, 8 aa, Severe acute respiratory syndrome coronavirus 2
  REGION 1..8: note = Table A: HLA-B*58:02H
SSRVPDLL

SEQ ID NO: 7470 - protein, 8 aa, Severe acute respiratory syndrome coronavirus 2
  REGION 1..8: note = Table A: HLA-C*06:02H
SRVPDLLV

SEQ ID NO: 7471 - protein, 9 aa, Severe acute respiratory syndrome coronavirus 2
  REGION 1..9: note = Table A: HLA-A*11:303H HLA-A*26:03H HLA-C*03:04H HLA-B*35:03H HLA-A*02:05H HLA-A*02:02H HLA-A*02:03H HLA-A*34:01H HLA-B*35:02M HLA-C*08:01H HLA-C*08:02H HLA-B*35:12M HLA-B*38:02H HLA-B*15:02H HLA-B*39:01H
  REGION 1..9: note = CONT. FROM ABOVE: HLA-A*66:01H
FVSEETGTL

SEQ ID NO: 7472 - protein, 9 aa, Severe acute respiratory syndrome coronavirus 2
  REGION 1..9: note = Table A: HLA-B*58:01H HLA-C*04:03H HLA-C*08:02H HLA-C*05:01H HLA-B*49:01H
VSEETGTLI

SEQ ID NO: 7473 - protein, 9 aa, Severe acute respiratory syndrome coronavirus 2
  REGION 1..9: note = Table A: HLA-B*45:01M HLA-B*40:01H HLA-B*40:02H HLA-B*41:02H HLA-B*49:01H
SEETGTLIV

SEQ ID NO: 7474 - protein, 9 aa, Severe acute respiratory syndrome coronavirus 2
  REGION 1..9: note = Table A: HLA-C*12:05H HLA-A*68:02H HLA-C*15:05H HLA-B*51:01H HLA-B*38:02H HLA-B*39:06H HLA-B*13:02H
TGTLIVNSV

SEQ ID NO: 7475 - protein, 9 aa, Severe acute respiratory syndrome coronavirus 2
  REGION 1..9: note = Table A: HLA-A*02:01H HLA-A*02:02H HLA-B*38:02H
TLIVNSVLL

SEQ ID NO: 7476 - protein, 9 aa, Severe acute respiratory syndrome coronavirus 2
  REGION 1..9: note = Table A: HLA-B*58:01H HLA-A*02:11H HLA-A*68:02H HLA-C*15:05H HLA-C*15:02H HLA-A*02:04M HLA-A*02:07H HLA-C*08:01H HLA-B*38:02H HLA-B*13:02H HLA-C*07:04H
IVNSVLLFL

SEQ ID NO: 7477 - protein, 9 aa, Severe acute respiratory syndrome coronavirus 2
  REGION 1..9: note = Table A: HLA-A*68:02H HLA-A*02:04H
SVLLFLAFV

SEQ ID NO: 7478 - protein, 9 aa, Severe acute respiratory syndrome coronavirus 2
  REGION 1..9: note = Table A: HLA-A*02:04M HLA-A*02:02M
FLAFVVFLL

SEQ ID NO: 7479 - protein, 9 aa, Severe acute respiratory syndrome coronavirus 2
  REGION 1..9: note = Table A: HLA-A*68:02H HLA-C*15:02H
LAFVVFLLV

SEQ ID NO: 7480 - protein, 9 aa, Severe acute respiratory syndrome coronavirus 2
  REGION 1..9: note = Table A: HLA-A*02:11H HLA-A*68:02M HLA-A*02:04M HLA-A*02:05H HLA-A*02:06H HLA-C*17:01H HLA-C*08:01M HLA-B*38:02H HLA-B*40:06H
FVVFLLVTL

SEQ ID NO: 7481 - protein, 9 aa, Severe acute respiratory syndrome coronavirus 2
  REGION 1..9: note = Table A: HLA-C*14:03H HLA-A*24:07H
VFLLVTLAI

SEQ ID NO: 7482 - protein, 9 aa, Severe acute respiratory syndrome coronavirus 2
  REGION 1..9: note = Table A: HLA-A*02:04H
FLLVTLAIL

SEQ ID NO: 7483 - protein, 9 aa, Severe acute respiratory syndrome coronavirus 2
  REGION 1..9: note = Table A: HLA-B*54:01H
LVTLAILTA

SEQ ID NO: 7484 - protein, 9 aa, Severe acute respiratory syndrome coronavirus 2
  REGION 1..9: note = Table A: HLA-A*11:303H HLA-B*46:01H HLA-C*03:03H HLA-A*02:11M HLA-C*03:04H HLA-A*68:02H HLA-C*15:05M HLA-C*15:02H HLA-A*02:04M HLA-A*02:06H HLA-B*14:01H HLA-A*02:01H HLA-A*34:02H HLA-C*08:01H HLA-B*38:02H
  REGION 1..9: note = CONT. FROM ABOVE: HLA-B*07:05H HLA-B*57:03M
VTLAILTAL

SEQ ID NO: 7485 - protein, 9 aa, Severe acute respiratory syndrome coronavirus 2
  REGION 1..9: note = Table A: HLA-A*74:01M HLA-A*34:01H
TLAILTALR

SEQ ID NO: 7486 - protein, 9 aa, Severe acute respiratory syndrome coronavirus 2
  REGION 1..9: note = Table A: HLA-C*03:03H HLA-C*03:04H HLA-C*17:01H
LAILTALRL

SEQ ID NO: 7487 - protein, 9 aa, Severe acute respiratory syndrome coronavirus 2
  REGION 1..9: note = Table A: HLA-C*16:01M HLA-B*46:01H HLA-C*03:02H
LTALRLCAY

SEQ ID NO: 7488 - protein, 9 aa, Severe acute respiratory syndrome coronavirus 2
  REGION 1..9: note = Table A: HLA-A*11:303H
CCNIVNVSL

SEQ ID NO: 7489 - protein, 9 aa, Severe acute respiratory syndrome coronavirus 2
  REGION 1..9: note = Table A: HLA-A*34:02M HLA-A*66:01H
NIVNVSLVK

SEQ ID NO: 7490 - protein, 9 aa, Severe acute respiratory syndrome coronavirus 2
  REGION 1..9: note = Table A: HLA-B*35:01H HLA-B*15:02H HLA-B*07:05H
NVSLVKPSF

SEQ ID NO: 7491 - protein, 9 aa, Severe acute respiratory syndrome coronavirus 2
  REGION 1..9: note = Table A: HLA-B*58:01H HLA-B*58:02H HLA-C*16:01H HLA-A*36:01H HLA-A*30:02H HLA-B*57:03H
VSLVKPSFY

SEQ ID NO: 7492 - protein, 9 aa, Severe acute respiratory syndrome coronavirus 2
  REGION 1..9: note = Table A: HLA-A*02:11M HLA-A*68:02H HLA-A*02:04M HLA-A*02:06H HLA-A*02:01H HLA-A*02:02H HLA-B*38:02H HLA-B*13:02H
SLVKPSFYV

SEQ ID NO: 7493 - protein, 9 aa, Severe acute respiratory syndrome coronavirus 2
  REGION 1..9: note = Table A: HLA-B*58:02H HLA-C*16:01H HLA-B*57:01H HLA-B*46:01M HLA-A*29:01H HLA-A*29:02M HLA-C*03:02M HLA-A*30:01H HLA-A*30:02M HLA-C*12:02H HLA-B*35:07H HLA-B*38:02M HLA-B*07:04H HLA-B*15:01M HLA-B*15:02M HLA-C*02:02H
  REGION 1..9: note = CONT. FROM ABOVE: HLA-B*15:11H
LVKPSFYVY

SEQ ID NO: 7494 - protein, 9 aa, Severe acute respiratory syndrome coronavirus 2
  REGION 1..9: note = Table A: HLA-A*68:02H
PSFYVYSRV

SEQ ID NO: 7495 - protein, 9 aa, Severe acute respiratory syndrome coronavirus 2
  REGION 1..9: note = Table A: HLA-A*30:01H
SFYVYSRVK

SEQ ID NO: 7496 - protein, 9 aa, Severe acute respiratory syndrome coronavirus 2
  REGION 1..9: note = Table A: HLA-B*08:01M HLA-C*03:03H HLA-A*02:11M HLA-C*03:04H HLA-A*68:02H HLA-B*14:02H HLA-C*12:03H HLA-C*15:02H HLA-A*02:04H HLA-A*02:05H HLA-A*02:02M HLA-A*02:03M HLA-A*34:01H HLA-A*34:02H HLA-C*17:01M HLA-B*38:02H
  REGION 1..9: note = CONT. FROM ABOVE: HLA-B*07:04M HLA-A*66:01H
YVYSRVKNL

SEQ ID NO: 7497 - protein, 9 aa, Severe acute respiratory syndrome coronavirus 2
  REGION 1..9: note = Table A: HLA-A*74:01H HLA-A*33:03H HLA-A*30:02H HLA-A*31:01M
RVKNLNSSR

SEQ ID NO: 7498 - protein, 9 aa, Severe acute respiratory syndrome coronavirus 2
  REGION 1..9: note = Table A: HLA-A*68:02H
NSSRVPDLL

SEQ ID NO: 7499 - protein, 9 aa, Severe acute respiratory syndrome coronavirus 2
  REGION 1..9: note = Table A: HLA-B*58:02H HLA-A*30:01H HLA-A*68:02H HLA-C*15:05M HLA-C*15:02M HLA-B*52:01H HLA-C*08:01H HLA-B*38:02H HLA-B*07:04H HLA-B*57:03H HLA-B*13:02M HLA-B*49:01H
SSRVPDLLV

SEQ ID NO: 7500 - protein, 10 aa, Severe acute respiratory syndrome coronavirus 2
  REGION 1..10: note = Table A: HLA-A*68:02H HLA-A*02:05M HLA-A*02:06H HLA-A*02:02H HLA-B*38:02H
FVSEETGTLI

SEQ ID NO: 7501 - protein, 10 aa, Severe acute respiratory syndrome coronavirus 2
  REGION 1..10: note = Table A: HLA-A*68:02H
ETGTLIVNSV

SEQ ID NO: 7502 - protein, 10 aa, Severe acute respiratory syndrome coronavirus 2
  REGION 1..10: note = Table A: HLA-A*74:01H
VTLAILTALR

SEQ ID NO: 7503 - protein, 10 aa, Severe acute respiratory syndrome coronavirus 2
  REGION 1..10: note = Table A: HLA-A*02:02H
TLAILTALRL

SEQ ID NO: 7504 - protein, 10 aa, Severe acute respiratory syndrome coronavirus 2
  REGION 1..10: note = Table A: HLA-A*29:02H HLA-A*30:02H HLA-B*38:02H HLA-B*15:02H
SLVKPSFYVY

SEQ ID NO: 7505 - protein, 10 aa, Severe acute respiratory syndrome coronavirus 2
  REGION 1..10: note = Table A: HLA-B*27:05H
SRVKNLNSSR

SEQ ID NO: 7506 - protein, 10 aa, Severe acute respiratory syndrome coronavirus 2
  REGION 1..10: note = Table A: HLA-B*07:04H
RVKNLNSSRV

SEQ ID NO: 7507 - protein, 10 aa, Severe acute respiratory syndrome coronavirus 2
  REGION 1..10: note = Table A: HLA-A*68:02M HLA-C*15:05H HLA-C*15:02M HLA-B*13:02H
NSSRVPDLLV

SEQ ID NO: 7508 - protein, 11 aa, Severe acute respiratory syndrome coronavirus 2
  REGION 1..11: note = Table A: HLA-B*57:03H
GTLIVNSVLLF

SEQ ID NO: 7509 - protein, 11 aa, Severe acute respiratory syndrome coronavirus 2
  REGION 1..11: note = Table A: HLA-A*02:04H
TLIVNSVLLFL

SEQ ID NO: 7510 - protein, 11 aa, Severe acute respiratory syndrome coronavirus 2
  REGION 1..11: note = Table A: HLA-A*02:04H
LLVTLAILTAL

SEQ ID NO: 7511 - protein, 11 aa, Severe acute respiratory syndrome coronavirus 2
  REGION 1..11: note = Table A: HLA-B*57:03H
VTLAILTALRL

SEQ ID NO: 7512 - protein, 11 aa, Severe acute respiratory syndrome coronavirus 2
  REGION 1..11: note = Table A: HLA-B*57:03H
IVNVSLVKPSF

SEQ ID NO: 7513 - protein, 11 aa, Severe acute respiratory syndrome coronavirus 2
  REGION 1..11: note = Table A: HLA-A*74:01H
LVKPSFYVYSR

SEQ ID NO: 7514 - protein, 8 aa, Severe acute respiratory syndrome coronavirus 2
  REGION 1..8: note = Table A: HLA-B*51:01H
DSNGTITV

SEQ ID NO: 7515 - protein, 8 aa, Severe acute respiratory syndrome coronavirus 2
  REGION 1..8: note = Table A: HLA-A*11:303H HLA-C*15:05H HLA-A*02:05H HLA-C*08:03H HLA-B*40:02H HLA-B*39:01H
GTITVEEL

SEQ ID NO: 7516 - protein, 8 aa, Severe acute respiratory syndrome coronavirus 2
  REGION 1..8: note = Table A: HLA-A*02:11M HLA-A*02:04M HLA-A*02:02H
KLLEQWNL

SEQ ID NO: 7517 - protein, 8 aa, Severe acute respiratory syndrome coronavirus 2
  REGION 1..8: note = Table A: HLA-A*33:03H HLA-A*34:01H HLA-A*66:01H
FAYANRNR

SEQ ID NO: 7518 - protein, 8 aa, Severe acute respiratory syndrome coronavirus 2
  REGION 1..8: note = Table A: HLA-B*58:02M HLA-C*16:01H HLA-C*03:04H HLA-C*12:03H
YANRNRFL

SEQ ID NO: 7519 - protein, 8 aa, Severe acute respiratory syndrome coronavirus 2
  REGION 1..8: note = Table A: HLA-B*52:01H
FLYIIKLI

SEQ ID NO: 7520 - protein, 8 aa, Severe acute respiratory syndrome coronavirus 2
  REGION 1..8: note = Table A: HLA-C*17:01H
YIIKLIFL

SEQ ID NO: 7521 - protein, 8 aa, Severe acute respiratory syndrome coronavirus 2
  REGION 1..8: note = Table A: HLA-A*02:04H
WLLWPVTL

SEQ ID NO: 7522 - protein, 8 aa, Severe acute respiratory syndrome coronavirus 2
  REGION 1..8: note = Table A: HLA-A*02:11H HLA-A*02:01H
LLWPVTLA

SEQ ID NO: 7523 - protein, 8 aa, Severe acute respiratory syndrome coronavirus 2
  REGION 1..8: note = Table A: HLA-C*15:05H
WPVTLACF

SEQ ID NO: 7524 - protein, 8 aa, Severe acute respiratory syndrome coronavirus 2
  REGION 1..8: note = Table A: HLA-C*14:03H HLA-B*15:02H HLA-B*07:05H
CFVLAAVY

SEQ ID NO: 7525 - protein, 8 aa, Severe acute respiratory syndrome coronavirus 2
  REGION 1..8: note = Table A: HLA-A*66:01H
FVLAAVYR

SEQ ID NO: 7526 - protein, 8 aa, Severe acute respiratory syndrome coronavirus 2
  REGION 1..8: note = Table A: HLA-B*35:03H HLA-C*15:05H HLA-B*35:01H HLA-B*07:05H HLA-C*07:04H
TGGIAIAM

SEQ ID NO: 7527 - protein, 8 aa, Severe acute respiratory syndrome coronavirus 2
  REGION 1..8: note = Table A: HLA-B*39:06H
GGIAIAMA

SEQ ID NO: 7528 - protein, 8 aa, Severe acute respiratory syndrome coronavirus 2
  REGION 1..8: note = Table A: HLA-C*15:05H HLA-B*51:01H
IAIAMACL

SEQ ID NO: 7529 - protein, 8 aa, Severe acute respiratory syndrome coronavirus 2
  REGION 1..8: note = Table A: HLA-A*02:11H
LMWLSYFI

SEQ ID NO: 7530 - protein, 8 aa, Severe acute respiratory syndrome coronavirus 2
  REGION 1..8: note = Table A: HLA-A*33:03H
SYFIASFR

SEQ ID NO: 7531 - protein, 8 aa, Severe acute respiratory syndrome coronavirus 2
  REGION 1..8: note = Table A: HLA-A*24:07H
YFIASFRL

SEQ ID NO: 7532 - protein, 8 aa, Severe acute respiratory syndrome coronavirus 2
  REGION 1..8: note = Table A: HLA-C*03:02H
FIASFRLF

SEQ ID NO: 7533 - protein, 8 aa, Severe acute respiratory syndrome coronavirus 2
  REGION 1..8: note = Table A: HLA-A*74:01H HLA-A*11:02H HLA-A*31:01H
ASFRLFAR

SEQ ID NO: 7534 - protein, 8 aa, Severe acute respiratory syndrome coronavirus 2
  REGION 1..8: note = Table A: HLA-B*58:02H HLA-B*57:03H
RTRSMWSF

SEQ ID NO: 7535 - protein, 8 aa, Severe acute respiratory syndrome coronavirus 2
  REGION 1..8: note = Table A: HLA-B*42:01H HLA-B*35:03H HLA-C*15:05M HLA-B*07:02H HLA-B*07:04H HLA-B*07:05H
VPLHGTIL

SEQ ID NO: 7536 - protein, 8 aa, Severe acute respiratory syndrome coronavirus 2
  REGION 1..8: note = Table A: HLA-B*08:01H
TILTRPLL

SEQ ID NO: 7537 - protein, 8 aa, Severe acute respiratory syndrome coronavirus 2
  REGION 1..8: note = Table A: HLA-C*15:05M HLA-B*07:05H
RPLLESEL

SEQ ID NO: 7538 - protein, 8 aa, Severe acute respiratory syndrome coronavirus 2
  REGION 1..8: note = Table A: HLA-B*40:02H HLA-B*07:05H HLA-B*41:02H HLA-B*49:01M
SELVIGAV

SEQ ID NO: 7539 - protein, 8 aa, Severe acute respiratory syndrome coronavirus 2
  REGION 1..8: note = Table A: HLA-A*74:01H
VIGAVILR

SEQ ID NO: 7540 - protein, 8 aa, Severe acute respiratory syndrome coronavirus 2
  REGION 1..8: note = Table A: HLA-A*74:01H
VILRGHLR

SEQ ID NO: 7541 - protein, 8 aa, Severe acute respiratory syndrome coronavirus 2
  REGION 1..8: note = Table A: HLA-A*36:01H
IAGHHLGR

SEQ ID NO: 7542 - protein, 8 aa, Severe acute respiratory syndrome coronavirus 2
  REGION 1..8: note = Table A: HLA-B*51:01H
DLPKEITV

SEQ ID NO: 7543 - protein, 8 aa, Severe acute respiratory syndrome coronavirus 2
  REGION 1..8: note = Table A: HLA-B*56:01H HLA-B*55:02H HLA-B*55:01M HLA-B*39:06H HLA-B*54:01M
LPKEITVA

SEQ ID NO: 7544 - protein, 8 aa, Severe acute respiratory syndrome coronavirus 2
  REGION 1..8: note = Table A: HLA-A*33:03H HLA-A*26:03H HLA-A*68:01H HLA-A*34:01H HLA-A*66:01H
EITVATSR

SEQ ID NO: 7545 - protein, 8 aa, Severe acute respiratory syndrome coronavirus 2
  REGION 1..8: note = Table A: HLA-B*58:02H HLA-C*03:04H HLA-C*15:05H HLA-B*14:01H HLA-B*38:02H HLA-B*15:02H
TVATSRTL

SEQ ID NO: 7546 - protein, 8 aa, Severe acute respiratory syndrome coronavirus 2
  REGION 1..8: note = Table A: HLA-B*58:01H HLA-A*36:01M HLA-A*30:02H
ATSRTLSY

SEQ ID NO: 7547 - protein, 8 aa, Severe acute respiratory syndrome coronavirus 2
  REGION 1..8: note = Table A: HLA-B*46:01H
TSRTLSYY

SEQ ID NO: 7548 - protein, 8 aa, Severe acute respiratory syndrome coronavirus 2
  REGION 1..8: note = Table A: HLA-B*58:02H HLA-B*57:03H
RTLSYYKL

SEQ ID NO: 7549 - protein, 8 aa, Severe acute respiratory syndrome coronavirus 2
  REGION 1..8: note = Table A: HLA-A*02:02H
KLGASQRV

SEQ ID NO: 7550 - protein, 8 aa, Severe acute respiratory syndrome coronavirus 2
  REGION 1..8: note = Table A: HLA-B*07:05H
GDSGFAAY

SEQ ID NO: 7551 - protein, 8 aa, Severe acute respiratory syndrome coronavirus 2
  REGION 1..8: note = Table A: HLA-A*34:01H HLA-A*66:01H
FAAYSRYR

SEQ ID NO: 7552 - protein, 8 aa, Severe acute respiratory syndrome coronavirus 2
  REGION 1..8: note = Table A: HLA-C*07:02H HLA-B*38:02H
YRIGNYKL

SEQ ID NO: 7553 - protein, 8 aa, Severe acute respiratory syndrome coronavirus 2
  REGION 1..8: note = Table A: HLA-C*04:03M HLA-C*08:02H HLA-C*05:01H
SSDNIALL

SEQ ID NO: 7554 - protein, 9 aa, Severe acute respiratory syndrome coronavirus 2
  REGION 1..9: note = Table A: HLA-B*37:01H HLA-B*41:02H HLA-B*49:01H
ADSNGTITV

SEQ ID NO: 7555 - protein, 9 aa, Severe acute respiratory syndrome coronavirus 2
  REGION 1..9: note = Table A: HLA-B*35:03H HLA-B*39:01H
NGTITVEEL

SEQ ID NO: 7556 - protein, 9 aa, Severe acute respiratory syndrome coronavirus 2
  REGION 1..9: note = Table A: HLA-A*11:303H HLA-A*03:02H HLA-A*11:01M HLA-A*11:02M HLA-A*36:01H HLA-B*57:01H HLA-B*27:02H HLA-A*30:02H HLA-A*68:01H HLA-A*68:02H HLA-A*34:02H HLA-C*07:27M
GTITVEELK

SEQ ID NO: 7557 - protein, 9 aa, Severe acute respiratory syndrome coronavirus 2
  REGION 1..9: note = Table A: HLA-A*02:05H
ITVEELKKL

SEQ ID NO: 7558 - protein, 9 aa, Severe acute respiratory syndrome coronavirus 2
  REGION 1..9: note = Table A: HLA-A*25:01H HLA-B*38:02H HLA-B*57:03H
ELKKLLEQW

SEQ ID NO: 7559 - protein, 9 aa, Severe acute respiratory syndrome coronavirus 2
  REGION 1..9: note = Table A: HLA-B*48:01H
KKLLEQWNL

SEQ ID NO: 7560 - protein, 9 aa, Severe acute respiratory syndrome coronavirus 2
  REGION 1..9: note = Table A: HLA-A*02:11H HLA-A*02:04H HLA-A*02:07H HLA-A*02:01H HLA-A*02:02H HLA-B*13:02H
KLLEQWNLV

SEQ ID NO: 7561 - protein, 9 aa, Severe acute respiratory syndrome coronavirus 2
  REGION 1..9: note = Table A: HLA-A*74:01M
LLQFAYANR

SEQ ID NO: 7562 - protein, 9 aa, Severe acute respiratory syndrome coronavirus 2
  REGION 1..9: note = Table A: HLA-A*33:03H
QFAYANRNR

SEQ ID NO: 7563 - protein, 9 aa, Severe acute respiratory syndrome coronavirus 2
  REGION 1..9: note = Table A: HLA-C*03:02H HLA-C*12:02H HLA-B*35:07H HLA-C*02:02H
FAYANRNRF

SEQ ID NO: 7564 - protein, 9 aa, Severe acute respiratory syndrome coronavirus 2
  REGION 1..9: note = Table A: HLA-C*14:02H
AYANRNRFL

SEQ ID NO: 7565 - protein, 9 aa, Severe acute respiratory syndrome coronavirus 2
  REGION 1..9: note = Table A: HLA-B*58:01H HLA-C*16:01H HLA-A*36:01H HLA-A*29:02M HLA-B*53:01H HLA-A*30:02H HLA-B*35:07M HLA-B*57:03H HLA-C*02:02H
YANRNRFLY

SEQ ID NO: 7566 - protein, 9 aa, Severe acute respiratory syndrome coronavirus 2
  REGION 1..9: note = Table A: HLA-C*15:02H
ANRNRFLYI

SEQ ID NO: 7567 - protein, 9 aa, Severe acute respiratory syndrome coronavirus 2
  REGION 1..9: note = Table A: HLA-C*06:02M HLA-B*27:05H HLA-C*07:01H HLA-C*07:02H HLA-B*14:02M
NRFLYIIKL

SEQ ID NO: 7568 - protein, 9 aa, Severe acute respiratory syndrome coronavirus 2
  REGION 1..9: note = Table A: HLA-B*58:02H HLA-A*24:07H
RFLYIIKLI

SEQ ID NO: 7569 - protein, 9 aa, Severe acute respiratory syndrome coronavirus 2
  REGION 1..9: note = Table A: HLA-A*24:02H HLA-A*24:07H
LYIIKLIFL

SEQ ID NO: 7570 - protein, 9 aa, Severe acute respiratory syndrome coronavirus 2
  REGION 1..9: note = Table A: HLA-B*58:01H HLA-A*24:07H HLA-B*57:03M
YIIKLIFLW

SEQ ID NO: 7571 - protein, 9 aa, Severe acute respiratory syndrome coronavirus 2
  REGION 1..9: note = Table A: HLA-C*04:03H HLA-A*02:04H HLA-A*24:02H HLA-A*24:07H HLA-A*23:01H
LWLLWPVTL

SEQ ID NO: 7572 - protein, 9 aa, Severe acute respiratory syndrome coronavirus 2
  REGION 1..9: note = Table A: HLA-A*02:11M HLA-A*02:01H
LLWPVTLAC

SEQ ID NO: 7573 - protein, 9 aa, Severe acute respiratory syndrome coronavirus 2
  REGION 1..9: note = Table A: HLA-A*24:02H HLA-A*24:07H
LWPVTLACF

SEQ ID NO: 7574 - protein, 9 aa, Severe acute respiratory syndrome coronavirus 2
  REGION 1..9: note = Table A: HLA-B*46:01H HLA-B*38:02H HLA-B*15:02H HLA-B*15:03H
ACFVLAAVY

SEQ ID NO: 7575 - protein, 9 aa, Severe acute respiratory syndrome coronavirus 2
  REGION 1..9: note = Table A: HLA-A*02:11M HLA-A*68:02H HLA-A*02:04M HLA-A*02:06M HLA-A*02:01H HLA-C*08:01H HLA-B*38:02H HLA-B*13:02H
FVLAAVYRI

SEQ ID NO: 7576 - protein, 9 aa, Severe acute respiratory syndrome coronavirus 2
  REGION 1..9: note = Table A: HLA-B*58:01H HLA-B*57:01H HLA-B*53:01H HLA-B*57:03M
LAAVYRINW

SEQ ID NO: 7577 - protein, 9 aa, Severe acute respiratory syndrome coronavirus 2
  REGION 1..9: note = Table A: HLA-C*12:03H HLA-C*17:01H
AAVYRINWI

SEQ ID NO: 7578 - protein, 9 aa, Severe acute respiratory syndrome coronavirus 2
  REGION 1..9: note = Table A: HLA-A*02:11H
AVYRINWIT

SEQ ID NO: 7579 - protein, 9 aa, Severe acute respiratory syndrome coronavirus 2
  REGION 1..9: note = Table A: HLA-A*02:11H HLA-C*15:02H HLA-B*13:02H
RINWITGGI

SEQ ID NO: 7580 - protein, 9 aa, Severe acute respiratory syndrome coronavirus 2
  REGION 1..9: note = Table A: HLA-C*14:02H HLA-C*14:03H HLA-C*08:01H
NWITGGIAI

SEQ ID NO: 7581 - protein, 9 aa, Severe acute respiratory syndrome coronavirus 2
  REGION 1..9: note = Table A: HLA-A*68:02H HLA-C*15:05M HLA-B*35:01H HLA-B*07:05H HLA-B*57:03H HLA-C*07:04H
ITGGIAIAM

SEQ ID NO: 7582 - protein, 9 aa, Severe acute respiratory syndrome coronavirus 2
  REGION 1..9: note = Table A: HLA-B*51:01H
IAIAMACLV

SEQ ID NO: 7583 - protein, 9 aa, Severe acute respiratory syndrome coronavirus 2
  REGION 1..9: note = Table A: HLA-C*15:05H
IAMACLVGL

SEQ ID NO: 7584 - protein, 9 aa, Severe acute respiratory syndrome coronavirus 2
  REGION 1..9: note = Table A: HLA-B*53:01H
MACLVGLMW

SEQ ID NO: 7585 - protein, 9 aa, Severe acute respiratory syndrome coronavirus 2
  REGION 1..9: note = Table A: HLA-A*29:02H
LVGLMWLSY

SEQ ID NO: 7586 - protein, 9 aa, Severe acute respiratory syndrome coronavirus 2
  REGION 1..9: note = Table A: HLA-A*02:04H
WLSYFIASF

SEQ ID NO: 7587 - protein, 9 aa, Severe acute respiratory syndrome coronavirus 2
  REGION 1..9: note = Table A: HLA-A*74:01H HLA-A*34:01H HLA-A*34:02H HLA-A*66:01M
LSYFIASFR

SEQ ID NO: 7588 - protein, 9 aa, Severe acute respiratory syndrome coronavirus 2
  REGION 1..9: note = Table A: HLA-C*14:03H HLA-A*24:02H HLA-A*24:07M HLA-C*08:01H HLA-A*23:01H
SYFIASFRL

SEQ ID NO: 7589 - protein, 9 aa, Severe acute respiratory syndrome coronavirus 2
  REGION 1..9: note = Table A: HLA-C*14:02M HLA-C*14:03M HLA-C*16:01H HLA-A*29:02M HLA-C*03:02H HLA-A*24:02M HLA-A*24:07H HLA-A*23:01M
YFIASFRLF

SEQ ID NO: 7590 - protein, 9 aa, Severe acute respiratory syndrome coronavirus 2
  REGION 1..9: note = Table A: HLA-A*74:01H HLA-A*34:01H
IASFRLFAR

SEQ ID NO: 7591 - protein, 9 aa, Severe acute respiratory syndrome coronavirus 2
  REGION 1..9: note = Table A: HLA-A*02:11H
ASFRLFART

SEQ ID NO: 7592 - protein, 9 aa, Severe acute respiratory syndrome coronavirus 2
  REGION 1..9: note = Table A: HLA-A*74:01H HLA-A*33:03H
SFRLFARTR

SEQ ID NO: 7593 - protein, 9 aa, Severe acute respiratory syndrome coronavirus 2
  REGION 1..9: note = Table A: HLA-A*74:01H HLA-B*07:04H
RLFARTRSM

SEQ ID NO: 7594 - protein, 9 aa, Severe acute respiratory syndrome coronavirus 2
  REGION 1..9: note = Table A: HLA-A*24:07H
LFARTRSMW

SEQ ID NO: 7595 - protein, 9 aa, Severe acute respiratory syndrome coronavirus 2
  REGION 1..9: note = Table A: HLA-B*27:05M
ARTRSMWSF

SEQ ID NO: 7596 - protein, 9 aa, Severe acute respiratory syndrome coronavirus 2
  REGION 1..9: note = Table A: HLA-A*02:11H HLA-A*02:01H
SMWSFNPET

SEQ ID NO: 7597 - protein, 9 aa, Severe acute respiratory syndrome coronavirus 2
  REGION 1..9: note = Table A: HLA-C*14:02M HLA-C*14:03M HLA-B*39:01H
SFNPETNIL

SEQ ID NO: 7598 - protein, 9 aa, Severe acute respiratory syndrome coronavirus 2
  REGION 1..9: note = Table A: HLA-A*68:02H
PETNILLNV

SEQ ID NO: 7599 - protein, 9 aa, Severe acute respiratory syndrome coronavirus 2
  REGION 1..9: note = Table A: HLA-A*02:11H
ILLNVPLHG

SEQ ID NO: 7600 - protein, 9 aa, Severe acute respiratory syndrome coronavirus 2
  REGION 1..9: note = Table A: HLA-A*02:11H HLA-A*02:04H HLA-A*02:02H
LLNVPLHGT

SEQ ID NO: 7601 - protein, 9 aa, Severe acute respiratory syndrome coronavirus 2
  REGION 1..9: note = Table A: HLA-C*15:05H HLA-C*01:02H HLA-A*34:01H HLA-C*07:04H
NVPLHGTIL

SEQ ID NO: 7602 - protein, 9 aa, Severe acute respiratory syndrome coronavirus 2
  REGION 1..9: note = Table A: HLA-B*55:02H HLA-C*15:05H HLA-B*54:01H
VPLHGTILT

SEQ ID NO: 7603 - protein, 9 aa, Severe acute respiratory syndrome coronavirus 2
  REGION 1..9: note = Table A: HLA-A*74:01H HLA-A*26:03H HLA-A*34:01H
PLHGTILTR

SEQ ID NO: 7604 - protein, 9 aa, Severe acute respiratory syndrome coronavirus 2
  REGION 1..9: note = Table A: HLA-B*58:01H HLA-B*58:02H HLA-A*30:01H HLA-B*57:03M
GTILTRPLL

SEQ ID NO: 7605 - protein, 9 aa, Severe acute respiratory syndrome coronavirus 2
  REGION 1..9: note = Table A: HLA-C*06:02H HLA-B*39:01H
TRPLLESEL

SEQ ID NO: 7606 - protein, 9 aa, Severe acute respiratory syndrome coronavirus 2
  REGION 1..9: note = Table A: HLA-C*15:05H
RPLLESELV

SEQ ID NO: 7607 - protein, 9 aa, Severe acute respiratory syndrome coronavirus 2
  REGION 1..9: note = Table A: HLA-B*45:01M HLA-B*40:06H HLA-B*50:01H
LESELVIGA

SEQ ID NO: 7608 - protein, 9 aa, Severe acute respiratory syndrome coronavirus 2
  REGION 1..9: note = Table A: HLA-B*44:05M HLA-B*45:01H HLA-B*44:03H HLA-B*40:01H HLA-B*40:02H HLA-B*41:02H HLA-B*49:01H
SELVIGAVI

SEQ ID NO: 7609 - protein, 9 aa, Severe acute respiratory syndrome coronavirus 2
  REGION 1..9: note = Table A: HLA-A*74:01M HLA-A*11:02H HLA-A*33:03H HLA-A*26:03H HLA-A*68:01M HLA-A*34:01M HLA-A*34:02H HLA-A*66:01H
LVIGAVILR

SEQ ID NO: 7610 - protein, 9 aa, Severe acute respiratory syndrome coronavirus 2
  REGION 1..9: note = Table A: HLA-A*74:01M HLA-A*34:01H HLA-A*66:01H
AVILRGHLR

SEQ ID NO: 7611 - protein, 9 aa, Severe acute respiratory syndrome coronavirus 2
  REGION 1..9: note = Table A: HLA-B*38:02H HLA-B*07:04H
HLRIAGHHL

SEQ ID NO: 7612 - protein, 9 aa, Severe acute respiratory syndrome coronavirus 2
  REGION 1..9: note = Table A: HLA-A*74:01H HLA-A*34:01H
RIAGHHLGR

SEQ ID NO: 7613 - protein, 9 aa, Severe acute respiratory syndrome coronavirus 2
  REGION 1..9: note = Table A: HLA-B*38:02H
GHHLGRCDI

SEQ ID NO: 7614 - protein, 9 aa, Severe acute respiratory syndrome coronavirus 2
  REGION 1..9: note = Table A: HLA-B*08:01H HLA-A*68:02H
DIKDLPKEI

SEQ ID NO: 7615 - protein, 9 aa, Severe acute respiratory syndrome coronavirus 2
  REGION 1..9: note = Table A: HLA-A*02:11H HLA-A*02:06H HLA-A*02:01H HLA-B*37:01M HLA-B*40:02M HLA-B*40:06H HLA-B*41:02M HLA-B*13:02H HLA-B*49:01H HLA-C*07:04M
KDLPKEITV

SEQ ID NO: 7616 - protein, 9 aa, Severe acute respiratory syndrome coronavirus 2
  REGION 1..9: note = Table A: HLA-B*42:01H HLA-B*56:01M HLA-B*08:01H HLA-B*55:02M HLA-C*15:05H HLA-B*55:01M HLA-B*35:07H HLA-B*39:06H HLA-B*54:01M HLA-B*07:04H
LPKEITVAT

SEQ ID NO: 7617 - protein, 9 aa, Severe acute respiratory syndrome coronavirus 2
  REGION 1..9: note = Table A: HLA-B*50:01H
KEITVATSR

SEQ ID NO: 7618 - protein, 9 aa, Severe acute respiratory syndrome coronavirus 2
  REGION 1..9: note = Table A: HLA-B*58:02H HLA-A*11:303H HLA-C*16:01H HLA-B*57:01H HLA-C*03:03H HLA-C*03:04M HLA-C*15:05H HLA-C*15:02H HLA-B*57:03H
ITVATSRTL

SEQ ID NO: 7619 - protein, 9 aa, Severe acute respiratory syndrome coronavirus 2
  REGION 1..9: note = Table A: HLA-B*58:01H HLA-C*16:01H HLA-A*03:01H HLA-B*46:01H HLA-A*29:02H HLA-C*03:02M HLA-C*15:05H HLA-C*12:02H HLA-C*12:03H HLA-C*07:27H HLA-B*35:07H HLA-B*38:02H HLA-B*15:01H HLA-B*07:05H HLA-C*02:02H
VATSRTLSY

SEQ ID NO: 7620 - protein, 9 aa, Severe acute respiratory syndrome coronavirus 2
  REGION 1..9: note = Table A: HLA-B*58:01H HLA-A*03:01H HLA-A*11:01H HLA-A*36:01H HLA-A*26:01H HLA-A*29:02H HLA-A*01:01H HLA-A*30:02H HLA-A*34:02H HLA-B*15:01H HLA-B*57:03H
ATSRTLSYY

SEQ ID NO: 7621 - protein, 9 aa, Severe acute respiratory syndrome coronavirus 2
  REGION 1..9: note = Table A: HLA-A*34:02H
TSRTLSYYK

SEQ ID NO: 7622 - protein, 9 aa, Severe acute respiratory syndrome coronavirus 2
  REGION 1..9: note = Table A: HLA-B*27:05H
SRTLSYYKL

SEQ ID NO: 7623 - protein, 9 aa, Severe acute respiratory syndrome coronavirus 2
  REGION 1..9: note = Table A: HLA-A*74:01H
RTLSYYKLG

SEQ ID NO: 7624 - protein, 9 aa, Severe acute respiratory syndrome coronavirus 2
  REGION 1..9: note = Table A: HLA-A*33:01M HLA-A*33:03H HLA-A*26:03H HLA-A*34:01H HLA-A*31:01H HLA-A*66:01H
YYKLGASQR

SEQ ID NO: 7625 - protein, 9 aa, Severe acute respiratory syndrome coronavirus 2
  REGION 1..9: note = Table A: HLA-B*27:05H HLA-B*27:02M HLA-B*38:01M HLA-B*38:02M HLA-B*39:01H
QRVAGDSGF

SEQ ID NO: 7626 - protein, 9 aa, Severe acute respiratory syndrome coronavirus 2
  REGION 1..9: note = Table A: HLA-A*02:08H
RVAGDSGFA

SEQ ID NO: 7627 - protein, 9 aa, Severe acute respiratory syndrome coronavirus 2
  REGION 1..9: note = Table A: HLA-B*55:02H HLA-B*54:01H
VAGDSGFAA

SEQ ID NO: 7628 - protein, 9 aa, Severe acute respiratory syndrome coronavirus 2
  REGION 1..9: note = Table A: HLA-A*11:303H HLA-A*36:01H HLA-B*46:01M HLA-A*01:01M HLA-A*30:02M HLA-C*07:27H HLA-B*35:01H HLA-B*35:08H HLA-B*38:02H HLA-B*15:01H HLA-B*15:03H HLA-B*39:01M HLA-B*07:05H
AGDSGFAAY

SEQ ID NO: 7629 - protein, 9 aa, Severe acute respiratory syndrome coronavirus 2
  REGION 1..9: note = Table A: HLA-A*33:01M HLA-A*33:03H HLA-A*68:01M HLA-A*34:01H HLA-A*66:01H
DSGFAAYSR

SEQ ID NO: 7630 - protein, 9 aa, Severe acute respiratory syndrome coronavirus 2
  REGION 1..9: note = Table A: HLA-B*46:01H HLA-A*29:02H HLA-A*30:02M HLA-C*12:02H HLA-B*35:01H HLA-B*35:07H HLA-B*38:02H HLA-B*15:01H HLA-B*15:03H HLA-B*07:05H
SGFAAYSRY

SEQ ID NO: 7631 - protein, 9 aa, Severe acute respiratory syndrome coronavirus 2
  REGION 1..9: note = Table A: HLA-A*26:01H HLA-A*30:02H
YSRYRIGNY

SEQ ID NO: 7632 - protein, 9 aa, Severe acute respiratory syndrome coronavirus 2
  REGION 1..9: note = Table A: HLA-B*27:05H
SRYRIGNYK

SEQ ID NO: 7633 - protein, 9 aa, Severe acute respiratory syndrome coronavirus 2
  REGION 1..9: note = Table A: HLA-A*30:01H HLA-A*30:02H HLA-A*24:02H HLA-A*24:07M HLA-A*23:01H
RYRIGNYKL

SEQ ID NO: 7634 - protein, 9 aa, Severe acute respiratory syndrome coronavirus 2
  REGION 1..9: note = Table A: HLA-B*38:01M HLA-B*38:02M HLA-B*39:01M
DHSSSSDNI

SEQ ID NO: 7635 - protein, 9 aa, Severe acute respiratory syndrome coronavirus 2
  REGION 1..9: note = Table A: HLA-C*15:05H HLA-B*35:12H
SSSSDNIAL

SEQ ID NO: 7636 - protein, 9 aa, Severe acute respiratory syndrome coronavirus 2
  REGION 1..9: note = Table A: HLA-A*68:02M HLA-C*15:05H HLA-C*15:02H HLA-A*02:05H HLA-A*02:02H HLA-C*17:01H HLA-B*38:02H
SSSDNIALL

SEQ ID NO: 7637 - protein, 9 aa, Severe acute respiratory syndrome coronavirus 2
  REGION 1..9: note = Table A: HLA-A*36:01H HLA-A*68:02H HLA-C*15:05H HLA-C*15:02M HLA-A*02:07H HLA-B*13:02M
SSDNIALLV

SEQ ID NO: 7638 - protein, 10 aa, Severe acute respiratory syndrome coronavirus 2
  REGION 1..10: note = Table A: HLA-B*35:03H HLA-B*35:02H HLA-B*38:02H
MADSNGTITV

SEQ ID NO: 7639 - protein, 10 aa, Severe acute respiratory syndrome coronavirus 2
  REGION 1..10: note = Table A: HLA-A*11:303H HLA-A*11:01M HLA-A*11:02M HLA-A*36:01H HLA-A*34:02H HLA-C*07:27H
GTITVEELKK

SEQ ID NO: 7640 - protein, 10 aa, Severe acute respiratory syndrome coronavirus 2
  REGION 1..10: note = Table A: HLA-B*44:02M HLA-B*44:05H HLA-B*44:03H
EELKKLLEQW

SEQ ID NO: 7641 - protein, 10 aa, Severe acute respiratory syndrome coronavirus 2
  REGION 1..10: note = Table A: HLA-A*02:04H
KLLEQWNLVI

SEQ ID NO: 7642 - protein, 10 aa, Severe acute respiratory syndrome coronavirus 2
  REGION 1..10: note = Table A: HLA-A*24:07H
QWNLVIGFLF

SEQ ID NO: 7643 - protein, 10 aa, Severe acute respiratory syndrome coronavirus 2
  REGION 1..10: note = Table A: HLA-A*02:04H
FLFLTWICLL

SEQ ID NO: 7644 - protein, 10 aa, Severe acute respiratory syndrome coronavirus 2
  REGION 1..10: note = Table A: HLA-A*74:01H
CLLQFAYANR

SEQ ID NO: 7645 - protein, 10 aa, Severe acute respiratory syndrome coronavirus 2
  REGION 1..10: note = Table A: HLA-A*24:07H
QFAYANRNRF

SEQ ID NO: 7646 - protein, 10 aa, Severe acute respiratory syndrome coronavirus 2
  REGION 1..10: note = Table A: HLA-C*03:04H
FAYANRNRFL

SEQ ID NO: 7647 - protein, 10 aa, Severe acute respiratory syndrome coronavirus 2
  REGION 1..10: note = Table A: HLA-A*29:02H HLA-A*30:02H
AYANRNRFLY

SEQ ID NO: 7648 - protein, 10 aa, Severe acute respiratory syndrome coronavirus 2
  REGION 1..10: note = Table A: HLA-A*24:07M HLA-A*23:01H
RFLYIIKLIF

SEQ ID NO: 7649 - protein, 10 aa, Severe acute respiratory syndrome coronavirus 2
  REGION 1..10: note = Table A: HLA-A*02:11M HLA-A*02:04M HLA-A*02:02M HLA-A*02:03H
FLYIIKLIFL

SEQ ID NO: 7650 - protein, 10 aa, Severe acute respiratory syndrome coronavirus 2
  REGION 1..10: note = Table A: HLA-A*24:07H
LYIIKLIFLW

SEQ ID NO: 7651 - protein, 10 aa, Severe acute respiratory syndrome coronavirus 2
  REGION 1..10: note = Table A: HLA-A*02:11M HLA-A*02:04M
FLWLLWPVTL

SEQ ID NO: 7652 - protein, 10 aa, Severe acute respiratory syndrome coronavirus 2
  REGION 1..10: note = Table A: HLA-A*32:01H
VLAAVYRINW

SEQ ID NO: 7653 - protein, 10 aa, Severe acute respiratory syndrome coronavirus 2
  REGION 1..10: note = Table A: HLA-B*40:06H
AVYRINWITG

SEQ ID NO: 7654 - protein, 10 aa, Severe acute respiratory syndrome coronavirus 2
  REGION 1..10: note = Table A: HLA-A*02:08H
ITGGIAIAMA

SEQ ID NO: 7655 - protein, 10 aa, Severe acute respiratory syndrome coronavirus 2
  REGION 1..10: note = Table A: HLA-A*23:01H
MWLSYFIASF

SEQ ID NO: 7656 - protein, 10 aa, Severe acute respiratory syndrome coronavirus 2
  REGION 1..10: note = Table A: HLA-C*14:03H HLA-A*24:02H HLA-A*24:07M HLA-A*23:01H
SYFIASFRLF

SEQ ID NO: 7657 - protein, 10 aa, Severe acute respiratory syndrome coronavirus 2
  REGION 1..10: note = Table A: HLA-C*14:03H
YFIASFRLFA

SEQ ID NO: 7658 - protein, 10 aa, Severe acute respiratory syndrome coronavirus 2
  REGION 1..10: note = Table A: HLA-A*74:01H HLA-A*66:01H
FIASFRLFAR

SEQ ID NO: 7659 - protein, 10 aa, Severe acute respiratory syndrome coronavirus 2
  REGION 1..10: note = Table A: HLA-A*74:01H
ASFRLFARTR

SEQ ID NO: 7660 - protein, 10 aa, Severe acute respiratory syndrome coronavirus 2
  REGION 1..10: note = Table A: HLA-A*32:01M HLA-B*57:03H
RLFARTRSMW

SEQ ID NO: 7661 - protein, 10 aa, Severe acute respiratory syndrome coronavirus 2
  REGION 1..10: note = Table A: HLA-A*02:11H HLA-A*02:04H HLA-A*02:01H
ILLNVPLHGT

SEQ ID NO: 7662 - protein, 10 aa, Severe acute respiratory syndrome coronavirus 2
  REGION 1..10: note = Table A: HLA-A*34:01H HLA-A*34:02H
VPLHGTILTR

SEQ ID NO: 7663 - protein, 10 aa, Severe acute respiratory syndrome coronavirus 2
  REGION 1..10: note = Table A: HLA-B*57:03H
LTRPLLESEL

SEQ ID NO: 7664 - protein, 10 aa, Severe acute respiratory syndrome coronavirus 2
  REGION 1..10: note = Table A: HLA-C*15:05H
RPLLESELVI

SEQ ID NO: 7665 - protein, 10 aa, Severe acute respiratory syndrome coronavirus 2
  REGION 1..10: note = Table A: HLA-B*44:05M HLA-B*40:01M HLA-B*40:02M HLA-B*41:02H
SELVIGAVIL

SEQ ID NO: 7666 - protein, 10 aa, Severe acute respiratory syndrome coronavirus 2
  REGION 1..10: note = Table A: HLA-A*26:03M HLA-A*68:01H HLA-A*34:01M HLA-A*66:01H
ELVIGAVILR

SEQ ID NO: 7667 - protein, 10 aa, Severe acute respiratory syndrome coronavirus 2
  REGION 1..10: note = Table A: HLA-B*38:01H HLA-B*38:02M HLA-B*15:10H
GHLRIAGHHL

SEQ ID NO: 7668 - protein, 10 aa, Severe acute respiratory syndrome coronavirus 2
  REGION 1..10: note = Table A: HLA-B*27:05H
GRCDIKDLPK

SEQ ID NO: 7669 - protein, 10 aa, Severe acute respiratory syndrome coronavirus 2
  REGION 1..10: note = Table A: HLA-A*36:01H HLA-A*25:01H HLA-A*26:01H HLA-A*34:02H HLA-B*35:01H HLA-B*38:02H HLA-B*15:01H HLA-B*15:02M
TVATSRTLSY

SEQ ID NO: 7670 - protein, 10 aa, Severe acute respiratory syndrome coronavirus 2
  REGION 1..10: note = Table A: HLA-C*16:01H HLA-A*30:02H
VATSRTLSYY

SEQ ID NO: 7671 - protein, 10 aa, Severe acute respiratory syndrome coronavirus 2
  REGION 1..10: note = Table A: HLA-A*11:303H HLA-A*03:02H HLA-A*11:01M HLA-A*11:02M HLA-A*34:02H HLA-C*07:27H
ATSRTLSYYK

SEQ ID NO: 7672 - protein, 10 aa, Severe acute respiratory syndrome coronavirus 2
  REGION 1..10: note = Table A: HLA-A*74:01M HLA-A*03:01H HLA-A*11:01H HLA-A*33:01M HLA-A*33:03H HLA-A*26:03H HLA-A*68:01H HLA-A*34:01H HLA-A*34:02H HLA-A*31:01M HLA-A*66:01H
SYYKLGASQR

SEQ ID NO: 7673 - protein, 10 aa, Severe acute respiratory syndrome coronavirus 2
  REGION 1..10: note = Table A: HLA-B*38:02M HLA-B*15:01H HLA-B*15:02H HLA-B*15:03M
SQRVAGDSGF

SEQ ID NO: 7674 - protein, 10 aa, Severe acute respiratory syndrome coronavirus 2
  REGION 1..10: note = Table A: HLA-B*55:02H HLA-A*02:08M
RVAGDSGFAA

SEQ ID NO: 7675 - protein, 10 aa, Severe acute respiratory syndrome coronavirus 2
  REGION 1..10: note = Table A: HLA-A*11:303H HLA-C*16:04H HLA-A*36:01H HLA-B*46:01M HLA-A*26:03H HLA-A*29:02H HLA-C*03:02H HLA-A*30:02H HLA-C*12:02H HLA-A*34:01H HLA-A*34:02H HLA-B*35:01M HLA-B*35:08H HLA-B*35:07H HLA-B*38:02H
  REGION 1..10: note = CONT. FROM ABOVE: HLA-B*15:01H HLA-B*39:01H HLA-B*15:11H
VAGDSGFAAY

SEQ ID NO: 7676 - protein, 10 aa, Severe acute respiratory syndrome coronavirus 2
  REGION 1..10: note = Table A: HLA-B*27:02H
GDSGFAAYSR

SEQ ID NO: 7677 - protein, 10 aa, Severe acute respiratory syndrome coronavirus 2
  REGION 1..10: note = Table A: HLA-A*36:01H HLA-A*26:01H
DSGFAAYSRY

SEQ ID NO: 7678 - protein, 10 aa, Severe acute respiratory syndrome coronavirus 2
  REGION 1..10: note = Table A: HLA-A*30:02H
AYSRYRIGNY

SEQ ID NO: 7679 - protein, 10 aa, Severe acute respiratory syndrome coronavirus 2
  REGION 1..10: note = Table A: HLA-B*27:05M HLA-B*14:02H HLA-B*38:02H
SRYRIGNYKL

SEQ ID NO: 7680 - protein, 10 aa, Severe acute respiratory syndrome coronavirus 2
  REGION 1..10: note = Table A: HLA-A*68:02H HLA-C*15:02H HLA-B*13:02H
SSSDNIALLV

SEQ ID NO: 7681 - protein, 11 aa, Severe acute respiratory syndrome coronavirus 2
  REGION 1..11: note = Table A: HLA-A*02:05H HLA-A*02:08H
GTITVEELKKL

SEQ ID NO: 7682 - protein, 11 aa, Severe acute respiratory syndrome coronavirus 2
  REGION 1..11: note = Table A: HLA-A*74:01H
LLQFAYANRNR

SEQ ID NO: 7683 - protein, 11 aa, Severe acute respiratory syndrome coronavirus 2
  REGION 1..11: note = Table A: HLA-A*29:02H
FAYANRNRFLY

SEQ ID NO: 7684 - protein, 11 aa, Severe acute respiratory syndrome coronavirus 2
  REGION 1..11: note = Table A: HLA-A*24:07M
AYANRNRFLYI

SEQ ID NO: 7685 - protein, 11 aa, Severe acute respiratory syndrome coronavirus 2
  REGION 1..11: note = Table A: HLA-A*24:07H
IFLWLLWPVTL

SEQ ID NO: 7686 - protein, 11 aa, Severe acute respiratory syndrome coronavirus 2
  REGION 1..11: note = Table A: HLA-B*58:02H
RINWITGGIAI

SEQ ID NO: 7687 - protein, 11 aa, Severe acute respiratory syndrome coronavirus 2
  REGION 1..11: note = Table A: HLA-B*58:02H
LSYFIASFRLF

SEQ ID NO: 7688 - protein, 11 aa, Severe acute respiratory syndrome coronavirus 2
  REGION 1..11: note = Table A: HLA-A*02:11M
SMWSFNPETNI

SEQ ID NO: 7689 - protein, 11 aa, Severe acute respiratory syndrome coronavirus 2
  REGION 1..11: note = Table A: HLA-A*68:02H
WSFNPETNILL

SEQ ID NO: 7690 - protein, 11 aa, Severe acute respiratory syndrome coronavirus 2
  REGION 1..11: note = Table A: HLA-A*33:03H HLA-A*26:03H HLA-A*68:01H HLA-A*34:01M HLA-A*34:02H HLA-A*66:01H
NVPLHGTILTR

SEQ ID NO: 7691 - protein, 11 aa, Severe acute respiratory syndrome coronavirus 2
  REGION 1..11: note = Table A: HLA-A*74:01H
HLRIAGHHLGR

SEQ ID NO: 7692 - protein, 11 aa, Severe acute respiratory syndrome coronavirus 2
  REGION 1..11: note = Table A: HLA-B*08:01H HLA-A*68:02H HLA-B*38:02H
DIKDLPKEITV

SEQ ID NO: 7693 - protein, 11 aa, Severe acute respiratory syndrome coronavirus 2
  REGION 1..11: note = Table A: HLA-A*33:01H HLA-A*33:03M HLA-B*56:01H HLA-B*55:02H HLA-A*68:01H HLA-A*34:01H HLA-B*54:01H HLA-A*66:01H
LPKEITVATSR

SEQ ID NO: 7694 - protein, 11 aa, Severe acute respiratory syndrome coronavirus 2
  REGION 1..11: note = Table A: HLA-B*44:05H HLA-B*40:01H HLA-B*40:02H HLA-B*41:02H
KEITVATSRTL

SEQ ID NO: 7695 - protein, 11 aa, Severe acute respiratory syndrome coronavirus 2
  REGION 1..11: note = Table A: HLA-A*03:01H HLA-A*26:01M HLA-A*26:02H HLA-A*30:02M HLA-A*34:01H HLA-A*34:02H HLA-B*38:02M HLA-B*15:01H HLA-B*15:02H
TVATSRTLSYY

SEQ ID NO: 7696 - protein, 11 aa, Severe acute respiratory syndrome coronavirus 2
  REGION 1..11: note = Table A: HLA-B*57:03H
ATSRTLSYYKL

SEQ ID NO: 7697 - protein, 11 aa, Severe acute respiratory syndrome coronavirus 2
  REGION 1..11: note = Table A: HLA-A*74:01H
LSYYKLGASQR

SEQ ID NO: 7698 - protein, 11 aa, Severe acute respiratory syndrome coronavirus 2
  REGION 1..11: note = Table A: HLA-B*57:03H
ASQRVAGDSGF

SEQ ID NO: 7699 - protein, 11 aa, Severe acute respiratory syndrome coronavirus 2
  REGION 1..11: note = Table A: HLA-B*39:06H
QRVAGDSGFAA

SEQ ID NO: 7700 - protein, 11 aa, Severe acute respiratory syndrome coronavirus 2
  REGION 1..11: note = Table A: HLA-B*58:01H HLA-A*03:02M HLA-A*36:01M HLA-A*25:01H HLA-B*46:01H HLA-A*26:01H HLA-A*26:03H HLA-A*29:01H HLA-A*29:02H HLA-A*30:02H HLA-A*02:08H HLA-B*35:01H HLA-B*35:08H HLA-B*38:02H HLA-A*32:01H HLA-B*15:01H
  REGION 1..11: note = CONT. FROM ABOVE: HLA-B*07:05H HLA-B*57:03H HLA-B*13:01H
RVAGDSGFAAY

SEQ ID NO: 7701 - protein, 11 aa, Severe acute respiratory syndrome coronavirus 2
  REGION 1..11: note = Table A: HLA-A*36:01H HLA-A*29:02H HLA-B*27:02H HLA-A*30:02H
GDSGFAAYSRY

SEQ ID NO: 7702 - protein, 11 aa, Severe acute respiratory syndrome coronavirus 2
  REGION 1..11: note = Table A: HLA-A*33:01H
DSGFAAYSRYR

SEQ ID NO: 7703 - protein, 11 aa, Severe acute respiratory syndrome coronavirus 2
  REGION 1..11: note = Table A: HLA-A*30:02H
AAYSRYRIGNY

SEQ ID NO: 7704 - protein, 11 aa, Severe acute respiratory syndrome coronavirus 2
  REGION 1..11: note = Table A: HLA-B*38:01M HLA-B*38:02M HLA-B*39:01M HLA-B*15:10H
DHSSSSDNIAL

SEQ ID NO: 7705 - protein, 8 aa, Severe acute respiratory syndrome coronavirus 2
  REGION 1..8: note = Table A: HLA-B*38:02H HLA-B*39:06H
FHLVDFQV

SEQ ID NO: 7706 - protein, 8 aa, Severe acute respiratory syndrome coronavirus 2
  REGION 1..8: note = Table A: HLA-C*04:03H
LVDFQVTI

SEQ ID NO: 7707 - protein, 8 aa, Severe acute respiratory syndrome coronavirus 2
  REGION 1..8: note = Table A: HLA-B*52:01H HLA-B*38:02H HLA-B*13:02M HLA-B*49:01H
FQVTIAEI

SEQ ID NO: 7708 - protein, 8 aa, Severe acute respiratory syndrome coronavirus 2
  REGION 1..8: note = Table A: HLA-B*40:02H HLA-B*07:05H HLA-B*41:02H
AEILLIIM

SEQ ID NO: 7709 - protein, 8 aa, Severe acute respiratory syndrome coronavirus 2
  REGION 1..8: note = Table A: HLA-A*02:11H
IIMRTFKV

SEQ ID NO: 7710 - protein, 8 aa, Severe acute respiratory syndrome coronavirus 2
  REGION 1..8: note = Table A: HLA-B*58:01M HLA-B*58:02H HLA-B*57:01H HLA-A*32:01H HLA-B*57:03M
RTFKVSIW

SEQ ID NO: 7711 - protein, 8 aa, Severe acute respiratory syndrome coronavirus 2
  REGION 1..8: note = Table A: HLA-C*04:03H
NLDYIINL

SEQ ID NO: 7712 - protein, 8 aa, Severe acute respiratory syndrome coronavirus 2
  REGION 1..8: note = Table A: HLA-B*58:01H HLA-B*58:02H HLA-B*57:03H
KSLTENKY

SEQ ID NO: 7713 - protein, 8 aa, Severe acute respiratory syndrome coronavirus 2
  REGION 1..8: note = Table A: HLA-B*44:05H HLA-B*18:01H HLA-B*37:01H HLA-B*40:02H HLA-B*07:05H HLA-B*41:02H
TENKYSQL

SEQ ID NO: 7714 - protein, 9 aa, Severe acute respiratory syndrome coronavirus 2
  REGION 1..9: note = Table A: HLA-B*38:02H
FHLVDFQVT

SEQ ID NO: 7715 - protein, 9 aa, Severe acute respiratory syndrome coronavirus 2
  REGION 1..9: note = Table A: HLA-B*48:01H HLA-B*58:01H HLA-A*11:303H HLA-A*02:11H HLA-B*53:01H HLA-A*68:02M HLA-B*35:03H HLA-C*15:05H HLA-C*15:02H HLA-A*02:04H HLA-A*02:05M HLA-A*02:06M HLA-A*02:07M HLA-B*14:01H HLA-A*02:01M
  REGION 1..9: note = CONT. FROM ABOVE: HLA-A*02:02H HLA-A*02:03M HLA-B*51:01H HLA- B*52:01M HLA-C*08:01M HLA-B*15:13H HLA-B*38:01M HLA-B*38:02H HLA-B*40:02H HLA-B*40:06M HLA-B*15:02H HLA-B*57:03M HLA-B*13 :01M HLA-B*13:02H HLA-B*49:01H
HLVDFQVTI

SEQ ID NO: 7716 - protein, 9 aa, Severe acute respiratory syndrome coronavirus 2
  REGION 1..9: note = Table A: HLA-A*02:05H HLA-B*38:02H
FQVTIAEIL

SEQ ID NO: 7717 - protein, 9 aa, Severe acute respiratory syndrome coronavirus 2
  REGION 1..9: note = Table A: HLA-C*15:02M HLA-B*57:03H HLA-B*13:02H
VTIAEILLI

SEQ ID NO: 7718 - protein, 9 aa, Severe acute respiratory syndrome coronavirus 2
  REGION 1..9: note = Table A: HLA-A*68:02H HLA-C*15:05H HLA-C*15:02H HLA-A*02:04H HLA-B*38:02H HLA-B*13:02H
TIAEILLII

SEQ ID NO: 7719 - protein, 9 aa, Severe acute respiratory syndrome coronavirus 2
  REGION 1..9: note = Table A: HLA-C*04:03H
IAEILLIIM

SEQ ID NO: 7720 - protein, 9 aa, Severe acute respiratory syndrome coronavirus 2
  REGION 1..9: note = Table A: HLA-A*02:11H
LIIMRTFKV

SEQ ID NO: 7721 - protein, 9 aa, Severe acute respiratory syndrome coronavirus 2
  REGION 1..9: note = Table A: HLA-B*52:01H
IMRTFKVSI

SEQ ID NO: 7722 - protein, 9 aa, Severe acute respiratory syndrome coronavirus 2
  REGION 1..9: note = Table A: HLA-A*24:07H
TFKVSIWNL

SEQ ID NO: 7723 - protein, 9 aa, Severe acute respiratory syndrome coronavirus 2
  REGION 1..9: note = Table A: HLA-A*36:01H HLA-A*29:01H HLA-A*29:02H HLA-A*30:02M
KVSIWNLDY

SEQ ID NO: 7724 - protein, 9 aa, Severe acute respiratory syndrome coronavirus 2
  REGION 1..9: note = Table A: HLA-C*08:01H
VSIWNLDYI

SEQ ID NO: 7725 - protein, 9 aa, Severe acute respiratory syndrome coronavirus 2
  REGION 1..9: note = Table A: HLA-A*02:04M
WNLDYIINL

SEQ ID NO: 7726 - protein, 9 aa, Severe acute respiratory syndrome coronavirus 2
  REGION 1..9: note = Table A: HLA-C*04:03H HLA-A*02:11H HLA-A*02:07M HLA-B*38:02H
NLDYIINLI

SEQ ID NO: 7727 - protein, 9 aa, Severe acute respiratory syndrome coronavirus 2
  REGION 1..9: note = Table A: HLA-A*02:11M HLA-C*15:02H HLA-A*02:04M HLA-A*02:02H HLA-B*07:04H
IINLIIKNL

SEQ ID NO: 7728 - protein, 9 aa, Severe acute respiratory syndrome coronavirus 2
  REGION 1..9: note = Table A: HLA-A*34:02H
NLIIKNLSK

SEQ ID NO: 7729 - protein, 9 aa, Severe acute respiratory syndrome coronavirus 2
  REGION 1..9: note = Table A: HLA-B*08:01H HLA-B*07:02H HLA-B*07:04M
IIKNLSKSL

SEQ ID NO: 7730 - protein, 9 aa, Severe acute respiratory syndrome coronavirus 2
  REGION 1..9: note = Table A: HLA-B*38:02H HLA-B*15:03M
SKSLTENKY

SEQ ID NO: 7731 - protein, 9 aa, Severe acute respiratory syndrome coronavirus 2
  REGION 1..9: note = Table A: HLA-C*04:03H
LTENKYSQL

SEQ ID NO: 7732 - protein, 9 aa, Severe acute respiratory syndrome coronavirus 2
  REGION 1..9: note = Table A: HLA-B*35:02H HLA-B*38:02H HLA-B*39:01H
SQLDEEQPM

SEQ ID NO: 7733 - protein, 10 aa, Severe acute respiratory syndrome coronavirus 2
  REGION 1..10: note = Table A: HLA-B*38:01H HLA-B*38:02H
FHLVDFQVTI

SEQ ID NO: 7734 - protein, 10 aa, Severe acute respiratory syndrome coronavirus 2
  REGION 1..10: note = Table A: HLA-A*02:05H HLA-A*02:08H HLA-A*02:02H HLA-A*02:03M HLA-B*38:02H
HLVDFQVTIA

SEQ ID NO: 7735 - protein, 10 aa, Severe acute respiratory syndrome coronavirus 2
  REGION 1..10: note = Table A: HLA-B*40:06H
AEILLIIMRT

SEQ ID NO: 7736 - protein, 10 aa, Severe acute respiratory syndrome coronavirus 2
  REGION 1..10: note = Table A: HLA-B*58:02H HLA-A*74:01H HLA-A*02:11H HLA-A*02:08H HLA-A*32:01H HLA-B*57:03M
RTFKVSIWNL

SEQ ID NO: 7737 - protein, 10 aa, Severe acute respiratory syndrome coronavirus 2
  REGION 1..10: note = Table A: HLA-A*02:11H HLA-A*68:02H HLA-A*02:04H HLA-A*02:02H HLA-A*02:03H
YIINLIIKNL

SEQ ID NO: 7738 - protein, 10 aa, Severe acute respiratory syndrome coronavirus 2
  REGION 1..10: note = Table A: HLA-A*30:02M
LSKSLTENKY

SEQ ID NO: 7739 - protein, 10 aa, Severe acute respiratory syndrome coronavirus 2
  REGION 1..10: note = Table A: HLA-C*01:02H HLA-A*02:02H HLA-A*02:03H HLA-B*38:02H
SLTENKYSQL

SEQ ID NO: 7740 - protein, 10 aa, Severe acute respiratory syndrome coronavirus 2
  REGION 1..10: note = Table A: HLA-B*38:02H
QLDEEQPMEI

SEQ ID NO: 7741 - protein, 11 aa, Severe acute respiratory syndrome coronavirus 2
  REGION 1..11: note = Table A: HLA-B*13:02H
FQVTIAEILLI

SEQ ID NO: 7742 - protein, 11 aa, Severe acute respiratory syndrome coronavirus 2
  REGION 1..11: note = Table A: HLA-B*44:02H HLA-B*44:03H
AEILLIIMRTF

SEQ ID NO: 7743 - protein, 11 aa, Severe acute respiratory syndrome coronavirus 2
  REGION 1..11: note = Table A: HLA-A*02:11H HLA-A*02:04H
SIWNLDYIINL

SEQ ID NO: 7744 - protein, 11 aa, Severe acute respiratory syndrome coronavirus 2
  REGION 1..11: note = Table A: HLA-B*58:02H HLA-B*57:03M
KSLTENKYSQL

SEQ ID NO: 7745 - protein, 11 aa, Severe acute respiratory syndrome coronavirus 2
  REGION 1..11: note = Table A: HLA-A*02:06H HLA-A*02:01H HLA-B*38:02H HLA-B*13:02H
SQLDEEQPMEI

SEQ ID NO: 7746 - protein, 8 aa, Severe acute respiratory syndrome coronavirus 2
  REGION 1..8: note = Table A: HLA-A*02:01H HLA-A*02:03H
ALITLATC

SEQ ID NO: 7747 - protein, 8 aa, Severe acute respiratory syndrome coronavirus 2
  REGION 1..8: note = Table A: HLA-C*06:02H
VRGTTVLL

SEQ ID NO: 7748 - protein, 8 aa, Severe acute respiratory syndrome coronavirus 2
  REGION 1..8: note = Table A: HLA-B*53:01H HLA-B*35:02H
HPLADNKF

SEQ ID NO: 7749 - protein, 8 aa, Severe acute respiratory syndrome coronavirus 2
  REGION 1..8: note = Table A: HLA-C*07:01H HLA-A*30:02H HLA-B*35:01H HLA-B*35:07H
PDGVKHVY

SEQ ID NO: 7750 - protein, 8 aa, Severe acute respiratory syndrome coronavirus 2
  REGION 1..8: note = Table A: HLA-A*34:01H
HVYQLRAR

SEQ ID NO: 7751 - protein, 8 aa, Severe acute respiratory syndrome coronavirus 2
  REGION 1..8: note = Table A: HLA-B*52:01M HLA-B*13:02H
YQLRARSV

SEQ ID NO: 7752 - protein, 8 aa, Severe acute respiratory syndrome coronavirus 2
  REGION 1..8: note = Table A: HLA-B*14:01H HLA-B*39:01H
ARSVSPKL

SEQ ID NO: 7753 - protein, 8 aa, Severe acute respiratory syndrome coronavirus 2
  REGION 1..8: note = Table A: HLA-B*58:02M HLA-B*57:03H
RSVSPKLF

SEQ ID NO: 7754 - protein, 8 aa, Severe acute respiratory syndrome coronavirus 2
  REGION 1..8: note = Table A: HLA-C*15:05H HLA-C*15:02H
SVSPKLFI

SEQ ID NO: 7755 - protein, 8 aa, Severe acute respiratory syndrome coronavirus 2
  REGION 1..8: note = Table A: HLA-B*18:01H
QEEVQELY

SEQ ID NO: 7756 - protein, 8 aa, Severe acute respiratory syndrome coronavirus 2
  REGION 1..8: note = Table A: HLA-B*18:01H HLA-B*07:05H
QELYSPIF

SEQ ID NO: 7757 - protein, 8 aa, Severe acute respiratory syndrome coronavirus 2
  REGION 1..8: note = Table A: HLA-A*24:07H
LYSPIFLI

SEQ ID NO: 7758 - protein, 8 aa, Severe acute respiratory syndrome coronavirus 2
  REGION 1..8: note = Table A: HLA-B*51:01H
YSPIFLIV

SEQ ID NO: 7759 - protein, 8 aa, Severe acute respiratory syndrome coronavirus 2
  REGION 1..8: note = Table A: HLA-B*56:01M HLA-B*55:02M HLA-B*55:01M HLA-B*39:06H HLA-B*54:01M
SPIFLIVA

SEQ ID NO: 7760 - protein, 8 aa, Severe acute respiratory syndrome coronavirus 2
  REGION 1..8: note = Table A: HLA-B*54:01H
PIFLIVAA

SEQ ID NO: 7761 - protein, 8 aa, Severe acute respiratory syndrome coronavirus 2
  REGION 1..8: note = Table A: HLA-C*03:02H HLA-C*15:05H HLA-C*17:01H HLA-C*08:01H
AAIVFITL

SEQ ID NO: 7762 - protein, 9 aa, Severe acute respiratory syndrome coronavirus 2
  REGION 1..9: note = Table A: HLA-B*58:02H HLA-C*15:02H HLA-B*57:03H
KIILFLALI

SEQ ID NO: 7763 - protein, 9 aa, Severe acute respiratory syndrome coronavirus 2
  REGION 1..9: note = Table A: HLA-A*02:11H HLA-A*02:04M HLA-A*02:01H HLA-A*02:02H
ILFLALITL

SEQ ID NO: 7764 - protein, 9 aa, Severe acute respiratory syndrome coronavirus 2
  REGION 1..9: note = Table A: HLA-B*58:01H HLA-A*29:02H
ITLATCELY

SEQ ID NO: 7765 - protein, 9 aa, Severe acute respiratory syndrome coronavirus 2
  REGION 1..9: note = Table A: HLA-A*02:11H HLA-A*68:02M HLA-A*02:01H HLA-A*02:02M HLA-B*38:02M HLA-B*13:02H
ELYHYQECV

SEQ ID NO: 7766 - protein, 9 aa, Severe acute respiratory syndrome coronavirus 2
  REGION 1..9: note = Table A: HLA-B*45:01H HLA-B*37:01H HLA-B*41:02H HLA-B*49:01M HLA-B*50:01H
QECVRGTTV

SEQ ID NO: 7767 - protein, 9 aa, Severe acute respiratory syndrome coronavirus 2
  REGION 1..9: note = Table A: HLA-A*34:01H
ECVRGTTVL

SEQ ID NO: 7768 - protein, 9 aa, Severe acute respiratory syndrome coronavirus 2
  REGION 1..9: note = Table A: HLA-A*68:02H
TTVLLKEPC

SEQ ID NO: 7769 - protein, 9 aa, Severe acute respiratory syndrome coronavirus 2
  REGION 1..9: note = Table A: HLA-A*03:01H HLA-B*46:01H HLA-A*26:01H HLA-A*26:03H HLA-C*15:05H HLA-C*12:02H HLA-A*34:02H HLA-C*08:03H HLA-B*38:02H HLA-B*15:01H HLA-B*15:02H HLA-B*07:05H HLA-A*66:01H
GTYEGNSPF

SEQ ID NO: 7770 - protein, 9 aa, Severe acute respiratory syndrome coronavirus 2
  REGION 1..9: note = Table A: HLA-B*45:01H HLA-B*40:06H HLA-B*50:01H
YEGNSPFHP

SEQ ID NO: 7771 - protein, 9 aa, Severe acute respiratory syndrome coronavirus 2
  REGION 1..9: note = Table A: HLA-A*68:02H
EGNSPFHPL

SEQ ID NO: 7772 - protein, 9 aa, Severe acute respiratory syndrome coronavirus 2
  REGION 1..9: note = Table A: HLA-B*38:01H HLA-B*38:02M
FHPLADNKF

SEQ ID NO: 7773 - protein, 9 aa, Severe acute respiratory syndrome coronavirus 2
  REGION 1..9: note = Table A: HLA-A*02:04H HLA-A*02:02H
PLADNKFAL

SEQ ID NO: 7774 - protein, 9 aa, Severe acute respiratory syndrome coronavirus 2
  REGION 1..9: note = Table A: HLA-B*45:01H HLA-B*50:01H
ADNKFALTC

SEQ ID NO: 7775 - protein, 9 aa, Severe acute respiratory syndrome coronavirus 2
  REGION 1..9: note = Table A: HLA-B*15:02H
ALTCFSTQF

SEQ ID NO: 7776 - protein, 9 aa, Severe acute respiratory syndrome coronavirus 2
  REGION 1..9: note = Table A: HLA-B*38:02H
TCFSTQFAF

SEQ ID NO: 7777 - protein, 9 aa, Severe acute respiratory syndrome coronavirus 2
  REGION 1..9: note = Table A: HLA-A*02:11H HLA-A*68:02H HLA-A*02:03H HLA-B*38:02H
FAFACPDGV

SEQ ID NO: 7778 - protein, 9 aa, Severe acute respiratory syndrome coronavirus 2
  REGION 1..9: note = Table A: HLA-A*36:01H HLA-B*53:01M HLA-A*30:02M HLA-B*35:01H HLA-B*35:02H HLA-B*35:08H HLA-B*35:07H HLA-B*35:12H HLA-B*38:02H HLA-B*15:02H HLA-B*07:05H
CPDGVKHVY

SEQ ID NO: 7779 - protein, 9 aa, Severe acute respiratory syndrome coronavirus 2
  REGION 1..9: note = Table A: HLA-A*74:01M HLA-A*33:01H HLA-A*33:03H HLA-A*34:01H HLA-A*31:01M HLA-A*66:01H
GVKHVYQLR

SEQ ID NO: 7780 - protein, 9 aa, Severe acute respiratory syndrome coronavirus 2
  REGION 1..9: note = Table A: HLA-C*14:02H HLA-C*14:03H
VYQLRARSV

SEQ ID NO: 7781 - protein, 9 aa, Severe acute respiratory syndrome coronavirus 2
  REGION 1..9: note = Table A: HLA-B*58:02M HLA-A*30:01H HLA-B*07:04M HLA-B*57:03M
RARSVSPKL

SEQ ID NO: 7782 - protein, 9 aa, Severe acute respiratory syndrome coronavirus 2
  REGION 1..9: note = Table A: HLA-B*27:05H
ARSVSPKLF

SEQ ID NO: 7783 - protein, 9 aa, Severe acute respiratory syndrome coronavirus 2
  REGION 1..9: note = Table A: HLA-B*58:01H HLA-B*58:02H HLA-C*15:02M HLA-B*57:03M HLA-B*13:02M
RSVSPKLFI

SEQ ID NO: 7784 - protein, 9 aa, Severe acute respiratory syndrome coronavirus 2
  REGION 1..9: note = Table A: HLA-A*11:303H HLA-A*74:01H HLA-A*03:01H HLA-A*03:02H HLA-A*11:01M HLA-A*11:02H HLA-A*36:01H HLA-A*33:01H HLA-A*33:03M HLA-A*30:02H HLA-A*68:01M HLA-A*68:02H HLA-A*02:04H HLA-A*34:01M HLA-A*34:02H
  REGION 1..9: note = CONT. FROM ABOVE: HLA-C*07:27H HLA-A*31:01M HLA-A*66:01H
SVSPKLFIR

SEQ ID NO: 7785 - protein, 9 aa, Severe acute respiratory syndrome coronavirus 2
  REGION 1..9: note = Table A: HLA-A*02:11M HLA-A*02:02M HLA-B*13:02H
KLFIRQEEV

SEQ ID NO: 7786 - protein, 9 aa, Severe acute respiratory syndrome coronavirus 2
  REGION 1..9: note = Table A: HLA-C*06:02H HLA-C*07:02H HLA-B*14:02H HLA-B*14:01M HLA-B*38:01H HLA-B*38:02M HLA-B*39:01M HLA-C*07:04H
IRQEEVQEL

SEQ ID NO: 7787 - protein, 9 aa, Severe acute respiratory syndrome coronavirus 2
  REGION 1..9: note = Table A: HLA-A*36:01H HLA-A*30:02H HLA-B*15:01M HLA-B*15:03M HLA-B*13:01H
RQEEVQELY

SEQ ID NO: 7788 - protein, 9 aa, Severe acute respiratory syndrome coronavirus 2
  REGION 1..9: note = Table A: HLA-B*45:01H
EEVQELYSP

SEQ ID NO: 7789 - protein, 9 aa, Severe acute respiratory syndrome coronavirus 2
  REGION 1..9: note = Table A: HLA-A*26:03H HLA-A*68:02H
EVQELYSPI

SEQ ID NO: 7790 - protein, 9 aa, Severe acute respiratory syndrome coronavirus 2
  REGION 1..9: note = Table A: HLA-B*40:01H
QELYSPIFL

SEQ ID NO: 7791 - protein, 9 aa, Severe acute respiratory syndrome coronavirus 2
  REGION 1..9: note = Table A: HLA-A*68:02H
ELYSPIFLI

SEQ ID NO: 7792 - protein, 9 aa, Severe acute respiratory syndrome coronavirus 2
  REGION 1..9: note = Table A: HLA-C*06:02H HLA-A*29:02H HLA-A*68:02H HLA-C*15:02H HLA-A*24:02H HLA-A*24:07H HLA-C*08:01H
LYSPIFLIV

SEQ ID NO: 7793 - protein, 9 aa, Severe acute respiratory syndrome coronavirus 2
  REGION 1..9: note = Table A: HLA-B*56:01H HLA-B*55:02H HLA-C*15:05H HLA-B*55:01H HLA-B*39:06M HLA-B*54:01H HLA-B*07:05H
SPIFLIVAA

SEQ ID NO: 7794 - protein, 9 aa, Severe acute respiratory syndrome coronavirus 2
  REGION 1..9: note = Table A: HLA-A*68:02H
IVAAIVFIT

SEQ ID NO: 7795 - protein, 9 aa, Severe acute respiratory syndrome coronavirus 2
  REGION 1..9: note = Table A: HLA-B*58:01H HLA-B*58:02H HLA-A*11:303H HLA-C*16:01H HLA-C*16:04M HLA-B*57:01H HLA-C*03:03M HLA-C*12:05M HLA-C*03:02H HLA-C*03:04M HLA-A*68:02H HLA-B*35:03H HLA-C*15:05M HLA-C*12:02H HLA-C*12:03H
  REGION 1..9: note = CONT. FROM ABOVE: HLA-C*15:02H HLA-A*02:05H HLA-A*02:06H HLA- B*35:01H HLA-C*17:01M HLA-C*08:01M HLA-B*38:02H HLA-B*57:03M HLA-C*07:04H
VAAIVFITL

SEQ ID NO: 7796 - protein, 9 aa, Severe acute respiratory syndrome coronavirus 2
  REGION 1..9: note = Table A: HLA-C*14:03H HLA-A*24:02H HLA-A*24:07M HLA-A*23:01H
VFITLCFTL

SEQ ID NO: 7797 - protein, 9 aa, Severe acute respiratory syndrome coronavirus 2
  REGION 1..9: note = Table A: HLA-A*34:02H
FITLCFTLK

SEQ ID NO: 7798 - protein, 9 aa, Severe acute respiratory syndrome coronavirus 2
  REGION 1..9: note = Table A: HLA-A*34:02H
ITLCFTLKR

SEQ ID NO: 7799 - protein, 10 aa, Severe acute respiratory syndrome coronavirus 2
  REGION 1..10: note = Table A: HLA-A*02:04H
IILFLALITL

SEQ ID NO: 7800 - protein, 10 aa, Severe acute respiratory syndrome coronavirus 2
  REGION 1..10: note = Table A: HLA-A*02:03H
FLALITLATC

SEQ ID NO: 7801 - protein, 10 aa, Severe acute respiratory syndrome coronavirus 2
  REGION 1..10: note = Table A: HLA-C*01:02H HLA-A*02:02H HLA-A*02:03H HLA-B*38:02H
ALITLATCEL

SEQ ID NO: 7802 - protein, 10 aa, Severe acute respiratory syndrome coronavirus 2
  REGION 1..10: note = Table A: HLA-A*33:03H HLA-A*34:01H
ELYHYQECVR

SEQ ID NO: 7803 - protein, 10 aa, Severe acute respiratory syndrome coronavirus 2
  REGION 1..10: note = Table A: HLA-A*03:01H
CVRGTTVLLK

SEQ ID NO: 7804 - protein, 10 aa, Severe acute respiratory syndrome coronavirus 2
  REGION 1..10: note = Table A: HLA-A*11:303M HLA-A*74:01H HLA-A*03:01H HLA-A*03:02M HLA-A*11:01H HLA-A*11:02M HLA-A*36:01H HLA-A*30:02H HLA-A*34:02M HLA-C*07:27M HLA-C*08:03H
GTYEGNSPFH

SEQ ID NO: 7805 - protein, 10 aa, Severe acute respiratory syndrome coronavirus 2
  REGION 1..10: note = Table A: HLA-B*40:01H HLA-B*40:02H
YEGNSPFHPL

SEQ ID NO: 7806 - protein, 10 aa, Severe acute respiratory syndrome coronavirus 2
  REGION 1..10: note = Table A: HLA-A*24:07H HLA-A*23:01H
PFHPLADNKF

SEQ ID NO: 7807 - protein, 10 aa, Severe acute respiratory syndrome coronavirus 2
  REGION 1..10: note = Table A: HLA-B*42:01H HLA-B*53:01H HLA-B*35:03M HLA-C*15:05H HLA-B*35:01H HLA-B*35:02H HLA-B*35:07M HLA-B*35:12H HLA-B*07:04H
HPLADNKFAL

SEQ ID NO: 7808 - protein, 10 aa, Severe acute respiratory syndrome coronavirus 2
  REGION 1..10: note = Table A: HLA-A*02:06H
FACPDGVKHV

SEQ ID NO: 7809 - protein, 10 aa, Severe acute respiratory syndrome coronavirus 2
  REGION 1..10: note = Table A: HLA-B*46:01H HLA-A*30:02M HLA-C*12:02H HLA-B*15:01H HLA-B*15:02H
ACPDGVKHVY

SEQ ID NO: 7810 - protein, 10 aa, Severe acute respiratory syndrome coronavirus 2
  REGION 1..10: note = Table A: HLA-B*07:04M HLA-B*57:03H
RARSVSPKLF

SEQ ID NO: 7811 - protein, 10 aa, Severe acute respiratory syndrome coronavirus 2
  REGION 1..10: note = Table A: HLA-A*74:01M
RSVSPKLFIR

SEQ ID NO: 7812 - protein, 10 aa, Severe acute respiratory syndrome coronavirus 2
  REGION 1..10: note = Table A: HLA-B*38:02H
FIRQEEVQEL

SEQ ID NO: 7813 - protein, 10 aa, Severe acute respiratory syndrome coronavirus 2
  REGION 1..10: note = Table A: HLA-B*27:02H
IRQEEVQELY

SEQ ID NO: 7814 - protein, 10 aa, Severe acute respiratory syndrome coronavirus 2
  REGION 1..10: note = Table A: HLA-A*25:01H
EVQELYSPIF

SEQ ID NO: 7815 - protein, 10 aa, Severe acute respiratory syndrome coronavirus 2
  REGION 1..10: note = Table A: HLA-C*15:05H
SPIFLIVAAI

SEQ ID NO: 7816 - protein, 10 aa, Severe acute respiratory syndrome coronavirus 2
  REGION 1..10: note = Table A: HLA-A*68:02M HLA-C*15:05H
IVAAIVFITL

SEQ ID NO: 7817 - protein, 11 aa, Severe acute respiratory syndrome coronavirus 2
  REGION 1..11: note = Table A: HLA-A*34:02H
ECVRGTTVLLK

SEQ ID NO: 7818 - protein, 11 aa, Severe acute respiratory syndrome coronavirus 2
  REGION 1..11: note = Table A: HLA-A*30:02H HLA-B*15:01H
LLKEPCSSGTY

SEQ ID NO: 7819 - protein, 11 aa, Severe acute respiratory syndrome coronavirus 2
  REGION 1..11: note = Table A: HLA-C*08:01H
TYEGNSPFHPL

SEQ ID NO: 7820 - protein, 11 aa, Severe acute respiratory syndrome coronavirus 2
  REGION 1..11: note = Table A: HLA-B*42:01H HLA-B*56:01H HLA-B*53:01H HLA-B*55:02H HLA-B*35:03M HLA-C*15:05M HLA-B*35:01M HLA-B*35:02H HLA-B*35:08H HLA-B*35:07H HLA-B*35:12H HLA-B*38:02H HLA-B*54:01H HLA-B*07:02H HLA-B*07:04H HLA-B*07:05M
  REGION 1..11: note = CONT. FROM ABOVE: HLA-B*57:03H
SPFHPLADNKF

SEQ ID NO: 7821 - protein, 11 aa, Severe acute respiratory syndrome coronavirus 2
  REGION 1..11: note = Table A: HLA-B*13:02H
TQFAFACPDGV

SEQ ID NO: 7822 - protein, 11 aa, Severe acute respiratory syndrome coronavirus 2
  REGION 1..11: note = Table A: HLA-B*58:01H HLA-B*53:01H HLA-A*30:02H HLA-B*35:01M HLA-B*35:08H HLA-B*35:07H
FACPDGVKHVY

SEQ ID NO: 7823 - protein, 11 aa, Severe acute respiratory syndrome coronavirus 2
  REGION 1..11: note = Table A: HLA-B*42:01H HLA-C*15:05H HLA-B*07:02H HLA-B*07:04H
CPDGVKHVYQL

SEQ ID NO: 7824 - protein, 11 aa, Severe acute respiratory syndrome coronavirus 2
  REGION 1..11: note = Table A: HLA-B*58:02H
RARSVSPKLFI

SEQ ID NO: 7825 - protein, 11 aa, Severe acute respiratory syndrome coronavirus 2
  REGION 1..11: note = Table A: HLA-B*42:01H HLA-B*08:01H HLA-B*55:02H HLA-B*07:04H
SPKLFIRQEEV

SEQ ID NO: 7826 - protein, 11 aa, Severe acute respiratory syndrome coronavirus 2
  REGION 1..11: note = Table A: HLA-B*38:02H
FIRQEEVQELY

SEQ ID NO: 7827 - protein, 11 aa, Severe acute respiratory syndrome coronavirus 2
  REGION 1..11: note = Table A: HLA-A*68:02H
EVQELYSPIFL

SEQ ID NO: 7828 - protein, 8 aa, Severe acute respiratory syndrome coronavirus 2
  REGION 1..8: note = Table A: HLA-B*07:05H
IELSLIDF

SEQ ID NO: 7829 - protein, 8 aa, Severe acute respiratory syndrome coronavirus 2
  REGION 1..8: note = Table A: HLA-C*14:03H
IFWFSLEL

SEQ ID NO: 7830 - protein, 8 aa, Severe acute respiratory syndrome coronavirus 2
  REGION 1..8: note = Table A: HLA-B*39:06M
DHNETCHA

SEQ ID NO: 7831 - protein, 9 aa, Severe acute respiratory syndrome coronavirus 2
  REGION 1..9: note = Table A: HLA-A*36:01H HLA-B*44:03H HLA-B*18:01H HLA-A*30:02H HLA-B*07:05H
IELSLIDFY

SEQ ID NO: 7832 - protein, 9 aa, Severe acute respiratory syndrome coronavirus 2
  REGION 1..9: note = Table A: HLA-A*68:02M HLA-A*02:04H HLA-A*02:02H
ELSLIDFYL

SEQ ID NO: 7833 - protein, 9 aa, Severe acute respiratory syndrome coronavirus 2
  REGION 1..9: note = Table A: HLA-A*26:01H HLA-A*29:02H HLA-C*03:02H HLA-A*02:04H HLA-B*38:02H HLA-B*15:02H
SLIDFYLCF

SEQ ID NO: 7834 - protein, 9 aa, Severe acute respiratory syndrome coronavirus 2
  REGION 1..9: note = Table A: HLA-C*04:03H
LIDFYLCFL

SEQ ID NO: 7835 - protein, 9 aa, Severe acute respiratory syndrome coronavirus 2
  REGION 1..9: note = Table A: HLA-A*02:04H
FLAFLLFLV

SEQ ID NO: 7836 - protein, 9 aa, Severe acute respiratory syndrome coronavirus 2
  REGION 1..9: note = Table A: HLA-A*02:11H HLA-A*02:04H
LLFLVLIML

SEQ ID NO: 7837 - protein, 9 aa, Severe acute respiratory syndrome coronavirus 2
  REGION 1..9: note = Table A: HLA-C*15:02M HLA-C*08:01H
IIFWFSLEL

SEQ ID NO: 7838 - protein, 9 aa, Severe acute respiratory syndrome coronavirus 2
  REGION 1..9: note = Table A: HLA-B*38:02H
ELQDHNETC

SEQ ID NO: 7839 - protein, 9 aa, Severe acute respiratory syndrome coronavirus 2
  REGION 1..9: note = Table A: HLA-B*38:02H
QDHNETCHA

SEQ ID NO: 7840 - protein, 10 aa, Severe acute respiratory syndrome coronavirus 2
  REGION 1..10: note = Table A: HLA-A*36:01H
MIELSLIDFY

SEQ ID NO: 7841 - protein, 10 aa, Severe acute respiratory syndrome coronavirus 2
  REGION 1..10: note = Table A: HLA-A*02:11H HLA-A*02:04H HLA-A*02:01H HLA-A*02:02M HLA-A*02:03H
SLIDFYLCFL

SEQ ID NO: 7842 - protein, 10 aa, Severe acute respiratory syndrome coronavirus 2
  REGION 1..10: note = Table A: HLA-B*38:02H
LQDHNETCHA

SEQ ID NO: 7843 - protein, 8 aa, Severe acute respiratory syndrome coronavirus 2
  REGION 1..8: note = Table A: HLA-A*02:11M HLA-A*68:02H HLA-A*02:04H HLA-A*02:05H HLA-A*02:06H HLA-A*02:07H HLA-B*14:01H HLA-A*02:01H HLA-A*02:02M HLA-A*02:03H HLA-B*38:02M HLA-B*13:02H HLA-B*49:01H
FLGIITTV

SEQ ID NO: 7844 - protein, 8 aa, Severe acute respiratory syndrome coronavirus 2
  REGION 1..8: note = Table A: HLA-B*39:06H
LGIITTVA

SEQ ID NO: 7845 - protein, 8 aa, Severe acute respiratory syndrome coronavirus 2
  REGION 1..8: note = Table A: HLA-B*39:06H
GIITTVAA

SEQ ID NO: 7846 - protein, 8 aa, Severe acute respiratory syndrome coronavirus 2
  REGION 1..8: note = Table A: HLA-B*46:01H HLA-C*15:05H HLA-B*15:01H HLA-B*07:05H
IITTVAAF

SEQ ID NO: 7847 - protein, 8 aa, Severe acute respiratory syndrome coronavirus 2
  REGION 1..8: note = Table A: HLA-C*16:01H HLA-C*12:03H
VAAFHQEC

SEQ ID NO: 7848 - protein, 8 aa, Severe acute respiratory syndrome coronavirus 2
  REGION 1..8: note = Table A: HLA-B*52:01M HLA-B*38:02H HLA-B*39:06M HLA-B*39:01H HLA-B*13:02M
TQHQPYVV

SEQ ID NO: 7849 - protein, 8 aa, Severe acute respiratory syndrome coronavirus 2
  REGION 1..8: note = Table A: HLA-B*35:01H
DPCPIHFY

SEQ ID NO: 7850 - protein, 8 aa, Severe acute respiratory syndrome coronavirus 2
  REGION 1..8: note = Table A: HLA-A*33:03H
WYIRVGAR

SEQ ID NO: 7851 - protein, 8 aa, Severe acute respiratory syndrome coronavirus 2
  REGION 1..8: note = Table A: HLA-B*58:01H HLA-B*58:02H HLA-C*16:01H HLA-C*03:02H HLA-C*03:04H HLA-C*15:05M HLA-C*15:02H HLA-C*17:01H HLA-C*08:01H HLA-B*57:03M HLA-C*07:04H
KSAPLIEL

SEQ ID NO: 7852 - protein, 8 aa, Severe acute respiratory syndrome coronavirus 2
  REGION 1..8: note = Table A: HLA-C*15:05H
SPIQYIDI

SEQ ID NO: 7853 - protein, 8 aa, Severe acute respiratory syndrome coronavirus 2
  REGION 1..8: note = Table A: HLA-A*30:02H HLA-B*39:01H
QYIDIGNY

SEQ ID NO: 7854 - protein, 8 aa, Severe acute respiratory syndrome coronavirus 2
  REGION 1..8: note = Table A: HLA-B*38:02H HLA-B*40:02H HLA-B*41:02H
IDIGNYTV

SEQ ID NO: 7855 - protein, 8 aa, Severe acute respiratory syndrome coronavirus 2
  REGION 1..8: note = Table A: HLA-B*58:02H
VSCLPFTI

SEQ ID NO: 7856 - protein, 8 aa, Severe acute respiratory syndrome coronavirus 2
  REGION 1..8: note = Table A: HLA-A*74:01H
KLGSLVVR

SEQ ID NO: 7857 - protein, 8 aa, Severe acute respiratory syndrome coronavirus 2
  REGION 1..8: note = Table A: HLA-C*14:02H HLA-C*14:03H HLA-A*36:01H HLA-A*29:02H
FYEDFLEY

SEQ ID NO: 7858 - protein, 8 aa, Severe acute respiratory syndrome coronavirus 2
  REGION 1..8: note = Table A: HLA-B*49:01H
LEYHDVRV

SEQ ID NO: 7859 - protein, 8 aa, Severe acute respiratory syndrome coronavirus 2
  REGION 1..8: note = Table A: HLA-B*38:01H HLA-B*38:02M HLA-B*39:01H HLA-B*15:10M
YHDVRVVL

SEQ ID NO: 7860 - protein, 8 aa, Severe acute respiratory syndrome coronavirus 2
  REGION 1..8: note = Table A: HLA-B*15:02M
DVRVVLDF

SEQ ID NO: 7861 - protein, 8 aa, Severe acute respiratory syndrome coronavirus 2
  REGION 1..8: note = Table A: HLA-C*06:02H HLA-B*38:02H
VRVVLDFI

SEQ ID NO: 7862 - protein, 9 aa, Severe acute respiratory syndrome coronavirus 2
  REGION 1..9: note = Table A: HLA-C*14:02H HLA-C*14:03M HLA-A*29:02H HLA-C*04:01H HLA-C*04:03H HLA-A*02:11M HLA-C*15:05H HLA-A*02:04H HLA-A*02:07H HLA-A*02:01H HLA-A*02:03H HLA-A*24:02H HLA-B*51:01H HLA-A*24:07H HLA-B*52:01H HLA-C*08:01H
  REGION 1..9: note = CONT. FROM ABOVE: HLA-A*23:01M HLA-B*38:02M HLA-B*07:05H HLA- B*13:02H HLA-B*49:01H
VFLGIITTV

SEQ ID NO: 7863 - protein, 9 aa, Severe acute respiratory syndrome coronavirus 2
  REGION 1..9: note = Table A: HLA-A*02:02H HLA-A*02:03H
FLGIITTVA

SEQ ID NO: 7864 - protein, 9 aa, Severe acute respiratory syndrome coronavirus 2
  REGION 1..9: note = Table A: HLA-B*54:01H
LGIITTVAA

SEQ ID NO: 7865 - protein, 9 aa, Severe acute respiratory syndrome coronavirus 2
  REGION 1..9: note = Table A: HLA-A*11:303M HLA-A*25:01M HLA-B*46:01H HLA-A*26:01M HLA-A*26:02M HLA-A*26:03M HLA-C*03:02H HLA-C*15:05H HLA-C*12:02H HLA-A*02:03H HLA-B*35:01H HLA-B*38:02M HLA-B*15:01H HLA-B*15:02M HLA-B*15:03H
  REGION 1..9: note = CONT. FROM ABOVE: HLA-B*07:05H
GIITTVAAF

SEQ ID NO: 7866 - protein, 9 aa, Severe acute respiratory syndrome coronavirus 2
  REGION 1..9: note = Table A: HLA-A*68:02M HLA-A*02:05H HLA-A*02:08H HLA-B*38:02H
TVAAFHQEC

SEQ ID NO: 7867 - protein, 9 aa, Severe acute respiratory syndrome coronavirus 2
  REGION 1..9: note = Table A: HLA-B*48:01H HLA-A*11:303M HLA-B*46:01H HLA-C*03:03H HLA-C*12:05H HLA-C*03:02H HLA-C*03:04M HLA-B*35:03H HLA-C*15:05H HLA-C*12:02H HLA-C*12:03H HLA-A*02:05H HLA-A*02:02H HLA-C*07:27H HLA-B*35:02H
  REGION 1..9: note = CONT. FROM ABOVE: HLA-C*17:01H HLA-C*08:01M HLA-B*35:12H HLA- B*38:02M HLA-B*39:01H
AAFHQECSL

SEQ ID NO: 7868 - protein, 9 aa, Severe acute respiratory syndrome coronavirus 2
  REGION 1..9: note = Table A: HLA-A*02:11H HLA-A*68:02H
CTQHQPYVV

SEQ ID NO: 7869 - protein, 9 aa, Severe acute respiratory syndrome coronavirus 2
  REGION 1..9: note = Table A: HLA-B*35:02H HLA-B*35:12H
QPYVVDDPC

SEQ ID NO: 7870 - protein, 9 aa, Severe acute respiratory syndrome coronavirus 2
  REGION 1..9: note = Table A: HLA-A*68:02H HLA-A*02:06H HLA-B*35:02H HLA-C*08:01H HLA-B*35:12H HLA-B*38:02H
YVVDDPCPI

SEQ ID NO: 7871 - protein, 9 aa, Severe acute respiratory syndrome coronavirus 2
  REGION 1..9: note = Table A: HLA-C*04:03M
VDDPCPIHF

SEQ ID NO: 7872 - protein, 9 aa, Severe acute respiratory syndrome coronavirus 2
  REGION 1..9: note = Table A: HLA-B*53:01M
CPIHFYSKW

SEQ ID NO: 7873 - protein, 9 aa, Severe acute respiratory syndrome coronavirus 2
  REGION 1..9: note = Table A: HLA-B*38:02M
IHFYSKWYI

SEQ ID NO: 7874 - protein, 9 aa, Severe acute respiratory syndrome coronavirus 2
  REGION 1..9: note = Table A: HLA-B*39:06H
SKWYIRVGA

SEQ ID NO: 7875 - protein, 9 aa, Severe acute respiratory syndrome coronavirus 2
  REGION 1..9: note = Table A: HLA-B*57:03H
GARKSAPLI

SEQ ID NO: 7876 - protein, 9 aa, Severe acute respiratory syndrome coronavirus 2
  REGION 1..9: note = Table A: HLA-B*48:01M HLA-B*15:03M
RKSAPLIEL

SEQ ID NO: 7877 - protein, 9 aa, Severe acute respiratory syndrome coronavirus 2
  REGION 1..9: note = Table A: HLA-A*68:02H HLA-A*02:05H HLA-A*02:08M HLA-B*57:03H
KSAPLIELC

SEQ ID NO: 7878 - protein, 9 aa, Severe acute respiratory syndrome coronavirus 2
  REGION 1..9: note = Table A: HLA-C*15:05H HLA-B*51:01H HLA-B*13:02H
SAPLIELCV

SEQ ID NO: 7879 - protein, 9 aa, Severe acute respiratory syndrome coronavirus 2
  REGION 1..9: note = Table A: HLA-B*58:02M HLA-B*57:01H HLA-A*30:01H HLA-B*57:03H HLA-B*13:02H
GSKSPIQYI

SEQ ID NO: 7880 - protein, 9 aa, Severe acute respiratory syndrome coronavirus 2
  REGION 1..9: note = Table A: HLA-B*57:03H
KSPIQYIDI

SEQ ID NO: 7881 - protein, 9 aa, Severe acute respiratory syndrome coronavirus 2
  REGION 1..9: note = Table A: HLA-A*30:02M HLA-B*38:02H HLA-B*15:01M HLA-B*15:02H HLA-B*15:03M
IQYIDIGNY

SEQ ID NO: 7882 - protein, 9 aa, Severe acute respiratory syndrome coronavirus 2
  REGION 1..9: note = Table A: HLA-C*04:03M HLA-A*02:11M HLA-A*02:04H HLA-A*02:05H HLA-A*02:06M HLA-A*02:07M HLA-A*02:01M HLA-A*02:02H HLA-B*35:02H HLA-C*08:01H HLA-C*08:02M HLA-B*38:02H HLA-C*05:01H
YIDIGNYTV

SEQ ID NO: 7883 - protein, 9 aa, Severe acute respiratory syndrome coronavirus 2
  REGION 1..9: note = Table A: HLA-A*68:02H HLA-B*13:02H
TVSCLPFTI

SEQ ID NO: 7884 - protein, 9 aa, Severe acute respiratory syndrome coronavirus 2
  REGION 1..9: note = Table A: HLA-A*34:02H HLA-A*66:01H
FTINCQEPK

SEQ ID NO: 7885 - protein, 9 aa, Severe acute respiratory syndrome coronavirus 2
  REGION 1..9: note = Table A: HLA-B*49:01M
QEPKLGSLV

SEQ ID NO: 7886 - protein, 9 aa, Severe acute respiratory syndrome coronavirus 2
  REGION 1..9: note = Table A: HLA-B*55:01H HLA-B*51:01H
EPKLGSLVV

SEQ ID NO: 7887 - protein, 9 aa, Severe acute respiratory syndrome coronavirus 2
  REGION 1..9: note = Table A: HLA-A*02:11H HLA-A*02:02H
KLGSLVVRC

SEQ ID NO: 7888 - protein, 9 aa, Severe acute respiratory syndrome coronavirus 2
  REGION 1..9: note = Table A: HLA-B*57:03H
GSLVVRCSF

SEQ ID NO: 7889 - protein, 9 aa, Severe acute respiratory syndrome coronavirus 2
  REGION 1..9: note = Table A: HLA-C*14:02H HLA-C*14:03H HLA-A*36:01H HLA-B*46:01H HLA-A*29:01H HLA-A*29:02H HLA-C*03:02M HLA-A*30:02H HLA-C*15:05H HLA-A*34:02H HLA-B*35:01H HLA-B*35:07H HLA-B*38:02M HLA-B*15:02M HLA-B*15:03H HLA-B*07:05H
SFYEDFLEY

SEQ ID NO: 7890 - protein, 9 aa, Severe acute respiratory syndrome coronavirus 2
  REGION 1..9: note = Table A: HLA-A*68:02H
EDFLEYHDV

SEQ ID NO: 7891 - protein, 9 aa, Severe acute respiratory syndrome coronavirus 2
  REGION 1..9: note = Table A: HLA-A*33:01H HLA-A*33:03H
DFLEYHDVR

SEQ ID NO: 7892 - protein, 9 aa, Severe acute respiratory syndrome coronavirus 2
  REGION 1..9: note = Table A: HLA-C*04:03H HLA-A*02:11H HLA-A*02:04H HLA-A*02:06H HLA-A*02:07H HLA-A*02:02M HLA-B*38:02H
FLEYHDVRV

SEQ ID NO: 7893 - protein, 9 aa, Severe acute respiratory syndrome coronavirus 2
  REGION 1..9: note = Table A: HLA-B*45:01H HLA-B*40:02M HLA-B*40:06M HLA-B*41:02M HLA-B*49:01H HLA-B*50:01M
LEYHDVRVV

SEQ ID NO: 7894 - protein, 9 aa, Severe acute respiratory syndrome coronavirus 2
  REGION 1..9: note = Table A: HLA-A*33:03H HLA-A*24:02H HLA-A*24:07M HLA-C*08:01H HLA-A*23:01H
EYHDVRVVL

SEQ ID NO: 7895 - protein, 9 aa, Severe acute respiratory syndrome coronavirus 2
  REGION 1..9: note = Table A: HLA-B*40:02H
HDVRVVLDF

SEQ ID NO: 7896 - protein, 9 aa, Severe acute respiratory syndrome coronavirus 2
  REGION 1..9: note = Table A: HLA-A*33:01H HLA-A*68:02H HLA-C*15:05H HLA-B*51:01M HLA-C*08:01H HLA-B*38:02M HLA-B*13:02H
DVRVVLDFI

SEQ ID NO: 7897 - protein, 10 aa, Severe acute respiratory syndrome coronavirus 2
  REGION 1..10: note = Table A: HLA-A*02:11H HLA-B*55:02H HLA-A*68:02M HLA-A*02:04H HLA-A*02:05M HLA-A*02:06H HLA-A*02:08M HLA-A*02:02H HLA-A*02:03M HLA-B*38:02H HLA-B*54:01H
LVFLGIITTV

SEQ ID NO: 7898 - protein, 10 aa, Severe acute respiratory syndrome coronavirus 2
  REGION 1..10: note = Table A: HLA-A*68:02H
TTVAAFHQEC

SEQ ID NO: 7899 - protein, 10 aa, Severe acute respiratory syndrome coronavirus 2
  REGION 1..10: note = Table A: HLA-B*38:02H
FHQECSLQSC

SEQ ID NO: 7900 - protein, 10 aa, Severe acute respiratory syndrome coronavirus 2
  REGION 1..10: note = Table A: HLA-C*04:03H HLA-A*02:07M HLA-C*08:02H HLA-C*05:01M
VVDDPCPIHF

SEQ ID NO: 7901 - protein, 10 aa, Severe acute respiratory syndrome coronavirus 2
  REGION 1..10: note = Table A: HLA-A*36:01H HLA-A*01:01H
VDDPCPIHFY

SEQ ID NO: 7902 - protein, 10 aa, Severe acute respiratory syndrome coronavirus 2
  REGION 1..10: note = Table A: HLA-B*27:05H
ARKSAPLIEL

SEQ ID NO: 7903 - protein, 10 aa, Severe acute respiratory syndrome coronavirus 2
  REGION 1..10: note = Table A: HLA-C*15:02H HLA-B*13:02H
KSAPLIELCV

SEQ ID NO: 7904 - protein, 10 aa, Severe acute respiratory syndrome coronavirus 2
  REGION 1..10: note = Table A: HLA-A*68:02H HLA-A*02:02H HLA-A*24:02H HLA-C*08:01H HLA-A*23:01H
QYIDIGNYTV

SEQ ID NO: 7905 - protein, 10 aa, Severe acute respiratory syndrome coronavirus 2
  REGION 1..10: note = Table A: HLA-B*45:01H HLA-B*40:02H HLA-B*49:01H
QEPKLGSLVV

SEQ ID NO: 7906 - protein, 10 aa, Severe acute respiratory syndrome coronavirus 2
  REGION 1..10: note = Table A: HLA-A*33:03H HLA-A*34:01M HLA-A*66:01H
EPKLGSLVVR

SEQ ID NO: 7907 - protein, 10 aa, Severe acute respiratory syndrome coronavirus 2
  REGION 1..10: note = Table A: HLA-A*02:02H HLA-A*02:03H
FLEYHDVRVV

SEQ ID NO: 7908 - protein, 10 aa, Severe acute respiratory syndrome coronavirus 2
  REGION 1..10: note = Table A: HLA-B*40:01H HLA-B*40:02H
LEYHDVRVVL

SEQ ID NO: 7909 - protein, 10 aa, Severe acute respiratory syndrome coronavirus 2
  REGION 1..10: note = Table A: HLA-B*38:02H
YHDVRVVLDF

SEQ ID NO: 7910 - protein, 10 aa, Severe acute respiratory syndrome coronavirus 2
  REGION 1..10: note = Table A: HLA-A*68:02M HLA-C*08:01H HLA-C*08:03H HLA-B*38:02M HLA-B*40:02H HLA-B*13:02H
HDVRVVLDFI

SEQ ID NO: 7911 - protein, 11 aa, Severe acute respiratory syndrome coronavirus 2
  REGION 1..11: note = Table A: HLA-A*02:11M HLA-A*02:04H HLA-A*02:03H HLA-B*38:02H
FLVFLGIITTV

SEQ ID NO: 7912 - protein, 11 aa, Severe acute respiratory syndrome coronavirus 2
  REGION 1..11: note = Table A: HLA-B*55:02H HLA-B*54:01H
LVFLGIITTVA

SEQ ID NO: 7913 - protein, 11 aa, Severe acute respiratory syndrome coronavirus 2
  REGION 1..11: note = Table A: HLA-A*36:01H
VVDDPCPIHFY

SEQ ID NO: 7914 - protein, 11 aa, Severe acute respiratory syndrome coronavirus 2
  REGION 1..11: note = Table A: HLA-B*53:01H
DPCPIHFYSKW

SEQ ID NO: 7915 - protein, 11 aa, Severe acute respiratory syndrome coronavirus 2
  REGION 1..11: note = Table A: HLA-B*18:01H HLA-B*07:05H
DEAGSKSPIQY

SEQ ID NO: 7916 - protein, 11 aa, Severe acute respiratory syndrome coronavirus 2
  REGION 1..11: note = Table A: HLA-A*26:01H HLA-A*30:02H HLA-B*35:01M HLA-B*35:08H HLA-B*35:07H
SPIQYIDIGNY

SEQ ID NO: 7917 - protein, 11 aa, Severe acute respiratory syndrome coronavirus 2
  REGION 1..11: note = Table A: HLA-A*02:11H HLA-A*02:06H HLA-B*13:02H
IQYIDIGNYTV

SEQ ID NO: 7918 - protein, 11 aa, Severe acute respiratory syndrome coronavirus 2
  REGION 1..11: note = Table A: HLA-C*04:03H HLA-B*38:01H HLA-B*38:02H
YHDVRVVLDFI

SEQ ID NO: 7919 - protein, 8 aa, Severe acute respiratory syndrome coronavirus 2
  REGION 1..8: note = Table A: HLA-A*33:01H HLA-A*33:03H
DNGPQNQR

SEQ ID NO: 7920 - protein, 8 aa, Severe acute respiratory syndrome coronavirus 2
  REGION 1..8: note = Table A: HLA-B*52:01M
NQRNAPRI

SEQ ID NO: 7921 - protein, 8 aa, Severe acute respiratory syndrome coronavirus 2
  REGION 1..8: note = Table A: HLA-B*39:01H
FGGPSDST

SEQ ID NO: 7922 - protein, 8 aa, Severe acute respiratory syndrome coronavirus 2
  REGION 1..8: note = Table A: HLA-B*53:01M
LPNNTASW

SEQ ID NO: 7923 - protein, 8 aa, Severe acute respiratory syndrome coronavirus 2
  REGION 1..8: note = Table A: HLA-B*35:01H HLA-B*35:08H
SPDDQIGY

SEQ ID NO: 7924 - protein, 8 aa, Severe acute respiratory syndrome coronavirus 2
  REGION 1..8: note = Table A: HLA-A*36:01H
PDDQIGYY

SEQ ID NO: 7925 - protein, 8 aa, Severe acute respiratory syndrome coronavirus 2
  REGION 1..8: note = Table A: HLA-A*33:01H
DDQIGYYR

SEQ ID NO: 7926 - protein, 8 aa, Severe acute respiratory syndrome coronavirus 2
  REGION 1..8: note = Table A: HLA-A*11:303H HLA-A*02:01H HLA-A*02:03H HLA-B*38:02H HLA-B*54:01H HLA-B*39:01H
YLGTGPEA

SEQ ID NO: 7927 - protein, 8 aa, Severe acute respiratory syndrome coronavirus 2
  REGION 1..8: note = Table A: HLA-B*40:06H
KDGIIWVA

SEQ ID NO: 7928 - protein, 8 aa, Severe acute respiratory syndrome coronavirus 2
  REGION 1..8: note = Table A: HLA-C*15:05H
NPANNAAI

SEQ ID NO: 7929 - protein, 8 aa, Severe acute respiratory syndrome coronavirus 2
  REGION 1..8: note = Table A: HLA-C*15:05H HLA-B*51:01M HLA-C*17:01H HLA-B*07:05H
NAAIVLQL

SEQ ID NO: 7930 - protein, 8 aa, Severe acute respiratory syndrome coronavirus 2
  REGION 1..8: note = Table A: HLA-C*01:02H
QLPQGTTL

SEQ ID NO: 7931 - protein, 8 aa, Severe acute respiratory syndrome coronavirus 2
  REGION 1..8: note = Table A: HLA-A*11:01H HLA-A*11:02H
PQGTTLPK

SEQ ID NO: 7932 - protein, 8 aa, Severe acute respiratory syndrome coronavirus 2
  REGION 1..8: note = Table A: HLA-C*15:05H HLA-B*51:01M
DAALALLL

SEQ ID NO: 7933 - protein, 8 aa, Severe acute respiratory syndrome coronavirus 2
  REGION 1..8: note = Table A: HLA-C*04:03H HLA-A*02:11H HLA-A*02:02H HLA-C*08:02H
LLDRLNQL

SEQ ID NO: 7934 - protein, 8 aa, Severe acute respiratory syndrome coronavirus 2
  REGION 1..8: note = Table A: HLA-B*52:01H HLA-B*13:02H
QQQQGQTV

SEQ ID NO: 7935 - protein, 8 aa, Severe acute respiratory syndrome coronavirus 2
  REGION 1..8: note = Table A: HLA-A*11:01H
QQGQTVTK

SEQ ID NO: 7936 - protein, 8 aa, Severe acute respiratory syndrome coronavirus 2
  REGION 1..8: note = Table A: HLA-A*03:02H
QGQTVTKK

SEQ ID NO: 7937 - protein, 8 aa, Severe acute respiratory syndrome coronavirus 2
  REGION 1..8: note = Table A: HLA-B*58:01H HLA-C*15:05H HLA-B*51:01H HLA-B*13:02H
TATKAYNV

SEQ ID NO: 7938 - protein, 8 aa, Severe acute respiratory syndrome coronavirus 2
  REGION 1..8: note = Table A: HLA-C*14:02H HLA-C*14:03H HLA-B*46:01H HLA-C*15:05H HLA-A*24:02H HLA-A*23:01H HLA-B*37:01M HLA-B*15:01H HLA-B*39:01H
AYNVTQAF

SEQ ID NO: 7939 - protein, 8 aa, Severe acute respiratory syndrome coronavirus 2
  REGION 1..8: note = Table A: HLA-A*68:01H HLA-A*34:01H HLA-A*66:01H
NVTQAFGR

SEQ ID NO: 7940 - protein, 8 aa, Severe acute respiratory syndrome coronavirus 2
  REGION 1..8: note = Table A: HLA-B*46:01M HLA-B*38:02H HLA-B*15:02H
LIRQGTDY

SEQ ID NO: 7941 - protein, 8 aa, Severe acute respiratory syndrome coronavirus 2
  REGION 1..8: note = Table A: HLA-B*46:01H HLA-C*01:02H HLA-B*51:01H
FAPSASAF

SEQ ID NO: 7942 - protein, 8 aa, Severe acute respiratory syndrome coronavirus 2
  REGION 1..8: note = Table A: HLA-C*15:05H HLA-B*07:05H
APSASAFF

SEQ ID NO: 7943 - protein, 8 aa, Severe acute respiratory syndrome coronavirus 2
  REGION 1..8: note = Table A: HLA-A*11:01H HLA-A*11:02H HLA-A*33:03H HLA-A*34:01M HLA-A*34:02H HLA-A*66:01M
SAFFGMSR

SEQ ID NO: 7944 - protein, 8 aa, Severe acute respiratory syndrome coronavirus 2
  REGION 1..8: note = Table A: HLA-B*52:01H
AFFGMSRI

SEQ ID NO: 7945 - protein, 8 aa, Severe acute respiratory syndrome coronavirus 2
  REGION 1..8: note = Table A: HLA-B*08:01H
FGMSRIGM

SEQ ID NO: 7946 - protein, 8 aa, Severe acute respiratory syndrome coronavirus 2
  REGION 1..8: note = Table A: HLA-C*16:01H HLA-C*03:02H HLA-C*15:05H HLA-B*51:01H HLA-B*52:01H
MSRIGMEV

SEQ ID NO: 7947 - protein, 8 aa, Severe acute respiratory syndrome coronavirus 2
  REGION 1..8: note = Table A: HLA-A*25:01M HLA-B*15:13M
EVTPSGTW

SEQ ID NO: 7948 - protein, 8 aa, Severe acute respiratory syndrome coronavirus 2
  REGION 1..8: note = Table A: HLA-C*01:02H
VTPSGTWL

SEQ ID NO: 7949 - protein, 8 aa, Severe acute respiratory syndrome coronavirus 2
  REGION 1..8: note = Table A: HLA-A*24:07H HLA-B*39:01H
TYTGAIKL

SEQ ID NO: 7950 - protein, 8 aa, Severe acute respiratory syndrome coronavirus 2
  REGION 1..8: note = Table A: HLA-C*04:03H
FKDQVILL

SEQ ID NO: 7951 - protein, 8 aa, Severe acute respiratory syndrome coronavirus 2
  REGION 1..8: note = Table A: HLA-B*15:01H
LNKHIDAY

SEQ ID NO: 7952 - protein, 8 aa, Severe acute respiratory syndrome coronavirus 2
  REGION 1..8: note = Table A: HLA-B*57:03H
KTFPPTEP

SEQ ID NO: 7953 - protein, 8 aa, Severe acute respiratory syndrome coronavirus 2
  REGION 1..8: note = Table A: HLA-C*15:05H HLA-C*08:02M HLA-C*05:01H
KADETQAL

SEQ ID NO: 7954 - protein, 8 aa, Severe acute respiratory syndrome coronavirus 2
  REGION 1..8: note = Table A: HLA-A*33:01H HLA-A*33:03M HLA-A*68:01H HLA-A*34:02H
ETQALPQR

SEQ ID NO: 7955 - protein, 8 aa, Severe acute respiratory syndrome coronavirus 2
  REGION 1..8: note = Table A: HLA-A*11:02H
QALPQRQK

SEQ ID NO: 7956 - protein, 8 aa, Severe acute respiratory syndrome coronavirus 2
  REGION 1..8: note = Table A: HLA-B*52:01M HLA-B*13:02H
RQKKQQTV

SEQ ID NO: 7957 - protein, 8 aa, Severe acute respiratory syndrome coronavirus 2
  REGION 1..8: note = Table A: HLA-B*48:01H
KKQQTVTL

SEQ ID NO: 7958 - protein, 8 aa, Severe acute respiratory syndrome coronavirus 2
  REGION 1..8: note = Table A: HLA-B*48:01H HLA-B*52:01H HLA-B*15:01H
KQQTVTLL

SEQ ID NO: 7959 - protein, 8 aa, Severe acute respiratory syndrome coronavirus 2
  REGION 1..8: note = Table A: HLA-B*56:01H HLA-B*55:02H HLA-B*55:01M HLA-B*39:06H HLA-B*54:01M
TVTLLPAA

SEQ ID NO: 7960 - protein, 8 aa, Severe acute respiratory syndrome coronavirus 2
  REGION 1..8: note = Table A: HLA-C*08:02H HLA-B*40:02H HLA-B*41:02H
LDDFSKQL

SEQ ID NO: 7961 - protein, 9 aa, Severe acute respiratory syndrome coronavirus 2
  REGION 1..9: note = Table A: HLA-A*33:01H HLA-A*33:03H HLA-A*68:01H
SDNGPQNQR

SEQ ID NO: 7962 - protein, 9 aa, Severe acute respiratory syndrome coronavirus 2
  REGION 1..9: note = Table A: HLA-B*07:02H
GPQNQRNAP

SEQ ID NO: 7963 - protein, 9 aa, Severe acute respiratory syndrome coronavirus 2
  REGION 1..9: note = Table A: HLA-A*74:01H HLA-A*34:01H
PQNQRNAPR

SEQ ID NO: 7964 - protein, 9 aa, Severe acute respiratory syndrome coronavirus 2
  REGION 1..9: note = Table A: HLA-B*27:05H HLA-C*07:01H HLA-B*27:02H HLA-B*14:02H HLA-B*38:02H
QRNAPRITF

SEQ ID NO: 7965 - protein, 9 aa, Severe acute respiratory syndrome coronavirus 2
  REGION 1..9: note = Table A: HLA-B*55:01H HLA-B*07:02H HLA-B*50:01H
APRITFGGP

SEQ ID NO: 7966 - protein, 9 aa, Severe acute respiratory syndrome coronavirus 2
  REGION 1..9: note = Table A: HLA-B*56:01H HLA-B*55:02H HLA-C*15:05H
RPQGLPNNT

SEQ ID NO: 7967 - protein, 9 aa, Severe acute respiratory syndrome coronavirus 2
  REGION 1..9: note = Table A: HLA-B*15:13H
GLPNNTASW

SEQ ID NO: 7968 - protein, 9 aa, Severe acute respiratory syndrome coronavirus 2
  REGION 1..9: note = Table A: HLA-B*53:01H
LPNNTASWF

SEQ ID NO: 7969 - protein, 9 aa, Severe acute respiratory syndrome coronavirus 2
  REGION 1..9: note = Table A: HLA-A*25:01H HLA-C*03:03H HLA-C*03:04H HLA-A*68:02M HLA-C*15:05H HLA-A*02:04H HLA-A*34:02H HLA-C*08:01H HLA-A*66:01H
NTASWFTAL

SEQ ID NO: 7970 - protein, 9 aa, Severe acute respiratory syndrome coronavirus 2
  REGION 1..9: note = Table A: HLA-C*14:03H
SWFTALTQH

SEQ ID NO: 7971 - protein, 9 aa, Severe acute respiratory syndrome coronavirus 2
  REGION 1..9: note = Table A: HLA-A*68:01H HLA-A*34:02M HLA-A*66:01H
FTALTQHGK

SEQ ID NO: 7972 - protein, 9 aa, Severe acute respiratory syndrome coronavirus 2
  REGION 1..9: note = Table A: HLA-B*38:01M HLA-B*38:02H
QHGKEDLKF

SEQ ID NO: 7973 - protein, 9 aa, Severe acute respiratory syndrome coronavirus 2
  REGION 1..9: note = Table A: HLA-C*15:05H HLA-A*34:01H HLA-B*51:01H HLA-B*54:01H HLA-B*07:02H HLA-B*07:04H
FPRGQGVPI

SEQ ID NO: 7974 - protein, 9 aa, Severe acute respiratory syndrome coronavirus 2
  REGION 1..9: note = Table A: HLA-A*36:01M HLA-A*01:01H HLA-B*53:01H HLA-A*30:02H HLA-C*15:05H HLA-A*34:02H HLA-B*35:01M HLA-B*35:08M HLA-B*35:07H HLA-B*38:02H HLA-B*39:01M HLA-B*07:05H
SPDDQIGYY

SEQ ID NO: 7975 - protein, 9 aa, Severe acute respiratory syndrome coronavirus 2
  REGION 1..9: note = Table A: HLA-A*33:01M
DDQIGYYRR

SEQ ID NO: 7976 - protein, 9 aa, Severe acute respiratory syndrome coronavirus 2
  REGION 1..9: note = Table A: HLA-B*07:04M
RIRGGDGKM

SEQ ID NO: 7977 - protein, 9 aa, Severe acute respiratory syndrome coronavirus 2
  REGION 1..9: note = Table A: HLA-B*58:01H HLA-A*32:01M HLA-B*57:03H
KMKDLSPRW

SEQ ID NO: 7978 - protein, 9 aa, Severe acute respiratory syndrome coronavirus 2
  REGION 1..9: note = Table A: HLA-A*36:01H
LSPRWYFYY

SEQ ID NO: 7979 - protein, 9 aa, Severe acute respiratory syndrome coronavirus 2
  REGION 1..9: note = Table A: HLA-B*42:01M HLA-B*07:04M
SPRWYFYYL

SEQ ID NO: 7980 - protein, 9 aa, Severe acute respiratory syndrome coronavirus 2
  REGION 1..9: note = Table A: HLA-C*14:02H HLA-C*14:03H HLA-C*08:01H HLA-B*54:01H HLA-B*39:01H
YYLGTGPEA

SEQ ID NO: 7981 - protein, 9 aa, Severe acute respiratory syndrome coronavirus 2
  REGION 1..9: note = Table A: HLA-C*14:02H HLA-C*14:03H HLA-A*36:01H HLA-B*46:01H HLA-B*35:01H HLA-B*15:02H
TGPEAGLPY

SEQ ID NO: 7982 - protein, 9 aa, Severe acute respiratory syndrome coronavirus 2
  REGION 1..9: note = Table A: HLA-A*03:02H HLA-A*11:01H HLA-A*11:02H
AGLPYGANK

SEQ ID NO: 7983 - protein, 9 aa, Severe acute respiratory syndrome coronavirus 2
  REGION 1..9: note = Table A: HLA-B*58:01H HLA-B*53:01H HLA-B*57:03H
GANKDGIIW

SEQ ID NO: 7984 - protein, 9 aa, Severe acute respiratory syndrome coronavirus 2
  REGION 1..9: note = Table A: HLA-B*39:06H
NKDGIIWVA

SEQ ID NO: 7985 - protein, 9 aa, Severe acute respiratory syndrome coronavirus 2
  REGION 1..9: note = Table A: HLA-A*02:11H
IIWVATEGA

SEQ ID NO: 7986 - protein, 9 aa, Severe acute respiratory syndrome coronavirus 2
  REGION 1..9: note = Table A: HLA-A*03:02H HLA-A*11:01H
TEGALNTPK

SEQ ID NO: 7987 - protein, 9 aa, Severe acute respiratory syndrome coronavirus 2
  REGION 1..9: note = Table A: HLA-B*13:01H HLA-B*13:02H
ALNTPKDHI

SEQ ID NO: 7988 - protein, 9 aa, Severe acute respiratory syndrome coronavirus 2
  REGION 1..9: note = Table A: HLA-A*33:01H HLA-A*33:03M HLA-A*26:03M HLA-A*68:01H HLA-B*55:01H HLA-A*34:01H HLA-A*34:02H HLA-B*07:04H HLA-A*66:01M
TPKDHIGTR

SEQ ID NO: 7989 - protein, 9 aa, Severe acute respiratory syndrome coronavirus 2
  REGION 1..9: note = Table A: HLA-B*39:06H
DHIGTRNPA

SEQ ID NO: 7990 - protein, 9 aa, Severe acute respiratory syndrome coronavirus 2
  REGION 1..9: note = Table A: HLA-B*39:06M HLA-B*39:01H
TRNPANNAA

SEQ ID NO: 7991 - protein, 9 aa, Severe acute respiratory syndrome coronavirus 2
  REGION 1..9: note = Table A: HLA-B*35:03H HLA-C*15:05H
NPANNAAIV

SEQ ID NO: 7992 - protein, 9 aa, Severe acute respiratory syndrome coronavirus 2
  REGION 1..9: note = Table A: HLA-B*35:03H HLA-C*15:05H
PANNAAIVL

SEQ ID NO: 7993 - protein, 9 aa, Severe acute respiratory syndrome coronavirus 2
  REGION 1..9: note = Table A: HLA-A*68:02H
NNAAIVLQL

SEQ ID NO: 7994 - protein, 9 aa, Severe acute respiratory syndrome coronavirus 2
  REGION 1..9: note = Table A: HLA-B*48:01M HLA-A*11:303H HLA-B*14:01H HLA-B*38:02H HLA-B*15:01H HLA-B*15:03H HLA-B*39:01H HLA-B*15:10H
LQLPQGTTL

SEQ ID NO: 7995 - protein, 9 aa, Severe acute respiratory syndrome coronavirus 2
  REGION 1..9: note = Table A: HLA-A*03:02H HLA-A*68:01H HLA-A*34:01M HLA-A*34:02M HLA-A*66:01H
LPQGTTLPK

SEQ ID NO: 7996 - protein, 9 aa, Severe acute respiratory syndrome coronavirus 2
  REGION 1..9: note = Table A: HLA-A*36:01H HLA-A*30:02M
GTTLPKGFY

SEQ ID NO: 7997 - protein, 9 aa, Severe acute respiratory syndrome coronavirus 2
  REGION 1..9: note = Table A: HLA-A*02:11H HLA-A*34:02H
TTLPKGFYA

SEQ ID NO: 7998 - protein, 9 aa, Severe acute respiratory syndrome coronavirus 2
  REGION 1..9: note = Table A: HLA-B*56:01H HLA-B*55:01H HLA-B*54:01H
LPKGFYAEG

SEQ ID NO: 7999 - protein, 9 aa, Severe acute respiratory syndrome coronavirus 2
  REGION 1..9: note = Table A: HLA-B*39:01H
SRNSTPGSS

SEQ ID NO: 8000 - protein, 9 aa, Severe acute respiratory syndrome coronavirus 2
  REGION 1..9: note = Table A: HLA-A*33:03H HLA-A*34:01H HLA-A*31:01H
RNSTPGSSR

SEQ ID NO: 8001 - protein, 9 aa, Severe acute respiratory syndrome coronavirus 2
  REGION 1..9: note = Table A: HLA-A*11:303H HLA-B*35:03H HLA-C*15:05H HLA-B*35:02M HLA-B*35:12M HLA-B*38:02H HLA-B*39:01M
AGNGGDAAL

SEQ ID NO: 8002 - protein, 9 aa, Severe acute respiratory syndrome coronavirus 2
  REGION 1..9: note = Table A: HLA-B*35:03H HLA-B*39:01H
NGGDAALAL

SEQ ID NO: 8003 - protein, 9 aa, Severe acute respiratory syndrome coronavirus 2
  REGION 1..9: note = Table A: HLA-C*15:05H HLA-B*51:01H
DAALALLLL

SEQ ID NO: 8004 - protein, 9 aa, Severe acute respiratory syndrome coronavirus 2
  REGION 1..9: note = Table A: HLA-A*02:11H HLA-C*08:01H
LALLLLDRL

SEQ ID NO: 8005 - protein, 9 aa, Severe acute respiratory syndrome coronavirus 2
  REGION 1..9: note = Table A: HLA-A*11:303H HLA-B*08:01M HLA-A*02:11H HLA-A*02:04H HLA-A*02:05H HLA-A*02:06H HLA-A*02:07M HLA-B*14:01M HLA-A*02:01H HLA-A*02:02H HLA-A*02:03M HLA-C*08:01H HLA-B*38:02H HLA-B*40:06H
LLLDRLNQL

SEQ ID NO: 8006 - protein, 9 aa, Severe acute respiratory syndrome coronavirus 2
  REGION 1..9: note = Table A: HLA-A*02:11H HLA-A*30:02H HLA-A*02:02M HLA-B*38:02H HLA-B*15:01M HLA-B*13:01M HLA-B*13:02H
RLNQLESKM

SEQ ID NO: 8007 - protein, 9 aa, Severe acute respiratory syndrome coronavirus 2
  REGION 1..9: note = Table A: HLA-A*03:01H HLA-A*03:02H
QLESKMSGK

SEQ ID NO: 8008 - protein, 9 aa, Severe acute respiratory syndrome coronavirus 2
  REGION 1..9: note = Table A: HLA-B*48:01H HLA-B*52:01M HLA-B*38:02H HLA-B*15:01M HLA-B*39:01H HLA-B*13:02H
GQQQQGQTV

SEQ ID NO: 8009 - protein, 9 aa, Severe acute respiratory syndrome coronavirus 2
  REGION 1..9: note = Table A: HLA-B*39:01H
QQQQGQTVT

SEQ ID NO: 8010 - protein, 9 aa, Severe acute respiratory syndrome coronavirus 2
  REGION 1..9: note = Table A: HLA-A*11:303H HLA-A*03:02M HLA-A*11:01M HLA-A*11:02M HLA-A*30:02H HLA-C*07:27H HLA-B*15:01H HLA-B*13:02H
QQQGQTVTK

SEQ ID NO: 8011 - protein, 9 aa, Severe acute respiratory syndrome coronavirus 2
  REGION 1..9: note = Table A: HLA-A*03:01H HLA-A*03:02H HLA-A*11:01H
QQGQTVTKK

SEQ ID NO: 8012 - protein, 9 aa, Severe acute respiratory syndrome coronavirus 2
  REGION 1..9: note = Table A: HLA-B*39:06M HLA-B*15:01H HLA-B*13:02H HLA-B*50:01H
GQTVTKKSA

SEQ ID NO: 8013 - protein, 9 aa, Severe acute respiratory syndrome coronavirus 2
  REGION 1..9: note = Table A: HLA-A*02:08H HLA-A*02:03H
VTKKSAAEA

SEQ ID NO: 8014 - protein, 9 aa, Severe acute respiratory syndrome coronavirus 2
  REGION 1..9: note = Table A: HLA-A*34:01H HLA-A*34:02M
EASKKPRQK

SEQ ID NO: 8015 - protein, 9 aa, Severe acute respiratory syndrome coronavirus 2
  REGION 1..9: note = Table A: HLA-B*07:04H
KPRQKRTAT

SEQ ID NO: 8016 - protein, 9 aa, Severe acute respiratory syndrome coronavirus 2
  REGION 1..9: note = Table A: HLA-B*15:03M
QKRTATKAY

SEQ ID NO: 8017 - protein, 9 aa, Severe acute respiratory syndrome coronavirus 2
  REGION 1..9: note = Table A: HLA-B*58:02H HLA-A*02:11H HLA-A*68:02H HLA-C*15:02H HLA-A*02:05M HLA-A*02:08M HLA-A*02:02M HLA-B*57:03M HLA-B*13:02H
RTATKAYNV

SEQ ID NO: 8018 - protein, 9 aa, Severe acute respiratory syndrome coronavirus 2
  REGION 1..9: note = Table A: HLA-B*57:03H
ATKAYNVTQ

SEQ ID NO: 8019 - protein, 9 aa, Severe acute respiratory syndrome coronavirus 2
  REGION 1..9: note = Table A: HLA-B*39:06H
TKAYNVTQA

SEQ ID NO: 8020 - protein, 9 aa, Severe acute respiratory syndrome coronavirus 2
  REGION 1..9: note = Table A: HLA-B*48:01H HLA-B*58:01H HLA-B*58:02H HLA-C*14:02H HLA-C*14:03H HLA-A*11:303M HLA-B*44:05H HLA-C*16:01H HLA-C*16:04M HLA-B*57:01M HLA-A*25:01H HLA-B*46:01H HLA-C*03:03M HLA-C*07:01H HLA-A*02:11H HLA-B*53:01H
  REGION 1..9: note = CONT. FROM ABOVE: HLA-C*03:02H HLA-C*03:04M HLA-A*30:02H HLA- A*68:02H HLA-C*15:05M HLA-C*12:02H HLA-C*12:03M HLA-C*15:02H HLA-A*02:08H HLA-A*34:01H HLA-C*07:27H HLA-A*24:02H HLA-B*35 :01M HLA-A*24:07H HLA-B*35:07M HLA-C*08:01M HLA-A*23:01H
  REGION 1..9: note = CONT. FROM ABOVE: HLA-B*37:01H HLA-B*38:02M HLA-A*32:01M HLA- B*07:02H HLA-B*07:04H HLA-B*15:01H HLA-B*15:02M HLA-B*15:03H HLA-B*07:05M HLA-B*57:03H HLA-C*02:02M HLA-B*13:01H HLA-B*13 :02H HLA-A*66:01H
KAYNVTQAF

SEQ ID NO: 8021 - protein, 9 aa, Severe acute respiratory syndrome coronavirus 2
  REGION 1..9: note = Table A: HLA-A*33:01H HLA-A*33:03H HLA-A*68:01H HLA-A*66:01H
YNVTQAFGR

SEQ ID NO: 8022 - protein, 9 aa, Severe acute respiratory syndrome coronavirus 2
  REGION 1..9: note = Table A: HLA-A*26:03H HLA-A*68:01H HLA-A*34:01M HLA-A*34:02M HLA-A*66:01M
NVTQAFGRR

SEQ ID NO: 8023 - protein, 9 aa, Severe acute respiratory syndrome coronavirus 2
  REGION 1..9: note = Table A: HLA-C*15:05H HLA-B*07:05H
GPEQTQGNF

SEQ ID NO: 8024 - protein, 9 aa, Severe acute respiratory syndrome coronavirus 2
  REGION 1..9: note = Table A: HLA-B*35:03H HLA-B*35:02H HLA-B*35:12H HLA-B*39:01H
QGNFGDQEL

SEQ ID NO: 8025 - protein, 9 aa, Severe acute respiratory syndrome coronavirus 2
  REGION 1..9: note = Table A: HLA-A*25:01H HLA-A*26:01M HLA-A*26:02M HLA-A*26:03H HLA-A*34:01H HLA-B*15:13H HLA-B*38:02M HLA-B*15:01M HLA-B*15:02H HLA-B*39:01H
ELIRQGTDY

SEQ ID NO: 8026 - protein, 9 aa, Severe acute respiratory syndrome coronavirus 2
  REGION 1..9: note = Table A: HLA-A*34:02H
LIRQGTDYK

SEQ ID NO: 8027 - protein, 9 aa, Severe acute respiratory syndrome coronavirus 2
  REGION 1..9: note = Table A: HLA-B*13:01M
RQGTDYKHW

SEQ ID NO: 8028 - protein, 9 aa, Severe acute respiratory syndrome coronavirus 2
  REGION 1..9: note = Table A: HLA-A*02:11H HLA-B*37:01H HLA-B*40:02H HLA-B*40:06H HLA-B*49:01H
TDYKHWPQI

SEQ ID NO: 8029 - protein, 9 aa, Severe acute respiratory syndrome coronavirus 2
  REGION 1..9: note = Table A: HLA-B*48:01H HLA-B*58:01H HLA-B*58:02H HLA-B*27:05H HLA-A*02:11H HLA-A*24:07H HLA-A*23:01H HLA-B*38:01H HLA-B*38:02M HLA-A*32:01H HLA-B*39:06H HLA-B*15:01H HLA-B*15:03H HLA-B*39:01H HLA-B*57:03M HLA-B*15:10H
KHWPQIAQF

SEQ ID NO: 8030 - protein, 9 aa, Severe acute respiratory syndrome coronavirus 2
  REGION 1..9: note = Table A: HLA-B*39:06H
QIAQFAPSA

SEQ ID NO: 8031 - protein, 9 aa, Severe acute respiratory syndrome coronavirus 2
  REGION 1..9: note = Table A: HLA-B*38:02H HLA-B*39:06M HLA-B*15:01H HLA-B*13:02H HLA-B*50:01H
AQFAPSASA

SEQ ID NO: 8032 - protein, 9 aa, Severe acute respiratory syndrome coronavirus 2
  REGION 1..9: note = Table A: HLA-C*14:02H HLA-C*14:03H HLA-B*46:01M HLA-C*15:05H HLA-A*24:02H HLA-B*35:01H HLA-A*24:07H HLA-A*23:01H HLA-B*38:02M HLA-B*15:01M HLA-B*15:02H HLA-B*15:03H HLA-B*39:01H HLA-B*07:05M HLA-B*15:11H
QFAPSASAF

SEQ ID NO: 8033 - protein, 9 aa, Severe acute respiratory syndrome coronavirus 2
  REGION 1..9: note = Table A: HLA-C*14:03H HLA-B*46:01H HLA-C*04:03H HLA-B*53:01H HLA-C*03:02H HLA-C*01:02M HLA-C*12:02H HLA-A*34:01H HLA-B*38:02H HLA-C*02:02H HLA-A*66:01H
FAPSASAFF

SEQ ID NO: 8034 - protein, 9 aa, Severe acute respiratory syndrome coronavirus 2
  REGION 1..9: note = Table A: HLA-A*74:01M HLA-A*11:01M HLA-A*11:02M HLA-A*68:01H HLA-A*34:01H HLA-A*34:02H HLA-A*31:01H HLA-A*66:01M
ASAFFGMSR

SEQ ID NO: 8035 - protein, 9 aa, Severe acute respiratory syndrome coronavirus 2
  REGION 1..9: note = Table A: HLA-C*12:05H HLA-A*02:11H HLA-B*53:01H HLA-A*68:02H HLA-C*15:05H HLA-C*12:03H HLA-A*02:05H HLA-A*34:01H HLA-B*51:01M HLA-C*17:01H HLA-C*08:01H HLA-B*38:02H HLA-B*57:03H HLA-B*49:01H HLA-A*66:01H
SAFFGMSRI

SEQ ID NO: 8036 - protein, 9 aa, Severe acute respiratory syndrome coronavirus 2
  REGION 1..9: note = Table A: HLA-C*14:02H HLA-C*14:03H
FFGMSRIGM

SEQ ID NO: 8037 - protein, 9 aa, Severe acute respiratory syndrome coronavirus 2
  REGION 1..9: note = Table A: HLA-A*02:11M HLA-C*15:05H HLA-A*02:01H HLA-A*02:02H HLA-A*02:03M HLA-B*52:01H HLA-B*38:02H HLA-B*13:02H
GMSRIGMEV

SEQ ID NO: 8038 - protein, 9 aa, Severe acute respiratory syndrome coronavirus 2
  REGION 1..9: note = Table A: HLA-B*39:06H
SRIGMEVTP

SEQ ID NO: 8039 - protein, 9 aa, Severe acute respiratory syndrome coronavirus 2
  REGION 1..9: note = Table A: HLA-B*58:01H HLA-B*44:02M HLA-B*44:05M HLA-C*16:04H HLA-B*44:03M HLA-B*15:13M HLA-B*49:01H HLA-B*50:01H
MEVTPSGTW

SEQ ID NO: 8040 - protein, 9 aa, Severe acute respiratory syndrome coronavirus 2
  REGION 1..9: note = Table A: HLA-A*34:01H
EVTPSGTWL

SEQ ID NO: 8041 - protein, 9 aa, Severe acute respiratory syndrome coronavirus 2
  REGION 1..9: note = Table A: HLA-A*29:01H HLA-A*29:02H HLA-B*53:01M HLA-C*15:05H HLA-A*34:01H HLA-A*34:02H HLA-B*35:01H HLA-B*35:08H HLA-B*35:07M HLA-B*38:02H HLA-B*15:02H HLA-B*07:05M HLA-B*15:11M
TPSGTWLTY

SEQ ID NO: 8042 - protein, 9 aa, Severe acute respiratory syndrome coronavirus 2
  REGION 1..9: note = Table A: HLA-A*68:02H HLA-C*15:05H HLA-C*12:03H HLA-C*15:02H HLA-A*02:05H HLA-A*02:08H HLA-A*34:02H HLA-C*17:01M HLA-B*57:03M
LTYTGAIKL

SEQ ID NO: 8043 - protein, 9 aa, Severe acute respiratory syndrome coronavirus 2
  REGION 1..9: note = Table A: HLA-B*58:01H HLA-A*02:11H HLA-A*02:07H HLA-B*38:01H HLA-B*38:02H HLA-B*57:03H HLA-C*05:01H HLA-B*13:01H
KLDDKDPNF

SEQ ID NO: 8044 - protein, 9 aa, Severe acute respiratory syndrome coronavirus 2
  REGION 1..9: note = Table A: HLA-B*53:01H HLA-B*35:03H HLA-C*15:05H HLA-B*35:02M HLA-B*51:01M HLA-B*35:12H
DPNFKDQVI

SEQ ID NO: 8045 - protein, 9 aa, Severe acute respiratory syndrome coronavirus 2
  REGION 1..9: note = Table A: HLA-C*14:03H HLA-A*24:07H
NFKDQVILL

SEQ ID NO: 8046 - protein, 9 aa, Severe acute respiratory syndrome coronavirus 2
  REGION 1..9: note = Table A: HLA-A*36:01H HLA-B*46:01H HLA-A*29:02H HLA-A*30:02M HLA-A*02:02H HLA-B*35:07H HLA-B*38:02M HLA-B*15:01M HLA-B*15:02M
LLNKHIDAY

SEQ ID NO: 8047 - protein, 9 aa, Severe acute respiratory syndrome coronavirus 2
  REGION 1..9: note = Table A: HLA-A*23:01H HLA-B*38:01H HLA-B*38:02M HLA-B*15:03M HLA-B*15:10H
KHIDAYKTF

SEQ ID NO: 8048 - protein, 9 aa, Severe acute respiratory syndrome coronavirus 2
  REGION 1..9: note = Table A: HLA-A*11:303M HLA-A*74:01M HLA-A*03:01H HLA-A*03:02H HLA-A*11:01H HLA-A*11:02H HLA-A*36:01M HLA-B*57:01H HLA-B*46:01H HLA-A*30:01M HLA-A*30:02H HLA-A*68:01H HLA-A*68:02H HLA-A*34:01M HLA-A*34:02H
  REGION 1..9: note = CONT. FROM ABOVE: HLA-C*07:27M HLA-C*08:03H HLA-B*37:01H HLA- A*31:01H HLA-B*57:03H HLA-A*66:01M
KTFPPTEPK

SEQ ID NO: 8049 - protein, 9 aa, Severe acute respiratory syndrome coronavirus 2
  REGION 1..9: note = Table A: HLA-B*48:01M HLA-B*15:03H
KKADETQAL

SEQ ID NO: 8050 - protein, 9 aa, Severe acute respiratory syndrome coronavirus 2
  REGION 1..9: note = Table A: HLA-A*33:01M HLA-A*33:03H HLA-A*26:03H HLA-B*18:01H HLA-B*27:02H HLA-A*68:01H HLA-A*68:02H HLA-A*34:01H HLA-A*34:02H HLA-B*07:05H
DETQALPQR

SEQ ID NO: 8051 - protein, 9 aa, Severe acute respiratory syndrome coronavirus 2
  REGION 1..9: note = Table A: HLA-A*33:03H HLA-A*68:02H
ETQALPQRQ

SEQ ID NO: 8052 - protein, 9 aa, Severe acute respiratory syndrome coronavirus 2
  REGION 1..9: note = Table A: HLA-A*03:01M HLA-A*03:02H HLA-A*11:01M HLA-A*11:02H HLA-A*34:02H HLA-C*07:27H
TQALPQRQK

SEQ ID NO: 8053 - protein, 9 aa, Severe acute respiratory syndrome coronavirus 2
  REGION 1..9: note = Table A: HLA-A*34:02H
QALPQRQKK

SEQ ID NO: 8054 - protein, 9 aa, Severe acute respiratory syndrome coronavirus 2
  REGION 1..9: note = Table A: HLA-B*15:03H
QKKQQTVTL

SEQ ID NO: 8055 - protein, 9 aa, Severe acute respiratory syndrome coronavirus 2
  REGION 1..9: note = Table A: HLA-B*48:01H HLA-B*15:03H
KKQQTVTLL

SEQ ID NO: 8056 - protein, 9 aa, Severe acute respiratory syndrome coronavirus 2
  REGION 1..9: note = Table A: HLA-B*13:02H
KQQTVTLLP

SEQ ID NO: 8057 - protein, 9 aa, Severe acute respiratory syndrome coronavirus 2
  REGION 1..9: note = Table A: HLA-B*39:06H
QQTVTLLPA

SEQ ID NO: 8058 - protein, 9 aa, Severe acute respiratory syndrome coronavirus 2
  REGION 1..9: note = Table A: HLA-B*56:01H HLA-B*55:02H HLA-A*02:05H HLA-B*39:06H HLA-B*54:01H
QTVTLLPAA

SEQ ID NO: 8059 - protein, 9 aa, Severe acute respiratory syndrome coronavirus 2
  REGION 1..9: note = Table A: HLA-B*53:01M HLA-B*35:03M HLA-C*15:05H HLA-B*35:01H HLA-B*35:02H HLA-B*35:08H HLA-B*35:07M HLA-B*35:12H HLA-B*39:01H HLA-B*07:05H
LPAADLDDF

SEQ ID NO: 8060 - protein, 9 aa, Severe acute respiratory syndrome coronavirus 2
  REGION 1..9: note = Table A: HLA-A*02:07M HLA-B*14:01H HLA-B*38:02H
DLDDFSKQL

SEQ ID NO: 8061 - protein, 9 aa, Severe acute respiratory syndrome coronavirus 2
  REGION 1..9: note = Table A: HLA-C*16:01H HLA-B*46:01H HLA-B*08:01H HLA-C*12:03H HLA-B*38:02H HLA-B*57:03H HLA-C*02:02H
FSKQLQQSM

SEQ ID NO: 8062 - protein, 9 aa, Severe acute respiratory syndrome coronavirus 2
  REGION 1..9: note = Table A: HLA-B*38:02H
QLQQSMSSA

SEQ ID NO: 8063 - protein, 9 aa, Severe acute respiratory syndrome coronavirus 2
  REGION 1..9: note = Table A: HLA-B*54:01H HLA-B*39:01H
MSSADSTQA

SEQ ID NO: 8064 - protein, 10 aa, Severe acute respiratory syndrome coronavirus 2
  REGION 1..10: note = Table A: HLA-A*68:01H
MSDNGPQNQR

SEQ ID NO: 8065 - protein, 10 aa, Severe acute respiratory syndrome coronavirus 2
  REGION 1..10: note = Table A: HLA-B*38:02H HLA-B*15:01H HLA-B*15:02M HLA-B*15:03H
NQRNAPRITF

SEQ ID NO: 8066 - protein, 10 aa, Severe acute respiratory syndrome coronavirus 2
  REGION 1..10: note = Table A: HLA-A*02:08H
ITFGGPSDST

SEQ ID NO: 8067 - protein, 10 aa, Severe acute respiratory syndrome coronavirus 2
  REGION 1..10: note = Table A: HLA-B*56:01H HLA-B*55:02H HLA-C*15:05H HLA-B*55:01H HLA-B*54:01H HLA-B*07:02H HLA-B*07:04H HLA-B*07:05H
RPQGLPNNTA

SEQ ID NO: 8068 - protein, 10 aa, Severe acute respiratory syndrome coronavirus 2
  REGION 1..10: note = Table A: HLA-B*58:01H HLA-B*57:03H
QGLPNNTASW

SEQ ID NO: 8069 - protein, 10 aa, Severe acute respiratory syndrome coronavirus 2
  REGION 1..10: note = Table A: HLA-B*38:01H HLA-B*38:02M HLA-B*15:01H HLA-B*15:02H HLA-B*13:01M HLA-B*13:02H
TQHGKEDLKF

SEQ ID NO: 8070 - protein, 10 aa, Severe acute respiratory syndrome coronavirus 2
  REGION 1..10: note = Table A: HLA-A*74:01H HLA-A*33:03H
HGKEDLKFPR

SEQ ID NO: 8071 - protein, 10 aa, Severe acute respiratory syndrome coronavirus 2
  REGION 1..10: note = Table A: HLA-A*36:01H HLA-A*01:01H
NSSPDDQIGY

SEQ ID NO: 8072 - protein, 10 aa, Severe acute respiratory syndrome coronavirus 2
  REGION 1..10: note = Table A: HLA-A*36:01H HLA-A*26:01M HLA-A*26:02H HLA-A*01:01H HLA-A*30:02H HLA-B*39:01H
SSPDDQIGYY

SEQ ID NO: 8073 - protein, 10 aa, Severe acute respiratory syndrome coronavirus 2
  REGION 1..10: note = Table A: HLA-A*33:03H HLA-B*27:02H HLA-A*68:01H HLA-A*34:01H HLA-A*66:01H
SPDDQIGYYR

SEQ ID NO: 8074 - protein, 10 aa, Severe acute respiratory syndrome coronavirus 2
  REGION 1..10: note = Table A: HLA-A*74:01H HLA-A*03:01H HLA-A*30:01H
RIRGGDGKMK

SEQ ID NO: 8075 - protein, 10 aa, Severe acute respiratory syndrome coronavirus 2
  REGION 1..10: note = Table A: HLA-A*33:01H
DGKMKDLSPR

SEQ ID NO: 8076 - protein, 10 aa, Severe acute respiratory syndrome coronavirus 2
  REGION 1..10: note = Table A: HLA-A*30:02H
KMKDLSPRWY

SEQ ID NO: 8077 - protein, 10 aa, Severe acute respiratory syndrome coronavirus 2
  REGION 1..10: note = Table A: HLA-C*14:02H HLA-C*14:03H HLA-B*55:02H HLA-C*08:01H HLA-B*54:01H
FYYLGTGPEA

SEQ ID NO: 8078 - protein, 10 aa, Severe acute respiratory syndrome coronavirus 2
  REGION 1..10: note = Table A: HLA-A*02:11H HLA-A*02:01H HLA-A*02:02M HLA-A*02:03H HLA-C*08:03H HLA-B*38:02H
YLGTGPEAGL

SEQ ID NO: 8079 - protein, 10 aa, Severe acute respiratory syndrome coronavirus 2
  REGION 1..10: note = Table A: HLA-A*11:01H HLA-A*36:01M HLA-A*29:01H HLA-A*29:02H HLA-A*01:01H HLA-A*30:02H HLA-C*07:27H HLA-C*08:03H HLA-B*15:01H
GTGPEAGLPY

SEQ ID NO: 8080 - protein, 10 aa, Severe acute respiratory syndrome coronavirus 2
  REGION 1..10: note = Table A: HLA-B*55:02H
GPEAGLPYGA

SEQ ID NO: 8081 - protein, 10 aa, Severe acute respiratory syndrome coronavirus 2
  REGION 1..10: note = Table A: HLA-A*33:03H HLA-A*68:01H HLA-A*34:01H HLA-A*34:02M
EAGLPYGANK

SEQ ID NO: 8082 - protein, 10 aa, Severe acute respiratory syndrome coronavirus 2
  REGION 1..10: note = Table A: HLA-C*15:05H HLA-B*51:01H
LPYGANKDGI

SEQ ID NO: 8083 - protein, 10 aa, Severe acute respiratory syndrome coronavirus 2
  REGION 1..10: note = Table A: HLA-A*11:303M HLA-A*03:01H HLA-A*03:02H HLA-A*11:01H HLA-A*11:02M HLA-A*36:01M HLA-A*30:02H HLA-A*68:01H HLA-A*34:02M HLA-C*07:27M
ATEGALNTPK

SEQ ID NO: 8084 - protein, 10 aa, Severe acute respiratory syndrome coronavirus 2
  REGION 1..10: note = Table A: HLA-A*26:03M HLA-A*68:01H HLA-A*34:01H HLA-A*34:02H
NTPKDHIGTR

SEQ ID NO: 8085 - protein, 10 aa, Severe acute respiratory syndrome coronavirus 2
  REGION 1..10: note = Table A: HLA-B*38:02H HLA-B*39:01H
TRNPANNAAI

SEQ ID NO: 8086 - protein, 10 aa, Severe acute respiratory syndrome coronavirus 2
  REGION 1..10: note = Table A: HLA-B*35:03M HLA-C*15:05H HLA-B*35:01H HLA-B*07:02H HLA-B*07:05H
NPANNAAIVL

SEQ ID NO: 8087 - protein, 10 aa, Severe acute respiratory syndrome coronavirus 2
  REGION 1..10: note = Table A: HLA-A*11:303H
VLQLPQGTTL

SEQ ID NO: 8088 - protein, 10 aa, Severe acute respiratory syndrome coronavirus 2
  REGION 1..10: note = Table A: HLA-A*03:01M HLA-A*03:02M HLA-A*11:01H HLA-A*11:02H HLA-A*36:01H HLA-A*34:01H HLA-A*34:02M
QLPQGTTLPK

SEQ ID NO: 8089 - protein, 10 aa, Severe acute respiratory syndrome coronavirus 2
  REGION 1..10: note = Table A: HLA-A*30:02H
QGTTLPKGFY

SEQ ID NO: 8090 - protein, 10 aa, Severe acute respiratory syndrome coronavirus 2
  REGION 1..10: note = Table A: HLA-A*02:07H
TLPKGFYAEG

SEQ ID NO: 8091 - protein, 10 aa, Severe acute respiratory syndrome coronavirus 2
  REGION 1..10: note = Table A: HLA-B*45:01H
AEGSRGGSQA

SEQ ID NO: 8092 - protein, 10 aa, Severe acute respiratory syndrome coronavirus 2
  REGION 1..10: note = Table A: HLA-B*27:05M
SRNSTPGSSR

SEQ ID NO: 8093 - protein, 10 aa, Severe acute respiratory syndrome coronavirus 2
  REGION 1..10: note = Table A: HLA-C*15:05H
TPGSSRGTSP

SEQ ID NO: 8094 - protein, 10 aa, Severe acute respiratory syndrome coronavirus 2
  REGION 1..10: note = Table A: HLA-B*35:03M HLA-B*35:01H HLA-B*35:02M HLA-B*35:12H HLA-B*38:02H HLA-B*39:01H
MAGNGGDAAL

SEQ ID NO: 8095 - protein, 10 aa, Severe acute respiratory syndrome coronavirus 2
  REGION 1..10: note = Table A: HLA-A*02:04H HLA-A*02:02M
ALALLLLDRL

SEQ ID NO: 8096 - protein, 10 aa, Severe acute respiratory syndrome coronavirus 2
  REGION 1..10: note = Table A: HLA-A*02:04M HLA-A*02:02H
LLLLDRLNQL

SEQ ID NO: 8097 - protein, 10 aa, Severe acute respiratory syndrome coronavirus 2
  REGION 1..10: note = Table A: HLA-B*14:02H HLA-B*14:01H
DRLNQLESKM

SEQ ID NO: 8098 - protein, 10 aa, Severe acute respiratory syndrome coronavirus 2
  REGION 1..10: note = Table A: HLA-B*48:01H HLA-C*08:03H HLA-B*15:01H
GQQQQGQTVT

SEQ ID NO: 8099 - protein, 10 aa, Severe acute respiratory syndrome coronavirus 2
  REGION 1..10: note = Table A: HLA-A*11:303H HLA-A*03:02M HLA-A*11:01H HLA-A*11:02H HLA-A*30:02H
QQQQGQTVTK

SEQ ID NO: 8100 - protein, 10 aa, Severe acute respiratory syndrome coronavirus 2
  REGION 1..10: note = Table A: HLA-A*03:01H HLA-A*03:02M HLA-A*11:01H
QQQGQTVTKK

SEQ ID NO: 8101 - protein, 10 aa, Severe acute respiratory syndrome coronavirus 2
  REGION 1..10: note = Table A: HLA-A*33:03H HLA-A*26:03H HLA-A*68:01M HLA-A*34:01M HLA-A*34:02H HLA-A*66:01M
SAAEASKKPR

SEQ ID NO: 8102 - protein, 10 aa, Severe acute respiratory syndrome coronavirus 2
  REGION 1..10: note = Table A: HLA-A*30:02H HLA-B*15:01M HLA-B*15:03H
RQKRTATKAY

SEQ ID NO: 8103 - protein, 10 aa, Severe acute respiratory syndrome coronavirus 2
  REGION 1..10: note = Table A: HLA-A*02:08H
ATKAYNVTQA

SEQ ID NO: 8104 - protein, 10 aa, Severe acute respiratory syndrome coronavirus 2
  REGION 1..10: note = Table A: HLA-B*38:02H HLA-B*15:03M
TKAYNVTQAF

SEQ ID NO: 8105 - protein, 10 aa, Severe acute respiratory syndrome coronavirus 2
  REGION 1..10: note = Table A: HLA-B*58:01H HLA-A*03:01H HLA-A*02:11H HLA-A*30:02H HLA-A*68:02H HLA-B*57:03H
KAYNVTQAFG

SEQ ID NO: 8106 - protein, 10 aa, Severe acute respiratory syndrome coronavirus 2
  REGION 1..10: note = Table A: HLA-B*27:02H
AYNVTQAFGR

SEQ ID NO: 8107 - protein, 10 aa, Severe acute respiratory syndrome coronavirus 2
  REGION 1..10: note = Table A: HLA-A*66:01H
YNVTQAFGRR

SEQ ID NO: 8108 - protein, 10 aa, Severe acute respiratory syndrome coronavirus 2
  REGION 1..10: note = Table A: HLA-B*57:03H
RGPEQTQGNF

SEQ ID NO: 8109 - protein, 10 aa, Severe acute respiratory syndrome coronavirus 2
  REGION 1..10: note = Table A: HLA-B*44:02M HLA-B*44:05H HLA-B*44:03M
QELIRQGTDY

SEQ ID NO: 8110 - protein, 10 aa, Severe acute respiratory syndrome coronavirus 2
  REGION 1..10: note = Table A: HLA-A*34:02H
ELIRQGTDYK

SEQ ID NO: 8111 - protein, 10 aa, Severe acute respiratory syndrome coronavirus 2
  REGION 1..10: note = Table A: HLA-B*50:01H
TDYKHWPQIA

SEQ ID NO: 8112 - protein, 10 aa, Severe acute respiratory syndrome coronavirus 2
  REGION 1..10: note = Table A: HLA-B*15:03M
YKHWPQIAQF

SEQ ID NO: 8113 - protein, 10 aa, Severe acute respiratory syndrome coronavirus 2
  REGION 1..10: note = Table A: HLA-B*44:05H HLA-B*46:01H HLA-B*38:02H HLA-B*15:01H HLA-B*15:02H HLA-B*15:03H
AQFAPSASAF

SEQ ID NO: 8114 - protein, 10 aa, Severe acute respiratory syndrome coronavirus 2
  REGION 1..10: note = Table A: HLA-C*14:03H HLA-A*24:02M HLA-A*24:07M HLA-A*23:01H
QFAPSASAFF

SEQ ID NO: 8115 - protein, 10 aa, Severe acute respiratory syndrome coronavirus 2
  REGION 1..10: note = Table A: HLA-C*15:05M HLA-B*07:05H
APSASAFFGM

SEQ ID NO: 8116 - protein, 10 aa, Severe acute respiratory syndrome coronavirus 2
  REGION 1..10: note = Table A: HLA-A*68:01H HLA-A*66:01M
SASAFFGMSR

SEQ ID NO: 8117 - protein, 10 aa, Severe acute respiratory syndrome coronavirus 2
  REGION 1..10: note = Table A: HLA-C*14:03H
AFFGMSRIGM

SEQ ID NO: 8118 - protein, 10 aa, Severe acute respiratory syndrome coronavirus 2
  REGION 1..10: note = Table A: HLA-A*02:11H
FGMSRIGMEV

SEQ ID NO: 8119 - protein, 10 aa, Severe acute respiratory syndrome coronavirus 2
  REGION 1..10: note = Table A: HLA-B*44:05H HLA-B*40:01H HLA-B*40:02H HLA-B*49:01H
MEVTPSGTWL

SEQ ID NO: 8120 - protein, 10 aa, Severe acute respiratory syndrome coronavirus 2
  REGION 1..10: note = Table A: HLA-A*36:01H HLA-B*46:01H HLA-A*29:01H HLA-A*29:02H HLA-A*30:02H
VTPSGTWLTY

SEQ ID NO: 8121 - protein, 10 aa, Severe acute respiratory syndrome coronavirus 2
  REGION 1..10: note = Table A: HLA-A*03:01H HLA-A*03:02H HLA-A*36:01H
KLDDKDPNFK

SEQ ID NO: 8122 - protein, 10 aa, Severe acute respiratory syndrome coronavirus 2
  REGION 1..10: note = Table A: HLA-B*35:03H
DPNFKDQVIL

SEQ ID NO: 8123 - protein, 10 aa, Severe acute respiratory syndrome coronavirus 2
  REGION 1..10: note = Table A: HLA-A*36:01H HLA-A*29:02H HLA-A*30:02M HLA-B*38:02M HLA-B*15:01H HLA-B*15:02H
ILLNKHIDAY

SEQ ID NO: 8124 - protein, 10 aa, Severe acute respiratory syndrome coronavirus 2
  REGION 1..10: note = Table A: HLA-A*11:303H HLA-A*74:01H HLA-A*03:01M HLA-A*03:02M HLA-A*11:01M HLA-A*11:02M HLA-A*36:01H HLA-A*30:01M HLA-A*30:02M HLA-A*34:02H HLA-C*07:27M
KTFPPTEPKK

SEQ ID NO: 8125 - protein, 10 aa, Severe acute respiratory syndrome coronavirus 2
  REGION 1..10: note = Table A: HLA-A*36:01H
KADETQALPQ

SEQ ID NO: 8126 - protein, 10 aa, Severe acute respiratory syndrome coronavirus 2
  REGION 1..10: note = Table A: HLA-A*03:02H HLA-A*11:01H HLA-A*33:03M HLA-A*26:03H HLA-A*68:01M HLA-A*34:01H HLA-A*34:02H HLA-A*66:01H
ETQALPQRQK

SEQ ID NO: 8127 - protein, 10 aa, Severe acute respiratory syndrome coronavirus 2
  REGION 1..10: note = Table A: HLA-B*07:04H HLA-B*15:01H
RQKKQQTVTL

SEQ ID NO: 8128 - protein, 10 aa, Severe acute respiratory syndrome coronavirus 2
  REGION 1..10: note = Table A: HLA-A*02:08H
KQLQQSMSSA

SEQ ID NO: 8129 - protein, 10 aa, Severe acute respiratory syndrome coronavirus 2
  REGION 1..10: note = Table A: HLA-A*02:03H HLA-B*38:02H HLA-B*39:01H
SMSSADSTQA

SEQ ID NO: 8130 - protein, 11 aa, Severe acute respiratory syndrome coronavirus 2
  REGION 1..11: note = Table A: HLA-B*39:01H
FGGPSDSTGSN

SEQ ID NO: 8131 - protein, 11 aa, Severe acute respiratory syndrome coronavirus 2
  REGION 1..11: note = Table A: HLA-B*39:06H
RRPQGLPNNTA

SEQ ID NO: 8132 - protein, 11 aa, Severe acute respiratory syndrome coronavirus 2
  REGION 1..11: note = Table A: HLA-B*55:02H
RPQGLPNNTAS

SEQ ID NO: 8133 - protein, 11 aa, Severe acute respiratory syndrome coronavirus 2
  REGION 1..11: note = Table A: HLA-B*55:02H HLA-B*54:01H
LPNNTASWFTA

SEQ ID NO: 8134 - protein, 11 aa, Severe acute respiratory syndrome coronavirus 2
  REGION 1..11: note = Table A: HLA-B*57:03H
LTQHGKEDLKF

SEQ ID NO: 8135 - protein, 11 aa, Severe acute respiratory syndrome coronavirus 2
  REGION 1..11: note = Table A: HLA-A*36:01H HLA-A*26:01H HLA-A*01:01M HLA-A*30:02H
NSSPDDQIGYY

SEQ ID NO: 8136 - protein, 11 aa, Severe acute respiratory syndrome coronavirus 2
  REGION 1..11: note = Table A: HLA-A*74:01H HLA-A*11:01H HLA-A*11:02H HLA-A*33:03H HLA-A*68:01M HLA-A*68:02H HLA-A*66:01H
SSPDDQIGYYR

SEQ ID NO: 8137 - protein, 11 aa, Severe acute respiratory syndrome coronavirus 2
  REGION 1..11: note = Table A: HLA-B*15:03H
GKMKDLSPRWY

SEQ ID NO: 8138 - protein, 11 aa, Severe acute respiratory syndrome coronavirus 2
  REGION 1..11: note = Table A: HLA-A*74:01H HLA-A*02:11H HLA-A*32:01H
KMKDLSPRWYF

SEQ ID NO: 8139 - protein, 11 aa, Severe acute respiratory syndrome coronavirus 2
  REGION 1..11: note = Table A: HLA-A*03:02H HLA-A*11:01H
VATEGALNTPK

SEQ ID NO: 8140 - protein, 11 aa, Severe acute respiratory syndrome coronavirus 2
  REGION 1..11: note = Table A: HLA-A*33:01H HLA-A*33:03H
LNTPKDHIGTR

SEQ ID NO: 8141 - protein, 11 aa, Severe acute respiratory syndrome coronavirus 2
  REGION 1..11: note = Table A: HLA-A*02:11M HLA-C*15:05H HLA-A*02:04H HLA-C*08:01H HLA-B*38:02H HLA-B*07:05H HLA-B*57:03H
IVLQLPQGTTL

SEQ ID NO: 8142 - protein, 11 aa, Severe acute respiratory syndrome coronavirus 2
  REGION 1..11: note = Table A: HLA-A*11:01H HLA-A*11:02H
LQLPQGTTLPK

SEQ ID NO: 8143 - protein, 11 aa, Severe acute respiratory syndrome coronavirus 2
  REGION 1..11: note = Table A: HLA-A*31:01H
TTLPKGFYAEG

SEQ ID NO: 8144 - protein, 11 aa, Severe acute respiratory syndrome coronavirus 2
  REGION 1..11: note = Table A: HLA-A*74:01H HLA-A*31:01H
GSRGGSQASSR

SEQ ID NO: 8145 - protein, 11 aa, Severe acute respiratory syndrome coronavirus 2
  REGION 1..11: note = Table A: HLA-A*74:01H HLA-A*33:03H HLA-A*31:01H HLA-A*66:01H
SSRNSTPGSSR

SEQ ID NO: 8146 - protein, 11 aa, Severe acute respiratory syndrome coronavirus 2
  REGION 1..11: note = Table A: HLA-A*02:02H HLA-B*13:01H
RMAGNGGDAAL

SEQ ID NO: 8147 - protein, 11 aa, Severe acute respiratory syndrome coronavirus 2
  REGION 1..11: note = Table A: HLA-A*02:11M HLA-A*02:04M
ALLLLDRLNQL

SEQ ID NO: 8148 - protein, 11 aa, Severe acute respiratory syndrome coronavirus 2
  REGION 1..11: note = Table A: HLA-A*74:01H
RLNQLESKMSG

SEQ ID NO: 8149 - protein, 11 aa, Severe acute respiratory syndrome coronavirus 2
  REGION 1..11: note = Table A: HLA-A*02:02H
KMSGKGQQQQG

SEQ ID NO: 8150 - protein, 11 aa, Severe acute respiratory syndrome coronavirus 2
  REGION 1..11: note = Table A: HLA-A*11:303M HLA-A*03:01H HLA-A*03:02H HLA-A*11:01M HLA-A*11:02M HLA-B*27:05H HLA-B*27:02M HLA-A*30:02M HLA-C*07:27M HLA-B*15:01H HLA-B*13:02H
GQQQQGQTVTK

SEQ ID NO: 8151 - protein, 11 aa, Severe acute respiratory syndrome coronavirus 2
  REGION 1..11: note = Table A: HLA-A*03:02H
QQQQGQTVTKK

SEQ ID NO: 8152 - protein, 11 aa, Severe acute respiratory syndrome coronavirus 2
  REGION 1..11: note = Table A: HLA-A*74:01M
KSAAEASKKPR

SEQ ID NO: 8153 - protein, 11 aa, Severe acute respiratory syndrome coronavirus 2
  REGION 1..11: note = Table A: HLA-B*15:01H HLA-B*57:03H
ATKAYNVTQAF

SEQ ID NO: 8154 - protein, 11 aa, Severe acute respiratory syndrome coronavirus 2
  REGION 1..11: note = Table A: HLA-A*74:01H HLA-A*03:02H HLA-A*11:01H HLA-A*11:02H HLA-A*36:01H HLA-A*68:01H HLA-A*31:01H HLA-A*66:01H
KAYNVTQAFGR

SEQ ID NO: 8155 - protein, 11 aa, Severe acute respiratory syndrome coronavirus 2
  REGION 1..11: note = Table A: HLA-B*15:02H
DQELIRQGTDY

SEQ ID NO: 8156 - protein, 11 aa, Severe acute respiratory syndrome coronavirus 2
  REGION 1..11: note = Table A: HLA-A*24:07H HLA-A*23:01H
DYKHWPQIAQF

SEQ ID NO: 8157 - protein, 11 aa, Severe acute respiratory syndrome coronavirus 2
  REGION 1..11: note = Table A: HLA-B*54:01H
WPQIAQFAPSA

SEQ ID NO: 8158 - protein, 11 aa, Severe acute respiratory syndrome coronavirus 2
  REGION 1..11: note = Table A: HLA-A*30:02H HLA-B*38:02H HLA-B*15:01M HLA-B*15:03H HLA-B*13:01H
AQFAPSASAFF

SEQ ID NO: 8159 - protein, 11 aa, Severe acute respiratory syndrome coronavirus 2
  REGION 1..11: note = Table A: HLA-A*02:02H
GMSRIGMEVTP

SEQ ID NO: 8160 - protein, 11 aa, Severe acute respiratory syndrome coronavirus 2
  REGION 1..11: note = Table A: HLA-B*58:01M HLA-B*57:01H HLA-B*53:01H HLA-B*57:03M
IGMEVTPSGTW

SEQ ID NO: 8161 - protein, 11 aa, Severe acute respiratory syndrome coronavirus 2
  REGION 1..11: note = Table A: HLA-A*25:01M HLA-A*26:01M HLA-A*26:02H HLA-A*26:03H HLA-A*34:02H
EVTPSGTWLTY

SEQ ID NO: 8162 - protein, 11 aa, Severe acute respiratory syndrome coronavirus 2
  REGION 1..11: note = Table A: HLA-A*30:02H
VILLNKHIDAY

SEQ ID NO: 8163 - protein, 11 aa, Severe acute respiratory syndrome coronavirus 2
  REGION 1..11: note = Table A: HLA-A*30:01H
AYKTFPPTEPK

SEQ ID NO: 8164 - protein, 11 aa, Severe acute respiratory syndrome coronavirus 2
  REGION 1..11: note = Table A: HLA-A*36:01H
KADETQALPQR

SEQ ID NO: 8165 - protein, 11 aa, Severe acute respiratory syndrome coronavirus 2
  REGION 1..11: note = Table A: HLA-A*33:03H
ETQALPQRQKK

SEQ ID NO: 8166 - protein, 11 aa, Severe acute respiratory syndrome coronavirus 2
  REGION 1..11: note = Table A: HLA-B*07:04H
LPQRQKKQQTV

SEQ ID NO: 8167 - protein, 11 aa, Severe acute respiratory syndrome coronavirus 2
  REGION 1..11: note = Table A: HLA-B*38:02H
TLLPAADLDDF

SEQ ID NO: 8168 - protein, 11 aa, Severe acute respiratory syndrome coronavirus 2
  REGION 1..11: note = Table A: HLA-C*08:02H
AADLDDFSKQL

SEQ ID NO: 8169 - protein, 8 aa, Severe acute respiratory syndrome coronavirus 2
  REGION 1..8: note = Table A: HLA-B*46:01H HLA-C*03:02M HLA-B*35:07M HLA-B*38:02H HLA-B*15:02H
FAFPFTIY

SEQ ID NO: 8170 - protein, 8 aa, Severe acute respiratory syndrome coronavirus 2
  REGION 1..8: note = Table A: HLA-B*35:03H HLA-C*15:05H HLA-B*35:01H HLA-B*51:01H HLA-B*35:07M HLA-C*08:01H HLA-B*38:02H HLA-B*54:01H HLA-B*15:02H HLA-B*07:05H
FPFTIYSL

SEQ ID NO: 8171 - protein, 8 aa, Severe acute respiratory syndrome coronavirus 2
  REGION 1..8: note = Table A: HLA-B*39:06H
SRNYIAQV

SEQ ID NO: 8172 - protein, 8 aa, Severe acute respiratory syndrome coronavirus 2
  REGION 1..8: note = Table A: HLA-B*38:02H
YIAQVDVV

SEQ ID NO: 8173 - protein, 8 aa, Severe acute respiratory syndrome coronavirus 2
  REGION 1..8: note = Table A: HLA-B*44:05H HLA-B*38:02H HLA-B*15:01M HLA-B*15:03H
AQVDVVNF

SEQ ID NO: 8174 - protein, 8 aa, Severe acute respiratory syndrome coronavirus 2
  REGION 1..8: note = Table A: HLA-B*37:01H HLA-B*40:02H HLA-B*41:02H
VDVVNFNL

SEQ ID NO: 8175 - protein, 9 aa, Severe acute respiratory syndrome coronavirus 2
  REGION 1..9: note = Table A: HLA-A*02:11M HLA-A*68:02M HLA-A*02:04H HLA-A*02:07H HLA-A*02:03H HLA-B*51:01H HLA-C*08:01H HLA-B*38:02H HLA-B*40:06H HLA-B*07:05H HLA-B*13:02H
NVFAFPFTI

SEQ ID NO: 8176 - protein, 9 aa, Severe acute respiratory syndrome coronavirus 2
  REGION 1..9: note = Table A: HLA-C*14:03H HLA-A*29:02H
VFAFPFTIY

SEQ ID NO: 8177 - protein, 9 aa, Severe acute respiratory syndrome coronavirus 2
  REGION 1..9: note = Table A: HLA-C*14:02M HLA-C*14:03M HLA-A*24:07H
AFPFTIYSL

SEQ ID NO: 8178 - protein, 9 aa, Severe acute respiratory syndrome coronavirus 2
  REGION 1..9: note = Table A: HLA-B*53:01H HLA-B*35:03H HLA-B*35:07H
FPFTIYSLL

SEQ ID NO: 8179 - protein, 9 aa, Severe acute respiratory syndrome coronavirus 2
  REGION 1..9: note = Table A: HLA-A*24:07H
PFTIYSLLL

SEQ ID NO: 8180 - protein, 9 aa, Severe acute respiratory syndrome coronavirus 2
  REGION 1..9: note = Table A: HLA-A*02:02H
RMNSRNYIA

SEQ ID NO: 8181 - protein, 9 aa, Severe acute respiratory syndrome coronavirus 2
  REGION 1..9: note = Table A: HLA-A*68:02H HLA-C*15:05H HLA-C*15:02H HLA-A*02:03H HLA-B*52:01H HLA-B*38:02H
NSRNYIAQV

SEQ ID NO: 8182 - protein, 9 aa, Severe acute respiratory syndrome coronavirus 2
  REGION 1..9: note = Table A: HLA-C*15:02H
RNYIAQVDV

SEQ ID NO: 8183 - protein, 9 aa, Severe acute respiratory syndrome coronavirus 2
  REGION 1..9: note = Table A: HLA-C*14:03H HLA-A*24:02H HLA-C*08:01H HLA-B*38:02H HLA-B*39:01M
NYIAQVDVV

SEQ ID NO: 8184 - protein, 9 aa, Severe acute respiratory syndrome coronavirus 2
  REGION 1..9: note = Table A: HLA-B*58:01H HLA-A*11:303H HLA-B*57:01H HLA-B*46:01H HLA-C*04:03M HLA-B*53:01M HLA-B*35:03H HLA-C*15:05H HLA-C*12:02H HLA-B*35:01M HLA-B*35:02H HLA-B*35:08M HLA-B*35:07H HLA-C*08:01H HLA-B*35:12H
  REGION 1..9: note = CONT. FROM ABOVE: HLA-B*38:02H HLA-B*15:01H HLA-B*07:05H HLA- B*57:03M HLA-C*02:02H HLA-C*05:01H
IAQVDVVNF

SEQ ID NO: 8185 - protein, 9 aa, Severe acute respiratory syndrome coronavirus 2
  REGION 1..9: note = Table A: HLA-C*04:03M HLA-A*02:11H HLA-A*02:06H HLA-A*02:07H HLA-A*02:01H HLA-B*35:02H HLA-C*08:01H HLA-C*08:02M HLA-B*35:12H HLA-B*38:02H
QVDVVNFNL

SEQ ID NO: 8186 - protein, 9 aa, Severe acute respiratory syndrome coronavirus 2
  REGION 1..9: note = Table A: HLA-C*08:03H HLA-B*40:02H HLA-B*50:01H
VDVVNFNLT

SEQ ID NO: 8187 - protein, 10 aa, Severe acute respiratory syndrome coronavirus 2
  REGION 1..10: note = Table A: HLA-A*29:02H
GYINVFAFPF

SEQ ID NO: 8188 - protein, 10 aa, Severe acute respiratory syndrome coronavirus 2
  REGION 1..10: note = Table A: HLA-C*16:01H HLA-B*46:01H HLA-C*03:03H HLA-A*02:11H HLA-C*03:02H HLA-C*03:04M HLA-A*68:02H HLA-C*12:03H HLA-A*02:04M HLA-A*02:05M HLA-A*02:02M HLA-A*02:03H HLA-C*17:01H
FAFPFTIYSL

SEQ ID NO: 8189 - protein, 10 aa, Severe acute respiratory syndrome coronavirus 2
  REGION 1..10: note = Table A: HLA-A*26:02H HLA-A*68:02H HLA-A*02:05H HLA-B*35:01H HLA-B*38:02H HLA-B*15:01H HLA-B*57:03H
YIAQVDVVNF

SEQ ID NO: 8190 - protein, 10 aa, Severe acute respiratory syndrome coronavirus 2
  REGION 1..10: note = Table A: HLA-B*48:01H HLA-A*02:11H HLA-A*02:04M HLA-A*02:05M HLA-A*02:06M HLA-A*02:08H HLA-A*02:01H HLA-A*02:02M HLA-C*08:01H HLA-B*38:02H HLA-B*40:06H HLA-B*13:01H HLA-B*13:02M
AQVDVVNFNL

SEQ ID NO: 8191 - protein, 10 aa, Severe acute respiratory syndrome coronavirus 2
  REGION 1..10: note = Table A: HLA-C*08:03H
QVDVVNFNLT

SEQ ID NO: 8192 - protein, 11 aa, Severe acute respiratory syndrome coronavirus 2
  REGION 1..11: note = Table A: HLA-C*17:01H
FAFPFTIYSLL

SEQ ID NO: 8193 - protein, 11 aa, Severe acute respiratory syndrome coronavirus 2
  REGION 1..11: note = Table A: HLA-A*02:11H
RMNSRNYIAQV

SEQ ID NO: 8194 - protein, 11 aa, Severe acute respiratory syndrome coronavirus 2
  REGION 1..11: note = Table A: HLA-C*14:03H HLA-A*24:02M HLA-A*24:07M HLA-C*08:01H HLA-A*23:01M
NYIAQVDVVNF

SEQ ID NO: 8195 - protein, 11 aa, Severe acute respiratory syndrome coronavirus 2
  REGION 1..11: note = Table A: HLA-B*48:01H HLA-C*06:02H HLA-B*27:02H HLA-A*68:02H HLA-A*02:05M HLA-A*02:06M HLA-C*08:01H HLA-C*08:03H HLA-B*38:02H HLA-B*40:06H HLA-B*39:01H HLA-B*13:02H
AQVDVVNFNLT

SEQ ID NO: 8196 - protein, 12 aa, Severe acute respiratory syndrome coronavirus 2
  REGION 1..12: note = Table B: HLA-DQA1*03:02-B1*03:03L HLA-DQA1*05:01-B1*03:01L HLA-DRB1*01:03L HLA-DRB1*04:05L HLA-DRB1*01:02L HLA-DQA1*01:01-B1*05:01L HLA-DQA1*05:05-B1*03:19L HLA-DQA1*05:01-B1*02:01L HLA-DRB1*04:08L HLA-DRB1*15:03L
ESLVPGFNEKTH

SEQ ID NO: 8197 - protein, 11 aa, Severe acute respiratory syndrome coronavirus 2
  REGION 1..11: note = Table B: HLA-DQA1*03:02-B1*03:03L HLA-DQA1*05:01-B1*03:01L HLA-DRB1*04:03L HLA-DRB1*13:03L HLA-DRB1*01:03L HLA-DRB1*04:02L HLA-DRB1*04:05L HLA-DQA1*01:02-B1*06:02L HLA-DRB1*14:01L HLA-DQA1*01:01-B1*05:01L HLA-DRB1*08:01L
  REGION 1..11: note = CONT. FROM ABOVE: HLA-DQA1*05:01-B1*02:01L HLA-DRB1*12:01L HLA-D RB1*14:17L HLA-DPA1*01:02-B1*04:01L HLA-DRB1*16:01L HLA-DQA1*01: 03-B1*06:01L HLA-DRB1*04:08L HLA-DQA1*02:01-B1*03:03L
VPGFNEKTHVQ

SEQ ID NO: 8198 - protein, 10 aa, Severe acute respiratory syndrome coronavirus 2
  REGION 1..10: note = Table B: HLA-DQA1*03:02-B1*03:03L HLA-DQA1*05:05-B1*03:19L
NEKTHVQLSL

SEQ ID NO: 8199 - protein, 10 aa, Severe acute respiratory syndrome coronavirus 2
  REGION 1..10: note = Table B: HLA-DQA1*03:02-B1*03:03L HLA-DQA1*05:05-B1*03:19L HLA-DQA1*03:01-B1*03:02L HLA-DPA1*01:03-B1*104:01L HLA-DQA1*02:01-B1*03:03L HLA-DRB1*15:03L
VQLSLPVLQV

SEQ ID NO: 8200 - protein, 10 aa, Severe acute respiratory syndrome coronavirus 2
  REGION 1..10: note = Table B: HLA-DQA1*03:02-B1*03:03L HLA-DQA1*05:01-B1*03:01L HLA-DRB1*13:03L HLA-DQA1*01:02-B1*06:02L HLA-DPA1*03:01-B1*04:02L HLA-DRB1*14:01L HLA-DQA1*01-B1*05L HLA-DQA1*05:01-B1*02:01L HLA-DPA1*03:01-B1*105:01L
  REGION 1..10: note = CONT. FROM ABOVE: HLA-DQA1*03:01-B1*03:02L HLA-DPA1*01:02-B1*04: 01L HLA-DQA1*02:01-B1*03:03L
LPVLQVRDVL

SEQ ID NO: 8201 - protein, 12 aa, Severe acute respiratory syndrome coronavirus 2
  REGION 1..12: note = Table B: HLA-DQA1*03:02-B1*03:03L HLA-DQA1*05:01-B1*03:01L HLA-DRB1*13:03L HLA-DRB1*01:03L HLA-DRB1*04:05L HLA-DQA1*01:02-B1*06:02L HLA-DRB1*01:02L HLA-DRB3*02:01L HLA-DPA1*01:03-B1*03:01L HLA-DPA1*03:01-B1*04:02L
  REGION 1..12: note = CONT. FROM ABOVE: HLA-DQA1*01:01-B1*05:01L HLA-DRB1*08:01L HLA-D RB1*04:10L HLA-DPA1*01:03-B1*04:02L HLA-DRB1*12:01L HLA-DPA1*02: 01-B1*13:01L HLA-DPA1*03:01-B1*105:01L HLA-DQA1*05:05-B1*03:01L HLA-DRB1*14:17L HLA-DPA1*01:02-B1*04:01L
  REGION 1..12: note = CONT. FROM ABOVE: HLA-DQA1*01:03-B1*06:01L HLA-DRB1*04:08L HLA-D QA1*02:01-B1*03:03L
DVLVRGFGDSVE

SEQ ID NO: 8202 - protein, 12 aa, Severe acute respiratory syndrome coronavirus 2
  REGION 1..12: note = Table B: HLA-DQA1*03:02-B1*03:03L HLA-DRB1*13:03L HLA-DRB1*01:03L HLA-DRB1*04:04L HLA-DQA1*01:02-B1*06:02L HLA-DRB1*01:02L HLA-DRB4*03:01NL HLA-DPA1*03:01-B1*04:02L HLA-DRB1*08:01L HLA-DRB1*12:01L HLA-DPA1*02:01-B1*13:01L
  REGION 1..12: note = CONT. FROM ABOVE: HLA-DPA1*03:01-B1*105:01L HLA-DRB1*14:17L HLA- DQA1*01:03-B1*06:01L HLA-DRB1*04:08L HLA-DQA1*02:01-B1*03:03L
VLVRGFGDSVEE

SEQ ID NO: 8203 - protein, 10 aa, Severe acute respiratory syndrome coronavirus 2
  REGION 1..10: note = Table B: HLA-DQA1*03:02-B1*03:03L HLA-DQA1*02:01-B1*03:03L
RGFGDSVEEV

SEQ ID NO: 8204 - protein, 10 aa, Severe acute respiratory syndrome coronavirus 2
  REGION 1..10: note = Table B: HLA-DQA1*03:02-B1*03:03L HLA-DQA1*01-B1*05L HLA-DQA1*05:01-B1*02:01L HLA-DQA1*03:01-B1*03:02L
GFGDSVEEVL

SEQ ID NO: 8205 - protein, 12 aa, Severe acute respiratory syndrome coronavirus 2
  REGION 1..12: note = Table B: HLA-DQA1*03:02-B1*03:03L HLA-DQA1*05:01-B1*03:01L HLA-DRB1*04:03L HLA-DRB1*04:05L HLA-DQA1*01:02-B1*06:02L HLA-DQA1*01:01-B1*05:01L HLA-DQA1*01-B1*05L HLA-DQA1*05:01-B1*02:01L HLA-DRB1*16:01L
GDSVEEVLSEAR

SEQ ID NO: 8206 - protein, 12 aa, Severe acute respiratory syndrome coronavirus 2
  REGION 1..12: note = Table B: HLA-DQA1*03:02-B1*03:03L HLA-DQA1*05:01-B1*03:01L HLA-DRB1*04:03L HLA-DRB1*04:05L HLA-DQA1*01:02-B1*06:02L HLA-DQA1*01:01-B1*05:01L HLA-DQA1*01-B1*05L HLA-DQA1*05:05-B1*03:19L HLA-DQA1*05:01-B1*02:01L
  REGION 1..12: note = CONT. FROM ABOVE: HLA-DRB1*04:10L HLA-DPA1*03:01-B1*105:01L HLA- DRB1*16:01L
DSVEEVLSEARQ

SEQ ID NO: 8207 - protein, 12 aa, Severe acute respiratory syndrome coronavirus 2
  REGION 1..12: note = Table B: HLA-DQA1*03:02-B1*03:03L HLA-DQA1*05:01-B1*03:01L HLA-DQA1*01:02-B1*06:02L HLA-DQA1*01:01-B1*05:01L HLA-DQA1*05:01-B1*02:01L HLA-DRB1*16:01L
SVEEVLSEARQH

SEQ ID NO: 8208 - protein, 10 aa, Severe acute respiratory syndrome coronavirus 2
  REGION 1..10: note = Table B: HLA-DQA1*03:02-B1*03:03L HLA-DQA1*05:01-B1*03:01L HLA-DRB1*13:03L HLA-DQA1*01:02-B1*06:02M HLA-DRB1*01:02L HLA-DRB4*03:01NL HLA-DPA1*01:03-B1*03:01L HLA-DPA1*03:01-B1*04:02L HLA-DRB1*14:01L HLA-DRB1*14:02L
  REGION 1..10: note = CONT. FROM ABOVE: HLA-DRB1*08:01L HLA-DQA1*05:05-B1*03:19L HLA-D QA1*05:01-B1*02:01L HLA-DPA1*01:03-B1*04:01L HLA-DQA1*05:05-B1*0 3:116L HLA-DRB1*09:01L HLA-DRB1*12:01L HLA-DPA1*02:01-B1*13:01L HLA-DPA1*03:01-B1*105:01M HLA-DQA1*03:01-B1*03:02L
  REGION 1..10: note = CONT. FROM ABOVE: HLA-DQA1*05:05-B1*03:01L HLA-DPA1*01:02-B1*04: 01L HLA-DQA1*01:03-B1*06:01L HLA-DQA1*02:01-B1*03:03L HLA-DRB1*1 5:03L
EVLSEARQHL

SEQ ID NO: 8209 - protein, 12 aa, Severe acute respiratory syndrome coronavirus 2
  REGION 1..12: note = Table B: HLA-DQA1*03:02-B1*03:03L HLA-DQA1*05:01-B1*03:01L HLA-DQA1*05:05-B1*03:19L HLA-DPA1*03:01-B1*105:01L HLA-DQA1*03:01-B1*03:02L HLA-DQA1*05:05-B1*03:01L
DGTCGLVEVEKG

SEQ ID NO: 8210 - protein, 10 aa, Severe acute respiratory syndrome coronavirus 2
  REGION 1..10: note = Table B: HLA-DQA1*03:02-B1*03:03L HLA-DQA1*03:01-B1*03:02L
GLVEVEKGVL

SEQ ID NO: 8211 - protein, 10 aa, Severe acute respiratory syndrome coronavirus 2
  REGION 1..10: note = Table B: HLA-DQA1*03:02-B1*03:03L HLA-DRB1*04:03L HLA-DRB1*04:02L HLA-DQA1*03:01-B1*03:02L HLA-DRB1*14:17L HLA-DQA1*02:01-B1*03:03L
VEVEKGVLPQ

SEQ ID NO: 8212 - protein, 10 aa, Severe acute respiratory syndrome coronavirus 2
  REGION 1..10: note = Table B: HLA-DQA1*03:02-B1*03:03L HLA-DQA1*05:01-B1*03:01L HLA-DQA1*01:02-B1*06:02L HLA-DPA1*03:01-B1*04:02L HLA-DQA1*05:05-B1*03:19L HLA-DQA1*05:01-B1*02:01L HLA-DQA1*05:05-B1*03:116L HLA-DRB1*09:01L
  REGION 1..10: note = CONT. FROM ABOVE: HLA-DPA1*03:01-B1*105:01L HLA-DQA1*03:01-B1*03 :02L HLA-DPA1*01:02-B1*04:01L HLA-DQA1*02:01-B1*03:03L HLA-DRB1* 15:03L
EVEKGVLPQL

SEQ ID NO: 8213 - protein, 12 aa, Severe acute respiratory syndrome coronavirus 2
  REGION 1..12: note = Table B: HLA-DQA1*03:02-B1*03:03L HLA-DQA1*01:02-B1*06:02L HLA-DQA1*05:01-B1*02:01L HLA-DQA1*03:01-B1*03:02L HLA-DQA1*01:03-B1*06:01L HLA-DQA1*02:01-B1*03:03L
VEKGVLPQLEQP

SEQ ID NO: 8214 - protein, 10 aa, Severe acute respiratory syndrome coronavirus 2
  REGION 1..10: note = Table B: HLA-DQA1*03:02-B1*03:03L HLA-DQA1*05:01-B1*03:01L HLA-DRB1*04:03L HLA-DRB1*13:02L HLA-DRB1*13:03L HLA-DRB1*01:03L HLA-DRB1*04:02L HLA-DRB1*04:05L HLA-DQA1*01:02-B1*06:02M HLA-DRB4*03:01NL HLA-DRB1*08:77L HLA-DPA1*01:03-B1*03:01L
  REGION 1..10: note = CONT. FROM ABOVE: HLA-DPA1*03:01-B1*04:02L HLA-DRB1*03:01L HLA-D RB1*14:01L HLA-DRB1*11:02L HLA-DRB1*14:02L HLA-DRB1*11:01L HLA-D QA1*01-B1*05L HLA-DQA1*05:05-B1*03:19M HLA-DQA1*05:01-B1*02:01M HLA-DRB4*01:01L HLA-DPA1*01:03-B1*04:01L
  REGION 1..10: note = CONT. FROM ABOVE: HLA-DQA1*05:05-B1*03:116L HLA-DPA1*01:03-B1*04 :02L HLA-DRB1*12:01L HLA-DPA1*02:01-B1*13:01L HLA-DPA1*03:01-B1* 105:01L HLA-DQA1*03:01-B1*03:02L HLA-DPA1*01:03-B1*104:01L HLA-D QA1*05:05-B1*03:01L HLA-DPA1*01:02-B1*04:01L HLA-DRB1*10:01L
  REGION 1..10: note = CONT. FROM ABOVE: HLA-DRB1*16:01L HLA-DQA1*01:03-B1*06:01L HLA-D RB1*08:02L HLA-DQA1*02:01-B1*03:03L HLA-DRB1*15:03L
GVLPQLEQPY

SEQ ID NO: 8215 - protein, 10 aa, Severe acute respiratory syndrome coronavirus 2
  REGION 1..10: note = Table B: HLA-DQA1*03:02-B1*03:03L HLA-DQA1*05:01-B1*03:01L HLA-DQA1*01:02-B1*06:02L HLA-DRB1*01:02L HLA-DPA1*03:01-B1*04:02L HLA-DRB1*14:01L HLA-DQA1*01-B1*05L HLA-DQA1*05:05-B1*03:19L HLA-DQA1*05:01-B1*02:01L
  REGION 1..10: note = CONT. FROM ABOVE: HLA-DQA1*05:05-B1*03:116L HLA-DPA1*02:01-B1*13 :01L HLA-DPA1*03:01-B1*105:01L HLA-DQA1*03:01-B1*03:02L HLA-DPA1 *01:03-B1*104:01L HLA-DPA1*01:02-B1*04:01L HLA-DRB1*16:01L HLA-D QA1*01:03-B1*06:01L HLA-DQA1*02:01-B1*03:03L HLA-DRB1*15:03L
VLPQLEQPYV

SEQ ID NO: 8216 - protein, 11 aa, Severe acute respiratory syndrome coronavirus 2
  REGION 1..11: note = Table B: HLA-DQA1*03:02-B1*03:03L HLA-DRB1*13:03L HLA-DRB1*14:01L HLA-DPA1*01:02-B1*04:01L
DARTAPHGHVM

SEQ ID NO: 8217 - protein, 10 aa, Severe acute respiratory syndrome coronavirus 2
  REGION 1..10: note = Table B: HLA-DQA1*03:02-B1*03:03L HLA-DQA1*05:01-B1*03:01L HLA-DRB1*01:03L HLA-DQA1*01:02-B1*06:02L HLA-DRB1*01:02L HLA-DRB1*14:01L HLA-DRB1*08:01L HLA-DQA1*05:05-B1*03:19L HLA-DQA1*03:01-B1*03:02L HLA-DRB1*16:01L
  REGION 1..10: note = CONT. FROM ABOVE: HLA-DQA1*01:03-B1*06:01L HLA-DQA1*02:01-B1*03: 03L HLA-DRB1*15:03L
RTAPHGHVMV

SEQ ID NO: 8218 - protein, 10 aa, Severe acute respiratory syndrome coronavirus 2
  REGION 1..10: note = Table B: HLA-DQA1*03:02-B1*03:03L
HVMVELVAEL

SEQ ID NO: 8219 - protein, 10 aa, Severe acute respiratory syndrome coronavirus 2
  REGION 1..10: note = Table B: HLA-DQA1*03:02-B1*03:03L HLA-DRB1*11:02L HLA-DQA1*05:05-B1*03:19M HLA-DPA1*01:03-B1*104:01M
VELVAELEGI

SEQ ID NO: 8220 - protein, 10 aa, Severe acute respiratory syndrome coronavirus 2
  REGION 1..10: note = Table B: HLA-DQA1*03:02-B1*03:03L HLA-DRB1*13:02L HLA-DRB1*13:03L HLA-DRB4*03:01NL HLA-DRB3*02:01L HLA-DRB1*08:01L HLA-DPA1*01:03-B1*04:02L HLA-DRB1*12:01L HLA-DQA1*03:01-B1*03:02L HLA-DQA1*05:05-B1*03:01L
AELEGIQYGR

SEQ ID NO: 8221 - protein, 11 aa, Severe acute respiratory syndrome coronavirus 2
  REGION 1..11: note = Table B: HLA-DQA1*03:02-B1*03:03L HLA-DQA1*05:01-B1*03:01L HLA-DRB1*04:03L HLA-DRB1*04:02L HLA-DQA1*05:05-B1*03:19L HLA-DQA1*05:05-B1*03:01L HLA-DRB1*14:17L HLA-DQA1*01:03-B1*06:01L
EGIQYGRSGET

SEQ ID NO: 8222 - protein, 10 aa, Severe acute respiratory syndrome coronavirus 2
  REGION 1..10: note = Table B: HLA-DQA1*03:02-B1*03:03M HLA-DQA1*05:01-B1*03:01L HLA-DRB1*04:03L HLA-DRB1*13:02L HLA-DRB1*13:03L HLA-DRB1*01:03L HLA-DRB1*04:02L HLA-DRB1*04:05L HLA-DQA1*01:02-B1*06:02L HLA-DRB1*01:01L HLA-DRB1*01:02L HLA-DRB4*03:01NL HLA-DRB1*08:77L
  REGION 1..10: note = CONT. FROM ABOVE: HLA-DRB3*02:01L HLA-DPA1*01:03-B1*03:01L HLA-D PA1*03:01-B1*04:02L HLA-DRB1*14:01L HLA-DRB1*11:03L HLA-DRB1*11: 04L HLA-DRB1*14:02L HLA-DQA1*01:01-B1*05:01L HLA-DRB1*08:01L HLA -DRB1*11:01L HLA-DRB5*01:01L HLA-DQA1*01-B1*05L
  REGION 1..10: note = CONT. FROM ABOVE: HLA-DQA1*05:05-B1*03:19L HLA-DQA1*05:01-B1*02: 01L HLA-DRB4*01:01L HLA-DPA1*01:03-B1*04:01L HLA-DQA1*05:05-B1*0 3:116L HLA-DRB1*09:01L HLA-DPA1*01:03-B1*04:02L HLA-DRB1*12:01L HLA-DPA1*02:01-B1*13:01L HLA-DPA1*03:01-B1*105:01L
  REGION 1..10: note = CONT. FROM ABOVE: HLA-DQA1*03:01-B1*03:02L HLA-DQA1*05:05-B1*03: 01L HLA-DPA1*01:02-B1*04:01L HLA-DRB1*07:01L HLA-DRB1*10:01L HLA -DRB1*16:01L HLA-DQA1*01:03-B1*06:01L HLA-DRB1*08:02L HLA-DRB1*0 8:03L HLA-DQA1*02:01-B1*03:03L HLA-DRB1*15:03L
IQYGRSGETL

SEQ ID NO: 8223 - protein, 10 aa, Severe acute respiratory syndrome coronavirus 2
  REGION 1..10: note = Table B: HLA-DQA1*03:02-B1*03:03L HLA-DQA1*03:01-B1*03:02L
GETLGVLVPH

SEQ ID NO: 8224 - protein, 10 aa, Severe acute respiratory syndrome coronavirus 2
  REGION 1..10: note = Table B: HLA-DQA1*03:02-B1*03:03M HLA-DQA1*05:01-B1*03:01L HLA-DRB1*13:03L HLA-DQA1*01:02-B1*06:02M HLA-DRB1*01:02M HLA-DPA1*03:01-B1*04:02L HLA-DRB1*14:01L HLA-DRB1*14:02L HLA-DQA1*05:05-B1*03:19L HLA-DQA1*05:01-B1*02:01L
  REGION 1..10: note = CONT. FROM ABOVE: HLA-DPA1*01:03-B1*04:01L HLA-DQA1*05:05-B1*03: 116L HLA-DRB1*09:01L HLA-DRB1*12:01L HLA-DPA1*02:01-B1*13:01L HL A-DPA1*03:01-B1*105:01H HLA-DQA1*03:01-B1*03:02L HLA-DPA1*01:03- B1*104:01L HLA-DQA1*05:05-B1*03:01L HLA-DPA1*01:02-B1*04:01L
  REGION 1..10: note = CONT. FROM ABOVE: HLA-DQA1*01:03-B1*06:01L HLA-DRB1*08:03L HLA-D QA1*02:01-B1*03:03L HLA-DRB1*15:03M
ETLGVLVPHV

SEQ ID NO: 8225 - protein, 11 aa, Severe acute respiratory syndrome coronavirus 2
  REGION 1..11: note = Table B: HLA-DQA1*03:02-B1*03:03L HLA-DRB1*04:03L HLA-DQA1*03:01-B1*03:02L HLA-DQA1*02:01-B1*03:03L
VLVPHVGEIPV

SEQ ID NO: 8226 - protein, 12 aa, Severe acute respiratory syndrome coronavirus 2
  REGION 1..12: note = Table B: HLA-DQA1*03:02-B1*03:03L HLA-DRB1*04:03L HLA-DQA1*05:05-B1*03:01L
LVPHVGEIPVAY

SEQ ID NO: 8227 - protein, 12 aa, Severe acute respiratory syndrome coronavirus 2
  REGION 1..12: note = Table B: HLA-DQA1*03:02-B1*03:03L HLA-DRB1*04:03L HLA-DRB1*04:02L HLA-DRB1*01:02L HLA-DQA1*01:01-B1*05:01L HLA-DRB1*14:17L HLA-DRB1*04:08L
VPHVGEIPVAYR

SEQ ID NO: 8228 - protein, 10 aa, Severe acute respiratory syndrome coronavirus 2
  REGION 1..10: note = Table B: HLA-DQA1*03:02-B1*03:03M HLA-DQA1*05:01-B1*03:01L HLA-DRB1*08:77L HLA-DRB1*11:02M HLA-DQA1*05:05-B1*03:19H HLA-DQA1*05:01-B1*02:01L HLA-DPA1*01:03-B1*04:01L HLA-DRB1*09:01L HLA-DQA1*03:01-B1*03:02L
  REGION 1..10: note = CONT. FROM ABOVE: HLA-DPA1*01:03-B1*104:01M
GEIPVAYRKV

SEQ ID NO: 8229 - protein, 14 aa, Severe acute respiratory syndrome coronavirus 2
  REGION 1..14: note = Table B: HLA-DQA1*03:02-B1*03:03L
NGNKGAGGHSYGAD

SEQ ID NO: 8230 - protein, 11 aa, Severe acute respiratory syndrome coronavirus 2
  REGION 1..11: note = Table B: HLA-DQA1*03:02-B1*03:03L HLA-DQA1*03:01-B1*03:02L
GAGGHSYGADL

SEQ ID NO: 8231 - protein, 10 aa, Severe acute respiratory syndrome coronavirus 2
  REGION 1..10: note = Table B: HLA-DQA1*03:02-B1*03:03L HLA-DQA1*05:01-B1*03:01L HLA-DRB1*04:03L HLA-DRB1*13:02L HLA-DRB1*13:03L HLA-DRB1*01:03L HLA-DRB1*04:05L HLA-DQA1*01:02-B1*06:02M HLA-DRB1*01:01L HLA-DRB1*01:02L HLA-DRB1*08:77L HLA-DPA1*01:03-B1*03:01L
  REGION 1..10: note = CONT. FROM ABOVE: HLA-DPA1*03:01-B1*04:02L HLA-DRB1*03:01L HLA-D RB1*14:01L HLA-DRB1*14:02L HLA-DRB1*11:01L HLA-DQA1*01-B1*05L HL A-DQA1*05:05-B1*03:19L HLA-DQA1*05:01-B1*02:01L HLA-DRB4*01:01L HLA-DPA1*01:03-B1*04:01L HLA-DQA1*05:05-B1*03:116L
  REGION 1..10: note = CONT. FROM ABOVE: HLA-DPA1*01:03-B1*04:02L HLA-DRB1*12:01L HLA-D PA1*02:01-B1*13:01L HLA-DPA1*03:01-B1*105:01M HLA-DPA1*01:02-B1* 04:01L HLA-DRB1*10:01L HLA-DRB1*16:01L HLA-DQA1*01:03-B1*06:01L HLA-DRB1*08:02L HLA-DQA1*02:01-B1*03:03M HLA-DRB1*15:03L
HSYGADLKSF

SEQ ID NO: 8232 - protein, 12 aa, Severe acute respiratory syndrome coronavirus 2
  REGION 1..12: note = Table B: HLA-DQA1*03:02-B1*03:03L HLA-DQA1*05:01-B1*03:01L HLA-DRB1*04:03L HLA-DRB1*13:03L HLA-DRB1*04:02L HLA-DRB1*04:05L HLA-DQA1*01:02-B1*06:02L HLA-DRB1*08:04L HLA-DRB1*08:01L HLA-DQA1*05:05-B1*03:19L HLA-DQA1*05:01-B1*02:01L
  REGION 1..12: note = CONT. FROM ABOVE: HLA-DPA1*03:01-B1*105:01L HLA-DQA1*05:05-B1*03 :01L HLA-DQA1*01:03-B1*06:01L HLA-DRB1*04:08L HLA-DQA1*02:01-B1* 03:03L
SYGADLKSFDLG

SEQ ID NO: 8233 - protein, 12 aa, Severe acute respiratory syndrome coronavirus 2
  REGION 1..12: note = Table B: HLA-DQA1*03:02-B1*03:03L HLA-DRB1*04:05L HLA-DQA1*01:01-B1*05:01L
GADLKSFDLGDE

SEQ ID NO: 8234 - protein, 12 aa, Severe acute respiratory syndrome coronavirus 2
  REGION 1..12: note = Table B: HLA-DQA1*03:02-B1*03:03L
ADLKSFDLGDEL

SEQ ID NO: 8235 - protein, 16 aa, Severe acute respiratory syndrome coronavirus 2
  REGION 1..16: note = Table B: HLA-DQA1*03:02-B1*03:03L HLA-DPA1*02:01-B1*13:01L HLA-DQA1*05:05-B1*03:01L HLA-DQA1*02:01-B1*03:03L
DLKSFDLGDELGTDPY

SEQ ID NO: 8236 - protein, 13 aa, Severe acute respiratory syndrome coronavirus 2
  REGION 1..13: note = Table B: HLA-DQA1*03:02-B1*03:03L
DLGDELGTDPYED

SEQ ID NO: 8237 - protein, 11 aa, Severe acute respiratory syndrome coronavirus 2
  REGION 1..11: note = Table B: HLA-DQA1*03:02-B1*03:03L HLA-DQA1*01:02-B1*06:02L HLA-DQA1*05:05-B1*03:19L HLA-DQA1*05:01-B1*02:01L HLA-DPA1*03:01-B1*105:01L HLA-DQA1*03:01-B1*03:02L HLA-DQA1*01:03-B1*06:01L HLA-DQA1*02:01-B1*03:03L
DELGTDPYEDF

SEQ ID NO: 8238 - protein, 11 aa, Severe acute respiratory syndrome coronavirus 2
  REGION 1..11: note = Table B: HLA-DQA1*03:02-B1*03:03L HLA-DRB1*04:03L HLA-DQA1*05:01-B1*02:01L HLA-DQA1*03:01-B1*03:02L HLA-DRB1*15:03L
GTDPYEDFQEN

SEQ ID NO: 8239 - protein, 13 aa, Severe acute respiratory syndrome coronavirus 2
  REGION 1..13: note = Table B: HLA-DQA1*03:02-B1*03:03L HLA-DRB1*16:01L HLA-DQA1*02:01-B1*03:03L
DPYEDFQENWNTK

SEQ ID NO: 8240 - protein, 13 aa, Severe acute respiratory syndrome coronavirus 2
  REGION 1..13: note = Table B: HLA-DQA1*03:02-B1*03:03L HLA-DQA1*05:01-B1*03:01L HLA-DRB1*04:05L HLA-DRB1*01:02L HLA-DRB4*03:01NL HLA-DRB1*08:04L HLA-DRB1*14:01L HLA-DQA1*01-B1*05L HLA-DRB1*14:54L HLA-DRB1*16:01L HLA-DRB1*04:08L
DFQENWNTKHSSG

SEQ ID NO: 8241 - protein, 13 aa, Severe acute respiratory syndrome coronavirus 2
  REGION 1..13: note = Table B: HLA-DQA1*03:02-B1*03:03L HLA-DQA1*05:05-B1*03:01L HLA-DRB1*16:01L HLA-DQA1*01:03-B1*06:01L
QENWNTKHSSGVT

SEQ ID NO: 8242 - protein, 10 aa, Severe acute respiratory syndrome coronavirus 2
  REGION 1..10: note = Table B: HLA-DQA1*03:02-B1*03:03L HLA-DQA1*05:01-B1*03:01L HLA-DRB1*13:02L HLA-DRB1*13:03L HLA-DRB1*01:03L HLA-DRB1*04:02L HLA-DQA1*01:02-B1*06:02L HLA-DRB1*14:01L HLA-DQA1*01:01-B1*05:01L HLA-DRB1*08:01L HLA-DRB3*01:01L
  REGION 1..10: note = CONT. FROM ABOVE: HLA-DQA1*03:01-B1*03:02L HLA-DPA1*01:02-B1*04: 01L HLA-DRB1*16:01L HLA-DQA1*01:03-B1*06:01L HLA-DQA1*02:01-B1*0 3:03L
KHSSGVTREL

SEQ ID NO: 8243 - protein, 11 aa, Severe acute respiratory syndrome coronavirus 2
  REGION 1..11: note = Table B: HLA-DQA1*03:02-B1*03:03L HLA-DRB1*04:03L HLA-DPA1*03:01-B1*04:02L HLA-DQA1*03:01-B1*03:02L HLA-DQA1*05:05-B1*03:01L HLA-DPA1*01:02-B1*04:01L
ELMRELNGGAY

SEQ ID NO: 8244 - protein, 10 aa, Severe acute respiratory syndrome coronavirus 2
  REGION 1..10: note = Table B: HLA-DQA1*03:02-B1*03:03L HLA-DQA1*05:01-B1*03:01M HLA-DRB1*14:04L HLA-DRB1*04:01L HLA-DRB1*04:03L HLA-DRB1*13:02M HLA-DRB1*13:03M HLA-DRB1*01:03M HLA-DRB1*04:02L HLA-DRB1*04:05L HLA-DQA1*01:02-B1*06:02H HLA-DRB1*01:01L HLA-DRB1*01:02L
  REGION 1..10: note = CONT. FROM ABOVE: HLA-DRB4*03:01NM HLA-DRB1*08:77M HLA-DPA1*01:0 3-B1*03:01M HLA-DPA1*03:01-B1*04:02M HLA-DRB1*03:01M HLA-DRB1*14 :01M HLA-DRB1*11:02L HLA-DRB1*11:03L HLA-DRB1*11:04L HLA-DRB1*14 :02M HLA-DRB1*08:01L HLA-DRB1*11:01L HLA-DRB5*01:01M
  REGION 1..10: note = CONT. FROM ABOVE: HLA-DQA1*01-B1*05M HLA-DQA1*05:05-B1*03:19M HL A-DRB4*02:01NL HLA-DQA1*05:01-B1*02:01M HLA-DRB4*01:01M HLA-DPA1 *01:03-B1*04:01H HLA-DQA1*05:05-B1*03:116M HLA-DRB1*09:01L HLA-D PA1*01:03-B1*04:02M HLA-DRB1*12:01M HLA-DRB1*12:02L
  REGION 1..10: note = CONT. FROM ABOVE: HLA-DPA1*02:01-B1*13:01L HLA-DPA1*03:01-B1*105 :01M HLA-DQA1*03:01-B1*03:02L HLA-DRB1*14:54L HLA-DPA1*01:03-B1* 104:01M HLA-DQA1*05:05-B1*03:01L HLA-DRB1*14:17L HLA-DPA1*01:02- B1*04:01L HLA-DRB1*10:01M HLA-DRB1*16:01M
  REGION 1..10: note = CONT. FROM ABOVE: HLA-DQA1*01:03-B1*06:01L HLA-DRB1*08:02L HLA- DRB1*08:03L HLA-DQA1*02:01-B1*03:03M HLA-DRB1*15:01L HLA-DRB1*15:03M
ELNGGAYTRY

SEQ ID NO: 8245 - protein, 10 aa, Severe acute respiratory syndrome coronavirus 2
  REGION 1..10: note = Table B: HLA-DQA1*03:02-B1*03:03L HLA-DQA1*03:01-B1*03:02L HLA-DQA1*01:03-B1*06:01L HLA-DQA1*02:01-B1*03:03L
GGAYTRYVDN

SEQ ID NO: 8246 - protein, 10 aa, Severe acute respiratory syndrome coronavirus 2
  REGION 1..10: note = Table B: HLA-DQA1*03:02-B1*03:03L HLA-DRB1*04:03L HLA-DRB1*04:02L HLA-DQA1*01-B1*05L HLA-DQA1*03:01-B1*03:02L HLA-DPA1*01:02-B1*04:01L HLA-DQA1*01:03-B1*06:01L HLA-DQA1*02:01-B1*03:03L
GAYTRYVDNN

SEQ ID NO: 8247 - protein, 14 aa, Severe acute respiratory syndrome coronavirus 2
  REGION 1..14: note = Table B: HLA-DQA1*03:02-B1*03:03L HLA-DQA1*05:01-B1*03:01L HLA-DQA1*01-B1*05L HLA-DQA1*05:05-B1*03:19L HLA-DQA1*05:01-B1*02:01L HLA-DPA1*02:01-B1*13:01L HLA-DPA1*03:01-B1*105:01L HLA-DQA1*03:01-B1*03:02L
  REGION 1..14: note = CONT. FROM ABOVE: HLA-DQA1*05:05-B1*03:01L HLA-DQA1*02:01-B1*03: 03L
VDNNFCGPDGYPLE

SEQ ID NO: 8248 - protein, 13 aa, Severe acute respiratory syndrome coronavirus 2
  REGION 1..13: note = Table B: HLA-DQA1*03:02-B1*03:03L HLA-DQA1*01:02-B1*06:02L HLA-DPA1*03:01-B1*105:01L HLA-DQA1*03:01-B1*03:02L HLA-DQA1*05:05-B1*03:01L HLA-DQA1*01:03-B1*06:01L HLA-DQA1*02:01-B1*03:03L
GPDGYPLECIKDL

SEQ ID NO: 8249 - protein, 16 aa, Severe acute respiratory syndrome coronavirus 2
  REGION 1..16: note = Table B: HLA-DQA1*03:02-B1*03:03L HLA-DPA1*03:01-B1*105:01L HLA-DRB1*15:03L
DLLARAGKASCTLSEQ

SEQ ID NO: 8250 - protein, 10 aa, Severe acute respiratory syndrome coronavirus 2
  REGION 1..10: note = Table B: HLA-DQA1*03:02-B1*03:03L HLA-DQA1*03:01-B1*03:02L
SEQLDFIDTK

SEQ ID NO: 8251 - protein, 10 aa, Severe acute respiratory syndrome coronavirus 2
  REGION 1..10: note = Table B: HLA-DQA1*03:02-B1*03:03L HLA-DQA1*05:01-B1*03:01L HLA-DRB1*04:03L HLA-DRB1*13:02L HLA-DRB1*13:03L HLA-DRB1*01:03L HLA-DRB1*04:05L HLA-DQA1*01:02-B1*06:02M HLA-DRB1*01:01L HLA-DRB1*01:02L HLA-DRB4*03:01NL HLA-DRB1*08:77L
  REGION 1..10: note = CONT. FROM ABOVE: HLA-DPA1*01:03-B1*03:01L HLA-DPA1*03:01-B1*04: 02L HLA-DRB1*03:01L HLA-DRB1*14:01L HLA-DRB1*11:02L HLA-DRB1*14: 02L HLA-DQA1*01:01-B1*05:01L HLA-DRB1*08:01L HLA-DRB1*11:01L HLA -DRB5*01:01L HLA-DQA1*01-B1*05L HLA-DQA1*05:05-B1*03:19L
  REGION 1..10: note = CONT. FROM ABOVE: HLA-DQA1*05:01-B1*02:01L HLA-DRB4*01:01L HLA-D PA1*01:03-B1*04:01L HLA-DQA1*05:05-B1*03:116L HLA-DPA1*01:03-B1* 04:02L HLA-DRB1*12:01L HLA-DPA1*02:01-B1*13:01L HLA-DPA1*03:01-B 1*105:01L HLA-DQA1*03:01-B1*03:02L HLA-DPA1*01:03-B1*104:01L
  REGION 1..10: note = CONT. FROM ABOVE: HLA-DQA1*05:05-B1*03:01L HLA-DPA1*01:02-B1*04: 01L HLA-DRB1*10:01L HLA-DRB1*16:01L HLA-DQA1*01:03-B1*06:01L HLA -DRB1*08:02L HLA-DQA1*02:01-B1*03:03M HLA-DRB1*15:03L
DFIDTKRGVY

SEQ ID NO: 8252 - protein, 12 aa, Severe acute respiratory syndrome coronavirus 2
  REGION 1..12: note = Table B: HLA-DQA1*03:02-B1*03:03L HLA-DRB1*04:03L HLA-DRB1*04:02L HLA-DRB1*04:05L HLA-DQA1*01:02-B1*06:02L HLA-DQA1*05:01-B1*02:01L HLA-DRB1*04:10L HLA-DRB1*12:01L HLA-DRB1*14:17L HLA-DRB1*16:01L HLA-DQA1*02:01-B1*03:03L
  REGION 1..12: note = CONT. FROM ABOVE: HLA-DRB1*15:03L
EHEIAWYTERSE

SEQ ID NO: 8253 - protein, 12 aa, Severe acute respiratory syndrome coronavirus 2
  REGION 1..12: note = Table B: HLA-DQA1*03:02-B1*03:03L HLA-DRB1*14:01L HLA-DRB1*08:01L HLA-DQA1*05:05-B1*03:01L
IAWYTERSEKSY

SEQ ID NO: 8254 - protein, 12 aa, Severe acute respiratory syndrome coronavirus 2
  REGION 1..12: note = Table B: HLA-DQA1*03:02-B1*03:03L HLA-DRB3*01:01L
AWYTERSEKSYE

SEQ ID NO: 8255 - protein, 10 aa, Severe acute respiratory syndrome coronavirus 2
  REGION 1..10: note = Table B: HLA-DQA1*03:02-B1*03:03M HLA-DQA1*05:05-B1*03:19L HLA-DRB1*09:01L HLA-DQA1*03:01-B1*03:02L HLA-DRB1*16:01L
TERSEKSYEL

SEQ ID NO: 8256 - protein, 10 aa, Severe acute respiratory syndrome coronavirus 2
  REGION 1..10: note = Table B: HLA-DQA1*03:02-B1*03:03L HLA-DQA1*01-B1*05L HLA-DQA1*03:01-B1*03:02L HLA-DQA1*02:01-B1*03:03L
KSYELQTPFE

SEQ ID NO: 8257 - protein, 10 aa, Severe acute respiratory syndrome coronavirus 2
  REGION 1..10: note = Table B: HLA-DQA1*03:02-B1*03:03L HLA-DQA1*05:05-B1*03:19L HLA-DPA1*02:01-B1*13:01L HLA-DPA1*01:03-B1*104:01L HLA-DQA1*01:03-B1*06:01L HLA-DRB1*15:03L
SYELQTPFEI

SEQ ID NO: 8258 - protein, 10 aa, Severe acute respiratory syndrome coronavirus 2
  REGION 1..10: note = Table B: HLA-DQA1*03:02-B1*03:03L HLA-DQA1*05:01-B1*03:01L HLA-DRB1*04:03L HLA-DRB1*13:02L HLA-DRB1*13:03L HLA-DRB1*01:03L HLA-DRB1*04:02L HLA-DQA1*01:02-B1*06:02L HLA-DRB1*01:02L HLA-DRB4*03:01NL HLA-DRB1*08:77L HLA-DRB3*02:01L HLA-DRB1*11:03L
  REGION 1..10: note = CONT. FROM ABOVE: HLA-DQA1*01-B1*05L HLA-DQA1*05:05-B1*03:19L HL A-DQA1*05:01-B1*02:01L HLA-DRB1*12:01L HLA-DPA1*03:01-B1*105:01L HLA-DQA1*03:01-B1*03:02L HLA-DQA1*05:05-B1*03:01L HLA-DRB1*14:17 L HLA-DPA1*01:02-B1*04:01L HLA-DRB1*16:01L
  REGION 1..10: note = CONT. FROM ABOVE: HLA-DQA1*01:03-B1*06:01L HLA-DRB1*04:08L HLA-D QA1*02:01-B1*03:03L HLA-DRB1*15:03L
YELQTPFEIK

SEQ ID NO: 8259 - protein, 10 aa, Severe acute respiratory syndrome coronavirus 2
  REGION 1..10: note = Table B: HLA-DQA1*03:02-B1*03:03M HLA-DQA1*05:01-B1*03:01L HLA-DRB1*13:03L HLA-DQA1*01:02-B1*06:02L HLA-DRB1*01:02L HLA-DPA1*03:01-B1*04:02L HLA-DRB1*14:01L HLA-DRB1*14:02L HLA-DQA1*05:05-B1*03:19L HLA-DQA1*05:01-B1*02:01L
  REGION 1..10: note = CONT. FROM ABOVE: HLA-DPA1*01:03-B1*04:01L HLA-DQA1*05:05-B1*03: 116L HLA-DRB1*09:01L HLA-DRB1*12:01L HLA-DPA1*02:01-B1*13:01L HL A-DPA1*03:01-B1*105:01M HLA-DQA1*03:01-B1*03:02L HLA-DPA1*01:02- B1*04:01L HLA-DRB1*16:01L HLA-DQA1*01:03-B1*06:01L
  REGION 1..10: note = CONT. FROM ABOVE: HLA-DQA1*02:01-B1*03:03L HLA-DRB1*15:03L
ELQTPFEIKL

SEQ ID NO: 8260 - protein, 15 aa, Severe acute respiratory syndrome coronavirus 2
  REGION 1..15: note = Table B: HLA-DQA1*03:02-B1*03:03L HLA-DRB1*04:04L HLA-DRB1*01:01L HLA-DRB3*02:01L HLA-DPA1*01:03-B1*03:01L HLA-DRB1*03:01L HLA-DRB1*11:02L HLA-DQA1*05:05-B1*03:19L HLA-DRB1*13:01L HLA-DQA1*05:05-B1*03:116L
  REGION 1..15: note = CONT. FROM ABOVE: HLA-DPA1*01:03-B1*04:02L HLA-DPA1*01:03-B1*02: 01L HLA-DPA1*01:03-B1*104:01L HLA-DQA1*05:05-B1*03:01L HLA-DRB1* 07:01L HLA-DRB1*10:01L HLA-DRB1*08:02L
TPFEIKLAKKFDTFN

SEQ ID NO: 8261 - protein, 15 aa, Severe acute respiratory syndrome coronavirus 2
  REGION 1..15: note = Table B: HLA-DQA1*03:02-B1*03:03L HLA-DRB1*01:03L HLA-DPA1*01:03-B1*03:01L HLA-DRB1*16:01L HLA-DRB1*04:08L
FDTFNGECPNFVFPL

SEQ ID NO: 8262 - protein, 15 aa, Severe acute respiratory syndrome coronavirus 2
  REGION 1..15: note = Table B: HLA-DQA1*03:02-B1*03:03L HLA-DPA1*01:03-B1*03:01L HLA-DQA1*05:01-B1*02:01L HLA-DQA1*03:01-B1*03:02L
DTFNGECPNFVFPLN

SEQ ID NO: 8263 - protein, 10 aa, Severe acute respiratory syndrome coronavirus 2
  REGION 1..10: note = Table B: HLA-DQA1*03:02-B1*03:03L HLA-DQA1*05:01-B1*03:01L HLA-DQA1*01:02-B1*06:02L HLA-DRB1*01:01L HLA-DPA1*03:01-B1*04:02L HLA-DRB1*14:01L HLA-DQA1*05:05-B1*03:116M HLA-DPA1*02:01-B1*13:01M
  REGION 1..10: note = CONT. FROM ABOVE: HLA-DPA1*03:01-B1*105:01L HLA-DPA1*01:02-B1*04 :01L HLA-DQA1*01:03-B1*06:01L HLA-DRB1*08:03L HLA-DRB1*15:03L
FPLNSIIKTI

SEQ ID NO: 8264 - protein, 10 aa, Severe acute respiratory syndrome coronavirus 2
  REGION 1..10: note = Table B: HLA-DQA1*03:02-B1*03:03L HLA-DQA1*05:01-B1*03:01L HLA-DQA1*01:02-B1*06:02L HLA-DRB1*14:01L HLA-DQA1*05:05-B1*03:19L HLA-DPA1*03:01-B1*105:01L HLA-DQA1*03:01-B1*03:02L HLA-DRB1*16:01L
  REGION 1..10: note = CONT. FROM ABOVE: HLA-DQA1*01:03-B1*06:01L HLA-DQA1*02:01-B1*03: 03L HLA-DRB1*15:03L
SIIKTIQPRV

SEQ ID NO: 8265 - protein, 10 aa, Severe acute respiratory syndrome coronavirus 2
  REGION 1..10: note = Table B: HLA-DQA1*03:02-B1*03:03L HLA-DQA1*05:01-B1*03:01L HLA-DRB1*04:03L HLA-DRB1*13:02L HLA-DRB1*13:03L HLA-DRB1*01:03L HLA-DRB1*04:02L HLA-DRB1*04:05L HLA-DQA1*01:02-B1*06:02L HLA-DRB1*01:02L HLA-DRB4*03:01NL HLA-DRB1*08:77L HLA-DRB3*02:01L
  REGION 1..10: note = CONT. FROM ABOVE: HLA-DPA1*03:01-B1*04:02L HLA-DRB1*14:01L HLA-D QA1*05:01-B1*02:01L HLA-DRB1*12:01L HLA-DRB1*12:02L HLA-DPA1*03: 01-B1*105:01L HLA-DQA1*03:01-B1*03:02L HLA-DRB1*14:54L HLA-DQA1* 05:05-B1*03:01L HLA-DRB1*14:17L HLA-DPA1*01:02-B1*04:01L
  REGION 1..10: note = CONT. FROM ABOVE: HLA-DRB1*16:01L HLA-DQA1*01:03-B1*06:01L HLA-D RB1*04:08L HLA-DQA1*02:01-B1*03:03L HLA-DRB1*15:03L
IIKTIQPRVE

SEQ ID NO: 8266 - protein, 11 aa, Severe acute respiratory syndrome coronavirus 2
  REGION 1..11: note = Table B: HLA-DQA1*03:02-B1*03:03L HLA-DQA1*05:01-B1*03:01L HLA-DRB1*04:03L HLA-DRB1*04:02L HLA-DQA1*01:02-B1*06:02L HLA-DRB4*03:01NL HLA-DRB1*04:10L HLA-DQA1*05:05-B1*03:01L HLA-DRB1*14:17L HLA-DQA1*01:03-B1*06:01L
  REGION 1..11: note = CONT. FROM ABOVE: HLA-DQA1*02:01-B1*03:03L
IRSVYPVASPN

SEQ ID NO: 8267 - protein, 10 aa, Severe acute respiratory syndrome coronavirus 2
  REGION 1..10: note = Table B: HLA-DQA1*03:02-B1*03:03L HLA-DQA1*05:01-B1*03:01L HLA-DRB1*04:03L HLA-DRB1*13:02L HLA-DRB1*13:03L HLA-DRB1*01:03L HLA-DRB1*04:02L HLA-DRB1*04:05L HLA-DQA1*01:02-B1*06:02L HLA-DRB4*03:01NL HLA-DRB1*08:77L HLA-DRB1*14:01L HLA-DRB1*11:04L
  REGION 1..10: note = CONT. FROM ABOVE: HLA-DRB1*14:02L HLA-DQA1*01-B1*05L HLA-DQA1*05 :05-B1*03:19L HLA-DQA1*05:01-B1*02:01L HLA-DRB1*04:10L HLA-DRB1* 12:01L HLA-DRB1*12:02L HLA-DPA1*03:01-B1*105:01L HLA-DQA1*03:01- B1*03:02L HLA-DRB1*14:54L HLA-DQA1*05:05-B1*03:01L
  REGION 1..10: note = CONT. FROM ABOVE: HLA-DRB1*14:17L HLA-DPA1*01:02-B1*04:01L HLA-D RB1*10:01L HLA-DRB1*16:01L HLA-DQA1*01:03-B1*06:01L HLA-DQA1*02: 01-B1*03:03L
SVYPVASPNE

SEQ ID NO: 8268 - protein, 12 aa, Severe acute respiratory syndrome coronavirus 2
  REGION 1..12: note = Table B: HLA-DQA1*03:02-B1*03:03L HLA-DQA1*05:01-B1*03:01L HLA-DRB1*04:03L HLA-DQA1*01:02-B1*06:02L HLA-DQA1*05:05-B1*03:19L HLA-DQA1*03:01-B1*03:02L HLA-DQA1*05:05-B1*03:01L HLA-DQA1*02:01-B1*03:03L
VYPVASPNECNQ

SEQ ID NO: 8269 - protein, 10 aa, Severe acute respiratory syndrome coronavirus 2
  REGION 1..10: note = Table B: HLA-DQA1*03:02-B1*03:03L HLA-DQA1*05:01-B1*03:01L HLA-DRB1*08:77L HLA-DPA1*03:01-B1*04:02L HLA-DRB1*03:01L HLA-DQA1*01-B1*05L HLA-DQA1*05:05-B1*03:19L HLA-DQA1*05:01-B1*02:01L HLA-DRB4*01:01L
  REGION 1..10: note = CONT. FROM ABOVE: HLA-DPA1*01:03-B1*04:01L HLA-DQA1*03:01-B1*03: 02L HLA-DPA1*01:03-B1*104:01L HLA-DPA1*01:02-B1*04:01L HLA-DRB1* 16:01L HLA-DRB1*15:03L
GETSWQTGDF

SEQ ID NO: 8270 - protein, 10 aa, Severe acute respiratory syndrome coronavirus 2
  REGION 1..10: note = Table B: HLA-DQA1*03:02-B1*03:03L HLA-DPA1*03:01-B1*105:01L
ETSWQTGDFV

SEQ ID NO: 8271 - protein, 10 aa, Severe acute respiratory syndrome coronavirus 2
  REGION 1..10: note = Table B: HLA-DQA1*03:02-B1*03:03L HLA-DQA1*05:01-B1*03:01L HLA-DRB1*04:03L HLA-DRB1*13:03L HLA-DRB1*04:02L HLA-DRB4*03:01NL HLA-DQA1*05:01-B1*02:01L HLA-DQA1*03:01-B1*03:02L HLA-DQA1*05:05-B1*03:01L HLA-DQA1*01:03-B1*06:01L
  REGION 1..10: note = CONT. FROM ABOVE: HLA-DQA1*02:01-B1*03:03L
TSWQTGDFVK

SEQ ID NO: 8272 - protein, 10 aa, Severe acute respiratory syndrome coronavirus 2
  REGION 1..10: note = Table B: HLA-DQA1*03:02-B1*03:03L HLA-DPA1*03:01-B1*04:02L HLA-DQA1*01-B1*05L HLA-DPA1*03:01-B1*105:01L HLA-DQA1*03:01-B1*03:02L HLA-DPA1*01:02-B1*04:01L HLA-DRB1*16:01L HLA-DQA1*01:03-B1*06:01L
  REGION 1..10: note = CONT. FROM ABOVE: HLA-DQA1*02:01-B1*03:03L
SWQTGDFVKA

SEQ ID NO: 8273 - protein, 10 aa, Severe acute respiratory syndrome coronavirus 2
  REGION 1..10: note = Table B: HLA-DQA1*03:02-B1*03:03L HLA-DQA1*05:01-B1*03:01L HLA-DRB1*04:03L HLA-DRB1*01:03L HLA-DQA1*01:02-B1*06:02L HLA-DPA1*03:01-B1*04:02L HLA-DQA1*01-B1*05L HLA-DQA1*05:05-B1*03:19L HLA-DQA1*05:01-B1*02:01L
  REGION 1..10: note = CONT. FROM ABOVE: HLA-DPA1*01:03-B1*04:01L HLA-DPA1*01:03-B1*04: 02L HLA-DPA1*03:01-B1*105:01L HLA-DQA1*03:01-B1*03:02L HLA-DQA1* 05:05-B1*03:01L HLA-DPA1*01:02-B1*04:01L HLA-DRB1*16:01L HLA-DQA 1*01:03-B1*06:01M HLA-DRB1*04:08L HLA-DQA1*02:01-B1*03:03L
WQTGDFVKAT

SEQ ID NO: 8274 - protein, 15 aa, Severe acute respiratory syndrome coronavirus 2
  REGION 1..15: note = Table B: HLA-DQA1*03:02-B1*03:03L HLA-DRB1*04:03L HLA-DRB1*13:02L HLA-DPA1*03:01-B1*04:02L HLA-DRB1*14:01L HLA-DRB1*12:01L HLA-DRB1*16:01L
GDFVKATCEFCGTEN

SEQ ID NO: 8275 - protein, 10 aa, Severe acute respiratory syndrome coronavirus 2
  REGION 1..10: note = Table B: HLA-DQA1*03:02-B1*03:03L
TENLTKEGAT

SEQ ID NO: 8276 - protein, 10 aa, Severe acute respiratory syndrome coronavirus 2
  REGION 1..10: note = Table B: HLA-DQA1*03:02-B1*03:03L HLA-DQA1*05:01-B1*03:01L HLA-DRB1*04:03L HLA-DRB1*13:02L HLA-DRB1*13:03L HLA-DRB1*01:03L HLA-DRB1*04:02L HLA-DRB1*04:05L HLA-DQA1*01:02-B1*06:02L HLA-DRB1*01:01L HLA-DRB1*01:02L HLA-DRB4*03:01NL HLA-DRB3*02:01L
  REGION 1..10: note = CONT. FROM ABOVE: HLA-DRB1*14:01L HLA-DRB1*11:04L HLA-DRB1*14:02 L HLA-DRB1*08:01L HLA-DRB5*01:01L HLA-DQA1*01-B1*05L HLA-DQA1*05 :01-B1*02:01L HLA-DRB1*12:01L HLA-DRB1*12:02L HLA-DPA1*03:01-B1* 105:01L HLA-DQA1*03:01-B1*03:02M HLA-DRB1*14:54L
  REGION 1..10: note = CONT. FROM ABOVE: HLA-DQA1*05:05-B1*03:01L HLA-DRB1*14:17L HLA-D PA1*01:02-B1*04:01L HLA-DRB1*16:01L HLA-DQA1*01:03-B1*06:01L HLA -DRB1*04:08L HLA-DQA1*02:01-B1*03:03L
GYLPQNAVVK

SEQ ID NO: 8277 - protein, 10 aa, Severe acute respiratory syndrome coronavirus 2
  REGION 1..10: note = Table B: HLA-DQA1*03:02-B1*03:03M HLA-DQA1*05:01-B1*03:01L HLA-DRB1*01:03L HLA-DRB1*04:05L HLA-DQA1*01:02-B1*06:02L HLA-DRB1*01:01L HLA-DRB1*01:02L HLA-DRB1*08:77L HLA-DPA1*03:01-B1*04:02L HLA-DRB1*14:01L HLA-DRB1*14:02L
  REGION 1..10: note = CONT. FROM ABOVE: HLA-DQA1*01-B1*05L HLA-DQA1*05:05-B1*03:19L HL A-DQA1*05:01-B1*02:01L HLA-DQA1*05:05-B1*03:116M HLA-DRB1*09:01L HLA-DPA1*02:01-B1*13:01M HLA-DPA1*03:01-B1*105:01L HLA-DQA1*03:0 1-B1*03:02L HLA-DPA1*01:03-B1*104:01L HLA-DPA1*01:02-B1*04:01L
  REGION 1..10: note = CONT. FROM ABOVE: HLA-DRB1*10:01L HLA-DRB1*16:01L HLA-DQA1*01:03 -B1*06:01M HLA-DRB1*08:03L HLA-DQA1*02:01-B1*03:03L HLA-DRB1*15: 03L
YLPQNAVVKI

SEQ ID NO: 8278 - protein, 13 aa, Severe acute respiratory syndrome coronavirus 2
  REGION 1..13: note = Table B: HLA-DQA1*03:02-B1*03:03L HLA-DQA1*03:01-B1*03:02L HLA-DQA1*05:05-B1*03:01L HLA-DQA1*01:03-B1*06:01L
LPQNAVVKIYCPA

SEQ ID NO: 8279 - protein, 10 aa, Severe acute respiratory syndrome coronavirus 2
  REGION 1..10: note = Table B: HLA-DQA1*03:02-B1*03:03M HLA-DQA1*05:01-B1*03:01L HLA-DRB1*13:03L HLA-DRB1*08:77L HLA-DPA1*03:01-B1*04:02L HLA-DRB1*14:02L HLA-DQA1*01-B1*05L HLA-DQA1*05:05-B1*03:19L HLA-DQA1*05:01-B1*02:01L HLA-DQA1*05:05-B1*03:116L
  REGION 1..10: note = CONT. FROM ABOVE: HLA-DRB1*09:01L HLA-DPA1*01:03-B1*04:02L HLA-D QA1*03:01-B1*03:02L HLA-DPA1*01:03-B1*104:01L HLA-DPA1*01:02-B1* 04:01L HLA-DRB1*16:01L HLA-DQA1*02:01-B1*03:03L HLA-DRB1*15:03L
NSEVGPEHSL

SEQ ID NO: 8280 - protein, 10 aa, Severe acute respiratory syndrome coronavirus 2
  REGION 1..10: note = Table B: HLA-DQA1*03:02-B1*03:03L HLA-DQA1*05:05-B1*03:19L HLA-DQA1*03:01-B1*03:02L
SEVGPEHSLA

SEQ ID NO: 8281 - protein, 12 aa, Severe acute respiratory syndrome coronavirus 2
  REGION 1..12: note = Table B: HLA-DQA1*03:02-B1*03:03L HLA-DQA1*05:01-B1*03:01L HLA-DRB1*04:03L HLA-DQA1*01:01-B1*05:01L HLA-DQA1*05:05-B1*03:01L HLA-DQA1*01:03-B1*06:01L
VGPEHSLAEYHN

SEQ ID NO: 8282 - protein, 13 aa, Severe acute respiratory syndrome coronavirus 2
  REGION 1..13: note = Table B: HLA-DQA1*03:02-B1*03:03L
GPEHSLAEYHNES

SEQ ID NO: 8283 - protein, 11 aa, Severe acute respiratory syndrome coronavirus 2
  REGION 1..11: note = Table B: HLA-DQA1*03:02-B1*03:03L
SLAEYHNESGL

SEQ ID NO: 8284 - protein, 11 aa, Severe acute respiratory syndrome coronavirus 2
  REGION 1..11: note = Table B: HLA-DQA1*03:02-B1*03:03L HLA-DRB1*04:03L HLA-DRB1*13:03L HLA-DRB1*01:03L HLA-DRB1*04:02L HLA-DRB1*04:05L HLA-DRB1*01:02L HLA-DRB4*03:01NL HLA-DRB1*12:01L HLA-DRB1*14:17L HLA-DRB1*16:01L HLA-DRB1*04:08L HLA-DQA1*02:01-B1*03:03L
AEYHNESGLKT

SEQ ID NO: 8285 - protein, 10 aa, Severe acute respiratory syndrome coronavirus 2
  REGION 1..10: note = Table B: HLA-DQA1*03:02-B1*03:03L HLA-DQA1*05:01-B1*03:01L HLA-DRB1*13:03L HLA-DRB1*04:05L HLA-DQA1*01:02-B1*06:02L HLA-DRB1*01:02L HLA-DPA1*03:01-B1*04:02L HLA-DRB1*14:01L HLA-DRB1*11:02L HLA-DRB1*08:01L HLA-DQA1*01-B1*05L
  REGION 1..10: note = CONT. FROM ABOVE: HLA-DQA1*05:05-B1*03:19M HLA-DQA1*05:01-B1*02: 01L HLA-DPA1*01:03-B1*04:01L HLA-DQA1*05:05-B1*03:116L HLA-DPA1* 02:01-B1*13:01L HLA-DPA1*03:01-B1*105:01L HLA-DQA1*03:01-B1*03:0 2L HLA-DPA1*01:03-B1*104:01L HLA-DPA1*01:02-B1*04:01L
  REGION 1..10: note = CONT. FROM ABOVE: HLA-DRB1*10:01L HLA-DRB1*16:01L HLA-DQA1*01:03 -B1*06:01L HLA-DQA1*02:01-B1*03:03L HLA-DRB1*15:03L
YHNESGLKTI

SEQ ID NO: 8286 - protein, 10 aa, Severe acute respiratory syndrome coronavirus 2
  REGION 1..10: note = Table B: HLA-DQA1*03:02-B1*03:03L
HNESGLKTIL

SEQ ID NO: 8287 - protein, 15 aa, Severe acute respiratory syndrome coronavirus 2
  REGION 1..15: note = Table B: HLA-DQA1*03:02-B1*03:03L HLA-DRB1*01:03L HLA-DRB1*12:01L HLA-DPA1*02:01-B1*13:01L HLA-DPA1*01:03-B1*104:01L HLA-DRB1*16:01L HLA-DRB1*15:03L
GRTIAFGGCVFSYVG

SEQ ID NO: 8288 - protein, 10 aa, Severe acute respiratory syndrome coronavirus 2
  REGION 1..10: note = Table B: HLA-DQA1*03:02-B1*03:03L HLA-DQA1*05:01-B1*03:01L HLA-DRB1*04:03L HLA-DRB1*13:03L HLA-DRB1*01:03L HLA-DRB1*04:02L HLA-DRB4*03:01NL HLA-DRB1*14:01L HLA-DQA1*05:05-B1*03:19L HLA-DQA1*05:01-B1*02:01L HLA-DQA1*03:01-B1*03:02L
  REGION 1..10: note = CONT. FROM ABOVE: HLA-DQA1*05:05-B1*03:01L HLA-DRB1*14:17L HLA-D PA1*01:02-B1*04:01L HLA-DRB1*16:01L HLA-DQA1*02:01-B1*03:03L
WVPRASANIG

SEQ ID NO: 8289 - protein, 14 aa, Severe acute respiratory syndrome coronavirus 2
  REGION 1..14: note = Table B: HLA-DQA1*03:02-B1*03:03L HLA-DRB1*04:03L HLA-DRB1*13:02L HLA-DRB1*01:03L HLA-DRB1*04:04L HLA-DQA1*01:01-B1*05:01L HLA-DRB1*08:01L HLA-DQA1*05:05-B1*03:19L HLA-DPA1*02:01-B1*13:01L
  REGION 1..14: note = CONT. FROM ABOVE: HLA-DPA1*03:01-B1*105:01L HLA-DPA1*01:03-B1*10 4:01L HLA-DRB1*07:01L HLA-DRB1*04:08L
VPRASANIGCNHTG

SEQ ID NO: 8290 - protein, 13 aa, Severe acute respiratory syndrome coronavirus 2
  REGION 1..13: note = Table B: HLA-DQA1*03:02-B1*03:03L HLA-DRB1*14:04L HLA-DRB1*13:03L HLA-DRB1*01:03L HLA-DRB1*04:05L HLA-DRB1*01:02L HLA-DRB4*03:01NL HLA-DRB1*08:77L HLA-DRB3*02:01L HLA-DPA1*01:03-B1*03:01L HLA-DPA1*03:01-B1*04:02L
  REGION 1..13: note = CONT. FROM ABOVE: HLA-DRB1*11:03L HLA-DRB1*11:04L HLA-DRB1*14:02 L HLA-DRB1*08:01L HLA-DQA1*05:05-B1*03:19L HLA-DQA1*05:01-B1*02: 01L HLA-DPA1*02:01-B1*13:01L HLA-DPA1*03:01-B1*105:01L HLA-DPA1* 01:03-B1*104:01L HLA-DRB1*14:17L HLA-DRB1*16:01L HLA-DRB1*04:08L
SANIGCNHTGVVG

SEQ ID NO: 8291 - protein, 11 aa, Severe acute respiratory syndrome coronavirus 2
  REGION 1..11: note = Table B: HLA-DQA1*03:02-B1*03:03L HLA-DQA1*05:01-B1*03:01L HLA-DQA1*01:02-B1*06:02L HLA-DQA1*05:05-B1*03:19L HLA-DPA1*03:01-B1*105:01L HLA-DQA1*03:01-B1*03:02L HLA-DQA1*05:05-B1*03:01L
NHTGVVGEGSE

SEQ ID NO: 8292 - protein, 11 aa, Severe acute respiratory syndrome coronavirus 2
  REGION 1..11: note = Table B: HLA-DQA1*03:02-B1*03:03L HLA-DQA1*05:01-B1*03:01L HLA-DQA1*01:02-B1*06:02L HLA-DQA1*01:01-B1*05:01L HLA-DQA1*05:05-B1*03:19L HLA-DQA1*03:01-B1*03:02L HLA-DQA1*05:05-B1*03:01L
HTGVVGEGSEG

SEQ ID NO: 8293 - protein, 10 aa, Severe acute respiratory syndrome coronavirus 2
  REGION 1..10: note = Table B: HLA-DQA1*03:02-B1*03:03L HLA-DQA1*03:01-B1*03:02L
GVVGEGSEGL

SEQ ID NO: 8294 - protein, 12 aa, Severe acute respiratory syndrome coronavirus 2
  REGION 1..12: note = Table B: HLA-DQA1*03:02-B1*03:03L HLA-DQA1*05:01-B1*03:01L HLA-DRB1*04:03L HLA-DRB1*13:02L HLA-DRB1*13:03L HLA-DRB1*01:03L HLA-DRB1*04:02L HLA-DRB1*04:05L HLA-DQA1*01:02-B1*06:02L HLA-DRB1*01:02L HLA-DRB4*03:01NL HLA-DRB1*08:77L
  REGION 1..12: note = CONT. FROM ABOVE: HLA-DPA1*01:03-B1*03:01L HLA-DRB1*11:03L HLA-D RB1*14:02L HLA-DQA1*01:01-B1*05:01L HLA-DQA1*01-B1*05L HLA-DQA1* 05:05-B1*03:19L HLA-DQA1*05:01-B1*02:01L HLA-DRB1*04:10L HLA-DRB 1*12:01L HLA-DRB1*12:02L HLA-DPA1*03:01-B1*105:01L
  REGION 1..12: note = CONT. FROM ABOVE: HLA-DRB1*14:54L HLA-DQA1*05:05-B1*03:01L HLA-D RB1*14:17L HLA-DRB1*07:01L HLA-DRB1*10:01L HLA-DRB1*16:01L HLA-D QA1*01:03-B1*06:01L HLA-DRB1*04:08L HLA-DQA1*02:01-B1*03:03L HLA -DRB1*15:03L
VVGEGSEGLNDN

SEQ ID NO: 8295 - protein, 11 aa, Severe acute respiratory syndrome coronavirus 2
  REGION 1..11: note = Table B: HLA-DQA1*03:02-B1*03:03L HLA-DQA1*05:05-B1*03:19L HLA-DQA1*03:01-B1*03:02L
GEGSEGLNDNL

SEQ ID NO: 8296 - protein, 10 aa, Severe acute respiratory syndrome coronavirus 2
  REGION 1..10: note = Table B: HLA-DQA1*03:02-B1*03:03L HLA-DQA1*01-B1*05L
GSEGLNDNLL

SEQ ID NO: 8297 - protein, 11 aa, Severe acute respiratory syndrome coronavirus 2
  REGION 1..11: note = Table B: HLA-DQA1*03:02-B1*03:03L HLA-DRB1*11:02L HLA-DQA1*05:05-B1*03:19M HLA-DQA1*03:01-B1*03:02L HLA-DPA1*01:03-B1*104:01L
SEGLNDNLLEI

SEQ ID NO: 8298 - protein, 10 aa, Severe acute respiratory syndrome coronavirus 2
  REGION 1..10: note = Table B: HLA-DQA1*03:02-B1*03:03L
GLNDNLLEIL

SEQ ID NO: 8299 - protein, 13 aa, Severe acute respiratory syndrome coronavirus 2
  REGION 1..13: note = Table B: HLA-DQA1*03:02-B1*03:03L HLA-DRB1*14:04L HLA-DRB1*04:03L HLA-DRB4*03:01NL HLA-DRB3*02:01L HLA-DPA1*01:03-B1*03:01L HLA-DRB1*11:02L HLA-DRB1*11:03L HLA-DRB1*14:02L HLA-DQA1*05:05-B1*03:19L
  REGION 1..13: note = CONT. FROM ABOVE: HLA-DQA1*05:01-B1*02:01L HLA-DQA1*05:05-B1*03: 116L HLA-DPA1*01:03-B1*04:02L HLA-DRB1*12:02L HLA-DPA1*02:01-B1* 13:01L HLA-DPA1*03:01-B1*105:01L HLA-DPA1*01:03-B1*02:01L HLA-DQ A1*05:05-B1*03:01L HLA-DRB1*14:17L HLA-DRB1*07:01L
  REGION 1..13: note = CONT. FROM ABOVE: HLA-DRB1*08:02L HLA-DRB1*08:03L
DNLLEILQKEKVN

SEQ ID NO: 8300 - protein, 13 aa, Severe acute respiratory syndrome coronavirus 2
  REGION 1..13: note = Table B: HLA-DQA1*03:02-B1*03:03L HLA-DQA1*05:01-B1*03:01L HLA-DRB1*04:03L HLA-DRB1*13:02L HLA-DRB1*01:03L HLA-DRB1*04:02L HLA-DRB1*04:05L HLA-DQA1*01:02-B1*06:02L HLA-DRB1*01:02L HLA-DPA1*01:03-B1*03:01L HLA-DQA1*05:01-B1*02:01L
  REGION 1..13: note = CONT. FROM ABOVE: HLA-DRB1*12:01L HLA-DPA1*02:01-B1*13:01L HLA-D PA1*03:01-B1*105:01L HLA-DQA1*03:01-B1*03:02L HLA-DQA1*05:05-B1* 03:01L HLA-DRB1*16:01L HLA-DQA1*02:01-B1*03:03L HLA-DRB1*15:03L
ILQKEKVNINIVG

SEQ ID NO: 8301 - protein, 10 aa, Severe acute respiratory syndrome coronavirus 2
  REGION 1..10: note = Table B: HLA-DQA1*03:02-B1*03:03L HLA-DRB1*04:03L HLA-DRB1*04:02L HLA-DQA1*01:02-B1*06:02L HLA-DQA1*05:01-B1*02:01L HLA-DQA1*03:01-B1*03:02L HLA-DRB1*14:17L HLA-DQA1*01:03-B1*06:01L
  REGION 1..10: note = CONT. FROM ABOVE: HLA-DQA1*02:01-B1*03:03L
VNINIVGDFK

SEQ ID NO: 8302 - protein, 10 aa, Severe acute respiratory syndrome coronavirus 2
  REGION 1..10: note = Table B: HLA-DQA1*03:02-B1*03:03L HLA-DQA1*05:01-B1*03:01L HLA-DRB1*04:03L HLA-DRB1*13:02L HLA-DRB1*13:03L HLA-DRB1*01:03L HLA-DRB1*04:02L HLA-DRB1*04:05L HLA-DRB1*01:02L HLA-DRB4*03:01NL HLA-DPA1*01:03-B1*03:01L HLA-DRB1*14:01L HLA-DRB1*14:02L
  REGION 1..10: note = CONT. FROM ABOVE: HLA-DQA1*01-B1*05L HLA-DQA1*05:01-B1*02:01L HL A-DRB1*12:01L HLA-DPA1*03:01-B1*105:01L HLA-DQA1*03:01-B1*03:02L HLA-DRB1*14:54L HLA-DRB1*14:17L HLA-DPA1*01:02-B1*04:01L HLA-DRB 1*16:01L HLA-DQA1*01:03-B1*06:01L HLA-DRB1*04:08L
  REGION 1..10: note = CONT. FROM ABOVE: HLA-DQA1*02:01-B1*03:03L HLA-DRB1*15:03L
IVGDFKLNEE

SEQ ID NO: 8303 - protein, 13 aa, Severe acute respiratory syndrome coronavirus 2
  REGION 1..13: note = Table B: HLA-DQA1*03:02-B1*03:03L HLA-DQA1*05:01-B1*03:01L HLA-DRB1*04:03L HLA-DQA1*01:02-B1*06:02L HLA-DRB1*01:02L HLA-DRB1*08:04L HLA-DRB1*08:77L HLA-DPA1*01:03-B1*03:01L HLA-DRB1*14:02L HLA-DQA1*05:05-B1*03:19L
  REGION 1..13: note = CONT. FROM ABOVE: HLA-DPA1*01:03-B1*04:01L HLA-DRB1*09:01L HLA-D RB1*12:02L HLA-DPA1*02:01-B1*13:01L HLA-DPA1*03:01-B1*105:01L HL A-DQA1*05:05-B1*03:01L HLA-DPA1*01:02-B1*04:01L HLA-DRB1*07:01L HLA-DQA1*01:03-B1*06:01L HLA-DQA1*02:01-B1*03:03L
VGDFKLNEEIAII

SEQ ID NO: 8304 - protein, 10 aa, Severe acute respiratory syndrome coronavirus 2
  REGION 1..10: note = Table B: HLA-DQA1*03:02-B1*03:03L HLA-DPA1*03:01-B1*04:02L HLA-DQA1*03:01-B1*03:02L HLA-DQA1*02:01-B1*03:03L HLA-DRB1*15:03L
KLNEEIAIIL

SEQ ID NO: 8305 - protein, 10 aa, Severe acute respiratory syndrome coronavirus 2
  REGION 1..10: note = Table B: HLA-DQA1*03:02-B1*03:03M HLA-DQA1*05:01-B1*03:01M HLA-DRB1*13:03L HLA-DQA1*01:02-B1*06:02L HLA-DRB4*03:01NL HLA-DRB1*08:77M HLA-DPA1*01:03-B1*03:01L HLA-DPA1*03:01-B1*04:02L HLA-DRB1*03:01L HLA-DRB1*11:02L
  REGION 1..10: note = CONT. FROM ABOVE: HLA-DQA1*01-B1*05L HLA-DQA1*05:05-B1*03:19M HL A-DQA1*05:01-B1*02:01L HLA-DRB4*01:01M HLA-DPA1*01:03-B1*04:01M HLA-DQA1*05:05-B1*03:116L HLA-DRB1*09:01L HLA-DPA1*01:03-B1*04:0 2L HLA-DRB1*12:01L HLA-DPA1*02:01-B1*13:01L
  REGION 1..10: note = CONT. FROM ABOVE: HLA-DPA1*03:01-B1*105:01L HLA-DQA1*03:01-B1*03 :02L HLA-DPA1*01:03-B1*104:01L HLA-DPA1*01:02-B1*04:01L HLA-DRB1 *10:01L HLA-DRB1*16:01L HLA-DRB1*15:03M
EEIAIILASF

SEQ ID NO: 8306 - protein, 14 aa, Severe acute respiratory syndrome coronavirus 2
  REGION 1..14: note = Table B: HLA-DQA1*03:02-B1*03:03L HLA-DRB1*13:02L HLA-DRB1*01:03L HLA-DPA1*03:01-B1*04:02L HLA-DQA1*01-B1*05L HLA-DRB4*01:01L HLA-DPA1*01:03-B1*104:01L HLA-DRB1*10:01L HLA-DQA1*01:03-B1*06:01L
IAIILASFSASTSA

SEQ ID NO: 8307 - protein, 10 aa, Severe acute respiratory syndrome coronavirus 2
  REGION 1..10: note = Table B: HLA-DQA1*03:02-B1*03:03L HLA-DQA1*05:01-B1*03:01L HLA-DRB1*13:03L HLA-DRB1*01:03L HLA-DQA1*01:02-B1*06:02L HLA-DRB1*08:77L HLA-DRB1*14:02L HLA-DQA1*05:05-B1*03:19L HLA-DQA1*05:01-B1*02:01L HLA-DPA1*01:03-B1*04:01L
  REGION 1..10: note = CONT. FROM ABOVE: HLA-DPA1*02:01-B1*13:01L HLA-DPA1*03:01-B1*105 :01L HLA-DQA1*01:03-B1*06:01L HLA-DQA1*02:01-B1*03:03L HLA-DRB1* 15:03L
ASFSASTSAF

SEQ ID NO: 8308 - protein, 12 aa, Severe acute respiratory syndrome coronavirus 2
  REGION 1..12: note = Table B: HLA-DQA1*03:02-B1*03:03L HLA-DQA1*05:01-B1*03:01L HLA-DRB1*01:02L HLA-DRB4*03:01NL HLA-DRB1*08:77L HLA-DQA1*05:05-B1*03:19L HLA-DQA1*05:01-B1*02:01L HLA-DRB1*12:01L HLA-DQA1*05:05-B1*03:01L HLA-DRB1*07:01L
  REGION 1..12: note = CONT. FROM ABOVE: HLA-DRB1*16:01L HLA-DQA1*02:01-B1*03:03L
SFSASTSAFVET

SEQ ID NO: 8309 - protein, 10 aa, Severe acute respiratory syndrome coronavirus 2
  REGION 1..10: note = Table B: HLA-DQA1*03:02-B1*03:03L HLA-DQA1*05:01-B1*03:01L HLA-DRB1*13:02L HLA-DRB1*13:03L HLA-DRB1*01:03L HLA-DQA1*01:02-B1*06:02L HLA-DRB4*03:01NL HLA-DRB1*08:01L HLA-DRB5*01:01L HLA-DQA1*05:05-B1*03:19L
  REGION 1..10: note = CONT. FROM ABOVE: HLA-DQA1*05:01-B1*02:01L HLA-DPA1*01:03-B1*04: 02L HLA-DRB1*12:01L HLA-DPA1*03:01-B1*105:01L HLA-DQA1*03:01-B1* 03:02L HLA-DQA1*05:05-B1*03:01M HLA-DRB1*16:01L HLA-DQA1*01:03-B 1*06:01M HLA-DQA1*02:01-B1*03:03L
STSAFVETVK

SEQ ID NO: 8310 - protein, 10 aa, Severe acute respiratory syndrome coronavirus 2
  REGION 1..10: note = Table B: HLA-DQA1*03:02-B1*03:03L HLA-DQA1*05:01-B1*03:01L HLA-DRB1*04:03L HLA-DQA1*01:02-B1*06:02L HLA-DQA1*01:01-B1*05:01L HLA-DQA1*05:05-B1*03:19L HLA-DQA1*05:01-B1*02:01L HLA-DPA1*03:01-B1*105:01L
  REGION 1..10: note = CONT. FROM ABOVE: HLA-DQA1*03:01-B1*03:02L HLA-DQA1*05:05-B1*03: 01L HLA-DQA1*01:03-B1*06:01M HLA-DQA1*02:01-B1*03:03L
TSAFVETVKG

SEQ ID NO: 8311 - protein, 10 aa, Severe acute respiratory syndrome coronavirus 2
  REGION 1..10: note = Table B: HLA-DQA1*03:02-B1*03:03L HLA-DQA1*05:01-B1*03:01L HLA-DQA1*01:02-B1*06:02L HLA-DQA1*05:05-B1*03:19L HLA-DPA1*03:01-B1*105:01L HLA-DQA1*03:01-B1*03:02L HLA-DQA1*01:03-B1*06:01L HLA-DQA1*02:01-B1*03:03L
SAFVETVKGL

SEQ ID NO: 8312 - protein, 10 aa, Severe acute respiratory syndrome coronavirus 2
  REGION 1..10: note = Table B: HLA-DQA1*03:02-B1*03:03L HLA-DQA1*05:01-B1*03:01L HLA-DRB1*04:03L HLA-DRB1*13:02L HLA-DRB1*13:03L HLA-DRB1*01:03L HLA-DRB1*04:02L HLA-DRB1*04:05L HLA-DQA1*01:02-B1*06:02L HLA-DRB4*03:01NL HLA-DRB1*08:77M HLA-DPA1*01:03-B1*03:01M
  REGION 1..10: note = CONT. FROM ABOVE: HLA-DPA1*03:01-B1*04:02L HLA-DRB1*03:01L HLA-D RB1*14:01L HLA-DRB1*11:02L HLA-DRB1*11:03L HLA-DRB1*14:02L HLA-D RB1*11:01L HLA-DQA1*01-B1*05M HLA-DQA1*05:05-B1*03:19M HLA-DQA1* 05:01-B1*02:01M HLA-DRB4*01:01L HLA-DPA1*01:03-B1*04:01L
  REGION 1..10: note = CONT. FROM ABOVE: HLA-DQA1*05:05-B1*03:116L HLA-DPA1*01:03-B1*04 :02L HLA-DRB1*12:01L HLA-DPA1*02:01-B1*13:01L HLA-DPA1*03:01-B1* 105:01L HLA-DRB1*14:54L HLA-DPA1*01:03-B1*104:01M HLA-DPA1*01:02 -B1*04:01L HLA-DRB1*10:01L HLA-DRB1*16:01M
  REGION 1..10: note = CONT. FROM ABOVE: HLA-DQA1*01:03-B1*06:01L HLA-DRB1*08:02L HLA-D QA1*02:01-B1*03:03L HLA-DRB1*15:03L
FVETVKGLDY

SEQ ID NO: 8313 - protein, 10 aa, Severe acute respiratory syndrome coronavirus 2
  REGION 1..10: note = Table B: HLA-DQA1*03:02-B1*03:03L HLA-DQA1*05:01-B1*03:01L HLA-DRB1*04:03L HLA-DRB1*13:02L HLA-DRB1*13:03L HLA-DRB1*01:03L HLA-DRB1*04:02L HLA-DRB1*04:05L HLA-DQA1*01:02-B1*06:02L HLA-DRB1*01:02L HLA-DRB4*03:01NL HLA-DRB1*08:77L HLA-DRB3*02:01L
  REGION 1..10: note = CONT. FROM ABOVE: HLA-DPA1*03:01-B1*04:02L HLA-DRB1*14:01L HLA-D QA1*01:01-B1*05:01L HLA-DQA1*01-B1*05L HLA-DQA1*05:05-B1*03:19L HLA-DQA1*05:01-B1*02:01L HLA-DRB1*12:01L HLA-DPA1*03:01-B1*105:0 1L HLA-DQA1*03:01-B1*03:02L HLA-DRB1*14:54L
  REGION 1..10: note = CONT. FROM ABOVE: HLA-DQA1*05:05-B1*03:01L HLA-DRB1*14:17L HLA-D PA1*01:02-B1*04:01L HLA-DRB1*16:01L HLA-DQA1*01:03-B1*06:01L HLA -DRB1*04:08L HLA-DQA1*02:01-B1*03:03L HLA-DRB1*15:03L
VETVKGLDYK

SEQ ID NO: 8314 - protein, 12 aa, Severe acute respiratory syndrome coronavirus 2
  REGION 1..12: note = Table B: HLA-DQA1*03:02-B1*03:03L HLA-DRB1*13:02L HLA-DRB1*04:04L HLA-DRB1*08:04L HLA-DPA1*01:03-B1*03:01L HLA-DRB3*01:01L HLA-DPA1*02:01-B1*13:01L HLA-DRB1*08:03L
LDYKAFKQIVES

SEQ ID NO: 8315 - protein, 11 aa, Severe acute respiratory syndrome coronavirus 2
  REGION 1..11: note = Table B: HLA-DQA1*03:02-B1*03:03L HLA-DQA1*05:01-B1*03:01L HLA-DQA1*01:02-B1*06:02L HLA-DQA1*05:01-B1*02:01L HLA-DPA1*02:01-B1*13:01L HLA-DPA1*03:01-B1*105:01L HLA-DPA1*01:03-B1*104:01L HLA-DRB1*16:01L
  REGION 1..11: note = CONT. FROM ABOVE: HLA-DQA1*01:03-B1*06:01L HLA-DRB1*15:03L
GAWNIGEQKSI

SEQ ID NO: 8316 - protein, 10 aa, Severe acute respiratory syndrome coronavirus 2
  REGION 1..10: note = Table B: HLA-DQA1*03:02-B1*03:03L HLA-DQA1*03:01-B1*03:02L HLA-DQA1*01:03-B1*06:01L HLA-DQA1*02:01-B1*03:03L
WNIGEQKSIL

SEQ ID NO: 8317 - protein, 10 aa, Severe acute respiratory syndrome coronavirus 2
  REGION 1..10: note = Table B: HLA-DQA1*03:02-B1*03:03M HLA-DRB1*13:03L HLA-DQA1*05:05-B1*03:19L HLA-DQA1*05:05-B1*03:116L HLA-DRB1*09:01L HLA-DPA1*01:03-B1*04:02L HLA-DQA1*03:01-B1*03:02L HLA-DPA1*01:03-B1*104:01L
  REGION 1..10: note = CONT. FROM ABOVE: HLA-DQA1*02:01-B1*03:03L
GEQKSILSPL

SEQ ID NO: 8318 - protein, 10 aa, Severe acute respiratory syndrome coronavirus 2
  REGION 1..10: note = Table B: HLA-DQA1*03:02-B1*03:03L HLA-DQA1*05:01-B1*03:01L HLA-DRB1*13:02L HLA-DRB1*13:03L HLA-DRB1*01:03L HLA-DQA1*01:02-B1*06:02M HLA-DRB4*03:01NL HLA-DRB1*08:77L HLA-DPA1*01:03-B1*03:01L HLA-DPA1*03:01-B1*04:02L
  REGION 1..10: note = CONT. FROM ABOVE: HLA-DRB1*03:01L HLA-DRB1*14:01L HLA-DRB1*14:02 L HLA-DQA1*01-B1*05L HLA-DQA1*05:05-B1*03:19L HLA-DQA1*05:01-B1* 02:01L HLA-DRB4*01:01L HLA-DPA1*01:03-B1*04:01L HLA-DQA1*05:05-B 1*03:116L HLA-DPA1*01:03-B1*04:02L HLA-DRB1*12:01L
  REGION 1..10: note = CONT. FROM ABOVE: HLA-DPA1*02:01-B1*13:01L HLA-DPA1*03:01-B1*105 :01L HLA-DQA1*03:01-B1*03:02L HLA-DPA1*01:03-B1*104:01L HLA-DQA1 *05:05-B1*03:01L HLA-DPA1*01:02-B1*04:01L HLA-DRB1*10:01L HLA-DR B1*16:01L HLA-DQA1*01:03-B1*06:01L HLA-DRB1*08:02L
  REGION 1..10: note = CONT. FROM ABOVE: HLA-DQA1*02:01-B1*03:03L HLA-DRB1*15:03L
EQKSILSPLY

SEQ ID NO: 8319 - protein, 12 aa, Severe acute respiratory syndrome coronavirus 2
  REGION 1..12: note = Table B: HLA-DQA1*03:02-B1*03:03L HLA-DRB1*04:01L HLA-DRB1*13:02L HLA-DRB1*13:03L HLA-DRB1*01:03L HLA-DRB1*04:04L HLA-DRB1*04:05L HLA-DQA1*01:02-B1*06:02L HLA-DRB1*01:01L HLA-DRB1*01:02L HLA-DRB4*03:01NL HLA-DRB1*08:04L HLA-DRB1*08:77L
  REGION 1..12: note = CONT. FROM ABOVE: HLA-DRB3*02:01L HLA-DPA1*01:03-B1*03:01L HLA-D PA1*03:01-B1*04:02L HLA-DRB1*14:01L HLA-DRB1*11:03L HLA-DRB1*11: 04L HLA-DRB1*14:02L HLA-DQA1*01:01-B1*05:01L HLA-DRB1*08:01L HLA -DRB1*11:01L HLA-DRB5*01:01L HLA-DQA1*05:05-B1*03:19L
  REGION 1..12: note = CONT. FROM ABOVE: HLA-DQA1*05:01-B1*02:01L HLA-DPA1*01:03-B1*04: 01L HLA-DRB1*04:10M HLA-DRB1*09:01L HLA-DPA1*01:03-B1*04:02L HLA -DRB1*12:01L HLA-DRB1*12:02L HLA-DRB3*01:01L HLA-DPA1*02:01-B1*1 3:01L HLA-DPA1*03:01-B1*105:01L HLA-DRB1*14:54L
  REGION 1..12: note = CONT. FROM ABOVE: HLA-DPA1*01:03-B1*104:01L HLA-DQA1*05:05-B1*03 :01L HLA-DPA1*01:02-B1*04:01L HLA-DRB1*07:01L HLA-DRB1*10:01L HL A-DQA1*01:03-B1*06:01L HLA-DRB1*04:08L HLA-DRB1*08:03L HLA-DRB1* 15:01L HLA-DRB1*15:03L
SPLYAFASEAAR

SEQ ID NO: 8320 - protein, 10 aa, Severe acute respiratory syndrome coronavirus 2
  REGION 1..10: note = Table B: HLA-DQA1*03:02-B1*03:03L HLA-DQA1*05:05-B1*03:19L HLA-DPA1*02:01-B1*13:01L HLA-DQA1*03:01-B1*03:02L HLA-DQA1*02:01-B1*03:03L HLA-DRB1*15:03L
YAFASEAARV

SEQ ID NO: 8321 - protein, 10 aa, Severe acute respiratory syndrome coronavirus 2
  REGION 1..10: note = Table B: HLA-DQA1*03:02-B1*03:03L HLA-DQA1*05:01-B1*03:01L HLA-DRB1*04:03L HLA-DQA1*01:02-B1*06:02L HLA-DPA1*03:01-B1*04:02L HLA-DQA1*01-B1*05L HLA-DQA1*05:05-B1*03:19L HLA-DQA1*05:01-B1*02:01L
  REGION 1..10: note = CONT. FROM ABOVE: HLA-DRB1*12:01L HLA-DPA1*02:01-B1*13:01L HLA-D PA1*03:01-B1*105:01L HLA-DQA1*03:01-B1*03:02L HLA-DQA1*05:05-B1* 03:01L HLA-DPA1*01:02-B1*04:01L HLA-DRB1*16:01L HLA-DQA1*01:03-B 1*06:01L HLA-DQA1*02:01-B1*03:03L HLA-DRB1*15:03L
AFASEAARVV

SEQ ID NO: 8322 - protein, 10 aa, Severe acute respiratory syndrome coronavirus 2
  REGION 1..10: note = Table B: HLA-DQA1*03:02-B1*03:03L HLA-DQA1*05:01-B1*03:01L HLA-DRB1*04:01L HLA-DRB1*04:03L HLA-DRB1*13:02L HLA-DRB1*13:03M HLA-DRB1*01:03L HLA-DRB1*04:02L HLA-DRB1*04:04L HLA-DRB1*04:05L HLA-DQA1*01:02-B1*06:02L HLA-DRB1*01:01L HLA-DRB1*01:02L
  REGION 1..10: note = CONT. FROM ABOVE: HLA-DRB4*03:01NL HLA-DRB1*08:77L HLA-DRB3*02:0 1L HLA-DPA1*03:01-B1*04:02L HLA-DRB1*14:01L HLA-DRB1*11:03L HLA- DRB1*11:04L HLA-DRB1*14:02L HLA-DRB1*08:01L HLA-DRB1*11:01L HLA- DRB5*01:01L HLA-DQA1*01-B1*05L HLA-DQA1*05:05-B1*03:19L
  REGION 1..10: note = CONT. FROM ABOVE: HLA-DQA1*05:01-B1*02:01L HLA-DPA1*01:03-B1*04: 01L HLA-DPA1*01:03-B1*04:02L HLA-DRB1*12:01M HLA-DRB1*12:02L HLA -DRB3*01:01L HLA-DPA1*03:01-B1*105:01L HLA-DQA1*03:01-B1*03:02M HLA-DRB1*14:54L HLA-DQA1*05:05-B1*03:01L HLA-DRB1*14:17L
  REGION 1..10: note = CONT. FROM ABOVE: HLA-DPA1*01:02-B1*04:01L HLA-DRB1*07:01L HLA-D RB1*10:01L HLA-DRB1*16:01L HLA-DQA1*01:03-B1*06:01L HLA-DRB1*04: 08L HLA-DRB1*08:03L HLA-DQA1*02:01-B1*03:03M HLA-DRB1*15:03L
FASEAARVVR

SEQ ID NO: 8323 - protein, 10 aa, Severe acute respiratory syndrome coronavirus 2
  REGION 1..10: note = Table B: HLA-DQA1*03:02-B1*03:03M HLA-DQA1*05:01-B1*03:01L HLA-DRB1*08:77L HLA-DPA1*03:01-B1*04:02L HLA-DRB1*11:02M HLA-DQA1*05:05-B1*03:19H HLA-DQA1*05:01-B1*02:01L HLA-DRB4*01:01L HLA-DPA1*01:03-B1*04:01L
  REGION 1..10: note = CONT. FROM ABOVE: HLA-DQA1*05:05-B1*03:116L HLA-DRB1*09:01L HLA- DPA1*01:03-B1*04:02L HLA-DQA1*03:01-B1*03:02L HLA-DPA1*01:03-B1* 104:01M HLA-DRB1*10:01L HLA-DRB1*16:01L HLA-DQA1*01:03-B1*06:01L HLA-DQA1*02:01-B1*03:03L HLA-DRB1*15:03L
SEAARVVRSI

SEQ ID NO: 8324 - protein, 10 aa, Severe acute respiratory syndrome coronavirus 2
  REGION 1..10: note = Table B: HLA-DQA1*03:02-B1*03:03L HLA-DQA1*05:01-B1*03:01L HLA-DRB1*04:03L HLA-DRB1*13:03L HLA-DRB1*01:03L HLA-DQA1*01:02-B1*06:02L HLA-DRB1*01:02L HLA-DPA1*03:01-B1*04:02L HLA-DRB1*14:01L HLA-DRB1*14:02L
  REGION 1..10: note = CONT. FROM ABOVE: HLA-DQA1*05:05-B1*03:19L HLA-DQA1*05:01-B1*02: 01L HLA-DPA1*03:01-B1*105:01L HLA-DQA1*03:01-B1*03:02L HLA-DPA1* 01:02-B1*04:01L HLA-DRB1*16:01L HLA-DQA1*01:03-B1*06:01L HLA-DQA 1*02:01-B1*03:03L HLA-DRB1*15:03L
SIFSRTLETA

SEQ ID NO: 8325 - protein, 10 aa, Severe acute respiratory syndrome coronavirus 2
  REGION 1..10: note = Table B: HLA-DQA1*03:02-B1*03:03M HLA-DQA1*05:01-B1*03:01L HLA-DRB1*13:03L HLA-DRB1*01:03L HLA-DQA1*01:02-B1*06:02L HLA-DRB1*01:02L HLA-DPA1*03:01-B1*04:02L HLA-DRB1*14:01L HLA-DRB1*14:02L HLA-DRB1*08:01L HLA-DQA1*05:05-B1*03:19L
  REGION 1..10: note = CONT. FROM ABOVE: HLA-DQA1*05:01-B1*02:01L HLA-DPA1*01:03-B1*04: 01L HLA-DQA1*05:05-B1*03:116L HLA-DRB1*09:01L HLA-DPA1*01:03-B1* 04:02L HLA-DRB1*12:01L HLA-DPA1*02:01-B1*13:01L HLA-DPA1*03:01-B 1*105:01L HLA-DQA1*03:01-B1*03:02L HLA-DPA1*01:03-B1*104:01L
  REGION 1..10: note = CONT. FROM ABOVE: HLA-DPA1*01:02-B1*04:01L HLA-DRB1*10:01L HLA-D RB1*16:01L HLA-DQA1*01:03-B1*06:01L HLA-DRB1*08:03L HLA-DQA1*02: 01-B1*03:03L HLA-DRB1*15:03L
RTLETAQNSV

SEQ ID NO: 8326 - protein, 10 aa, Severe acute respiratory syndrome coronavirus 2
  REGION 1..10: note = Table B: HLA-DQA1*03:02-B1*03:03L HLA-DQA1*05:01-B1*03:01L HLA-DRB1*04:03L HLA-DRB1*13:02L HLA-DRB1*13:03L HLA-DRB1*01:03L HLA-DRB1*04:02L HLA-DRB1*04:04L HLA-DRB1*04:05L HLA-DRB1*01:01L HLA-DRB1*01:02L HLA-DRB4*03:01NL HLA-DRB1*11:04L
  REGION 1..10: note = CONT. FROM ABOVE: HLA-DQA1*01:01-B1*05:01L HLA-DRB1*08:01L HLA-D RB5*01:01L HLA-DQA1*01-B1*05L HLA-DQA1*05:01-B1*02:01L HLA-DRB1* 04:10L HLA-DRB1*12:01L HLA-DPA1*03:01-B1*105:01L HLA-DQA1*03:01- B1*03:02L HLA-DRB1*14:54L HLA-DQA1*05:05-B1*03:01L
  REGION 1..10: note = CONT. FROM ABOVE: HLA-DRB1*14:17L HLA-DRB1*16:01L HLA-DQA1*01:03 -B1*06:01L HLA-DQA1*02:01-B1*03:03L
TLETAQNSVR

SEQ ID NO: 8327 - protein, 10 aa, Severe acute respiratory syndrome coronavirus 2
  REGION 1..10: note = Table B: HLA-DQA1*03:02-B1*03:03L HLA-DQA1*05:01-B1*03:01L HLA-DRB1*11:02L HLA-DQA1*05:05-B1*03:19M HLA-DQA1*05:01-B1*02:01L HLA-DRB1*09:01L HLA-DQA1*03:01-B1*03:02L HLA-DPA1*01:03-B1*104:01L
  REGION 1..10: note = CONT. FROM ABOVE: HLA-DRB1*16:01L HLA-DQA1*01:03-B1*06:01L HLA-D QA1*02:01-B1*03:03L HLA-DRB1*15:03L
LETAQNSVRV

SEQ ID NO: 8328 - protein, 10 aa, Severe acute respiratory syndrome coronavirus 2
  REGION 1..10: note = Table B: HLA-DQA1*03:02-B1*03:03M HLA-DQA1*05:01-B1*03:01L HLA-DRB1*13:02L HLA-DRB1*13:03M HLA-DQA1*01:02-B1*06:02M HLA-DRB1*01:01L HLA-DRB1*01:02M HLA-DRB4*03:01NL HLA-DRB3*02:01L HLA-DPA1*01:03-B1*03:01L HLA-DPA1*03:01-B1*04:02L
  REGION 1..10: note = CONT. FROM ABOVE: HLA-DRB1*14:01L HLA-DRB1*11:04L HLA-DRB1*14:02 L HLA-DRB1*08:01L HLA-DRB5*01:01L HLA-DQA1*05:01-B1*02:01L HLA-D PA1*01:03-B1*04:01L HLA-DQA1*05:05-B1*03:116L HLA-DRB1*09:01L HL A-DRB1*12:01L HLA-DPA1*02:01-B1*13:01L HLA-DPA1*03:01-B1*105:01M
  REGION 1..10: note = CONT. FROM ABOVE: HLA-DQA1*03:01-B1*03:02L HLA-DQA1*05:05-B1*03: 01L HLA-DPA1*01:02-B1*04:01L HLA-DQA1*01:03-B1*06:01L HLA-DRB1*0 8:03L HLA-DQA1*02:01-B1*03:03L HLA-DRB1*15:01L HLA-DRB1*15:03M
ETAQNSVRVL

SEQ ID NO: 8329 - protein, 10 aa, Severe acute respiratory syndrome coronavirus 2
  REGION 1..10: note = Table B: HLA-DQA1*03:02-B1*03:03L HLA-DQA1*05:01-B1*03:01L HLA-DQA1*05:05-B1*03:19L HLA-DQA1*03:01-B1*03:02L HLA-DRB1*16:01L HLA-DQA1*01:03-B1*06:01L HLA-DQA1*02:01-B1*03:03L
RVLQKAAITI

SEQ ID NO: 8330 - protein, 12 aa, Severe acute respiratory syndrome coronavirus 2
  REGION 1..12: note = Table B: HLA-DQA1*03:02-B1*03:03L HLA-DQA1*05:01-B1*03:01L HLA-DRB1*04:03L HLA-DRB1*13:02L HLA-DRB1*13:03L HLA-DRB1*01:03L HLA-DRB1*04:02L HLA-DRB1*04:05L HLA-DQA1*01:02-B1*06:02L HLA-DRB1*01:02L HLA-DRB4*03:01NL HLA-DRB1*08:04L
  REGION 1..12: note = CONT. FROM ABOVE: HLA-DPA1*01:03-B1*03:01L HLA-DRB1*14:01L HLA-D QA1*01:01-B1*05:01L HLA-DQA1*05:05-B1*03:19L HLA-DQA1*05:01-B1*0 2:01L HLA-DRB1*04:10L HLA-DRB1*12:01L HLA-DRB1*12:02L HLA-DPA1*0 2:01-B1*13:01L HLA-DPA1*03:01-B1*105:01L
  REGION 1..12: note = CONT. FROM ABOVE: HLA-DQA1*03:01-B1*03:02L HLA-DRB1*14:54L HLA-D PA1*01:03-B1*104:01L HLA-DQA1*05:05-B1*03:01L HLA-DRB1*14:17L HL A-DRB1*07:01L HLA-DRB1*16:01L HLA-DQA1*01:03-B1*06:01L HLA-DRB1* 04:08L HLA-DQA1*02:01-B1*03:03L HLA-DRB1*15:03L
VLQKAAITILDG

SEQ ID NO: 8331 - protein, 12 aa, Severe acute respiratory syndrome coronavirus 2
  REGION 1..12: note = Table B: HLA-DQA1*03:02-B1*03:03L HLA-DQA1*05:01-B1*03:01L HLA-DRB1*13:02L HLA-DRB1*13:03L HLA-DRB1*01:03L HLA-DRB1*04:04L HLA-DQA1*01:02-B1*06:02L HLA-DRB1*01:02L HLA-DRB1*08:04L HLA-DPA1*01:03-B1*03:01L HLA-DRB1*14:01L HLA-DRB1*11:04L
  REGION 1..12: note = CONT. FROM ABOVE: HLA-DQA1*01-B1*05L HLA-DRB1*12:02L HLA-DQA1*05 :05-B1*03:01L HLA-DRB1*10:01L HLA-DRB1*04:08L HLA-DRB1*08:03L HL A-DRB1*15:03L
KAAITILDGISQ

SEQ ID NO: 8332 - protein, 10 aa, Severe acute respiratory syndrome coronavirus 2
  REGION 1..10: note = Table B: HLA-DQA1*03:02-B1*03:03L HLA-DQA1*05:01-B1*03:01L HLA-DRB1*04:03L HLA-DRB1*13:02L HLA-DRB1*13:03L HLA-DRB1*01:03L HLA-DQA1*01:02-B1*06:02M HLA-DRB4*03:01NL HLA-DRB1*08:77L HLA-DPA1*01:03-B1*03:01L HLA-DPA1*03:01-B1*04:02L
  REGION 1..10: note = CONT. FROM ABOVE: HLA-DRB1*03:01L HLA-DRB1*14:01L HLA-DRB1*11:02 L HLA-DRB1*14:02L HLA-DQA1*01-B1*05L HLA-DQA1*05:05-B1*03:19M HL A-DQA1*05:01-B1*02:01M HLA-DRB4*01:01L HLA-DPA1*01:03-B1*04:01L HLA-DQA1*05:05-B1*03:116L HLA-DPA1*01:03-B1*04:02L
  REGION 1..10: note = CONT. FROM ABOVE: HLA-DRB1*12:01L HLA-DPA1*02:01-B1*13:01L HLA-D PA1*03:01-B1*105:01L HLA-DPA1*01:03-B1*104:01L HLA-DQA1*05:05-B1 *03:01L HLA-DPA1*01:02-B1*04:01L HLA-DRB1*10:01L HLA-DRB1*16:01L HLA-DQA1*01:03-B1*06:01L HLA-DRB1*08:02L
  REGION 1..10: note = CONT. FROM ABOVE: HLA-DQA1*02:01-B1*03:03L HLA-DRB1*15:03L
ITILDGISQY

SEQ ID NO: 8333 - protein, 10 aa, Severe acute respiratory syndrome coronavirus 2
  REGION 1..10: note = Table B: HLA-DQA1*03:02-B1*03:03M HLA-DQA1*05:01-B1*03:01L HLA-DRB1*13:03L HLA-DQA1*01:02-B1*06:02L HLA-DPA1*03:01-B1*04:02L HLA-DRB1*14:01L HLA-DRB1*14:02L HLA-DRB1*08:01L HLA-DQA1*05:05-B1*03:19L
  REGION 1..10: note = CONT. FROM ABOVE: HLA-DQA1*05:01-B1*02:01L HLA-DRB4*01:01L HLA-D QA1*05:05-B1*03:116L HLA-DRB1*09:01L HLA-DPA1*01:03-B1*04:02L HL A-DPA1*02:01-B1*13:01L HLA-DPA1*03:01-B1*105:01L HLA-DQA1*03:01- B1*03:02L HLA-DPA1*01:03-B1*104:01L HLA-DPA1*01:02-B1*04:01L
  REGION 1..10: note = CONT. FROM ABOVE: HLA-DRB1*10:01L HLA-DRB1*16:01L HLA-DQA1*01:03 -B1*06:01L HLA-DRB1*08:03L HLA-DQA1*02:01-B1*03:03L HLA-DRB1*15: 03L
ILDGISQYSL

SEQ ID NO: 8334 - protein, 12 aa, Severe acute respiratory syndrome coronavirus 2
  REGION 1..12: note = Table B: HLA-DQA1*03:02-B1*03:03L HLA-DQA1*05:01-B1*03:01L HLA-DRB1*04:03L HLA-DRB1*04:02L HLA-DQA1*01:02-B1*06:02L HLA-DPA1*03:01-B1*04:02L HLA-DRB1*14:01L HLA-DQA1*05:01-B1*02:01L HLA-DRB1*12:01L
  REGION 1..12: note = CONT. FROM ABOVE: HLA-DPA1*03:01-B1*105:01L HLA-DQA1*03:01-B1*03 :02L HLA-DPA1*01:02-B1*04:01L HLA-DRB1*16:01L HLA-DQA1*01:03-B1* 06:01L HLA-DQA1*02:01-B1*03:03L HLA-DRB1*15:03L
DGISQYSLRLID

SEQ ID NO: 8335 - protein, 10 aa, Severe acute respiratory syndrome coronavirus 2
  REGION 1..10: note = Table B: HLA-DQA1*03:02-B1*03:03L HLA-DQA1*03:01-B1*03:02L HLA-DQA1*02:01-B1*03:03L
SQYSLRLIDA

SEQ ID NO: 8336 - protein, 11 aa, Severe acute respiratory syndrome coronavirus 2
  REGION 1..11: note = Table B: HLA-DQA1*03:02-B1*03:03L HLA-DQA1*05:01-B1*03:01L HLA-DRB1*04:03L HLA-DQA1*01:02-B1*06:02L HLA-DPA1*03:01-B1*04:02L HLA-DPA1*03:01-B1*105:01L HLA-DQA1*03:01-B1*03:02L HLA-DPA1*01:02-B1*04:01L
  REGION 1..11: note = CONT. FROM ABOVE: HLA-DRB1*16:01L HLA-DQA1*01:03-B1*06:01L HLA-D QA1*02:01-B1*03:03L HLA-DRB1*15:03L
RLIDAMMFTSD

SEQ ID NO: 8337 - protein, 13 aa, Severe acute respiratory syndrome coronavirus 2
  REGION 1..13: note = Table B: HLA-DQA1*03:02-B1*03:03L HLA-DRB1*04:03L HLA-DRB1*04:02L HLA-DRB1*04:05L HLA-DQA1*01:02-B1*06:02L HLA-DQA1*05:01-B1*02:01L HLA-DRB1*04:10L HLA-DRB1*12:01L HLA-DPA1*03:01-B1*105:01L HLA-DQA1*03:01-B1*03:02L
  REGION 1..13: note = CONT. FROM ABOVE: HLA-DQA1*05:05-B1*03:01L HLA-DRB1*14:17L HLA-D RB1*16:01L HLA-DQA1*01:03-B1*06:01L HLA-DQA1*02:01-B1*03:03L
IDAMMFTSDLATN

SEQ ID NO: 8338 - protein, 12 aa, Severe acute respiratory syndrome coronavirus 2
  REGION 1..12: note = Table B: HLA-DQA1*03:02-B1*03:03L HLA-DRB1*04:02L HLA-DRB1*04:05L HLA-DQA1*01:02-B1*06:02L HLA-DQA1*01-B1*05L HLA-DQA1*05:05-B1*03:01L HLA-DRB1*16:01L
AMMFTSDLATNN

SEQ ID NO: 8339 - protein, 10 aa, Severe acute respiratory syndrome coronavirus 2
  REGION 1..10: note = Table B: HLA-DQA1*03:02-B1*03:03M HLA-DQA1*05:01-B1*03:01L HLA-DRB1*04:03L HLA-DRB1*13:03L HLA-DRB1*01:03L HLA-DRB1*04:02L HLA-DRB1*04:05L HLA-DQA1*01:02-B1*06:02L HLA-DRB1*01:02L HLA-DRB4*03:01NL HLA-DRB1*08:77L HLA-DRB3*02:01L
  REGION 1..10: note = CONT. FROM ABOVE: HLA-DPA1*01:03-B1*03:01L HLA-DPA1*03:01-B1*04: 02L HLA-DRB1*14:01L HLA-DRB1*14:02L HLA-DRB1*08:01L HLA-DQA1*01- B1*05L HLA-DQA1*05:05-B1*03:19L HLA-DQA1*05:01-B1*02:01L HLA-DRB 4*01:01L HLA-DPA1*01:03-B1*04:01L HLA-DQA1*05:05-B1*03:116L
  REGION 1..10: note = CONT. FROM ABOVE: HLA-DRB1*09:01L HLA-DPA1*01:03-B1*04:02L HLA-D RB1*12:01L HLA-DPA1*02:01-B1*13:01L HLA-DPA1*03:01-B1*105:01L HL A-DQA1*03:01-B1*03:02M HLA-DPA1*01:03-B1*104:01L HLA-DQA1*05:05- B1*03:01L HLA-DPA1*01:02-B1*04:01L HLA-DRB1*07:01L
  REGION 1..10: note = CONT. FROM ABOVE: HLA-DRB1*10:01L HLA-DRB1*16:01L HLA-DQA1*01:03 -B1*06:01L HLA-DRB1*08:03L HLA-DQA1*02:01-B1*03:03L HLA-DRB1*15: 03L
FTSDLATNNL

SEQ ID NO: 8340 - protein, 10 aa, Severe acute respiratory syndrome coronavirus 2
  REGION 1..10: note = Table B: HLA-DQA1*03:02-B1*03:03L
TSDLATNNLV

SEQ ID NO: 8341 - protein, 10 aa, Severe acute respiratory syndrome coronavirus 2
  REGION 1..10: note = Table B: HLA-DQA1*03:02-B1*03:03L
SDLATNNLVV

SEQ ID NO: 8342 - protein, 10 aa, Severe acute respiratory syndrome coronavirus 2
  REGION 1..10: note = Table B: HLA-DQA1*03:02-B1*03:03L HLA-DQA1*05:01-B1*03:01L HLA-DRB1*13:03L HLA-DQA1*01:02-B1*06:02L HLA-DQA1*05:01-B1*02:01L HLA-DRB1*12:01L HLA-DPA1*03:01-B1*105:01L HLA-DQA1*03:01-B1*03:02L
  REGION 1..10: note = CONT. FROM ABOVE: HLA-DQA1*01:03-B1*06:01L HLA-DQA1*02:01-B1*03: 03L HLA-DRB1*15:03L
DLATNNLVVM

SEQ ID NO: 8343 - protein, 10 aa, Severe acute respiratory syndrome coronavirus 2
  REGION 1..10: note = Table B: HLA-DQA1*03:02-B1*03:03L HLA-DQA1*05:01-B1*03:01L HLA-DRB1*04:03L HLA-DRB1*13:02L HLA-DRB1*13:03M HLA-DRB1*01:03L HLA-DQA1*01:02-B1*06:02M HLA-DRB4*03:01NL HLA-DRB1*08:77M HLA-DPA1*01:03-B1*03:01M HLA-DPA1*03:01-B1*04:02L
  REGION 1..10: note = CONT. FROM ABOVE: HLA-DRB1*03:01M HLA-DRB1*14:01L HLA-DRB1*11:02 L HLA-DRB1*11:03L HLA-DRB1*14:02L HLA-DRB1*11:01L HLA-DRB5*01:01 L HLA-DQA1*01-B1*05M HLA-DQA1*05:05-B1*03:19M HLA-DQA1*05:01-B1* 02:01M HLA-DRB4*01:01M HLA-DPA1*01:03-B1*04:01M
  REGION 1..10: note = CONT. FROM ABOVE: HLA-DQA1*05:05-B1*03:116L HLA-DPA1*01:03-B1*04 :02L HLA-DRB1*12:01L HLA-DPA1*02:01-B1*13:01L HLA-DPA1*03:01-B1* 105:01L HLA-DPA1*01:03-B1*104:01M HLA-DQA1*05:05-B1*03:01L HLA-D PA1*01:02-B1*04:01L HLA-DRB1*10:01L HLA-DRB1*16:01M
  REGION 1..10: note = CONT. FROM ABOVE: HLA-DQA1*01:03-B1*06:01L HLA-DRB1*08:02L HLA-D QA1*02:01-B1*03:03L HLA-DRB1*15:03L
ATNNLVVMAY

SEQ ID NO: 8344 - protein, 10 aa, Severe acute respiratory syndrome coronavirus 2
  REGION 1..10: note = Table B: HLA-DQA1*03:02-B1*03:03L HLA-DQA1*05:01-B1*03:01L HLA-DRB1*04:03L HLA-DQA1*05:01-B1*02:01L HLA-DQA1*03:01-B1*03:02L HLA-DQA1*02:01-B1*03:03L
MAYITGGVVQ

SEQ ID NO: 8345 - protein, 10 aa, Severe acute respiratory syndrome coronavirus 2
  REGION 1..10: note = Table B: HLA-DQA1*03:02-B1*03:03M HLA-DQA1*05:01-B1*03:01M HLA-DRB1*04:01L HLA-DRB1*04:03L HLA-DRB1*13:02L HLA-DRB1*13:03L HLA-DRB1*01:03L HLA-DRB1*04:02L HLA-DRB1*04:05M HLA-DQA1*01:02-B1*06:02L HLA-DRB1*01:01L HLA-DRB1*01:02L
  REGION 1..10: note = CONT. FROM ABOVE: HLA-DRB1*08:77L HLA-DRB3*02:01L HLA-DPA1*03:01 -B1*04:02M HLA-DRB1*14:01L HLA-DRB1*11:02L HLA-DRB1*11:03L HLA-D RB1*14:02M HLA-DQA1*01:01-B1*05:01L HLA-DRB1*08:01L HLA-DRB1*11: 01L HLA-DQA1*01-B1*05L HLA-DQA1*05:05-B1*03:19L
  REGION 1..10: note = CONT. FROM ABOVE: HLA-DQA1*05:01-B1*02:01L HLA-DRB4*01:01L HLA-D PA1*01:03-B1*04:01L HLA-DQA1*05:05-B1*03:116M HLA-DRB1*09:01L HL A-DPA1*01:03-B1*04:02L HLA-DRB1*12:01L HLA-DPA1*02:01-B1*13:01M HLA-DPA1*03:01-B1*105:01L HLA-DQA1*03:01-B1*03:02M
  REGION 1..10: note = CONT. FROM ABOVE: HLA-DPA1*01:03-B1*104:01L HLA-DPA1*01:02-B1*04 :01L HLA-DRB1*07:01L HLA-DRB1*10:01L HLA-DRB1*16:01L HLA-DQA1*01 :03-B1*06:01M HLA-DRB1*08:03M HLA-DQA1*02:01-B1*03:03M HLA-DRB1* 15:03M
AYITGGVVQL

SEQ ID NO: 8346 - protein, 11 aa, Severe acute respiratory syndrome coronavirus 2
  REGION 1..11: note = Table B: HLA-DQA1*03:02-B1*03:03L HLA-DQA1*05:01-B1*03:01L HLA-DQA1*01:02-B1*06:02L HLA-DQA1*05:05-B1*03:19L HLA-DPA1*03:01-B1*105:01L HLA-DQA1*03:01-B1*03:02L HLA-DQA1*05:05-B1*03:01L HLA-DRB1*04:08L
  REGION 1..11: note = CONT. FROM ABOVE: HLA-DQA1*02:01-B1*03:03L
ITGGVVQLTSQ

SEQ ID NO: 8347 - protein, 14 aa, Severe acute respiratory syndrome coronavirus 2
  REGION 1..14: note = Table B: HLA-DQA1*03:02-B1*03:03L HLA-DPA1*01:03-B1*03:01L HLA-DPA1*02:01-B1*13:01L HLA-DQA1*03:01-B1*03:02L HLA-DPA1*01:03-B1*104:01L HLA-DPA1*01:02-B1*04:01L HLA-DRB1*04:08L
VVQLTSQWLTNIFG

SEQ ID NO: 8348 - protein, 14 aa, Severe acute respiratory syndrome coronavirus 2
  REGION 1..14: note = Table B: HLA-DQA1*03:02-B1*03:03L HLA-DRB1*13:02L HLA-DRB1*08:04L HLA-DRB1*08:01L HLA-DRB1*11:01L HLA-DQA1*02:01-B1*03:03L
TSQWLTNIFGTVYE

SEQ ID NO: 8349 - protein, 10 aa, Severe acute respiratory syndrome coronavirus 2
  REGION 1..10: note = Table B: HLA-DQA1*03:02-B1*03:03L HLA-DQA1*05:01-B1*03:01L HLA-DRB1*04:03L HLA-DRB1*13:02L HLA-DRB1*13:03L HLA-DRB1*01:03L HLA-DRB1*04:05L HLA-DQA1*01:02-B1*06:02L HLA-DRB1*01:02L HLA-DRB1*08:77L HLA-DRB3*02:01L HLA-DPA1*01:03-B1*03:01L
  REGION 1..10: note = CONT. FROM ABOVE: HLA-DPA1*03:01-B1*04:02M HLA-DRB1*14:01L HLA-D RB1*11:03L HLA-DRB1*11:04L HLA-DRB1*14:02L HLA-DRB1*08:01L HLA-D RB1*11:01L HLA-DQA1*01-B1*05L HLA-DQA1*05:05-B1*03:19L HLA-DQA1* 05:01-B1*02:01L HLA-DRB4*01:01L HLA-DPA1*01:03-B1*04:01L
  REGION 1..10: note = CONT. FROM ABOVE: HLA-DQA1*05:05-B1*03:116L HLA-DRB1*09:01L HLA- DPA1*01:03-B1*04:02L HLA-DRB1*12:01L HLA-DPA1*02:01-B1*13:01L HL A-DPA1*03:01-B1*105:01M HLA-DQA1*03:01-B1*03:02L HLA-DPA1*01:03- B1*104:01L HLA-DQA1*05:05-B1*03:01L HLA-DPA1*01:02-B1*04:01M
  REGION 1..10: note = CONT. FROM ABOVE: HLA-DRB1*07:01L HLA-DRB1*16:01L HLA-DQA1*01:03 -B1*06:01L HLA-DRB1*04:08L HLA-DRB1*08:03L HLA-DQA1*02:01-B1*03: 03L HLA-DRB1*15:03L
NIFGTVYEKL

SEQ ID NO: 8350 - protein, 10 aa, Severe acute respiratory syndrome coronavirus 2
  REGION 1..10: note = Table B: HLA-DQA1*03:02-B1*03:03L HLA-DQA1*05:01-B1*03:01L HLA-DRB1*13:02L HLA-DRB1*13:03L HLA-DRB1*01:03L HLA-DRB1*04:02L HLA-DQA1*01:02-B1*06:02L HLA-DRB1*01:02L HLA-DPA1*01:03-B1*03:01L HLA-DPA1*03:01-B1*04:02L
  REGION 1..10: note = CONT. FROM ABOVE: HLA-DRB1*14:01L HLA-DRB1*14:02L HLA-DRB1*08:01 L HLA-DQA1*01-B1*05L HLA-DQA1*05:05-B1*03:19L HLA-DQA1*05:01-B1* 02:01L HLA-DPA1*01:03-B1*04:01L HLA-DQA1*05:05-B1*03:116L HLA-DP A1*01:03-B1*04:02L HLA-DRB1*12:01L HLA-DPA1*02:01-B1*13:01L
  REGION 1..10: note = CONT. FROM ABOVE: HLA-DPA1*03:01-B1*105:01L HLA-DQA1*03:01-B1*03 :02L HLA-DQA1*05:05-B1*03:01L HLA-DPA1*01:02-B1*04:01L HLA-DRB1* 16:01L HLA-DQA1*01:03-B1*06:01L HLA-DQA1*02:01-B1*03:03L HLA-DRB 1*15:03L
TVYEKLKPVL

SEQ ID NO: 8351 - protein, 16 aa, Severe acute respiratory syndrome coronavirus 2
  REGION 1..16: note = Table B: HLA-DQA1*03:02-B1*03:03L HLA-DQA1*05:01-B1*03:01L HLA-DRB3*02:01L HLA-DPA1*01:03-B1*03:01L HLA-DRB1*11:02L HLA-DRB1*14:02L HLA-DQA1*05:05-B1*03:19L HLA-DPA1*01:03-B1*104:01L HLA-DQA1*05:05-B1*03:01L
  REGION 1..16: note = CONT. FROM ABOVE: HLA-DRB1*08:03L
KPVLDWLEEKFKEGVE

SEQ ID NO: 8352 - protein, 10 aa, Severe acute respiratory syndrome coronavirus 2
  REGION 1..10: note = Table B: HLA-DQA1*03:02-B1*03:03L HLA-DQA1*05:01-B1*03:01L HLA-DRB1*08:77L HLA-DPA1*01:03-B1*03:01L HLA-DPA1*03:01-B1*04:02L HLA-DRB1*03:01L HLA-DQA1*01-B1*05L HLA-DQA1*05:05-B1*03:19L HLA-DQA1*05:01-B1*02:01L
  REGION 1..10: note = CONT. FROM ABOVE: HLA-DRB4*01:01L HLA-DPA1*01:03-B1*04:01L HLA-D QA1*03:01-B1*03:02L HLA-DPA1*01:03-B1*104:01L HLA-DPA1*01:02-B1* 04:01L HLA-DRB1*10:01L HLA-DRB1*16:01L HLA-DRB1*15:03L
EEKFKEGVEF

SEQ ID NO: 8353 - protein, 15 aa, Severe acute respiratory syndrome coronavirus 2
  REGION 1..15: note = Table B: HLA-DQA1*03:02-B1*03:03L HLA-DQA1*05:01-B1*03:01L HLA-DRB1*13:03L HLA-DQA1*01:01-B1*05:01L HLA-DQA1*05:05-B1*03:19L HLA-DPA1*01:03-B1*04:01L HLA-DRB3*01:01L HLA-DQA1*05:05-B1*03:01L
EKFKEGVEFLRDGWE

SEQ ID NO: 8354 - protein, 10 aa, Severe acute respiratory syndrome coronavirus 2
  REGION 1..10: note = Table B: HLA-DQA1*03:02-B1*03:03M HLA-DRB1*11:02L HLA-DQA1*05:05-B1*03:19H HLA-DQA1*05:01-B1*02:01L HLA-DRB1*09:01L HLA-DQA1*03:01-B1*03:02L HLA-DPA1*01:03-B1*104:01M
VEFLRDGWEI

SEQ ID NO: 8355 - protein, 11 aa, Severe acute respiratory syndrome coronavirus 2
  REGION 1..11: note = Table B: HLA-DQA1*03:02-B1*03:03L HLA-DQA1*05:01-B1*03:01L HLA-DRB1*04:03L HLA-DRB1*13:02L HLA-DRB1*13:03L HLA-DRB1*04:02L HLA-DRB1*04:05L HLA-DQA1*01:02-B1*06:02L HLA-DRB1*01:02L HLA-DRB4*03:01NL HLA-DRB1*08:04L HLA-DPA1*01:03-B1*03:01L
  REGION 1..11: note = CONT. FROM ABOVE: HLA-DRB1*14:01L HLA-DRB1*11:04L HLA-DRB1*08:01 L HLA-DRB1*11:01L HLA-DQA1*05:05-B1*03:19L HLA-DQA1*05:01-B1*02: 01L HLA-DRB1*12:01L HLA-DPA1*02:01-B1*13:01L HLA-DQA1*03:01-B1*0 3:02L HLA-DRB1*14:54L HLA-DPA1*01:03-B1*02:01L
  REGION 1..11: note = CONT. FROM ABOVE: HLA-DPA1*01:03-B1*104:01L HLA-DQA1*05:05-B1*03 :01L HLA-DRB1*14:17L HLA-DQA1*02:01-B1*03:03L HLA-DRB1*15:03L
DGWEIVKFIST

SEQ ID NO: 8356 - protein, 16 aa, Severe acute respiratory syndrome coronavirus 2
  REGION 1..16: note = Table B: HLA-DQA1*03:02-B1*03:03L HLA-DRB1*04:03L HLA-DRB3*02:01L HLA-DRB1*11:02L HLA-DRB1*14:02L HLA-DQA1*05:01-B1*02:01L HLA-DPA1*01:03-B1*04:01L HLA-DRB1*10:01L
IVKFISTCACEIVGGQ

SEQ ID NO: 8357 - protein, 10 aa, Severe acute respiratory syndrome coronavirus 2
  REGION 1..10: note = Table B: HLA-DQA1*03:02-B1*03:03L HLA-DQA1*01:02-B1*06:02L HLA-DPA1*03:01-B1*105:01L HLA-DQA1*01:03-B1*06:01L HLA-DRB1*15:03L
EIVGGQIVTC

SEQ ID NO: 8358 - protein, 11 aa, Severe acute respiratory syndrome coronavirus 2
  REGION 1..11: note = Table B: HLA-DQA1*03:02-B1*03:03L HLA-DQA1*05:01-B1*03:01L HLA-DQA1*01:02-B1*06:02L HLA-DQA1*05:05-B1*03:19L HLA-DPA1*03:01-B1*105:01L HLA-DQA1*03:01-B1*03:02L HLA-DQA1*05:05-B1*03:01L HLA-DQA1*02:01-B1*03:03L
IVGGQIVTCAK

SEQ ID NO: 8359 - protein, 10 aa, Severe acute respiratory syndrome coronavirus 2
  REGION 1..10: note = Table B: HLA-DQA1*03:02-B1*03:03M HLA-DQA1*05:01-B1*03:01H HLA-DRB1*04:01L HLA-DRB1*13:02L HLA-DRB1*13:03L HLA-DRB1*01:03M HLA-DRB1*04:02L HLA-DRB1*04:05L HLA-DQA1*01:02-B1*06:02L HLA-DRB4*03:01NM HLA-DRB1*08:77H HLA-DPA1*01:03-B1*03:01L
  REGION 1..10: note = CONT. FROM ABOVE: HLA-DPA1*03:01-B1*04:02M HLA-DRB1*03:01M HLA-D RB1*14:01L HLA-DRB1*11:02L HLA-DRB1*14:02L HLA-DRB1*11:01L HLA-D QA1*01-B1*05M HLA-DQA1*05:05-B1*03:19M HLA-DQA1*05:01-B1*02:01M HLA-DRB4*01:01M HLA-DPA1*01:03-B1*04:01H
  REGION 1..10: note = CONT. FROM ABOVE: HLA-DQA1*05:05-B1*03:116M HLA-DRB1*09:01L HLA- DPA1*01:03-B1*04:02M HLA-DRB1*12:01L HLA-DPA1*02:01-B1*13:01L HL A-DPA1*03:01-B1*105:01L HLA-DQA1*03:01-B1*03:02M HLA-DPA1*01:03- B1*104:01L HLA-DPA1*01:02-B1*04:01M HLA-DRB1*10:01M
  REGION 1..10: note = CONT. FROM ABOVE: HLA-DRB1*16:01M HLA-DQA1*01:03-B1*06:01L HLA-D RB1*08:02L HLA-DQA1*02:01-B1*03:03M HLA-DRB1*15:03M
KEIKESVQTF

SEQ ID NO: 8360 - protein, 10 aa, Severe acute respiratory syndrome coronavirus 2
  REGION 1..10: note = Table B: HLA-DQA1*03:02-B1*03:03L HLA-DQA1*05:01-B1*03:01L HLA-DRB1*13:03L HLA-DRB1*01:03L HLA-DQA1*01:02-B1*06:02M HLA-DRB1*08:77L HLA-DPA1*01:03-B1*03:01L HLA-DPA1*03:01-B1*04:02L HLA-DRB1*03:01L HLA-DRB1*14:01L
  REGION 1..10: note = CONT. FROM ABOVE: HLA-DRB1*14:02L HLA-DQA1*05:05-B1*03:19L HLA-D QA1*05:01-B1*02:01L HLA-DPA1*01:03-B1*04:01L HLA-DRB1*12:01L HLA -DPA1*02:01-B1*13:01L HLA-DPA1*03:01-B1*105:01L HLA-DQA1*05:05-B 1*03:01L HLA-DPA1*01:02-B1*04:01L HLA-DQA1*01:03-B1*06:01L
  REGION 1..10: note = CONT. FROM ABOVE: HLA-DQA1*02:01-B1*03:03L HLA-DRB1*15:03L
EIKESVQTFF

SEQ ID NO: 8361 - protein, 10 aa, Severe acute respiratory syndrome coronavirus 2
  REGION 1..10: note = Table B: HLA-DQA1*03:02-B1*03:03L HLA-DQA1*05:05-B1*03:19M HLA-DQA1*03:01-B1*03:02L HLA-DPA1*01:03-B1*104:01L
KESVQTFFKL

SEQ ID NO: 8362 - protein, 10 aa, Severe acute respiratory syndrome coronavirus 2
  REGION 1..10: note = Table B: HLA-DQA1*03:02-B1*03:03L HLA-DQA1*05:01-B1*03:01L HLA-DRB1*01:03L HLA-DQA1*01:02-B1*06:02L HLA-DRB1*14:02L HLA-DQA1*05:05-B1*03:19L HLA-DQA1*05:01-B1*02:01L HLA-DPA1*01:03-B1*04:01L HLA-DPA1*02:01-B1*13:01L
  REGION 1..10: note = CONT. FROM ABOVE: HLA-DPA1*03:01-B1*105:01L HLA-DQA1*03:01-B1*03 :02L HLA-DPA1*01:02-B1*04:01L HLA-DRB1*16:01L HLA-DQA1*01:03-B1* 06:01L HLA-DQA1*02:01-B1*03:03L HLA-DRB1*15:03L
QTFFKLVNKF

SEQ ID NO: 8363 - protein, 10 aa, Severe acute respiratory syndrome coronavirus 2
  REGION 1..10: note = Table B: HLA-DQA1*03:02-B1*03:03L HLA-DRB1*04:03L HLA-DQA1*03:01-B1*03:02L HLA-DQA1*01:03-B1*06:01L HLA-DQA1*02:01-B1*03:03L
ADSIIIGGAK

SEQ ID NO: 8364 - protein, 10 aa, Severe acute respiratory syndrome coronavirus 2
  REGION 1..10: note = Table B: HLA-DQA1*03:02-B1*03:03L HLA-DQA1*05:01-B1*03:01L HLA-DRB1*13:03L HLA-DQA1*01:02-B1*06:02L HLA-DRB1*01:02L HLA-DPA1*03:01-B1*04:02L HLA-DRB1*14:01L HLA-DRB1*08:01L HLA-DQA1*05:05-B1*03:19L HLA-DQA1*05:01-B1*02:01L
  REGION 1..10: note = CONT. FROM ABOVE: HLA-DPA1*01:03-B1*04:01L HLA-DRB1*12:01L HLA-D PA1*03:01-B1*105:01L HLA-DQA1*03:01-B1*03:02L HLA-DPA1*01:02-B1* 04:01L HLA-DQA1*01:03-B1*06:01L HLA-DQA1*02:01-B1*03:03L HLA-DRB 1*15:03L
DSIIIGGAKL

SEQ ID NO: 8365 - protein, 11 aa, Severe acute respiratory syndrome coronavirus 2
  REGION 1..11: note = Table B: HLA-DQA1*03:02-B1*03:03L HLA-DQA1*01:02-B1*06:02L HLA-DPA1*03:01-B1*04:02L HLA-DQA1*05:05-B1*03:19L HLA-DQA1*05:01-B1*02:01L HLA-DPA1*03:01-B1*105:01L HLA-DQA1*05:05-B1*03:01L
IIIGGAKLKAL

SEQ ID NO: 8366 - protein, 11 aa, Severe acute respiratory syndrome coronavirus 2
  REGION 1..11: note = Table B: HLA-DQA1*03:02-B1*03:03L HLA-DRB1*04:03L HLA-DRB1*01:03L HLA-DRB1*04:02L HLA-DRB1*01:02L HLA-DQA1*05:05-B1*03:19L HLA-DPA1*01:03-B1*04:02L HLA-DRB1*12:01L HLA-DQA1*03:01-B1*03:02L HLA-DRB1*14:17L
  REGION 1..11: note = CONT. FROM ABOVE: HLA-DPA1*01:02-B1*04:01L HLA-DRB1*16:01L HLA-D RB1*04:08L HLA-DRB1*15:03L
IIGGAKLKALN

SEQ ID NO: 8367 - protein, 10 aa, Severe acute respiratory syndrome coronavirus 2
  REGION 1..10: note = Table B: HLA-DQA1*03:02-B1*03:03L HLA-DQA1*03:01-B1*03:02L HLA-DQA1*02:01-B1*03:03L
GETFVTHSKG

SEQ ID NO: 8368 - protein, 10 aa, Severe acute respiratory syndrome coronavirus 2
  REGION 1..10: note = Table B: HLA-DQA1*03:02-B1*03:03L HLA-DQA1*05:01-B1*03:01L HLA-DRB1*13:03L HLA-DQA1*01:02-B1*06:02L HLA-DRB1*01:02L HLA-DPA1*01:03-B1*03:01L HLA-DRB1*14:01L HLA-DQA1*05:01-B1*02:01L HLA-DPA1*01:03-B1*04:01L
  REGION 1..10: note = CONT. FROM ABOVE: HLA-DRB1*12:01L HLA-DPA1*03:01-B1*105:01L HLA- DQA1*03:01-B1*03:02L HLA-DQA1*05:05-B1*03:01L HLA-DPA1*01:02-B1* 04:01L HLA-DQA1*01:03-B1*06:01L HLA-DQA1*02:01-B1*03:03L HLA-DRB 1*15:03L
ETFVTHSKGL

SEQ ID NO: 8369 - protein, 10 aa, Severe acute respiratory syndrome coronavirus 2
  REGION 1..10: note = Table B: HLA-DQA1*03:02-B1*03:03L HLA-DQA1*05:05-B1*03:19L HLA-DRB1*09:01L HLA-DQA1*03:01-B1*03:02L
REETGLLMPL

SEQ ID NO: 8370 - protein, 10 aa, Severe acute respiratory syndrome coronavirus 2
  REGION 1..10: note = Table B: HLA-DQA1*03:02-B1*03:03L HLA-DQA1*05:01-B1*03:01L HLA-DRB1*04:03L HLA-DRB1*13:03L HLA-DRB1*01:03L HLA-DRB1*04:02L HLA-DQA1*01:02-B1*06:02M HLA-DRB1*01:02L HLA-DRB4*03:01NL HLA-DRB1*14:02L HLA-DQA1*01:01-B1*05:01L HLA-DRB1*08:01L
  REGION 1..10: note = CONT. FROM ABOVE: HLA-DQA1*05:05-B1*03:19L HLA-DRB4*02:01NL HLA- DQA1*05:01-B1*02:01L HLA-DPA1*01:03-B1*04:02L HLA-DRB1*12:01L HL A-DPA1*03:01-B1*105:01L HLA-DQA1*03:01-B1*03:02L HLA-DQA1*05:05- B1*03:01M HLA-DPA1*01:02-B1*04:01L HLA-DRB1*16:01L
  REGION 1..10: note = CONT. FROM ABOVE: HLA-DQA1*01:03-B1*06:01M HLA-DRB1*04:08L HLA-D QA1*02:01-B1*03:03M
EETGLLMPLK

SEQ ID NO: 8371 - protein, 12 aa, Severe acute respiratory syndrome coronavirus 2
  REGION 1..12: note = Table B: HLA-DQA1*03:02-B1*03:03L HLA-DRB1*14:04L HLA-DRB1*13:02L HLA-DRB1*08:04L HLA-DRB1*08:77L HLA-DRB3*02:01L HLA-DPA1*01:03-B1*03:01L HLA-DPA1*03:01-B1*04:02L HLA-DRB1*11:03L HLA-DRB1*11:04L HLA-DQA1*01:01-B1*05:01L
  REGION 1..12: note = CONT. FROM ABOVE: HLA-DQA1*01-B1*05L HLA-DQA1*05:05-B1*03:19L HL A-DQA1*05:01-B1*02:01L HLA-DRB1*09:01L HLA-DRB1*12:02L HLA-DPA1* 02:01-B1*13:01L HLA-DPA1*03:01-B1*105:01L HLA-DQA1*05:05-B1*03:0 1L HLA-DRB1*07:01L HLA-DRB1*10:01L HLA-DRB1*08:03L
TGLLMPLKAPKE

SEQ ID NO: 8372 - protein, 11 aa, Severe acute respiratory syndrome coronavirus 2
  REGION 1..11: note = Table B: HLA-DQA1*03:02-B1*03:03L
KEIIFLEGETL

SEQ ID NO: 8373 - protein, 10 aa, Severe acute respiratory syndrome coronavirus 2
  REGION 1..10: note = Table B: HLA-DQA1*03:02-B1*03:03L HLA-DRB1*11:02L HLA-DQA1*05:05-B1*03:19M HLA-DRB1*09:01L HLA-DQA1*03:01-B1*03:02L HLA-DPA1*01:03-B1*104:01L
LEGETLPTEV

SEQ ID NO: 8374 - protein, 10 aa, Severe acute respiratory syndrome coronavirus 2
  REGION 1..10: note = Table B: HLA-DQA1*03:02-B1*03:03L HLA-DQA1*03:01-B1*03:02L
EGETLPTEVL

SEQ ID NO: 8375 - protein, 13 aa, Severe acute respiratory syndrome coronavirus 2
  REGION 1..13: note = Table B: HLA-DQA1*03:02-B1*03:03L HLA-DQA1*01:03-B1*06:01L
ETLPTEVLTEEVV

SEQ ID NO: 8376 - protein, 10 aa, Severe acute respiratory syndrome coronavirus 2
  REGION 1..10: note = Table B: HLA-DQA1*03:02-B1*03:03M HLA-DQA1*05:05-B1*03:19L HLA-DRB1*09:01L HLA-DQA1*03:01-B1*03:02L
TEVLTEEVVL

SEQ ID NO: 8377 - protein, 10 aa, Severe acute respiratory syndrome coronavirus 2
  REGION 1..10: note = Table B: HLA-DQA1*03:02-B1*03:03L HLA-DQA1*03:01-B1*03:02L
TEEVVLKTGD

SEQ ID NO: 8378 - protein, 10 aa, Severe acute respiratory syndrome coronavirus 2
  REGION 1..10: note = Table B: HLA-DQA1*03:02-B1*03:03L HLA-DQA1*05:05-B1*03:19L HLA-DQA1*03:01-B1*03:02L
EEVVLKTGDL

SEQ ID NO: 8379 - protein, 11 aa, Severe acute respiratory syndrome coronavirus 2
  REGION 1..11: note = Table B: HLA-DQA1*03:02-B1*03:03L HLA-DQA1*05:01-B1*03:01L HLA-DQA1*05:05-B1*03:19L HLA-DQA1*05:01-B1*02:01L HLA-DQA1*03:01-B1*03:02L HLA-DQA1*05:05-B1*03:01L HLA-DRB1*16:01L
VLKTGDLQPLE

SEQ ID NO: 8380 - protein, 13 aa, Severe acute respiratory syndrome coronavirus 2
  REGION 1..13: note = Table B: HLA-DQA1*03:02-B1*03:03L
LKTGDLQPLEQPT

SEQ ID NO: 8381 - protein, 12 aa, Severe acute respiratory syndrome coronavirus 2
  REGION 1..12: note = Table B: HLA-DQA1*03:02-B1*03:03L HLA-DRB1*13:03L HLA-DRB1*14:01L HLA-DRB1*12:01L HLA-DRB1*12:02L HLA-DRB1*14:54L HLA-DQA1*02:01-B1*03:03L
TGDLQPLEQPTS

SEQ ID NO: 8382 - protein, 12 aa, Severe acute respiratory syndrome coronavirus 2
  REGION 1..12: note = Table B: HLA-DQA1*03:02-B1*03:03L HLA-DRB1*13:03L HLA-DRB1*01:03L HLA-DRB1*12:01L HLA-DRB1*12:02L HLA-DRB1*14:54L HLA-DQA1*05:05-B1*03:01L HLA-DRB1*10:01L HLA-DRB1*04:08L HLA-DQA1*02:01-B1*03:03L
GDLQPLEQPTSE

SEQ ID NO: 8383 - protein, 12 aa, Severe acute respiratory syndrome coronavirus 2
  REGION 1..12: note = Table B: HLA-DQA1*03:02-B1*03:03L HLA-DRB1*04:02L HLA-DQA1*05:01-B1*02:01L HLA-DRB1*04:10L HLA-DQA1*02:01-B1*03:03L
DLQPLEQPTSEA

SEQ ID NO: 8384 - protein, 12 aa, Severe acute respiratory syndrome coronavirus 2
  REGION 1..12: note = Table B: HLA-DQA1*03:02-B1*03:03L HLA-DQA1*05:01-B1*02:01L HLA-DQA1*03:01-B1*03:02L HLA-DQA1*02:01-B1*03:03L
QPLEQPTSEAVE

SEQ ID NO: 8385 - protein, 12 aa, Severe acute respiratory syndrome coronavirus 2
  REGION 1..12: note = Table B: HLA-DQA1*03:02-B1*03:03L HLA-DQA1*05:01-B1*02:01L HLA-DQA1*03:01-B1*03:02L
EQPTSEAVEAPL

SEQ ID NO: 8386 - protein, 12 aa, Severe acute respiratory syndrome coronavirus 2
  REGION 1..12: note = Table B: HLA-DQA1*03:02-B1*03:03L HLA-DQA1*05:01-B1*02:01L HLA-DQA1*03:01-B1*03:02L HLA-DQA1*01:03-B1*06:01L HLA-DQA1*02:01-B1*03:03L
PTSEAVEAPLVG

SEQ ID NO: 8387 - protein, 10 aa, Severe acute respiratory syndrome coronavirus 2
  REGION 1..10: note = Table B: HLA-DQA1*03:02-B1*03:03L HLA-DQA1*05:05-B1*03:19L HLA-DQA1*03:01-B1*03:02L HLA-DPA1*01:03-B1*104:01L
VEAPLVGTPV

SEQ ID NO: 8388 - protein, 12 aa, Severe acute respiratory syndrome coronavirus 2
  REGION 1..12: note = Table B: HLA-DQA1*03:02-B1*03:03L HLA-DQA1*05:01-B1*03:01L HLA-DRB1*04:03L HLA-DRB1*01:03L HLA-DRB1*04:02L HLA-DRB1*04:05L HLA-DQA1*01:02-B1*06:02L HLA-DRB1*01:02L HLA-DPA1*01:03-B1*03:01L HLA-DPA1*03:01-B1*04:02L
  REGION 1..12: note = CONT. FROM ABOVE: HLA-DQA1*01-B1*05L HLA-DQA1*05:05-B1*03:19L HL A-DQA1*05:01-B1*02:01L HLA-DPA1*01:03-B1*04:01L HLA-DPA1*01:03-B 1*04:02L HLA-DRB1*12:01L HLA-DPA1*02:01-B1*13:01L HLA-DPA1*03:01 -B1*105:01L HLA-DQA1*03:01-B1*03:02L HLA-DPA1*01:03-B1*104:01L
  REGION 1..12: note = CONT. FROM ABOVE: HLA-DQA1*05:05-B1*03:01L HLA-DRB1*14:17L HLA-D PA1*01:02-B1*04:01L HLA-DRB1*16:01L HLA-DQA1*01:03-B1*06:01L HLA -DRB1*04:08L HLA-DQA1*02:01-B1*03:03L HLA-DRB1*15:03L
APLVGTPVCING

SEQ ID NO: 8389 - protein, 13 aa, Severe acute respiratory syndrome coronavirus 2
  REGION 1..13: note = Table B: HLA-DQA1*03:02-B1*03:03L HLA-DRB1*04:03L HLA-DRB1*01:02L HLA-DPA1*01:03-B1*03:01L HLA-DQA1*01-B1*05L HLA-DQA1*05:01-B1*02:01L HLA-DPA1*01:03-B1*04:01L HLA-DRB1*12:01L HLA-DRB1*16:01L HLA-DRB1*15:03L
INGLMLLEIKDTE

SEQ ID NO: 8390 - protein, 10 aa, Severe acute respiratory syndrome coronavirus 2
  REGION 1..10: note = Table B: HLA-DQA1*03:02-B1*03:03L HLA-DQA1*05:01-B1*03:01L HLA-DRB1*04:03L HLA-DRB1*13:02L HLA-DRB1*13:03L HLA-DRB1*01:03L HLA-DQA1*01:02-B1*06:02L HLA-DRB1*08:77L HLA-DPA1*01:03-B1*03:01M HLA-DPA1*03:01-B1*04:02L
  REGION 1..10: note = CONT. FROM ABOVE: HLA-DRB1*03:01L HLA-DRB1*11:02L HLA-DRB1*14:02 L HLA-DQA1*01-B1*05L HLA-DQA1*05:05-B1*03:19M HLA-DQA1*05:01-B1* 02:01M HLA-DRB4*01:01L HLA-DPA1*01:03-B1*04:01L HLA-DQA1*05:05-B 1*03:116L HLA-DPA1*01:03-B1*04:02L HLA-DRB1*12:01L
  REGION 1..10: note = CONT. FROM ABOVE: HLA-DPA1*03:01-B1*105:01L HLA-DQA1*03:01-B1*03 :02L HLA-DPA1*01:03-B1*104:01M HLA-DPA1*01:02-B1*04:01L HLA-DRB1 *10:01L HLA-DRB1*16:01M HLA-DQA1*01:03-B1*06:01L HLA-DRB1*08:02L HLA-DQA1*02:01-B1*03:03L HLA-DRB1*15:03L
LLEIKDTEKY

SEQ ID NO: 8391 - protein, 15 aa, Severe acute respiratory syndrome coronavirus 2
  REGION 1..15: note = Table B: HLA-DQA1*03:02-B1*03:03L HLA-DRB1*04:03L HLA-DRB1*13:03L HLA-DRB1*04:02L HLA-DRB1*01:01L HLA-DRB3*02:01L HLA-DRB1*03:01L HLA-DRB1*11:02L HLA-DRB1*11:03L HLA-DRB1*14:02L HLA-DQA1*01:01-B1*05:01L HLA-DQA1*01-B1*05L
  REGION 1..15: note = CONT. FROM ABOVE: HLA-DQA1*05:05-B1*03:19L HLA-DRB1*08:02L HLA-D RB1*08:03L
LEIKDTEKYCALAPN

SEQ ID NO: 8392 - protein, 12 aa, Severe acute respiratory syndrome coronavirus 2
  REGION 1..12: note = Table B: HLA-DQA1*03:02-B1*03:03L HLA-DQA1*05:01-B1*03:01L HLA-DQA1*01:02-B1*06:02L HLA-DPA1*01:03-B1*03:01L HLA-DPA1*03:01-B1*04:02L HLA-DQA1*05:05-B1*03:19L HLA-DPA1*01:03-B1*04:02L HLA-DQA1*05:05-B1*03:01L
  REGION 1..12: note = CONT. FROM ABOVE: HLA-DQA1*02:01-B1*03:03L
DTEKYCALAPNM

SEQ ID NO: 8393 - protein, 12 aa, Severe acute respiratory syndrome coronavirus 2
  REGION 1..12: note = Table B: HLA-DQA1*03:02-B1*03:03L HLA-DQA1*05:01-B1*03:01L HLA-DRB1*01:02L HLA-DPA1*01:03-B1*03:01L HLA-DPA1*03:01-B1*04:02L HLA-DQA1*05:05-B1*03:19L HLA-DQA1*05:01-B1*02:01L HLA-DRB1*12:01L
  REGION 1..12: note = CONT. FROM ABOVE: HLA-DPA1*02:01-B1*13:01L HLA-DPA1*03:01-B1*105 :01L HLA-DQA1*03:01-B1*03:02L HLA-DPA1*01:03-B1*104:01L HLA-DQA1 *05:05-B1*03:01L HLA-DRB1*16:01L HLA-DQA1*02:01-B1*03:03L HLA-DR B1*15:03L
TEKYCALAPNMM

SEQ ID NO: 8394 - protein, 12 aa, Severe acute respiratory syndrome coronavirus 2
  REGION 1..12: note = Table B: HLA-DQA1*03:02-B1*03:03L HLA-DRB1*04:03L HLA-DRB1*01:03L HLA-DRB1*04:02L HLA-DRB1*04:05L HLA-DRB4*03:01NL HLA-DPA1*01:03-B1*03:01L HLA-DRB1*14:01L HLA-DQA1*01:01-B1*05:01L HLA-DQA1*01-B1*05L
  REGION 1..12: note = CONT. FROM ABOVE: HLA-DQA1*05:05-B1*03:19L HLA-DRB1*04:10L HLA-D RB1*12:01L HLA-DRB1*12:02L HLA-DQA1*03:01-B1*03:02L HLA-DRB1*14: 54L HLA-DQA1*05:05-B1*03:01L HLA-DRB1*14:17L HLA-DRB1*16:01L HLA -DRB1*04:08L
APNMMVTNNTFT

SEQ ID NO: 8395 - protein, 10 aa, Severe acute respiratory syndrome coronavirus 2
  REGION 1..10: note = Table B: HLA-DQA1*03:02-B1*03:03L HLA-DQA1*03:01-B1*03:02L HLA-DQA1*02:01-B1*03:03L HLA-DRB1*15:03L
MMVTNNTFTL

SEQ ID NO: 8396 - protein, 12 aa, Severe acute respiratory syndrome coronavirus 2
  REGION 1..12: note = Table B: HLA-DQA1*03:02-B1*03:03L HLA-DQA1*05:01-B1*03:01L HLA-DRB1*13:02L HLA-DQA1*01:02-B1*06:02L HLA-DRB1*01:02L HLA-DRB1*08:04L HLA-DRB1*08:77L HLA-DRB1*14:01L HLA-DRB1*11:03L HLA-DRB1*11:04L HLA-DRB1*14:02L HLA-DQA1*01:01-B1*05:01L
  REGION 1..12: note = CONT. FROM ABOVE: HLA-DRB1*11:01L HLA-DQA1*05:05-B1*03:19L HLA-D QA1*05:01-B1*02:01L HLA-DRB1*04:10L HLA-DRB1*12:01L HLA-DRB1*12: 02L HLA-DPA1*03:01-B1*105:01L HLA-DQA1*05:05-B1*03:01L HLA-DRB1* 10:01L HLA-DQA1*01:03-B1*06:01L HLA-DRB1*04:08L HLA-DRB1*08:03L
NNTFTLKGGAPT

SEQ ID NO: 8397 - protein, 10 aa, Severe acute respiratory syndrome coronavirus 2
  REGION 1..10: note = Table B: HLA-DQA1*03:02-B1*03:03L HLA-DQA1*03:01-B1*03:02L HLA-DRB1*16:01L HLA-DQA1*02:01-B1*03:03L
TLKGGAPTKV

SEQ ID NO: 8398 - protein, 12 aa, Severe acute respiratory syndrome coronavirus 2
  REGION 1..12: note = Table B: HLA-DQA1*03:02-B1*03:03L HLA-DQA1*05:01-B1*03:01L HLA-DQA1*01:02-B1*06:02L HLA-DQA1*05:05-B1*03:19L HLA-DQA1*05:05-B1*03:01L HLA-DQA1*01:03-B1*06:01L HLA-DQA1*02:01-B1*03:03L
GGAPTKVTFGDD

SEQ ID NO: 8399 - protein, 12 aa, Severe acute respiratory syndrome coronavirus 2
  REGION 1..12: note = Table B: HLA-DQA1*03:02-B1*03:03L
GAPTKVTFGDDT

SEQ ID NO: 8400 - protein, 14 aa, Severe acute respiratory syndrome coronavirus 2
  REGION 1..14: note = Table B: HLA-DQA1*03:02-B1*03:03L HLA-DQA1*05:01-B1*03:01L HLA-DRB1*04:03L HLA-DRB1*13:02L HLA-DRB1*13:03L HLA-DRB1*01:03L HLA-DRB1*04:02L HLA-DRB1*04:04L HLA-DRB1*04:05L HLA-DQA1*01:02-B1*06:02L HLA-DRB1*01:02L HLA-DRB4*03:01NL
  REGION 1..14: note = CONT. FROM ABOVE: HLA-DRB1*08:04L HLA-DRB3*02:01L HLA-DPA1*01:03 -B1*03:01L HLA-DPA1*03:01-B1*04:02L HLA-DRB1*14:01L HLA-DRB1*14: 02L HLA-DQA1*01:01-B1*05:01L HLA-DRB1*08:01L HLA-DQA1*05:05-B1*0 3:19L HLA-DPA1*01:03-B1*04:01L HLA-DRB1*04:10L
  REGION 1..14: note = CONT. FROM ABOVE: HLA-DPA1*01:03-B1*04:02L HLA-DRB1*12:01L HLA-D RB1*12:02L HLA-DRB3*01:01L HLA-DPA1*02:01-B1*13:01L HLA-DPA1*03: 01-B1*105:01L HLA-DRB1*14:54L HLA-DPA1*01:03-B1*104:01L HLA-DQA1 *05:05-B1*03:01L HLA-DRB1*14:17L HLA-DPA1*01:02-B1*04:01L
  REGION 1..14: note = CONT. FROM ABOVE: HLA-DRB1*07:01L HLA-DRB1*16:01L HLA-DQA1*01:03 -B1*06:01L HLA-DRB1*04:08L HLA-DRB1*08:03L HLA-DRB1*15:03L
APTKVTFGDDTVIE

SEQ ID NO: 8401 - protein, 11 aa, Severe acute respiratory syndrome coronavirus 2
  REGION 1..11: note = Table B: HLA-DQA1*03:02-B1*03:03L
VTFGDDTVIEV

SEQ ID NO: 8402 - protein, 11 aa, Severe acute respiratory syndrome coronavirus 2
  REGION 1..11: note = Table B: HLA-DQA1*03:02-B1*03:03L HLA-DRB1*04:03L HLA-DQA1*01:01-B1*05:01L
DDTVIEVQGYK

SEQ ID NO: 8403 - protein, 11 aa, Severe acute respiratory syndrome coronavirus 2
  REGION 1..11: note = Table B: HLA-DQA1*03:02-B1*03:03L HLA-DQA1*05:01-B1*02:01L
DTVIEVQGYKS

SEQ ID NO: 8404 - protein, 11 aa, Severe acute respiratory syndrome coronavirus 2
  REGION 1..11: note = Table B: HLA-DQA1*03:02-B1*03:03L HLA-DQA1*05:05-B1*03:19L HLA-DPA1*01:03-B1*104:01L HLA-DRB1*15:03L
TVIEVQGYKSV

SEQ ID NO: 8405 - protein, 10 aa, Severe acute respiratory syndrome coronavirus 2
  REGION 1..10: note = Table B: HLA-DQA1*03:02-B1*03:03L HLA-DRB1*04:03L HLA-DQA1*01-B1*05L HLA-DQA1*03:01-B1*03:02L HLA-DPA1*01:02-B1*04:01L HLA-DQA1*02:01-B1*03:03L
IEVQGYKSVN

SEQ ID NO: 8406 - protein, 10 aa, Severe acute respiratory syndrome coronavirus 2
  REGION 1..10: note = Table B: HLA-DQA1*03:02-B1*03:03L HLA-DQA1*01:02-B1*06:02L HLA-DRB1*01:02L HLA-DQA1*05:05-B1*03:19L HLA-DPA1*03:01-B1*105:01L HLA-DPA1*01:03-B1*104:01L HLA-DRB1*15:03L
EVQGYKSVNI

SEQ ID NO: 8407 - protein, 12 aa, Severe acute respiratory syndrome coronavirus 2
  REGION 1..12: note = Table B: HLA-DQA1*03:02-B1*03:03L HLA-DQA1*05:01-B1*03:01L HLA-DRB1*13:02L HLA-DRB1*01:02L HLA-DRB3*02:01L HLA-DPA1*01:03-B1*03:01L HLA-DPA1*03:01-B1*04:02L HLA-DRB1*14:01L HLA-DRB1*08:01L HLA-DQA1*05:05-B1*03:19L
  REGION 1..12: note = CONT. FROM ABOVE: HLA-DQA1*05:01-B1*02:01L HLA-DRB1*12:01L HLA-D QA1*05:05-B1*03:01L HLA-DRB1*14:17L HLA-DRB1*04:08L HLA-DRB1*15: 01L
VQGYKSVNITFE

SEQ ID NO: 8408 - protein, 10 aa, Severe acute respiratory syndrome coronavirus 2
  REGION 1..10: note = Table B: HLA-DQA1*03:02-B1*03:03L HLA-DRB1*04:03L HLA-DPA1*03:01-B1*04:02L HLA-DQA1*01-B1*05L HLA-DQA1*05:01-B1*02:01L HLA-DPA1*03:01-B1*105:01L HLA-DQA1*03:01-B1*03:02L HLA-DPA1*01:02-B1*04:01L
  REGION 1..10: note = CONT. FROM ABOVE: HLA-DRB1*16:01L HLA-DQA1*01:03-B1*06:01L HLA-D QA1*02:01-B1*03:03L HLA-DRB1*15:03L
ITFELDERID

SEQ ID NO: 8409 - protein, 10 aa, Severe acute respiratory syndrome coronavirus 2
  REGION 1..10: note = Table B: HLA-DQA1*03:02-B1*03:03M HLA-DQA1*05:01-B1*03:01L HLA-DRB1*13:02L HLA-DRB1*13:03L HLA-DQA1*01:02-B1*06:02L HLA-DRB1*01:02L HLA-DRB1*08:77L HLA-DPA1*03:01-B1*04:02L HLA-DRB1*03:01L HLA-DRB1*14:01L HLA-DRB1*11:02M HLA-DRB1*14:02L
  REGION 1..10: note = CONT. FROM ABOVE: HLA-DRB1*11:01L HLA-DQA1*05:05-B1*03:19H HLA-D QA1*05:01-B1*02:01L HLA-DRB4*01:01L HLA-DPA1*01:03-B1*04:01L HLA -DQA1*05:05-B1*03:116L HLA-DRB1*09:01L HLA-DPA1*01:03-B1*04:02L HLA-DPA1*02:01-B1*13:01L HLA-DPA1*03:01-B1*105:01L
  REGION 1..10: note = CONT. FROM ABOVE: HLA-DQA1*03:01-B1*03:02M HLA-DPA1*01:03-B1*104 :01M HLA-DPA1*01:02-B1*04:01L HLA-DRB1*10:01L HLA-DRB1*16:01L HL A-DQA1*01:03-B1*06:01L HLA-DRB1*08:03L HLA-DQA1*02:01-B1*03:03L HLA-DRB1*15:03L
FELDERIDKV

SEQ ID NO: 8410 - protein, 12 aa, Severe acute respiratory syndrome coronavirus 2
  REGION 1..12: note = Table B: HLA-DQA1*03:02-B1*03:03L HLA-DQA1*05:01-B1*03:01L HLA-DRB1*04:03L HLA-DQA1*01:02-B1*06:02L HLA-DRB1*01:02L HLA-DQA1*01-B1*05L HLA-DQA1*05:05-B1*03:19L HLA-DRB1*12:01L HLA-DQA1*03:01-B1*03:02L HLA-DQA1*05:05-B1*03:01L
  REGION 1..12: note = CONT. FROM ABOVE: HLA-DRB1*16:01L HLA-DQA1*01:03-B1*06:01L HLA-D RB1*15:03L
SAYTVELGTEVN

SEQ ID NO: 8411 - protein, 10 aa, Severe acute respiratory syndrome coronavirus 2
  REGION 1..10: note = Table B: HLA-DQA1*03:02-B1*03:03L HLA-DQA1*05:01-B1*03:01M HLA-DRB1*13:03L HLA-DRB1*01:03L HLA-DQA1*01:02-B1*06:02L HLA-DRB4*03:01NL HLA-DRB1*08:77M HLA-DPA1*01:03-B1*03:01L HLA-DPA1*03:01-B1*04:02M HLA-DRB1*03:01L HLA-DRB1*14:01L
  REGION 1..10: note = CONT. FROM ABOVE: HLA-DRB1*11:02L HLA-DRB1*14:02L HLA-DQA1*01-B1 *05L HLA-DQA1*05:05-B1*03:19L HLA-DQA1*05:01-B1*02:01L HLA-DRB4* 01:01M HLA-DPA1*01:03-B1*04:01M HLA-DQA1*05:05-B1*03:116L HLA-DR B1*09:01L HLA-DPA1*01:03-B1*04:02L HLA-DRB1*12:01L
  REGION 1..10: note = CONT. FROM ABOVE: HLA-DPA1*02:01-B1*13:01L HLA-DQA1*03:01-B1*03: 02L HLA-DPA1*01:03-B1*104:01L HLA-DPA1*01:02-B1*04:01L HLA-DRB1* 10:01L HLA-DRB1*16:01L HLA-DQA1*02:01-B1*03:03L HLA-DRB1*15:03M
VELGTEVNEF

SEQ ID NO: 8412 - protein, 10 aa, Severe acute respiratory syndrome coronavirus 2
  REGION 1..10: note = Table B: HLA-DQA1*03:02-B1*03:03L HLA-DQA1*05:05-B1*03:19M HLA-DPA1*01:03-B1*104:01L
TEVNEFACVV

SEQ ID NO: 8413 - protein, 12 aa, Severe acute respiratory syndrome coronavirus 2
  REGION 1..12: note = Table B: HLA-DQA1*03:02-B1*03:03L HLA-DQA1*05:01-B1*03:01L HLA-DRB1*01:03L HLA-DRB1*04:05L HLA-DRB1*01:02L HLA-DPA1*01:03-B1*03:01L HLA-DQA1*05:05-B1*03:19L HLA-DQA1*05:01-B1*02:01L HLA-DRB1*12:01L
  REGION 1..12: note = CONT. FROM ABOVE: HLA-DPA1*03:01-B1*105:01L HLA-DQA1*03:01-B1*03 :02L HLA-DQA1*05:05-B1*03:01L HLA-DRB1*16:01L HLA-DRB1*04:08L HL A-DRB1*15:03L
EFACVVADAVIK

SEQ ID NO: 8414 - protein, 10 aa, Severe acute respiratory syndrome coronavirus 2
  REGION 1..10: note = Table B: HLA-DQA1*03:02-B1*03:03M HLA-DQA1*05:01-B1*03:01M HLA-DRB1*04:01L HLA-DRB1*04:03L HLA-DRB1*13:02L HLA-DRB1*13:03L HLA-DRB1*01:03L HLA-DRB1*04:02L HLA-DRB1*04:04L HLA-DRB1*04:05L HLA-DQA1*01:02-B1*06:02M HLA-DRB1*01:01L HLA-DRB1*01:02L
  REGION 1..10: note = CONT. FROM ABOVE: HLA-DRB4*03:01NL HLA-DRB1*08:77L HLA-DRB3*02:0 1L HLA-DPA1*01:03-B1*03:01L HLA-DPA1*03:01-B1*04:02M HLA-DRB1*03 :01L HLA-DRB1*14:01L HLA-DRB1*11:02L HLA-DRB1*11:04L HLA-DRB1*14 :02M HLA-DRB1*08:01L HLA-DRB1*11:01L HLA-DRB5*01:01L
  REGION 1..10: note = CONT. FROM ABOVE: HLA-DQA1*01-B1*05L HLA-DQA1*05:05-B1*03:19L HL A-DQA1*05:01-B1*02:01M HLA-DRB4*01:01L HLA-DPA1*01:03-B1*04:01L HLA-DQA1*05:05-B1*03:116M HLA-DRB1*09:01L HLA-DPA1*01:03-B1*04:0 2M HLA-DRB1*12:01L HLA-DPA1*02:01-B1*13:01L
  REGION 1..10: note = CONT. FROM ABOVE: HLA-DPA1*03:01-B1*105:01M HLA-DQA1*03:01-B1*03 :02M HLA-DPA1*01:03-B1*104:01L HLA-DQA1*05:05-B1*03:01L HLA-DPA1 *01:02-B1*04:01L HLA-DRB1*07:01L HLA-DRB1*10:01L HLA-DRB1*16:01L HLA-DQA1*01:03-B1*06:01L HLA-DRB1*08:02L HLA-DRB1*08:03L
  REGION 1..10: note = CONT. FROM ABOVE: HLA-DQA1*02:01-B1*03:03M HLA-DRB1*15:03M
VVADAVIKTL

SEQ ID NO: 8415 - protein, 11 aa, Severe acute respiratory syndrome coronavirus 2
  REGION 1..11: note = Table B: HLA-DQA1*03:02-B1*03:03L HLA-DRB1*04:05L HLA-DQA1*01:02-B1*06:02L HLA-DRB4*03:01NL HLA-DQA1*05:01-B1*02:01L HLA-DRB1*04:10L HLA-DRB1*14:54L
DAVIKTLQPVS

SEQ ID NO: 8416 - protein, 10 aa, Severe acute respiratory syndrome coronavirus 2
  REGION 1..10: note = Table B: HLA-DQA1*03:02-B1*03:03L HLA-DQA1*05:01-B1*03:01L HLA-DRB1*04:03L HLA-DRB1*13:02L HLA-DRB1*13:03L HLA-DRB1*01:03L HLA-DRB1*04:02L HLA-DRB1*04:04L HLA-DRB1*04:05L HLA-DQA1*01:02-B1*06:02L HLA-DRB1*01:02L HLA-DRB4*03:01NL
  REGION 1..10: note = CONT. FROM ABOVE: HLA-DRB1*14:01L HLA-DQA1*01-B1*05L HLA-DQA1*05 :01-B1*02:01L HLA-DRB1*04:10L HLA-DRB1*12:01L HLA-DRB1*12:02L HL A-DPA1*03:01-B1*105:01L HLA-DQA1*03:01-B1*03:02L HLA-DRB1*14:54L HLA-DQA1*05:05-B1*03:01L HLA-DRB1*14:17L
  REGION 1..10: note = CONT. FROM ABOVE: HLA-DPA1*01:02-B1*04:01L HLA-DRB1*16:01L HLA-D QA1*01:03-B1*06:01L HLA-DRB1*04:08L HLA-DQA1*02:01-B1*03:03L HLA -DRB1*15:03L
VIKTLQPVSE

SEQ ID NO: 8417 - protein, 10 aa, Severe acute respiratory syndrome coronavirus 2
  REGION 1..10: note = Table B: HLA-DQA1*03:02-B1*03:03L HLA-DQA1*01-B1*05L HLA-DQA1*03:01-B1*03:02L
IKTLQPVSEL

SEQ ID NO: 8418 - protein, 10 aa, Severe acute respiratory syndrome coronavirus 2
  REGION 1..10: note = Table B: HLA-DQA1*03:02-B1*03:03L HLA-DQA1*03:01-B1*03:02L
KTLQPVSELL

SEQ ID NO: 8419 - protein, 12 aa, Severe acute respiratory syndrome coronavirus 2
  REGION 1..12: note = Table B: HLA-DQA1*03:02-B1*03:03L HLA-DRB1*04:02L HLA-DRB1*04:05L HLA-DQA1*01:02-B1*06:02L HLA-DRB4*03:01NL HLA-DRB1*04:10L HLA-DRB1*12:01L HLA-DPA1*03:01-B1*105:01L HLA-DRB1*14:54L HLA-DRB1*14:17L HLA-DRB1*16:01L HLA-DRB1*15:03L
LQPVSELLTPLG

SEQ ID NO: 8420 - protein, 10 aa, Severe acute respiratory syndrome coronavirus 2
  REGION 1..10: note = Table B: HLA-DQA1*03:02-B1*03:03L HLA-DPA1*03:01-B1*105:01L
ELLTPLGIDL

SEQ ID NO: 8421 - protein, 10 aa, Severe acute respiratory syndrome coronavirus 2
  REGION 1..10: note = Table B: HLA-DQA1*03:02-B1*03:03L HLA-DQA1*05:05-B1*03:19L HLA-DQA1*03:01-B1*03:02L
DEWSMATYYL

SEQ ID NO: 8422 - protein, 12 aa, Severe acute respiratory syndrome coronavirus 2
  REGION 1..12: note = Table B: HLA-DQA1*03:02-B1*03:03L HLA-DRB1*04:03L HLA-DPA1*03:01-B1*04:02L HLA-DRB1*14:02L HLA-DQA1*01-B1*05L HLA-DQA1*05:01-B1*02:01L HLA-DRB1*12:01L HLA-DPA1*03:01-B1*105:01L HLA-DQA1*03:01-B1*03:02L
  REGION 1..12: note = CONT. FROM ABOVE: HLA-DRB1*16:01L
ATYYLFDESGEF

SEQ ID NO: 8423 - protein, 10 aa, Severe acute respiratory syndrome coronavirus 2
  REGION 1..10: note = Table B: HLA-DQA1*03:02-B1*03:03L HLA-DQA1*05:01-B1*03:01L HLA-DRB1*04:01L HLA-DRB1*04:03L HLA-DRB1*13:02L HLA-DRB1*13:03L HLA-DRB1*01:03L HLA-DRB1*04:02L HLA-DRB1*04:04L HLA-DRB1*04:05L HLA-DQA1*01:02-B1*06:02L HLA-DRB1*01:01L HLA-DRB1*01:02L
  REGION 1..10: note = CONT. FROM ABOVE: HLA-DRB4*03:01NL HLA-DRB1*08:04L HLA-DRB1*08:7 7L HLA-DRB3*02:01L HLA-DPA1*01:03-B1*03:01L HLA-DPA1*03:01-B1*04 :02L HLA-DRB1*03:01L HLA-DRB1*14:01L HLA-DRB1*11:03L HLA-DRB1*11 :04L HLA-DRB1*14:02M HLA-DQA1*01:01-B1*05:01L HLA-DRB1*08:01L
  REGION 1..10: note = CONT. FROM ABOVE: HLA-DRB1*11:01L HLA-DRB5*01:01L HLA-DQA1*01-B1 *05L HLA-DQA1*05:05-B1*03:19L HLA-DQA1*05:01-B1*02:01L HLA-DRB1* 13:01L HLA-DRB4*01:01L HLA-DPA1*01:03-B1*04:01L HLA-DRB1*04:10L HLA-DRB1*09:01L HLA-DPA1*01:03-B1*04:02L HLA-DRB1*12:01L
  REGION 1..10: note = CONT. FROM ABOVE: HLA-DRB1*12:02L HLA-DRB3*01:01L HLA-DPA1*02:01 -B1*13:01L HLA-DPA1*03:01-B1*105:01L HLA-DQA1*03:01-B1*03:02L HL A-DRB1*14:54L HLA-DPA1*01:03-B1*104:01L HLA-DQA1*05:05-B1*03:01L HLA-DRB1*14:17L HLA-DPA1*01:02-B1*04:01L HLA-DRB1*07:01L
  REGION 1..10: note = CONT. FROM ABOVE: HLA-DRB1*10:01L HLA-DRB1*16:01L HLA-DQA1*01:03 -B1*06:01L HLA-DRB1*04:08L HLA-DRB1*08:02L HLA-DRB1*08:03L HLA -DQA1*02:01-B1*03:03L HLA-DRB1*15:03L
YLFDESGEFK

SEQ ID NO: 8424 - protein, 10 aa, Severe acute respiratory syndrome coronavirus 2
  REGION 1..10: note = Table B: HLA-DQA1*03:02-B1*03:03M HLA-DQA1*05:01-B1*03:01L HLA-DQA1*01:02-B1*06:02L HLA-DRB1*01:02L HLA-DPA1*03:01-B1*04:02L HLA-DRB1*14:01L HLA-DRB1*11:02L HLA-DRB1*14:02L HLA-DRB1*08:01L HLA-DQA1*01-B1*05L
  REGION 1..10: note = CONT. FROM ABOVE: HLA-DQA1*05:05-B1*03:19L HLA-DQA1*05:01-B1*02: 01L HLA-DRB4*01:01L HLA-DPA1*01:03-B1*04:01L HLA-DQA1*05:05-B1*0 3:116L HLA-DRB1*09:01L HLA-DPA1*01:03-B1*04:02L HLA-DRB1*12:01L HLA-DPA1*02:01-B1*13:01L HLA-DPA1*03:01-B1*105:01L
  REGION 1..10: note = CONT. FROM ABOVE: HLA-DQA1*03:01-B1*03:02M HLA-DPA1*01:03-B1*104 :01L HLA-DPA1*01:02-B1*04:01L HLA-DRB1*10:01L HLA-DRB1*16:01L HL A-DQA1*01:03-B1*06:01L HLA-DRB1*08:03L HLA-DQA1*02:01-B1*03:03L HLA-DRB1*15:03L
LFDESGEFKL

SEQ ID NO: 8425 - protein, 11 aa, Severe acute respiratory syndrome coronavirus 2
  REGION 1..11: note = Table B: HLA-DQA1*03:02-B1*03:03L HLA-DQA1*05:01-B1*03:01L HLA-DRB1*04:03L HLA-DRB1*01:03L HLA-DQA1*01:02-B1*06:02L HLA-DQA1*01:01-B1*05:01L HLA-DQA1*05:05-B1*03:19L HLA-DPA1*03:01-B1*105:01L HLA-DQA1*05:05-B1*03:01L
  REGION 1..11: note = CONT. FROM ABOVE: HLA-DRB1*16:01L
DESGEFKLASH

SEQ ID NO: 8426 - protein, 10 aa, Severe acute respiratory syndrome coronavirus 2
  REGION 1..10: note = Table B: HLA-DQA1*03:02-B1*03:03M HLA-DQA1*05:01-B1*03:01H HLA-DRB1*04:01L HLA-DRB1*13:02L HLA-DRB1*13:03L HLA-DRB1*01:03M HLA-DRB1*04:02L HLA-DRB1*04:05L HLA-DQA1*01:02-B1*06:02L HLA-DRB1*01:01L HLA-DRB4*03:01NM HLA-DRB1*08:77H
  REGION 1..10: note = CONT. FROM ABOVE: HLA-DPA1*01:03-B1*03:01M HLA-DPA1*03:01-B1*04: 02H HLA-DRB1*03:01M HLA-DRB1*14:01L HLA-DRB1*11:02L HLA-DRB1*11: 03L HLA-DRB1*11:04L HLA-DRB1*14:02L HLA-DRB1*11:01L HLA-DRB5*01: 01L HLA-DQA1*01-B1*05M HLA-DQA1*05:05-B1*03:19M
  REGION 1..10: note = CONT. FROM ABOVE: HLA-DQA1*05:01-B1*02:01M HLA-DRB4*01:01H HLA-D PA1*01:03-B1*04:01H HLA-DQA1*05:05-B1*03:116M HLA-DRB1*09:01L HL A-DPA1*01:03-B1*04:02M HLA-DRB1*12:01M HLA-DPA1*02:01-B1*13:01L HLA-DPA1*03:01-B1*105:01L HLA-DQA1*03:01-B1*03:02M
  REGION 1..10: note = CONT. FROM ABOVE: HLA-DRB1*14:54L HLA-DPA1*01:03-B1*104:01M HLA- DPA1*01:02-B1*04:01M HLA-DRB1*10:01M HLA-DRB1*16:01M HLA-DQA1*01 :03-B1*06:01L HLA-DRB1*08:02L HLA-DQA1*02:01-B1*03:03L HLA-DRB1* 15:03M
GEFKLASHMY

SEQ ID NO: 8427 - protein, 16 aa, Severe acute respiratory syndrome coronavirus 2
  REGION 1..16: note = Table B: HLA-DQA1*03:02-B1*03:03L
YPPDEDEEEGDCEEEE

SEQ ID NO: 8428 - protein, 14 aa, Severe acute respiratory syndrome coronavirus 2
  REGION 1..14: note = Table B: HLA-DQA1*03:02-B1*03:03L HLA-DQA1*01:02-B1*06:02L HLA-DQA1*01-B1*05L HLA-DQA1*03:01-B1*03:02L HLA-DQA1*01:03-B1*06:01L HLA-DQA1*02:01-B1*03:03L
EEEGDCEEEEFEPS

SEQ ID NO: 8429 - protein, 10 aa, Severe acute respiratory syndrome coronavirus 2
  REGION 1..10: note = Table B: HLA-DQA1*03:02-B1*03:03L HLA-DQA1*05:01-B1*03:01M HLA-DRB1*13:03L HLA-DQA1*01:02-B1*06:02L HLA-DRB4*03:01NL HLA-DRB1*08:77M HLA-DPA1*01:03-B1*03:01M HLA-DPA1*03:01-B1*04:02L HLA-DRB1*03:01M HLA-DRB1*11:02L
  REGION 1..10: note = CONT. FROM ABOVE: HLA-DQA1*01-B1*05L HLA-DQA1*05:05-B1*03:19M HL A-DQA1*05:01-B1*02:01M HLA-DRB4*01:01M HLA-DPA1*01:03-B1*04:01M HLA-DQA1*05:05-B1*03:116L HLA-DPA1*01:03-B1*04:02L HLA-DRB1*12:0 1L HLA-DQA1*03:01-B1*03:02L HLA-DPA1*01:03-B1*104:01M
  REGION 1..10: note = CONT. FROM ABOVE: HLA-DPA1*01:02-B1*04:01L HLA-DRB1*10:01M HLA-D RB1*16:01M HLA-DRB1*15:03L
EEEFEPSTQY

SEQ ID NO: 8430 - protein, 11 aa, Severe acute respiratory syndrome coronavirus 2
  REGION 1..11: note = Table B: HLA-DQA1*03:02-B1*03:03L HLA-DRB1*13:02L HLA-DRB4*03:01NL HLA-DRB1*14:01L HLA-DRB1*12:01L HLA-DQA1*03:01-B1*03:02L HLA-DQA1*05:05-B1*03:01L HLA-DPA1*01:02-B1*04:01L HLA-DQA1*01:03-B1*06:01L
  REGION 1..11: note = CONT. FROM ABOVE: HLA-DRB1*08:02L
EEFEPSTQYEY

SEQ ID NO: 8431 - protein, 13 aa, Severe acute respiratory syndrome coronavirus 2
  REGION 1..13: note = Table B: HLA-DQA1*03:02-B1*03:03L HLA-DRB1*04:03L HLA-DRB1*12:01L HLA-DQA1*01:03-B1*06:01L
EFEPSTQYEYGTE

SEQ ID NO: 8432 - protein, 13 aa, Severe acute respiratory syndrome coronavirus 2
  REGION 1..13: note = Table B: HLA-DQA1*03:02-B1*03:03L HLA-DQA1*01-B1*05L HLA-DQA1*05:01-B1*02:01L HLA-DQA1*01:03-B1*06:01L HLA-DQA1*02:01-B1*03:03L
EPSTQYEYGTEDD

SEQ ID NO: 8433 - protein, 10 aa, Severe acute respiratory syndrome coronavirus 2
  REGION 1..10: note = Table B: HLA-DQA1*03:02-B1*03:03L HLA-DRB1*04:03L HLA-DRB1*04:02L HLA-DQA1*01-B1*05L HLA-DQA1*05:01-B1*02:01L HLA-DQA1*03:01-B1*03:02L HLA-DRB1*14:17L HLA-DRB1*16:01L HLA-DQA1*02:01-B1*03:03L
GTEDDYQGKP

SEQ ID NO: 8434 - protein, 10 aa, Severe acute respiratory syndrome coronavirus 2
  REGION 1..10: note = Table B: HLA-DQA1*03:02-B1*03:03M HLA-DRB1*13:03L HLA-DRB1*08:77L HLA-DQA1*01-B1*05L HLA-DQA1*05:05-B1*03:19L HLA-DQA1*05:05-B1*03:116L HLA-DRB1*09:01L HLA-DPA1*01:03-B1*04:02L HLA-DQA1*03:01-B1*03:02L
  REGION 1..10: note = CONT. FROM ABOVE: HLA-DPA1*01:03-B1*104:01L HLA-DPA1*01:02-B1*04 :01L HLA-DRB1*16:01L
TEDDYQGKPL

SEQ ID NO: 8435 - protein, 10 aa, Severe acute respiratory syndrome coronavirus 2
  REGION 1..10: note = Table B: HLA-DQA1*03:02-B1*03:03L HLA-DQA1*05:01-B1*03:01L HLA-DRB1*04:03L HLA-DRB1*04:02L HLA-DQA1*01-B1*05L HLA-DQA1*05:05-B1*03:19L HLA-DQA1*05:01-B1*02:01L HLA-DQA1*03:01-B1*03:02L HLA-DRB1*16:01L
  REGION 1..10: note = CONT. FROM ABOVE: HLA-DQA1*01:03-B1*06:01L HLA-DQA1*02:01-B1*03: 03L
EDDYQGKPLE

SEQ ID NO: 8436 - protein, 10 aa, Severe acute respiratory syndrome coronavirus 2
  REGION 1..10: note = Table B: HLA-DQA1*03:02-B1*03:03L HLA-DQA1*05:01-B1*03:01L HLA-DRB1*13:03L HLA-DRB1*01:03L HLA-DRB1*04:05L HLA-DQA1*01:02-B1*06:02M HLA-DRB1*01:01L HLA-DRB1*08:77L HLA-DPA1*03:01-B1*04:02L HLA-DRB1*03:01L HLA-DRB1*14:01L
  REGION 1..10: note = CONT. FROM ABOVE: HLA-DRB1*14:02L HLA-DQA1*01-B1*05L HLA-DQA1*05 :05-B1*03:19L HLA-DQA1*05:01-B1*02:01L HLA-DRB4*01:01L HLA-DPA1* 01:03-B1*04:01L HLA-DQA1*05:05-B1*03:116L HLA-DPA1*01:03-B1*04:0 2L HLA-DPA1*02:01-B1*13:01L HLA-DPA1*03:01-B1*105:01L
  REGION 1..10: note = CONT. FROM ABOVE: HLA-DPA1*01:02-B1*04:01L HLA-DRB1*10:01L HLA-D RB1*16:01L HLA-DQA1*01:03-B1*06:01L HLA-DQA1*02:01-B1*03:03L HLA -DRB1*15:03L
DDYQGKPLEF

SEQ ID NO: 8437 - protein, 10 aa, Severe acute respiratory syndrome coronavirus 2
  REGION 1..10: note = Table B: HLA-DQA1*03:02-B1*03:03M HLA-DQA1*05:05-B1*03:19L HLA-DRB1*09:01L HLA-DQA1*03:01-B1*03:02L
LEFGATSAAL

SEQ ID NO: 8438 - protein, 12 aa, Severe acute respiratory syndrome coronavirus 2
  REGION 1..12: note = Table B: HLA-DQA1*03:02-B1*03:03L HLA-DQA1*05:05-B1*03:19L HLA-DQA1*03:01-B1*03:02L HLA-DQA1*05:05-B1*03:01L HLA-DQA1*02:01-B1*03:03L
EFGATSAALQPE

SEQ ID NO: 8439 - protein, 12 aa, Severe acute respiratory syndrome coronavirus 2
  REGION 1..12: note = Table B: HLA-DQA1*03:02-B1*03:03L HLA-DQA1*05:01-B1*03:01L HLA-DQA1*01:02-B1*06:02L HLA-DQA1*05:05-B1*03:19L HLA-DQA1*05:01-B1*02:01L HLA-DQA1*05:05-B1*03:01L
FGATSAALQPEE

SEQ ID NO: 8440 - protein, 10 aa, Severe acute respiratory syndrome coronavirus 2
  REGION 1..10: note = Table B: HLA-DQA1*03:02-B1*03:03L HLA-DQA1*01:02-B1*06:02L HLA-DQA1*05:01-B1*02:01L HLA-DQA1*03:01-B1*03:02L HLA-DQA1*01:03-B1*06:01L HLA-DQA1*02:01-B1*03:03L
TSAALQPEEE

SEQ ID NO: 8441 - protein, 10 aa, Severe acute respiratory syndrome coronavirus 2
  REGION 1..10: note = Table B: HLA-DQA1*03:02-B1*03:03L HLA-DQA1*05:01-B1*02:01L HLA-DQA1*03:01-B1*03:02L HLA-DQA1*01:03-B1*06:01L HLA-DQA1*02:01-B1*03:03L
SAALQPEEEQ

SEQ ID NO: 8442 - protein, 12 aa, Severe acute respiratory syndrome coronavirus 2
  REGION 1..12: note = Table B: HLA-DQA1*03:02-B1*03:03L HLA-DRB1*04:05L HLA-DQA1*01:01-B1*05:01L HLA-DRB1*04:10L HLA-DRB1*16:01L
AALQPEEEQEED

SEQ ID NO: 8443 - protein, 12 aa, Severe acute respiratory syndrome coronavirus 2
  REGION 1..12: note = Table B: HLA-DQA1*03:02-B1*03:03L HLA-DQA1*01-B1*05L HLA-DQA1*01:03-B1*06:01L
ALQPEEEQEEDW

SEQ ID NO: 8444 - protein, 11 aa, Severe acute respiratory syndrome coronavirus 2
  REGION 1..11: note = Table B: HLA-DQA1*03:02-B1*03:03L HLA-DQA1*01-B1*05L HLA-DQA1*05:01-B1*02:01L HLA-DQA1*03:01-B1*03:02L
QPEEEQEEDWL

SEQ ID NO: 8445 - protein, 14 aa, Severe acute respiratory syndrome coronavirus 2
  REGION 1..14: note = Table B: HLA-DQA1*03:02-B1*03:03L HLA-DRB1*04:05L HLA-DPA1*02:01-B1*13:01L
EEQEEDWLDDDSQQ

SEQ ID NO: 8446 - protein, 10 aa, Severe acute respiratory syndrome coronavirus 2
  REGION 1..10: note = Table B: HLA-DQA1*03:02-B1*03:03M HLA-DQA1*05:01-B1*03:01L HLA-DRB1*04:04L HLA-DPA1*03:01-B1*04:02L HLA-DRB1*14:01L HLA-DRB1*11:02L HLA-DRB1*14:02L HLA-DQA1*05:05-B1*03:19M HLA-DQA1*05:05-B1*03:116L HLA-DRB1*09:01L
  REGION 1..10: note = CONT. FROM ABOVE: HLA-DQA1*03:01-B1*03:02L HLA-DPA1*01:03-B1*104 :01L HLA-DPA1*01:02-B1*04:01L HLA-DRB1*10:01L HLA-DRB1*16:01L HL A-DRB1*08:03L HLA-DQA1*02:01-B1*03:03L HLA-DRB1*15:03L
WLDDDSQQTV

SEQ ID NO: 8447 - protein, 12 aa, Severe acute respiratory syndrome coronavirus 2
  REGION 1..12: note = Table B: HLA-DQA1*03:02-B1*03:03L HLA-DQA1*03:01-B1*03:02L
DDDSQQTVGQQD

SEQ ID NO: 8448 - protein, 12 aa, Severe acute respiratory syndrome coronavirus 2
  REGION 1..12: note = Table B: HLA-DQA1*03:02-B1*03:03L HLA-DQA1*05:01-B1*03:01L HLA-DRB1*04:03L HLA-DQA1*01:01-B1*05:01L HLA-DQA1*05:01-B1*02:01L HLA-DQA1*05:05-B1*03:01L HLA-DQA1*01:03-B1*06:01L
DDSQQTVGQQDG

SEQ ID NO: 8449 - protein, 13 aa, Severe acute respiratory syndrome coronavirus 2
  REGION 1..13: note = Table B: HLA-DQA1*03:02-B1*03:03L HLA-DQA1*05:01-B1*02:01L HLA-DQA1*01:03-B1*06:01L
DSQQTVGQQDGSE

SEQ ID NO: 8450 - protein, 14 aa, Severe acute respiratory syndrome coronavirus 2
  REGION 1..14: note = Table B: HLA-DQA1*03:02-B1*03:03L HLA-DQA1*05:01-B1*03:01L HLA-DRB1*04:03L HLA-DRB1*04:02L HLA-DRB1*04:05L HLA-DQA1*01:02-B1*06:02L HLA-DQA1*01:01-B1*05:01L HLA-DQA1*05:05-B1*03:19L HLA-DQA1*05:01-B1*02:01L
  REGION 1..14: note = CONT. FROM ABOVE: HLA-DRB1*04:10L HLA-DQA1*05:05-B1*03:01L HLA-D RB1*14:17L HLA-DRB1*16:01L
SQQTVGQQDGSEDN

SEQ ID NO: 8451 - protein, 14 aa, Severe acute respiratory syndrome coronavirus 2
  REGION 1..14: note = Table B: HLA-DQA1*03:02-B1*03:03L HLA-DQA1*05:01-B1*02:01L HLA-DQA1*03:01-B1*03:02L
VGQQDGSEDNQTTT

SEQ ID NO: 8452 - protein, 15 aa, Severe acute respiratory syndrome coronavirus 2
  REGION 1..15: note = Table B: HLA-DQA1*03:02-B1*03:03L HLA-DQA1*03:01-B1*03:02L
GQQDGSEDNQTTTIQ

SEQ ID NO: 8453 - protein, 13 aa, Severe acute respiratory syndrome coronavirus 2
  REGION 1..13: note = Table B: HLA-DQA1*03:02-B1*03:03L HLA-DQA1*05:01-B1*03:01L HLA-DQA1*05:01-B1*02:01L HLA-DPA1*03:01-B1*105:01L HLA-DQA1*03:01-B1*03:02L
SEDNQTTTIQTIV

SEQ ID NO: 8454 - protein, 11 aa, Severe acute respiratory syndrome coronavirus 2
  REGION 1..11: note = Table B: HLA-DQA1*03:02-B1*03:03L HLA-DQA1*05:01-B1*03:01L HLA-DQA1*05:05-B1*03:19L HLA-DQA1*05:01-B1*02:01L HLA-DPA1*03:01-B1*105:01L HLA-DQA1*05:05-B1*03:01L
NQTTTIQTIVE

SEQ ID NO: 8455 - protein, 10 aa, Severe acute respiratory syndrome coronavirus 2
  REGION 1..10: note = Table B: HLA-DQA1*03:02-B1*03:03L
TTTIQTIVEV

SEQ ID NO: 8456 - protein, 10 aa, Severe acute respiratory syndrome coronavirus 2
  REGION 1..10: note = Table B: HLA-DQA1*03:02-B1*03:03L HLA-DQA1*03:01-B1*03:02L HLA-DQA1*02:01-B1*03:03L
QTIVEVQPQL

SEQ ID NO: 8457 - protein, 10 aa, Severe acute respiratory syndrome coronavirus 2
  REGION 1..10: note = Table B: HLA-DQA1*03:02-B1*03:03L HLA-DRB1*04:03L HLA-DQA1*01:02-B1*06:02L HLA-DQA1*05:01-B1*02:01L HLA-DQA1*03:01-B1*03:02L HLA-DRB1*14:17L HLA-DQA1*01:03-B1*06:01L HLA-DQA1*02:01-B1*03:03L
TIVEVQPQLE

SEQ ID NO: 8458 - protein, 10 aa, Severe acute respiratory syndrome coronavirus 2
  REGION 1..10: note = Table B: HLA-DQA1*03:02-B1*03:03L HLA-DQA1*05:01-B1*03:01L HLA-DRB1*04:03L HLA-DRB1*04:02L HLA-DQA1*01-B1*05L HLA-DQA1*05:05-B1*03:19L HLA-DQA1*05:01-B1*02:01L HLA-DRB1*12:01L HLA-DQA1*03:01-B1*03:02L HLA-DRB1*14:17L
  REGION 1..10: note = CONT. FROM ABOVE: HLA-DRB1*16:01L HLA-DQA1*01:03-B1*06:01L HLA-D QA1*02:01-B1*03:03L
IVEVQPQLEM

SEQ ID NO: 8459 - protein, 10 aa, Severe acute respiratory syndrome coronavirus 2
  REGION 1..10: note = Table B: HLA-DQA1*03:02-B1*03:03L HLA-DQA1*01:02-B1*06:02L HLA-DPA1*03:01-B1*105:01L HLA-DRB1*15:03L
EVQPQLEMEL

SEQ ID NO: 8460 - protein, 13 aa, Severe acute respiratory syndrome coronavirus 2
  REGION 1..13: note = Table B: HLA-DQA1*03:02-B1*03:03L HLA-DQA1*05:01-B1*03:01L HLA-DRB1*13:02L HLA-DRB1*13:03L HLA-DRB1*01:03L HLA-DRB1*04:02L HLA-DRB1*04:04L HLA-DRB1*04:05L HLA-DQA1*01:02-B1*06:02L HLA-DRB1*01:02L HLA-DRB4*03:01NL HLA-DRB1*08:04L HLA-DRB1*08:77L
  REGION 1..13: note = CONT. FROM ABOVE: HLA-DRB3*02:01L HLA-DRB1*14:01L HLA-DRB1*11:03 L HLA-DRB1*11:04L HLA-DRB1*14:02L HLA-DQA1*01-B1*05L HLA-DRB1*04 :10L HLA-DRB1*12:01L HLA-DRB1*12:02L HLA-DPA1*03:01-B1*105:01L H LA-DRB1*14:54L HLA-DQA1*05:05-B1*03:01L HLA-DRB1*10:01L
  REGION 1..13: note = CONT. FROM ABOVE: HLA-DRB1*16:01L HLA-DRB1*04:08L HLA-DRB1*08:03 L HLA-DQA1*02:01-B1*03:03L HLA-DRB1*15:03L
QPQLEMELTPVVQ

SEQ ID NO: 8461 - protein, 10 aa, Severe acute respiratory syndrome coronavirus 2
  REGION 1..10: note = Table B: HLA-DQA1*03:02-B1*03:03M HLA-DQA1*05:01-B1*03:01L HLA-DQA1*01:02-B1*06:02L HLA-DRB1*08:77L HLA-DPA1*03:01-B1*04:02L HLA-DRB1*11:02H HLA-DRB1*14:02L HLA-DRB1*11:01L HLA-DQA1*05:05-B1*03:19H
  REGION 1..10: note = CONT. FROM ABOVE: HLA-DQA1*05:01-B1*02:01M HLA-DRB4*01:01L HLA-D PA1*01:03-B1*04:01L HLA-DQA1*05:05-B1*03:116L HLA-DRB1*09:01L HL A-DPA1*01:03-B1*04:02L HLA-DPA1*02:01-B1*13:01L HLA-DQA1*03:01-B 1*03:02M HLA-DPA1*01:03-B1*104:01H HLA-DPA1*01:02-B1*04:01L
  REGION 1..10: note = CONT. FROM ABOVE: HLA-DRB1*10:01L HLA-DRB1*16:01L HLA-DQA1*01:03 -B1*06:01L HLA-DRB1*08:03L HLA-DQA1*02:01-B1*03:03L HLA-DRB1*15: 03L
MELTPVVQTI

SEQ ID NO: 8462 - protein, 11 aa, Severe acute respiratory syndrome coronavirus 2
  REGION 1..11: note = Table B: HLA-DQA1*03:02-B1*03:03L HLA-DQA1*05:05-B1*03:19L
ELTPVVQTIEV

SEQ ID NO: 8463 - protein, 11 aa, Severe acute respiratory syndrome coronavirus 2
  REGION 1..11: note = Table B: HLA-DQA1*03:02-B1*03:03L HLA-DQA1*05:01-B1*03:01L HLA-DRB1*04:03L HLA-DRB1*13:03L HLA-DRB1*08:77L HLA-DPA1*03:01-B1*04:02L HLA-DRB1*14:01L HLA-DQA1*05:05-B1*03:19L HLA-DQA1*05:01-B1*02:01L
  REGION 1..11: note = CONT. FROM ABOVE: HLA-DRB4*01:01L HLA-DPA1*01:03-B1*04:01L HLA-D RB1*12:01L HLA-DQA1*03:01-B1*03:02L HLA-DPA1*01:02-B1*04:01L HLA -DRB1*16:01L
PVVQTIEVNSF

SEQ ID NO: 8464 - protein, 11 aa, Severe acute respiratory syndrome coronavirus 2
  REGION 1..11: note = Table B: HLA-DQA1*03:02-B1*03:03L HLA-DRB1*13:02L HLA-DRB1*14:01L HLA-DPA1*02:01-B1*13:01L HLA-DQA1*01:03-B1*06:01L HLA-DRB1*08:02L
QTIEVNSFSGY

SEQ ID NO: 8465 - protein, 10 aa, Severe acute respiratory syndrome coronavirus 2
  REGION 1..10: note = Table B: HLA-DQA1*03:02-B1*03:03L HLA-DQA1*05:05-B1*03:19L HLA-DQA1*03:01-B1*03:02L HLA-DPA1*01:03-B1*104:01L
IEVNSFSGYL

SEQ ID NO: 8466 - protein, 11 aa, Severe acute respiratory syndrome coronavirus 2
  REGION 1..11: note = Table B: HLA-DQA1*03:02-B1*03:03L HLA-DQA1*05:01-B1*03:01L HLA-DRB1*01:02L HLA-DRB1*14:02L HLA-DQA1*05:05-B1*03:19L HLA-DRB1*15:03L
EVNSFSGYLKL

SEQ ID NO: 8467 - protein, 11 aa, Severe acute respiratory syndrome coronavirus 2
  REGION 1..11: note = Table B: HLA-DQA1*03:02-B1*03:03L HLA-DQA1*05:01-B1*03:01L HLA-DRB1*01:03L HLA-DQA1*01:02-B1*06:02L HLA-DRB1*08:04L HLA-DPA1*03:01-B1*04:02L HLA-DRB1*08:01L HLA-DQA1*05:05-B1*03:19L HLA-DPA1*01:03-B1*04:01L
  REGION 1..11: note = CONT. FROM ABOVE: HLA-DPA1*01:03-B1*04:02L HLA-DQA1*05:05-B1*03: 01L HLA-DRB1*16:01L HLA-DRB1*04:08L
SFSGYLKLTDN

SEQ ID NO: 8468 - protein, 10 aa, Severe acute respiratory syndrome coronavirus 2
  REGION 1..10: note = Table B: HLA-DQA1*03:02-B1*03:03L HLA-DQA1*05:01-B1*03:01L HLA-DRB1*04:03L HLA-DRB1*13:02L HLA-DRB1*13:03L HLA-DRB1*01:03L HLA-DRB1*04:05L HLA-DQA1*01:02-B1*06:02M HLA-DRB1*01:01L HLA-DRB1*08:77L HLA-DPA1*01:03-B1*03:01L
  REGION 1..10: note = CONT. FROM ABOVE: HLA-DPA1*03:01-B1*04:02L HLA-DRB1*03:01L HLA-D RB1*14:01L HLA-DRB1*11:02L HLA-DRB1*14:02L HLA-DQA1*01:01-B1*05: 01L HLA-DRB1*11:01L HLA-DQA1*01-B1*05L HLA-DQA1*05:05-B1*03:19M HLA-DQA1*05:01-B1*02:01L HLA-DRB4*01:01L
  REGION 1..10: note = CONT. FROM ABOVE: HLA-DPA1*01:03-B1*04:01L HLA-DQA1*05:05-B1*03: 116L HLA-DPA1*01:03-B1*04:02L HLA-DRB1*12:01L HLA-DPA1*02:01-B1* 13:01M HLA-DPA1*03:01-B1*105:01L HLA-DQA1*03:01-B1*03:02L HLA-DP A1*01:03-B1*104:01L HLA-DQA1*05:05-B1*03:01L
  REGION 1..10: note = CONT. FROM ABOVE: HLA-DPA1*01:02-B1*04:01L HLA-DRB1*10:01L HLA-D RB1*16:01L HLA-DQA1*01:03-B1*06:01M HLA-DRB1*08:02L HLA-DQA1*02: 01-B1*03:03L HLA-DRB1*15:03L
GYLKLTDNVY

SEQ ID NO: 8469 - protein, 13 aa, Severe acute respiratory syndrome coronavirus 2
  REGION 1..13: note = Table B: HLA-DQA1*03:02-B1*03:03L HLA-DQA1*05:01-B1*03:01L HLA-DQA1*01:02-B1*06:02L HLA-DQA1*05:05-B1*03:19L HLA-DPA1*03:01-B1*105:01L
LTDNVYIKNADIV

SEQ ID NO: 8470 - protein, 11 aa, Severe acute respiratory syndrome coronavirus 2
  REGION 1..11: note = Table B: HLA-DQA1*03:02-B1*03:03L HLA-DRB1*13:03L HLA-DRB4*03:01NL HLA-DRB1*14:01L HLA-DRB1*08:01L HLA-DRB1*04:10L HLA-DRB1*14:54L HLA-DRB1*04:08L
NVYIKNADIVE

SEQ ID NO: 8471 - protein, 11 aa, Severe acute respiratory syndrome coronavirus 2
  REGION 1..11: note = Table B: HLA-DQA1*03:02-B1*03:03L HLA-DQA1*05:01-B1*03:01L HLA-DRB1*13:03L HLA-DRB4*03:01NL HLA-DRB1*14:01L HLA-DRB1*04:10L HLA-DRB1*14:54L HLA-DRB1*04:08L
VYIKNADIVEE

SEQ ID NO: 8472 - protein, 11 aa, Severe acute respiratory syndrome coronavirus 2
  REGION 1..11: note = Table B: HLA-DQA1*03:02-B1*03:03L HLA-DQA1*05:01-B1*03:01L HLA-DRB1*04:03L HLA-DQA1*01:02-B1*06:02L HLA-DQA1*01:01-B1*05:01L HLA-DQA1*05:01-B1*02:01L HLA-DPA1*03:01-B1*105:01L HLA-DQA1*05:05-B1*03:01L
  REGION 1..11: note = CONT. FROM ABOVE: HLA-DRB1*16:01L HLA-DQA1*01:03-B1*06:01L
IKNADIVEEAK

SEQ ID NO: 8473 - protein, 10 aa, Severe acute respiratory syndrome coronavirus 2
  REGION 1..10: note = Table B: HLA-DQA1*03:02-B1*03:03M HLA-DQA1*05:01-B1*03:01L HLA-DQA1*01:02-B1*06:02L HLA-DRB1*11:02L HLA-DQA1*05:05-B1*03:19M HLA-DQA1*05:01-B1*02:01L HLA-DRB1*09:01L HLA-DPA1*01:03-B1*04:02L
  REGION 1..10: note = CONT. FROM ABOVE: HLA-DQA1*03:01-B1*03:02L HLA-DPA1*01:03-B1*104 :01M HLA-DRB1*16:01L HLA-DQA1*01:03-B1*06:01L HLA-DQA1*02:01-B1* 03:03L
EEAKKVKPTV

SEQ ID NO: 8474 - protein, 11 aa, Severe acute respiratory syndrome coronavirus 2
  REGION 1..11: note = Table B: HLA-DQA1*03:02-B1*03:03L HLA-DQA1*05:01-B1*03:01L HLA-DRB1*04:03L HLA-DRB1*04:02L HLA-DQA1*01:02-B1*06:02L HLA-DRB4*03:01NL HLA-DQA1*05:01-B1*02:01L HLA-DQA1*03:01-B1*03:02L HLA-DQA1*05:05-B1*03:01L
  REGION 1..11: note = CONT. FROM ABOVE: HLA-DRB1*14:17L HLA-DQA1*01:03-B1*06:01L HLA-D QA1*02:01-B1*03:03L
VKPTVVVNAAN

SEQ ID NO: 8475 - protein, 11 aa, Severe acute respiratory syndrome coronavirus 2
  REGION 1..11: note = Table B: HLA-DQA1*03:02-B1*03:03L HLA-DQA1*05:01-B1*03:01L HLA-DRB1*04:03L HLA-DRB1*13:02L HLA-DRB1*01:03L HLA-DRB4*03:01NL HLA-DRB3*02:01L HLA-DPA1*01:03-B1*03:01L HLA-DPA1*03:01-B1*04:02L HLA-DRB1*03:01L HLA-DRB1*14:01L
  REGION 1..11: note = CONT. FROM ABOVE: HLA-DRB1*11:02L HLA-DQA1*01-B1*05L HLA-DRB4*01 :01L HLA-DPA1*01:03-B1*04:01L HLA-DPA1*01:03-B1*04:02L HLA-DRB1* 12:01L HLA-DRB1*12:02L HLA-DPA1*02:01-B1*13:01L HLA-DQA1*03:01-B 1*03:02L HLA-DRB1*14:54L HLA-DPA1*01:03-B1*104:01L
  REGION 1..11: note = CONT. FROM ABOVE: HLA-DQA1*05:05-B1*03:01L HLA-DPA1*01:02-B1*04: 01L HLA-DRB1*10:01L HLA-DRB1*16:01L HLA-DQA1*01:03-B1*06:01L HLA -DRB1*15:03L
PTVVVNAANVY

SEQ ID NO: 8476 - protein, 10 aa, Severe acute respiratory syndrome coronavirus 2
  REGION 1..10: note = Table B: HLA-DQA1*03:02-B1*03:03L HLA-DQA1*05:01-B1*03:01L HLA-DRB1*04:03L HLA-DRB1*13:02L HLA-DRB1*13:03L HLA-DRB1*04:02L HLA-DRB1*01:02L HLA-DRB1*08:77L HLA-DRB3*02:01L HLA-DPA1*03:01-B1*04:02L HLA-DRB1*14:01L HLA-DRB1*14:02L
  REGION 1..10: note = CONT. FROM ABOVE: HLA-DQA1*05:05-B1*03:19L HLA-DQA1*05:01-B1*02: 01L HLA-DRB1*09:01L HLA-DRB1*12:01L HLA-DPA1*03:01-B1*105:01L HL A-DQA1*03:01-B1*03:02L HLA-DPA1*01:02-B1*04:01L HLA-DRB1*16:01L HLA-DQA1*02:01-B1*03:03L HLA-DRB1*15:03L
VVVNAANVYL

SEQ ID NO: 8477 - protein, 12 aa, Severe acute respiratory syndrome coronavirus 2
  REGION 1..12: note = Table B: HLA-DQA1*03:02-B1*03:03L HLA-DQA1*05:01-B1*03:01L HLA-DRB1*04:03L HLA-DRB1*04:02L HLA-DQA1*01:02-B1*06:02L HLA-DQA1*05:05-B1*03:19L HLA-DQA1*05:05-B1*03:01L HLA-DRB1*14:17L HLA-DQA1*01:03-B1*06:01L
NAANVYLKHGGG

SEQ ID NO: 8478 - protein, 12 aa, Severe acute respiratory syndrome coronavirus 2
  REGION 1..12: note = Table B: HLA-DQA1*03:02-B1*03:03L HLA-DQA1*05:01-B1*03:01L HLA-DRB1*13:02L HLA-DRB1*04:05L HLA-DQA1*01:02-B1*06:02L HLA-DRB1*01:02L HLA-DRB1*08:04L HLA-DRB1*14:01L HLA-DRB1*08:01L HLA-DRB1*12:01L HLA-DRB1*12:02L HLA-DRB1*14:54L HLA-DRB1*04:08L
  REGION 1..12: note = CONT. FROM ABOVE: HLA-DRB1*15:03L
ANVYLKHGGGVA

SEQ ID NO: 8479 - protein, 11 aa, Severe acute respiratory syndrome coronavirus 2
  REGION 1..11: note = Table B: HLA-DQA1*03:02-B1*03:03L HLA-DQA1*05:01-B1*03:01L HLA-DRB1*04:03L HLA-DRB1*04:02L HLA-DRB1*01:02L HLA-DRB4*03:01NL HLA-DRB1*14:01L HLA-DQA1*05:05-B1*03:19L HLA-DRB1*12:01L HLA-DQA1*05:05-B1*03:01L HLA-DRB1*14:17L HLA-DRB1*16:01L
VYLKHGGGVAG

SEQ ID NO: 8480 - protein, 10 aa, Severe acute respiratory syndrome coronavirus 2
  REGION 1..10: note = Table B: HLA-DQA1*03:02-B1*03:03L HLA-DQA1*05:01-B1*03:01L HLA-DRB1*01:03L HLA-DQA1*01:02-B1*06:02L HLA-DQA1*05:05-B1*03:19L HLA-DQA1*03:01-B1*03:02L HLA-DQA1*05:05-B1*03:01L HLA-DQA1*01:03-B1*06:01L
  REGION 1..10: note = CONT. FROM ABOVE: HLA-DQA1*02:01-B1*03:03L
HGGGVAGALN

SEQ ID NO: 8481 - protein, 10 aa, Severe acute respiratory syndrome coronavirus 2
  REGION 1..10: note = Table B: HLA-DQA1*03:02-B1*03:03L HLA-DQA1*05:01-B1*03:01L HLA-DRB1*13:03L HLA-DRB1*01:03L HLA-DRB4*03:01NL HLA-DQA1*05:05-B1*03:19L HLA-DQA1*03:01-B1*03:02L HLA-DQA1*05:05-B1*03:01L HLA-DQA1*01:03-B1*06:01L
  REGION 1..10: note = CONT. FROM ABOVE: HLA-DQA1*02:01-B1*03:03L
GGGVAGALNK

SEQ ID NO: 8482 - protein, 10 aa, Severe acute respiratory syndrome coronavirus 2
  REGION 1..10: note = Table B: HLA-DQA1*03:02-B1*03:03L HLA-DQA1*05:01-B1*03:01L HLA-DRB1*04:03L HLA-DRB1*13:03L HLA-DRB1*01:03L HLA-DRB1*04:02L HLA-DQA1*01:02-B1*06:02L HLA-DRB4*03:01NL HLA-DRB1*08:04L HLA-DRB1*14:02L HLA-DQA1*05:05-B1*03:19L
  REGION 1..10: note = CONT. FROM ABOVE: HLA-DQA1*05:01-B1*02:01L HLA-DRB1*12:01L HLA-D PA1*03:01-B1*105:01L HLA-DQA1*03:01-B1*03:02L HLA-DQA1*05:05-B1* 03:01L HLA-DRB1*14:17L HLA-DRB1*16:01L HLA-DQA1*01:03-B1*06:01L HLA-DRB1*04:08L HLA-DQA1*02:01-B1*03:03L
VAGALNKATN

SEQ ID NO: 8483 - protein, 10 aa, Severe acute respiratory syndrome coronavirus 2
  REGION 1..10: note = Table B: HLA-DQA1*03:02-B1*03:03L HLA-DQA1*05:01-B1*03:01L HLA-DRB1*04:01L HLA-DRB1*04:03L HLA-DRB1*13:02L HLA-DRB1*13:03L HLA-DRB1*01:03L HLA-DRB1*04:02L HLA-DRB1*04:04L HLA-DRB1*04:05L HLA-DQA1*01:02-B1*06:02L HLA-DRB1*01:02L HLA-DRB4*03:01NL
  REGION 1..10: note = CONT. FROM ABOVE: HLA-DRB1*08:04L HLA-DRB1*08:77L HLA-DRB3*02:01 L HLA-DPA1*01:03-B1*03:01L HLA-DPA1*03:01-B1*04:02L HLA-DRB1*03: 01L HLA-DRB1*14:01L HLA-DRB1*11:03L HLA-DRB1*11:04L HLA-DRB1*14: 02L HLA-DQA1*01:01-B1*05:01L HLA-DRB1*08:01L HLA-DRB1*11:01L
  REGION 1..10: note = CONT. FROM ABOVE: HLA-DRB5*01:01L HLA-DQA1*01-B1*05L HLA-DQA1*05 :05-B1*03:19L HLA-DQA1*05:01-B1*02:01L HLA-DRB4*01:01L HLA-DPA1* 01:03-B1*04:01L HLA-DQA1*05:05-B1*03:116L HLA-DRB1*09:01L HLA-DP A1*01:03-B1*04:02L HLA-DRB1*12:01L HLA-DRB1*12:02L
  REGION 1..10: note = CONT. FROM ABOVE: HLA-DRB3*01:01L HLA-DPA1*02:01-B1*13:01L HLA-D PA1*03:01-B1*105:01L HLA-DQA1*03:01-B1*03:02L HLA-DRB1*14:54L HL A-DQA1*05:05-B1*03:01L HLA-DRB1*14:17L HLA-DPA1*01:02-B1*04:01L HLA-DRB1*07:01L HLA-DRB1*10:01L HLA-DRB1*16:01L
  REGION 1..10: note = CONT. FROM ABOVE: HLA-DQA1*01:03-B1*06:01L HLA-DRB1*04:08L HLA -DRB1*08:02L HLA-DRB1*08:03L HLA-DQA1*02:01-B1*03:03L HLA-DRB1* 15:03L
ALNKATNNAM

SEQ ID NO: 8484 - protein, 14 aa, Severe acute respiratory syndrome coronavirus 2
  REGION 1..14: note = Table B: HLA-DQA1*03:02-B1*03:03L HLA-DRB1*13:02L HLA-DPA1*01:03-B1*03:01L HLA-DQA1*05:05-B1*03:19L HLA-DPA1*02:01-B1*13:01L HLA-DQA1*05:05-B1*03:01L
LNKATNNAMQVESD

SEQ ID NO: 8485 - protein, 12 aa, Severe acute respiratory syndrome coronavirus 2
  REGION 1..12: note = Table B: HLA-DQA1*03:02-B1*03:03L HLA-DQA1*05:01-B1*03:01L HLA-DRB1*04:03L HLA-DQA1*01:02-B1*06:02L HLA-DQA1*05:05-B1*03:19L HLA-DQA1*05:01-B1*02:01L HLA-DQA1*05:05-B1*03:01L
ATNNAMQVESDD

SEQ ID NO: 8486 - protein, 10 aa, Severe acute respiratory syndrome coronavirus 2
  REGION 1..10: note = Table B: HLA-DQA1*03:02-B1*03:03L HLA-DQA1*05:01-B1*03:01L HLA-DRB1*13:03L HLA-DQA1*01:02-B1*06:02L HLA-DRB1*08:77L HLA-DPA1*01:03-B1*03:01L HLA-DQA1*01-B1*05L HLA-DQA1*05:05-B1*03:19L HLA-DQA1*05:01-B1*02:01L
  REGION 1..10: note = CONT. FROM ABOVE: HLA-DPA1*01:03-B1*04:01L HLA-DPA1*03:01-B1*105 :01L HLA-DQA1*03:01-B1*03:02L HLA-DPA1*01:03-B1*104:01L HLA-DRB1 *16:01L HLA-DQA1*01:03-B1*06:01L HLA-DQA1*02:01-B1*03:03L HLA-DR B1*15:03L
NAMQVESDDY

SEQ ID NO: 8487 - protein, 13 aa, Severe acute respiratory syndrome coronavirus 2
  REGION 1..13: note = Table B: HLA-DQA1*03:02-B1*03:03L HLA-DQA1*01-B1*05L HLA-DQA1*03:01-B1*03:02L
VESDDYIATNGPL

SEQ ID NO: 8488 - protein, 10 aa, Severe acute respiratory syndrome coronavirus 2
  REGION 1..10: note = Table B: HLA-DQA1*03:02-B1*03:03L HLA-DQA1*05:01-B1*03:01L HLA-DRB1*04:03L HLA-DRB1*13:02L HLA-DRB1*13:03L HLA-DRB1*01:03L HLA-DRB1*04:02L HLA-DRB1*04:05L HLA-DQA1*01:02-B1*06:02L HLA-DRB1*01:01L HLA-DRB1*01:02L HLA-DRB4*03:01NL HLA-DRB1*08:04L
  REGION 1..10: note = CONT. FROM ABOVE: HLA-DRB1*08:77L HLA-DRB3*02:01L HLA-DPA1*01:03 -B1*03:01L HLA-DRB1*14:01L HLA-DRB1*11:03L HLA-DRB1*11:04L HLA-D RB1*14:02L HLA-DQA1*01:01-B1*05:01L HLA-DRB1*08:01L HLA-DRB5*01: 01L HLA-DQA1*01-B1*05L HLA-DQA1*05:05-B1*03:19L
  REGION 1..10: note = CONT. FROM ABOVE: HLA-DQA1*05:01-B1*02:01L HLA-DRB1*04:10L HLA-D PA1*01:03-B1*04:02L HLA-DRB1*12:01L HLA-DRB1*12:02L HLA-DPA1*03: 01-B1*105:01L HLA-DQA1*03:01-B1*03:02L HLA-DRB1*14:54L HLA-DQA1* 05:05-B1*03:01L HLA-DRB1*14:17L HLA-DPA1*01:02-B1*04:01L
  REGION 1..10: note = CONT. FROM ABOVE: HLA-DRB1*07:01L HLA-DRB1*10:01L HLA-DRB1*16:01 L HLA-DQA1*01:03-B1*06:01L HLA-DRB1*04:08L HLA-DRB1*08:03L HLA-D QA1*02:01-B1*03:03L HLA-DRB1*15:03L
DYIATNGPLK

SEQ ID NO: 8489 - protein, 10 aa, Severe acute respiratory syndrome coronavirus 2
  REGION 1..10: note = Table B: HLA-DQA1*03:02-B1*03:03L HLA-DQA1*05:01-B1*03:01L HLA-DQA1*01:02-B1*06:02L HLA-DRB1*01:02L HLA-DRB1*08:77L HLA-DPA1*03:01-B1*04:02L HLA-DRB1*14:01L HLA-DRB1*14:02L HLA-DQA1*05:05-B1*03:19L HLA-DQA1*05:01-B1*02:01L
  REGION 1..10: note = CONT. FROM ABOVE: HLA-DQA1*05:05-B1*03:116L HLA-DRB1*09:01L HLA- DRB1*12:01L HLA-DPA1*02:01-B1*13:01L HLA-DPA1*03:01-B1*105:01L H LA-DQA1*03:01-B1*03:02L HLA-DPA1*01:03-B1*104:01L HLA-DPA1*01:02 -B1*04:01L HLA-DRB1*10:01L HLA-DRB1*16:01L
  REGION 1..10: note = CONT. FROM ABOVE: HLA-DQA1*01:03-B1*06:01L HLA-DRB1*08:03L HLA-D QA1*02:01-B1*03:03L HLA-DRB1*15:03L
YIATNGPLKV

SEQ ID NO: 8490 - protein, 10 aa, Severe acute respiratory syndrome coronavirus 2
  REGION 1..10: note = Table B: HLA-DQA1*03:02-B1*03:03L HLA-DQA1*05:01-B1*03:01L HLA-DRB1*04:03L HLA-DRB1*13:02L HLA-DRB1*13:03L HLA-DRB1*01:03L HLA-DRB1*04:02L HLA-DRB1*01:02L HLA-DRB4*03:01NL HLA-DRB1*08:04L HLA-DRB1*08:77L HLA-DRB3*02:01L HLA-DPA1*01:03-B1*03:01L
  REGION 1..10: note = CONT. FROM ABOVE: HLA-DPA1*03:01-B1*04:02L HLA-DRB1*14:01L HLA-D RB1*11:03L HLA-DRB1*11:04L HLA-DRB1*14:02L HLA-DQA1*05:05-B1*03: 19L HLA-DQA1*05:01-B1*02:01L HLA-DRB1*12:01L HLA-DRB1*12:02L HLA -DPA1*03:01-B1*105:01L HLA-DQA1*03:01-B1*03:02L HLA-DRB1*14:54L
  REGION 1..10: note = CONT. FROM ABOVE: HLA-DQA1*05:05-B1*03:01L HLA-DRB1*14:17L HLA-D PA1*01:02-B1*04:01L HLA-DRB1*07:01L HLA-DRB1*16:01L HLA-DQA1*01: 03-B1*06:01L HLA-DQA1*02:01-B1*03:03L HLA-DRB1*15:03L
IATNGPLKVG

SEQ ID NO: 8491 - protein, 10 aa, Severe acute respiratory syndrome coronavirus 2
  REGION 1..10: note = Table B: HLA-DQA1*03:02-B1*03:03L HLA-DRB1*04:03L HLA-DRB1*13:03L HLA-DRB1*01:03L HLA-DRB1*04:02L HLA-DRB1*04:05L HLA-DRB1*01:02L HLA-DRB4*03:01NL HLA-DRB1*14:01L HLA-DRB1*11:04L HLA-DRB1*12:01L HLA-DQA1*03:01-B1*03:02L HLA-DRB1*14:17L
  REGION 1..10: note = CONT. FROM ABOVE: HLA-DRB1*16:01L HLA-DRB1*04:08L HLA-DQA1*02:01 -B1*03:03L
TNGPLKVGGS

SEQ ID NO: 8492 - protein, 11 aa, Severe acute respiratory syndrome coronavirus 2
  REGION 1..11: note = Table B: HLA-DQA1*03:02-B1*03:03L HLA-DQA1*05:01-B1*03:01L HLA-DQA1*01:02-B1*06:02L HLA-DQA1*05:05-B1*03:19L HLA-DQA1*03:01-B1*03:02L HLA-DQA1*05:05-B1*03:01L HLA-DQA1*02:01-B1*03:03L
VGGSCVLSGHN

SEQ ID NO: 8493 - protein, 11 aa, Severe acute respiratory syndrome coronavirus 2
  REGION 1..11: note = Table B: HLA-DQA1*03:02-B1*03:03L HLA-DQA1*05:01-B1*03:01L HLA-DRB1*04:03L HLA-DRB1*13:03L HLA-DRB1*01:03L HLA-DRB1*04:02L HLA-DRB1*04:05L HLA-DRB4*03:01NL HLA-DQA1*05:01-B1*02:01L HLA-DRB1*14:54L HLA-DQA1*05:05-B1*03:01L HLA-DRB1*14:17L
  REGION 1..11: note = CONT. FROM ABOVE: HLA-DRB1*16:01L HLA-DQA1*01:03-B1*06:01L HLA-D QA1*02:01-B1*03:03L
VVGPNVNKGED

SEQ ID NO: 8494 - protein, 11 aa, Severe acute respiratory syndrome coronavirus 2
  REGION 1..11: note = Table B: HLA-DQA1*03:02-B1*03:03L HLA-DQA1*05:01-B1*03:01L HLA-DRB1*04:03L HLA-DRB1*13:03L HLA-DRB1*04:02L HLA-DQA1*01:01-B1*05:01L HLA-DQA1*01-B1*05L HLA-DQA1*05:05-B1*03:19L HLA-DQA1*05:01-B1*02:01L
  REGION 1..11: note = CONT. FROM ABOVE: HLA-DQA1*05:05-B1*03:01L HLA-DRB1*16:01L HLA-D QA1*01:03-B1*06:01L HLA-DQA1*02:01-B1*03:03L
GPNVNKGEDIQ

SEQ ID NO: 8495 - protein, 10 aa, Severe acute respiratory syndrome coronavirus 2
  REGION 1..10: note = Table B: HLA-DQA1*03:02-B1*03:03L HLA-DQA1*05:01-B1*03:01L HLA-DQA1*03:01-B1*03:02L HLA-DQA1*02:01-B1*03:03L
NVNKGEDIQL

SEQ ID NO: 8496 - protein, 10 aa, Severe acute respiratory syndrome coronavirus 2
  REGION 1..10: note = Table B: HLA-DQA1*03:02-B1*03:03L HLA-DQA1*05:05-B1*03:19L HLA-DQA1*03:01-B1*03:02L
GEDIQLLKSA

SEQ ID NO: 8497 - protein, 11 aa, Severe acute respiratory syndrome coronavirus 2
  REGION 1..11: note = Table B: HLA-DQA1*03:02-B1*03:03L HLA-DQA1*01:02-B1*06:02L HLA-DQA1*05:01-B1*02:01L HLA-DRB1*12:01L HLA-DRB1*14:54L HLA-DRB1*16:01L HLA-DRB1*04:08L HLA-DRB1*15:03L
DIQLLKSAYEN

SEQ ID NO: 8498 - protein, 12 aa, Severe acute respiratory syndrome coronavirus 2
  REGION 1..12: note = Table B: HLA-DQA1*03:02-B1*03:03L HLA-DQA1*05:01-B1*03:01L HLA-DRB1*13:02L HLA-DRB1*01:03L HLA-DRB1*01:02L HLA-DRB1*08:04L HLA-DRB3*02:01L HLA-DPA1*01:03-B1*03:01L HLA-DRB1*14:01L HLA-DQA1*05:05-B1*03:19L HLA-DPA1*01:03-B1*04:01L
  REGION 1..12: note = CONT. FROM ABOVE: HLA-DPA1*01:03-B1*04:02L HLA-DPA1*02:01-B1*13: 01L HLA-DQA1*05:05-B1*03:01L HLA-DRB1*16:01L HLA-DRB1*04:08L
IQLLKSAYENFN

SEQ ID NO: 8499 - protein, 10 aa, Severe acute respiratory syndrome coronavirus 2
  REGION 1..10: note = Table B: HLA-DQA1*03:02-B1*03:03L HLA-DRB1*04:03L HLA-DRB1*13:03L HLA-DRB1*04:02L HLA-DRB4*03:01NL HLA-DQA1*01-B1*05L HLA-DQA1*05:01-B1*02:01L HLA-DPA1*03:01-B1*105:01L HLA-DQA1*03:01-B1*03:02L
  REGION 1..10: note = CONT. FROM ABOVE: HLA-DRB1*14:17L HLA-DPA1*01:02-B1*04:01L HLA-D RB1*16:01L HLA-DQA1*01:03-B1*06:01L HLA-DQA1*02:01-B1*03:03L
SAYENFNQHE

SEQ ID NO: 8500 - protein, 10 aa, Severe acute respiratory syndrome coronavirus 2
  REGION 1..10: note = Table B: HLA-DQA1*03:02-B1*03:03L HLA-DQA1*05:01-B1*03:01L HLA-DRB1*04:05L HLA-DQA1*01:02-B1*06:02L HLA-DRB1*01:02L HLA-DPA1*03:01-B1*04:02L HLA-DRB1*11:02L HLA-DQA1*01-B1*05L HLA-DQA1*05:05-B1*03:19L HLA-DQA1*05:01-B1*02:01L
  REGION 1..10: note = CONT. FROM ABOVE: HLA-DQA1*05:05-B1*03:116L HLA-DPA1*02:01-B1*13 :01L HLA-DPA1*03:01-B1*105:01L HLA-DQA1*03:01-B1*03:02L HLA-DPA1 *01:03-B1*104:01L HLA-DPA1*01:02-B1*04:01L HLA-DRB1*16:01L HLA-D QA1*01:03-B1*06:01L HLA-DQA1*02:01-B1*03:03L HLA-DRB1*15:03L
AYENFNQHEV

SEQ ID NO: 8501 - protein, 10 aa, Severe acute respiratory syndrome coronavirus 2
  REGION 1..10: note = Table B: HLA-DQA1*03:02-B1*03:03M HLA-DQA1*05:01-B1*03:01L HLA-DRB1*13:03L HLA-DRB1*08:77L HLA-DPA1*03:01-B1*04:02L HLA-DRB1*11:02L HLA-DQA1*01-B1*05L HLA-DQA1*05:05-B1*03:19M HLA-DQA1*05:01-B1*02:01L HLA-DPA1*01:03-B1*04:01L
  REGION 1..10: note = CONT. FROM ABOVE: HLA-DQA1*05:05-B1*03:116L HLA-DRB1*09:01L HLA- DPA1*01:03-B1*04:02L HLA-DPA1*02:01-B1*13:01L HLA-DQA1*03:01-B1* 03:02M HLA-DPA1*01:03-B1*104:01L HLA-DPA1*01:02-B1*04:01L HLA-DR B1*16:01L HLA-DQA1*01:03-B1*06:01L HLA-DQA1*02:01-B1*03:03L
  REGION 1..10: note = CONT. FROM ABOVE: HLA-DRB1*15:03L
YENFNQHEVL

SEQ ID NO: 8502 - protein, 10 aa, Severe acute respiratory syndrome coronavirus 2
  REGION 1..10: note = Table B: HLA-DQA1*03:02-B1*03:03L HLA-DQA1*05:01-B1*03:01L HLA-DQA1*01:02-B1*06:02L HLA-DQA1*01-B1*05L HLA-DQA1*05:05-B1*03:19L HLA-DQA1*05:01-B1*02:01L HLA-DPA1*03:01-B1*105:01L HLA-DQA1*03:01-B1*03:02L
  REGION 1..10: note = CONT. FROM ABOVE: HLA-DPA1*01:02-B1*04:01L HLA-DQA1*01:03-B1*06: 01L HLA-DQA1*02:01-B1*03:03L HLA-DRB1*15:03L
ENFNQHEVLL

SEQ ID NO: 8503 - protein, 10 aa, Severe acute respiratory syndrome coronavirus 2
  REGION 1..10: note = Table B: HLA-DQA1*03:02-B1*03:03L HLA-DQA1*03:01-B1*03:02L HLA-DPA1*01:02-B1*04:01L HLA-DRB1*16:01L HLA-DQA1*02:01-B1*03:03L
NQHEVLLAPL

SEQ ID NO: 8504 - protein, 11 aa, Severe acute respiratory syndrome coronavirus 2
  REGION 1..11: note = Table B: HLA-DQA1*03:02-B1*03:03L
HEVLLAPLLSA

SEQ ID NO: 8505 - protein, 10 aa, Severe acute respiratory syndrome coronavirus 2
  REGION 1..10: note = Table B: HLA-DQA1*03:02-B1*03:03L HLA-DQA1*05:05-B1*03:19L
LLAPLLSAGI

SEQ ID NO: 8506 - protein, 13 aa, Severe acute respiratory syndrome coronavirus 2
  REGION 1..13: note = Table B: HLA-DQA1*03:02-B1*03:03L HLA-DQA1*05:01-B1*03:01L HLA-DQA1*01:02-B1*06:02L HLA-DQA1*05:05-B1*03:19L HLA-DQA1*05:01-B1*02:01L HLA-DPA1*03:01-B1*105:01L HLA-DQA1*03:01-B1*03:02L HLA-DQA1*05:05-B1*03:01L
  REGION 1..13: note = CONT. FROM ABOVE: HLA-DQA1*01:03-B1*06:01L HLA-DQA1*02:01-B1*03: 03L
APLLSAGIFGADP

SEQ ID NO: 8507 - protein, 11 aa, Severe acute respiratory syndrome coronavirus 2
  REGION 1..11: note = Table B: HLA-DQA1*03:02-B1*03:03L HLA-DQA1*01-B1*05L HLA-DQA1*05:01-B1*02:01L HLA-DQA1*01:03-B1*06:01L
SAGIFGADPIH

SEQ ID NO: 8508 - protein, 10 aa, Severe acute respiratory syndrome coronavirus 2
  REGION 1..10: note = Table B: HLA-DQA1*03:02-B1*03:03L HLA-DQA1*05:01-B1*03:01L HLA-DRB1*04:03L HLA-DRB1*13:03L HLA-DRB1*01:03L HLA-DRB1*04:02L HLA-DRB1*04:05L HLA-DRB1*01:02L HLA-DRB4*03:01NL HLA-DRB1*14:01L HLA-DQA1*01-B1*05L HLA-DQA1*05:05-B1*03:19L
  REGION 1..10: note = CONT. FROM ABOVE: HLA-DQA1*05:01-B1*02:01L HLA-DRB1*12:01L HLA-D QA1*03:01-B1*03:02L HLA-DQA1*05:05-B1*03:01L HLA-DRB1*14:17L HLA -DPA1*01:02-B1*04:01L HLA-DRB1*16:01L HLA-DQA1*01:03-B1*06:01L H LA-DQA1*02:01-B1*03:03L
GIFGADPIHS

SEQ ID NO: 8509 - protein, 10 aa, Severe acute respiratory syndrome coronavirus 2
  REGION 1..10: note = Table B: HLA-DQA1*03:02-B1*03:03M HLA-DQA1*05:01-B1*03:01L HLA-DRB1*04:01L HLA-DRB1*04:03L HLA-DRB1*13:02L HLA-DRB1*13:03L HLA-DRB1*01:03L HLA-DRB1*04:02L HLA-DRB1*04:05L HLA-DQA1*01:02-B1*06:02M HLA-DRB1*01:01L HLA-DRB1*01:02L
  REGION 1..10: note = CONT. FROM ABOVE: HLA-DRB4*03:01NL HLA-DRB1*08:77L HLA-DRB3*02:0 1L HLA-DPA1*01:03-B1*03:01L HLA-DPA1*03:01-B1*04:02L HLA-DRB1*03 :01L HLA-DRB1*14:01L HLA-DRB1*11:02L HLA-DRB1*11:03L HLA-DRB1*11 :04L HLA-DRB1*14:02L HLA-DQA1*01:01-B1*05:01L HLA-DRB1*08:01L
  REGION 1..10: note = CONT. FROM ABOVE: HLA-DRB1*11:01L HLA-DQA1*01-B1*05L HLA-DQA1*05 :05-B1*03:19L HLA-DQA1*05:01-B1*02:01L HLA-DRB4*01:01L HLA-DPA1* 01:03-B1*04:01L HLA-DQA1*05:05-B1*03:116L HLA-DRB1*09:01L HLA-DP A1*01:03-B1*04:02L HLA-DRB1*12:01L HLA-DPA1*02:01-B1*13:01M
  REGION 1..10: note = CONT. FROM ABOVE: HLA-DPA1*03:01-B1*105:01M HLA-DQA1*03:01-B1*03 :02L HLA-DPA1*01:03-B1*104:01L HLA-DQA1*05:05-B1*03:01L HLA-DPA1 *01:02-B1*04:01L HLA-DRB1*07:01L HLA-DRB1*10:01L HLA-DRB1*16:01L HLA-DQA1*01:03-B1*06:01M HLA-DRB1*04:08L HLA-DRB1*08:03L
  REGION 1..10: note = CONT. FROM ABOVE: HLA-DQA1*02:01-B1*03:03L HLA-DRB1*15:03L
IFGADPIHSL

SEQ ID NO: 8510 - protein, 10 aa, Severe acute respiratory syndrome coronavirus 2
  REGION 1..10: note = Table B: HLA-DQA1*03:02-B1*03:03L HLA-DQA1*05:01-B1*03:01L HLA-DQA1*01:02-B1*06:02L HLA-DPA1*03:01-B1*04:02L HLA-DQA1*01-B1*05L HLA-DQA1*05:05-B1*03:19L HLA-DQA1*05:01-B1*02:01L HLA-DQA1*05:05-B1*03:116L
  REGION 1..10: note = CONT. FROM ABOVE: HLA-DPA1*03:01-B1*105:01L HLA-DQA1*03:01-B1*03 :02L HLA-DPA1*01:03-B1*104:01L HLA-DPA1*01:02-B1*04:01L HLA-DRB1 *16:01L HLA-DQA1*01:03-B1*06:01L HLA-DQA1*02:01-B1*03:03L HLA-DR B1*15:03L
GADPIHSLRV

SEQ ID NO: 8511 - protein, 10 aa, Severe acute respiratory syndrome coronavirus 2
  REGION 1..10: note = Table B: HLA-DQA1*03:02-B1*03:03L HLA-DQA1*05:01-B1*03:01L HLA-DPA1*03:01-B1*04:02L HLA-DQA1*01-B1*05L HLA-DQA1*05:05-B1*03:19L HLA-DQA1*05:01-B1*02:01L HLA-DQA1*03:01-B1*03:02L HLA-DPA1*01:02-B1*04:01L
  REGION 1..10: note = CONT. FROM ABOVE: HLA-DRB1*16:01L HLA-DQA1*02:01-B1*03:03L
VDTVRTNVYL

SEQ ID NO: 8512 - protein, 10 aa, Severe acute respiratory syndrome coronavirus 2
  REGION 1..10: note = Table B: HLA-DQA1*03:02-B1*03:03L HLA-DQA1*01-B1*05L HLA-DPA1*03:01-B1*105:01L HLA-DQA1*03:01-B1*03:02L HLA-DQA1*01:03-B1*06:01L HLA-DQA1*02:01-B1*03:03L
NVYLAVFDKN

SEQ ID NO: 8513 - protein, 10 aa, Severe acute respiratory syndrome coronavirus 2
  REGION 1..10: note = Table B: HLA-DQA1*03:02-B1*03:03L HLA-DRB1*04:03L HLA-DRB1*04:05L HLA-DQA1*01:02-B1*06:02L HLA-DRB1*01:02L HLA-DPA1*03:01-B1*04:02L HLA-DQA1*01-B1*05L HLA-DQA1*05:01-B1*02:01L HLA-DPA1*01:03-B1*04:01L
  REGION 1..10: note = CONT. FROM ABOVE: HLA-DRB1*12:01L HLA-DPA1*02:01-B1*13:01L HLA-D PA1*03:01-B1*105:01L HLA-DQA1*03:01-B1*03:02L HLA-DPA1*01:02-B1* 04:01L HLA-DRB1*16:01L HLA-DQA1*01:03-B1*06:01L HLA-DQA1*02:01-B 1*03:03L HLA-DRB1*15:03L
VYLAVFDKNL

SEQ ID NO: 8514 - protein, 10 aa, Severe acute respiratory syndrome coronavirus 2
  REGION 1..10: note = Table B: HLA-DQA1*03:02-B1*03:03L HLA-DQA1*05:01-B1*03:01L HLA-DQA1*01:02-B1*06:02L HLA-DPA1*01:03-B1*03:01L HLA-DPA1*03:01-B1*04:02L HLA-DRB1*14:01L HLA-DRB1*14:02L HLA-DQA1*01-B1*05L HLA-DQA1*05:05-B1*03:19L
  REGION 1..10: note = CONT. FROM ABOVE: HLA-DQA1*05:01-B1*02:01L HLA-DPA1*01:03-B1*04: 01L HLA-DPA1*02:01-B1*13:01L HLA-DPA1*03:01-B1*105:01L HLA-DQA1* 03:01-B1*03:02L HLA-DPA1*01:03-B1*104:01L HLA-DPA1*01:02-B1*04:0 1L HLA-DRB1*16:01L HLA-DQA1*01:03-B1*06:01L
  REGION 1..10: note = CONT. FROM ABOVE: HLA-DQA1*02:01-B1*03:03L HLA-DRB1*15:03L
VFDKNLYDKL

SEQ ID NO: 8515 - protein, 10 aa, Severe acute respiratory syndrome coronavirus 2
  REGION 1..10: note = Table B: HLA-DQA1*03:02-B1*03:03M HLA-DQA1*05:01-B1*03:01M HLA-DRB1*04:01L HLA-DRB1*04:03L HLA-DRB1*13:02L HLA-DRB1*13:03M HLA-DRB1*01:03M HLA-DRB1*04:02L HLA-DRB1*04:05M HLA-DQA1*01:02-B1*06:02H HLA-DRB1*01:01M HLA-DRB1*01:02L
  REGION 1..10: note = CONT. FROM ABOVE: HLA-DRB4*03:01NL HLA-DRB1*08:77M HLA-DPA1*01:0 3-B1*03:01L HLA-DPA1*03:01-B1*04:02M HLA-DRB1*03:01L HLA-DRB1*14 :01L HLA-DRB1*11:03L HLA-DRB1*11:04L HLA-DRB1*14:02M HLA-DQA1*01 :01-B1*05:01L HLA-DRB1*08:01L HLA-DRB1*11:01L HLA-DRB5*01:01L
  REGION 1..10: note = CONT. FROM ABOVE: HLA-DQA1*01-B1*05L HLA-DQA1*05:05-B1*03:19L HL A-DQA1*05:01-B1*02:01M HLA-DRB4*01:01L HLA-DPA1*01:03-B1*04:01M HLA-DQA1*05:05-B1*03:116M HLA-DRB1*09:01L HLA-DPA1*01:03-B1*04:0 2M HLA-DRB1*12:01L HLA-DPA1*02:01-B1*13:01M
  REGION 1..10: note = CONT. FROM ABOVE: HLA-DPA1*03:01-B1*105:01M HLA-DQA1*03:01-B1*03 :02L HLA-DPA1*01:03-B1*104:01L HLA-DQA1*05:05-B1*03:01L HLA-DPA1 *01:02-B1*04:01L HLA-DRB1*07:01L HLA-DRB1*10:01L HLA-DRB1*16:01M HLA-DQA1*01:03-B1*06:01M HLA-DRB1*08:02L HLA-DRB1*08:03L
  REGION 1..10: note = CONT. FROM ABOVE: HLA-DQA1*02:01-B1*03:03M HLA-DRB1*15:01L HLA -DRB1*15:03M
NLYDKLVSSF

SEQ ID NO: 8516 - protein, 10 aa, Severe acute respiratory syndrome coronavirus 2
  REGION 1..10: note = Table B: HLA-DQA1*03:02-B1*03:03L HLA-DQA1*05:01-B1*02:01L HLA-DPA1*02:01-B1*13:01L HLA-DPA1*03:01-B1*105:01L HLA-DRB1*16:01L HLA-DQA1*01:03-B1*06:01L HLA-DRB1*15:03L
LYDKLVSSFL

SEQ ID NO: 8517 - protein, 13 aa, Severe acute respiratory syndrome coronavirus 2
  REGION 1..13: note = Table B: HLA-DQA1*03:02-B1*03:03L HLA-DQA1*05:01-B1*03:01L HLA-DRB1*04:03L HLA-DRB1*13:02L HLA-DRB1*04:05L HLA-DRB1*01:02L HLA-DQA1*05:01-B1*02:01L HLA-DPA1*02:01-B1*13:01L HLA-DPA1*01:03-B1*104:01L HLA-DQA1*05:05-B1*03:01L
  REGION 1..13: note = CONT. FROM ABOVE: HLA-DRB1*15:03L
DKLVSSFLEMKSE

SEQ ID NO: 8518 - protein, 12 aa, Severe acute respiratory syndrome coronavirus 2
  REGION 1..12: note = Table B: HLA-DQA1*03:02-B1*03:03L HLA-DQA1*05:01-B1*03:01L HLA-DRB1*04:01L HLA-DRB1*13:02L HLA-DQA1*01:02-B1*06:02L HLA-DRB1*08:04L HLA-DRB1*08:77L HLA-DPA1*01:03-B1*03:01L HLA-DPA1*03:01-B1*04:02L HLA-DRB1*11:03L HLA-DRB1*11:04L
  REGION 1..12: note = CONT. FROM ABOVE: HLA-DQA1*01:01-B1*05:01L HLA-DRB1*11:01L HLA-D RB5*01:01L HLA-DQA1*05:01-B1*02:01L HLA-DRB1*09:01L HLA-DPA1*01: 03-B1*04:02L HLA-DRB1*12:02L HLA-DRB3*01:01L HLA-DPA1*02:01-B1*1 3:01L HLA-DPA1*03:01-B1*105:01L HLA-DPA1*01:03-B1*02:01L
  REGION 1..12: note = CONT. FROM ABOVE: HLA-DQA1*05:05-B1*03:01L HLA-DPA1*01:02-B1*04: 01L HLA-DRB1*07:01L HLA-DQA1*01:03-B1*06:01L HLA-DRB1*15:03L
VSSFLEMKSEKQ

SEQ ID NO: 8519 - protein, 12 aa, Severe acute respiratory syndrome coronavirus 2
  REGION 1..12: note = Table B: HLA-DQA1*03:02-B1*03:03L HLA-DQA1*05:01-B1*03:01L HLA-DRB1*13:02L HLA-DRB1*01:01L HLA-DPA1*01:03-B1*03:01L HLA-DRB1*11:03L HLA-DRB1*14:02L HLA-DRB1*08:01L HLA-DRB1*11:01L HLA-DQA1*01-B1*05L HLA-DQA1*05:05-B1*03:19L
  REGION 1..12: note = CONT. FROM ABOVE: HLA-DQA1*05:01-B1*02:01L HLA-DRB1*04:10L HLA-D RB3*01:01L HLA-DPA1*02:01-B1*13:01L HLA-DQA1*05:05-B1*03:01L HLA -DRB1*08:03L
FLEMKSEKQVEQ

SEQ ID NO: 8520 - protein, 10 aa, Severe acute respiratory syndrome coronavirus 2
  REGION 1..10: note = Table B: HLA-DQA1*03:02-B1*03:03L HLA-DQA1*05:05-B1*03:19L
KQVEQKIAEI

SEQ ID NO: 8521 - protein, 12 aa, Severe acute respiratory syndrome coronavirus 2
  REGION 1..12: note = Table B: HLA-DQA1*03:02-B1*03:03L HLA-DQA1*05:01-B1*03:01L HLA-DRB1*13:02L HLA-DRB1*13:03L HLA-DRB1*01:03L HLA-DRB1*04:02L HLA-DRB1*04:05L HLA-DQA1*01:02-B1*06:02L HLA-DRB1*01:02L HLA-DPA1*01:03-B1*03:01L HLA-DQA1*01:01-B1*05:01L
  REGION 1..12: note = CONT. FROM ABOVE: HLA-DRB1*08:01L HLA-DQA1*01-B1*05L HLA-DQA1*05 :05-B1*03:19L HLA-DQA1*05:01-B1*02:01L HLA-DRB1*04:10L HLA-DRB1* 12:01L HLA-DPA1*02:01-B1*13:01L HLA-DPA1*03:01-B1*105:01L HLA-DR B1*14:54L HLA-DPA1*01:03-B1*104:01L HLA-DQA1*05:05-B1*03:01L
  REGION 1..12: note = CONT. FROM ABOVE: HLA-DRB1*14:17L HLA-DPA1*01:02-B1*04:01L HLA-D RB1*16:01L HLA-DQA1*01:03-B1*06:01L HLA-DRB1*04:08L HLA-DRB1*15: 03L
VEQKIAEIPKEE

SEQ ID NO: 8522 - protein, 10 aa, Severe acute respiratory syndrome coronavirus 2
  REGION 1..10: note = Table B: HLA-DQA1*03:02-B1*03:03L HLA-DQA1*05:01-B1*03:01L HLA-DQA1*01:02-B1*06:02L HLA-DRB1*01:02L HLA-DPA1*03:01-B1*04:02L HLA-DRB1*14:01L HLA-DRB1*14:02L HLA-DQA1*05:05-B1*03:19L HLA-DQA1*05:01-B1*02:01L
  REGION 1..10: note = CONT. FROM ABOVE: HLA-DQA1*05:05-B1*03:116L HLA-DRB1*09:01L HLA- DPA1*02:01-B1*13:01L HLA-DPA1*03:01-B1*105:01L HLA-DQA1*03:01-B1 *03:02L HLA-DPA1*01:03-B1*104:01L HLA-DPA1*01:02-B1*04:01L HLA-D RB1*16:01L HLA-DQA1*01:03-B1*06:01L HLA-DQA1*02:01-B1*03:03L
  REGION 1..10: note = CONT. FROM ABOVE: HLA-DRB1*15:03L
KIAEIPKEEV

SEQ ID NO: 8523 - protein, 10 aa, Severe acute respiratory syndrome coronavirus 2
  REGION 1..10: note = Table B: HLA-DQA1*03:02-B1*03:03L
AEIPKEEVKP

SEQ ID NO: 8524 - protein, 10 aa, Severe acute respiratory syndrome coronavirus 2
  REGION 1..10: note = Table B: HLA-DQA1*03:02-B1*03:03L HLA-DQA1*05:01-B1*03:01L HLA-DRB1*13:03L HLA-DRB1*01:03L HLA-DQA1*01:02-B1*06:02L HLA-DPA1*01:03-B1*03:01L HLA-DRB1*14:01L HLA-DRB1*14:02L HLA-DQA1*05:05-B1*03:19L HLA-DQA1*05:01-B1*02:01L
  REGION 1..10: note = CONT. FROM ABOVE: HLA-DPA1*01:03-B1*04:01L HLA-DPA1*03:01-B1*105 :01L HLA-DQA1*03:01-B1*03:02L HLA-DPA1*01:02-B1*04:01L HLA-DRB1* 16:01L HLA-DQA1*01:03-B1*06:01L HLA-DQA1*02:01-B1*03:03L HLA-DRB 1*15:03L
EIPKEEVKPF

SEQ ID NO: 8525 - protein, 12 aa, Severe acute respiratory syndrome coronavirus 2
  REGION 1..12: note = Table B: HLA-DQA1*03:02-B1*03:03L HLA-DQA1*05:01-B1*03:01L HLA-DRB1*04:03L HLA-DRB1*04:02L HLA-DQA1*01:02-B1*06:02L HLA-DRB1*01:02L HLA-DQA1*01-B1*05L HLA-DQA1*05:01-B1*02:01L HLA-DRB1*14:17L HLA-DRB1*16:01L HLA-DQA1*01:03-B1*06:01L
  REGION 1..12: note = CONT. FROM ABOVE: HLA-DRB1*04:08L HLA-DQA1*02:01-B1*03:03L HLA-D RB1*15:03L
EEVKPFITESKP

SEQ ID NO: 8526 - protein, 13 aa, Severe acute respiratory syndrome coronavirus 2
  REGION 1..13: note = Table B: HLA-DQA1*03:02-B1*03:03L HLA-DRB1*04:04L HLA-DRB4*03:01NL HLA-DRB1*08:77L HLA-DRB3*02:01L HLA-DPA1*01:03-B1*03:01L HLA-DPA1*03:01-B1*04:02L HLA-DRB1*11:03L HLA-DRB1*14:02L HLA-DQA1*01:01-B1*05:01L
  REGION 1..13: note = CONT. FROM ABOVE: HLA-DRB1*11:01L HLA-DQA1*05:05-B1*03:19L HLA-D QA1*05:05-B1*03:116L HLA-DRB1*04:10L HLA-DRB1*09:01L HLA-DPA1*01 :03-B1*04:02L HLA-DRB1*12:02L HLA-DRB3*01:01L HLA-DPA1*02:01-B1* 13:01L HLA-DPA1*03:01-B1*105:01L HLA-DQA1*05:05-B1*03:01L
  REGION 1..13: note = CONT. FROM ABOVE: HLA-DPA1*01:02-B1*04:01L HLA-DRB1*07:01L HLA-D RB1*10:01L HLA-DQA1*01:03-B1*06:01L HLA-DRB1*08:02L
VKPFITESKPSVE

SEQ ID NO: 8527 - protein, 10 aa, Severe acute respiratory syndrome coronavirus 2
  REGION 1..10: note = Table B: HLA-DQA1*03:02-B1*03:03L HLA-DQA1*05:01-B1*03:01L HLA-DRB1*04:03L HLA-DRB1*04:02L HLA-DRB4*03:01NL HLA-DQA1*05:05-B1*03:19L HLA-DQA1*05:01-B1*02:01L HLA-DQA1*03:01-B1*03:02L HLA-DQA1*05:05-B1*03:01L
  REGION 1..10: note = CONT. FROM ABOVE: HLA-DRB1*14:17L HLA-DRB1*16:01L HLA-DQA1*01:03 -B1*06:01L HLA-DQA1*02:01-B1*03:03L
ITESKPSVEQ

SEQ ID NO: 8528 - protein, 15 aa, Severe acute respiratory syndrome coronavirus 2
  REGION 1..15: note = Table B: HLA-DQA1*03:02-B1*03:03L HLA-DRB1*04:02L HLA-DRB1*04:04L HLA-DRB1*08:04L HLA-DPA1*03:01-B1*04:02L HLA-DQA1*05:05-B1*03:19L HLA-DQA1*05:01-B1*02:01L HLA-DPA1*01:03-B1*04:02L HLA-DPA1*01:02-B1*04:01L
DDKKIKACVEEVTTT

SEQ ID NO: 8529 - protein, 10 aa, Severe acute respiratory syndrome coronavirus 2
  REGION 1..10: note = Table B: HLA-DQA1*03:02-B1*03:03L HLA-DQA1*05:01-B1*03:01L HLA-DRB1*13:02L HLA-DRB1*13:03M HLA-DRB1*01:03L HLA-DRB1*04:02L HLA-DQA1*01:02-B1*06:02L HLA-DRB1*01:01L HLA-DRB4*03:01NL HLA-DRB3*02:01L HLA-DRB1*14:01L HLA-DRB1*11:04L HLA-DRB1*14:02L
  REGION 1..10: note = CONT. FROM ABOVE: HLA-DRB1*08:01L HLA-DRB5*01:01L HLA-DQA1*05:01 -B1*02:01L HLA-DPA1*01:03-B1*04:01L HLA-DPA1*01:03-B1*04:02L HLA -DRB1*12:01M HLA-DRB1*12:02L HLA-DPA1*03:01-B1*105:01L HLA-DQA1* 03:01-B1*03:02M HLA-DQA1*05:05-B1*03:01M HLA-DRB1*14:17L
  REGION 1..10: note = CONT. FROM ABOVE: HLA-DRB1*16:01L HLA-DQA1*01:03-B1*06:01L HLA-D RB1*08:03L HLA-DQA1*02:01-B1*03:03L HLA-DRB1*15:01L
EVTTTLEETK

SEQ ID NO: 8530 - protein, 10 aa, Severe acute respiratory syndrome coronavirus 2
  REGION 1..10: note = Table B: HLA-DQA1*03:02-B1*03:03L HLA-DQA1*05:01-B1*03:01L HLA-DRB1*04:03L HLA-DRB1*13:03L HLA-DRB1*01:03L HLA-DRB1*04:05L HLA-DQA1*01:02-B1*06:02L HLA-DRB4*03:01NL HLA-DRB1*08:77L HLA-DRB3*02:01L HLA-DPA1*01:03-B1*03:01L
  REGION 1..10: note = CONT. FROM ABOVE: HLA-DPA1*03:01-B1*04:02L HLA-DRB1*14:01L HLA-D RB1*14:02L HLA-DQA1*01-B1*05L HLA-DQA1*05:05-B1*03:19L HLA-DQA1* 05:01-B1*02:01L HLA-DRB4*01:01L HLA-DPA1*01:03-B1*04:01L HLA-DQA 1*05:05-B1*03:116L HLA-DPA1*01:03-B1*04:02L HLA-DRB1*12:01L
  REGION 1..10: note = CONT. FROM ABOVE: HLA-DPA1*02:01-B1*13:01L HLA-DPA1*03:01-B1*105 :01L HLA-DQA1*03:01-B1*03:02L HLA-DPA1*01:03-B1*104:01L HLA-DQA1 *05:05-B1*03:01L HLA-DPA1*01:02-B1*04:01L HLA-DRB1*07:01L HLA-DR B1*10:01L HLA-DRB1*16:01L HLA-DQA1*01:03-B1*06:01L
  REGION 1..10: note = CONT. FROM ABOVE: HLA-DQA1*02:01-B1*03:03L HLA-DRB1*15:03L
VTTTLEETKF

SEQ ID NO: 8531 - protein, 10 aa, Severe acute respiratory syndrome coronavirus 2
  REGION 1..10: note = Table B: HLA-DQA1*03:02-B1*03:03L HLA-DQA1*05:01-B1*03:01L HLA-DRB1*04:03L HLA-DRB1*01:03L HLA-DQA1*01:02-B1*06:02L HLA-DRB1*01:02L HLA-DPA1*01:03-B1*03:01L HLA-DPA1*03:01-B1*04:02L HLA-DRB1*14:01L HLA-DRB1*08:01L
  REGION 1..10: note = CONT. FROM ABOVE: HLA-DQA1*01-B1*05L HLA-DQA1*05:01-B1*02:01L HL A-DPA1*01:03-B1*04:01L HLA-DPA1*01:03-B1*04:02L HLA-DRB1*12:01L HLA-DPA1*03:01-B1*105:01L HLA-DQA1*03:01-B1*03:02L HLA-DPA1*01:0 3-B1*02:01L HLA-DPA1*01:02-B1*04:01M HLA-DRB1*16:01L
  REGION 1..10: note = CONT. FROM ABOVE: HLA-DQA1*01:03-B1*06:01L HLA-DRB1*04:08L HLA-D QA1*02:01-B1*03:03L HLA-DRB1*15:03L
LEETKFLTEN

SEQ ID NO: 8532 - protein, 10 aa, Severe acute respiratory syndrome coronavirus 2
  REGION 1..10: note = Table B: HLA-DQA1*03:02-B1*03:03M HLA-DQA1*05:01-B1*03:01L HLA-DRB1*13:03L HLA-DRB1*08:77L HLA-DPA1*03:01-B1*04:02L HLA-DRB1*11:02L HLA-DQA1*05:05-B1*03:19M HLA-DQA1*05:01-B1*02:01L HLA-DRB4*01:01L
  REGION 1..10: note = CONT. FROM ABOVE: HLA-DPA1*01:03-B1*04:01L HLA-DQA1*05:05-B1*03: 116L HLA-DRB1*09:01L HLA-DPA1*01:03-B1*04:02L HLA-DQA1*03:01-B1* 03:02M HLA-DPA1*01:03-B1*104:01M HLA-DPA1*01:02-B1*04:01L HLA-DR B1*16:01L HLA-DQA1*01:03-B1*06:01L HLA-DQA1*02:01-B1*03:03L
  REGION 1..10: note = CONT. FROM ABOVE: HLA-DRB1*15:03L
EETKFLTENL

SEQ ID NO: 8533 - protein, 10 aa, Severe acute respiratory syndrome coronavirus 2
  REGION 1..10: note = Table B: HLA-DQA1*03:02-B1*03:03L HLA-DQA1*01:02-B1*06:02L HLA-DQA1*01-B1*05L HLA-DQA1*05:01-B1*02:01L HLA-DPA1*03:01-B1*105:01L HLA-DQA1*03:01-B1*03:02L HLA-DPA1*01:02-B1*04:01L HLA-DQA1*01:03-B1*06:01L
  REGION 1..10: note = CONT. FROM ABOVE: HLA-DQA1*02:01-B1*03:03L HLA-DRB1*15:03L
ETKFLTENLL

SEQ ID NO: 8534 - protein, 10 aa, Severe acute respiratory syndrome coronavirus 2
  REGION 1..10: note = Table B: HLA-DQA1*03:02-B1*03:03L HLA-DQA1*05:01-B1*03:01L HLA-DRB1*04:03L HLA-DRB1*01:03L HLA-DRB1*04:05L HLA-DQA1*01:02-B1*06:02M HLA-DRB1*01:01L HLA-DRB1*08:77L HLA-DPA1*01:03-B1*03:01L HLA-DPA1*03:01-B1*04:02L
  REGION 1..10: note = CONT. FROM ABOVE: HLA-DRB1*03:01L HLA-DRB1*11:02L HLA-DRB1*14:02 L HLA-DQA1*01-B1*05L HLA-DQA1*05:05-B1*03:19M HLA-DQA1*05:01-B1* 02:01M HLA-DRB4*01:01M HLA-DPA1*01:03-B1*04:01M HLA-DQA1*05:05-B 1*03:116L HLA-DPA1*01:03-B1*04:02L HLA-DRB1*12:01L
  REGION 1..10: note = CONT. FROM ABOVE: HLA-DPA1*02:01-B1*13:01M HLA-DPA1*03:01-B1*105 :01L HLA-DPA1*01:03-B1*104:01L HLA-DQA1*05:05-B1*03:01L HLA-DPA1 *01:02-B1*04:01L HLA-DRB1*10:01L HLA-DRB1*16:01L HLA-DQA1*01:03- B1*06:01M HLA-DRB1*08:02L HLA-DQA1*02:01-B1*03:03L
  REGION 1..10: note = CONT. FROM ABOVE: HLA-DRB1*15:03L
KFLTENLLLY

SEQ ID NO: 8535 - protein, 10 aa, Severe acute respiratory syndrome coronavirus 2
  REGION 1..10: note = Table B: HLA-DQA1*03:02-B1*03:03L HLA-DRB1*04:03L HLA-DRB1*13:03L HLA-DRB1*01:03L HLA-DRB1*04:02L HLA-DRB1*04:05L HLA-DRB4*03:01NL HLA-DQA1*01-B1*05L HLA-DQA1*05:01-B1*02:01L HLA-DRB1*12:01L HLA-DQA1*03:01-B1*03:02L HLA-DRB1*14:54L
  REGION 1..10: note = CONT. FROM ABOVE: HLA-DRB1*14:17L HLA-DPA1*01:02-B1*04:01L HLA-D RB1*16:01L HLA-DQA1*02:01-B1*03:03L
IDINGNLHPD

SEQ ID NO: 8536 - protein, 12 aa, Severe acute respiratory syndrome coronavirus 2
  REGION 1..12: note = Table B: HLA-DQA1*03:02-B1*03:03L HLA-DRB1*04:02L HLA-DQA1*01:02-B1*06:02L HLA-DQA1*05:01-B1*02:01L HLA-DQA1*05:05-B1*03:01L HLA-DQA1*01:03-B1*06:01L
DINGNLHPDSAT

SEQ ID NO: 8537 - protein, 10 aa, Severe acute respiratory syndrome coronavirus 2
  REGION 1..10: note = Table B: HLA-DQA1*03:02-B1*03:03L HLA-DQA1*05:01-B1*03:01L HLA-DRB1*13:03L HLA-DRB1*04:02L HLA-DPA1*03:01-B1*04:02L HLA-DRB1*14:01L HLA-DRB1*08:01L HLA-DQA1*01-B1*05L HLA-DQA1*05:01-B1*02:01L HLA-DQA1*05:05-B1*03:116L
  REGION 1..10: note = CONT. FROM ABOVE: HLA-DQA1*03:01-B1*03:02L HLA-DPA1*01:02-B1*04: 01L HLA-DRB1*16:01L HLA-DQA1*02:01-B1*03:03L
GNLHPDSATL

SEQ ID NO: 8538 - protein, 10 aa, Severe acute respiratory syndrome coronavirus 2
  REGION 1..10: note = Table B: HLA-DQA1*03:02-B1*03:03L
NLHPDSATLV

SEQ ID NO: 8539 - protein, 12 aa, Severe acute respiratory syndrome coronavirus 2
  REGION 1..12: note = Table B: HLA-DQA1*03:02-B1*03:03L HLA-DQA1*05:01-B1*03:01L HLA-DRB1*04:03L HLA-DQA1*01:02-B1*06:02L HLA-DPA1*01:03-B1*03:01L HLA-DQA1*01:01-B1*05:01L HLA-DQA1*01-B1*05L HLA-DQA1*05:05-B1*03:19L
  REGION 1..12: note = CONT. FROM ABOVE: HLA-DQA1*05:01-B1*02:01L HLA-DPA1*03:01-B1*105 :01L HLA-DQA1*03:01-B1*03:02L HLA-DQA1*05:05-B1*03:01L HLA-DRB1* 16:01L HLA-DQA1*02:01-B1*03:03L
HPDSATLVSDID

SEQ ID NO: 8540 - protein, 12 aa, Severe acute respiratory syndrome coronavirus 2
  REGION 1..12: note = Table B: HLA-DQA1*03:02-B1*03:03L HLA-DQA1*03:01-B1*03:02L
DSATLVSDIDIT

SEQ ID NO: 8541 - protein, 10 aa, Severe acute respiratory syndrome coronavirus 2
  REGION 1..10: note = Table B: HLA-DQA1*03:02-B1*03:03L HLA-DQA1*01:02-B1*06:02L HLA-DRB1*14:02L HLA-DQA1*05:05-B1*03:19L HLA-DRB4*01:01L HLA-DPA1*02:01-B1*13:01L HLA-DPA1*03:01-B1*105:01L HLA-DQA1*01:03-B1*06:01L HLA-DQA1*02:01-B1*03:03L
  REGION 1..10: note = CONT. FROM ABOVE: HLA-DRB1*15:03L
TLVSDIDITF

SEQ ID NO: 8542 - protein, 10 aa, Severe acute respiratory syndrome coronavirus 2
  REGION 1..10: note = Table B: HLA-DQA1*03:02-B1*03:03L HLA-DPA1*03:01-B1*04:02L HLA-DRB1*14:02L HLA-DQA1*03:01-B1*03:02L HLA-DRB1*15:03L
LVSDIDITFL

SEQ ID NO: 8543 - protein, 13 aa, Severe acute respiratory syndrome coronavirus 2
  REGION 1..13: note = Table B: HLA-DQA1*03:02-B1*03:03L HLA-DRB1*04:03L HLA-DRB1*13:02L HLA-DRB1*04:05L HLA-DRB1*01:02L HLA-DRB3*02:01L HLA-DPA1*01:03-B1*03:01L HLA-DPA1*03:01-B1*04:02L HLA-DRB1*11:04L HLA-DRB1*14:02L HLA-DQA1*01:01-B1*05:01L
  REGION 1..13: note = CONT. FROM ABOVE: HLA-DRB1*11:01L HLA-DQA1*01-B1*05L HLA-DPA1*01 :03-B1*04:01L HLA-DPA1*01:03-B1*04:02L HLA-DRB3*01:01L HLA-DRB1* 14:54L HLA-DPA1*01:03-B1*104:01L HLA-DQA1*05:05-B1*03:01L HLA-DR B1*14:17L HLA-DRB1*08:03L
DIDITFLKKDAPY

SEQ ID NO: 8544 - protein, 13 aa, Severe acute respiratory syndrome coronavirus 2
  REGION 1..13: note = Table B: HLA-DQA1*03:02-B1*03:03L HLA-DRB1*01:01L HLA-DRB4*03:01NL HLA-DRB1*08:77L HLA-DRB3*02:01L HLA-DPA1*03:01-B1*04:02L HLA-DRB1*11:02L HLA-DRB1*11:03L HLA-DRB1*11:04L HLA-DRB1*11:01L HLA-DRB5*01:01L
  REGION 1..13: note = CONT. FROM ABOVE: HLA-DQA1*01-B1*05L HLA-DRB1*13:01L HLA-DRB4*01 :01L HLA-DPA1*01:03-B1*04:01L HLA-DRB1*04:10L HLA-DRB1*09:01L HL A-DPA1*01:03-B1*04:02L HLA-DRB1*12:02L HLA-DPA1*02:01-B1*13:01L HLA-DQA1*05:05-B1*03:01L HLA-DRB1*07:01L HLA-DRB1*10:01L
  REGION 1..13: note = CONT. FROM ABOVE: HLA-DRB1*08:03L
ITFLKKDAPYIVG

SEQ ID NO: 8545 - protein, 12 aa, Severe acute respiratory syndrome coronavirus 2
  REGION 1..12: note = Table B: HLA-DQA1*03:02-B1*03:03L HLA-DRB1*04:03L HLA-DQA1*05:01-B1*02:01L
DAPYIVGDVVQE

SEQ ID NO: 8546 - protein, 12 aa, Severe acute respiratory syndrome coronavirus 2
  REGION 1..12: note = Table B: HLA-DQA1*03:02-B1*03:03L HLA-DRB1*13:02L HLA-DRB1*13:03L HLA-DRB1*01:03L HLA-DRB1*04:02L HLA-DRB1*04:04L HLA-DRB1*04:05L HLA-DRB4*03:01NL HLA-DRB1*08:77L HLA-DRB1*11:04L HLA-DQA1*05:01-B1*02:01L HLA-DRB1*04:10L HLA-DRB1*12:01L
  REGION 1..12: note = CONT. FROM ABOVE: HLA-DRB1*12:02L HLA-DPA1*03:01-B1*105:01L HLA- DRB1*14:54L HLA-DRB1*10:01L HLA-DRB1*16:01L HLA-DRB1*04:08L HLA- DQA1*02:01-B1*03:03L
APYIVGDVVQEG

SEQ ID NO: 8547 - protein, 10 aa, Severe acute respiratory syndrome coronavirus 2
  REGION 1..10: note = Table B: HLA-DQA1*03:02-B1*03:03L
IVGDVVQEGV

SEQ ID NO: 8548 - protein, 10 aa, Severe acute respiratory syndrome coronavirus 2
  REGION 1..10: note = Table B: HLA-DQA1*03:02-B1*03:03L HLA-DRB1*13:03L HLA-DQA1*01:02-B1*06:02L HLA-DRB1*01:02L HLA-DQA1*05:01-B1*02:01L HLA-DPA1*03:01-B1*105:01L HLA-DQA1*03:01-B1*03:02L HLA-DPA1*01:02-B1*04:01L
  REGION 1..10: note = CONT. FROM ABOVE: HLA-DRB1*15:03L
DVVQEGVLTA

SEQ ID NO: 8549 - protein, 10 aa, Severe acute respiratory syndrome coronavirus 2
  REGION 1..10: note = Table B: HLA-DQA1*03:02-B1*03:03M HLA-DQA1*05:01-B1*03:01L HLA-DRB1*13:03L HLA-DQA1*01:02-B1*06:02L HLA-DRB1*01:02L HLA-DPA1*03:01-B1*04:02L HLA-DRB1*14:01L HLA-DRB1*14:02L HLA-DQA1*05:05-B1*03:19L HLA-DQA1*05:05-B1*03:116L
  REGION 1..10: note = CONT. FROM ABOVE: HLA-DRB1*09:01L HLA-DPA1*02:01-B1*13:01L HLA-D PA1*03:01-B1*105:01L HLA-DQA1*03:01-B1*03:02L HLA-DPA1*01:03-B1* 104:01L HLA-DPA1*01:02-B1*04:01L HLA-DRB1*10:01L HLA-DRB1*16:01L HLA-DRB1*08:03L HLA-DQA1*02:01-B1*03:03L HLA-DRB1*15:03L
VVQEGVLTAV

SEQ ID NO: 8550 - protein, 10 aa, Severe acute respiratory syndrome coronavirus 2
  REGION 1..10: note = Table B: HLA-DQA1*03:02-B1*03:03L HLA-DQA1*05:01-B1*03:01L HLA-DRB1*04:03L HLA-DRB1*13:02L HLA-DRB1*13:03L HLA-DRB1*01:03L HLA-DRB1*04:02L HLA-DQA1*01:02-B1*06:02L HLA-DRB1*01:02L HLA-DRB4*03:01NL HLA-DRB1*08:01L HLA-DQA1*05:05-B1*03:19L
  REGION 1..10: note = CONT. FROM ABOVE: HLA-DQA1*05:01-B1*02:01L HLA-DPA1*01:03-B1*04: 02L HLA-DRB1*12:01L HLA-DPA1*03:01-B1*105:01L HLA-DQA1*03:01-B1* 03:02L HLA-DQA1*05:05-B1*03:01M HLA-DRB1*14:17L HLA-DPA1*01:02-B 1*04:01L HLA-DRB1*16:01L HLA-DQA1*01:03-B1*06:01M
  REGION 1..10: note = CONT. FROM ABOVE: HLA-DRB1*04:08L HLA-DQA1*02:01-B1*03:03L
VLTAVVIPTK

SEQ ID NO: 8551 - protein, 12 aa, Severe acute respiratory syndrome coronavirus 2
  REGION 1..12: note = Table B: HLA-DQA1*03:02-B1*03:03L HLA-DQA1*05:01-B1*03:01L HLA-DRB1*13:02L HLA-DRB1*04:04L HLA-DRB1*04:05L HLA-DQA1*01:02-B1*06:02L HLA-DRB1*01:02L HLA-DRB1*08:04L HLA-DRB1*11:03L HLA-DRB1*14:02L HLA-DRB1*08:01L HLA-DRB1*11:01L
  REGION 1..12: note = CONT. FROM ABOVE: HLA-DQA1*05:05-B1*03:19L HLA-DRB1*04:10L HLA-D RB1*12:01L HLA-DRB3*01:01L HLA-DQA1*05:05-B1*03:01L HLA-DRB1*16: 01L HLA-DQA1*01:03-B1*06:01L HLA-DRB1*08:02L HLA-DRB1*08:03L HLA -DQA1*02:01-B1*03:03L HLA-DRB1*15:03L
VVIPTKKAGGTT

SEQ ID NO: 8552 - protein, 12 aa, Severe acute respiratory syndrome coronavirus 2
  REGION 1..12: note = Table B: HLA-DQA1*03:02-B1*03:03L HLA-DQA1*05:01-B1*03:01L HLA-DRB1*04:05L HLA-DQA1*01:02-B1*06:02L HLA-DRB1*01:02L HLA-DRB1*08:04L HLA-DRB1*08:01L HLA-DRB1*11:01L HLA-DQA1*05:05-B1*03:19L HLA-DRB1*12:01L
  REGION 1..12: note = CONT. FROM ABOVE: HLA-DQA1*05:05-B1*03:01L HLA-DRB1*16:01L HLA-D QA1*02:01-B1*03:03L
VIPTKKAGGTTE

SEQ ID NO: 8553 - protein, 11 aa, Severe acute respiratory syndrome coronavirus 2
  REGION 1..11: note = Table B: HLA-DQA1*03:02-B1*03:03L HLA-DQA1*05:01-B1*03:01L
AGGTTEMLAKA

SEQ ID NO: 8554 - protein, 10 aa, Severe acute respiratory syndrome coronavirus 2
  REGION 1..10: note = Table B: HLA-DQA1*03:02-B1*03:03L HLA-DQA1*05:01-B1*03:01L HLA-DQA1*01:02-B1*06:02L HLA-DQA1*05:05-B1*03:19L HLA-DQA1*05:01-B1*02:01L HLA-DPA1*03:01-B1*105:01L HLA-DQA1*03:01-B1*03:02L HLA-DPA1*01:03-B1*104:01L
  REGION 1..10: note = CONT. FROM ABOVE: HLA-DPA1*01:02-B1*04:01L HLA-DQA1*01:03-B1*06: 01L HLA-DQA1*02:01-B1*03:03L
GTTEMLAKAL

SEQ ID NO: 8555 - protein, 10 aa, Severe acute respiratory syndrome coronavirus 2
  REGION 1..10: note = Table B: HLA-DQA1*03:02-B1*03:03L HLA-DRB1*04:03L HLA-DRB1*04:02L HLA-DRB1*04:05L HLA-DRB4*03:01NL HLA-DQA1*01-B1*05L HLA-DQA1*05:01-B1*02:01L HLA-DRB1*04:10L HLA-DQA1*03:01-B1*03:02L HLA-DRB1*14:54L HLA-DRB1*14:17L
  REGION 1..10: note = CONT. FROM ABOVE: HLA-DRB1*16:01L HLA-DRB1*04:08L HLA-DQA1*02:01 -B1*03:03L
NYITTYPGQG

SEQ ID NO: 8556 - protein, 10 aa, Severe acute respiratory syndrome coronavirus 2
  REGION 1..10: note = Table B: HLA-DQA1*03:02-B1*03:03L HLA-DQA1*05:01-B1*03:01L HLA-DRB1*04:03L HLA-DRB1*04:02L HLA-DQA1*01:02-B1*06:02L HLA-DRB1*01:02L HLA-DRB3*02:01L HLA-DPA1*03:01-B1*04:02L HLA-DQA1*01-B1*05L HLA-DQA1*05:05-B1*03:19L
  REGION 1..10: note = CONT. FROM ABOVE: HLA-DQA1*05:01-B1*02:01L HLA-DRB1*12:01L HLA-D PA1*03:01-B1*105:01L HLA-DQA1*03:01-B1*03:02L HLA-DPA1*01:02-B1* 04:01L HLA-DRB1*16:01L HLA-DQA1*01:03-B1*06:01L HLA-DQA1*02:01-B 1*03:03L HLA-DRB1*15:03L
YITTYPGQGL

SEQ ID NO: 8557 - protein, 10 aa, Severe acute respiratory syndrome coronavirus 2
  REGION 1..10: note = Table B: HLA-DQA1*03:02-B1*03:03L HLA-DQA1*05:01-B1*03:01L HLA-DRB1*04:03L HLA-DRB1*13:03L HLA-DRB1*01:03L HLA-DRB1*04:02L HLA-DQA1*01:02-B1*06:02L HLA-DRB1*01:02L HLA-DRB3*02:01L HLA-DRB1*14:01L HLA-DQA1*01-B1*05L HLA-DQA1*05:05-B1*03:19L
  REGION 1..10: note = CONT. FROM ABOVE: HLA-DQA1*05:01-B1*02:01L HLA-DRB1*12:01L HLA-D PA1*03:01-B1*105:01L HLA-DQA1*03:01-B1*03:02L HLA-DQA1*05:05-B1* 03:01L HLA-DRB1*14:17L HLA-DRB1*16:01L HLA-DQA1*01:03-B1*06:01L HLA-DRB1*04:08L HLA-DQA1*02:01-B1*03:03L HLA-DRB1*15:01L
  REGION 1..10: note = CONT. FROM ABOVE: HLA-DRB1*15:03L
ITTYPGQGLN

SEQ ID NO: 8558 - protein, 10 aa, Severe acute respiratory syndrome coronavirus 2
  REGION 1..10: note = Table B: HLA-DQA1*03:02-B1*03:03L HLA-DQA1*05:01-B1*03:01L HLA-DRB1*04:01L HLA-DRB1*04:03L HLA-DRB1*13:02L HLA-DRB1*13:03L HLA-DRB1*01:03L HLA-DRB1*04:05L HLA-DQA1*01:02-B1*06:02M HLA-DRB1*01:01L HLA-DRB4*03:01NL HLA-DRB1*08:77L
  REGION 1..10: note = CONT. FROM ABOVE: HLA-DPA1*01:03-B1*03:01L HLA-DPA1*03:01-B1*04: 02L HLA-DRB1*03:01L HLA-DRB1*14:01L HLA-DRB1*11:02L HLA-DRB1*11: 03L HLA-DRB1*14:02M HLA-DRB1*11:01L HLA-DQA1*01-B1*05L HLA-DQA1* 05:05-B1*03:19M HLA-DQA1*05:01-B1*02:01L HLA-DRB4*01:01L
  REGION 1..10: note = CONT. FROM ABOVE: HLA-DPA1*01:03-B1*04:01M HLA-DQA1*05:05-B1*03: 116L HLA-DPA1*01:03-B1*04:02L HLA-DRB1*12:01L HLA-DPA1*02:01-B1* 13:01M HLA-DPA1*03:01-B1*105:01M HLA-DPA1*01:03-B1*104:01L HLA-D QA1*05:05-B1*03:01L HLA-DPA1*01:02-B1*04:01L HLA-DRB1*10:01L
  REGION 1..10: note = CONT. FROM ABOVE: HLA-DRB1*16:01L HLA-DQA1*01:03-B1*06:01L HLA-D RB1*08:02L HLA-DRB1*08:03L HLA-DQA1*02:01-B1*03:03L HLA-DRB1*15: 03L
TYPGQGLNGY

SEQ ID NO: 8559 - protein, 13 aa, Severe acute respiratory syndrome coronavirus 2
  REGION 1..13: note = Table B: HLA-DQA1*03:02-B1*03:03L HLA-DQA1*05:01-B1*03:01L HLA-DQA1*05:05-B1*03:19L HLA-DQA1*03:01-B1*03:02L HLA-DQA1*02:01-B1*03:03L
YPGQGLNGYTVEE

SEQ ID NO: 8560 - protein, 10 aa, Severe acute respiratory syndrome coronavirus 2
  REGION 1..10: note = Table B: HLA-DQA1*03:02-B1*03:03L HLA-DRB1*04:03L HLA-DRB1*04:02L HLA-DQA1*01-B1*05L HLA-DQA1*05:01-B1*02:01L HLA-DQA1*03:01-B1*03:02L HLA-DQA1*01:03-B1*06:01L HLA-DQA1*02:01-B1*03:03L
NGYTVEEAKT

SEQ ID NO: 8561 - protein, 10 aa, Severe acute respiratory syndrome coronavirus 2
  REGION 1..10: note = Table B: HLA-DQA1*03:02-B1*03:03L HLA-DQA1*01-B1*05L HLA-DQA1*05:05-B1*03:19L HLA-DQA1*05:01-B1*02:01L HLA-DPA1*02:01-B1*13:01L HLA-DQA1*03:01-B1*03:02L HLA-DRB1*16:01L HLA-DQA1*01:03-B1*06:01L
  REGION 1..10: note = CONT. FROM ABOVE: HLA-DQA1*02:01-B1*03:03L HLA-DRB1*15:03L
GYTVEEAKTV

SEQ ID NO: 8562 - protein, 10 aa, Severe acute respiratory syndrome coronavirus 2
  REGION 1..10: note = Table B: HLA-DQA1*03:02-B1*03:03M HLA-DQA1*05:01-B1*03:01L HLA-DRB1*04:01L HLA-DRB1*04:03L HLA-DRB1*13:02L HLA-DRB1*13:03L HLA-DRB1*01:03L HLA-DRB1*04:02L HLA-DRB1*04:05L HLA-DQA1*01:02-B1*06:02L HLA-DRB1*01:01L HLA-DRB1*01:02L
  REGION 1..10: note = CONT. FROM ABOVE: HLA-DRB4*03:01NL HLA-DRB1*08:77L HLA-DRB3*02:0 1L HLA-DPA1*01:03-B1*03:01L HLA-DPA1*03:01-B1*04:02L HLA-DRB1*14 :01L HLA-DRB1*14:02L HLA-DRB1*08:01L HLA-DRB1*11:01L HLA-DQA1*01 -B1*05L HLA-DQA1*05:05-B1*03:19L HLA-DQA1*05:01-B1*02:01L
  REGION 1..10: note = CONT. FROM ABOVE: HLA-DRB4*01:01L HLA-DPA1*01:03-B1*04:01L HLA-D QA1*05:05-B1*03:116L HLA-DRB1*09:01L HLA-DPA1*01:03-B1*04:02L HL A-DRB1*12:01L HLA-DPA1*02:01-B1*13:01L HLA-DPA1*03:01-B1*105:01L HLA-DQA1*03:01-B1*03:02M HLA-DPA1*01:03-B1*104:01L
  REGION 1..10: note = CONT. FROM ABOVE: HLA-DQA1*05:05-B1*03:01L HLA-DPA1*01:02-B1*04: 01L HLA-DRB1*07:01L HLA-DRB1*10:01L HLA-DRB1*16:01L HLA-DQA1*01: 03-B1*06:01L HLA-DRB1*08:03L HLA-DQA1*02:01-B1*03:03M HLA-DRB1*1 5:03M
YTVEEAKTVL

SEQ ID NO: 8563 - protein, 12 aa, Severe acute respiratory syndrome coronavirus 2
  REGION 1..12: note = Table B: HLA-DQA1*03:02-B1*03:03L HLA-DRB1*13:03L HLA-DRB1*01:03L HLA-DRB1*04:02L HLA-DRB1*04:04L HLA-DQA1*01:02-B1*06:02L HLA-DRB1*01:02L HLA-DRB4*03:01NL HLA-DPA1*01:03-B1*03:01L HLA-DPA1*03:01-B1*04:02L
  REGION 1..12: note = CONT. FROM ABOVE: HLA-DRB1*14:01L HLA-DRB1*08:01L HLA-DQA1*05:01 -B1*02:01L HLA-DRB1*04:10L HLA-DRB1*12:01L HLA-DRB1*12:02L HLA-D PA1*02:01-B1*13:01L HLA-DPA1*03:01-B1*105:01L HLA-DQA1*03:01-B1* 03:02L HLA-DRB1*14:54L HLA-DRB1*10:01L HLA-DRB1*16:01L
  REGION 1..12: note = CONT. FROM ABOVE: HLA-DRB1*04:08L HLA-DQA1*02:01-B1*03:03L HLA-D RB1*15:03L
KSAFYILPSIIS

SEQ ID NO: 8564 - protein, 10 aa, Severe acute respiratory syndrome coronavirus 2
  REGION 1..10: note = Table B: HLA-DQA1*03:02-B1*03:03L HLA-DRB1*04:03L HLA-DRB1*13:03L HLA-DRB1*01:03L HLA-DRB1*04:02L HLA-DRB1*04:05L HLA-DRB1*01:02L HLA-DRB4*03:01NL HLA-DQA1*01-B1*05L HLA-DQA1*05:01-B1*02:01L HLA-DRB1*04:10L HLA-DRB1*12:01L
  REGION 1..10: note = CONT. FROM ABOVE: HLA-DPA1*03:01-B1*105:01L HLA-DQA1*03:01-B1*03 :02L HLA-DRB1*14:54L HLA-DQA1*05:05-B1*03:01L HLA-DRB1*14:17L HL A-DRB1*10:01L HLA-DRB1*16:01L HLA-DRB1*04:08L HLA-DQA1*02:01-B1* 03:03L HLA-DRB1*15:03L
FYILPSIISN

SEQ ID NO: 8565 - protein, 11 aa, Severe acute respiratory syndrome coronavirus 2
  REGION 1..11: note = Table B: HLA-DQA1*03:02-B1*03:03L HLA-DQA1*05:01-B1*03:01L HLA-DRB1*13:03L HLA-DRB1*01:03L HLA-DRB1*04:05L HLA-DQA1*01:02-B1*06:02L HLA-DRB1*01:02L HLA-DRB4*03:01NL HLA-DRB1*12:01L HLA-DPA1*03:01-B1*105:01L
  REGION 1..11: note = CONT. FROM ABOVE: HLA-DPA1*01:02-B1*04:01L HLA-DRB1*16:01L HLA-D RB1*04:08L
YILPSIISNEK

SEQ ID NO: 8566 - protein, 11 aa, Severe acute respiratory syndrome coronavirus 2
  REGION 1..11: note = Table B: HLA-DQA1*03:02-B1*03:03L HLA-DQA1*01:02-B1*06:02L HLA-DQA1*05:01-B1*02:01L
ILPSIISNEKQ

SEQ ID NO: 8567 - protein, 10 aa, Severe acute respiratory syndrome coronavirus 2
  REGION 1..10: note = Table B: HLA-DQA1*03:02-B1*03:03L HLA-DRB1*04:03L HLA-DRB1*04:02L HLA-DQA1*05:01-B1*02:01L HLA-DQA1*03:01-B1*03:02L HLA-DRB1*14:17L HLA-DQA1*01:03-B1*06:01L HLA-DQA1*02:01-B1*03:03L
PSIISNEKQE

SEQ ID NO: 8568 - protein, 10 aa, Severe acute respiratory syndrome coronavirus 2
  REGION 1..10: note = Table B: HLA-DQA1*03:02-B1*03:03L HLA-DQA1*05:05-B1*03:19L HLA-DPA1*01:03-B1*104:01L
SIISNEKQEI

SEQ ID NO: 8569 - protein, 10 aa, Severe acute respiratory syndrome coronavirus 2
  REGION 1..10: note = Table B: HLA-DQA1*03:02-B1*03:03L HLA-DQA1*05:01-B1*03:01L HLA-DRB1*04:03L HLA-DRB1*04:02L HLA-DRB3*02:01L HLA-DPA1*03:01-B1*04:02L HLA-DRB1*14:01L HLA-DQA1*05:01-B1*02:01L HLA-DRB1*12:01L
  REGION 1..10: note = CONT. FROM ABOVE: HLA-DQA1*03:01-B1*03:02L HLA-DRB1*14:54L HLA-D PA1*01:02-B1*04:01L HLA-DRB1*16:01L HLA-DQA1*02:01-B1*03:03L HLA -DRB1*15:03L
IISNEKQEIL

SEQ ID NO: 8570 - protein, 10 aa, Severe acute respiratory syndrome coronavirus 2
  REGION 1..10: note = Table B: HLA-DQA1*03:02-B1*03:03M HLA-DRB1*11:02L HLA-DQA1*05:05-B1*03:19M HLA-DRB1*09:01L HLA-DQA1*03:01-B1*03:02L HLA-DPA1*01:03-B1*104:01L
NEKQEILGTV

SEQ ID NO: 8571 - protein, 10 aa, Severe acute respiratory syndrome coronavirus 2
  REGION 1..10: note = Table B: HLA-DQA1*03:02-B1*03:03L HLA-DQA1*01:02-B1*06:02L HLA-DRB1*09:01L HLA-DPA1*03:01-B1*105:01L HLA-DQA1*02:01-B1*03:03L HLA-DRB1*15:03L
EILGTVSWNL

SEQ ID NO: 8572 - protein, 10 aa, Severe acute respiratory syndrome coronavirus 2
  REGION 1..10: note = Table B: HLA-DQA1*03:02-B1*03:03L HLA-DQA1*05:01-B1*03:01L HLA-DQA1*01:02-B1*06:02L HLA-DQA1*05:05-B1*03:19L HLA-DQA1*05:01-B1*02:01L HLA-DPA1*03:01-B1*105:01L HLA-DQA1*03:01-B1*03:02L HLA-DPA1*01:02-B1*04:01L
  REGION 1..10: note = CONT. FROM ABOVE: HLA-DQA1*01:03-B1*06:01L HLA-DQA1*02:01-B1*03: 03L
GTVSWNLREM

SEQ ID NO: 8573 - protein, 10 aa, Severe acute respiratory syndrome coronavirus 2
  REGION 1..10: note = Table B: HLA-DQA1*03:02-B1*03:03L HLA-DQA1*05:05-B1*03:19L
AEETRKLMPV

SEQ ID NO: 8574 - protein, 10 aa, Severe acute respiratory syndrome coronavirus 2
  REGION 1..10: note = Table B: HLA-DQA1*03:02-B1*03:03M HLA-DQA1*05:01-B1*03:01L HLA-DRB1*08:77L HLA-DRB1*11:02M HLA-DQA1*05:05-B1*03:19H HLA-DQA1*05:01-B1*02:01L HLA-DRB4*01:01L HLA-DPA1*01:03-B1*04:01L HLA-DQA1*05:05-B1*03:116L
  REGION 1..10: note = CONT. FROM ABOVE: HLA-DRB1*09:01L HLA-DQA1*03:01-B1*03:02L HLA-D PA1*01:03-B1*104:01M HLA-DRB1*10:01L HLA-DRB1*16:01L HLA-DQA1*01 :03-B1*06:01L HLA-DQA1*02:01-B1*03:03L HLA-DRB1*15:03L
VETKAIVSTI

SEQ ID NO: 8575 - protein, 10 aa, Severe acute respiratory syndrome coronavirus 2
  REGION 1..10: note = Table B: HLA-DQA1*03:02-B1*03:03L HLA-DQA1*05:01-B1*03:01L HLA-DRB1*04:01L HLA-DRB1*04:03L HLA-DRB1*13:02L HLA-DRB1*13:03L HLA-DRB1*01:03L HLA-DRB1*04:02L HLA-DRB1*04:05L HLA-DQA1*01:02-B1*06:02M HLA-DRB1*01:01L HLA-DRB1*01:02L
  REGION 1..10: note = CONT. FROM ABOVE: HLA-DRB4*03:01NL HLA-DRB1*08:77L HLA-DRB3*02:0 1L HLA-DPA1*01:03-B1*03:01L HLA-DPA1*03:01-B1*04:02L HLA-DRB1*03 :01L HLA-DRB1*14:01L HLA-DRB1*11:02L HLA-DRB1*11:03L HLA-DRB1*11 :04L HLA-DRB1*14:02M HLA-DRB1*08:01L HLA-DRB1*11:01L
  REGION 1..10: note = CONT. FROM ABOVE: HLA-DQA1*01-B1*05L HLA-DQA1*05:05-B1*03:19L HL A-DQA1*05:01-B1*02:01M HLA-DRB4*01:01L HLA-DPA1*01:03-B1*04:01M HLA-DQA1*05:05-B1*03:116L HLA-DPA1*01:03-B1*04:02L HLA-DRB1*12:0 1L HLA-DRB1*12:02L HLA-DPA1*02:01-B1*13:01L
  REGION 1..10: note = CONT. FROM ABOVE: HLA-DPA1*03:01-B1*105:01L HLA-DQA1*03:01-B1*03 :02L HLA-DRB1*14:54L HLA-DPA1*01:03-B1*104:01L HLA-DQA1*05:05-B1 *03:01L HLA-DRB1*14:17L HLA-DPA1*01:02-B1*04:01L HLA-DRB1*07:01L HLA-DRB1*10:01L HLA-DRB1*16:01L HLA-DQA1*01:03-B1*06:01L
  REGION 1..10: note = CONT. FROM ABOVE: HLA-DRB1*08:02L HLA-DQA1*02:01-B1*03:03M HLA -DRB1*15:03L
AIVSTIQRKY

SEQ ID NO: 8576 - protein, 10 aa, Severe acute respiratory syndrome coronavirus 2
  REGION 1..10: note = Table B: HLA-DQA1*03:02-B1*03:03L HLA-DQA1*05:01-B1*03:01L HLA-DRB1*04:03L HLA-DRB1*04:02L HLA-DQA1*01:02-B1*06:02L HLA-DQA1*05:01-B1*02:01L HLA-DPA1*03:01-B1*105:01L HLA-DQA1*03:01-B1*03:02L HLA-DQA1*05:05-B1*03:01L
  REGION 1..10: note = CONT. FROM ABOVE: HLA-DQA1*01:03-B1*06:01L HLA-DQA1*02:01-B1*03: 03L
GIKIQEGVVD

SEQ ID NO: 8577 - protein, 11 aa, Severe acute respiratory syndrome coronavirus 2
  REGION 1..11: note = Table B: HLA-DQA1*03:02-B1*03:03L HLA-DRB1*04:03L HLA-DRB1*04:02L HLA-DRB1*04:05L HLA-DRB1*01:02L HLA-DRB4*03:01NL HLA-DRB1*14:01L HLA-DQA1*01-B1*05L HLA-DRB1*04:10L HLA-DRB1*12:01L HLA-DPA1*03:01-B1*105:01L
  REGION 1..11: note = CONT. FROM ABOVE: HLA-DQA1*03:01-B1*03:02L HLA-DRB1*14:54L HLA-D RB1*14:17L HLA-DRB1*04:08L HLA-DRB1*15:03L
IKIQEGVVDYG

SEQ ID NO: 8578 - protein, 10 aa, Severe acute respiratory syndrome coronavirus 2
  REGION 1..10: note = Table B: HLA-DQA1*03:02-B1*03:03L HLA-DQA1*03:01-B1*03:02L HLA-DQA1*01:03-B1*06:01L HLA-DQA1*02:01-B1*03:03L
QEGVVDYGAR

SEQ ID NO: 8579 - protein, 10 aa, Severe acute respiratory syndrome coronavirus 2
  REGION 1..10: note = Table B: HLA-DQA1*03:02-B1*03:03L HLA-DQA1*05:01-B1*03:01L HLA-DQA1*01:02-B1*06:02L HLA-DQA1*05:05-B1*03:19L HLA-DQA1*05:01-B1*02:01L HLA-DPA1*03:01-B1*105:01L HLA-DQA1*03:01-B1*03:02L HLA-DPA1*01:02-B1*04:01L
  REGION 1..10: note = CONT. FROM ABOVE: HLA-DQA1*01:03-B1*06:01L HLA-DQA1*02:01-B1*03: 03L HLA-DRB1*15:03L
EGVVDYGARF

SEQ ID NO: 8580 - protein, 10 aa, Severe acute respiratory syndrome coronavirus 2
  REGION 1..10: note = Table B: HLA-DQA1*03:02-B1*03:03L HLA-DQA1*05:01-B1*03:01M HLA-DRB1*04:01L HLA-DRB1*04:03L HLA-DRB1*13:02L HLA-DRB1*13:03M HLA-DRB1*01:03M HLA-DRB1*04:02L HLA-DRB1*04:05L HLA-DQA1*01:02-B1*06:02M HLA-DRB1*01:01L HLA-DRB4*03:01NL
  REGION 1..10: note = CONT. FROM ABOVE: HLA-DRB1*08:77M HLA-DPA1*01:03-B1*03:01M HLA-D PA1*03:01-B1*04:02L HLA-DRB1*03:01M HLA-DRB1*14:01L HLA-DRB1*11: 02L HLA-DRB1*11:03L HLA-DRB1*11:04L HLA-DRB1*14:02M HLA-DRB1*11: 01L HLA-DRB5*01:01L HLA-DQA1*01-B1*05M HLA-DQA1*05:05-B1*03:19M
  REGION 1..10: note = CONT. FROM ABOVE: HLA-DQA1*05:01-B1*02:01M HLA-DRB4*01:01M HLA-D PA1*01:03-B1*04:01M HLA-DQA1*05:05-B1*03:116L HLA-DRB1*09:01L HL A-DPA1*01:03-B1*04:02M HLA-DRB1*12:01L HLA-DRB1*12:02L HLA-DPA1* 02:01-B1*13:01L HLA-DPA1*03:01-B1*105:01M
  REGION 1..10: note = CONT. FROM ABOVE: HLA-DQA1*03:01-B1*03:02L HLA-DRB1*14:54L HLA-D PA1*01:03-B1*104:01M HLA-DQA1*05:05-B1*03:01L HLA-DRB1*14:17L HL A-DPA1*01:02-B1*04:01L HLA-DRB1*10:01M HLA-DRB1*16:01M HLA-DQA1* 01:03-B1*06:01L HLA-DRB1*08:02M HLA-DRB1*08:03L
  REGION 1..10: note = CONT. FROM ABOVE: HLA-DQA1*02:01-B1*03:03M HLA-DRB1*15:01L HLA -DRB1*15:03M
GVVDYGARFY

SEQ ID NO: 8581 - protein, 10 aa, Severe acute respiratory syndrome coronavirus 2
  REGION 1..10: note = Table B: HLA-DQA1*03:02-B1*03:03L HLA-DRB1*04:05L HLA-DQA1*01:02-B1*06:02L HLA-DRB1*01:02L HLA-DRB1*11:02L HLA-DQA1*05:05-B1*03:19L HLA-DQA1*05:05-B1*03:116L HLA-DPA1*02:01-B1*13:01L HLA-DPA1*03:01-B1*105:01L
  REGION 1..10: note = CONT. FROM ABOVE: HLA-DPA1*01:03-B1*104:01L HLA-DRB1*16:01L HLA- DQA1*01:03-B1*06:01L HLA-DQA1*02:01-B1*03:03L HLA-DRB1*15:03L
FYFYTSKTTV

SEQ ID NO: 8582 - protein, 10 aa, Severe acute respiratory syndrome coronavirus 2
  REGION 1..10: note = Table B: HLA-DQA1*03:02-B1*03:03L HLA-DQA1*05:01-B1*03:01L HLA-DRB1*04:03L HLA-DRB1*13:03L HLA-DRB1*01:03L HLA-DRB1*04:02L HLA-DRB1*04:05L HLA-DRB1*01:02L HLA-DRB4*03:01NL HLA-DQA1*01-B1*05L HLA-DQA1*05:01-B1*02:01L HLA-DRB1*04:10L
  REGION 1..10: note = CONT. FROM ABOVE: HLA-DRB1*12:01L HLA-DPA1*03:01-B1*105:01L HLA- DQA1*03:01-B1*03:02L HLA-DRB1*14:54L HLA-DRB1*14:17L HLA-DPA1*01 :02-B1*04:01L HLA-DRB1*16:01L HLA-DRB1*04:08L HLA-DQA1*02:01-B1* 03:03L HLA-DRB1*15:03L
FYTSKTTVAS

SEQ ID NO: 8583 - protein, 10 aa, Severe acute respiratory syndrome coronavirus 2
  REGION 1..10: note = Table B: HLA-DQA1*03:02-B1*03:03L HLA-DQA1*05:01-B1*03:01L HLA-DRB1*13:02L HLA-DRB1*13:03L HLA-DRB1*01:03L HLA-DRB1*04:02L HLA-DQA1*01:02-B1*06:02L HLA-DRB1*01:02L HLA-DRB1*08:77L HLA-DPA1*01:03-B1*03:01L HLA-DPA1*03:01-B1*04:02L
  REGION 1..10: note = CONT. FROM ABOVE: HLA-DRB1*14:01L HLA-DRB1*14:02L HLA-DRB1*08:01 L HLA-DRB5*01:01L HLA-DQA1*01-B1*05L HLA-DQA1*05:05-B1*03:19L HL A-DQA1*05:01-B1*02:01L HLA-DPA1*01:03-B1*04:01L HLA-DQA1*05:05-B 1*03:116L HLA-DRB1*09:01L HLA-DPA1*01:03-B1*04:02L
  REGION 1..10: note = CONT. FROM ABOVE: HLA-DPA1*03:01-B1*105:01L HLA-DQA1*03:01-B1*03 :02L HLA-DPA1*01:02-B1*04:01L HLA-DRB1*10:01L HLA-DRB1*16:01L HL A-DQA1*02:01-B1*03:03L HLA-DRB1*15:03L
YTSKTTVASL

SEQ ID NO: 8584 - protein, 11 aa, Severe acute respiratory syndrome coronavirus 2
  REGION 1..11: note = Table B: HLA-DQA1*03:02-B1*03:03L HLA-DQA1*05:01-B1*02:01L HLA-DQA1*03:01-B1*03:02L HLA-DQA1*02:01-B1*03:03L
TSKTTVASLIN

SEQ ID NO: 8585 - protein, 10 aa, Severe acute respiratory syndrome coronavirus 2
  REGION 1..10: note = Table B: HLA-DQA1*03:02-B1*03:03M HLA-DQA1*05:01-B1*03:01L HLA-DRB1*13:03L HLA-DQA1*01:02-B1*06:02L HLA-DRB1*01:02L HLA-DPA1*03:01-B1*04:02L HLA-DRB1*14:01L HLA-DRB1*14:02L HLA-DRB1*08:01L HLA-DQA1*05:05-B1*03:19L
  REGION 1..10: note = CONT. FROM ABOVE: HLA-DQA1*05:01-B1*02:01L HLA-DPA1*01:03-B1*04: 01L HLA-DQA1*05:05-B1*03:116L HLA-DRB1*09:01L HLA-DPA1*01:03-B1* 04:02L HLA-DRB1*12:01L HLA-DPA1*03:01-B1*105:01M HLA-DQA1*03:01- B1*03:02L HLA-DPA1*01:02-B1*04:01L HLA-DQA1*01:03-B1*06:01L
  REGION 1..10: note = CONT. FROM ABOVE: HLA-DRB1*08:03L HLA-DQA1*02:01-B1*03:03L HLA-D RB1*15:03L
TTVASLINTL

SEQ ID NO: 8586 - protein, 12 aa, Severe acute respiratory syndrome coronavirus 2
  REGION 1..12: note = Table B: HLA-DQA1*03:02-B1*03:03L HLA-DQA1*05:01-B1*03:01L HLA-DRB1*04:03L HLA-DRB1*04:02L HLA-DQA1*01:02-B1*06:02L HLA-DQA1*01-B1*05L HLA-DQA1*05:05-B1*03:19L HLA-DQA1*05:01-B1*02:01L HLA-DPA1*03:01-B1*105:01L
  REGION 1..12: note = CONT. FROM ABOVE: HLA-DQA1*03:01-B1*03:02L HLA-DQA1*05:05-B1*03: 01L HLA-DRB1*14:17L HLA-DQA1*01:03-B1*06:01L HLA-DQA1*02:01-B1*0 3:03L
VASLINTLNDLN

SEQ ID NO: 8587 - protein, 11 aa, Severe acute respiratory syndrome coronavirus 2
  REGION 1..11: note = Table B: HLA-DQA1*03:02-B1*03:03L HLA-DRB1*13:03L HLA-DRB1*01:03L HLA-DRB1*04:04L HLA-DRB1*12:01L HLA-DQA1*01:03-B1*06:01L HLA-DRB1*04:08L HLA-DQA1*02:01-B1*03:03L
LINTLNDLNET

SEQ ID NO: 8588 - protein, 10 aa, Severe acute respiratory syndrome coronavirus 2
  REGION 1..10: note = Table B: HLA-DQA1*03:02-B1*03:03M HLA-DQA1*05:01-B1*03:01L HLA-DRB1*13:03L HLA-DQA1*01:02-B1*06:02L HLA-DPA1*03:01-B1*04:02L HLA-DRB1*14:01L HLA-DRB1*14:02L HLA-DQA1*05:05-B1*03:19L HLA-DQA1*05:01-B1*02:01L
  REGION 1..10: note = CONT. FROM ABOVE: HLA-DQA1*05:05-B1*03:116L HLA-DRB1*09:01L HLA- DPA1*03:01-B1*105:01L HLA-DQA1*03:01-B1*03:02L HLA-DPA1*01:02-B1 *04:01L HLA-DRB1*08:03L HLA-DQA1*02:01-B1*03:03L HLA-DRB1*15:03L
NTLNDLNETL

SEQ ID NO: 8589 - protein, 10 aa, Severe acute respiratory syndrome coronavirus 2
  REGION 1..10: note = Table B: HLA-DQA1*03:02-B1*03:03L
TLNDLNETLV

SEQ ID NO: 8590 - protein, 10 aa, Severe acute respiratory syndrome coronavirus 2
  REGION 1..10: note = Table B: HLA-DQA1*03:02-B1*03:03L HLA-DQA1*05:01-B1*03:01L HLA-DRB1*13:03M HLA-DRB1*01:03L HLA-DQA1*01:02-B1*06:02M HLA-DRB4*03:01NL HLA-DRB1*08:77M HLA-DPA1*01:03-B1*03:01L HLA-DPA1*03:01-B1*04:02L HLA-DRB1*03:01L HLA-DRB1*14:01L
  REGION 1..10: note = CONT. FROM ABOVE: HLA-DRB1*11:02L HLA-DRB1*14:02L HLA-DRB5*01:01 L HLA-DQA1*01-B1*05L HLA-DQA1*05:05-B1*03:19M HLA-DQA1*05:01-B1* 02:01M HLA-DRB4*01:01L HLA-DPA1*01:03-B1*04:01M HLA-DQA1*05:05-B 1*03:116L HLA-DPA1*01:03-B1*04:02L HLA-DRB1*12:01L
  REGION 1..10: note = CONT. FROM ABOVE: HLA-DPA1*02:01-B1*13:01L HLA-DPA1*03:01-B1*105 :01L HLA-DPA1*01:03-B1*104:01L HLA-DQA1*05:05-B1*03:01L HLA-DRB1 *10:01L HLA-DRB1*16:01M HLA-DRB1*08:02L HLA-DQA1*02:01-B1*03:03L HLA-DRB1*15:03L
ETLVTMPLGY

SEQ ID NO: 8591 - protein, 10 aa, Severe acute respiratory syndrome coronavirus 2
  REGION 1..10: note = Table B: HLA-DQA1*03:02-B1*03:03L HLA-DQA1*05:01-B1*03:01M HLA-DRB1*13:03L HLA-DRB1*04:05L HLA-DQA1*01:02-B1*06:02L HLA-DRB1*01:02L HLA-DPA1*01:03-B1*03:01L HLA-DPA1*03:01-B1*04:02L HLA-DRB1*14:01L HLA-DRB1*14:02L
  REGION 1..10: note = CONT. FROM ABOVE: HLA-DRB1*08:01L HLA-DRB5*01:01L HLA-DQA1*01-B1 *05L HLA-DQA1*05:01-B1*02:01L HLA-DPA1*01:03-B1*04:01L HLA-DQA1* 05:05-B1*03:116L HLA-DPA1*02:01-B1*13:01L HLA-DPA1*03:01-B1*105: 01L HLA-DQA1*03:01-B1*03:02L HLA-DPA1*01:02-B1*04:01L
  REGION 1..10: note = CONT. FROM ABOVE: HLA-DRB1*16:01L HLA-DQA1*01:03-B1*06:01L HLA-D RB1*08:03L HLA-DQA1*02:01-B1*03:03L HLA-DRB1*15:03L
MPLGYVTHGL

SEQ ID NO: 8592 - protein, 10 aa, Severe acute respiratory syndrome coronavirus 2
  REGION 1..10: note = Table B: HLA-DQA1*03:02-B1*03:03L HLA-DQA1*03:01-B1*03:02L HLA-DQA1*02:01-B1*03:03L
VTHGLNLEEA

SEQ ID NO: 8593 - protein, 10 aa, Severe acute respiratory syndrome coronavirus 2
  REGION 1..10: note = Table B: HLA-DQA1*03:02-B1*03:03L HLA-DQA1*05:01-B1*03:01L HLA-DQA1*01:02-B1*06:02L HLA-DQA1*05:05-B1*03:19L HLA-DQA1*05:01-B1*02:01L HLA-DQA1*03:01-B1*03:02L HLA-DQA1*01:03-B1*06:01L HLA-DQA1*02:01-B1*03:03L
EEAARYMRSL

SEQ ID NO: 8594 - protein, 12 aa, Severe acute respiratory syndrome coronavirus 2
  REGION 1..12: note = Table B: HLA-DQA1*03:02-B1*03:03L HLA-DRB1*13:02L HLA-DRB1*04:04L HLA-DRB1*04:05L HLA-DQA1*01:02-B1*06:02L HLA-DPA1*01:03-B1*03:01L HLA-DRB1*11:01L HLA-DQA1*05:05-B1*03:19L HLA-DPA1*01:03-B1*04:02L
  REGION 1..12: note = CONT. FROM ABOVE: HLA-DPA1*02:01-B1*13:01L HLA-DPA1*03:01-B1*105 :01L HLA-DPA1*01:03-B1*104:01L HLA-DQA1*05:05-B1*03:01L HLA-DRB1 *10:01L HLA-DQA1*01:03-B1*06:01L HLA-DRB1*15:03L
YMRSLKVPATVS

SEQ ID NO: 8595 - protein, 10 aa, Severe acute respiratory syndrome coronavirus 2
  REGION 1..10: note = Table B: HLA-DQA1*03:02-B1*03:03L HLA-DQA1*05:01-B1*03:01L HLA-DQA1*01:02-B1*06:02L HLA-DRB1*01:02L HLA-DPA1*03:01-B1*04:02L HLA-DRB1*14:01L HLA-DRB1*14:02L HLA-DQA1*05:05-B1*03:19L HLA-DQA1*05:05-B1*03:116L
  REGION 1..10: note = CONT. FROM ABOVE: HLA-DPA1*02:01-B1*13:01L HLA-DPA1*03:01-B1*105 :01L HLA-DQA1*03:01-B1*03:02L HLA-DPA1*01:02-B1*04:01L HLA-DRB1* 16:01L HLA-DQA1*01:03-B1*06:01L HLA-DQA1*02:01-B1*03:03L HLA-DRB 1*15:03L
SLKVPATVSV

SEQ ID NO: 8596 - protein, 12 aa, Severe acute respiratory syndrome coronavirus 2
  REGION 1..12: note = Table B: HLA-DQA1*03:02-B1*03:03L HLA-DRB1*04:03L HLA-DRB1*14:17L HLA-DQA1*02:01-B1*03:03L
KVPATVSVSSPD

SEQ ID NO: 8597 - protein, 12 aa, Severe acute respiratory syndrome coronavirus 2
  REGION 1..12: note = Table B: HLA-DQA1*03:02-B1*03:03L HLA-DQA1*05:01-B1*03:01L HLA-DRB1*04:03L HLA-DQA1*01:01-B1*05:01L HLA-DQA1*05:05-B1*03:19L HLA-DQA1*05:01-B1*02:01L HLA-DQA1*05:05-B1*03:01L HLA-DQA1*02:01-B1*03:03L
VPATVSVSSPDA

SEQ ID NO: 8598 - protein, 13 aa, Severe acute respiratory syndrome coronavirus 2
  REGION 1..13: note = Table B: HLA-DQA1*03:02-B1*03:03L HLA-DQA1*05:05-B1*03:01L HLA-DQA1*01:03-B1*06:01L
VSVSSPDAVTAYN

SEQ ID NO: 8599 - protein, 13 aa, Severe acute respiratory syndrome coronavirus 2
  REGION 1..13: note = Table B: HLA-DQA1*03:02-B1*03:03L HLA-DPA1*03:01-B1*04:02L HLA-DQA1*05:05-B1*03:01L HLA-DQA1*01:03-B1*06:01L
VSSPDAVTAYNGY

SEQ ID NO: 8600 - protein, 12 aa, Severe acute respiratory syndrome coronavirus 2
  REGION 1..12: note = Table B: HLA-DQA1*03:02-B1*03:03L HLA-DQA1*03:01-B1*03:02L HLA-DQA1*01:03-B1*06:01L
SPDAVTAYNGYL

SEQ ID NO: 8601 - protein, 13 aa, Severe acute respiratory syndrome coronavirus 2
  REGION 1..13: note = Table B: HLA-DQA1*03:02-B1*03:03L HLA-DQA1*05:01-B1*03:01L HLA-DRB1*04:01L HLA-DRB1*13:02L HLA-DRB1*04:04L HLA-DQA1*01:02-B1*06:02L HLA-DRB1*14:01L HLA-DRB1*11:03L HLA-DRB1*11:04L HLA-DQA1*05:05-B1*03:19L
  REGION 1..13: note = CONT. FROM ABOVE: HLA-DQA1*05:01-B1*02:01L HLA-DRB1*12:02L HLA-D PA1*03:01-B1*105:01L HLA-DQA1*01:03-B1*06:01L HLA-DRB1*08:03L
VTAYNGYLTSSSK

SEQ ID NO: 8602 - protein, 13 aa, Severe acute respiratory syndrome coronavirus 2
  REGION 1..13: note = Table B: HLA-DQA1*03:02-B1*03:03L HLA-DQA1*05:01-B1*03:01L HLA-DQA1*01:02-B1*06:02L HLA-DPA1*03:01-B1*105:01L HLA-DQA1*05:05-B1*03:01L
AYNGYLTSSSKTP

SEQ ID NO: 8603 - protein, 10 aa, Severe acute respiratory syndrome coronavirus 2
  REGION 1..10: note = Table B: HLA-DQA1*03:02-B1*03:03L HLA-DQA1*05:01-B1*03:01L HLA-DRB1*04:03L HLA-DRB1*13:02L HLA-DRB1*13:03L HLA-DRB1*01:03L HLA-DRB1*04:02L HLA-DRB1*04:05L HLA-DRB1*01:02L HLA-DRB4*03:01NL HLA-DRB1*08:04L HLA-DRB1*08:77L HLA-DRB1*14:01L HLA-DRB1*11:03L
  REGION 1..10: note = CONT. FROM ABOVE: HLA-DRB1*11:04L HLA-DRB1*14:02L HLA-DQA1*01-B1 *05L HLA-DQA1*05:01-B1*02:01L HLA-DRB1*04:10L HLA-DRB1*12:01L HL A-DRB1*12:02L HLA-DQA1*03:01-B1*03:02L HLA-DRB1*14:54L HLA-DQA1* 05:05-B1*03:01L HLA-DRB1*14:17L HLA-DPA1*01:02-B1*04:01L
  REGION 1..10: note = CONT. FROM ABOVE: HLA-DRB1*10:01L HLA-DRB1*16:01L HLA-DRB1*04:08 L HLA-DRB1*08:03L HLA-DQA1*02:01-B1*03:03L HLA-DRB1*15:03L
YLTSSSKTPE

SEQ ID NO: 8604 - protein, 11 aa, Severe acute respiratory syndrome coronavirus 2
  REGION 1..11: note = Table B: HLA-DQA1*03:02-B1*03:03L HLA-DQA1*05:01-B1*03:01L HLA-DRB1*01:03L HLA-DRB1*04:05L HLA-DQA1*01:02-B1*06:02L HLA-DQA1*01:01-B1*05:01L
LTSSSKTPEEH

SEQ ID NO: 8605 - protein, 10 aa, Severe acute respiratory syndrome coronavirus 2
  REGION 1..10: note = Table B: HLA-DQA1*03:02-B1*03:03L HLA-DQA1*05:01-B1*03:01L HLA-DRB1*01:03L HLA-DQA1*01:02-B1*06:02L HLA-DRB1*08:77L HLA-DPA1*01:03-B1*03:01L HLA-DRB1*14:02L HLA-DQA1*05:05-B1*03:19L HLA-DQA1*05:01-B1*02:01L
  REGION 1..10: note = CONT. FROM ABOVE: HLA-DPA1*01:03-B1*04:01L HLA-DPA1*03:01-B1*105 :01L HLA-DQA1*03:01-B1*03:02L HLA-DRB1*16:01L HLA-DQA1*01:03-B1* 06:01L HLA-DQA1*02:01-B1*03:03L HLA-DRB1*15:03L
SSSKTPEEHF

SEQ ID NO: 8606 - protein, 10 aa, Severe acute respiratory syndrome coronavirus 2
  REGION 1..10: note = Table B: HLA-DQA1*03:02-B1*03:03M HLA-DQA1*05:05-B1*03:19M HLA-DQA1*05:05-B1*03:116L HLA-DRB1*09:01L HLA-DPA1*01:03-B1*04:02L HLA-DQA1*03:01-B1*03:02M HLA-DPA1*01:03-B1*104:01L
EEHFIETISL

SEQ ID NO: 8607 - protein, 12 aa, Severe acute respiratory syndrome coronavirus 2
  REGION 1..12: note = Table B: HLA-DQA1*03:02-B1*03:03L HLA-DRB1*04:03L HLA-DRB1*01:02L HLA-DPA1*03:01-B1*04:02L HLA-DRB1*14:02L HLA-DPA1*01:03-B1*04:02L HLA-DRB1*12:01L HLA-DPA1*03:01-B1*105:01L HLA-DQA1*03:01-B1*03:02L
  REGION 1..12: note = CONT. FROM ABOVE: HLA-DQA1*05:05-B1*03:01L HLA-DQA1*01:03-B1*06: 01L HLA-DQA1*02:01-B1*03:03L HLA-DRB1*15:03L
HFIETISLAGSY

SEQ ID NO: 8608 - protein, 11 aa, Severe acute respiratory syndrome coronavirus 2
  REGION 1..11: note = Table B: HLA-DQA1*03:02-B1*03:03L HLA-DRB1*04:03L HLA-DRB1*04:02L HLA-DRB1*01:02L HLA-DQA1*05:01-B1*02:01L HLA-DRB1*14:54L
IETISLAGSYK

SEQ ID NO: 8609 - protein, 12 aa, Severe acute respiratory syndrome coronavirus 2
  REGION 1..12: note = Table B: HLA-DQA1*03:02-B1*03:03L HLA-DQA1*05:01-B1*03:01L HLA-DPA1*01:03-B1*03:01L HLA-DPA1*03:01-B1*04:02L HLA-DQA1*01-B1*05L HLA-DRB1*16:01L
ETISLAGSYKDW

SEQ ID NO: 8610 - protein, 12 aa, Severe acute respiratory syndrome coronavirus 2
  REGION 1..12: note = Table B: HLA-DQA1*03:02-B1*03:03L HLA-DQA1*05:01-B1*03:01L HLA-DPA1*03:01-B1*04:02L HLA-DRB1*14:01L HLA-DRB1*12:01L HLA-DPA1*02:01-B1*13:01L HLA-DQA1*05:05-B1*03:01L
ISLAGSYKDWSY

SEQ ID NO: 8611 - protein, 13 aa, Severe acute respiratory syndrome coronavirus 2
  REGION 1..13: note = Table B: HLA-DQA1*03:02-B1*03:03L HLA-DRB1*01:03L HLA-DRB1*04:05L HLA-DQA1*01:02-B1*06:02L HLA-DRB1*08:04L HLA-DPA1*03:01-B1*04:02L HLA-DPA1*02:01-B1*13:01L HLA-DPA1*03:01-B1*105:01L HLA-DRB1*14:17L
  REGION 1..13: note = CONT. FROM ABOVE: HLA-DPA1*01:02-B1*04:01L HLA-DRB1*04:08L HLA-D QA1*02:01-B1*03:03L
AGSYKDWSYSGQS

SEQ ID NO: 8612 - protein, 12 aa, Severe acute respiratory syndrome coronavirus 2
  REGION 1..12: note = Table B: HLA-DQA1*03:02-B1*03:03L HLA-DQA1*05:01-B1*03:01L HLA-DRB1*04:03L HLA-DRB1*13:03L HLA-DRB1*04:02L HLA-DRB1*04:05L HLA-DQA1*01:02-B1*06:02L HLA-DQA1*05:05-B1*03:19L HLA-DQA1*05:01-B1*02:01L HLA-DPA1*03:01-B1*105:01L
  REGION 1..12: note = CONT. FROM ABOVE: HLA-DQA1*05:05-B1*03:01L HLA-DRB1*14:17L HLA-D RB1*16:01L HLA-DQA1*02:01-B1*03:03L
YKDWSYSGQSTQ

SEQ ID NO: 8613 - protein, 10 aa, Severe acute respiratory syndrome coronavirus 2
  REGION 1..10: note = Table B: HLA-DQA1*03:02-B1*03:03L HLA-DQA1*05:01-B1*03:01L HLA-DQA1*01:02-B1*06:02L HLA-DQA1*05:05-B1*03:19L HLA-DQA1*05:05-B1*03:116L HLA-DPA1*02:01-B1*13:01L HLA-DPA1*03:01-B1*105:01L HLA-DQA1*03:01-B1*03:02L
  REGION 1..10: note = CONT. FROM ABOVE: HLA-DQA1*02:01-B1*03:03L HLA-DRB1*15:03L
WSYSGQSTQL

SEQ ID NO: 8614 - protein, 12 aa, Severe acute respiratory syndrome coronavirus 2
  REGION 1..12: note = Table B: HLA-DQA1*03:02-B1*03:03L HLA-DQA1*05:01-B1*03:01L HLA-DRB1*04:04L HLA-DRB1*01:02L HLA-DQA1*05:01-B1*02:01L HLA-DPA1*03:01-B1*105:01L HLA-DRB1*10:01L HLA-DQA1*01:03-B1*06:01L
SYSGQSTQLGIE

SEQ ID NO: 8615 - protein, 10 aa, Severe acute respiratory syndrome coronavirus 2
  REGION 1..10: note = Table B: HLA-DQA1*03:02-B1*03:03L HLA-DRB1*13:03L HLA-DQA1*01:02-B1*06:02L HLA-DRB1*08:77L HLA-DQA1*05:05-B1*03:19L HLA-DQA1*05:01-B1*02:01L HLA-DPA1*01:03-B1*04:01L HLA-DPA1*03:01-B1*105:01L
  REGION 1..10: note = CONT. FROM ABOVE: HLA-DQA1*02:01-B1*03:03L HLA-DRB1*15:03L
GQSTQLGIEF

SEQ ID NO: 8616 - protein, 12 aa, Severe acute respiratory syndrome coronavirus 2
  REGION 1..12: note = Table B: HLA-DQA1*03:02-B1*03:03L HLA-DRB1*13:03L HLA-DRB1*01:03L HLA-DRB1*04:02L HLA-DRB1*04:05L HLA-DRB4*03:01NL HLA-DQA1*05:01-B1*02:01L HLA-DRB1*04:10L HLA-DRB1*12:01L HLA-DQA1*03:01-B1*03:02L HLA-DRB1*14:54L HLA-DRB1*14:17L
  REGION 1..12: note = CONT. FROM ABOVE: HLA-DRB1*16:01L HLA-DQA1*02:01-B1*03:03L
DKSVYYTSNPTT

SEQ ID NO: 8617 - protein, 10 aa, Severe acute respiratory syndrome coronavirus 2
  REGION 1..10: note = Table B: HLA-DQA1*03:02-B1*03:03L HLA-DQA1*05:01-B1*03:01L HLA-DRB1*04:03M HLA-DRB1*01:03M HLA-DRB1*04:05M HLA-DQA1*01:02-B1*06:02L HLA-DRB1*01:01M HLA-DRB1*01:02L HLA-DRB4*03:01NL HLA-DRB1*08:77L HLA-DPA1*03:01-B1*04:02L
  REGION 1..10: note = CONT. FROM ABOVE: HLA-DRB1*14:01L HLA-DRB1*11:03L HLA-DRB1*14:02 L HLA-DQA1*01:01-B1*05:01L HLA-DRB1*11:01L HLA-DQA1*01-B1*05L HL A-DQA1*05:05-B1*03:19L HLA-DQA1*05:01-B1*02:01L HLA-DRB4*01:01L HLA-DPA1*01:03-B1*04:01L HLA-DQA1*05:05-B1*03:116L
  REGION 1..10: note = CONT. FROM ABOVE: HLA-DPA1*01:03-B1*04:02L HLA-DRB1*12:01L HLA-D PA1*02:01-B1*13:01H HLA-DPA1*03:01-B1*105:01L HLA-DPA1*01:02-B1* 04:01L HLA-DRB1*10:01L HLA-DRB1*16:01L HLA-DQA1*01:03-B1*06:01M HLA-DRB1*08:03L HLA-DQA1*02:01-B1*03:03L HLA-DRB1*15:03L
VYYTSNPTTF

SEQ ID NO: 8618 - protein, 10 aa, Severe acute respiratory syndrome coronavirus 2
  REGION 1..10: note = Table B: HLA-DQA1*03:02-B1*03:03L HLA-DQA1*05:01-B1*03:01L HLA-DRB1*04:03L HLA-DRB1*13:02L HLA-DRB1*13:03L HLA-DRB1*01:03L HLA-DRB1*04:02L HLA-DRB1*01:02L HLA-DRB4*03:01NL HLA-DRB1*08:77L HLA-DRB3*02:01L HLA-DRB1*14:01L HLA-DQA1*01-B1*05L
  REGION 1..10: note = CONT. FROM ABOVE: HLA-DQA1*05:05-B1*03:19L HLA-DQA1*05:01-B1*02: 01L HLA-DRB1*12:01L HLA-DPA1*03:01-B1*105:01L HLA-DQA1*03:01-B1* 03:02L HLA-DQA1*05:05-B1*03:01L HLA-DPA1*01:02-B1*04:01L HLA-DRB 1*16:01L HLA-DQA1*01:03-B1*06:01L HLA-DQA1*02:01-B1*03:03L
  REGION 1..10: note = CONT. FROM ABOVE: HLA-DRB1*15:03L
YYTSNPTTFH

SEQ ID NO: 8619 - protein, 10 aa, Severe acute respiratory syndrome coronavirus 2
  REGION 1..10: note = Table B: HLA-DQA1*03:02-B1*03:03M HLA-DQA1*05:01-B1*03:01L HLA-DRB1*13:03L HLA-DRB1*01:03L HLA-DQA1*01:02-B1*06:02L HLA-DRB1*01:02L HLA-DPA1*03:01-B1*04:02L HLA-DRB1*14:01L HLA-DRB1*14:02L HLA-DRB1*08:01L HLA-DQA1*05:05-B1*03:19L
  REGION 1..10: note = CONT. FROM ABOVE: HLA-DQA1*05:01-B1*02:01L HLA-DPA1*01:03-B1*04: 01L HLA-DQA1*05:05-B1*03:116L HLA-DRB1*09:01L HLA-DPA1*01:03-B1* 04:02L HLA-DRB1*12:01L HLA-DPA1*02:01-B1*13:01L HLA-DPA1*03:01-B 1*105:01L HLA-DQA1*03:01-B1*03:02L HLA-DPA1*01:03-B1*104:01L
  REGION 1..10: note = CONT. FROM ABOVE: HLA-DPA1*01:02-B1*04:01L HLA-DRB1*10:01L HLA-D RB1*16:01L HLA-DQA1*01:03-B1*06:01L HLA-DRB1*08:03L HLA-DQA1*02: 01-B1*03:03L HLA-DRB1*15:03L
YTSNPTTFHL

SEQ ID NO: 8620 - protein, 12 aa, Severe acute respiratory syndrome coronavirus 2
  REGION 1..12: note = Table B: HLA-DQA1*03:02-B1*03:03L HLA-DRB1*04:03L HLA-DQA1*01-B1*05L HLA-DQA1*05:01-B1*02:01L HLA-DQA1*03:01-B1*03:02L
PTTFHLDGEVIT

SEQ ID NO: 8621 - protein, 10 aa, Severe acute respiratory syndrome coronavirus 2
  REGION 1..10: note = Table B: HLA-DQA1*03:02-B1*03:03L HLA-DQA1*05:01-B1*03:01L HLA-DRB1*04:03L HLA-DRB1*13:03L HLA-DRB1*01:03L HLA-DRB1*04:05L HLA-DQA1*01:02-B1*06:02M HLA-DRB1*01:01L HLA-DRB1*01:02L HLA-DRB1*08:77L HLA-DPA1*01:03-B1*03:01L
  REGION 1..10: note = CONT. FROM ABOVE: HLA-DPA1*03:01-B1*04:02L HLA-DRB1*03:01L HLA-D RB1*14:01L HLA-DRB1*11:03L HLA-DRB1*14:02M HLA-DQA1*01:01-B1*05: 01L HLA-DRB1*08:01L HLA-DRB1*11:01L HLA-DQA1*05:05-B1*03:19L HLA -DQA1*05:01-B1*02:01L HLA-DRB4*01:01L HLA-DPA1*01:03-B1*04:01L
  REGION 1..10: note = CONT. FROM ABOVE: HLA-DQA1*05:05-B1*03:116L HLA-DRB1*09:01L HLA- DPA1*01:03-B1*04:02L HLA-DRB1*12:01L HLA-DPA1*02:01-B1*13:01M HL A-DPA1*03:01-B1*105:01L HLA-DQA1*03:01-B1*03:02L HLA-DPA1*01:03- B1*104:01L HLA-DPA1*01:02-B1*04:01L HLA-DRB1*10:01L
  REGION 1..10: note = CONT. FROM ABOVE: HLA-DRB1*16:01L HLA-DQA1*01:03-B1*06:01M HLA-D RB1*08:02L HLA-DRB1*08:03L HLA-DQA1*02:01-B1*03:03M HLA-DRB1*15: 03L
FHLDGEVITF

SEQ ID NO: 8622 - protein, 12 aa, Severe acute respiratory syndrome coronavirus 2
  REGION 1..12: note = Table B: HLA-DQA1*03:02-B1*03:03L HLA-DQA1*01:02-B1*06:02L HLA-DQA1*05:01-B1*02:01L HLA-DQA1*01:03-B1*06:01L
LDGEVITFDNLK

SEQ ID NO: 8623 - protein, 11 aa, Severe acute respiratory syndrome coronavirus 2
  REGION 1..11: note = Table B: HLA-DQA1*03:02-B1*03:03L HLA-DRB1*13:03L HLA-DRB1*01:03L HLA-DRB1*04:04L HLA-DRB1*04:05L HLA-DQA1*01:02-B1*06:02L HLA-DRB1*01:02L HLA-DRB4*03:01NL HLA-DRB1*14:01L HLA-DQA1*05:01-B1*02:01L HLA-DRB1*04:10L
  REGION 1..11: note = CONT. FROM ABOVE: HLA-DRB1*12:01L HLA-DRB1*14:54L HLA-DRB1*16:01 L HLA-DRB1*04:08L HLA-DRB1*15:03L
GEVITFDNLKT

SEQ ID NO: 8624 - protein, 10 aa, Severe acute respiratory syndrome coronavirus 2
  REGION 1..10: note = Table B: HLA-DQA1*03:02-B1*03:03L HLA-DQA1*05:01-B1*03:01L HLA-DRB1*04:03L HLA-DRB1*04:02L HLA-DPA1*03:01-B1*04:02L HLA-DRB1*14:01L HLA-DQA1*01-B1*05L HLA-DQA1*05:01-B1*02:01L HLA-DRB1*12:01L HLA-DPA1*03:01-B1*105:01L
  REGION 1..10: note = CONT. FROM ABOVE: HLA-DQA1*03:01-B1*03:02L HLA-DPA1*01:02-B1*04: 01L HLA-DRB1*16:01L HLA-DQA1*01:03-B1*06:01L HLA-DQA1*02:01-B1*0 3:03L HLA-DRB1*15:03L
VITFDNLKTL

SEQ ID NO: 8625 - protein, 10 aa, Severe acute respiratory syndrome coronavirus 2
  REGION 1..10: note = Table B: HLA-DQA1*03:02-B1*03:03L HLA-DQA1*05:01-B1*03:01L HLA-DQA1*01:02-B1*06:02L HLA-DPA1*03:01-B1*04:02L HLA-DRB1*14:02L HLA-DQA1*05:05-B1*03:19L HLA-DQA1*05:01-B1*02:01L HLA-DQA1*05:05-B1*03:116L
  REGION 1..10: note = CONT. FROM ABOVE: HLA-DPA1*02:01-B1*13:01L HLA-DPA1*03:01-B1*105 :01L HLA-DQA1*03:01-B1*03:02L HLA-DPA1*01:02-B1*04:01L HLA-DQA1* 01:03-B1*06:01L HLA-DQA1*02:01-B1*03:03L HLA-DRB1*15:03L
ITFDNLKTLL

SEQ ID NO: 8626 - protein, 10 aa, Severe acute respiratory syndrome coronavirus 2
  REGION 1..10: note = Table B: HLA-DQA1*03:02-B1*03:03L HLA-DQA1*05:05-B1*03:19L HLA-DQA1*03:01-B1*03:02L
FDNLKTLLSL

SEQ ID NO: 8627 - protein, 12 aa, Severe acute respiratory syndrome coronavirus 2
  REGION 1..12: note = Table B: HLA-DQA1*03:02-B1*03:03L HLA-DQA1*05:01-B1*03:01L HLA-DRB1*01:03L HLA-DRB1*04:04L HLA-DRB1*04:05L HLA-DRB1*01:02L HLA-DRB4*03:01NL HLA-DPA1*01:03-B1*03:01L HLA-DRB1*14:01L HLA-DQA1*01:01-B1*05:01L HLA-DRB1*08:01L HLA-DQA1*01-B1*05L
  REGION 1..12: note = CONT. FROM ABOVE: HLA-DQA1*05:05-B1*03:19L HLA-DQA1*05:01-B1*02: 01L HLA-DRB1*04:10L HLA-DRB1*12:01L HLA-DPA1*03:01-B1*105:01L HL A-DRB1*14:54L HLA-DQA1*05:05-B1*03:01L HLA-DRB1*16:01L HLA-DRB1* 04:08L HLA-DRB1*15:03L
VRTIKVFTTVDN

SEQ ID NO: 8628 - protein, 11 aa, Severe acute respiratory syndrome coronavirus 2
  REGION 1..11: note = Table B: HLA-DQA1*03:02-B1*03:03L HLA-DRB1*04:03L HLA-DRB1*04:02L HLA-DQA1*01-B1*05L HLA-DQA1*05:01-B1*02:01L HLA-DRB1*14:17L HLA-DQA1*02:01-B1*03:03L
IKVFTTVDNIN

SEQ ID NO: 8629 - protein, 10 aa, Severe acute respiratory syndrome coronavirus 2
  REGION 1..10: note = Table B: HLA-DQA1*03:02-B1*03:03L HLA-DQA1*05:01-B1*02:01L HLA-DQA1*03:01-B1*03:02L HLA-DRB1*16:01L HLA-DQA1*01:03-B1*06:01L HLA-DQA1*02:01-B1*03:03L HLA-DRB1*15:03L
VFTTVDNINL

SEQ ID NO: 8630 - protein, 10 aa, Severe acute respiratory syndrome coronavirus 2
  REGION 1..10: note = Table B: HLA-DQA1*03:02-B1*03:03L HLA-DQA1*05:01-B1*03:01L HLA-DRB1*04:03L HLA-DRB1*13:02L HLA-DRB1*13:03L HLA-DRB1*01:03L HLA-DRB1*04:02L HLA-DRB1*04:05L HLA-DQA1*01:02-B1*06:02L HLA-DRB1*01:02L HLA-DRB4*03:01NL HLA-DRB1*08:77L HLA-DRB3*02:01L
  REGION 1..10: note = CONT. FROM ABOVE: HLA-DRB1*14:01L HLA-DRB1*11:03L HLA-DRB1*14:02 L HLA-DQA1*01-B1*05L HLA-DQA1*05:05-B1*03:19L HLA-DQA1*05:01-B1* 02:01L HLA-DRB1*04:10L HLA-DRB1*12:01L HLA-DRB1*12:02L HLA-DPA1* 03:01-B1*105:01L HLA-DQA1*03:01-B1*03:02L HLA-DRB1*14:54L
  REGION 1..10: note = CONT. FROM ABOVE: HLA-DQA1*05:05-B1*03:01L HLA-DRB1*14:17L HLA-D PA1*01:02-B1*04:01L HLA-DRB1*10:01L HLA-DRB1*16:01L HLA-DQA1*01: 03-B1*06:01L HLA-DRB1*04:08L HLA-DQA1*02:01-B1*03:03L HLA-DRB1*1 5:03L
FTTVDNINLH

SEQ ID NO: 8631 - protein, 10 aa, Severe acute respiratory syndrome coronavirus 2
  REGION 1..10: note = Table B: HLA-DQA1*03:02-B1*03:03L HLA-DRB1*04:03L HLA-DRB1*13:03L HLA-DRB1*01:03L HLA-DRB1*04:02L HLA-DRB4*03:01NL HLA-DQA1*01-B1*05L HLA-DQA1*05:01-B1*02:01L HLA-DQA1*03:01-B1*03:02L HLA-DRB1*14:54L HLA-DRB1*14:17L
  REGION 1..10: note = CONT. FROM ABOVE: HLA-DRB1*16:01L HLA-DQA1*01:03-B1*06:01L HLA-D QA1*02:01-B1*03:03L
TVDNINLHTQ

SEQ ID NO: 8632 - protein, 10 aa, Severe acute respiratory syndrome coronavirus 2
  REGION 1..10: note = Table B: HLA-DQA1*03:02-B1*03:03L HLA-DQA1*05:01-B1*03:01L HLA-DRB1*04:03L HLA-DRB1*13:03L HLA-DRB1*01:03L HLA-DRB1*04:02L HLA-DRB1*04:05L HLA-DQA1*01:02-B1*06:02L HLA-DRB4*03:01NL HLA-DRB1*14:01L HLA-DQA1*01-B1*05L HLA-DQA1*05:01-B1*02:01L
  REGION 1..10: note = CONT. FROM ABOVE: HLA-DRB1*12:01L HLA-DPA1*03:01-B1*105:01L HLA- DQA1*03:01-B1*03:02L HLA-DRB1*14:54L HLA-DQA1*05:05-B1*03:01L HL A-DRB1*14:17L HLA-DPA1*01:02-B1*04:01L HLA-DRB1*16:01L HLA-DQA1* 01:03-B1*06:01L HLA-DQA1*02:01-B1*03:03L
NINLHTQVVD

SEQ ID NO: 8633 - protein, 10 aa, Severe acute respiratory syndrome coronavirus 2
  REGION 1..10: note = Table B: HLA-DQA1*03:02-B1*03:03L HLA-DRB1*04:03L HLA-DQA1*01-B1*05L HLA-DQA1*03:01-B1*03:02L HLA-DQA1*02:01-B1*03:03L
INLHTQVVDM

SEQ ID NO: 8634 - protein, 10 aa, Severe acute respiratory syndrome coronavirus 2
  REGION 1..10: note = Table B: HLA-DQA1*03:02-B1*03:03L HLA-DRB1*04:03L HLA-DRB1*01:03L HLA-DQA1*01-B1*05L HLA-DQA1*05:01-B1*02:01L HLA-DPA1*03:01-B1*105:01L HLA-DQA1*03:01-B1*03:02L HLA-DPA1*01:02-B1*04:01L HLA-DRB1*16:01L
  REGION 1..10: note = CONT. FROM ABOVE: HLA-DQA1*01:03-B1*06:01L HLA-DQA1*02:01-B1*03: 03L HLA-DRB1*15:03L
LHTQVVDMSM

SEQ ID NO: 8635 - protein, 10 aa, Severe acute respiratory syndrome coronavirus 2
  REGION 1..10: note = Table B: HLA-DQA1*03:02-B1*03:03L HLA-DRB1*04:03L HLA-DQA1*01-B1*05L HLA-DQA1*05:01-B1*02:01L HLA-DQA1*03:01-B1*03:02L HLA-DRB1*16:01L HLA-DQA1*01:03-B1*06:01L HLA-DQA1*02:01-B1*03:03L
HTQVVDMSMT

SEQ ID NO: 8636 - protein, 13 aa, Severe acute respiratory syndrome coronavirus 2
  REGION 1..13: note = Table B: HLA-DQA1*03:02-B1*03:03L HLA-DRB1*13:02L HLA-DRB1*01:03L HLA-DRB1*04:02L HLA-DRB1*04:05L HLA-DQA1*01:02-B1*06:02L HLA-DRB1*01:02L HLA-DRB4*03:01NL HLA-DRB1*08:77L HLA-DPA1*01:03-B1*03:01L HLA-DRB1*14:01L
  REGION 1..13: note = CONT. FROM ABOVE: HLA-DQA1*05:01-B1*02:01L HLA-DRB1*04:10L HLA-D RB1*12:02L HLA-DPA1*03:01-B1*105:01L HLA-DRB1*14:54L HLA-DRB1*14 :17L HLA-DRB1*07:01L HLA-DRB1*16:01L HLA-DRB1*15:03L
DMSMTYGQQFGPT

SEQ ID NO: 8637 - protein, 10 aa, Severe acute respiratory syndrome coronavirus 2
  REGION 1..10: note = Table B: HLA-DQA1*03:02-B1*03:03L HLA-DQA1*05:01-B1*03:01L HLA-DRB1*04:03L HLA-DRB1*13:03L HLA-DRB1*01:03L HLA-DRB1*04:05L HLA-DQA1*01:02-B1*06:02L HLA-DRB1*01:01L HLA-DRB4*03:01NL HLA-DRB1*08:77L HLA-DPA1*01:03-B1*03:01L
  REGION 1..10: note = CONT. FROM ABOVE: HLA-DPA1*03:01-B1*04:02L HLA-DRB1*03:01L HLA-D RB1*14:01L HLA-DRB1*14:02L HLA-DRB1*11:01L HLA-DQA1*01-B1*05L HL A-DQA1*05:05-B1*03:19L HLA-DQA1*05:01-B1*02:01L HLA-DRB4*01:01L HLA-DPA1*01:03-B1*04:01L HLA-DQA1*05:05-B1*03:116L
  REGION 1..10: note = CONT. FROM ABOVE: HLA-DPA1*01:03-B1*04:02L HLA-DRB1*12:01L HLA-D PA1*02:01-B1*13:01M HLA-DPA1*03:01-B1*105:01L HLA-DQA1*03:01-B1* 03:02L HLA-DPA1*01:03-B1*104:01L HLA-DPA1*01:02-B1*04:01L HLA-DR B1*10:01L HLA-DRB1*16:01L HLA-DQA1*01:03-B1*06:01L
  REGION 1..10: note = CONT. FROM ABOVE: HLA-DRB1*08:02L HLA-DQA1*02:01-B1*03:03L HLA-D RB1*15:03L
TYGQQFGPTY

SEQ ID NO: 8638 - protein, 13 aa, Severe acute respiratory syndrome coronavirus 2
  REGION 1..13: note = Table B: HLA-DQA1*03:02-B1*03:03L HLA-DQA1*01-B1*05L HLA-DQA1*05:01-B1*02:01L HLA-DQA1*03:01-B1*03:02L
GQQFGPTYLDGAD

SEQ ID NO: 8639 - protein, 12 aa, Severe acute respiratory syndrome coronavirus 2
  REGION 1..12: note = Table B: HLA-DQA1*03:02-B1*03:03L HLA-DQA1*05:01-B1*02:01L HLA-DQA1*02:01-B1*03:03L
FGPTYLDGADVT

SEQ ID NO: 8640 - protein, 12 aa, Severe acute respiratory syndrome coronavirus 2
  REGION 1..12: note = Table B: HLA-DQA1*03:02-B1*03:03L HLA-DQA1*05:01-B1*03:01L HLA-DRB1*04:03L HLA-DRB1*01:03L HLA-DRB1*04:05L HLA-DRB1*01:02L HLA-DRB1*08:77L HLA-DRB1*11:03L HLA-DRB1*11:04L HLA-DRB1*14:02L HLA-DQA1*01:01-B1*05:01L HLA-DRB5*01:01L
  REGION 1..12: note = CONT. FROM ABOVE: HLA-DQA1*05:05-B1*03:19L HLA-DQA1*05:01-B1*02: 01L HLA-DRB1*04:10L HLA-DRB1*12:02L HLA-DRB1*14:54L HLA-DRB1*10: 01L HLA-DRB1*16:01L HLA-DRB1*04:08L
GPTYLDGADVTK

SEQ ID NO: 8641 - protein, 10 aa, Severe acute respiratory syndrome coronavirus 2
  REGION 1..10: note = Table B: HLA-DQA1*03:02-B1*03:03M HLA-DQA1*05:01-B1*03:01L HLA-DQA1*01:02-B1*06:02L HLA-DRB1*01:02L HLA-DRB1*08:77L HLA-DPA1*03:01-B1*04:02L HLA-DRB1*14:01L HLA-DRB1*11:02L HLA-DRB1*14:02L HLA-DQA1*05:05-B1*03:19M
  REGION 1..10: note = CONT. FROM ABOVE: HLA-DQA1*05:01-B1*02:01L HLA-DRB4*01:01L HLA-D PA1*01:03-B1*04:01L HLA-DQA1*05:05-B1*03:116L HLA-DRB1*09:01L HL A-DPA1*01:03-B1*04:02L HLA-DPA1*02:01-B1*13:01L HLA-DPA1*03:01-B 1*105:01L HLA-DQA1*03:01-B1*03:02M HLA-DPA1*01:03-B1*104:01M
  REGION 1..10: note = CONT. FROM ABOVE: HLA-DPA1*01:02-B1*04:01L HLA-DRB1*10:01L HLA-D RB1*16:01L HLA-DQA1*01:03-B1*06:01L HLA-DRB1*08:03L HLA-DQA1*02: 01-B1*03:03M HLA-DRB1*15:03L
YLDGADVTKI

SEQ ID NO: 8642 - protein, 12 aa, Severe acute respiratory syndrome coronavirus 2
  REGION 1..12: note = Table B: HLA-DQA1*03:02-B1*03:03L HLA-DRB1*01:03L HLA-DPA1*03:01-B1*105:01L HLA-DRB1*04:08L
LDGADVTKIKPH

SEQ ID NO: 8643 - protein, 12 aa, Severe acute respiratory syndrome coronavirus 2
  REGION 1..12: note = Table B: HLA-DQA1*03:02-B1*03:03L HLA-DRB1*01:03L HLA-DQA1*01:02-B1*06:02L HLA-DQA1*01:01-B1*05:01L HLA-DRB1*08:01L HLA-DQA1*05:05-B1*03:01L
DGADVTKIKPHN

SEQ ID NO: 8644 - protein, 12 aa, Severe acute respiratory syndrome coronavirus 2
  REGION 1..12: note = Table B: HLA-DQA1*03:02-B1*03:03L HLA-DQA1*02:01-B1*03:03L
EGKTFYVLPNDD

SEQ ID NO: 8645 - protein, 10 aa, Severe acute respiratory syndrome coronavirus 2
  REGION 1..10: note = Table B: HLA-DQA1*03:02-B1*03:03L HLA-DQA1*01-B1*05L HLA-DQA1*05:01-B1*02:01L HLA-DQA1*03:01-B1*03:02L
TFYVLPNDDT

SEQ ID NO: 8646 - protein, 10 aa, Severe acute respiratory syndrome coronavirus 2
  REGION 1..10: note = Table B: HLA-DQA1*03:02-B1*03:03L HLA-DQA1*05:01-B1*03:01L HLA-DRB1*04:03L HLA-DRB1*04:05L HLA-DQA1*01:02-B1*06:02L HLA-DPA1*03:01-B1*04:02L HLA-DRB1*14:02L HLA-DQA1*01-B1*05L HLA-DQA1*05:05-B1*03:19L HLA-DQA1*05:01-B1*02:01L
  REGION 1..10: note = CONT. FROM ABOVE: HLA-DQA1*05:05-B1*03:116L HLA-DRB1*09:01L HLA- DPA1*01:03-B1*04:02L HLA-DPA1*02:01-B1*13:01L HLA-DPA1*03:01-B1* 105:01L HLA-DQA1*03:01-B1*03:02L HLA-DPA1*01:02-B1*04:01L HLA-DR B1*16:01L HLA-DQA1*01:03-B1*06:01L HLA-DQA1*02:01-B1*03:03L
  REGION 1..10: note = CONT. FROM ABOVE: HLA-DRB1*15:03L
FYVLPNDDTL

SEQ ID NO: 8647 - protein, 10 aa, Severe acute respiratory syndrome coronavirus 2
  REGION 1..10: note = Table B: HLA-DQA1*03:02-B1*03:03L HLA-DQA1*05:01-B1*03:01L HLA-DRB1*14:01L HLA-DQA1*05:05-B1*03:19L HLA-DQA1*05:05-B1*03:116L HLA-DPA1*02:01-B1*13:01L HLA-DQA1*03:01-B1*03:02L HLA-DRB1*16:01L
  REGION 1..10: note = CONT. FROM ABOVE: HLA-DQA1*02:01-B1*03:03L HLA-DRB1*15:03L
VLPNDDTLRV

SEQ ID NO: 8648 - protein, 13 aa, Severe acute respiratory syndrome coronavirus 2
  REGION 1..13: note = Table B: HLA-DQA1*03:02-B1*03:03L HLA-DQA1*05:01-B1*03:01L HLA-DQA1*01:02-B1*06:02L HLA-DQA1*01:01-B1*05:01L HLA-DPA1*03:01-B1*105:01L HLA-DQA1*05:05-B1*03:01L HLA-DQA1*01:03-B1*06:01L HLA-DQA1*02:01-B1*03:03L
LPNDDTLRVEAFE

SEQ ID NO: 8649 - protein, 19 aa, Severe acute respiratory syndrome coronavirus 2
  REGION 1..19: note = Table B: HLA-DQA1*03:02-B1*03:03L
PNDDTLRVEAFEYYHTTDP

SEQ ID NO: 8650 - protein, 12 aa, Severe acute respiratory syndrome coronavirus 2
  REGION 1..12: note = Table B: HLA-DQA1*03:02-B1*03:03L HLA-DQA1*02:01-B1*03:03L
EAFEYYHTTDPS

SEQ ID NO: 8651 - protein, 10 aa, Severe acute respiratory syndrome coronavirus 2
  REGION 1..10: note = Table B: HLA-DQA1*03:02-B1*03:03L HLA-DQA1*05:01-B1*03:01L HLA-DRB1*04:03L HLA-DRB1*13:03L HLA-DRB1*01:03L HLA-DRB1*04:05M HLA-DQA1*01:02-B1*06:02M HLA-DRB1*01:01L HLA-DRB1*01:02L HLA-DRB4*03:01NL HLA-DRB1*08:77L HLA-DPA1*01:03-B1*03:01L
  REGION 1..10: note = CONT. FROM ABOVE: HLA-DPA1*03:01-B1*04:02L HLA-DRB1*03:01L HLA-D RB1*14:01L HLA-DRB1*11:03L HLA-DRB1*14:02L HLA-DQA1*01:01-B1*05: 01L HLA-DRB1*08:01L HLA-DRB1*11:01L HLA-DQA1*01-B1*05L HLA-DQA1* 05:05-B1*03:19L HLA-DQA1*05:01-B1*02:01L HLA-DRB4*01:01L
  REGION 1..10: note = CONT. FROM ABOVE: HLA-DPA1*01:03-B1*04:01L HLA-DQA1*05:05-B1*03: 116L HLA-DPA1*01:03-B1*04:02L HLA-DRB1*12:01L HLA-DPA1*02:01-B1* 13:01M HLA-DPA1*03:01-B1*105:01M HLA-DQA1*03:01-B1*03:02L HLA-DQ A1*05:05-B1*03:01L HLA-DPA1*01:02-B1*04:01L HLA-DRB1*10:01L
  REGION 1..10: note = CONT. FROM ABOVE: HLA-DRB1*16:01L HLA-DQA1*01:03-B1*06:01M HLA-D RB1*08:02L HLA-DRB1*08:03L HLA-DQA1*02:01-B1*03:03L HLA-DRB1*15: 03L
EYYHTTDPSF

SEQ ID NO: 8652 - protein, 10 aa, Severe acute respiratory syndrome coronavirus 2
  REGION 1..10: note = Table B: HLA-DQA1*03:02-B1*03:03L HLA-DQA1*05:01-B1*03:01L HLA-DRB1*04:03L HLA-DRB1*13:02L HLA-DRB1*13:03L HLA-DRB1*01:03L HLA-DRB1*04:05L HLA-DQA1*01:02-B1*06:02L HLA-DRB1*01:01L HLA-DRB1*01:02L HLA-DRB1*08:77L HLA-DRB3*02:01L
  REGION 1..10: note = CONT. FROM ABOVE: HLA-DPA1*03:01-B1*04:02L HLA-DRB1*14:01L HLA-D RB1*11:03L HLA-DRB1*14:02L HLA-DQA1*01:01-B1*05:01L HLA-DRB1*08: 01L HLA-DQA1*01-B1*05L HLA-DQA1*05:05-B1*03:19L HLA-DQA1*05:01-B 1*02:01L HLA-DPA1*01:03-B1*04:01L HLA-DQA1*05:05-B1*03:116L
  REGION 1..10: note = CONT. FROM ABOVE: HLA-DRB1*09:01L HLA-DPA1*01:03-B1*04:02L HLA-D RB1*12:01L HLA-DPA1*02:01-B1*13:01L HLA-DPA1*03:01-B1*105:01L HL A-DQA1*03:01-B1*03:02L HLA-DQA1*05:05-B1*03:01L HLA-DPA1*01:02-B 1*04:01L HLA-DRB1*07:01L HLA-DRB1*16:01L
  REGION 1..10: note = CONT. FROM ABOVE: HLA-DQA1*01:03-B1*06:01L HLA-DRB1*08:03L HLA-D QA1*02:01-B1*03:03L HLA-DRB1*15:03L
YYHTTDPSFL

SEQ ID NO: 8653 - protein, 10 aa, Severe acute respiratory syndrome coronavirus 2
  REGION 1..10: note = Table B: HLA-DQA1*03:02-B1*03:03L HLA-DQA1*05:01-B1*03:01L HLA-DRB1*04:03L HLA-DQA1*01-B1*05L HLA-DQA1*05:01-B1*02:01L HLA-DRB1*12:01L HLA-DQA1*03:01-B1*03:02L HLA-DRB1*16:01L HLA-DQA1*01:03-B1*06:01L HLA-DQA1*02:01-B1*03:03L
  REGION 1..10: note = CONT. FROM ABOVE: HLA-DRB1*15:03L
YHTTDPSFLG

SEQ ID NO: 8654 - protein, 10 aa, Severe acute respiratory syndrome coronavirus 2
  REGION 1..10: note = Table B: HLA-DQA1*03:02-B1*03:03L HLA-DQA1*05:01-B1*03:01M HLA-DRB1*14:04M HLA-DRB1*04:01L HLA-DRB1*04:03M HLA-DRB1*13:02M HLA-DRB1*13:03H HLA-DRB1*01:03H HLA-DRB1*04:02M HLA-DRB1*04:05H HLA-DQA1*01:02-B1*06:02H HLA-DRB1*01:01L HLA-DRB4*03:01NM
  REGION 1..10: note = CONT. FROM ABOVE: HLA-DRB1*08:04L HLA-DRB1*08:77H HLA-DRB3*02:01 L HLA-DPA1*01:03-B1*03:01H HLA-DPA1*03:01-B1*04:02M HLA-DRB1*03: 01H HLA-DRB1*14:01M HLA-DRB1*11:02H HLA-DRB1*11:03H HLA-DRB1*11: 04H HLA-DRB1*14:02M HLA-DRB1*08:01L HLA-DRB1*11:01M
  REGION 1..10: note = CONT. FROM ABOVE: HLA-DRB5*01:01H HLA-DQA1*01-B1*05H HLA-DQA1*05 :05-B1*03:19H HLA-DRB4*02:01NL HLA-DQA1*05:01-B1*02:01H HLA-DRB1 *13:01L HLA-DRB4*01:01H HLA-DPA1*01:03-B1*04:01H HLA-DQA1*05:05- B1*03:116H HLA-DRB1*09:01L HLA-DPA1*01:03-B1*04:02H
  REGION 1..10: note = CONT. FROM ABOVE: HLA-DRB1*12:01H HLA-DRB1*12:02L HLA-DPA1*02:01 -B1*13:01L HLA-DPA1*03:01-B1*105:01M HLA-DQA1*03:01-B1*03:02L HL A-DRB1*14:54H HLA-DPA1*01:03-B1*104:01H HLA-DQA1*05:05-B1*03:01L HLA-DRB1*14:17L HLA-DPA1*01:02-B1*04:01M HLA-DRB1*10:01H
  REGION 1..10: note = CONT. FROM ABOVE: HLA-DRB1*16:01H HLA-DQA1*01:03-B1*06:01L HLA -DRB1*04:08L HLA-DRB1*08:02M HLA-DRB1*08:03L HLA-DQA1*02:01-B1 *03:03L HLA-DRB1*15:01M HLA-DRB1*15:03M
TTDPSFLGRY

SEQ ID NO: 8655 - protein, 10 aa, Severe acute respiratory syndrome coronavirus 2
  REGION 1..10: note = Table B: HLA-DQA1*03:02-B1*03:03L HLA-DQA1*05:05-B1*03:19L HLA-DQA1*05:01-B1*02:01L HLA-DQA1*03:01-B1*03:02L
TDPSFLGRYM

SEQ ID NO: 8656 - protein, 10 aa, Severe acute respiratory syndrome coronavirus 2
  REGION 1..10: note = Table B: HLA-DQA1*03:02-B1*03:03L HLA-DQA1*05:01-B1*03:01L HLA-DRB1*13:03L HLA-DQA1*01:02-B1*06:02L HLA-DQA1*01-B1*05L HLA-DQA1*05:05-B1*03:19L HLA-DQA1*05:05-B1*03:116L HLA-DPA1*02:01-B1*13:01L HLA-DPA1*03:01-B1*105:01L
  REGION 1..10: note = CONT. FROM ABOVE: HLA-DPA1*01:02-B1*04:01L HLA-DRB1*08:03L HLA-D RB1*15:03L
YPQVNGLTSI

SEQ ID NO: 8657 - protein, 12 aa, Severe acute respiratory syndrome coronavirus 2
  REGION 1..12: note = Table B: HLA-DQA1*03:02-B1*03:03L HLA-DQA1*05:01-B1*03:01L HLA-DRB1*04:03L HLA-DRB1*13:02L HLA-DRB1*01:03L HLA-DRB1*04:02L HLA-DRB1*04:05L HLA-DRB1*01:02L HLA-DRB4*03:01NL HLA-DRB1*08:04L HLA-DRB3*02:01L HLA-DPA1*01:03-B1*03:01L
  REGION 1..12: note = CONT. FROM ABOVE: HLA-DPA1*03:01-B1*04:02L HLA-DRB1*14:01L HLA-D QA1*05:05-B1*03:19L HLA-DQA1*05:01-B1*02:01L HLA-DRB1*04:10L HLA -DRB1*12:01L HLA-DRB1*12:02L HLA-DPA1*02:01-B1*13:01L HLA-DPA1*0 3:01-B1*105:01L HLA-DRB1*14:54L HLA-DQA1*05:05-B1*03:01L
  REGION 1..12: note = CONT. FROM ABOVE: HLA-DRB1*14:17L HLA-DPA1*01:02-B1*04:01L HLA-D RB1*16:01L HLA-DRB1*04:08L HLA-DRB1*15:03L
VNGLTSIKWADN

SEQ ID NO: 8658 - protein, 10 aa, Severe acute respiratory syndrome coronavirus 2
  REGION 1..10: note = Table B: HLA-DQA1*03:02-B1*03:03L HLA-DRB1*04:03L HLA-DQA1*01:02-B1*06:02L HLA-DQA1*01-B1*05L HLA-DPA1*03:01-B1*105:01L HLA-DQA1*03:01-B1*03:02L HLA-DPA1*01:02-B1*04:01L HLA-DQA1*01:03-B1*06:01L
  REGION 1..10: note = CONT. FROM ABOVE: HLA-DQA1*02:01-B1*03:03L
LTSIKWADNN

SEQ ID NO: 8659 - protein, 10 aa, Severe acute respiratory syndrome coronavirus 2
  REGION 1..10: note = Table B: HLA-DQA1*03:02-B1*03:03L HLA-DQA1*01:02-B1*06:02L HLA-DQA1*05:05-B1*03:19L HLA-DPA1*03:01-B1*105:01L HLA-DPA1*01:03-B1*104:01L HLA-DRB1*15:03L
ATALLTLQQI

SEQ ID NO: 8660 - protein, 10 aa, Severe acute respiratory syndrome coronavirus 2
  REGION 1..10: note = Table B: HLA-DQA1*03:02-B1*03:03L HLA-DQA1*05:01-B1*03:01L HLA-DPA1*03:01-B1*04:02L HLA-DRB1*09:01L HLA-DQA1*03:01-B1*03:02L HLA-DQA1*02:01-B1*03:03L HLA-DRB1*15:03L
ALLTLQQIEL

SEQ ID NO: 8661 - protein, 10 aa, Severe acute respiratory syndrome coronavirus 2
  REGION 1..10: note = Table B: HLA-DQA1*03:02-B1*03:03M HLA-DQA1*05:01-B1*03:01L HLA-DRB1*13:03L HLA-DPA1*03:01-B1*04:02L HLA-DRB1*11:02L HLA-DRB1*11:01L HLA-DQA1*05:05-B1*03:19M HLA-DQA1*05:05-B1*03:116L HLA-DRB1*09:01M
  REGION 1..10: note = CONT. FROM ABOVE: HLA-DPA1*01:03-B1*04:02L HLA-DQA1*03:01-B1*03: 02M HLA-DPA1*01:03-B1*104:01L HLA-DPA1*01:02-B1*04:01L HLA-DRB1* 16:01L HLA-DQA1*02:01-B1*03:03L
IELKFNPPAL

SEQ ID NO: 8662 - protein, 11 aa, Severe acute respiratory syndrome coronavirus 2
  REGION 1..11: note = Table B: HLA-DQA1*03:02-B1*03:03L HLA-DRB1*04:01L HLA-DRB1*04:03L HLA-DRB1*13:02L HLA-DRB1*04:05L HLA-DRB4*03:01NL HLA-DPA1*03:01-B1*04:02L HLA-DRB1*14:01L HLA-DRB1*11:01L HLA-DPA1*02:01-B1*13:01L HLA-DQA1*03:01-B1*03:02L
  REGION 1..11: note = CONT. FROM ABOVE: HLA-DQA1*05:05-B1*03:01L HLA-DPA1*01:02-B1*04: 01L HLA-DQA1*01:03-B1*06:01L HLA-DRB1*08:02L
KFNPPALQDAY

SEQ ID NO: 8663 - protein, 17 aa, Severe acute respiratory syndrome coronavirus 2
  REGION 1..17: note = Table B: HLA-DQA1*03:02-B1*03:03L HLA-DQA1*05:01-B1*03:01L HLA-DRB1*13:02L HLA-DRB1*04:02L HLA-DRB1*04:05L HLA-DRB1*08:04L HLA-DPA1*01:03-B1*03:01L HLA-DRB1*14:01L HLA-DQA1*01:01-B1*05:01L HLA-DRB1*11:01L
  REGION 1..17: note = CONT. FROM ABOVE: HLA-DQA1*05:05-B1*03:19L HLA-DPA1*01:03-B1*04: 02L HLA-DRB1*12:01L HLA-DRB3*01:01L HLA-DPA1*02:01-B1*13:01L HLA -DQA1*05:05-B1*03:01L HLA-DRB1*15:03L
NPPALQDAYYRARAGEA

SEQ ID NO: 8664 - protein, 12 aa, Severe acute respiratory syndrome coronavirus 2
  REGION 1..12: note = Table B: HLA-DQA1*03:02-B1*03:03L HLA-DQA1*05:01-B1*03:01L HLA-DRB1*04:03L HLA-DRB1*13:02L HLA-DRB1*13:03L HLA-DRB1*01:03L HLA-DRB1*04:02L HLA-DRB1*04:05L HLA-DQA1*01:02-B1*06:02L HLA-DRB1*01:02L HLA-DRB4*03:01NL HLA-DRB1*08:04L HLA-DRB1*08:77L
  REGION 1..12: note = CONT. FROM ABOVE: HLA-DRB1*14:01L HLA-DRB1*11:03L HLA-DRB1*11:04 L HLA-DRB1*14:02L HLA-DQA1*01:01-B1*05:01L HLA-DRB1*08:01L HLA-D RB1*11:01L HLA-DQA1*01-B1*05L HLA-DQA1*05:05-B1*03:19L HLA-DQA1* 05:01-B1*02:01L HLA-DRB1*04:10L HLA-DRB1*09:01L HLA-DRB1*12:01L
  REGION 1..12: note = CONT. FROM ABOVE: HLA-DRB1*12:02L HLA-DPA1*02:01-B1*13:01L HLA-D PA1*03:01-B1*105:01L HLA-DRB1*14:54L HLA-DQA1*05:05-B1*03:01L HL A-DRB1*14:17L HLA-DPA1*01:02-B1*04:01L HLA-DRB1*07:01L HLA-DRB1* 10:01L HLA-DQA1*01:03-B1*06:01L HLA-DRB1*04:08L HLA-DRB1*08:03L
  REGION 1..12: note = CONT. FROM ABOVE: HLA-DRB1*15:03L
DAYYRARAGEAA

SEQ ID NO: 8665 - protein, 12 aa, Severe acute respiratory syndrome coronavirus 2
  REGION 1..12: note = Table B: HLA-DQA1*03:02-B1*03:03L HLA-DRB1*01:01L HLA-DRB1*08:04L HLA-DRB1*11:04L HLA-DRB1*11:01L HLA-DPA1*02:01-B1*13:01L HLA-DPA1*03:01-B1*105:01L HLA-DRB1*10:01L
AYYRARAGEAAN

SEQ ID NO: 8666 - protein, 10 aa, Severe acute respiratory syndrome coronavirus 2
  REGION 1..10: note = Table B: HLA-DQA1*03:02-B1*03:03L HLA-DRB1*04:03L HLA-DRB1*04:02L HLA-DQA1*05:01-B1*02:01L HLA-DQA1*03:01-B1*03:02L HLA-DQA1*01:03-B1*06:01L HLA-DQA1*02:01-B1*03:03L
TVGELGDVRE

SEQ ID NO: 8667 - protein, 10 aa, Severe acute respiratory syndrome coronavirus 2
  REGION 1..10: note = Table B: HLA-DQA1*03:02-B1*03:03L HLA-DQA1*05:01-B1*03:01L HLA-DRB1*04:03L HLA-DRB1*13:03L HLA-DRB1*01:03L HLA-DRB1*04:02L HLA-DRB1*04:05L HLA-DRB4*03:01NL HLA-DQA1*01:01-B1*05:01L HLA-DQA1*01-B1*05L HLA-DQA1*05:01-B1*02:01L HLA-DRB1*04:10L
  REGION 1..10: note = CONT. FROM ABOVE: HLA-DRB1*12:01L HLA-DQA1*03:01-B1*03:02L HLA-D RB1*14:54L HLA-DQA1*05:05-B1*03:01L HLA-DRB1*14:17L HLA-DPA1*01: 02-B1*04:01L HLA-DRB1*16:01L HLA-DQA1*01:03-B1*06:01L HLA-DRB1*0 4:08L HLA-DQA1*02:01-B1*03:03L
VGELGDVRET

SEQ ID NO: 8668 - protein, 10 aa, Severe acute respiratory syndrome coronavirus 2
  REGION 1..10: note = Table B: HLA-DQA1*03:02-B1*03:03H HLA-DQA1*05:01-B1*03:01M HLA-DRB1*04:01L HLA-DRB1*13:02L HLA-DRB1*13:03L HLA-DRB1*01:03L HLA-DQA1*01:02-B1*06:02L HLA-DRB4*03:01NL HLA-DRB1*08:77M HLA-DPA1*03:01-B1*04:02M HLA-DRB1*03:01L HLA-DRB1*14:01L
  REGION 1..10: note = CONT. FROM ABOVE: HLA-DRB1*11:02L HLA-DRB1*14:02L HLA-DRB1*08:01 L HLA-DRB1*11:01L HLA-DQA1*01-B1*05L HLA-DQA1*05:05-B1*03:19M HL A-DQA1*05:01-B1*02:01L HLA-DRB4*01:01M HLA-DPA1*01:03-B1*04:01M HLA-DQA1*05:05-B1*03:116M HLA-DRB1*09:01M
  REGION 1..10: note = CONT. FROM ABOVE: HLA-DPA1*01:03-B1*04:02M HLA-DRB1*12:01L HLA-D QA1*03:01-B1*03:02H HLA-DPA1*01:03-B1*104:01M HLA-DPA1*01:02-B1* 04:01L HLA-DRB1*10:01L HLA-DRB1*16:01L HLA-DQA1*01:03-B1*06:01L HLA-DQA1*02:01-B1*03:03L HLA-DRB1*15:03L
GELGDVRETM

SEQ ID NO: 8669 - protein, 10 aa, Severe acute respiratory syndrome coronavirus 2
  REGION 1..10: note = Table B: HLA-DQA1*03:02-B1*03:03L HLA-DQA1*01:02-B1*06:02L HLA-DPA1*03:01-B1*105:01L HLA-DQA1*03:01-B1*03:02L HLA-DQA1*01:03-B1*06:01L
ETMSYLFQHA

SEQ ID NO: 8670 - protein, 10 aa, Severe acute respiratory syndrome coronavirus 2
  REGION 1..10: note = Table B: HLA-DQA1*03:02-B1*03:03L HLA-DQA1*03:01-B1*03:02L HLA-DQA1*01:03-B1*06:01L HLA-DQA1*02:01-B1*03:03L
MSYLFQHANL

SEQ ID NO: 8671 - protein, 10 aa, Severe acute respiratory syndrome coronavirus 2
  REGION 1..10: note = Table B: HLA-DQA1*03:02-B1*03:03L HLA-DRB1*04:03L HLA-DRB1*13:03L HLA-DRB1*01:03L HLA-DRB1*04:02L HLA-DRB1*04:05L HLA-DRB4*03:01NL HLA-DQA1*01-B1*05L HLA-DRB1*04:10L HLA-DQA1*03:01-B1*03:02L HLA-DRB1*14:54L HLA-DRB1*14:17L
  REGION 1..10: note = CONT. FROM ABOVE: HLA-DRB1*16:01L HLA-DQA1*02:01-B1*03:03L
YLFQHANLDS

SEQ ID NO: 8672 - protein, 10 aa, Severe acute respiratory syndrome coronavirus 2
  REGION 1..10: note = Table B: HLA-DQA1*03:02-B1*03:03L HLA-DQA1*05:05-B1*03:19L HLA-DPA1*01:03-B1*104:01L
GQQQTTLKGV

SEQ ID NO: 8673 - protein, 10 aa, Severe acute respiratory syndrome coronavirus 2
  REGION 1..10: note = Table B: HLA-DQA1*03:02-B1*03:03L HLA-DQA1*03:01-B1*03:02L
QQTTLKGVEA

SEQ ID NO: 8674 - protein, 10 aa, Severe acute respiratory syndrome coronavirus 2
  REGION 1..10: note = Table B: HLA-DQA1*03:02-B1*03:03L HLA-DQA1*05:05-B1*03:19L
QTTLKGVEAV

SEQ ID NO: 8675 - protein, 10 aa, Severe acute respiratory syndrome coronavirus 2
  REGION 1..10: note = Table B: HLA-DQA1*03:02-B1*03:03L HLA-DQA1*05:01-B1*03:01L HLA-DQA1*01:02-B1*06:02L HLA-DQA1*05:01-B1*02:01L HLA-DPA1*03:01-B1*105:01L HLA-DQA1*03:01-B1*03:02L HLA-DPA1*01:02-B1*04:01L HLA-DQA1*02:01-B1*03:03L
  REGION 1..10: note = CONT. FROM ABOVE: HLA-DRB1*15:03L
TTLKGVEAVM

SEQ ID NO: 8676 - protein, 10 aa, Severe acute respiratory syndrome coronavirus 2
  REGION 1..10: note = Table B: HLA-DQA1*03:02-B1*03:03L HLA-DQA1*05:01-B1*03:01L HLA-DRB1*04:01L HLA-DRB1*04:03L HLA-DRB1*13:02L HLA-DRB1*13:03L HLA-DRB1*01:03L HLA-DQA1*01:02-B1*06:02M HLA-DRB4*03:01NL HLA-DRB1*08:77L HLA-DPA1*01:03-B1*03:01L
  REGION 1..10: note = CONT. FROM ABOVE: HLA-DPA1*03:01-B1*04:02L HLA-DRB1*03:01L HLA-D RB1*14:01L HLA-DRB1*11:02L HLA-DRB1*14:02M HLA-DRB1*11:01L HLA-D QA1*01-B1*05L HLA-DQA1*05:05-B1*03:19M HLA-DQA1*05:01-B1*02:01L HLA-DRB4*01:01L HLA-DPA1*01:03-B1*04:01L
  REGION 1..10: note = CONT. FROM ABOVE: HLA-DQA1*05:05-B1*03:116L HLA-DPA1*01:03-B1*04 :02L HLA-DRB1*12:01L HLA-DPA1*02:01-B1*13:01L HLA-DPA1*03:01-B1* 105:01L HLA-DQA1*03:01-B1*03:02L HLA-DPA1*01:03-B1*104:01L HLA-D QA1*05:05-B1*03:01L HLA-DPA1*01:02-B1*04:01L HLA-DRB1*10:01L
  REGION 1..10: note = CONT. FROM ABOVE: HLA-DRB1*16:01L HLA-DQA1*01:03-B1*06:01L HLA-D RB1*08:02L HLA-DQA1*02:01-B1*03:03M HLA-DRB1*15:03L
TLKGVEAVMY

SEQ ID NO: 8677 - protein, 10 aa, Severe acute respiratory syndrome coronavirus 2
  REGION 1..10: note = Table B: HLA-DQA1*03:02-B1*03:03L HLA-DQA1*05:05-B1*03:19L HLA-DQA1*03:01-B1*03:02L
VEAVMYMGTL

SEQ ID NO: 8678 - protein, 13 aa, Severe acute respiratory syndrome coronavirus 2
  REGION 1..13: note = Table B: HLA-DQA1*03:02-B1*03:03L HLA-DRB1*01:03L HLA-DRB1*01:02L HLA-DRB1*08:04L HLA-DPA1*01:03-B1*03:01L HLA-DQA1*01-B1*05L HLA-DPA1*01:03-B1*04:01L HLA-DRB1*16:01L HLA-DRB1*04:08L
VMYMGTLSYEQFK

SEQ ID NO: 8679 - protein, 12 aa, Severe acute respiratory syndrome coronavirus 2
  REGION 1..12: note = Table B: HLA-DQA1*03:02-B1*03:03L HLA-DRB1*04:04L HLA-DRB4*03:01NL HLA-DRB1*08:04L HLA-DRB1*11:03L HLA-DQA1*01:01-B1*05:01L HLA-DQA1*05:05-B1*03:19L HLA-DQA1*05:01-B1*02:01L HLA-DRB1*14:54L
  REGION 1..12: note = CONT. FROM ABOVE: HLA-DPA1*01:03-B1*104:01L HLA-DQA1*05:05-B1*03 :01L HLA-DRB1*07:01L HLA-DRB1*10:01L HLA-DRB1*08:03L
MGTLSYEQFKKG

SEQ ID NO: 8680 - protein, 10 aa, Severe acute respiratory syndrome coronavirus 2
  REGION 1..10: note = Table B: HLA-DQA1*03:02-B1*03:03L HLA-DQA1*05:05-B1*03:19M HLA-DPA1*01:03-B1*104:01L
YEQFKKGVQI

SEQ ID NO: 8681 - protein, 10 aa, Severe acute respiratory syndrome coronavirus 2
  REGION 1..10: note = Table B: HLA-DQA1*03:02-B1*03:03L HLA-DQA1*05:01-B1*03:01L HLA-DRB1*04:03L HLA-DRB1*01:03L HLA-DRB1*04:05L HLA-DQA1*01:02-B1*06:02L HLA-DRB1*01:01L HLA-DRB1*01:02L HLA-DPA1*03:01-B1*04:02L HLA-DQA1*01:01-B1*05:01L
  REGION 1..10: note = CONT. FROM ABOVE: HLA-DQA1*01-B1*05L HLA-DQA1*05:05-B1*03:19L HL A-DQA1*05:01-B1*02:01L HLA-DPA1*01:03-B1*04:01L HLA-DRB1*12:01L HLA-DPA1*02:01-B1*13:01M HLA-DPA1*03:01-B1*105:01L HLA-DQA1*03:0 1-B1*03:02L HLA-DQA1*05:05-B1*03:01L HLA-DPA1*01:02-B1*04:01L
  REGION 1..10: note = CONT. FROM ABOVE: HLA-DRB1*16:01L HLA-DQA1*01:03-B1*06:01M HLA-D QA1*02:01-B1*03:03L HLA-DRB1*15:03L
KYLVQQESPF

SEQ ID NO: 8682 - protein, 10 aa, Severe acute respiratory syndrome coronavirus 2
  REGION 1..10: note = Table B: HLA-DQA1*03:02-B1*03:03L HLA-DQA1*05:01-B1*03:01L HLA-DRB1*04:03L HLA-DQA1*01:02-B1*06:02L HLA-DRB1*01:02L HLA-DPA1*03:01-B1*04:02L HLA-DRB1*14:01L HLA-DRB1*14:02L HLA-DQA1*01-B1*05L HLA-DQA1*05:05-B1*03:19L
  REGION 1..10: note = CONT. FROM ABOVE: HLA-DQA1*05:01-B1*02:01L HLA-DQA1*05:05-B1*03: 116L HLA-DRB1*09:01L HLA-DRB1*12:01L HLA-DPA1*02:01-B1*13:01L HL A-DPA1*03:01-B1*105:01L HLA-DQA1*03:01-B1*03:02L HLA-DPA1*01:03- B1*104:01L HLA-DPA1*01:02-B1*04:01L HLA-DRB1*16:01L
  REGION 1..10: note = CONT. FROM ABOVE: HLA-DQA1*01:03-B1*06:01L HLA-DQA1*02:01-B1*03: 03L HLA-DRB1*15:03L
YLVQQESPFV

SEQ ID NO: 8683 - protein, 10 aa, Severe acute respiratory syndrome coronavirus 2
  REGION 1..10: note = Table B: HLA-DQA1*03:02-B1*03:03L HLA-DQA1*05:01-B1*03:01L HLA-DRB1*04:03L HLA-DQA1*01:02-B1*06:02L HLA-DRB1*01:02L HLA-DPA1*03:01-B1*04:02L HLA-DRB1*14:01L HLA-DQA1*01-B1*05L HLA-DQA1*05:05-B1*03:19L HLA-DQA1*05:01-B1*02:01L
  REGION 1..10: note = CONT. FROM ABOVE: HLA-DRB1*12:01L HLA-DPA1*03:01-B1*105:01L HLA- DQA1*03:01-B1*03:02L HLA-DPA1*01:02-B1*04:01L HLA-DRB1*16:01L HL A-DQA1*01:03-B1*06:01L HLA-DQA1*02:01-B1*03:03L HLA-DRB1*15:03L
LVQQESPFVM

SEQ ID NO: 8684 - protein, 10 aa, Severe acute respiratory syndrome coronavirus 2
  REGION 1..10: note = Table B: HLA-DQA1*03:02-B1*03:03L HLA-DQA1*03:01-B1*03:02L
VQQESPFVMM

SEQ ID NO: 8685 - protein, 10 aa, Severe acute respiratory syndrome coronavirus 2
  REGION 1..10: note = Table B: HLA-DQA1*03:02-B1*03:03L HLA-DQA1*05:05-B1*03:19L
QESPFVMMSA

SEQ ID NO: 8686 - protein, 12 aa, Severe acute respiratory syndrome coronavirus 2
  REGION 1..12: note = Table B: HLA-DQA1*03:02-B1*03:03L HLA-DQA1*05:01-B1*03:01L HLA-DRB1*04:01L HLA-DRB1*13:02L HLA-DQA1*01:02-B1*06:02L HLA-DRB1*01:01L HLA-DRB1*08:04L HLA-DRB1*08:77L HLA-DRB3*02:01L HLA-DPA1*01:03-B1*03:01L HLA-DPA1*03:01-B1*04:02L
  REGION 1..12: note = CONT. FROM ABOVE: HLA-DRB1*14:01L HLA-DRB1*11:03L HLA-DRB1*11:04 L HLA-DRB1*14:02L HLA-DRB1*08:01L HLA-DRB1*11:01L HLA-DRB5*01:01 L HLA-DQA1*01-B1*05L HLA-DQA1*05:05-B1*03:19L HLA-DQA1*05:01-B1* 02:01L HLA-DRB4*01:01L HLA-DRB1*09:01L HLA-DRB1*12:02L
  REGION 1..12: note = CONT. FROM ABOVE: HLA-DRB3*01:01L HLA-DPA1*02:01-B1*13:01L HLA-D PA1*03:01-B1*105:01L HLA-DPA1*01:03-B1*104:01L HLA-DQA1*05:05-B1 *03:01L HLA-DRB1*07:01L HLA-DRB1*08:02L HLA-DRB1*08:03L HLA-DRB1 *15:01L
SPFVMMSAPPAQ

SEQ ID NO: 8687 - protein, 10 aa, Severe acute respiratory syndrome coronavirus 2
  REGION 1..10: note = Table B: HLA-DQA1*03:02-B1*03:03L HLA-DQA1*05:01-B1*03:01L HLA-DRB1*04:01L HLA-DRB1*04:03L HLA-DRB1*13:02L HLA-DRB1*13:03L HLA-DRB1*01:03L HLA-DQA1*01:02-B1*06:02L HLA-DRB4*03:01NL HLA-DRB1*08:77L HLA-DPA1*01:03-B1*03:01L
  REGION 1..10: note = CONT. FROM ABOVE: HLA-DPA1*03:01-B1*04:02L HLA-DRB1*03:01L HLA-D RB1*14:01L HLA-DRB1*11:02L HLA-DRB1*14:02L HLA-DRB1*11:01L HLA-D QA1*01-B1*05L HLA-DQA1*05:05-B1*03:19L HLA-DQA1*05:01-B1*02:01L HLA-DRB4*01:01L HLA-DPA1*01:03-B1*04:01L
  REGION 1..10: note = CONT. FROM ABOVE: HLA-DQA1*05:05-B1*03:116L HLA-DPA1*01:03-B1*04 :02L HLA-DRB1*12:01L HLA-DPA1*02:01-B1*13:01L HLA-DPA1*03:01-B1* 105:01L HLA-DPA1*01:03-B1*104:01L HLA-DQA1*05:05-B1*03:01L HLA-D PA1*01:02-B1*04:01L HLA-DRB1*10:01L HLA-DRB1*16:01L
  REGION 1..10: note = CONT. FROM ABOVE: HLA-DQA1*01:03-B1*06:01L HLA-DRB1*08:02L HLA-D QA1*02:01-B1*03:03L HLA-DRB1*15:03L
VMMSAPPAQY

SEQ ID NO: 8688 - protein, 10 aa, Severe acute respiratory syndrome coronavirus 2
  REGION 1..10: note = Table B: HLA-DQA1*03:02-B1*03:03L HLA-DQA1*05:01-B1*03:01L HLA-DQA1*01:02-B1*06:02L HLA-DRB1*01:02L HLA-DPA1*03:01-B1*04:02L HLA-DRB1*14:02L HLA-DQA1*05:05-B1*03:19L HLA-DQA1*05:01-B1*02:01L
  REGION 1..10: note = CONT. FROM ABOVE: HLA-DQA1*05:05-B1*03:116L HLA-DRB1*09:01L HLA- DPA1*03:01-B1*105:01L HLA-DQA1*03:01-B1*03:02L HLA-DPA1*01:02-B1 *04:01L HLA-DQA1*02:01-B1*03:03L HLA-DRB1*15:03L
MSAPPAQYEL

SEQ ID NO: 8689 - protein, 10 aa, Severe acute respiratory syndrome coronavirus 2
  REGION 1..10: note = Table B: HLA-DQA1*03:02-B1*03:03L HLA-DQA1*05:01-B1*03:01L HLA-DRB1*01:03L HLA-DRB1*04:05L HLA-DQA1*01:02-B1*06:02M HLA-DRB1*08:77L HLA-DPA1*01:03-B1*03:01L HLA-DPA1*03:01-B1*04:02L HLA-DRB1*03:01L HLA-DRB1*14:02L
  REGION 1..10: note = CONT. FROM ABOVE: HLA-DQA1*05:05-B1*03:19L HLA-DQA1*05:01-B1*02: 01L HLA-DRB4*01:01L HLA-DPA1*01:03-B1*04:01L HLA-DQA1*05:05-B1*0 3:116L HLA-DPA1*01:03-B1*04:02L HLA-DPA1*02:01-B1*13:01L HLA-DPA 1*03:01-B1*105:01L HLA-DPA1*01:02-B1*04:01L HLA-DRB1*16:01L
  REGION 1..10: note = CONT. FROM ABOVE: HLA-DQA1*01:03-B1*06:01L HLA-DRB1*08:02L HLA-D QA1*02:01-B1*03:03M HLA-DRB1*15:03L
AQYELKHGTF

SEQ ID NO: 8690 - protein, 15 aa, Severe acute respiratory syndrome coronavirus 2
  REGION 1..15: note = Table B: HLA-DQA1*03:02-B1*03:03L HLA-DQA1*05:01-B1*03:01L HLA-DRB1*13:02L HLA-DRB1*04:05L HLA-DRB1*01:02L HLA-DQA1*05:05-B1*03:19L HLA-DRB1*12:01L HLA-DQA1*03:01-B1*03:02L HLA-DPA1*01:03-B1*104:01L
  REGION 1..15: note = CONT. FROM ABOVE: HLA-DRB1*04:08L
YELKHGTFTCASEYT

SEQ ID NO: 8691 - protein, 15 aa, Severe acute respiratory syndrome coronavirus 2
  REGION 1..15: note = Table B: HLA-DQA1*03:02-B1*03:03L HLA-DRB1*04:03L HLA-DRB1*01:03L HLA-DRB1*01:02L HLA-DRB1*08:04L HLA-DPA1*01:03-B1*04:02L HLA-DRB1*12:01L HLA-DQA1*03:01-B1*03:02L HLA-DRB1*16:01L HLA-DRB1*04:08L
  REGION 1..15: note = CONT. FROM ABOVE: HLA-DRB1*15:03L
HGTFTCASEYTGNYQ

SEQ ID NO: 8692 - protein, 12 aa, Severe acute respiratory syndrome coronavirus 2
  REGION 1..12: note = Table B: HLA-DQA1*03:02-B1*03:03L HLA-DQA1*05:01-B1*03:01L HLA-DPA1*01:03-B1*03:01L HLA-DPA1*03:01-B1*04:02L HLA-DPA1*01:03-B1*04:01L HLA-DPA1*03:01-B1*105:01L HLA-DPA1*01:03-B1*104:01L HLA-DRB1*15:03L
SEYTGNYQCGHY

SEQ ID NO: 8693 - protein, 18 aa, Severe acute respiratory syndrome coronavirus 2
  REGION 1..18: note = Table B: HLA-DQA1*03:02-B1*03:03L HLA-DRB3*02:01L HLA-DRB4*01:01L HLA-DQA1*05:05-B1*03:116L
HYKHITSKETLYCIDGAL

SEQ ID NO: 8694 - protein, 10 aa, Severe acute respiratory syndrome coronavirus 2
  REGION 1..10: note = Table B: HLA-DQA1*03:02-B1*03:03L HLA-DQA1*05:01-B1*03:01L HLA-DQA1*01:02-B1*06:02L HLA-DQA1*05:05-B1*03:19L HLA-DQA1*03:01-B1*03:02L HLA-DQA1*05:05-B1*03:01L HLA-DQA1*01:03-B1*06:01L HLA-DQA1*02:01-B1*03:03L
IDGALLTKSS

SEQ ID NO: 8695 - protein, 12 aa, Severe acute respiratory syndrome coronavirus 2
  REGION 1..12: note = Table B: HLA-DQA1*03:02-B1*03:03L HLA-DQA1*05:05-B1*03:01L
DGALLTKSSEYK

SEQ ID NO: 8696 - protein, 10 aa, Severe acute respiratory syndrome coronavirus 2
  REGION 1..10: note = Table B: HLA-DQA1*03:02-B1*03:03L HLA-DQA1*01-B1*05L HLA-DQA1*03:01-B1*03:02L
SSEYKGPITD

SEQ ID NO: 8697 - protein, 10 aa, Severe acute respiratory syndrome coronavirus 2
  REGION 1..10: note = Table B: HLA-DQA1*03:02-B1*03:03M HLA-DQA1*05:01-B1*03:01L HLA-DRB1*13:02L HLA-DRB1*13:03L HLA-DRB1*01:02L HLA-DRB1*08:77L HLA-DPA1*03:01-B1*04:02L HLA-DRB1*11:02M HLA-DRB1*11:01L HLA-DQA1*05:05-B1*03:19H HLA-DQA1*05:01-B1*02:01L
  REGION 1..10: note = CONT. FROM ABOVE: HLA-DRB4*01:01L HLA-DPA1*01:03-B1*04:01L HLA-D QA1*05:05-B1*03:116L HLA-DRB1*09:01M HLA-DPA1*01:03-B1*04:02L HL A-DPA1*03:01-B1*105:01L HLA-DQA1*03:01-B1*03:02M HLA-DPA1*01:03- B1*104:01M HLA-DPA1*01:02-B1*04:01L HLA-DRB1*07:01L
  REGION 1..10: note = CONT. FROM ABOVE: HLA-DRB1*10:01L HLA-DRB1*16:01L HLA-DQA1*01:03 -B1*06:01L HLA-DQA1*02:01-B1*03:03L HLA-DRB1*15:03L
SEYKGPITDV

SEQ ID NO: 8698 - protein, 10 aa, Severe acute respiratory syndrome coronavirus 2
  REGION 1..10: note = Table B: HLA-DQA1*03:02-B1*03:03L HLA-DQA1*05:01-B1*03:01L HLA-DRB1*04:03L HLA-DRB1*13:03L HLA-DRB1*01:03L HLA-DRB1*04:05L HLA-DQA1*01:02-B1*06:02M HLA-DRB1*01:01L HLA-DRB1*01:02L HLA-DRB1*08:77L HLA-DPA1*01:03-B1*03:01L
  REGION 1..10: note = CONT. FROM ABOVE: HLA-DPA1*03:01-B1*04:02L HLA-DRB1*03:01L HLA-D RB1*11:03L HLA-DRB1*14:02L HLA-DQA1*01:01-B1*05:01L HLA-DRB1*11: 01L HLA-DQA1*01-B1*05L HLA-DQA1*05:05-B1*03:19L HLA-DQA1*05:01-B 1*02:01L HLA-DRB4*01:01L HLA-DPA1*01:03-B1*04:01L
  REGION 1..10: note = CONT. FROM ABOVE: HLA-DQA1*05:05-B1*03:116L HLA-DPA1*01:03-B1*04 :02L HLA-DRB1*12:01L HLA-DPA1*02:01-B1*13:01M HLA-DPA1*03:01-B1* 105:01L HLA-DPA1*01:02-B1*04:01L HLA-DRB1*16:01L HLA-DQA1*01:03- B1*06:01M HLA-DQA1*02:01-B1*03:03L HLA-DRB1*15:03L
EYKGPITDVF

SEQ ID NO: 8699 - protein, 11 aa, Severe acute respiratory syndrome coronavirus 2
  REGION 1..11: note = Table B: HLA-DQA1*03:02-B1*03:03L HLA-DRB1*04:03L HLA-DQA1*01:02-B1*06:02L HLA-DQA1*05:01-B1*02:01L HLA-DQA1*03:01-B1*03:02L HLA-DPA1*01:02-B1*04:01L HLA-DQA1*02:01-B1*03:03L
GPITDVFYKEN

SEQ ID NO: 8700 - protein, 11 aa, Severe acute respiratory syndrome coronavirus 2
  REGION 1..11: note = Table B: HLA-DQA1*03:02-B1*03:03L HLA-DPA1*02:01-B1*13:01L
FYKENSYTTTI

SEQ ID NO: 8701 - protein, 10 aa, Severe acute respiratory syndrome coronavirus 2
  REGION 1..10: note = Table B: HLA-DQA1*03:02-B1*03:03L HLA-DQA1*05:01-B1*03:01L HLA-DRB1*04:03L HLA-DRB1*13:02L HLA-DRB1*13:03L HLA-DRB1*01:03L HLA-DRB1*04:02L HLA-DRB1*04:05L HLA-DQA1*01:02-B1*06:02L HLA-DRB1*01:02L HLA-DRB4*03:01NL HLA-DRB1*08:04L
  REGION 1..10: note = CONT. FROM ABOVE: HLA-DPA1*01:03-B1*03:01L HLA-DPA1*03:01-B1*04: 02L HLA-DRB1*14:01L HLA-DRB1*14:02L HLA-DQA1*01:01-B1*05:01L HLA -DRB1*08:01L HLA-DQA1*01-B1*05L HLA-DQA1*05:05-B1*03:19L HLA-DQA 1*05:01-B1*02:01L HLA-DPA1*01:03-B1*04:01L HLA-DRB1*04:10L
  REGION 1..10: note = CONT. FROM ABOVE: HLA-DPA1*01:03-B1*04:02L HLA-DRB1*12:01L HLA-D PA1*02:01-B1*13:01L HLA-DPA1*03:01-B1*105:01L HLA-DQA1*03:01-B1* 03:02L HLA-DRB1*14:54L HLA-DQA1*05:05-B1*03:01L HLA-DRB1*14:17L HLA-DPA1*01:02-B1*04:01L HLA-DRB1*16:01L
  REGION 1..10: note = CONT. FROM ABOVE: HLA-DQA1*01:03-B1*06:01L HLA-DRB1*04:08L HLA-D RB1*08:03L HLA-DQA1*02:01-B1*03:03L HLA-DRB1*15:03L
SYTTTIKPVT

SEQ ID NO: 8702 - protein, 10 aa, Severe acute respiratory syndrome coronavirus 2
  REGION 1..10: note = Table B: HLA-DQA1*03:02-B1*03:03L HLA-DQA1*05:01-B1*03:01M HLA-DRB1*14:04L HLA-DRB1*04:01L HLA-DRB1*04:03L HLA-DRB1*13:02L HLA-DRB1*13:03M HLA-DRB1*01:03M HLA-DRB1*04:02L HLA-DRB1*04:05L HLA-DQA1*01:02-B1*06:02M HLA-DRB1*01:01L HLA-DRB1*01:02L
  REGION 1..10: note = CONT. FROM ABOVE: HLA-DRB4*03:01NL HLA-DRB1*08:77M HLA-DRB3*02:0 1L HLA-DPA1*01:03-B1*03:01M HLA-DPA1*03:01-B1*04:02L HLA-DRB1*03 :01M HLA-DRB1*14:01L HLA-DRB1*11:02M HLA-DRB1*11:03L HLA-DRB1*11 :04L HLA-DRB1*14:02M HLA-DRB1*08:01L HLA-DRB1*11:01L
  REGION 1..10: note = CONT. FROM ABOVE: HLA-DRB5*01:01L HLA-DQA1*01-B1*05M HLA-DQA1*05 :05-B1*03:19M HLA-DRB4*02:01NL HLA-DQA1*05:01-B1*02:01M HLA-DRB4 *01:01M HLA-DPA1*01:03-B1*04:01M HLA-DQA1*05:05-B1*03:116M HLA-D RB1*09:01L HLA-DPA1*01:03-B1*04:02M HLA-DRB1*12:01L
  REGION 1..10: note = CONT. FROM ABOVE: HLA-DRB1*12:02L HLA-DPA1*02:01-B1*13:01L HLA-D PA1*03:01-B1*105:01M HLA-DQA1*03:01-B1*03:02L HLA-DRB1*14:54L HL A-DPA1*01:03-B1*104:01M HLA-DQA1*05:05-B1*03:01L HLA-DRB1*14:17L HLA-DPA1*01:02-B1*04:01L HLA-DRB1*10:01M HLA-DRB1*16:01M
  REGION 1..10: note = CONT. FROM ABOVE: HLA-DQA1*01:03-B1*06:01L HLA-DRB1*08:02L HLA -DRB1*08:03L HLA-DQA1*02:01-B1*03:03M HLA-DRB1*15:01L HLA-DRB1 *15:03M
YTTTIKPVTY

SEQ ID NO: 8703 - protein, 10 aa, Severe acute respiratory syndrome coronavirus 2
  REGION 1..10: note = Table B: HLA-DQA1*03:02-B1*03:03L HLA-DQA1*05:01-B1*03:01L HLA-DQA1*01:02-B1*06:02L HLA-DRB1*01:02L HLA-DPA1*03:01-B1*04:02L HLA-DRB1*14:01L HLA-DRB1*14:02L HLA-DRB1*08:01L HLA-DQA1*05:01-B1*02:01L
  REGION 1..10: note = CONT. FROM ABOVE: HLA-DQA1*05:05-B1*03:116L HLA-DPA1*03:01-B1*10 5:01L HLA-DQA1*03:01-B1*03:02L HLA-DPA1*01:02-B1*04:01L HLA-DRB1 *16:01L HLA-DQA1*01:03-B1*06:01L HLA-DQA1*02:01-B1*03:03L HLA-DR B1*15:03L
TTIKPVTYKL

SEQ ID NO: 8704 - protein, 12 aa, Severe acute respiratory syndrome coronavirus 2
  REGION 1..12: note = Table B: HLA-DQA1*03:02-B1*03:03L HLA-DQA1*05:01-B1*03:01L HLA-DQA1*01:02-B1*06:02L HLA-DQA1*05:05-B1*03:01L HLA-DQA1*01:03-B1*06:01L
LDGVVCTEIDPK

SEQ ID NO: 8705 - protein, 13 aa, Severe acute respiratory syndrome coronavirus 2
  REGION 1..13: note = Table B: HLA-DQA1*03:02-B1*03:03L HLA-DRB1*04:03L HLA-DRB1*04:05L HLA-DRB1*01:02L HLA-DPA1*02:01-B1*13:01L HLA-DRB1*16:01L HLA-DRB1*15:03L
DGVVCTEIDPKLD

SEQ ID NO: 8706 - protein, 12 aa, Severe acute respiratory syndrome coronavirus 2
  REGION 1..12: note = Table B: HLA-DQA1*03:02-B1*03:03L HLA-DRB1*04:03L HLA-DRB1*04:02L HLA-DRB1*04:05L HLA-DQA1*01:02-B1*06:02L HLA-DQA1*01-B1*05L HLA-DQA1*05:01-B1*02:01L HLA-DPA1*03:01-B1*105:01L HLA-DQA1*03:01-B1*03:02L
  REGION 1..12: note = CONT. FROM ABOVE: HLA-DQA1*05:05-B1*03:01L HLA-DRB1*16:01L HLA-D QA1*02:01-B1*03:03L
VVCTEIDPKLDN

SEQ ID NO: 8707 - protein, 10 aa, Severe acute respiratory syndrome coronavirus 2
  REGION 1..10: note = Table B: HLA-DQA1*03:02-B1*03:03M HLA-DQA1*05:01-B1*03:01H HLA-DRB1*14:04L HLA-DRB1*04:01L HLA-DRB1*04:03L HLA-DRB1*13:02L HLA-DRB1*13:03M HLA-DRB1*01:03M HLA-DRB1*04:02M HLA-DRB1*04:05L HLA-DQA1*01:02-B1*06:02M HLA-DRB1*01:01L HLA-DRB4*03:01NM
  REGION 1..10: note = CONT. FROM ABOVE: HLA-DRB1*08:77H HLA-DPA1*01:03-B1*03:01M HLA-D PA1*03:01-B1*04:02H HLA-DRB1*03:01H HLA-DRB1*14:01L HLA-DRB1*11: 02M HLA-DRB1*11:03L HLA-DRB1*11:04L HLA-DRB1*14:02M HLA-DRB1*08: 01L HLA-DRB1*11:01L HLA-DRB5*01:01L HLA-DQA1*01-B1*05H
  REGION 1..10: note = CONT. FROM ABOVE: HLA-DQA1*05:05-B1*03:19H HLA-DRB4*02:01NL HLA- DQA1*05:01-B1*02:01H HLA-DRB4*01:01H HLA-DPA1*01:03-B1*04:01H HL A-DQA1*05:05-B1*03:116M HLA-DRB1*09:01L HLA-DPA1*01:03-B1*04:02M HLA-DRB1*12:01M HLA-DPA1*02:01-B1*13:01L
  REGION 1..10: note = CONT. FROM ABOVE: HLA-DPA1*03:01-B1*105:01L HLA-DQA1*03:01-B1*03 :02M HLA-DRB1*14:54M HLA-DPA1*01:03-B1*104:01M HLA-DRB1*14:17L H LA-DPA1*01:02-B1*04:01M HLA-DRB1*10:01H HLA-DRB1*16:01M HLA-DQA1 *01:03-B1*06:01L HLA-DRB1*04:08L HLA-DRB1*08:02L HLA-DRB1*08:03L
  REGION 1..10: note = CONT. FROM ABOVE: HLA-DQA1*02:01-B1*03:03L HLA-DRB1*15:01L HLA -DRB1*15:03H
TEIDPKLDNY

SEQ ID NO: 8708 - protein, 10 aa, Severe acute respiratory syndrome coronavirus 2
  REGION 1..10: note = Table B: HLA-DQA1*03:02-B1*03:03L HLA-DQA1*05:01-B1*03:01L HLA-DRB1*04:03L HLA-DRB1*13:02L HLA-DRB1*13:03M HLA-DRB1*01:03M HLA-DRB1*04:02L HLA-DRB1*04:05L HLA-DQA1*01:02-B1*06:02M HLA-DRB1*01:01L HLA-DRB4*03:01NL HLA-DRB1*08:77M
  REGION 1..10: note = CONT. FROM ABOVE: HLA-DPA1*01:03-B1*03:01H HLA-DPA1*03:01-B1*04: 02L HLA-DRB1*03:01M HLA-DRB1*14:01L HLA-DRB1*11:02M HLA-DRB1*11: 03L HLA-DRB1*11:04L HLA-DRB1*14:02M HLA-DRB1*11:01L HLA-DRB5*01: 01L HLA-DQA1*01-B1*05M HLA-DQA1*05:05-B1*03:19H
  REGION 1..10: note = CONT. FROM ABOVE: HLA-DQA1*05:01-B1*02:01H HLA-DRB4*01:01M HLA-D PA1*01:03-B1*04:01M HLA-DQA1*05:05-B1*03:116M HLA-DPA1*01:03-B1* 04:02M HLA-DRB1*12:01M HLA-DPA1*02:01-B1*13:01L HLA-DPA1*03:01-B 1*105:01L HLA-DQA1*03:01-B1*03:02L HLA-DRB1*14:54L
  REGION 1..10: note = CONT. FROM ABOVE: HLA-DPA1*01:03-B1*104:01M HLA-DQA1*05:05-B1*03 :01L HLA-DPA1*01:02-B1*04:01L HLA-DRB1*10:01M HLA-DRB1*16:01M HL A-DQA1*01:03-B1*06:01L HLA-DRB1*08:02L HLA-DQA1*02:01-B1*03:03L HLA-DRB1*15:03L
EIDPKLDNYY

SEQ ID NO: 8709 - protein, 20 aa, Severe acute respiratory syndrome coronavirus 2
  REGION 1..20: note = Table B: HLA-DQA1*03:02-B1*03:03L HLA-DQA1*05:05-B1*03:01L
IDPKLDNYYKKDNSYFTEQP

SEQ ID NO: 8710 - protein, 20 aa, Severe acute respiratory syndrome coronavirus 2
  REGION 1..20: note = Table B: HLA-DQA1*03:02-B1*03:03L HLA-DRB3*02:01L
DPKLDNYYKKDNSYFTEQPI

SEQ ID NO: 8711 - protein, 11 aa, Severe acute respiratory syndrome coronavirus 2
  REGION 1..11: note = Table B: HLA-DQA1*03:02-B1*03:03L HLA-DQA1*05:01-B1*02:01L HLA-DQA1*03:01-B1*03:02L
DNSYFTEQPID

SEQ ID NO: 8712 - protein, 10 aa, Severe acute respiratory syndrome coronavirus 2
  REGION 1..10: note = Table B: HLA-DQA1*03:02-B1*03:03L HLA-DRB1*04:05L HLA-DQA1*01-B1*05L HLA-DQA1*05:01-B1*02:01L HLA-DPA1*02:01-B1*13:01L HLA-DQA1*03:01-B1*03:02L HLA-DRB1*16:01L HLA-DQA1*01:03-B1*06:01L
  REGION 1..10: note = CONT. FROM ABOVE: HLA-DQA1*02:01-B1*03:03L HLA-DRB1*15:03L
SYFTEQPIDL

SEQ ID NO: 8713 - protein, 11 aa, Severe acute respiratory syndrome coronavirus 2
  REGION 1..11: note = Table B: HLA-DQA1*03:02-B1*03:03L HLA-DRB1*13:03L HLA-DRB1*01:03L HLA-DRB1*04:02L HLA-DRB1*04:05L HLA-DRB4*03:01NL HLA-DRB1*08:77L HLA-DRB1*14:01L HLA-DRB1*14:02L HLA-DQA1*01-B1*05L HLA-DQA1*05:01-B1*02:01L HLA-DRB1*04:10L
  REGION 1..11: note = CONT. FROM ABOVE: HLA-DRB1*12:01L HLA-DQA1*03:01-B1*03:02L HLA-D RB1*14:54L HLA-DRB1*14:17L HLA-DRB1*16:01L HLA-DRB1*04:08L HLA-D QA1*02:01-B1*03:03L
FTEQPIDLVPN

SEQ ID NO: 8714 - protein, 12 aa, Severe acute respiratory syndrome coronavirus 2
  REGION 1..12: note = Table B: HLA-DQA1*03:02-B1*03:03L HLA-DQA1*01-B1*05L HLA-DQA1*05:01-B1*02:01L HLA-DQA1*03:01-B1*03:02L HLA-DQA1*02:01-B1*03:03L
TEQPIDLVPNQP

SEQ ID NO: 8715 - protein, 12 aa, Severe acute respiratory syndrome coronavirus 2
  REGION 1..12: note = Table B: HLA-DQA1*03:02-B1*03:03L HLA-DQA1*05:01-B1*03:01L HLA-DRB1*13:02L HLA-DRB1*13:03L HLA-DRB1*01:03L HLA-DRB1*04:02L HLA-DRB1*04:05L HLA-DRB1*01:02L HLA-DRB4*03:01NL HLA-DRB1*08:77L HLA-DRB3*02:01L HLA-DPA1*03:01-B1*04:02L HLA-DRB1*14:01L
  REGION 1..12: note = CONT. FROM ABOVE: HLA-DQA1*01-B1*05L HLA-DRB1*04:10L HLA-DRB1*12 :01L HLA-DRB1*12:02L HLA-DQA1*03:01-B1*03:02L HLA-DRB1*14:54L HL A-DRB1*14:17L HLA-DRB1*04:08L HLA-DQA1*02:01-B1*03:03L HLA-DRB1* 15:03L
QPIDLVPNQPYP

SEQ ID NO: 8716 - protein, 10 aa, Severe acute respiratory syndrome coronavirus 2
  REGION 1..10: note = Table B: HLA-DQA1*03:02-B1*03:03L HLA-DQA1*05:01-B1*03:01L HLA-DRB1*04:03L HLA-DRB1*13:02L HLA-DRB1*13:03L HLA-DRB1*01:03L HLA-DRB1*04:02L HLA-DRB1*04:05L HLA-DRB4*03:01NL HLA-DRB1*08:77L HLA-DRB1*14:01L HLA-DQA1*01-B1*05L HLA-DQA1*05:01-B1*02:01L
  REGION 1..10: note = CONT. FROM ABOVE: HLA-DRB1*04:10L HLA-DRB1*12:01L HLA-DRB1*12:02 L HLA-DQA1*03:01-B1*03:02L HLA-DRB1*14:54L HLA-DRB1*14:17L HLA-D RB1*16:01L HLA-DQA1*02:01-B1*03:03L
DLVPNQPYPN

SEQ ID NO: 8717 - protein, 10 aa, Severe acute respiratory syndrome coronavirus 2
  REGION 1..10: note = Table B: HLA-DQA1*03:02-B1*03:03L HLA-DQA1*05:01-B1*03:01L HLA-DRB1*04:03L HLA-DRB1*13:03L HLA-DRB1*04:02L HLA-DRB4*03:01NL HLA-DRB1*14:01L HLA-DRB1*12:01L HLA-DQA1*03:01-B1*03:02L HLA-DRB1*14:17L HLA-DRB1*16:01L HLA-DQA1*02:01-B1*03:03L
LVPNQPYPNA

SEQ ID NO: 8718 - protein, 11 aa, Severe acute respiratory syndrome coronavirus 2
  REGION 1..11: note = Table B: HLA-DQA1*03:02-B1*03:03L HLA-DQA1*05:01-B1*03:01L HLA-DRB1*01:03L HLA-DRB1*04:05L HLA-DQA1*01:02-B1*06:02M HLA-DRB1*01:01L HLA-DRB4*03:01NL HLA-DRB1*08:77L HLA-DPA1*01:03-B1*03:01L HLA-DPA1*03:01-B1*04:02L
  REGION 1..11: note = CONT. FROM ABOVE: HLA-DRB1*14:01L HLA-DRB1*11:03L HLA-DRB1*14:02 L HLA-DRB1*08:01L HLA-DRB5*01:01L HLA-DQA1*01-B1*05L HLA-DQA1*05 :05-B1*03:19L HLA-DQA1*05:01-B1*02:01L HLA-DPA1*01:03-B1*04:01L HLA-DQA1*05:05-B1*03:116L HLA-DPA1*01:03-B1*04:02L
  REGION 1..11: note = CONT. FROM ABOVE: HLA-DPA1*02:01-B1*13:01L HLA-DPA1*03:01-B1*105 :01M HLA-DPA1*01:02-B1*04:01L HLA-DRB1*10:01L HLA-DRB1*16:01L HL A-DQA1*01:03-B1*06:01L HLA-DQA1*02:01-B1*03:03L HLA-DRB1*15:03L
VPNQPYPNASF

SEQ ID NO: 8719 - protein, 12 aa, Severe acute respiratory syndrome coronavirus 2
  REGION 1..12: note = Table B: HLA-DQA1*03:02-B1*03:03L HLA-DQA1*05:01-B1*03:01L HLA-DQA1*01:02-B1*06:02L HLA-DQA1*05:05-B1*03:19L HLA-DQA1*05:05-B1*03:01L HLA-DQA1*01:03-B1*06:01L
PNQPYPNASFDN

SEQ ID NO: 8720 - protein, 12 aa, Severe acute respiratory syndrome coronavirus 2
  REGION 1..12: note = Table B: HLA-DQA1*03:02-B1*03:03L HLA-DRB1*04:02L HLA-DQA1*05:05-B1*03:19L HLA-DQA1*05:01-B1*02:01L HLA-DRB1*12:01L HLA-DQA1*05:05-B1*03:01L
QPYPNASFDNFK

SEQ ID NO: 8721 - protein, 15 aa, Severe acute respiratory syndrome coronavirus 2
  REGION 1..15: note = Table B: HLA-DQA1*03:02-B1*03:03L HLA-DQA1*05:01-B1*03:01L HLA-DRB1*04:03L HLA-DRB1*04:04L HLA-DRB1*08:04L HLA-DRB3*02:01L HLA-DPA1*01:03-B1*03:01L HLA-DPA1*03:01-B1*04:02L HLA-DRB1*03:01L HLA-DRB1*11:02L HLA-DRB1*14:02L HLA-DRB1*11:01L
  REGION 1..15: note = CONT. FROM ABOVE: HLA-DQA1*05:05-B1*03:19L HLA-DQA1*05:01-B1*02: 01L HLA-DPA1*01:03-B1*04:02L HLA-DRB3*01:01L HLA-DPA1*01:03-B1*1 04:01L HLA-DQA1*05:05-B1*03:01L HLA-DPA1*01:02-B1*04:01L HLA-DQA 1*01:03-B1*06:01L HLA-DRB1*08:03L HLA-DQA1*02:01-B1*03:03L
DNFKFVCDNIKFADD

SEQ ID NO: 8722 - protein, 11 aa, Severe acute respiratory syndrome coronavirus 2
  REGION 1..11: note = Table B: HLA-DQA1*03:02-B1*03:03L HLA-DRB1*13:03L HLA-DRB1*01:03L HLA-DRB1*04:02L HLA-DRB1*04:04L HLA-DRB1*04:05L HLA-DRB4*03:01NL HLA-DRB1*11:04L HLA-DQA1*05:01-B1*02:01L HLA-DRB1*04:10L HLA-DRB1*12:01L HLA-DRB1*14:54L HLA-DRB1*14:17L
  REGION 1..11: note = CONT. FROM ABOVE: HLA-DRB1*16:01L HLA-DRB1*04:08L HLA-DRB1*08:03 L HLA-DQA1*02:01-B1*03:03L
DNIKFADDLNQ

SEQ ID NO: 8723 - protein, 10 aa, Severe acute respiratory syndrome coronavirus 2
  REGION 1..10: note = Table B: HLA-DQA1*03:02-B1*03:03L HLA-DRB1*04:03L HLA-DRB1*04:02L HLA-DRB1*04:05L HLA-DPA1*03:01-B1*04:02L HLA-DRB1*14:01L HLA-DQA1*01-B1*05L HLA-DQA1*05:01-B1*02:01L HLA-DPA1*02:01-B1*13:01L HLA-DQA1*03:01-B1*03:02L
  REGION 1..10: note = CONT. FROM ABOVE: HLA-DPA1*01:02-B1*04:01L HLA-DRB1*16:01L HLA-D QA1*02:01-B1*03:03L HLA-DRB1*15:03L
IKFADDLNQL

SEQ ID NO: 8724 - protein, 18 aa, Severe acute respiratory syndrome coronavirus 2
  REGION 1..18: note = Table B: HLA-DQA1*03:02-B1*03:03L HLA-DRB3*02:01L HLA-DQA1*05:01-B1*02:01L HLA-DPA1*01:03-B1*04:01L HLA-DRB1*09:01L
DDLNQLTGYKKPASRELK

SEQ ID NO: 8725 - protein, 16 aa, Severe acute respiratory syndrome coronavirus 2
  REGION 1..16: note = Table B: HLA-DQA1*03:02-B1*03:03L HLA-DRB1*04:05L HLA-DRB1*14:02L HLA-DQA1*05:05-B1*03:01L
KPASRELKVTFFPDLN

SEQ ID NO: 8726 - protein, 11 aa, Severe acute respiratory syndrome coronavirus 2
  REGION 1..11: note = Table B: HLA-DQA1*03:02-B1*03:03L HLA-DRB1*04:03L HLA-DRB1*04:02L HLA-DRB1*04:05L HLA-DQA1*05:01-B1*02:01L HLA-DRB1*04:10L HLA-DQA1*03:01-B1*03:02L HLA-DRB1*14:17L HLA-DRB1*16:01L HLA-DQA1*02:01-B1*03:03L HLA-DRB1*15:03L
VTFFPDLNGDV

SEQ ID NO: 8727 - protein, 10 aa, Severe acute respiratory syndrome coronavirus 2
  REGION 1..10: note = Table B: HLA-DQA1*03:02-B1*03:03L HLA-DQA1*01-B1*05L HLA-DQA1*05:05-B1*03:19L HLA-DQA1*05:01-B1*02:01L HLA-DPA1*02:01-B1*13:01L HLA-DQA1*03:01-B1*03:02L HLA-DQA1*02:01-B1*03:03L HLA-DRB1*15:03L
FFPDLNGDVV

SEQ ID NO: 8728 - protein, 13 aa, Severe acute respiratory syndrome coronavirus 2
  REGION 1..13: note = Table B: HLA-DQA1*03:02-B1*03:03L HLA-DRB1*04:03L HLA-DPA1*01:03-B1*03:01L HLA-DQA1*01-B1*05L HLA-DPA1*03:01-B1*105:01L HLA-DRB1*16:01L
FPDLNGDVVAIDY

SEQ ID NO: 8729 - protein, 10 aa, Severe acute respiratory syndrome coronavirus 2
  REGION 1..10: note = Table B: HLA-DQA1*03:02-B1*03:03L HLA-DQA1*05:01-B1*02:01L HLA-DQA1*03:01-B1*03:02L HLA-DQA1*01:03-B1*06:01L HLA-DQA1*02:01-B1*03:03L
NGDVVAIDYK

SEQ ID NO: 8730 - protein, 10 aa, Severe acute respiratory syndrome coronavirus 2
  REGION 1..10: note = Table B: HLA-DQA1*03:02-B1*03:03L HLA-DQA1*05:01-B1*03:01L HLA-DRB1*13:02L HLA-DRB1*13:03M HLA-DRB1*01:03L HLA-DQA1*01:02-B1*06:02M HLA-DRB4*03:01NL HLA-DRB1*08:77L HLA-DPA1*01:03-B1*03:01L HLA-DPA1*03:01-B1*04:02L
  REGION 1..10: note = CONT. FROM ABOVE: HLA-DRB1*03:01L HLA-DRB1*14:01L HLA-DRB1*14:02 L HLA-DRB5*01:01L HLA-DQA1*01-B1*05L HLA-DQA1*05:05-B1*03:19L HL A-DQA1*05:01-B1*02:01L HLA-DRB4*01:01L HLA-DPA1*01:03-B1*04:01M HLA-DQA1*05:05-B1*03:116L HLA-DPA1*01:03-B1*04:02L
  REGION 1..10: note = CONT. FROM ABOVE: HLA-DRB1*12:01L HLA-DPA1*02:01-B1*13:01L HLA-D PA1*03:01-B1*105:01M HLA-DQA1*05:05-B1*03:01L HLA-DPA1*01:02-B1* 04:01L HLA-DRB1*10:01L HLA-DRB1*16:01L HLA-DQA1*01:03-B1*06:01L HLA-DQA1*02:01-B1*03:03L HLA-DRB1*15:03L
DVVAIDYKHY

SEQ ID NO: 8731 - protein, 12 aa, Severe acute respiratory syndrome coronavirus 2
  REGION 1..12: note = Table B: HLA-DQA1*03:02-B1*03:03L HLA-DQA1*05:01-B1*03:01L HLA-DRB1*14:04L HLA-DRB1*04:01L HLA-DRB1*04:04L HLA-DRB1*04:05L HLA-DQA1*01:02-B1*06:02L HLA-DRB1*01:02L HLA-DRB1*08:04L HLA-DRB1*08:77L HLA-DRB3*02:01L HLA-DPA1*01:03-B1*03:01L
  REGION 1..12: note = CONT. FROM ABOVE: HLA-DPA1*03:01-B1*04:02L HLA-DRB1*03:01L HLA-D RB1*11:02L HLA-DRB1*11:03L HLA-DRB1*11:04L HLA-DRB1*14:02L HLA-D RB1*08:01L HLA-DRB1*11:01L HLA-DRB5*01:01L HLA-DQA1*01-B1*05L HL A-DQA1*05:05-B1*03:19L HLA-DQA1*05:01-B1*02:01L HLA-DRB1*13:01L
  REGION 1..12: note = CONT. FROM ABOVE: HLA-DRB4*01:01L HLA-DPA1*01:03-B1*04:01L HLA-D RB1*04:10L HLA-DPA1*01:03-B1*04:02L HLA-DRB1*12:02L HLA-DRB3*01: 01L HLA-DPA1*02:01-B1*13:01L HLA-DPA1*03:01-B1*105:01L HLA-DPA1* 01:03-B1*02:01L HLA-DRB1*10:01L HLA-DQA1*01:03-B1*06:01L
  REGION 1..12: note = CONT. FROM ABOVE: HLA-DRB1*08:03L HLA-DQA1*02:01-B1*03:03L HLA-D RB1*15:03L
VVAIDYKHYTPS

SEQ ID NO: 8732 - protein, 15 aa, Severe acute respiratory syndrome coronavirus 2
  REGION 1..15: note = Table B: HLA-DQA1*03:02-B1*03:03L HLA-DPA1*03:01-B1*04:02L HLA-DRB1*03:01L HLA-DRB1*11:02L HLA-DQA1*05:05-B1*03:19L HLA-DQA1*05:01-B1*02:01L HLA-DRB1*09:01L HLA-DPA1*01:03-B1*04:02L HLA-DPA1*01:03-B1*104:01L
  REGION 1..15: note = CONT. FROM ABOVE: HLA-DQA1*01:03-B1*06:01L HLA-DRB1*08:02L
KPIVWHVNNATNKAT

SEQ ID NO: 8733 - protein, 11 aa, Severe acute respiratory syndrome coronavirus 2
  REGION 1..11: note = Table B: HLA-DQA1*03:02-B1*03:03L HLA-DRB1*04:01L HLA-DRB1*13:02L HLA-DRB4*03:01NL HLA-DPA1*03:01-B1*04:02L HLA-DRB1*14:01L HLA-DRB1*11:02L HLA-DRB1*11:01L HLA-DRB4*01:01L HLA-DQA1*05:05-B1*03:116L HLA-DPA1*02:01-B1*13:01L
  REGION 1..11: note = CONT. FROM ABOVE: HLA-DPA1*01:03-B1*104:01L HLA-DRB1*14:17L HLA- DPA1*01:02-B1*04:01L HLA-DQA1*01:03-B1*06:01L
HVNNATNKATY

SEQ ID NO: 8734 - protein, 10 aa, Severe acute respiratory syndrome coronavirus 2
  REGION 1..10: note = Table B: HLA-DQA1*03:02-B1*03:03L HLA-DQA1*05:01-B1*03:01L HLA-DRB1*04:03L HLA-DRB1*13:02L HLA-DRB1*13:03L HLA-DRB1*01:03L HLA-DRB1*04:02L HLA-DRB1*04:05L HLA-DRB1*01:02L HLA-DRB4*03:01NL HLA-DRB1*08:77L HLA-DRB1*14:01L HLA-DRB1*11:04L HLA-DRB1*12:01L
  REGION 1..10: note = CONT. FROM ABOVE: HLA-DQA1*03:01-B1*03:02L HLA-DRB1*14:54L HLA-D RB1*14:17L HLA-DPA1*01:02-B1*04:01L HLA-DRB1*16:01L HLA-DQA1*01: 03-B1*06:01L HLA-DRB1*04:08L HLA-DQA1*02:01-B1*03:03L
ATNKATYKPN

SEQ ID NO: 8735 - protein, 10 aa, Severe acute respiratory syndrome coronavirus 2
  REGION 1..10: note = Table B: HLA-DQA1*03:02-B1*03:03L HLA-DQA1*05:01-B1*03:01L HLA-DRB1*04:03L HLA-DRB1*13:03L HLA-DRB1*04:02L HLA-DQA1*01:02-B1*06:02L HLA-DRB4*03:01NL HLA-DQA1*05:05-B1*03:19L HLA-DQA1*05:01-B1*02:01L
  REGION 1..10: note = CONT. FROM ABOVE: HLA-DPA1*03:01-B1*105:01L HLA-DQA1*03:01-B1*03 :02L HLA-DQA1*05:05-B1*03:01L HLA-DRB1*14:17L HLA-DQA1*01:03-B1* 06:01L HLA-DQA1*02:01-B1*03:03L
WSTKPVETSN

SEQ ID NO: 8736 - protein, 11 aa, Severe acute respiratory syndrome coronavirus 2
  REGION 1..11: note = Table B: HLA-DQA1*03:02-B1*03:03L HLA-DQA1*05:01-B1*03:01L HLA-DRB1*04:03L HLA-DRB1*08:77L HLA-DPA1*01:03-B1*03:01L HLA-DPA1*03:01-B1*04:02L HLA-DRB1*03:01L HLA-DRB1*14:01L HLA-DRB1*14:02L HLA-DRB1*11:01L HLA-DQA1*01-B1*05L
  REGION 1..11: note = CONT. FROM ABOVE: HLA-DQA1*05:05-B1*03:19L HLA-DQA1*05:01-B1*02: 01L HLA-DRB4*01:01L HLA-DPA1*01:03-B1*04:01L HLA-DQA1*05:05-B1*0 3:116L HLA-DPA1*01:03-B1*04:02L HLA-DPA1*02:01-B1*13:01L HLA-DPA 1*03:01-B1*105:01L HLA-DPA1*01:02-B1*04:01L HLA-DRB1*10:01L
  REGION 1..11: note = CONT. FROM ABOVE: HLA-DRB1*16:01L HLA-DQA1*01:03-B1*06:01L HLA-D RB1*08:02L HLA-DRB1*15:03L
STKPVETSNSF

SEQ ID NO: 8737 - protein, 10 aa, Severe acute respiratory syndrome coronavirus 2
  REGION 1..10: note = Table B: HLA-DQA1*03:02-B1*03:03L HLA-DQA1*05:05-B1*03:19L HLA-DQA1*03:01-B1*03:02L
VETSNSFDVL

SEQ ID NO: 8738 - protein, 12 aa, Severe acute respiratory syndrome coronavirus 2
  REGION 1..12: note = Table B: HLA-DQA1*03:02-B1*03:03L HLA-DRB1*04:03L HLA-DQA1*01:02-B1*06:02L HLA-DQA1*01-B1*05L HLA-DQA1*05:01-B1*02:01L HLA-DPA1*03:01-B1*105:01L
TSNSFDVLKSED

SEQ ID NO: 8739 - protein, 12 aa, Severe acute respiratory syndrome coronavirus 2
  REGION 1..12: note = Table B: HLA-DQA1*03:02-B1*03:03L HLA-DQA1*05:01-B1*03:01L HLA-DRB1*13:02L HLA-DRB1*01:03L HLA-DRB1*04:04L HLA-DQA1*01:02-B1*06:02L HLA-DRB1*01:02L HLA-DRB1*08:04L HLA-DPA1*01:03-B1*03:01L HLA-DRB1*14:01L HLA-DRB1*11:04L
  REGION 1..12: note = CONT. FROM ABOVE: HLA-DQA1*01:01-B1*05:01L HLA-DRB1*08:01L HLA-D QA1*05:05-B1*03:19L HLA-DRB1*12:02L HLA-DPA1*02:01-B1*13:01L HLA -DPA1*03:01-B1*105:01L HLA-DQA1*05:05-B1*03:01L HLA-DRB1*10:01L HLA-DRB1*04:08L HLA-DRB1*08:03L HLA-DRB1*15:03L
SNSFDVLKSEDA

SEQ ID NO: 8740 - protein, 12 aa, Severe acute respiratory syndrome coronavirus 2
  REGION 1..12: note = Table B: HLA-DQA1*03:02-B1*03:03L HLA-DQA1*05:01-B1*03:01L HLA-DRB1*13:02L HLA-DRB1*01:03L HLA-DRB1*04:04L HLA-DQA1*01:02-B1*06:02L HLA-DRB1*01:02L HLA-DRB1*08:04L HLA-DRB1*08:77L HLA-DRB3*02:01L HLA-DPA1*01:03-B1*03:01L
  REGION 1..12: note = CONT. FROM ABOVE: HLA-DRB1*14:01L HLA-DRB1*11:03L HLA-DRB1*14:02 L HLA-DRB1*08:01L HLA-DQA1*05:05-B1*03:19L HLA-DRB1*12:02L HLA-D PA1*02:01-B1*13:01L HLA-DPA1*03:01-B1*105:01L HLA-DQA1*05:05-B1* 03:01L HLA-DRB1*10:01L HLA-DRB1*04:08L HLA-DRB1*08:03L
  REGION 1..12: note = CONT. FROM ABOVE: HLA-DRB1*15:03L
NSFDVLKSEDAQ

SEQ ID NO: 8741 - protein, 12 aa, Severe acute respiratory syndrome coronavirus 2
  REGION 1..12: note = Table B: HLA-DQA1*03:02-B1*03:03L HLA-DQA1*05:01-B1*03:01L HLA-DRB1*13:02L HLA-DQA1*01:02-B1*06:02L HLA-DRB1*01:01L HLA-DRB1*08:04L HLA-DRB1*08:77L HLA-DPA1*01:03-B1*03:01L HLA-DRB1*14:01L HLA-DRB1*11:03L HLA-DRB1*14:02L HLA-DRB1*08:01L
  REGION 1..12: note = CONT. FROM ABOVE: HLA-DRB1*11:01L HLA-DRB5*01:01L HLA-DQA1*05:05 -B1*03:19L HLA-DRB1*09:01L HLA-DRB1*12:02L HLA-DRB3*01:01L HLA-D PA1*02:01-B1*13:01L HLA-DPA1*03:01-B1*105:01L HLA-DQA1*05:05-B1* 03:01L HLA-DRB1*07:01L HLA-DRB1*08:03L HLA-DRB1*15:03L
SFDVLKSEDAQG

SEQ ID NO: 8742 - protein, 10 aa, Severe acute respiratory syndrome coronavirus 2
  REGION 1..10: note = Table B: HLA-DQA1*03:02-B1*03:03L
VLKSEDAQGM

SEQ ID NO: 8743 - protein, 10 aa, Severe acute respiratory syndrome coronavirus 2
  REGION 1..10: note = Table B: HLA-DQA1*03:02-B1*03:03L HLA-DRB1*04:03L HLA-DQA1*05:01-B1*02:01L HLA-DQA1*03:01-B1*03:02L
KSEDAQGMDN

SEQ ID NO: 8744 - protein, 10 aa, Severe acute respiratory syndrome coronavirus 2
  REGION 1..10: note = Table B: HLA-DQA1*03:02-B1*03:03H HLA-DQA1*05:01-B1*03:01L HLA-DRB1*13:03L HLA-DRB1*08:77L HLA-DPA1*03:01-B1*04:02L HLA-DRB1*11:02L HLA-DQA1*05:05-B1*03:19M HLA-DRB4*01:01L HLA-DPA1*01:03-B1*04:01L HLA-DQA1*05:05-B1*03:116L
  REGION 1..10: note = CONT. FROM ABOVE: HLA-DRB1*09:01M HLA-DPA1*01:03-B1*04:02L HLA-D QA1*03:01-B1*03:02M HLA-DPA1*01:03-B1*104:01L HLA-DPA1*01:02-B1* 04:01L HLA-DRB1*10:01L HLA-DRB1*16:01L
SEDAQGMDNL

SEQ ID NO: 8745 - protein, 16 aa, Severe acute respiratory syndrome coronavirus 2
  REGION 1..16: note = Table B: HLA-DQA1*03:02-B1*03:03L HLA-DQA1*05:01-B1*03:01L HLA-DRB1*04:05L HLA-DRB1*01:02L HLA-DPA1*01:03-B1*03:01L HLA-DQA1*05:05-B1*03:19L HLA-DQA1*05:01-B1*02:01L HLA-DRB1*12:01L HLA-DPA1*02:01-B1*13:01L HLA-DRB1*15:03L
DAQGMDNLACEDLKPV

SEQ ID NO: 8746 - protein, 14 aa, Severe acute respiratory syndrome coronavirus 2
  REGION 1..14: note = Table B: HLA-DQA1*03:02-B1*03:03L HLA-DRB1*04:03L HLA-DRB1*04:05L HLA-DRB1*01:02L HLA-DRB1*08:04L HLA-DPA1*01:03-B1*03:01L HLA-DRB1*08:01L HLA-DQA1*05:05-B1*03:19L HLA-DRB1*12:01L
  REGION 1..14: note = CONT. FROM ABOVE: HLA-DPA1*02:01-B1*13:01L HLA-DPA1*01:03-B1*02: 01L HLA-DRB1*15:03L
DNLACEDLKPVSEE

SEQ ID NO: 8747 - protein, 10 aa, Severe acute respiratory syndrome coronavirus 2
  REGION 1..10: note = Table B: HLA-DQA1*03:02-B1*03:03L HLA-DQA1*05:05-B1*03:19L HLA-DQA1*03:01-B1*03:02L HLA-DPA1*01:03-B1*104:01L
EDLKPVSEEV

SEQ ID NO: 8748 - protein, 11 aa, Severe acute respiratory syndrome coronavirus 2
  REGION 1..11: note = Table B: HLA-DQA1*03:02-B1*03:03L HLA-DQA1*05:01-B1*03:01L HLA-DRB1*13:02L HLA-DRB1*04:02L HLA-DRB1*04:05L HLA-DQA1*01:02-B1*06:02L HLA-DRB1*01:02L HLA-DRB4*03:01NL HLA-DRB3*02:01L HLA-DRB1*14:01L HLA-DQA1*01:01-B1*05:01L
  REGION 1..11: note = CONT. FROM ABOVE: HLA-DRB1*04:10L HLA-DRB1*12:01L HLA-DRB1*12:02 L HLA-DPA1*03:01-B1*105:01L HLA-DRB1*14:54L HLA-DQA1*05:05-B1*03 :01L HLA-DRB1*16:01L HLA-DQA1*01:03-B1*06:01L HLA-DRB1*15:03L
DLKPVSEEVVE

SEQ ID NO: 8749 - protein, 12 aa, Severe acute respiratory syndrome coronavirus 2
  REGION 1..12: note = Table B: HLA-DQA1*03:02-B1*03:03L HLA-DRB1*04:03L HLA-DRB1*04:05L HLA-DQA1*01:01-B1*05:01L HLA-DQA1*01-B1*05L HLA-DQA1*05:01-B1*02:01L HLA-DQA1*03:01-B1*03:02L HLA-DRB1*16:01L HLA-DQA1*01:03-B1*06:01L
  REGION 1..12: note = CONT. FROM ABOVE: HLA-DQA1*02:01-B1*03:03L
KPVSEEVVENPT

SEQ ID NO: 8750 - protein, 10 aa, Severe acute respiratory syndrome coronavirus 2
  REGION 1..10: note = Table B: HLA-DQA1*03:02-B1*03:03L HLA-DRB1*11:02L HLA-DQA1*05:05-B1*03:19M HLA-DRB1*09:01L HLA-DQA1*03:01-B1*03:02L HLA-DPA1*01:03-B1*104:01M
SEEVVENPTI

SEQ ID NO: 8751 - protein, 11 aa, Severe acute respiratory syndrome coronavirus 2
  REGION 1..11: note = Table B: HLA-DQA1*03:02-B1*03:03L HLA-DRB1*08:77L HLA-DPA1*01:03-B1*03:01L
EEVVENPTIQK

SEQ ID NO: 8752 - protein, 10 aa, Severe acute respiratory syndrome coronavirus 2
  REGION 1..10: note = Table B: HLA-DQA1*03:02-B1*03:03L HLA-DQA1*05:01-B1*03:01L HLA-DRB1*04:03L HLA-DRB1*13:02L HLA-DRB1*13:03L HLA-DRB1*01:03L HLA-DRB1*04:02L HLA-DRB1*04:05L HLA-DQA1*01:02-B1*06:02L HLA-DRB1*01:02L HLA-DRB4*03:01NL HLA-DRB1*08:04L HLA-DRB1*08:77L
  REGION 1..10: note = CONT. FROM ABOVE: HLA-DRB3*02:01L HLA-DPA1*01:03-B1*03:01L HLA-D RB1*14:01L HLA-DRB1*11:03L HLA-DRB1*11:04L HLA-DRB1*14:02L HLA-D QA1*01:01-B1*05:01L HLA-DQA1*01-B1*05L HLA-DQA1*05:05-B1*03:19L HLA-DQA1*05:01-B1*02:01L HLA-DRB1*04:10L
  REGION 1..10: note = CONT. FROM ABOVE: HLA-DPA1*01:03-B1*04:02L HLA-DRB1*12:01L HLA-D PA1*03:01-B1*105:01L HLA-DQA1*03:01-B1*03:02L HLA-DRB1*14:54L HL A-DQA1*05:05-B1*03:01L HLA-DRB1*14:17L HLA-DPA1*01:02-B1*04:01L HLA-DRB1*10:01L HLA-DRB1*16:01L HLA-DQA1*01:03-B1*06:01L
  REGION 1..10: note = CONT. FROM ABOVE: HLA-DRB1*04:08L HLA-DQA1*02:01-B1*03:03L HLA-D RB1*15:03L
VVENPTIQKD

SEQ ID NO: 8753 - protein, 10 aa, Severe acute respiratory syndrome coronavirus 2
  REGION 1..10: note = Table B: HLA-DQA1*03:02-B1*03:03L HLA-DRB1*11:02L HLA-DQA1*05:05-B1*03:19M HLA-DQA1*05:01-B1*02:01L HLA-DRB1*09:01L HLA-DPA1*01:03-B1*04:02L HLA-DQA1*03:01-B1*03:02L HLA-DPA1*01:03-B1*104:01L
  REGION 1..10: note = CONT. FROM ABOVE: HLA-DRB1*16:01L
VENPTIQKDV

SEQ ID NO: 8754 - protein, 10 aa, Severe acute respiratory syndrome coronavirus 2
  REGION 1..10: note = Table B: HLA-DQA1*03:02-B1*03:03L HLA-DQA1*05:01-B1*03:01L HLA-DQA1*01:02-B1*06:02L HLA-DQA1*01-B1*05L HLA-DQA1*05:01-B1*02:01L HLA-DPA1*03:01-B1*105:01L HLA-DQA1*03:01-B1*03:02L HLA-DQA1*01:03-B1*06:01L
  REGION 1..10: note = CONT. FROM ABOVE: HLA-DQA1*02:01-B1*03:03L
ENPTIQKDVL

SEQ ID NO: 8755 - protein, 10 aa, Severe acute respiratory syndrome coronavirus 2
  REGION 1..10: note = Table B: HLA-DQA1*03:02-B1*03:03L HLA-DQA1*01-B1*05L HLA-DQA1*05:01-B1*02:01L HLA-DQA1*03:01-B1*03:02L HLA-DQA1*02:01-B1*03:03L
NPTIQKDVLE

SEQ ID NO: 8756 - protein, 11 aa, Severe acute respiratory syndrome coronavirus 2
  REGION 1..11: note = Table B: HLA-DQA1*03:02-B1*03:03L HLA-DQA1*01-B1*05L HLA-DQA1*05:01-B1*02:01L HLA-DQA1*03:01-B1*03:02L HLA-DQA1*01:03-B1*06:01L HLA-DQA1*02:01-B1*03:03L
NVKTTEVVGDI

SEQ ID NO: 8757 - protein, 10 aa, Severe acute respiratory syndrome coronavirus 2
  REGION 1..10: note = Table B: HLA-DQA1*03:02-B1*03:03L HLA-DPA1*03:01-B1*105:01L
KTTEVVGDII

SEQ ID NO: 8758 - protein, 10 aa, Severe acute respiratory syndrome coronavirus 2
  REGION 1..10: note = Table B: HLA-DQA1*03:02-B1*03:03L HLA-DQA1*01-B1*05L HLA-DQA1*03:01-B1*03:02L
TTEVVGDIIL

SEQ ID NO: 8759 - protein, 10 aa, Severe acute respiratory syndrome coronavirus 2
  REGION 1..10: note = Table B: HLA-DQA1*03:02-B1*03:03L HLA-DRB1*13:03L HLA-DQA1*01:02-B1*06:02L HLA-DRB1*01:02L HLA-DQA1*05:01-B1*02:01L HLA-DRB1*12:01L HLA-DPA1*03:01-B1*105:01L HLA-DQA1*03:01-B1*03:02L
  REGION 1..10: note = CONT. FROM ABOVE: HLA-DQA1*05:05-B1*03:01L HLA-DQA1*01:03-B1*06: 01L HLA-DQA1*02:01-B1*03:03L HLA-DRB1*15:03L
EVVGDIILKP

SEQ ID NO: 8760 - protein, 11 aa, Severe acute respiratory syndrome coronavirus 2
  REGION 1..11: note = Table B: HLA-DQA1*03:02-B1*03:03L HLA-DQA1*05:01-B1*03:01L HLA-DRB1*04:03L HLA-DRB1*04:02L HLA-DQA1*01:02-B1*06:02L HLA-DQA1*05:05-B1*03:19L HLA-DQA1*05:01-B1*02:01L HLA-DPA1*03:01-B1*105:01L HLA-DQA1*05:05-B1*03:01L
VVGDIILKPAN

SEQ ID NO: 8761 - protein, 12 aa, Severe acute respiratory syndrome coronavirus 2
  REGION 1..12: note = Table B: HLA-DQA1*03:02-B1*03:03L HLA-DQA1*05:01-B1*03:01L HLA-DRB1*04:05L HLA-DQA1*01:02-B1*06:02L HLA-DRB1*14:01L HLA-DQA1*05:01-B1*02:01L HLA-DRB1*04:10L HLA-DRB1*12:01L HLA-DQA1*05:05-B1*03:01L HLA-DRB1*16:01L
VGDIILKPANNS

SEQ ID NO: 8762 - protein, 10 aa, Severe acute respiratory syndrome coronavirus 2
  REGION 1..10: note = Table B: HLA-DQA1*03:02-B1*03:03L HLA-DQA1*05:01-B1*03:01L HLA-DRB1*04:03L HLA-DRB1*13:02L HLA-DRB1*13:03L HLA-DRB1*01:03L HLA-DRB1*04:02L HLA-DRB1*04:05L HLA-DQA1*01:02-B1*06:02L HLA-DRB1*01:02L HLA-DRB4*03:01NL HLA-DRB1*08:77L
  REGION 1..10: note = CONT. FROM ABOVE: HLA-DPA1*01:03-B1*03:01L HLA-DPA1*03:01-B1*04: 02L HLA-DRB1*14:01L HLA-DRB1*14:02L HLA-DRB1*08:01L HLA-DQA1*01- B1*05L HLA-DQA1*05:05-B1*03:19L HLA-DQA1*05:01-B1*02:01L HLA-DPA 1*01:03-B1*04:01L HLA-DQA1*05:05-B1*03:116L HLA-DRB1*09:01L
  REGION 1..10: note = CONT. FROM ABOVE: HLA-DPA1*01:03-B1*04:02L HLA-DRB1*12:01L HLA-D PA1*03:01-B1*105:01L HLA-DQA1*03:01-B1*03:02L HLA-DRB1*14:17L HL A-DPA1*01:02-B1*04:01L HLA-DRB1*10:01L HLA-DRB1*16:01L HLA-DQA1* 01:03-B1*06:01L HLA-DQA1*02:01-B1*03:03L HLA-DRB1*15:03L
IILKPANNSL

SEQ ID NO: 8763 - protein, 11 aa, Severe acute respiratory syndrome coronavirus 2
  REGION 1..11: note = Table B: HLA-DQA1*03:02-B1*03:03L HLA-DRB1*04:03L HLA-DQA1*01:02-B1*06:02L
NNSLKITEEVG

SEQ ID NO: 8764 - protein, 12 aa, Severe acute respiratory syndrome coronavirus 2
  REGION 1..12: note = Table B: HLA-DQA1*03:02-B1*03:03L HLA-DQA1*05:01-B1*03:01L HLA-DRB1*04:05L HLA-DQA1*01:02-B1*06:02L HLA-DRB1*01:02L HLA-DRB1*14:01L HLA-DQA1*01-B1*05L HLA-DQA1*05:01-B1*02:01L HLA-DRB1*12:01L HLA-DPA1*02:01-B1*13:01L
  REGION 1..12: note = CONT. FROM ABOVE: HLA-DPA1*03:01-B1*105:01L HLA-DRB1*15:03L
SLKITEEVGHTD

SEQ ID NO: 8765 - protein, 10 aa, Severe acute respiratory syndrome coronavirus 2
  REGION 1..10: note = Table B: HLA-DQA1*03:02-B1*03:03M HLA-DQA1*05:01-B1*03:01L HLA-DRB1*04:03L HLA-DRB1*13:02L HLA-DRB1*13:03L HLA-DRB1*01:03L HLA-DRB1*04:02L HLA-DRB1*04:05L HLA-DRB4*03:01NL HLA-DRB1*08:77L HLA-DPA1*01:03-B1*03:01L HLA-DPA1*03:01-B1*04:02L
  REGION 1..10: note = CONT. FROM ABOVE: HLA-DRB1*14:01L HLA-DRB1*14:02L HLA-DQA1*01:01 -B1*05:01L HLA-DQA1*01-B1*05L HLA-DQA1*05:05-B1*03:19L HLA-DQA1* 05:01-B1*02:01L HLA-DQA1*05:05-B1*03:116L HLA-DRB1*09:01L HLA-DP A1*01:03-B1*04:02L HLA-DRB1*12:01L HLA-DPA1*03:01-B1*105:01L
  REGION 1..10: note = CONT. FROM ABOVE: HLA-DQA1*03:01-B1*03:02M HLA-DPA1*01:03-B1*104 :01L HLA-DRB1*14:17L HLA-DPA1*01:02-B1*04:01L HLA-DRB1*10:01L HL A-DRB1*16:01L HLA-DQA1*01:03-B1*06:01L HLA-DQA1*02:01-B1*03:03L HLA-DRB1*15:03L
ITEEVGHTDL

SEQ ID NO: 8766 - protein, 10 aa, Severe acute respiratory syndrome coronavirus 2
  REGION 1..10: note = Table B: HLA-DQA1*03:02-B1*03:03M HLA-DQA1*05:01-B1*03:01L HLA-DQA1*01-B1*05L HLA-DQA1*05:05-B1*03:19L HLA-DQA1*05:01-B1*02:01L HLA-DRB1*09:01L HLA-DQA1*03:01-B1*03:02L HLA-DPA1*01:03-B1*104:01L
  REGION 1..10: note = CONT. FROM ABOVE: HLA-DPA1*01:02-B1*04:01L HLA-DRB1*16:01L
TEEVGHTDLM

SEQ ID NO: 8767 - protein, 10 aa, Severe acute respiratory syndrome coronavirus 2
  REGION 1..10: note = Table B: HLA-DQA1*03:02-B1*03:03L HLA-DQA1*05:05-B1*03:19L HLA-DRB1*09:01L HLA-DQA1*03:01-B1*03:02L HLA-DPA1*01:03-B1*104:01L
EEVGHTDLMA

SEQ ID NO: 8768 - protein, 12 aa, Severe acute respiratory syndrome coronavirus 2
  REGION 1..12: note = Table B: HLA-DQA1*03:02-B1*03:03L HLA-DQA1*05:01-B1*03:01L HLA-DQA1*03:01-B1*03:02L HLA-DQA1*05:05-B1*03:01L HLA-DQA1*01:03-B1*06:01L
VGHTDLMAAYVD

SEQ ID NO: 8769 - protein, 11 aa, Severe acute respiratory syndrome coronavirus 2
  REGION 1..11: note = Table B: HLA-DQA1*03:02-B1*03:03L HLA-DQA1*05:01-B1*03:01L HLA-DRB1*04:03L HLA-DQA1*01:02-B1*06:02L HLA-DQA1*01:01-B1*05:01L HLA-DQA1*01-B1*05L HLA-DQA1*05:05-B1*03:19L HLA-DQA1*05:01-B1*02:01L
  REGION 1..11: note = CONT. FROM ABOVE: HLA-DQA1*03:01-B1*03:02L HLA-DQA1*05:05-B1*03: 01L HLA-DQA1*01:03-B1*06:01L HLA-DQA1*02:01-B1*03:03L
HTDLMAAYVDN

SEQ ID NO: 8770 - protein, 12 aa, Severe acute respiratory syndrome coronavirus 2
  REGION 1..12: note = Table B: HLA-DQA1*03:02-B1*03:03L HLA-DRB1*04:02L HLA-DRB1*14:17L HLA-DRB1*16:01L HLA-DQA1*02:01-B1*03:03L
TDLMAAYVDNSS

SEQ ID NO: 8771 - protein, 10 aa, Severe acute respiratory syndrome coronavirus 2
  REGION 1..10: note = Table B: HLA-DQA1*03:02-B1*03:03L HLA-DQA1*01-B1*05L HLA-DQA1*05:01-B1*02:01L HLA-DQA1*03:01-B1*03:02L HLA-DQA1*02:01-B1*03:03L HLA-DRB1*15:03L
MAAYVDNSSL

SEQ ID NO: 8772 - protein, 10 aa, Severe acute respiratory syndrome coronavirus 2
  REGION 1..10: note = Table B: HLA-DQA1*03:02-B1*03:03L HLA-DRB1*04:03L HLA-DRB1*04:05L HLA-DQA1*01:02-B1*06:02L HLA-DRB1*01:01L HLA-DRB1*11:02L HLA-DQA1*05:05-B1*03:19L HLA-DQA1*05:05-B1*03:116L HLA-DPA1*02:01-B1*13:01M
  REGION 1..10: note = CONT. FROM ABOVE: HLA-DPA1*01:03-B1*104:01L HLA-DRB1*16:01L HLA- DQA1*01:03-B1*06:01L HLA-DRB1*08:03L HLA-DQA1*02:01-B1*03:03L HL A-DRB1*15:03L
AYVDNSSLTI

SEQ ID NO: 8773 - protein, 10 aa, Severe acute respiratory syndrome coronavirus 2
  REGION 1..10: note = Table B: HLA-DQA1*03:02-B1*03:03L HLA-DQA1*05:01-B1*03:01L HLA-DRB1*04:01L HLA-DRB1*04:03L HLA-DRB1*13:02L HLA-DRB1*13:03L HLA-DRB1*01:03L HLA-DRB1*04:02L HLA-DRB1*04:05L HLA-DRB1*01:01L HLA-DRB1*01:02L HLA-DRB4*03:01NL HLA-DRB1*08:04L HLA-DRB1*08:77L
  REGION 1..10: note = CONT. FROM ABOVE: HLA-DRB3*02:01L HLA-DPA1*01:03-B1*03:01L HLA-D PA1*03:01-B1*04:02L HLA-DRB1*03:01L HLA-DRB1*14:01L HLA-DRB1*11: 03L HLA-DRB1*11:04L HLA-DRB1*14:02L HLA-DRB1*11:01L HLA-DRB5*01: 01L HLA-DQA1*01-B1*05L HLA-DQA1*05:05-B1*03:19L
  REGION 1..10: note = CONT. FROM ABOVE: HLA-DQA1*05:01-B1*02:01L HLA-DPA1*01:03-B1*04: 02L HLA-DRB1*12:01L HLA-DRB1*12:02L HLA-DRB3*01:01L HLA-DPA1*03: 01-B1*105:01L HLA-DQA1*03:01-B1*03:02L HLA-DRB1*14:54L HLA-DQA1* 05:05-B1*03:01L HLA-DRB1*14:17L HLA-DPA1*01:02-B1*04:01L
  REGION 1..10: note = CONT. FROM ABOVE: HLA-DRB1*07:01L HLA-DRB1*10:01L HLA-DRB1*16:01 L HLA-DRB1*04:08L HLA-DQA1*02:01-B1*03:03L HLA-DRB1*15:03L
YVDNSSLTIK

SEQ ID NO: 8774 - protein, 11 aa, Severe acute respiratory syndrome coronavirus 2
  REGION 1..11: note = Table B: HLA-DQA1*03:02-B1*03:03L HLA-DQA1*05:01-B1*03:01L HLA-DQA1*01:02-B1*06:02L
DNSSLTIKKPN

SEQ ID NO: 8775 - protein, 11 aa, Severe acute respiratory syndrome coronavirus 2
  REGION 1..11: note = Table B: HLA-DQA1*03:02-B1*03:03L HLA-DQA1*05:01-B1*03:01L HLA-DRB1*14:01L HLA-DRB1*12:01L HLA-DPA1*01:02-B1*04:01L HLA-DRB1*16:01L
SSLTIKKPNEL

SEQ ID NO: 8776 - protein, 10 aa, Severe acute respiratory syndrome coronavirus 2
  REGION 1..10: note = Table B: HLA-DQA1*03:02-B1*03:03L HLA-DQA1*05:01-B1*03:01L HLA-DRB1*12:01L HLA-DQA1*03:01-B1*03:02L HLA-DPA1*01:02-B1*04:01L HLA-DRB1*16:01L HLA-DQA1*02:01-B1*03:03L
GLKTLATHGL

SEQ ID NO: 8777 - protein, 10 aa, Severe acute respiratory syndrome coronavirus 2
  REGION 1..10: note = Table B: HLA-DQA1*03:02-B1*03:03M HLA-DQA1*05:01-B1*03:01L HLA-DRB1*04:01L HLA-DRB1*13:03L HLA-DRB1*01:03L HLA-DRB1*04:04L HLA-DQA1*01:02-B1*06:02L HLA-DRB1*01:02L HLA-DPA1*03:01-B1*04:02L HLA-DRB1*14:01L HLA-DRB1*14:02L
  REGION 1..10: note = CONT. FROM ABOVE: HLA-DRB1*08:01L HLA-DQA1*05:05-B1*03:19L HLA-D QA1*05:01-B1*02:01L HLA-DPA1*01:03-B1*04:01L HLA-DQA1*05:05-B1*0 3:116M HLA-DRB1*09:01L HLA-DPA1*01:03-B1*04:02L HLA-DRB1*12:01L HLA-DPA1*02:01-B1*13:01L HLA-DPA1*03:01-B1*105:01L
  REGION 1..10: note = CONT. FROM ABOVE: HLA-DQA1*03:01-B1*03:02L HLA-DPA1*01:03-B1*104 :01L HLA-DPA1*01:02-B1*04:01L HLA-DRB1*07:01L HLA-DRB1*10:01L HL A-DRB1*16:01L HLA-DQA1*01:03-B1*06:01L HLA-DRB1*08:03L HLA-DQA1* 02:01-B1*03:03M HLA-DRB1*15:03L
TLATHGLAAV

SEQ ID NO: 8778 - protein, 12 aa, Severe acute respiratory syndrome coronavirus 2
  REGION 1..12: note = Table B: HLA-DQA1*03:02-B1*03:03L HLA-DQA1*05:01-B1*03:01L HLA-DRB1*04:03L HLA-DRB1*13:02L HLA-DRB1*04:02L HLA-DRB1*01:02L HLA-DRB1*08:77L HLA-DRB3*02:01L HLA-DPA1*01:03-B1*03:01L HLA-DPA1*03:01-B1*04:02L HLA-DRB1*14:01L
  REGION 1..12: note = CONT. FROM ABOVE: HLA-DQA1*05:05-B1*03:19L HLA-DQA1*05:01-B1*02: 01L HLA-DRB1*12:01L HLA-DRB1*12:02L HLA-DPA1*03:01-B1*105:01L HL A-DQA1*03:01-B1*03:02L HLA-DRB1*14:54L HLA-DQA1*05:05-B1*03:01L HLA-DRB1*14:17L HLA-DRB1*16:01L
THGLAAVNSVPW

SEQ ID NO: 8779 - protein, 12 aa, Severe acute respiratory syndrome coronavirus 2
  REGION 1..12: note = Table B: HLA-DQA1*03:02-B1*03:03L HLA-DQA1*05:01-B1*03:01L HLA-DRB1*04:02L HLA-DRB1*01:02L HLA-DQA1*05:05-B1*03:19L HLA-DPA1*03:01-B1*105:01L HLA-DQA1*05:05-B1*03:01L HLA-DRB1*14:17L HLA-DRB1*16:01L
HGLAAVNSVPWD

SEQ ID NO: 8780 - protein, 10 aa, Severe acute respiratory syndrome coronavirus 2
  REGION 1..10: note = Table B: HLA-DQA1*03:02-B1*03:03L HLA-DQA1*01:02-B1*06:02L HLA-DQA1*05:05-B1*03:19L HLA-DPA1*02:01-B1*13:01L HLA-DPA1*03:01-B1*105:01L HLA-DQA1*03:01-B1*03:02L HLA-DPA1*01:03-B1*104:01L HLA-DQA1*01:03-B1*06:01L
  REGION 1..10: note = CONT. FROM ABOVE: HLA-DQA1*02:01-B1*03:03L HLA-DRB1*15:03L
AVNSVPWDTI

SEQ ID NO: 8781 - protein, 11 aa, Severe acute respiratory syndrome coronavirus 2
  REGION 1..11: note = Table B: HLA-DQA1*03:02-B1*03:03L HLA-DRB1*04:03L HLA-DRB1*04:02L HLA-DQA1*01-B1*05L HLA-DQA1*05:01-B1*02:01L HLA-DPA1*03:01-B1*105:01L HLA-DQA1*03:01-B1*03:02L HLA-DRB1*14:17L HLA-DPA1*01:02-B1*04:01L HLA-DRB1*16:01L
  REGION 1..11: note = CONT. FROM ABOVE: HLA-DQA1*01:03-B1*06:01L HLA-DQA1*02:01-B1*03: 03L
VNSVPWDTIAN

SEQ ID NO: 8782 - protein, 11 aa, Severe acute respiratory syndrome coronavirus 2
  REGION 1..11: note = Table B: HLA-DQA1*03:02-B1*03:03L HLA-DQA1*05:01-B1*03:01L HLA-DRB1*11:02L HLA-DPA1*01:03-B1*04:02L HLA-DRB1*08:02L
NSVPWDTIANY

SEQ ID NO: 8783 - protein, 12 aa, Severe acute respiratory syndrome coronavirus 2
  REGION 1..12: note = Table B: HLA-DQA1*03:02-B1*03:03L HLA-DQA1*05:01-B1*03:01L HLA-DRB1*04:03L HLA-DRB1*13:03L HLA-DRB1*01:03L HLA-DRB1*04:02L HLA-DRB1*04:05L HLA-DQA1*01:02-B1*06:02L HLA-DRB1*01:02L HLA-DRB4*03:01NL HLA-DQA1*01:01-B1*05:01L HLA-DQA1*01-B1*05L
  REGION 1..12: note = CONT. FROM ABOVE: HLA-DQA1*05:05-B1*03:19L HLA-DQA1*05:01-B1*02: 01L HLA-DRB1*12:01L HLA-DPA1*03:01-B1*105:01L HLA-DQA1*05:05-B1* 03:01L HLA-DRB1*14:17L HLA-DPA1*01:02-B1*04:01L HLA-DRB1*16:01L HLA-DQA1*01:03-B1*06:01L HLA-DRB1*04:08L
  REGION 1..12: note = CONT. FROM ABOVE: HLA-DQA1*02:01-B1*03:03L
VPWDTIANYAKP

SEQ ID NO: 8784 - protein, 10 aa, Severe acute respiratory syndrome coronavirus 2
  REGION 1..10: note = Table B: HLA-DQA1*03:02-B1*03:03L HLA-DQA1*05:01-B1*03:01L HLA-DRB1*04:03L HLA-DRB1*13:03L HLA-DRB1*01:03L HLA-DQA1*01:02-B1*06:02L HLA-DRB4*03:01NL HLA-DRB1*08:77L HLA-DPA1*01:03-B1*03:01L HLA-DPA1*03:01-B1*04:02L
  REGION 1..10: note = CONT. FROM ABOVE: HLA-DRB1*14:01L HLA-DRB1*14:02L HLA-DQA1*01-B1 *05L HLA-DQA1*05:05-B1*03:19L HLA-DQA1*05:01-B1*02:01L HLA-DPA1* 01:03-B1*04:01L HLA-DRB1*12:01L HLA-DPA1*02:01-B1*13:01L HLA-DPA 1*03:01-B1*105:01L HLA-DQA1*03:01-B1*03:02L
  REGION 1..10: note = CONT. FROM ABOVE: HLA-DQA1*05:05-B1*03:01L HLA-DRB1*14:17L HLA-D PA1*01:02-B1*04:01L HLA-DRB1*16:01L HLA-DQA1*01:03-B1*06:01L HLA -DQA1*02:01-B1*03:03L HLA-DRB1*15:03L
DTIANYAKPF

SEQ ID NO: 8785 - protein, 10 aa, Severe acute respiratory syndrome coronavirus 2
  REGION 1..10: note = Table B: HLA-DQA1*03:02-B1*03:03L HLA-DQA1*05:01-B1*03:01L HLA-DRB1*14:01L HLA-DQA1*03:01-B1*03:02L HLA-DQA1*01:03-B1*06:01L HLA-DQA1*02:01-B1*03:03L HLA-DRB1*15:03L
TIANYAKPFL

SEQ ID NO: 8786 - protein, 10 aa, Severe acute respiratory syndrome coronavirus 2
  REGION 1..10: note = Table B: HLA-DQA1*03:02-B1*03:03L HLA-DRB1*01:03L HLA-DRB1*04:05L HLA-DQA1*01:02-B1*06:02L HLA-DQA1*05:05-B1*03:19L HLA-DQA1*05:05-B1*03:116L HLA-DPA1*02:01-B1*13:01L HLA-DPA1*03:01-B1*105:01L
  REGION 1..10: note = CONT. FROM ABOVE: HLA-DQA1*03:01-B1*03:02L HLA-DPA1*01:02-B1*04: 01L HLA-DRB1*16:01L HLA-DQA1*01:03-B1*06:01L HLA-DQA1*02:01-B1*0 3:03L HLA-DRB1*15:03L
NYAKPFLNKV

SEQ ID NO: 8787 - protein, 12 aa, Severe acute respiratory syndrome coronavirus 2
  REGION 1..12: note = Table B: HLA-DQA1*03:02-B1*03:03L HLA-DQA1*05:01-B1*03:01L HLA-DRB1*01:03L HLA-DRB1*04:02L HLA-DQA1*01:02-B1*06:02L HLA-DRB1*01:02L HLA-DQA1*05:05-B1*03:19L HLA-DPA1*03:01-B1*105:01L HLA-DQA1*05:05-B1*03:01L
  REGION 1..12: note = CONT. FROM ABOVE: HLA-DRB1*16:01L HLA-DQA1*01:03-B1*06:01L HLA-D RB1*04:08L HLA-DRB1*15:03L
PFLNKVVSTTTN

SEQ ID NO: 8788 - protein, 12 aa, Severe acute respiratory syndrome coronavirus 2
  REGION 1..12: note = Table B: HLA-DQA1*03:02-B1*03:03L HLA-DQA1*05:01-B1*03:01L HLA-DRB1*13:02L HLA-DRB1*13:03L HLA-DRB1*01:03L HLA-DRB1*04:02L HLA-DRB1*04:05L HLA-DRB1*01:02L HLA-DRB4*03:01NL HLA-DRB1*08:04L HLA-DRB1*08:77L HLA-DRB3*02:01L HLA-DPA1*01:03-B1*03:01L
  REGION 1..12: note = CONT. FROM ABOVE: HLA-DPA1*03:01-B1*04:02L HLA-DRB1*14:01L HLA-D RB1*11:03L HLA-DRB1*11:04L HLA-DQA1*01-B1*05L HLA-DQA1*05:01-B1* 02:01L HLA-DPA1*01:03-B1*04:01L HLA-DRB1*04:10L HLA-DRB1*09:01L HLA-DRB1*12:02L HLA-DPA1*02:01-B1*13:01L
  REGION 1..12: note = CONT. FROM ABOVE: HLA-DPA1*03:01-B1*105:01L HLA-DRB1*14:54L HLA- DQA1*05:05-B1*03:01L HLA-DPA1*01:02-B1*04:01L HLA-DRB1*07:01L HL A-DRB1*15:03L
LNKVVSTTTNIV

SEQ ID NO: 8789 - protein, 10 aa, Severe acute respiratory syndrome coronavirus 2
  REGION 1..10: note = Table B: HLA-DQA1*03:02-B1*03:03L HLA-DRB1*04:03L HLA-DRB1*13:02L HLA-DRB1*13:03L HLA-DRB1*01:03L HLA-DRB1*04:02L HLA-DRB1*04:05L HLA-DRB4*03:01NL HLA-DRB1*08:77L HLA-DRB3*02:01L HLA-DRB1*14:01L HLA-DRB1*11:03L HLA-DRB1*11:04L
  REGION 1..10: note = CONT. FROM ABOVE: HLA-DQA1*05:01-B1*02:01L HLA-DRB1*04:10L HLA-D RB1*12:01L HLA-DRB1*12:02L HLA-DQA1*03:01-B1*03:02L HLA-DRB1*14: 54L HLA-DRB1*14:17L HLA-DRB1*07:01L HLA-DRB1*16:01L HLA-DQA1*02: 01-B1*03:03L
VVSTTTNIVT

SEQ ID NO: 8790 - protein, 10 aa, Severe acute respiratory syndrome coronavirus 2
  REGION 1..10: note = Table B: HLA-DQA1*03:02-B1*03:03L HLA-DQA1*01:02-B1*06:02L HLA-DQA1*05:05-B1*03:19L HLA-DPA1*02:01-B1*13:01L HLA-DQA1*01:03-B1*06:01L
TNYMPYFFTL

SEQ ID NO: 8791 - protein, 10 aa, Severe acute respiratory syndrome coronavirus 2
  REGION 1..10: note = Table B: HLA-DQA1*03:02-B1*03:03L HLA-DQA1*05:01-B1*03:01L HLA-DRB1*04:03L HLA-DRB1*13:02L HLA-DRB1*13:03L HLA-DRB1*01:03M HLA-DRB1*04:02L HLA-DRB1*04:05L HLA-DQA1*01:02-B1*06:02L HLA-DRB1*01:01L HLA-DRB1*01:02M HLA-DRB4*03:01NL HLA-DRB1*08:77L
  REGION 1..10: note = CONT. FROM ABOVE: HLA-DRB3*02:01L HLA-DRB1*14:01L HLA-DRB1*11:03 L HLA-DRB1*11:04L HLA-DRB1*08:01L HLA-DRB1*11:01L HLA-DRB1*12:01 L HLA-DRB1*12:02L HLA-DRB3*01:01L HLA-DPA1*03:01-B1*105:01L HLA- DQA1*03:01-B1*03:02L HLA-DRB1*14:54L HLA-DQA1*05:05-B1*03:01L
  REGION 1..10: note = CONT. FROM ABOVE: HLA-DRB1*14:17L HLA-DPA1*01:02-B1*04:01L HLA-D RB1*07:01L HLA-DRB1*16:01L HLA-DQA1*01:03-B1*06:01L HLA-DRB1*04: 08L HLA-DQA1*02:01-B1*03:03L HLA-DRB1*15:03L
FTRSTNSRIK

SEQ ID NO: 8792 - protein, 10 aa, Severe acute respiratory syndrome coronavirus 2
  REGION 1..10: note = Table B: HLA-DQA1*03:02-B1*03:03L HLA-DQA1*05:05-B1*03:19L HLA-DQA1*03:01-B1*03:02L HLA-DRB1*16:01L HLA-DQA1*01:03-B1*06:01L HLA-DQA1*02:01-B1*03:03L
RIKASMPTTI

SEQ ID NO: 8793 - protein, 12 aa, Severe acute respiratory syndrome coronavirus 2
  REGION 1..12: note = Table B: HLA-DQA1*03:02-B1*03:03L HLA-DPA1*03:01-B1*105:01L HLA-DRB1*15:03L
IKASMPTTIAKN

SEQ ID NO: 8794 - protein, 10 aa, Severe acute respiratory syndrome coronavirus 2
  REGION 1..10: note = Table B: HLA-DQA1*03:02-B1*03:03L HLA-DQA1*05:01-B1*03:01L HLA-DRB1*13:03L HLA-DRB1*04:05L HLA-DQA1*01:02-B1*06:02L HLA-DRB1*01:01L HLA-DRB1*01:02L HLA-DRB4*03:01NL HLA-DPA1*01:03-B1*03:01L HLA-DPA1*03:01-B1*04:02L
  REGION 1..10: note = CONT. FROM ABOVE: HLA-DRB1*14:01L HLA-DRB1*08:01L HLA-DQA1*01-B1 *05L HLA-DQA1*05:05-B1*03:19L HLA-DQA1*05:01-B1*02:01L HLA-DPA1* 01:03-B1*04:01L HLA-DQA1*05:05-B1*03:116M HLA-DPA1*02:01-B1*13:0 1M HLA-DPA1*03:01-B1*105:01M HLA-DQA1*03:01-B1*03:02L
  REGION 1..10: note = CONT. FROM ABOVE: HLA-DPA1*01:02-B1*04:01L HLA-DRB1*10:01L HLA-D RB1*16:01L HLA-DQA1*01:03-B1*06:01L HLA-DRB1*08:03L HLA-DQA1*02: 01-B1*03:03L HLA-DRB1*15:03L
MPTTIAKNTV

SEQ ID NO: 8795 - protein, 10 aa, Severe acute respiratory syndrome coronavirus 2
  REGION 1..10: note = Table B: HLA-DQA1*03:02-B1*03:03L HLA-DRB1*04:03L HLA-DRB1*04:02L HLA-DQA1*01-B1*05L HLA-DQA1*03:01-B1*03:02L HLA-DRB1*14:17L HLA-DPA1*01:02-B1*04:01L HLA-DQA1*02:01-B1*03:03L
ASFNYLKSPN

SEQ ID NO: 8796 - protein, 10 aa, Severe acute respiratory syndrome coronavirus 2
  REGION 1..10: note = Table B: HLA-DQA1*03:02-B1*03:03L HLA-DQA1*05:01-B1*03:01L HLA-DRB1*04:03L HLA-DRB1*04:05L HLA-DQA1*01:02-B1*06:02L HLA-DRB1*01:02L HLA-DRB1*08:77L HLA-DPA1*03:01-B1*04:02L HLA-DQA1*05:05-B1*03:19L HLA-DQA1*05:01-B1*02:01L
  REGION 1..10: note = CONT. FROM ABOVE: HLA-DRB1*12:01L HLA-DPA1*02:01-B1*13:01L HLA-D PA1*03:01-B1*105:01L HLA-DPA1*01:02-B1*04:01L HLA-DRB1*16:01L HL A-DQA1*01:03-B1*06:01L HLA-DQA1*02:01-B1*03:03L HLA-DRB1*15:03L
SFNYLKSPNF

SEQ ID NO: 8797 - protein, 10 aa, Severe acute respiratory syndrome coronavirus 2
  REGION 1..10: note = Table B: HLA-DQA1*03:02-B1*03:03L HLA-DQA1*05:01-B1*03:01L HLA-DRB1*04:03L HLA-DRB1*13:02L HLA-DRB1*01:03L HLA-DQA1*01:02-B1*06:02L HLA-DRB1*01:02L HLA-DPA1*01:03-B1*03:01L HLA-DPA1*03:01-B1*04:02L
  REGION 1..10: note = CONT. FROM ABOVE: HLA-DRB1*14:01L HLA-DRB1*14:02L HLA-DRB1*08:01 L HLA-DQA1*01-B1*05L HLA-DQA1*05:05-B1*03:19L HLA-DQA1*05:01-B1* 02:01L HLA-DPA1*01:03-B1*04:01L HLA-DQA1*05:05-B1*03:116L HLA-DP A1*01:03-B1*04:02L HLA-DRB1*12:01L HLA-DPA1*02:01-B1*13:01L
  REGION 1..10: note = CONT. FROM ABOVE: HLA-DPA1*03:01-B1*105:01L HLA-DQA1*03:01-B1*03 :02L HLA-DPA1*01:02-B1*04:01L HLA-DRB1*16:01L HLA-DQA1*01:03-B1* 06:01L HLA-DQA1*02:01-B1*03:03L HLA-DRB1*15:03L
YLKSPNFSKL

SEQ ID NO: 8798 - protein, 11 aa, Severe acute respiratory syndrome coronavirus 2
  REGION 1..11: note = Table B: HLA-DQA1*03:02-B1*03:03L HLA-DQA1*05:01-B1*03:01L HLA-DQA1*01:02-B1*06:02L HLA-DQA1*05:05-B1*03:19L HLA-DQA1*05:01-B1*02:01L HLA-DPA1*03:01-B1*105:01L HLA-DQA1*03:01-B1*03:02L HLA-DPA1*01:02-B1*04:01L
  REGION 1..11: note = CONT. FROM ABOVE: HLA-DQA1*01:03-B1*06:01L HLA-DQA1*02:01-B1*03: 03L
SPNFSKLINII

SEQ ID NO: 8799 - protein, 10 aa, Severe acute respiratory syndrome coronavirus 2
  REGION 1..10: note = Table B: HLA-DQA1*03:02-B1*03:03L HLA-DQA1*05:01-B1*03:01L HLA-DRB1*04:03L HLA-DQA1*01:02-B1*06:02L HLA-DRB1*08:77L HLA-DPA1*03:01-B1*04:02L HLA-DQA1*05:05-B1*03:19L HLA-DQA1*05:01-B1*02:01L HLA-DRB1*12:01L
  REGION 1..10: note = CONT. FROM ABOVE: HLA-DPA1*02:01-B1*13:01L HLA-DPA1*03:01-B1*105 :01L HLA-DQA1*03:01-B1*03:02L HLA-DQA1*05:05-B1*03:01L HLA-DPA1* 01:02-B1*04:01L HLA-DRB1*16:01L HLA-DQA1*01:03-B1*06:01L HLA-DQA 1*02:01-B1*03:03L HLA-DRB1*15:03L
IYSTAALGVL

SEQ ID NO: 8800 - protein, 10 aa, Severe acute respiratory syndrome coronavirus 2
  REGION 1..10: note = Table B: HLA-DQA1*03:02-B1*03:03L HLA-DQA1*03:01-B1*03:02L HLA-DQA1*02:01-B1*03:03L
AALGVLMSNL

SEQ ID NO: 8801 - protein, 12 aa, Severe acute respiratory syndrome coronavirus 2
  REGION 1..12: note = Table B: HLA-DQA1*03:02-B1*03:03L HLA-DRB1*04:02L HLA-DRB1*01:02L HLA-DRB1*08:04L HLA-DRB3*02:01L HLA-DRB1*12:02L HLA-DQA1*03:01-B1*03:02L HLA-DRB1*14:54L HLA-DPA1*01:02-B1*04:01L
GVLMSNLGMPSY

SEQ ID NO: 8802 - protein, 16 aa, Severe acute respiratory syndrome coronavirus 2
  REGION 1..16: note = Table B: HLA-DQA1*03:02-B1*03:03L
VLMSNLGMPSYCTGYR

SEQ ID NO: 8803 - protein, 12 aa, Severe acute respiratory syndrome coronavirus 2
  REGION 1..12: note = Table B: HLA-DQA1*03:02-B1*03:03L HLA-DQA1*05:01-B1*03:01L HLA-DRB1*04:03L HLA-DRB1*01:03L HLA-DRB1*04:02L HLA-DRB1*04:05L HLA-DQA1*01:02-B1*06:02L HLA-DRB1*01:02L HLA-DPA1*01:03-B1*03:01L HLA-DPA1*03:01-B1*04:02L
  REGION 1..12: note = CONT. FROM ABOVE: HLA-DQA1*01-B1*05L HLA-DQA1*05:05-B1*03:19L HL A-DQA1*05:01-B1*02:01L HLA-DPA1*01:03-B1*04:02L HLA-DRB1*12:01L HLA-DPA1*02:01-B1*13:01L HLA-DQA1*05:05-B1*03:01L HLA-DRB1*16:01 L HLA-DRB1*04:08L HLA-DRB1*15:03L
TGYREGYLNSTN

SEQ ID NO: 8804 - protein, 10 aa, Severe acute respiratory syndrome coronavirus 2
  REGION 1..10: note = Table B: HLA-DQA1*03:02-B1*03:03L HLA-DRB1*11:02L HLA-DQA1*05:05-B1*03:19M HLA-DRB1*09:01L HLA-DQA1*03:01-B1*03:02L HLA-DPA1*01:03-B1*104:01L
REGYLNSTNV

SEQ ID NO: 8805 - protein, 10 aa, Severe acute respiratory syndrome coronavirus 2
  REGION 1..10: note = Table B: HLA-DQA1*03:02-B1*03:03L HLA-DQA1*05:01-B1*03:01L HLA-DRB1*04:03L HLA-DRB1*01:03L HLA-DRB1*04:05L HLA-DQA1*01:02-B1*06:02L HLA-DRB1*01:01L HLA-DRB1*01:02L HLA-DRB1*08:77L HLA-DPA1*03:01-B1*04:02L HLA-DRB1*14:01L
  REGION 1..10: note = CONT. FROM ABOVE: HLA-DRB1*14:02L HLA-DQA1*05:05-B1*03:19L HLA-D QA1*05:05-B1*03:116L HLA-DRB1*09:01L HLA-DPA1*02:01-B1*13:01M HL A-DPA1*03:01-B1*105:01L HLA-DQA1*03:01-B1*03:02L HLA-DPA1*01:03- B1*104:01L HLA-DPA1*01:02-B1*04:01L HLA-DRB1*16:01L
  REGION 1..10: note = CONT. FROM ABOVE: HLA-DQA1*01:03-B1*06:01M HLA-DRB1*08:03L HLA-D QA1*02:01-B1*03:03L HLA-DRB1*15:03L
GYLNSTNVTI

SEQ ID NO: 8806 - protein, 10 aa, Severe acute respiratory syndrome coronavirus 2
  REGION 1..10: note = Table B: HLA-DQA1*03:02-B1*03:03L HLA-DQA1*05:01-B1*03:01L HLA-DRB1*04:03L HLA-DRB1*13:02L HLA-DRB1*13:03M HLA-DRB1*01:03L HLA-DQA1*01:02-B1*06:02M HLA-DRB4*03:01NL HLA-DRB1*08:77L HLA-DPA1*01:03-B1*03:01L HLA-DPA1*03:01-B1*04:02L
  REGION 1..10: note = CONT. FROM ABOVE: HLA-DRB1*03:01L HLA-DRB1*14:01L HLA-DRB1*11:02 L HLA-DRB1*14:02L HLA-DRB5*01:01L HLA-DQA1*01-B1*05L HLA-DQA1*05 :05-B1*03:19M HLA-DQA1*05:01-B1*02:01L HLA-DRB4*01:01L HLA-DPA1* 01:03-B1*04:01M HLA-DQA1*05:05-B1*03:116L
  REGION 1..10: note = CONT. FROM ABOVE: HLA-DPA1*01:03-B1*04:02L HLA-DRB1*12:01L HLA-D PA1*02:01-B1*13:01L HLA-DPA1*03:01-B1*105:01M HLA-DPA1*01:03-B1* 104:01L HLA-DQA1*05:05-B1*03:01L HLA-DPA1*01:02-B1*04:01L HLA-DR B1*10:01L HLA-DRB1*16:01L HLA-DQA1*01:03-B1*06:01L
  REGION 1..10: note = CONT. FROM ABOVE: HLA-DRB1*08:02L HLA-DQA1*02:01-B1*03:03L HLA-D RB1*15:03L
NSTNVTIATY

SEQ ID NO: 8807 - protein, 10 aa, Severe acute respiratory syndrome coronavirus 2
  REGION 1..10: note = Table B: HLA-DQA1*03:02-B1*03:03L
LDSLDTYPSL

SEQ ID NO: 8808 - protein, 11 aa, Severe acute respiratory syndrome coronavirus 2
  REGION 1..11: note = Table B: HLA-DQA1*03:02-B1*03:03L HLA-DPA1*02:01-B1*13:01L HLA-DQA1*01:03-B1*06:01L
SLDTYPSLETI

SEQ ID NO: 8809 - protein, 11 aa, Severe acute respiratory syndrome coronavirus 2
  REGION 1..11: note = Table B: HLA-DQA1*03:02-B1*03:03L HLA-DQA1*05:01-B1*03:01L HLA-DQA1*01:02-B1*06:02L HLA-DRB1*01:02L HLA-DPA1*03:01-B1*105:01L HLA-DPA1*01:03-B1*104:01L HLA-DRB1*08:03L HLA-DQA1*02:01-B1*03:03L
DTYPSLETIQI

SEQ ID NO: 8810 - protein, 10 aa, Severe acute respiratory syndrome coronavirus 2
  REGION 1..10: note = Table B: HLA-DQA1*03:02-B1*03:03L HLA-DQA1*05:01-B1*03:01L HLA-DRB1*13:03M HLA-DQA1*01:02-B1*06:02H HLA-DRB1*01:01L HLA-DRB1*01:02L HLA-DRB4*03:01NL HLA-DPA1*01:03-B1*03:01L HLA-DPA1*03:01-B1*04:02L HLA-DRB1*03:01L HLA-DRB1*14:01L
  REGION 1..10: note = CONT. FROM ABOVE: HLA-DRB1*14:02L HLA-DRB1*08:01L HLA-DRB5*01:01 L HLA-DQA1*05:01-B1*02:01L HLA-DRB4*01:01L HLA-DPA1*01:03-B1*04: 01M HLA-DQA1*05:05-B1*03:116L HLA-DRB1*09:01L HLA-DPA1*01:03-B1* 04:02L HLA-DRB1*12:01L HLA-DPA1*02:01-B1*13:01L
  REGION 1..10: note = CONT. FROM ABOVE: HLA-DPA1*03:01-B1*105:01H HLA-DQA1*05:05-B1*03 :01L HLA-DPA1*01:02-B1*04:01L HLA-DQA1*01:03-B1*06:01L HLA-DQA1* 02:01-B1*03:03L HLA-DRB1*15:01L HLA-DRB1*15:03M
ETIQITISSF

SEQ ID NO: 8811 - protein, 12 aa, Severe acute respiratory syndrome coronavirus 2
  REGION 1..12: note = Table B: HLA-DQA1*03:02-B1*03:03L HLA-DQA1*05:01-B1*03:01L HLA-DRB1*13:02L HLA-DRB1*13:03L HLA-DRB1*04:02L HLA-DRB1*04:04L HLA-DRB1*01:02L HLA-DRB4*03:01NL HLA-DRB1*08:04L HLA-DRB3*02:01L HLA-DPA1*01:03-B1*03:01L HLA-DPA1*03:01-B1*04:02L
  REGION 1..12: note = CONT. FROM ABOVE: HLA-DRB1*14:01L HLA-DRB1*08:01L HLA-DPA1*01:03 -B1*04:01L HLA-DRB1*04:10L HLA-DPA1*01:03-B1*04:02L HLA-DRB1*12: 01L HLA-DRB3*01:01L HLA-DQA1*03:01-B1*03:02L HLA-DRB1*14:54L HLA -DPA1*01:03-B1*104:01L HLA-DQA1*05:05-B1*03:01L
  REGION 1..12: note = CONT. FROM ABOVE: HLA-DPA1*01:02-B1*04:01L HLA-DRB1*10:01L HLA-D RB1*16:01L HLA-DRB1*04:08L HLA-DRB1*08:03L
ISSFKWDLTAFG

SEQ ID NO: 8812 - protein, 10 aa, Severe acute respiratory syndrome coronavirus 2
  REGION 1..10: note = Table B: HLA-DQA1*03:02-B1*03:03L HLA-DQA1*05:01-B1*03:01L HLA-DRB1*04:03L HLA-DRB1*04:05L HLA-DQA1*01:02-B1*06:02L HLA-DRB1*01:02L HLA-DPA1*01:03-B1*03:01L HLA-DPA1*03:01-B1*04:02L HLA-DRB1*14:01L HLA-DRB1*14:02L
  REGION 1..10: note = CONT. FROM ABOVE: HLA-DQA1*01-B1*05L HLA-DQA1*05:05-B1*03:19L HL A-DQA1*05:01-B1*02:01L HLA-DRB4*01:01L HLA-DPA1*01:03-B1*04:01L HLA-DQA1*05:05-B1*03:116L HLA-DPA1*01:03-B1*04:02L HLA-DRB1*12:0 1L HLA-DPA1*02:01-B1*13:01L HLA-DPA1*03:01-B1*105:01L
  REGION 1..10: note = CONT. FROM ABOVE: HLA-DPA1*01:03-B1*104:01L HLA-DQA1*05:05-B1*03 :01L HLA-DPA1*01:02-B1*04:01L HLA-DRB1*16:01L HLA-DQA1*01:03-B1* 06:01L HLA-DQA1*02:01-B1*03:03L HLA-DRB1*15:03L
FLAYILFTRF

SEQ ID NO: 8813 - protein, 11 aa, Severe acute respiratory syndrome coronavirus 2
  REGION 1..11: note = Table B: HLA-DQA1*03:02-B1*03:03L HLA-DQA1*01:02-B1*06:02L HLA-DRB1*15:03L
YVLGLAAIMQL

SEQ ID NO: 8814 - protein, 10 aa, Severe acute respiratory syndrome coronavirus 2
  REGION 1..10: note = Table B: HLA-DQA1*03:02-B1*03:03L HLA-DQA1*01:02-B1*06:02L HLA-DPA1*03:01-B1*04:02L HLA-DQA1*01-B1*05L HLA-DPA1*01:03-B1*04:02L HLA-DPA1*03:01-B1*105:01L HLA-DQA1*03:01-B1*03:02L HLA-DPA1*01:02-B1*04:01L
  REGION 1..10: note = CONT. FROM ABOVE: HLA-DRB1*16:01L HLA-DQA1*01:03-B1*06:01L HLA-D QA1*02:01-B1*03:03L
SYFAVHFISN

SEQ ID NO: 8815 - protein, 10 aa, Severe acute respiratory syndrome coronavirus 2
  REGION 1..10: note = Table B: HLA-DQA1*03:02-B1*03:03L HLA-DQA1*05:01-B1*03:01L HLA-DRB1*04:03L HLA-DRB1*13:03L HLA-DRB1*01:03L HLA-DRB1*04:05L HLA-DQA1*01:02-B1*06:02M HLA-DRB1*01:01L HLA-DRB1*08:77L HLA-DPA1*01:03-B1*03:01L HLA-DPA1*03:01-B1*04:02L
  REGION 1..10: note = CONT. FROM ABOVE: HLA-DRB1*03:01L HLA-DRB1*14:01L HLA-DRB1*14:02 L HLA-DQA1*01-B1*05L HLA-DQA1*05:05-B1*03:19L HLA-DQA1*05:01-B1* 02:01L HLA-DRB4*01:01L HLA-DPA1*01:03-B1*04:01L HLA-DQA1*05:05-B 1*03:116L HLA-DPA1*01:03-B1*04:02L HLA-DRB1*12:01L
  REGION 1..10: note = CONT. FROM ABOVE: HLA-DPA1*02:01-B1*13:01M HLA-DPA1*03:01-B1*105 :01L HLA-DQA1*03:01-B1*03:02L HLA-DPA1*01:03-B1*104:01L HLA-DQA1 *05:05-B1*03:01L HLA-DPA1*01:02-B1*04:01L HLA-DRB1*10:01L HLA-DR B1*16:01L HLA-DQA1*01:03-B1*06:01L HLA-DRB1*08:02L
  REGION 1..10: note = CONT. FROM ABOVE: HLA-DQA1*02:01-B1*03:03M HLA-DRB1*15:03L
FAVHFISNSW

SEQ ID NO: 8816 - protein, 10 aa, Severe acute respiratory syndrome coronavirus 2
  REGION 1..10: note = Table B: HLA-DQA1*03:02-B1*03:03L HLA-DQA1*05:01-B1*03:01L HLA-DRB1*04:03L HLA-DRB1*04:02L HLA-DQA1*01:02-B1*06:02L HLA-DRB1*01:02L HLA-DPA1*03:01-B1*04:02L HLA-DRB1*14:01L HLA-DQA1*01-B1*05L HLA-DQA1*05:01-B1*02:01L HLA-DRB1*12:01L
  REGION 1..10: note = CONT. FROM ABOVE: HLA-DPA1*03:01-B1*105:01L HLA-DQA1*03:01-B1*03 :02L HLA-DPA1*01:02-B1*04:01L HLA-DRB1*16:01L HLA-DQA1*01:03-B1* 06:01L HLA-DQA1*02:01-B1*03:03L HLA-DRB1*15:03L
AVHFISNSWL

SEQ ID NO: 8817 - protein, 12 aa, Severe acute respiratory syndrome coronavirus 2
  REGION 1..12: note = Table B: HLA-DQA1*03:02-B1*03:03L HLA-DRB1*13:02L HLA-DRB1*04:05L HLA-DRB4*03:01NL HLA-DPA1*01:03-B1*03:01L HLA-DQA1*05:05-B1*03:19L HLA-DRB1*04:10L HLA-DRB1*12:02L HLA-DRB1*14:54L
IINLVQMAPISA

SEQ ID NO: 8818 - protein, 10 aa, Severe acute respiratory syndrome coronavirus 2
  REGION 1..10: note = Table B: HLA-DQA1*03:02-B1*03:03L HLA-DQA1*05:01-B1*03:01L HLA-DRB1*04:03L HLA-DRB1*04:02L HLA-DQA1*01:02-B1*06:02L HLA-DRB1*01:02L HLA-DRB1*14:01L HLA-DQA1*05:05-B1*03:19L HLA-DQA1*05:01-B1*02:01L HLA-DRB1*12:01L
  REGION 1..10: note = CONT. FROM ABOVE: HLA-DPA1*03:01-B1*105:01L HLA-DQA1*03:01-B1*03 :02L HLA-DRB1*14:17L HLA-DRB1*16:01L HLA-DQA1*01:03-B1*06:01L HL A-DQA1*02:01-B1*03:03L HLA-DRB1*15:03L
LVQMAPISAM

SEQ ID NO: 8819 - protein, 10 aa, Severe acute respiratory syndrome coronavirus 2
  REGION 1..10: note = Table B: HLA-DQA1*03:02-B1*03:03L HLA-DQA1*05:05-B1*03:19L HLA-DQA1*03:01-B1*03:02L
VQMAPISAMV

SEQ ID NO: 8820 - protein, 11 aa, Severe acute respiratory syndrome coronavirus 2
  REGION 1..11: note = Table B: HLA-DQA1*03:02-B1*03:03L HLA-DQA1*05:05-B1*03:19L
QMAPISAMVRM

SEQ ID NO: 8821 - protein, 10 aa, Severe acute respiratory syndrome coronavirus 2
  REGION 1..10: note = Table B: HLA-DQA1*03:02-B1*03:03L HLA-DQA1*01:02-B1*06:02L HLA-DPA1*03:01-B1*04:02L HLA-DQA1*05:05-B1*03:19L HLA-DPA1*02:01-B1*13:01L HLA-DPA1*03:01-B1*105:01L HLA-DPA1*01:03-B1*104:01L HLA-DPA1*01:02-B1*04:01L
  REGION 1..10: note = CONT. FROM ABOVE: HLA-DRB1*16:01L HLA-DQA1*01:03-B1*06:01L HLA-D QA1*02:01-B1*03:03L HLA-DRB1*15:03L
YYVWKSYVHV

SEQ ID NO: 8822 - protein, 12 aa, Severe acute respiratory syndrome coronavirus 2
  REGION 1..12: note = Table B: HLA-DQA1*03:02-B1*03:03L HLA-DQA1*05:01-B1*03:01L HLA-DRB1*04:03L HLA-DRB1*13:02L HLA-DRB1*04:02L HLA-DRB1*04:04L HLA-DRB1*01:01L HLA-DRB1*08:04L HLA-DPA1*01:03-B1*03:01L HLA-DRB1*14:01L HLA-DRB1*11:03L HLA-DRB1*11:04L HLA-DRB1*14:02L
  REGION 1..12: note = CONT. FROM ABOVE: HLA-DQA1*01:01-B1*05:01L HLA-DRB1*11:01L HLA-D QA1*01-B1*05L HLA-DQA1*05:05-B1*03:19L HLA-DQA1*05:01-B1*02:01L HLA-DQA1*05:05-B1*03:116L HLA-DRB3*01:01L HLA-DPA1*02:01-B1*13:0 1L HLA-DRB1*14:54L HLA-DPA1*01:03-B1*104:01L
  REGION 1..12: note = CONT. FROM ABOVE: HLA-DQA1*05:05-B1*03:01L HLA-DRB1*07:01L HLA-D RB1*10:01L HLA-DRB1*08:02L HLA-DRB1*08:03L
YVWKSYVHVVDG

SEQ ID NO: 8823 - protein, 10 aa, Severe acute respiratory syndrome coronavirus 2
  REGION 1..10: note = Table B: HLA-DQA1*03:02-B1*03:03L HLA-DQA1*05:01-B1*03:01L HLA-DRB1*13:03L HLA-DRB1*01:03L HLA-DQA1*01:02-B1*06:02L HLA-DPA1*01:03-B1*03:01L HLA-DRB1*03:01L HLA-DRB1*14:01L HLA-DRB1*14:02L HLA-DQA1*05:05-B1*03:19L
  REGION 1..10: note = CONT. FROM ABOVE: HLA-DQA1*05:01-B1*02:01L HLA-DPA1*01:03-B1*04: 01L HLA-DPA1*02:01-B1*13:01L HLA-DPA1*03:01-B1*105:01L HLA-DPA1* 01:02-B1*04:01L HLA-DQA1*01:03-B1*06:01L HLA-DQA1*02:01-B1*03:03 L HLA-DRB1*15:03L
TIVNGVRRSF

SEQ ID NO: 8824 - protein, 10 aa, Severe acute respiratory syndrome coronavirus 2
  REGION 1..10: note = Table B: HLA-DQA1*03:02-B1*03:03L HLA-DQA1*05:01-B1*03:01L HLA-DRB1*04:03L HLA-DRB1*13:03L HLA-DRB1*01:03L HLA-DRB1*04:02L HLA-DRB1*04:05L HLA-DRB1*01:02L HLA-DRB4*03:01NL HLA-DQA1*01-B1*05L HLA-DQA1*05:01-B1*02:01L HLA-DRB1*12:01L
  REGION 1..10: note = CONT. FROM ABOVE: HLA-DQA1*03:01-B1*03:02L HLA-DRB1*14:54L HLA-D RB1*14:17L HLA-DRB1*16:01L HLA-DQA1*01:03-B1*06:01L HLA-DRB1*04: 08L HLA-DQA1*02:01-B1*03:03L HLA-DRB1*15:03L
FYVYANGGKG

SEQ ID NO: 8825 - protein, 10 aa, Severe acute respiratory syndrome coronavirus 2
  REGION 1..10: note = Table B: HLA-DQA1*03:02-B1*03:03L HLA-DQA1*05:01-B1*03:01L HLA-DRB1*04:01L HLA-DRB1*04:03L HLA-DRB1*13:02L HLA-DRB1*13:03M HLA-DRB1*01:03M HLA-DRB1*04:02L HLA-DRB1*04:05M HLA-DQA1*01:02-B1*06:02M HLA-DRB1*01:01L HLA-DRB1*01:02L
  REGION 1..10: note = CONT. FROM ABOVE: HLA-DRB4*03:01NL HLA-DRB1*08:77M HLA-DRB3*02:0 1L HLA-DPA1*01:03-B1*03:01L HLA-DPA1*03:01-B1*04:02L HLA-DRB1*03 :01L HLA-DRB1*14:01L HLA-DRB1*11:03L HLA-DRB1*11:04L HLA-DRB1*14 :02M HLA-DQA1*01:01-B1*05:01L HLA-DRB1*08:01L HLA-DRB1*11:01L
  REGION 1..10: note = CONT. FROM ABOVE: HLA-DRB5*01:01L HLA-DQA1*01-B1*05L HLA-DQA1*05 :05-B1*03:19L HLA-DQA1*05:01-B1*02:01L HLA-DRB4*01:01L HLA-DPA1* 01:03-B1*04:01M HLA-DQA1*05:05-B1*03:116L HLA-DRB1*09:01L HLA-DP A1*01:03-B1*04:02L HLA-DRB1*12:01L HLA-DPA1*02:01-B1*13:01M
  REGION 1..10: note = CONT. FROM ABOVE: HLA-DPA1*03:01-B1*105:01M HLA-DQA1*03:01-B1*03 :02L HLA-DPA1*01:03-B1*104:01L HLA-DQA1*05:05-B1*03:01L HLA-DPA1 *01:02-B1*04:01L HLA-DRB1*07:01L HLA-DRB1*10:01L HLA-DRB1*16:01L HLA-DQA1*01:03-B1*06:01M HLA-DRB1*08:02L HLA-DRB1*08:03L
  REGION 1..10: note = CONT. FROM ABOVE: HLA-DQA1*02:01-B1*03:03M HLA-DRB1*15:03M
YVYANGGKGF

SEQ ID NO: 8826 - protein, 12 aa, Severe acute respiratory syndrome coronavirus 2
  REGION 1..12: note = Table B: HLA-DQA1*03:02-B1*03:03L HLA-DQA1*01:01-B1*05:01L HLA-DQA1*05:01-B1*02:01L
AGSTFISDEVAR

SEQ ID NO: 8827 - protein, 10 aa, Severe acute respiratory syndrome coronavirus 2
  REGION 1..10: note = Table B: HLA-DQA1*03:02-B1*03:03L HLA-DRB1*04:03L HLA-DRB1*13:02L HLA-DRB1*13:03L HLA-DRB1*01:03L HLA-DRB1*04:02L HLA-DRB1*04:05L HLA-DRB1*01:02L HLA-DRB4*03:01NL HLA-DQA1*01:01-B1*05:01L HLA-DQA1*01-B1*05L
  REGION 1..10: note = CONT. FROM ABOVE: HLA-DQA1*05:01-B1*02:01L HLA-DRB1*04:10L HLA-D RB1*12:01L HLA-DPA1*03:01-B1*105:01L HLA-DQA1*03:01-B1*03:02L HL A-DRB1*14:54L HLA-DRB1*14:17L HLA-DPA1*01:02-B1*04:01L HLA-DRB1* 10:01L HLA-DRB1*16:01L HLA-DQA1*01:03-B1*06:01L HLA-DRB1*04:08L
  REGION 1..10: note = CONT. FROM ABOVE: HLA-DQA1*02:01-B1*03:03L HLA-DRB1*15:03L
TFISDEVARD

SEQ ID NO: 8828 - protein, 10 aa, Severe acute respiratory syndrome coronavirus 2
  REGION 1..10: note = Table B: HLA-DQA1*03:02-B1*03:03L HLA-DQA1*05:01-B1*03:01L HLA-DRB1*04:01L HLA-DRB1*04:03L HLA-DRB1*13:02L HLA-DRB1*13:03L HLA-DRB1*01:03L HLA-DRB1*04:02L HLA-DRB1*04:04L HLA-DRB1*04:05M HLA-DQA1*01:02-B1*06:02L HLA-DRB1*01:02L HLA-DRB4*03:01NL
  REGION 1..10: note = CONT. FROM ABOVE: HLA-DRB1*08:04L HLA-DRB1*08:77L HLA-DRB3*02:01 L HLA-DPA1*01:03-B1*03:01L HLA-DPA1*03:01-B1*04:02L HLA-DRB1*14: 01L HLA-DRB1*11:03L HLA-DRB1*11:04L HLA-DRB1*14:02L HLA-DQA1*01: 01-B1*05:01L HLA-DRB1*08:01L HLA-DRB1*11:01L HLA-DRB5*01:01L
  REGION 1..10: note = CONT. FROM ABOVE: HLA-DQA1*01-B1*05L HLA-DQA1*05:05-B1*03:19L HL A-DQA1*05:01-B1*02:01L HLA-DRB4*01:01L HLA-DPA1*01:03-B1*04:01L HLA-DQA1*05:05-B1*03:116L HLA-DRB1*04:10L HLA-DRB1*09:01L HLA-DP A1*01:03-B1*04:02L HLA-DRB1*12:01L HLA-DRB1*12:02L
  REGION 1..10: note = CONT. FROM ABOVE: HLA-DRB3*01:01L HLA-DPA1*02:01-B1*13:01L HLA-D PA1*03:01-B1*105:01L HLA-DQA1*03:01-B1*03:02L HLA-DRB1*14:54L HL A-DPA1*01:03-B1*104:01L HLA-DQA1*05:05-B1*03:01L HLA-DRB1*14:17L HLA-DPA1*01:02-B1*04:01L HLA-DRB1*07:01L HLA-DRB1*10:01L
  REGION 1..10: note = CONT. FROM ABOVE: HLA-DRB1*16:01L HLA-DQA1*01:03-B1*06:01L HLA -DRB1*04:08L HLA-DRB1*08:02L HLA-DRB1*08:03L HLA-DQA1*02:01-B1 *03:03L HLA-DRB1*15:03L
FISDEVARDL

SEQ ID NO: 8829 - protein, 10 aa, Severe acute respiratory syndrome coronavirus 2
  REGION 1..10: note = Table B: HLA-DQA1*03:02-B1*03:03L HLA-DRB1*04:03L HLA-DRB1*04:02L HLA-DQA1*01-B1*05L HLA-DQA1*05:01-B1*02:01L HLA-DQA1*03:01-B1*03:02L HLA-DRB1*14:17L HLA-DRB1*16:01L HLA-DQA1*01:03-B1*06:01L HLA-DQA1*02:01-B1*03:03L
ISDEVARDLS

SEQ ID NO: 8830 - protein, 10 aa, Severe acute respiratory syndrome coronavirus 2
  REGION 1..10: note = Table B: HLA-DQA1*03:02-B1*03:03L HLA-DQA1*01-B1*05L HLA-DQA1*05:05-B1*03:19L HLA-DQA1*03:01-B1*03:02L HLA-DRB1*16:01L
SDEVARDLSL

SEQ ID NO: 8831 - protein, 10 aa, Severe acute respiratory syndrome coronavirus 2
  REGION 1..10: note = Table B: HLA-DQA1*03:02-B1*03:03L HLA-DQA1*05:01-B1*02:01L HLA-DQA1*03:01-B1*03:02L
DEVARDLSLQ

SEQ ID NO: 8832 - protein, 10 aa, Severe acute respiratory syndrome coronavirus 2
  REGION 1..10: note = Table B: HLA-DQA1*03:02-B1*03:03L HLA-DQA1*05:01-B1*03:01L HLA-DRB1*13:02L HLA-DRB1*13:03M HLA-DRB1*01:03L HLA-DQA1*01:02-B1*06:02M HLA-DRB1*01:01L HLA-DRB1*01:02L HLA-DRB4*03:01NL HLA-DRB1*08:77L HLA-DPA1*01:03-B1*03:01L
  REGION 1..10: note = CONT. FROM ABOVE: HLA-DPA1*03:01-B1*04:02L HLA-DRB1*03:01L HLA-D RB1*14:01L HLA-DRB1*14:02L HLA-DRB5*01:01L HLA-DQA1*01-B1*05L HL A-DQA1*05:05-B1*03:19L HLA-DQA1*05:01-B1*02:01L HLA-DRB4*01:01L HLA-DPA1*01:03-B1*04:01M HLA-DQA1*05:05-B1*03:116L
  REGION 1..10: note = CONT. FROM ABOVE: HLA-DPA1*01:03-B1*04:02L HLA-DRB1*12:01L HLA-D PA1*02:01-B1*13:01L HLA-DPA1*03:01-B1*105:01M HLA-DQA1*03:01-B1* 03:02L HLA-DQA1*05:05-B1*03:01L HLA-DPA1*01:02-B1*04:01L HLA-DRB 1*10:01L HLA-DRB1*16:01L HLA-DQA1*01:03-B1*06:01L
  REGION 1..10: note = CONT. FROM ABOVE: HLA-DQA1*02:01-B1*03:03L HLA-DRB1*15:03L
EVARDLSLQF

SEQ ID NO: 8833 - protein, 13 aa, Severe acute respiratory syndrome coronavirus 2
  REGION 1..13: note = Table B: HLA-DQA1*03:02-B1*03:03L HLA-DQA1*05:01-B1*03:01L HLA-DRB1*04:04L HLA-DRB1*01:02L HLA-DRB4*03:01NL HLA-DQA1*01:01-B1*05:01L HLA-DQA1*01-B1*05L HLA-DRB1*12:01L HLA-DPA1*02:01-B1*13:01L HLA-DPA1*03:01-B1*105:01L
  REGION 1..13: note = CONT. FROM ABOVE: HLA-DRB1*14:17L
SLQFKRPINPTDQ

SEQ ID NO: 8834 - protein, 11 aa, Severe acute respiratory syndrome coronavirus 2
  REGION 1..11: note = Table B: HLA-DQA1*03:02-B1*03:03L HLA-DRB1*14:04L HLA-DRB1*04:01L HLA-DRB1*13:02M HLA-DRB1*04:02L HLA-DRB1*04:05L HLA-DRB1*01:01L HLA-DRB1*01:02L HLA-DRB3*02:01L HLA-DPA1*03:01-B1*04:02L HLA-DRB1*14:01M HLA-DRB1*11:03L
  REGION 1..11: note = CONT. FROM ABOVE: HLA-DRB1*11:04L HLA-DRB1*08:01L HLA-DRB1*11:01 L HLA-DRB5*01:01L HLA-DRB4*02:01NL HLA-DRB1*13:01L HLA-DQA1*05:0 5-B1*03:116L HLA-DRB1*09:01L HLA-DRB1*12:02L HLA-DRB3*01:01L HLA -DPA1*02:01-B1*13:01L HLA-DQA1*03:01-B1*03:02L HLA-DRB1*14:54L
  REGION 1..11: note = CONT. FROM ABOVE: HLA-DQA1*05:05-B1*03:01L HLA-DRB1*14:17L HLA-D PA1*01:02-B1*04:01L HLA-DQA1*01:03-B1*06:01L HLA-DRB1*08:03L HLA -DRB1*15:01L
RPINPTDQSSY

SEQ ID NO: 8835 - protein, 11 aa, Severe acute respiratory syndrome coronavirus 2
  REGION 1..11: note = Table B: HLA-DQA1*03:02-B1*03:03L HLA-DQA1*01-B1*05L HLA-DQA1*05:01-B1*02:01L HLA-DQA1*03:01-B1*03:02L HLA-DQA1*01:03-B1*06:01L HLA-DQA1*02:01-B1*03:03L
DQSSYIVDSVT

SEQ ID NO: 8836 - protein, 10 aa, Severe acute respiratory syndrome coronavirus 2
  REGION 1..10: note = Table B: HLA-DQA1*03:02-B1*03:03L HLA-DQA1*05:05-B1*03:19L
SSYIVDSVTV

SEQ ID NO: 8837 - protein, 10 aa, Severe acute respiratory syndrome coronavirus 2
  REGION 1..10: note = Table B: HLA-DQA1*03:02-B1*03:03L HLA-DQA1*05:01-B1*03:01L HLA-DRB1*04:03L HLA-DRB1*13:02L HLA-DRB1*13:03L HLA-DRB1*01:03L HLA-DRB1*04:02L HLA-DRB1*04:05L HLA-DRB4*03:01NL HLA-DRB1*14:01L HLA-DQA1*01-B1*05L HLA-DQA1*05:01-B1*02:01L HLA-DRB1*04:10L
  REGION 1..10: note = CONT. FROM ABOVE: HLA-DRB1*12:01L HLA-DQA1*03:01-B1*03:02L HLA-D RB1*14:54L HLA-DRB1*14:17L HLA-DRB1*10:01L HLA-DRB1*16:01L HLA-D QA1*02:01-B1*03:03L
IVDSVTVKNG

SEQ ID NO: 8838 - protein, 10 aa, Severe acute respiratory syndrome coronavirus 2
  REGION 1..10: note = Table B: HLA-DQA1*03:02-B1*03:03L HLA-DQA1*05:01-B1*03:01L HLA-DRB1*04:03L HLA-DRB1*13:03L HLA-DRB1*01:03L HLA-DRB1*04:02L HLA-DRB1*04:05L HLA-DQA1*01:02-B1*06:02L HLA-DRB1*01:02L HLA-DRB4*03:01NL HLA-DRB1*14:01L HLA-DQA1*01:01-B1*05:01L
  REGION 1..10: note = CONT. FROM ABOVE: HLA-DRB1*08:01L HLA-DQA1*05:05-B1*03:19L HLA-D RB1*12:01L HLA-DQA1*03:01-B1*03:02L HLA-DRB1*14:54L HLA-DQA1*05: 05-B1*03:01L HLA-DRB1*14:17L HLA-DPA1*01:02-B1*04:01L HLA-DRB1*1 6:01L HLA-DQA1*01:03-B1*06:01L HLA-DRB1*04:08L
  REGION 1..10: note = CONT. FROM ABOVE: HLA-DQA1*02:01-B1*03:03L
SVTVKNGSIH

SEQ ID NO: 8839 - protein, 10 aa, Severe acute respiratory syndrome coronavirus 2
  REGION 1..10: note = Table B: HLA-DQA1*03:02-B1*03:03L HLA-DQA1*05:01-B1*03:01L HLA-DRB1*13:02L HLA-DRB1*13:03L HLA-DRB1*01:03L HLA-DRB1*04:02L HLA-DQA1*01:02-B1*06:02L HLA-DRB1*14:01L HLA-DRB1*08:01L HLA-DQA1*05:01-B1*02:01L HLA-DQA1*05:05-B1*03:116L
  REGION 1..10: note = CONT. FROM ABOVE: HLA-DQA1*03:01-B1*03:02L HLA-DPA1*01:02-B1*04: 01L HLA-DRB1*16:01L HLA-DQA1*01:03-B1*06:01L HLA-DQA1*02:01-B1*0 3:03L HLA-DRB1*15:03L
VTVKNGSIHL

SEQ ID NO: 8840 - protein, 10 aa, Severe acute respiratory syndrome coronavirus 2
  REGION 1..10: note = Table B: HLA-DQA1*03:02-B1*03:03L HLA-DQA1*05:01-B1*03:01L HLA-DRB1*04:03L HLA-DRB1*13:02L HLA-DRB1*13:03L HLA-DRB1*01:03L HLA-DRB1*04:02L HLA-DRB1*04:05L HLA-DQA1*01:02-B1*06:02M HLA-DRB4*03:01NL HLA-DRB1*08:77M HLA-DPA1*01:03-B1*03:01M
  REGION 1..10: note = CONT. FROM ABOVE: HLA-DPA1*03:01-B1*04:02L HLA-DRB1*03:01M HLA-D RB1*14:01L HLA-DRB1*11:02L HLA-DRB1*11:03L HLA-DRB1*11:04L HLA-D RB1*14:02L HLA-DRB1*11:01L HLA-DRB5*01:01L HLA-DQA1*01-B1*05M HL A-DQA1*05:05-B1*03:19M HLA-DQA1*05:01-B1*02:01M HLA-DRB4*01:01L
  REGION 1..10: note = CONT. FROM ABOVE: HLA-DPA1*01:03-B1*04:01M HLA-DQA1*05:05-B1*03: 116L HLA-DPA1*01:03-B1*04:02L HLA-DRB1*12:01L HLA-DPA1*02:01-B1* 13:01L HLA-DPA1*03:01-B1*105:01L HLA-DPA1*01:03-B1*104:01M HLA-D PA1*01:02-B1*04:01L HLA-DRB1*10:01M HLA-DRB1*16:01M
  REGION 1..10: note = CONT. FROM ABOVE: HLA-DQA1*01:03-B1*06:01L HLA-DRB1*08:02L HLA-D QA1*02:01-B1*03:03L HLA-DRB1*15:03L
YFDKAGQKTY

SEQ ID NO: 8841 - protein, 10 aa, Severe acute respiratory syndrome coronavirus 2
  REGION 1..10: note = Table B: HLA-DQA1*03:02-B1*03:03L HLA-DRB1*04:03L HLA-DRB1*04:02L HLA-DQA1*01-B1*05L HLA-DPA1*03:01-B1*105:01L HLA-DQA1*03:01-B1*03:02L HLA-DPA1*01:02-B1*04:01L HLA-DQA1*01:03-B1*06:01L HLA-DQA1*02:01-B1*03:03L
SLSHFVNLDN

SEQ ID NO: 8842 - protein, 12 aa, Severe acute respiratory syndrome coronavirus 2
  REGION 1..12: note = Table B: HLA-DQA1*03:02-B1*03:03L HLA-DQA1*05:01-B1*03:01L HLA-DRB1*01:01L HLA-DRB1*08:77L HLA-DPA1*01:03-B1*03:01L HLA-DRB1*14:02L HLA-DRB5*01:01L HLA-DRB1*09:01L HLA-DRB3*01:01L HLA-DPA1*02:01-B1*13:01L HLA-DRB1*07:01L
SHFVNLDNLRAN

SEQ ID NO: 8843 - protein, 11 aa, Severe acute respiratory syndrome coronavirus 2
  REGION 1..11: note = Table B: HLA-DQA1*03:02-B1*03:03L HLA-DQA1*05:01-B1*03:01L HLA-DRB1*04:03L HLA-DRB1*13:03L HLA-DRB1*04:02L HLA-DQA1*05:01-B1*02:01L HLA-DQA1*05:05-B1*03:01L HLA-DRB1*14:17L HLA-DRB1*16:01L HLA-DQA1*01:03-B1*06:01L
  REGION 1..11: note = CONT. FROM ABOVE: HLA-DQA1*02:01-B1*03:03L
ANNTKGSLPIN

SEQ ID NO: 8844 - protein, 10 aa, Severe acute respiratory syndrome coronavirus 2
  REGION 1..10: note = Table B: HLA-DQA1*03:02-B1*03:03L HLA-DQA1*05:01-B1*03:01L HLA-DQA1*01:02-B1*06:02L HLA-DRB1*01:02L HLA-DQA1*05:05-B1*03:19L HLA-DPA1*03:01-B1*105:01L HLA-DQA1*03:01-B1*03:02L HLA-DRB1*16:01L
  REGION 1..10: note = CONT. FROM ABOVE: HLA-DQA1*02:01-B1*03:03L HLA-DRB1*15:03L
NTKGSLPINV

SEQ ID NO: 8845 - protein, 12 aa, Severe acute respiratory syndrome coronavirus 2
  REGION 1..12: note = Table B: HLA-DQA1*03:02-B1*03:03L HLA-DQA1*05:01-B1*03:01L HLA-DRB1*04:03L HLA-DRB1*04:02L HLA-DQA1*01:02-B1*06:02L HLA-DQA1*01-B1*05L HLA-DQA1*05:01-B1*02:01L HLA-DPA1*03:01-B1*105:01L HLA-DRB1*14:17L HLA-DRB1*16:01L
  REGION 1..12: note = CONT. FROM ABOVE: HLA-DQA1*01:03-B1*06:01L
LPINVIVFDGKS

SEQ ID NO: 8846 - protein, 14 aa, Severe acute respiratory syndrome coronavirus 2
  REGION 1..14: note = Table B: HLA-DQA1*03:02-B1*03:03L HLA-DQA1*05:01-B1*03:01L HLA-DRB1*04:01L HLA-DRB1*01:01L HLA-DRB3*02:01L HLA-DRB1*11:02L HLA-DRB1*13:01L HLA-DRB4*01:01L HLA-DPA1*01:03-B1*04:01L HLA-DQA1*05:05-B1*03:116L HLA-DPA1*01:03-B1*04:02L
  REGION 1..14: note = CONT. FROM ABOVE: HLA-DPA1*02:01-B1*13:01L HLA-DPA1*01:03-B1*02: 01L HLA-DPA1*01:03-B1*104:01L HLA-DQA1*05:05-B1*03:01L HLA-DRB1* 14:17L HLA-DRB1*10:01L HLA-DQA1*01:03-B1*06:01L HLA-DRB1*08:02L HLA-DRB1*08:03L HLA-DQA1*02:01-B1*03:03L
VIVFDGKSKCEESS

SEQ ID NO: 8847 - protein, 10 aa, Severe acute respiratory syndrome coronavirus 2
  REGION 1..10: note = Table B: HLA-DQA1*03:02-B1*03:03M HLA-DQA1*05:01-B1*03:01L HLA-DRB1*13:03L HLA-DRB1*08:77L HLA-DRB1*11:02M HLA-DRB1*11:01L HLA-DQA1*05:05-B1*03:19H HLA-DQA1*05:01-B1*02:01L HLA-DRB4*01:01L HLA-DPA1*01:03-B1*04:01L
  REGION 1..10: note = CONT. FROM ABOVE: HLA-DQA1*05:05-B1*03:116L HLA-DRB1*09:01L HLA- DPA1*01:03-B1*04:02L HLA-DQA1*03:01-B1*03:02L HLA-DPA1*01:03-B1* 104:01M HLA-DRB1*10:01L HLA-DRB1*16:01L
EESSAKSASV

SEQ ID NO: 8848 - protein, 10 aa, Severe acute respiratory syndrome coronavirus 2
  REGION 1..10: note = Table B: HLA-DQA1*03:02-B1*03:03L HLA-DQA1*05:01-B1*03:01L HLA-DRB1*13:02L HLA-DRB1*13:03M HLA-DRB1*01:03L HLA-DQA1*01:02-B1*06:02M HLA-DRB1*01:01L HLA-DRB4*03:01NL HLA-DRB1*08:77L HLA-DPA1*01:03-B1*03:01L
  REGION 1..10: note = CONT. FROM ABOVE: HLA-DPA1*03:01-B1*04:02L HLA-DRB1*03:01L HLA-D RB1*14:01L HLA-DRB1*11:04L HLA-DRB1*14:02L HLA-DRB1*08:01L HLA-D RB1*11:01L HLA-DRB5*01:01L HLA-DQA1*01-B1*05L HLA-DQA1*05:05-B1* 03:19L HLA-DQA1*05:01-B1*02:01L HLA-DRB4*01:01L
  REGION 1..10: note = CONT. FROM ABOVE: HLA-DPA1*01:03-B1*04:01M HLA-DQA1*05:05-B1*03: 116L HLA-DPA1*01:03-B1*04:02L HLA-DRB1*12:01L HLA-DPA1*02:01-B1* 13:01L HLA-DPA1*03:01-B1*105:01M HLA-DQA1*03:01-B1*03:02L HLA-DP A1*01:03-B1*104:01L HLA-DQA1*05:05-B1*03:01L HLA-DRB1*14:17L
  REGION 1..10: note = CONT. FROM ABOVE: HLA-DPA1*01:02-B1*04:01L HLA-DRB1*10:01L HLA-D RB1*16:01L HLA-DQA1*01:03-B1*06:01L HLA-DRB1*08:02L HLA-DQA1*02: 01-B1*03:03L HLA-DRB1*15:03L
ESSAKSASVY

SEQ ID NO: 8849 - protein, 10 aa, Severe acute respiratory syndrome coronavirus 2
  REGION 1..10: note = Table B: HLA-DQA1*03:02-B1*03:03L HLA-DQA1*05:01-B1*03:01L HLA-DRB1*04:01L HLA-DRB1*04:03L HLA-DRB1*13:02L HLA-DRB1*13:03M HLA-DRB1*01:03M HLA-DRB1*04:02L HLA-DQA1*01:02-B1*06:02M HLA-DRB4*03:01NL HLA-DRB1*08:77L HLA-DPA1*01:03-B1*03:01L
  REGION 1..10: note = CONT. FROM ABOVE: HLA-DPA1*03:01-B1*04:02L HLA-DRB1*03:01L HLA-D RB1*14:01L HLA-DRB1*11:02L HLA-DRB1*11:03L HLA-DRB1*14:02M HLA-D RB1*11:01L HLA-DRB5*01:01L HLA-DQA1*01-B1*05L HLA-DQA1*05:05-B1* 03:19M HLA-DQA1*05:01-B1*02:01M HLA-DRB4*01:01L
  REGION 1..10: note = CONT. FROM ABOVE: HLA-DPA1*01:03-B1*04:01L HLA-DQA1*05:05-B1*03: 116L HLA-DPA1*01:03-B1*04:02L HLA-DRB1*12:01L HLA-DPA1*02:01-B1* 13:01L HLA-DPA1*03:01-B1*105:01L HLA-DPA1*01:03-B1*104:01L HLA-D PA1*01:02-B1*04:01L HLA-DRB1*10:01L HLA-DRB1*16:01L
  REGION 1..10: note = CONT. FROM ABOVE: HLA-DQA1*01:03-B1*06:01L HLA-DRB1*08:02L HLA-D QA1*02:01-B1*03:03M HLA-DRB1*15:03L
SSAKSASVYY

SEQ ID NO: 8850 - protein, 10 aa, Severe acute respiratory syndrome coronavirus 2
  REGION 1..10: note = Table B: HLA-DQA1*03:02-B1*03:03L HLA-DQA1*05:01-B1*03:01L HLA-DQA1*01:02-B1*06:02L HLA-DQA1*05:05-B1*03:19L HLA-DQA1*05:01-B1*02:01L HLA-DPA1*03:01-B1*105:01L HLA-DQA1*03:01-B1*03:02L HLA-DPA1*01:02-B1*04:01L
  REGION 1..10: note = CONT. FROM ABOVE: HLA-DQA1*01:03-B1*06:01L HLA-DQA1*02:01-B1*03: 03L HLA-DRB1*15:03L
KSASVYYSQL

SEQ ID NO: 8851 - protein, 13 aa, Severe acute respiratory syndrome coronavirus 2
  REGION 1..13: note = Table B: HLA-DQA1*03:02-B1*03:03L HLA-DQA1*05:01-B1*03:01L HLA-DRB1*04:03L HLA-DRB1*04:05L HLA-DPA1*01:03-B1*03:01L HLA-DQA1*01-B1*05L HLA-DQA1*05:01-B1*02:01L HLA-DPA1*01:03-B1*04:02L HLA-DPA1*02:01-B1*13:01L
  REGION 1..13: note = CONT. FROM ABOVE: HLA-DPA1*01:03-B1*104:01L HLA-DPA1*01:02-B1*04 :01L HLA-DRB1*10:01L HLA-DRB1*16:01L HLA-DQA1*01:03-B1*06:01L HL A-DRB1*04:08L HLA-DQA1*02:01-B1*03:03L
SVYYSQLMCQPIL

SEQ ID NO: 8852 - protein, 10 aa, Severe acute respiratory syndrome coronavirus 2
  REGION 1..10: note = Table B: HLA-DQA1*03:02-B1*03:03L
QPILLLDQAL

SEQ ID NO: 8853 - protein, 14 aa, Severe acute respiratory syndrome coronavirus 2
  REGION 1..14: note = Table B: HLA-DQA1*03:02-B1*03:03L HLA-DQA1*05:01-B1*03:01L HLA-DRB1*04:01L HLA-DRB1*13:02L HLA-DRB1*13:03L HLA-DRB1*01:03L HLA-DRB1*04:04L HLA-DRB1*04:05L HLA-DRB1*01:02L HLA-DRB1*08:04L HLA-DRB1*08:77L HLA-DPA1*01:03-B1*03:01L
  REGION 1..14: note = CONT. FROM ABOVE: HLA-DPA1*03:01-B1*04:02L HLA-DRB1*03:01L HLA-D RB1*14:01L HLA-DRB1*11:03L HLA-DQA1*05:05-B1*03:19L HLA-DRB4*01: 01L HLA-DPA1*01:03-B1*04:02L HLA-DRB1*12:01L HLA-DRB3*01:01L HLA -DQA1*05:05-B1*03:01L HLA-DRB1*10:01L HLA-DQA1*01:03-B1*06:01L
  REGION 1..14: note = CONT. FROM ABOVE: HLA-DRB1*04:08L
PILLLDQALVSDVG

SEQ ID NO: 8854 - protein, 12 aa, Severe acute respiratory syndrome coronavirus 2
  REGION 1..12: note = Table B: HLA-DQA1*03:02-B1*03:03L HLA-DQA1*05:01-B1*03:01L HLA-DRB1*04:03L HLA-DQA1*01:02-B1*06:02L HLA-DQA1*01:01-B1*05:01L HLA-DQA1*01-B1*05L HLA-DQA1*05:05-B1*03:19L HLA-DQA1*05:01-B1*02:01L
  REGION 1..12: note = CONT. FROM ABOVE: HLA-DQA1*05:05-B1*03:01L HLA-DQA1*01:03-B1*06: 01L HLA-DQA1*02:01-B1*03:03L
LDQALVSDVGDS

SEQ ID NO: 8855 - protein, 13 aa, Severe acute respiratory syndrome coronavirus 2
  REGION 1..13: note = Table B: HLA-DQA1*03:02-B1*03:03L HLA-DRB1*13:02L HLA-DRB1*13:03L HLA-DRB1*01:03L HLA-DRB1*04:02L HLA-DRB1*04:05L HLA-DRB4*03:01NL HLA-DRB1*04:10L HLA-DRB1*12:01L HLA-DRB1*14:54L HLA-DRB1*14:17L HLA-DRB1*16:01L HLA-DQA1*02:01-B1*03:03L
DQALVSDVGDSAE

SEQ ID NO: 8856 - protein, 12 aa, Severe acute respiratory syndrome coronavirus 2
  REGION 1..12: note = Table B: HLA-DQA1*03:02-B1*03:03L HLA-DRB1*04:03L HLA-DRB1*04:02L HLA-DRB1*04:05L HLA-DQA1*01-B1*05L HLA-DQA1*05:01-B1*02:01L HLA-DQA1*03:01-B1*03:02L HLA-DRB1*14:17L HLA-DRB1*16:01L HLA-DQA1*02:01-B1*03:03L
LVSDVGDSAEVA

SEQ ID NO: 8857 - protein, 12 aa, Severe acute respiratory syndrome coronavirus 2
  REGION 1..12: note = Table B: HLA-DQA1*03:02-B1*03:03L HLA-DQA1*01-B1*05L HLA-DQA1*05:01-B1*02:01L HLA-DQA1*03:01-B1*03:02L
VSDVGDSAEVAV

SEQ ID NO: 8858 - protein, 10 aa, Severe acute respiratory syndrome coronavirus 2
  REGION 1..10: note = Table B: HLA-DQA1*03:02-B1*03:03L HLA-DQA1*05:01-B1*03:01L HLA-DRB1*04:03L HLA-DRB1*13:02L HLA-DRB1*13:03L HLA-DRB1*01:03L HLA-DRB1*04:02L HLA-DRB1*04:05L HLA-DRB4*03:01NL HLA-DRB1*14:02L HLA-DQA1*01:01-B1*05:01L HLA-DRB5*01:01L HLA-DQA1*01-B1*05L
  REGION 1..10: note = CONT. FROM ABOVE: HLA-DQA1*05:05-B1*03:19L HLA-DQA1*05:01-B1*02: 01L HLA-DPA1*01:03-B1*04:02L HLA-DRB1*12:01L HLA-DPA1*03:01-B1*1 05:01L HLA-DQA1*03:01-B1*03:02L HLA-DRB1*14:54L HLA-DQA1*05:05-B 1*03:01L HLA-DRB1*14:17L HLA-DRB1*16:01L
  REGION 1..10: note = CONT. FROM ABOVE: HLA-DQA1*01:03-B1*06:01L HLA-DQA1*02:01-B1*03: 03L
VGDSAEVAVK

SEQ ID NO: 8859 - protein, 10 aa, Severe acute respiratory syndrome coronavirus 2
  REGION 1..10: note = Table B: HLA-DQA1*03:02-B1*03:03L HLA-DQA1*05:01-B1*03:01L HLA-DQA1*01-B1*05L HLA-DQA1*05:05-B1*03:19L HLA-DQA1*05:01-B1*02:01L HLA-DQA1*03:01-B1*03:02L
GDSAEVAVKM

SEQ ID NO: 8860 - protein, 10 aa, Severe acute respiratory syndrome coronavirus 2
  REGION 1..10: note = Table B: HLA-DQA1*03:02-B1*03:03L HLA-DQA1*05:01-B1*03:01L HLA-DRB1*13:03L HLA-DQA1*01:02-B1*06:02M HLA-DPA1*01:03-B1*03:01L HLA-DPA1*03:01-B1*04:02L HLA-DRB1*14:01L HLA-DRB1*14:02L HLA-DQA1*05:01-B1*02:01L
  REGION 1..10: note = CONT. FROM ABOVE: HLA-DPA1*01:03-B1*04:01L HLA-DRB1*12:01L HLA-D PA1*02:01-B1*13:01L HLA-DPA1*03:01-B1*105:01M HLA-DQA1*05:05-B1* 03:01L HLA-DPA1*01:02-B1*04:01L HLA-DQA1*01:03-B1*06:01L HLA-DQA 1*02:01-B1*03:03L HLA-DRB1*15:03L
DSAEVAVKMF

SEQ ID NO: 8861 - protein, 10 aa, Severe acute respiratory syndrome coronavirus 2
  REGION 1..10: note = Table B: HLA-DQA1*03:02-B1*03:03L HLA-DQA1*05:05-B1*03:19L HLA-DRB1*09:01L HLA-DPA1*01:03-B1*04:02L HLA-DQA1*03:01-B1*03:02L
AEVAVKMFDA

SEQ ID NO: 8862 - protein, 10 aa, Severe acute respiratory syndrome coronavirus 2
  REGION 1..10: note = Table B: HLA-DQA1*03:02-B1*03:03L HLA-DQA1*05:01-B1*03:01L HLA-DRB1*13:02L HLA-DRB1*13:03M HLA-DRB1*01:03L HLA-DQA1*01:02-B1*06:02H HLA-DRB1*01:01L HLA-DRB4*03:01NL HLA-DRB1*08:77L HLA-DPA1*01:03-B1*03:01L
  REGION 1..10: note = CONT. FROM ABOVE: HLA-DPA1*03:01-B1*04:02L HLA-DRB1*03:01L HLA-D RB1*14:01L HLA-DRB1*14:02L HLA-DRB5*01:01L HLA-DQA1*01-B1*05L HL A-DQA1*05:05-B1*03:19L HLA-DQA1*05:01-B1*02:01L HLA-DRB4*01:01L HLA-DPA1*01:03-B1*04:01M HLA-DQA1*05:05-B1*03:116L
  REGION 1..10: note = CONT. FROM ABOVE: HLA-DPA1*01:03-B1*04:02L HLA-DRB1*12:01L HLA-D PA1*02:01-B1*13:01L HLA-DPA1*03:01-B1*105:01M HLA-DPA1*01:03-B1* 104:01L HLA-DQA1*05:05-B1*03:01L HLA-DPA1*01:02-B1*04:01L HLA-DR B1*10:01L HLA-DRB1*16:01L HLA-DQA1*01:03-B1*06:01L
  REGION 1..10: note = CONT. FROM ABOVE: HLA-DQA1*02:01-B1*03:03L HLA-DRB1*15:03L
EVAVKMFDAY

SEQ ID NO: 8863 - protein, 12 aa, Severe acute respiratory syndrome coronavirus 2
  REGION 1..12: note = Table B: HLA-DQA1*03:02-B1*03:03L HLA-DQA1*05:01-B1*03:01L HLA-DRB1*01:03L HLA-DRB1*04:04L HLA-DRB1*04:05L HLA-DRB1*01:02L HLA-DPA1*01:03-B1*03:01L HLA-DPA1*03:01-B1*04:02L HLA-DRB1*14:01L HLA-DRB1*04:10L HLA-DRB1*12:01L
  REGION 1..12: note = CONT. FROM ABOVE: HLA-DPA1*02:01-B1*13:01L HLA-DPA1*03:01-B1*105 :01L HLA-DQA1*05:05-B1*03:01L HLA-DPA1*01:02-B1*04:01L HLA-DRB1* 16:01L HLA-DRB1*04:08L HLA-DRB1*15:03L
VAVKMFDAYVNT

SEQ ID NO: 8864 - protein, 10 aa, Severe acute respiratory syndrome coronavirus 2
  REGION 1..10: note = Table B: HLA-DQA1*03:02-B1*03:03L HLA-DQA1*05:01-B1*03:01L HLA-DRB1*04:01L HLA-DRB1*04:03L HLA-DRB1*13:02L HLA-DRB1*13:03L HLA-DRB1*01:03M HLA-DRB1*04:05L HLA-DQA1*01:02-B1*06:02M HLA-DRB1*01:01L HLA-DRB1*01:02L HLA-DRB1*08:77L
  REGION 1..10: note = CONT. FROM ABOVE: HLA-DPA1*01:03-B1*03:01L HLA-DPA1*03:01-B1*04: 02L HLA-DRB1*03:01L HLA-DRB1*14:01L HLA-DRB1*11:03L HLA-DRB1*14: 02M HLA-DQA1*01:01-B1*05:01L HLA-DRB1*08:01L HLA-DRB1*11:01L HLA -DQA1*01-B1*05L HLA-DQA1*05:05-B1*03:19L
  REGION 1..10: note = CONT. FROM ABOVE: HLA-DQA1*05:01-B1*02:01L HLA-DRB4*01:01L HLA-D PA1*01:03-B1*04:01L HLA-DQA1*05:05-B1*03:116M HLA-DRB1*09:01L HL A-DPA1*01:03-B1*04:02M HLA-DRB1*12:01L HLA-DPA1*02:01-B1*13:01M HLA-DPA1*03:01-B1*105:01L HLA-DQA1*03:01-B1*03:02L
  REGION 1..10: note = CONT. FROM ABOVE: HLA-DPA1*01:03-B1*104:01L HLA-DPA1*01:02-B1*04 :01L HLA-DRB1*07:01L HLA-DRB1*10:01L HLA-DRB1*16:01L HLA-DQA1*01 :03-B1*06:01M HLA-DRB1*08:02L HLA-DRB1*08:03L HLA-DQA1*02:01-B1* 03:03M HLA-DRB1*15:03L
KMFDAYVNTF

SEQ ID NO: 8865 - protein, 11 aa, Severe acute respiratory syndrome coronavirus 2
  REGION 1..11: note = Table B: HLA-DQA1*03:02-B1*03:03L HLA-DRB1*13:03L HLA-DPA1*03:01-B1*04:02L HLA-DQA1*05:05-B1*03:19L HLA-DQA1*05:01-B1*02:01L HLA-DPA1*01:03-B1*04:01L HLA-DRB1*12:01L HLA-DPA1*01:02-B1*04:01L
DAYVNTFSSTF

SEQ ID NO: 8866 - protein, 11 aa, Severe acute respiratory syndrome coronavirus 2
  REGION 1..11: note = Table B: HLA-DQA1*03:02-B1*03:03L HLA-DPA1*03:01-B1*04:02L HLA-DQA1*01-B1*05L HLA-DQA1*05:01-B1*02:01L HLA-DRB1*12:01L HLA-DPA1*01:02-B1*04:01L
AYVNTFSSTFN

SEQ ID NO: 8867 - protein, 11 aa, Severe acute respiratory syndrome coronavirus 2
  REGION 1..11: note = Table B: HLA-DQA1*03:02-B1*03:03L HLA-DRB1*04:03L HLA-DRB1*13:02L HLA-DRB4*03:01NL HLA-DRB1*08:77L HLA-DRB3*02:01L HLA-DPA1*03:01-B1*04:02L HLA-DQA1*05:01-B1*02:01L HLA-DRB1*12:01L HLA-DRB1*07:01L HLA-DRB1*16:01L
  REGION 1..11: note = CONT. FROM ABOVE: HLA-DQA1*02:01-B1*03:03L HLA-DRB1*15:03L
NTFSSTFNVPM

SEQ ID NO: 8868 - protein, 10 aa, Severe acute respiratory syndrome coronavirus 2
  REGION 1..10: note = Table B: HLA-DQA1*03:02-B1*03:03L HLA-DRB1*04:03L HLA-DQA1*01-B1*05L HLA-DQA1*05:01-B1*02:01L HLA-DRB1*12:01L HLA-DQA1*03:01-B1*03:02L HLA-DRB1*16:01L HLA-DQA1*01:03-B1*06:01L HLA-DQA1*02:01-B1*03:03L
FSSTFNVPME

SEQ ID NO: 8869 - protein, 10 aa, Severe acute respiratory syndrome coronavirus 2
  REGION 1..10: note = Table B: HLA-DQA1*03:02-B1*03:03L HLA-DQA1*05:01-B1*03:01L HLA-DRB1*04:03L HLA-DRB1*13:02L HLA-DRB1*13:03L HLA-DRB1*01:03L HLA-DRB1*04:02L HLA-DRB4*03:01NL HLA-DQA1*01:01-B1*05:01L HLA-DRB1*08:01L HLA-DRB5*01:01L HLA-DQA1*01-B1*05L
  REGION 1..10: note = CONT. FROM ABOVE: HLA-DQA1*05:01-B1*02:01L HLA-DRB1*12:01L HLA-D RB1*12:02L HLA-DPA1*03:01-B1*105:01L HLA-DQA1*03:01-B1*03:02L HL A-DQA1*05:05-B1*03:01L HLA-DRB1*14:17L HLA-DRB1*16:01L HLA-DQA1* 01:03-B1*06:01L HLA-DQA1*02:01-B1*03:03L
SSTFNVPMEK

SEQ ID NO: 8870 - protein, 10 aa, Severe acute respiratory syndrome coronavirus 2
  REGION 1..10: note = Table B: HLA-DQA1*03:02-B1*03:03M HLA-DQA1*05:01-B1*03:01M HLA-DRB1*04:01L HLA-DRB1*13:02L HLA-DRB1*13:03L HLA-DRB1*01:03L HLA-DRB1*04:02L HLA-DRB1*04:05L HLA-DQA1*01:02-B1*06:02M HLA-DRB1*01:01L HLA-DRB1*01:02M HLA-DRB4*03:01NL HLA-DRB1*08:77L
  REGION 1..10: note = CONT. FROM ABOVE: HLA-DRB3*02:01L HLA-DPA1*01:03-B1*03:01L HLA-D PA1*03:01-B1*04:02L HLA-DRB1*03:01L HLA-DRB1*14:01L HLA-DRB1*14: 02M HLA-DRB1*08:01L HLA-DRB1*11:01L HLA-DQA1*01-B1*05L HLA-DQA1* 05:05-B1*03:19L HLA-DQA1*05:01-B1*02:01L HLA-DRB4*01:01L
  REGION 1..10: note = CONT. FROM ABOVE: HLA-DPA1*01:03-B1*04:01L HLA-DQA1*05:05-B1*03: 116M HLA-DRB1*09:01L HLA-DPA1*01:03-B1*04:02L HLA-DRB1*12:01L HL A-DPA1*02:01-B1*13:01L HLA-DPA1*03:01-B1*105:01M HLA-DQA1*03:01- B1*03:02M HLA-DPA1*01:03-B1*104:01L HLA-DQA1*05:05-B1*03:01L
  REGION 1..10: note = CONT. FROM ABOVE: HLA-DPA1*01:02-B1*04:01L HLA-DRB1*07:01L HLA-D RB1*10:01L HLA-DRB1*16:01L HLA-DQA1*01:03-B1*06:01L HLA-DRB1*08: 03L HLA-DQA1*02:01-B1*03:03M HLA-DRB1*15:03M
STFNVPMEKL

SEQ ID NO: 8871 - protein, 15 aa, Severe acute respiratory syndrome coronavirus 2
  REGION 1..15: note = Table B: HLA-DQA1*03:02-B1*03:03L HLA-DRB1*13:03L HLA-DRB1*07:01L HLA-DQA1*01:03-B1*06:01L
VPMEKLKTLVATAEA

SEQ ID NO: 8872 - protein, 13 aa, Severe acute respiratory syndrome coronavirus 2
  REGION 1..13: note = Table B: HLA-DQA1*03:02-B1*03:03L HLA-DQA1*05:01-B1*03:01L HLA-DRB1*13:02L HLA-DRB1*13:03L HLA-DRB1*01:03L HLA-DRB1*04:02L HLA-DRB1*04:04L HLA-DQA1*01:02-B1*06:02L HLA-DRB1*01:02L HLA-DRB4*03:01NL HLA-DPA1*01:03-B1*03:01L
  REGION 1..13: note = CONT. FROM ABOVE: HLA-DQA1*01:01-B1*05:01L HLA-DQA1*01-B1*05L HL A-DQA1*05:01-B1*02:01L HLA-DRB1*04:10L HLA-DRB1*12:01L HLA-DPA1* 02:01-B1*13:01L HLA-DPA1*03:01-B1*105:01L HLA-DRB1*14:54L HLA-DP A1*01:03-B1*104:01L HLA-DQA1*05:05-B1*03:01L HLA-DRB1*14:17L
  REGION 1..13: note = CONT. FROM ABOVE: HLA-DRB1*16:01L HLA-DQA1*01:03-B1*06:01L HLA-D RB1*04:08L HLA-DRB1*15:03L
EKLKTLVATAEAE

SEQ ID NO: 8873 - protein, 10 aa, Severe acute respiratory syndrome coronavirus 2
  REGION 1..10: note = Table B: HLA-DQA1*03:02-B1*03:03L
TLVATAEAEL

SEQ ID NO: 8874 - protein, 10 aa, Severe acute respiratory syndrome coronavirus 2
  REGION 1..10: note = Table B: HLA-DQA1*03:02-B1*03:03L HLA-DQA1*05:01-B1*03:01L HLA-DRB1*04:03L HLA-DRB1*01:03L HLA-DRB1*04:02L HLA-DQA1*01:02-B1*06:02L HLA-DRB4*03:01NL HLA-DQA1*01:01-B1*05:01L HLA-DQA1*05:05-B1*03:19L
  REGION 1..10: note = CONT. FROM ABOVE: HLA-DRB4*02:01NL HLA-DQA1*05:01-B1*02:01L HLA- DPA1*01:03-B1*04:02L HLA-DRB1*12:01L HLA-DPA1*03:01-B1*105:01L H LA-DQA1*03:01-B1*03:02L HLA-DQA1*05:05-B1*03:01L HLA-DRB1*14:17L HLA-DRB1*16:01L HLA-DQA1*01:03-B1*06:01M HLA-DRB1*04:08L
  REGION 1..10: note = CONT. FROM ABOVE: HLA-DQA1*02:01-B1*03:03L
VATAEAELAK

SEQ ID NO: 8875 - protein, 10 aa, Severe acute respiratory syndrome coronavirus 2
  REGION 1..10: note = Table B: HLA-DQA1*03:02-B1*03:03L HLA-DQA1*05:01-B1*03:01L HLA-DRB1*04:03L HLA-DRB1*01:03L HLA-DRB1*04:02L HLA-DQA1*01:02-B1*06:02L HLA-DRB4*03:01NL HLA-DQA1*01:01-B1*05:01L HLA-DQA1*05:05-B1*03:19L
  REGION 1..10: note = CONT. FROM ABOVE: HLA-DQA1*05:01-B1*02:01L HLA-DPA1*01:03-B1*04: 02L HLA-DRB1*12:01L HLA-DPA1*03:01-B1*105:01L HLA-DQA1*03:01-B1* 03:02L HLA-DQA1*05:05-B1*03:01L HLA-DRB1*14:17L HLA-DPA1*01:02-B 1*04:01L HLA-DRB1*16:01L HLA-DQA1*01:03-B1*06:01M
  REGION 1..10: note = CONT. FROM ABOVE: HLA-DRB1*04:08L HLA-DQA1*02:01-B1*03:03L
ATAEAELAKN

SEQ ID NO: 8876 - protein, 10 aa, Severe acute respiratory syndrome coronavirus 2
  REGION 1..10: note = Table B: HLA-DQA1*03:02-B1*03:03L HLA-DQA1*05:05-B1*03:19L HLA-DQA1*03:01-B1*03:02L HLA-DQA1*01:03-B1*06:01L
TAEAELAKNV

SEQ ID NO: 8877 - protein, 10 aa, Severe acute respiratory syndrome coronavirus 2
  REGION 1..10: note = Table B: HLA-DQA1*03:02-B1*03:03L HLA-DQA1*05:05-B1*03:19L HLA-DQA1*03:01-B1*03:02L
AEAELAKNVS

SEQ ID NO: 8878 - protein, 10 aa, Severe acute respiratory syndrome coronavirus 2
  REGION 1..10: note = Table B: HLA-DQA1*03:02-B1*03:03M HLA-DQA1*05:01-B1*03:01L HLA-DQA1*05:05-B1*03:19L HLA-DQA1*05:01-B1*02:01L HLA-DQA1*03:01-B1*03:02L
EAELAKNVSL

SEQ ID NO: 8879 - protein, 10 aa, Severe acute respiratory syndrome coronavirus 2
  REGION 1..10: note = Table B: HLA-DQA1*03:02-B1*03:03L HLA-DQA1*05:01-B1*03:01L HLA-DRB1*04:03L HLA-DRB1*04:02L HLA-DRB4*03:01NL HLA-DQA1*03:01-B1*03:02L HLA-DRB1*14:17L HLA-DQA1*01:03-B1*06:01L HLA-DQA1*02:01-B1*03:03L
ELAKNVSLDN

SEQ ID NO: 8880 - protein, 11 aa, Severe acute respiratory syndrome coronavirus 2
  REGION 1..11: note = Table B: HLA-DQA1*03:02-B1*03:03L HLA-DRB1*04:03L HLA-DQA1*05:01-B1*02:01L HLA-DQA1*02:01-B1*03:03L
LAKNVSLDNVL

SEQ ID NO: 8881 - protein, 10 aa, Severe acute respiratory syndrome coronavirus 2
  REGION 1..10: note = Table B: HLA-DQA1*03:02-B1*03:03L HLA-DQA1*05:01-B1*03:01L HLA-DRB1*04:03L HLA-DRB1*13:03L HLA-DRB1*01:03L HLA-DRB1*04:05L HLA-DQA1*01:02-B1*06:02L HLA-DRB1*01:01L HLA-DRB1*08:77L HLA-DPA1*03:01-B1*04:02L HLA-DRB1*14:01L HLA-DRB1*14:02L
  REGION 1..10: note = CONT. FROM ABOVE: HLA-DQA1*01-B1*05L HLA-DQA1*05:05-B1*03:19L HL A-DQA1*05:01-B1*02:01L HLA-DRB4*01:01L HLA-DPA1*01:03-B1*04:01L HLA-DQA1*05:05-B1*03:116L HLA-DPA1*01:03-B1*04:02L HLA-DRB1*12:0 1L HLA-DPA1*02:01-B1*13:01L HLA-DPA1*03:01-B1*105:01L
  REGION 1..10: note = CONT. FROM ABOVE: HLA-DPA1*01:02-B1*04:01L HLA-DRB1*10:01L HLA-D RB1*16:01L HLA-DQA1*01:03-B1*06:01L HLA-DRB1*08:02L HLA-DQA1*02: 01-B1*03:03L HLA-DRB1*15:03L
VSLDNVLSTF

SEQ ID NO: 8882 - protein, 10 aa, Severe acute respiratory syndrome coronavirus 2
  REGION 1..10: note = Table B: HLA-DQA1*03:02-B1*03:03L HLA-DQA1*05:05-B1*03:19L
SLDNVLSTFI

SEQ ID NO: 8883 - protein, 12 aa, Severe acute respiratory syndrome coronavirus 2
  REGION 1..12: note = Table B: HLA-DQA1*03:02-B1*03:03L HLA-DQA1*05:01-B1*03:01L HLA-DRB1*04:03L HLA-DRB1*01:03L HLA-DRB1*04:02L HLA-DRB1*04:05L HLA-DRB1*01:02L HLA-DQA1*01:01-B1*05:01L HLA-DQA1*01-B1*05L HLA-DQA1*05:05-B1*03:19L HLA-DQA1*05:01-B1*02:01L
  REGION 1..12: note = CONT. FROM ABOVE: HLA-DRB1*16:01L HLA-DRB1*04:08L
DNVLSTFISAAR

SEQ ID NO: 8884 - protein, 12 aa, Severe acute respiratory syndrome coronavirus 2
  REGION 1..12: note = Table B: HLA-DQA1*03:02-B1*03:03L HLA-DQA1*05:01-B1*03:01L HLA-DRB1*04:03L HLA-DRB1*04:02L HLA-DRB1*01:02L HLA-DQA1*01-B1*05L HLA-DQA1*05:05-B1*03:19L HLA-DRB1*16:01L HLA-DRB1*04:08L HLA-DRB1*15:03L
NVLSTFISAARQ

SEQ ID NO: 8885 - protein, 10 aa, Severe acute respiratory syndrome coronavirus 2
  REGION 1..10: note = Table B: HLA-DQA1*03:02-B1*03:03L HLA-DQA1*05:01-B1*03:01L HLA-DRB1*04:03L HLA-DRB1*13:03L HLA-DRB1*01:03L HLA-DRB1*04:02L HLA-DQA1*01:02-B1*06:02L HLA-DRB4*03:01NL HLA-DQA1*01:01-B1*05:01L HLA-DQA1*05:05-B1*03:19L
  REGION 1..10: note = CONT. FROM ABOVE: HLA-DQA1*05:01-B1*02:01L HLA-DQA1*03:01-B1*03: 02L HLA-DQA1*05:05-B1*03:01L HLA-DRB1*14:17L HLA-DPA1*01:02-B1*0 4:01L HLA-DRB1*16:01L HLA-DQA1*01:03-B1*06:01L HLA-DQA1*02:01-B1 *03:03L
STFISAARQG

SEQ ID NO: 8886 - protein, 10 aa, Severe acute respiratory syndrome coronavirus 2
  REGION 1..10: note = Table B: HLA-DQA1*03:02-B1*03:03L HLA-DQA1*05:01-B1*03:01L HLA-DRB1*04:03L HLA-DRB1*04:02L HLA-DQA1*01:02-B1*06:02L HLA-DRB4*03:01NL HLA-DQA1*05:05-B1*03:19L HLA-DQA1*05:01-B1*02:01L HLA-DPA1*03:01-B1*105:01L
  REGION 1..10: note = CONT. FROM ABOVE: HLA-DQA1*03:01-B1*03:02L HLA-DQA1*05:05-B1*03: 01L HLA-DRB1*14:17L HLA-DQA1*01:03-B1*06:01L HLA-DQA1*02:01-B1*0 3:03L
ISAARQGFVD

SEQ ID NO: 8887 - protein, 11 aa, Severe acute respiratory syndrome coronavirus 2
  REGION 1..11: note = Table B: HLA-DQA1*03:02-B1*03:03L HLA-DRB1*04:03L HLA-DRB1*16:01L HLA-DQA1*01:03-B1*06:01L
ARQGFVDSDVE

SEQ ID NO: 8888 - protein, 10 aa, Severe acute respiratory syndrome coronavirus 2
  REGION 1..10: note = Table B: HLA-DQA1*03:02-B1*03:03L HLA-DRB1*04:03L HLA-DRB1*13:03L HLA-DRB1*01:03L HLA-DRB1*04:02L HLA-DRB1*04:05L HLA-DRB4*03:01NL HLA-DQA1*01-B1*05L HLA-DQA1*05:01-B1*02:01L HLA-DRB1*04:10L HLA-DRB1*12:01L HLA-DPA1*03:01-B1*105:01L
  REGION 1..10: note = CONT. FROM ABOVE: HLA-DQA1*03:01-B1*03:02L HLA-DRB1*14:54L HLA-D RB1*14:17L HLA-DRB1*16:01L HLA-DQA1*02:01-B1*03:03L
FVDSDVETKD

SEQ ID NO: 8889 - protein, 10 aa, Severe acute respiratory syndrome coronavirus 2
  REGION 1..10: note = Table B: HLA-DQA1*03:02-B1*03:03L HLA-DQA1*01-B1*05L HLA-DQA1*05:01-B1*02:01L HLA-DQA1*03:01-B1*03:02L
VDSDVETKDV

SEQ ID NO: 8890 - protein, 10 aa, Severe acute respiratory syndrome coronavirus 2
  REGION 1..10: note = Table B: HLA-DQA1*03:02-B1*03:03L
DSDVETKDVV

SEQ ID NO: 8891 - protein, 10 aa, Severe acute respiratory syndrome coronavirus 2
  REGION 1..10: note = Table B: HLA-DQA1*03:02-B1*03:03L HLA-DRB1*04:03L HLA-DRB1*13:03L HLA-DQA1*01:01-B1*05:01L HLA-DQA1*01-B1*05L HLA-DQA1*05:01-B1*02:01L HLA-DQA1*03:01-B1*03:02L HLA-DRB1*16:01L HLA-DQA1*02:01-B1*03:03L
SDVETKDVVE

SEQ ID NO: 8892 - protein, 10 aa, Severe acute respiratory syndrome coronavirus 2
  REGION 1..10: note = Table B: HLA-DQA1*03:02-B1*03:03L HLA-DQA1*05:05-B1*03:19L
VETKDVVECL

SEQ ID NO: 8893 - protein, 11 aa, Severe acute respiratory syndrome coronavirus 2
  REGION 1..11: note = Table B: HLA-DQA1*03:02-B1*03:03L HLA-DRB1*04:03L HLA-DRB1*04:02L HLA-DQA1*05:01-B1*02:01L HLA-DRB1*14:17L HLA-DQA1*01:03-B1*06:01L HLA-DQA1*02:01-B1*03:03L
LSHQSDIEVTG

SEQ ID NO: 8894 - protein, 12 aa, Severe acute respiratory syndrome coronavirus 2
  REGION 1..12: note = Table B: HLA-DQA1*03:02-B1*03:03L HLA-DQA1*05:01-B1*03:01L HLA-DRB1*04:03L HLA-DQA1*01:02-B1*06:02L HLA-DQA1*01:01-B1*05:01L HLA-DQA1*01-B1*05L HLA-DQA1*05:05-B1*03:19L HLA-DQA1*05:01-B1*02:01L
  REGION 1..12: note = CONT. FROM ABOVE: HLA-DPA1*03:01-B1*105:01L HLA-DQA1*05:05-B1*03 :01L HLA-DRB1*16:01L HLA-DQA1*01:03-B1*06:01M HLA-DQA1*02:01-B1* 03:03L
SHQSDIEVTGDS

SEQ ID NO: 8895 - protein, 13 aa, Severe acute respiratory syndrome coronavirus 2
  REGION 1..13: note = Table B: HLA-DQA1*03:02-B1*03:03L HLA-DRB1*04:03L HLA-DRB1*12:01L HLA-DQA1*05:05-B1*03:01L HLA-DQA1*01:03-B1*06:01L
SDIEVTGDSCNNY

SEQ ID NO: 8896 - protein, 12 aa, Severe acute respiratory syndrome coronavirus 2
  REGION 1..12: note = Table B: HLA-DQA1*03:02-B1*03:03L HLA-DQA1*03:01-B1*03:02L HLA-DQA1*05:05-B1*03:01L HLA-DQA1*01:03-B1*06:01L
IEVTGDSCNNYM

SEQ ID NO: 8897 - protein, 11 aa, Severe acute respiratory syndrome coronavirus 2
  REGION 1..11: note = Table B: HLA-DQA1*03:02-B1*03:03L HLA-DQA1*01:02-B1*06:02L HLA-DPA1*03:01-B1*105:01L HLA-DRB1*16:01L HLA-DQA1*01:03-B1*06:01L
NYMLTYNKVEN

SEQ ID NO: 8898 - protein, 12 aa, Severe acute respiratory syndrome coronavirus 2
  REGION 1..12: note = Table B: HLA-DQA1*03:02-B1*03:03L HLA-DQA1*05:01-B1*03:01L HLA-DRB1*13:02L HLA-DRB1*04:04L HLA-DQA1*01:02-B1*06:02L HLA-DRB1*01:02L HLA-DRB1*08:04L HLA-DRB1*14:01L HLA-DRB1*11:04L HLA-DRB1*11:01L HLA-DQA1*01-B1*05L HLA-DQA1*05:01-B1*02:01L
  REGION 1..12: note = CONT. FROM ABOVE: HLA-DRB1*04:10L HLA-DPA1*03:01-B1*105:01L HLA- DQA1*05:05-B1*03:01L HLA-DRB1*10:01L HLA-DQA1*01:03-B1*06:01L HL A-DRB1*08:03L HLA-DRB1*15:03L
LTYNKVENMTPR

SEQ ID NO: 8899 - protein, 12 aa, Severe acute respiratory syndrome coronavirus 2
  REGION 1..12: note = Table B: HLA-DQA1*03:02-B1*03:03L HLA-DQA1*01:02-B1*06:02L HLA-DRB1*01:02L HLA-DRB1*14:01L HLA-DQA1*01-B1*05L HLA-DQA1*05:01-B1*02:01L HLA-DRB1*12:01L HLA-DPA1*02:01-B1*13:01L HLA-DPA1*03:01-B1*105:01L
  REGION 1..12: note = CONT. FROM ABOVE: HLA-DRB1*15:03L
YNKVENMTPRDL

SEQ ID NO: 8900 - protein, 10 aa, Severe acute respiratory syndrome coronavirus 2
  REGION 1..10: note = Table B: HLA-DQA1*03:02-B1*03:03L HLA-DQA1*05:01-B1*03:01L HLA-DRB1*04:03L HLA-DRB1*13:03L HLA-DRB1*04:02L HLA-DQA1*01:02-B1*06:02L HLA-DRB4*03:01NL HLA-DQA1*01-B1*05L HLA-DQA1*05:05-B1*03:19L HLA-DQA1*05:01-B1*02:01L
  REGION 1..10: note = CONT. FROM ABOVE: HLA-DRB1*12:01L HLA-DPA1*03:01-B1*105:01L HLA- DQA1*03:01-B1*03:02L HLA-DRB1*14:54L HLA-DQA1*05:05-B1*03:01L HL A-DRB1*14:17L HLA-DPA1*01:02-B1*04:01L HLA-DRB1*16:01L HLA-DQA1* 01:03-B1*06:01L HLA-DQA1*02:01-B1*03:03L HLA-DRB1*15:03L
VENMTPRDLG

SEQ ID NO: 8901 - protein, 10 aa, Severe acute respiratory syndrome coronavirus 2
  REGION 1..10: note = Table B: HLA-DQA1*03:02-B1*03:03L HLA-DQA1*05:01-B1*03:01L HLA-DRB1*04:03L HLA-DRB1*13:03L HLA-DRB1*01:03L HLA-DRB1*04:02L HLA-DRB1*04:05L HLA-DQA1*01:02-B1*06:02L HLA-DRB1*01:02L HLA-DRB4*03:01NL HLA-DQA1*01:01-B1*05:01L
  REGION 1..10: note = CONT. FROM ABOVE: HLA-DQA1*05:05-B1*03:19L HLA-DQA1*05:01-B1*02: 01L HLA-DRB1*12:01L HLA-DPA1*03:01-B1*105:01L HLA-DQA1*03:01-B1* 03:02L HLA-DRB1*14:54L HLA-DQA1*05:05-B1*03:01L HLA-DRB1*14:17L HLA-DRB1*16:01L HLA-DQA1*01:03-B1*06:01L HLA-DRB1*04:08L
  REGION 1..10: note = CONT. FROM ABOVE: HLA-DQA1*02:01-B1*03:03L
INAQVAKSHN

SEQ ID NO: 8902 - protein, 10 aa, Severe acute respiratory syndrome coronavirus 2
  REGION 1..10: note = Table B: HLA-DQA1*03:02-B1*03:03L HLA-DQA1*05:01-B1*03:01L HLA-DRB1*13:02L HLA-DRB1*13:03L HLA-DRB1*01:03L HLA-DRB1*04:02L HLA-DQA1*01:02-B1*06:02L HLA-DRB1*01:02L HLA-DRB4*03:01NL HLA-DRB1*08:77L HLA-DRB3*02:01L HLA-DPA1*01:03-B1*03:01L
  REGION 1..10: note = CONT. FROM ABOVE: HLA-DPA1*03:01-B1*04:02L HLA-DRB1*14:01L HLA-D RB1*14:02L HLA-DRB1*08:01L HLA-DRB5*01:01L HLA-DQA1*01-B1*05L HL A-DQA1*05:01-B1*02:01L HLA-DPA1*01:03-B1*04:01L HLA-DQA1*05:05-B 1*03:116L HLA-DRB1*09:01L HLA-DRB1*12:01L
  REGION 1..10: note = CONT. FROM ABOVE: HLA-DPA1*03:01-B1*105:01L HLA-DQA1*03:01-B1*03 :02L HLA-DPA1*01:02-B1*04:01L HLA-DRB1*07:01L HLA-DRB1*16:01L HL A-DQA1*02:01-B1*03:03L HLA-DRB1*15:03L
QVAKSHNIAL

SEQ ID NO: 8903 - protein, 12 aa, Severe acute respiratory syndrome coronavirus 2
  REGION 1..12: note = Table B: HLA-DQA1*03:02-B1*03:03L HLA-DQA1*05:01-B1*03:01L HLA-DRB1*13:03L HLA-DRB1*01:03L HLA-DRB1*04:04L HLA-DRB1*04:05L HLA-DRB1*01:02L HLA-DRB4*03:01NL HLA-DPA1*01:03-B1*03:01L HLA-DRB1*14:01L HLA-DRB1*11:04L HLA-DRB1*08:01L
  REGION 1..12: note = CONT. FROM ABOVE: HLA-DQA1*01-B1*05L HLA-DQA1*05:01-B1*02:01L HL A-DRB1*04:10L HLA-DRB1*12:01L HLA-DPA1*02:01-B1*13:01L HLA-DPA1* 03:01-B1*105:01L HLA-DQA1*03:01-B1*03:02L HLA-DRB1*14:54L HLA-DQ A1*05:05-B1*03:01L HLA-DPA1*01:02-B1*04:01L HLA-DRB1*16:01L
  REGION 1..12: note = CONT. FROM ABOVE: HLA-DRB1*04:08L HLA-DQA1*02:01-B1*03:03L HLA-D RB1*15:03L
SHNIALIWNVKD

SEQ ID NO: 8904 - protein, 10 aa, Severe acute respiratory syndrome coronavirus 2
  REGION 1..10: note = Table B: HLA-DQA1*03:02-B1*03:03L HLA-DQA1*05:01-B1*03:01L HLA-DRB1*04:03L HLA-DRB1*04:05L HLA-DQA1*01:02-B1*06:02L HLA-DPA1*03:01-B1*04:02L HLA-DRB1*14:01L HLA-DQA1*01-B1*05L HLA-DQA1*05:05-B1*03:19L HLA-DQA1*05:01-B1*02:01L
  REGION 1..10: note = CONT. FROM ABOVE: HLA-DRB1*12:01L HLA-DPA1*02:01-B1*13:01L HLA-D PA1*03:01-B1*105:01L HLA-DQA1*03:01-B1*03:02L HLA-DQA1*05:05-B1* 03:01L HLA-DRB1*16:01L HLA-DQA1*01:03-B1*06:01L HLA-DQA1*02:01-B 1*03:03L HLA-DRB1*15:03L
IALIWNVKDF

SEQ ID NO: 8905 - protein, 10 aa, Severe acute respiratory syndrome coronavirus 2
  REGION 1..10: note = Table B: HLA-DQA1*03:02-B1*03:03L HLA-DRB1*01:03L HLA-DQA1*01:02-B1*06:02L HLA-DPA1*01:03-B1*03:01L HLA-DPA1*03:01-B1*04:02L HLA-DQA1*01-B1*05L HLA-DQA1*05:01-B1*02:01L HLA-DPA1*01:03-B1*04:01L
  REGION 1..10: note = CONT. FROM ABOVE: HLA-DPA1*01:03-B1*04:02L HLA-DRB1*12:01L HLA-D PA1*02:01-B1*13:01L HLA-DPA1*03:01-B1*105:01L HLA-DPA1*01:02-B1* 04:01L HLA-DRB1*16:01L HLA-DQA1*01:03-B1*06:01L HLA-DRB1*04:08L HLA-DQA1*02:01-B1*03:03L HLA-DRB1*15:03L
IWNVKDFMSL

SEQ ID NO: 8906 - protein, 10 aa, Severe acute respiratory syndrome coronavirus 2
  REGION 1..10: note = Table B: HLA-DQA1*03:02-B1*03:03L
KDFMSLSEQL

SEQ ID NO: 8907 - protein, 15 aa, Severe acute respiratory syndrome coronavirus 2
  REGION 1..15: note = Table B: HLA-DQA1*03:02-B1*03:03L HLA-DRB1*04:01L HLA-DRB1*13:02L HLA-DRB1*04:02L HLA-DRB1*04:04L HLA-DRB1*04:05L HLA-DRB1*01:01L HLA-DRB1*08:04L HLA-DRB3*02:01L HLA-DPA1*01:03-B1*03:01L HLA-DPA1*03:01-B1*04:02L
  REGION 1..15: note = CONT. FROM ABOVE: HLA-DRB1*14:01L HLA-DRB1*11:02L HLA-DRB1*11:03 L HLA-DRB1*11:04L HLA-DRB1*14:02L HLA-DQA1*01:01-B1*05:01L HLA-D RB1*08:01L HLA-DRB1*11:01L HLA-DQA1*05:01-B1*02:01L HLA-DRB1*09: 01L HLA-DPA1*01:03-B1*04:02L HLA-DRB3*01:01L
  REGION 1..15: note = CONT. FROM ABOVE: HLA-DPA1*02:01-B1*13:01L HLA-DPA1*01:03-B1*02: 01L HLA-DPA1*01:03-B1*104:01L HLA-DPA1*01:02-B1*04:01L HLA-DRB1* 07:01L HLA-DRB1*10:01L HLA-DRB1*08:02L HLA-DRB1*08:03L
LPFKLTCATTRQVVN

SEQ ID NO: 8908 - protein, 10 aa, Severe acute respiratory syndrome coronavirus 2
  REGION 1..10: note = Table B: HLA-DQA1*03:02-B1*03:03M HLA-DQA1*05:01-B1*03:01L HLA-DRB1*13:03L HLA-DQA1*01:02-B1*06:02M HLA-DRB1*01:02M HLA-DRB1*08:77L HLA-DPA1*01:03-B1*03:01L HLA-DPA1*03:01-B1*04:02L HLA-DRB1*14:01L HLA-DRB1*11:02L
  REGION 1..10: note = CONT. FROM ABOVE: HLA-DRB1*14:02L HLA-DRB1*08:01L HLA-DQA1*05:05 -B1*03:19L HLA-DQA1*05:01-B1*02:01L HLA-DRB4*01:01L HLA-DPA1*01: 03-B1*04:01L HLA-DQA1*05:05-B1*03:116L HLA-DRB1*09:01L HLA-DPA1* 01:03-B1*04:02L HLA-DRB1*12:01L HLA-DPA1*02:01-B1*13:01L
  REGION 1..10: note = CONT. FROM ABOVE: HLA-DPA1*03:01-B1*105:01M HLA-DQA1*03:01-B1*03 :02L HLA-DPA1*01:03-B1*104:01L HLA-DQA1*05:05-B1*03:01L HLA-DPA1 *01:02-B1*04:01L HLA-DRB1*10:01L HLA-DRB1*16:01L HLA-DQA1*01:03- B1*06:01L HLA-DRB1*08:03L HLA-DQA1*02:01-B1*03:03L
  REGION 1..10: note = CONT. FROM ABOVE: HLA-DRB1*15:03M
QVVNVVTTKI

SEQ ID NO: 8909 - protein, 10 aa, Severe acute respiratory syndrome coronavirus 2
  REGION 1..10: note = Table B: HLA-DQA1*03:02-B1*03:03L HLA-DQA1*05:01-B1*03:01L HLA-DRB1*04:03L HLA-DRB1*13:02L HLA-DRB1*13:03L HLA-DRB1*04:02L HLA-DRB1*04:05L HLA-DRB1*01:02L HLA-DRB4*03:01NL HLA-DRB1*08:77L HLA-DRB3*02:01L HLA-DRB1*14:01L HLA-DQA1*05:01-B1*02:01L
  REGION 1..10: note = CONT. FROM ABOVE: HLA-DRB1*12:01L HLA-DRB1*12:02L HLA-DPA1*03:01 -B1*105:01L HLA-DQA1*03:01-B1*03:02L HLA-DRB1*14:54L HLA-DRB1*14 :17L HLA-DPA1*01:02-B1*04:01L HLA-DRB1*16:01L HLA-DQA1*01:03-B1* 06:01L HLA-DQA1*02:01-B1*03:03L HLA-DRB1*15:03L
VVNVVTTKIA

SEQ ID NO: 8910 - protein, 10 aa, Severe acute respiratory syndrome coronavirus 2
  REGION 1..10: note = Table B: HLA-DQA1*03:02-B1*03:03L HLA-DQA1*03:01-B1*03:02L HLA-DQA1*02:01-B1*03:03L
VNVVTTKIAL

SEQ ID NO: 8911 - protein, 11 aa, Severe acute respiratory syndrome coronavirus 2
  REGION 1..11: note = Table B: HLA-DQA1*03:02-B1*03:03L HLA-DQA1*01:02-B1*06:02L HLA-DQA1*05:05-B1*03:19L HLA-DPA1*03:01-B1*105:01L HLA-DQA1*01:03-B1*06:01L
IALKGGKIVNN

SEQ ID NO: 8912 - protein, 10 aa, Severe acute respiratory syndrome coronavirus 2
  REGION 1..10: note = Table B: HLA-DQA1*03:02-B1*03:03L HLA-DQA1*01:02-B1*06:02L HLA-DQA1*03:01-B1*03:02L HLA-DPA1*01:02-B1*04:01L HLA-DQA1*01:03-B1*06:01L HLA-DQA1*02:01-B1*03:03L HLA-DRB1*15:03L
KIVNNWLKQL

SEQ ID NO: 8913 - protein, 10 aa, Severe acute respiratory syndrome coronavirus 2
  REGION 1..10: note = Table B: HLA-DQA1*03:02-B1*03:03L HLA-DQA1*05:01-B1*03:01L HLA-DRB1*04:03L HLA-DRB1*01:03L HLA-DRB1*04:05L HLA-DQA1*01:02-B1*06:02L HLA-DRB1*01:01L HLA-DRB1*01:02L HLA-DPA1*03:01-B1*04:02L HLA-DRB1*14:01L HLA-DRB1*14:02L
  REGION 1..10: note = CONT. FROM ABOVE: HLA-DQA1*01-B1*05L HLA-DQA1*05:05-B1*03:19L HL A-DQA1*05:01-B1*02:01L HLA-DPA1*01:03-B1*04:01L HLA-DQA1*05:05-B 1*03:116L HLA-DRB1*09:01L HLA-DPA1*01:03-B1*04:02L HLA-DRB1*12:0 1L HLA-DPA1*02:01-B1*13:01M HLA-DPA1*03:01-B1*105:01L
  REGION 1..10: note = CONT. FROM ABOVE: HLA-DQA1*03:01-B1*03:02L HLA-DPA1*01:03-B1*104 :01L HLA-DPA1*01:02-B1*04:01L HLA-DRB1*10:01L HLA-DRB1*16:01L HL A-DQA1*01:03-B1*06:01M HLA-DRB1*08:03L HLA-DQA1*02:01-B1*03:03L HLA-DRB1*15:03L
IFYLITPVHV

SEQ ID NO: 8914 - protein, 10 aa, Severe acute respiratory syndrome coronavirus 2
  REGION 1..10: note = Table B: HLA-DQA1*03:02-B1*03:03L HLA-DQA1*05:01-B1*03:01L HLA-DRB1*04:03L HLA-DRB1*01:03L HLA-DRB1*04:05L HLA-DQA1*01:02-B1*06:02L HLA-DRB1*01:01L HLA-DRB1*01:02L HLA-DRB1*08:77L HLA-DRB3*02:01L HLA-DPA1*03:01-B1*04:02L
  REGION 1..10: note = CONT. FROM ABOVE: HLA-DRB1*14:01L HLA-DRB1*11:03L HLA-DRB1*14:02 L HLA-DQA1*01-B1*05L HLA-DQA1*05:05-B1*03:19L HLA-DQA1*05:01-B1* 02:01L HLA-DPA1*01:03-B1*04:01L HLA-DQA1*05:05-B1*03:116L HLA-DR B1*09:01L HLA-DPA1*01:03-B1*04:02L HLA-DRB1*12:01L
  REGION 1..10: note = CONT. FROM ABOVE: HLA-DPA1*02:01-B1*13:01L HLA-DPA1*03:01-B1*105 :01L HLA-DQA1*03:01-B1*03:02L HLA-DQA1*05:05-B1*03:01L HLA-DPA1* 01:02-B1*04:01L HLA-DRB1*07:01L HLA-DRB1*10:01L HLA-DRB1*16:01L HLA-DQA1*01:03-B1*06:01L HLA-DQA1*02:01-B1*03:03L
  REGION 1..10: note = CONT. FROM ABOVE: HLA-DRB1*15:03L
FYLITPVHVM

SEQ ID NO: 8915 - protein, 10 aa, Severe acute respiratory syndrome coronavirus 2
  REGION 1..10: note = Table B: HLA-DQA1*03:02-B1*03:03L HLA-DRB1*04:03L HLA-DQA1*01-B1*05L HLA-DQA1*05:01-B1*02:01L HLA-DQA1*03:01-B1*03:02L HLA-DRB1*16:01L
HTDFSSEIIG

SEQ ID NO: 8916 - protein, 10 aa, Severe acute respiratory syndrome coronavirus 2
  REGION 1..10: note = Table B: HLA-DQA1*03:02-B1*03:03L HLA-DQA1*05:01-B1*03:01L HLA-DRB1*13:02L HLA-DRB1*13:03L HLA-DRB1*04:02L HLA-DQA1*01:02-B1*06:02L HLA-DRB4*03:01NL HLA-DRB1*08:01L HLA-DQA1*05:05-B1*03:19L HLA-DQA1*05:01-B1*02:01L
  REGION 1..10: note = CONT. FROM ABOVE: HLA-DPA1*01:03-B1*04:02L HLA-DRB1*12:01L HLA-D PA1*03:01-B1*105:01L HLA-DQA1*03:01-B1*03:02L HLA-DQA1*05:05-B1* 03:01L HLA-DPA1*01:02-B1*04:01L HLA-DRB1*16:01L HLA-DQA1*01:03-B 1*06:01L HLA-DQA1*02:01-B1*03:03L
DFSSEIIGYK

SEQ ID NO: 8917 - protein, 12 aa, Severe acute respiratory syndrome coronavirus 2
  REGION 1..12: note = Table B: HLA-DQA1*03:02-B1*03:03L HLA-DQA1*05:01-B1*03:01L HLA-DRB1*13:02L HLA-DRB1*01:03L HLA-DQA1*01:02-B1*06:02L HLA-DRB1*01:02L HLA-DRB1*08:77L HLA-DRB3*02:01L HLA-DPA1*03:01-B1*04:02L HLA-DRB1*14:01L HLA-DRB1*11:03L
  REGION 1..12: note = CONT. FROM ABOVE: HLA-DRB1*11:04L HLA-DRB1*08:01L HLA-DQA1*05:01 -B1*02:01L HLA-DRB1*12:02L HLA-DPA1*03:01-B1*105:01L HLA-DQA1*05 :05-B1*03:01L HLA-DRB1*08:03L
SSEIIGYKAIDG

SEQ ID NO: 8918 - protein, 12 aa, Severe acute respiratory syndrome coronavirus 2
  REGION 1..12: note = Table B: HLA-DQA1*03:02-B1*03:03L HLA-DQA1*05:01-B1*03:01L HLA-DRB1*01:03L HLA-DQA1*01:02-B1*06:02L HLA-DRB1*01:02L HLA-DRB3*02:01L HLA-DPA1*03:01-B1*04:02L HLA-DRB1*14:01L HLA-DRB1*08:01L HLA-DQA1*05:01-B1*02:01L
  REGION 1..12: note = CONT. FROM ABOVE: HLA-DPA1*03:01-B1*105:01L
SEIIGYKAIDGG

SEQ ID NO: 8919 - protein, 11 aa, Severe acute respiratory syndrome coronavirus 2
  REGION 1..11: note = Table B: HLA-DQA1*03:02-B1*03:03L HLA-DQA1*05:01-B1*03:01L HLA-DRB1*04:03L HLA-DRB1*13:03L HLA-DRB1*01:03L HLA-DRB1*04:02L HLA-DRB1*04:05L HLA-DRB4*03:01NL HLA-DQA1*01-B1*05L HLA-DQA1*05:01-B1*02:01L HLA-DRB1*04:10L HLA-DRB1*12:01L
  REGION 1..11: note = CONT. FROM ABOVE: HLA-DQA1*03:01-B1*03:02L HLA-DRB1*14:54L HLA-D RB1*14:17L HLA-DRB1*16:01L HLA-DRB1*04:08L HLA-DQA1*02:01-B1*03: 03L
IGYKAIDGGVT

SEQ ID NO: 8920 - protein, 10 aa, Severe acute respiratory syndrome coronavirus 2
  REGION 1..10: note = Table B: HLA-DQA1*03:02-B1*03:03L HLA-DQA1*05:01-B1*03:01L HLA-DRB1*13:02L HLA-DRB1*13:03L HLA-DRB1*01:03L HLA-DRB4*03:01NL HLA-DQA1*03:01-B1*03:02L HLA-DRB1*16:01L HLA-DQA1*02:01-B1*03:03L
KAIDGGVTRD

SEQ ID NO: 8921 - protein, 10 aa, Severe acute respiratory syndrome coronavirus 2
  REGION 1..10: note = Table B: HLA-DQA1*03:02-B1*03:03L HLA-DQA1*05:01-B1*03:01L HLA-DQA1*01:02-B1*06:02L HLA-DRB1*01:02L HLA-DPA1*03:01-B1*04:02L HLA-DRB1*14:01L HLA-DRB1*14:02L HLA-DQA1*01-B1*05L HLA-DQA1*05:05-B1*03:19L
  REGION 1..10: note = CONT. FROM ABOVE: HLA-DQA1*05:01-B1*02:01L HLA-DQA1*05:05-B1*03: 116L HLA-DRB1*09:01L HLA-DPA1*02:01-B1*13:01L HLA-DPA1*03:01-B1* 105:01L HLA-DQA1*03:01-B1*03:02L HLA-DPA1*01:03-B1*104:01L HLA-D PA1*01:02-B1*04:01L HLA-DRB1*10:01L HLA-DRB1*16:01L
  REGION 1..10: note = CONT. FROM ABOVE: HLA-DQA1*01:03-B1*06:01L HLA-DQA1*02:01-B1*03: 03L HLA-DRB1*15:03L
AIDGGVTRDI

SEQ ID NO: 8922 - protein, 10 aa, Severe acute respiratory syndrome coronavirus 2
  REGION 1..10: note = Table B: HLA-DQA1*03:02-B1*03:03L HLA-DQA1*05:01-B1*03:01L HLA-DQA1*01:02-B1*06:02L HLA-DQA1*05:05-B1*03:19L HLA-DQA1*05:01-B1*02:01L HLA-DQA1*03:01-B1*03:02L HLA-DQA1*05:05-B1*03:01L HLA-DQA1*01:03-B1*06:01L
  REGION 1..10: note = CONT. FROM ABOVE: HLA-DQA1*02:01-B1*03:03L
IDGGVTRDIA

SEQ ID NO: 8923 - protein, 11 aa, Severe acute respiratory syndrome coronavirus 2
  REGION 1..11: note = Table B: HLA-DQA1*03:02-B1*03:03L HLA-DQA1*03:01-B1*03:02L
DGGVTRDIAST

SEQ ID NO: 8924 - protein, 11 aa, Severe acute respiratory syndrome coronavirus 2
  REGION 1..11: note = Table B: HLA-DQA1*03:02-B1*03:03L HLA-DRB1*13:03L HLA-DRB1*04:05L HLA-DRB4*03:01NL HLA-DQA1*05:01-B1*02:01L HLA-DRB1*16:01L HLA-DQA1*01:03-B1*06:01L
GVTRDIASTDT

SEQ ID NO: 8925 - protein, 13 aa, Severe acute respiratory syndrome coronavirus 2
  REGION 1..13: note = Table B: HLA-DQA1*03:02-B1*03:03L HLA-DRB1*01:03L HLA-DRB1*04:05L HLA-DRB1*01:02L HLA-DRB1*08:01L HLA-DQA1*05:05-B1*03:19L HLA-DRB1*16:01L HLA-DRB1*04:08L
DIASTDTCFANKH

SEQ ID NO: 8926 - protein, 16 aa, Severe acute respiratory syndrome coronavirus 2
  REGION 1..16: note = Table B: HLA-DQA1*03:02-B1*03:03L HLA-DQA1*05:05-B1*03:19L HLA-DPA1*02:01-B1*13:01L HLA-DRB1*04:08L
IASTDTCFANKHADFD

SEQ ID NO: 8927 - protein, 10 aa, Severe acute respiratory syndrome coronavirus 2
  REGION 1..10: note = Table B: HLA-DQA1*03:02-B1*03:03L HLA-DQA1*05:01-B1*03:01L HLA-DRB1*13:03L HLA-DRB1*01:03L HLA-DQA1*01:02-B1*06:02L HLA-DRB1*08:77L HLA-DPA1*01:03-B1*03:01L HLA-DPA1*03:01-B1*04:02L HLA-DRB1*03:01L HLA-DRB1*14:02L
  REGION 1..10: note = CONT. FROM ABOVE: HLA-DQA1*01-B1*05L HLA-DQA1*05:05-B1*03:19L HL A-DQA1*05:01-B1*02:01L HLA-DRB4*01:01L HLA-DPA1*01:03-B1*04:01L HLA-DPA1*01:03-B1*04:02L HLA-DRB1*12:01L HLA-DPA1*02:01-B1*13:01 L HLA-DPA1*03:01-B1*105:01L HLA-DPA1*01:03-B1*104:01L
  REGION 1..10: note = CONT. FROM ABOVE: HLA-DQA1*05:05-B1*03:01L HLA-DPA1*01:02-B1*04: 01L HLA-DRB1*10:01L HLA-DRB1*16:01L HLA-DQA1*01:03-B1*06:01L HLA -DRB1*08:02L HLA-DQA1*02:01-B1*03:03L HLA-DRB1*15:03L
TWFSQRGGSY

SEQ ID NO: 8928 - protein, 11 aa, Severe acute respiratory syndrome coronavirus 2
  REGION 1..11: note = Table B: HLA-DQA1*03:02-B1*03:03L HLA-DQA1*05:01-B1*03:01L HLA-DRB1*04:03L HLA-DRB1*13:02L HLA-DRB1*13:03L HLA-DRB1*01:03L HLA-DRB1*04:02L HLA-DRB1*04:05L HLA-DRB1*01:02L HLA-DRB4*03:01NL HLA-DRB1*08:04L HLA-DRB1*08:77L HLA-DRB3*02:01L
  REGION 1..11: note = CONT. FROM ABOVE: HLA-DPA1*01:03-B1*03:01L HLA-DPA1*03:01-B1*04: 02L HLA-DRB1*14:01L HLA-DQA1*01-B1*05L HLA-DQA1*05:01-B1*02:01L HLA-DPA1*01:03-B1*04:01L HLA-DRB1*12:01L HLA-DRB1*12:02L HLA-DRB 3*01:01L HLA-DPA1*03:01-B1*105:01L HLA-DQA1*03:01-B1*03:02L
  REGION 1..11: note = CONT. FROM ABOVE: HLA-DRB1*14:54L HLA-DRB1*14:17L HLA-DPA1*01:02 -B1*04:01L HLA-DRB1*07:01L HLA-DRB1*16:01L HLA-DRB1*04:08L HLA-D QA1*02:01-B1*03:03L
GSYTNDKACPL

SEQ ID NO: 8929 - protein, 13 aa, Severe acute respiratory syndrome coronavirus 2
  REGION 1..13: note = Table B: HLA-DQA1*03:02-B1*03:03L HLA-DRB1*01:02L HLA-DPA1*01:03-B1*03:01L HLA-DRB1*12:01L HLA-DPA1*02:01-B1*13:01L HLA-DQA1*03:01-B1*03:02L HLA-DPA1*01:03-B1*104:01L
NDKACPLIAAVIT

SEQ ID NO: 8930 - protein, 10 aa, Severe acute respiratory syndrome coronavirus 2
  REGION 1..10: note = Table B: HLA-DQA1*03:02-B1*03:03L HLA-DQA1*05:01-B1*03:01L HLA-DRB1*04:03L HLA-DRB1*13:02L HLA-DRB1*13:03L HLA-DRB1*01:03L HLA-DRB1*04:02L HLA-DRB1*04:05L HLA-DQA1*01:02-B1*06:02L HLA-DRB1*01:02L HLA-DRB4*03:01NL HLA-DRB1*08:77L HLA-DRB3*02:01L
  REGION 1..10: note = CONT. FROM ABOVE: HLA-DPA1*01:03-B1*03:01L HLA-DPA1*03:01-B1*04: 02L HLA-DRB1*14:01L HLA-DQA1*01:01-B1*05:01L HLA-DRB1*08:01L HLA -DQA1*01-B1*05L HLA-DQA1*05:05-B1*03:19L HLA-DQA1*05:01-B1*02:01 L HLA-DQA1*05:05-B1*03:116L HLA-DRB1*04:10L
  REGION 1..10: note = CONT. FROM ABOVE: HLA-DPA1*01:03-B1*04:02L HLA-DRB1*12:01L HLA-D RB1*12:02L HLA-DPA1*03:01-B1*105:01L HLA-DQA1*03:01-B1*03:02L HL A-DRB1*14:54L HLA-DQA1*05:05-B1*03:01L HLA-DRB1*14:17L HLA-DPA1* 01:02-B1*04:01L HLA-DRB1*07:01L HLA-DRB1*16:01L
  REGION 1..10: note = CONT. FROM ABOVE: HLA-DQA1*01:03-B1*06:01M HLA-DRB1*04:08L HLA-D QA1*02:01-B1*03:03M HLA-DRB1*15:03L
IAAVITREVG

SEQ ID NO: 8931 - protein, 14 aa, Severe acute respiratory syndrome coronavirus 2
  REGION 1..14: note = Table B: HLA-DQA1*03:02-B1*03:03L HLA-DRB1*08:77L HLA-DPA1*03:01-B1*04:02L HLA-DRB1*11:04L HLA-DRB1*14:02L HLA-DRB1*08:01L HLA-DRB1*11:01L HLA-DRB1*04:10L HLA-DRB1*09:01L HLA-DRB3*01:01L HLA-DRB1*08:03L
AAVITREVGFVVPG

SEQ ID NO: 8932 - protein, 10 aa, Severe acute respiratory syndrome coronavirus 2
  REGION 1..10: note = Table B: HLA-DQA1*03:02-B1*03:03M HLA-DRB1*11:02L HLA-DQA1*05:05-B1*03:19M HLA-DQA1*05:05-B1*03:116L HLA-DRB1*09:01L HLA-DPA1*01:03-B1*04:02L HLA-DQA1*03:01-B1*03:02L HLA-DPA1*01:03-B1*104:01L
REVGFVVPGL

SEQ ID NO: 8933 - protein, 10 aa, Severe acute respiratory syndrome coronavirus 2
  REGION 1..10: note = Table B: HLA-DQA1*03:02-B1*03:03M HLA-DQA1*05:01-B1*03:01L HLA-DRB1*04:01L HLA-DRB1*13:03L HLA-DRB1*01:03L HLA-DRB1*04:05L HLA-DQA1*01:02-B1*06:02L HLA-DRB1*01:02L HLA-DRB1*08:77L HLA-DRB3*02:01L HLA-DPA1*01:03-B1*03:01L
  REGION 1..10: note = CONT. FROM ABOVE: HLA-DPA1*03:01-B1*04:02L HLA-DRB1*14:01L HLA-D RB1*11:02L HLA-DRB1*14:02L HLA-DRB1*08:01L HLA-DRB1*11:01L HLA-D QA1*01-B1*05L HLA-DQA1*05:05-B1*03:19M HLA-DQA1*05:01-B1*02:01L HLA-DRB4*01:01L HLA-DPA1*01:03-B1*04:01L
  REGION 1..10: note = CONT. FROM ABOVE: HLA-DQA1*05:05-B1*03:116M HLA-DRB1*09:01L HLA- DPA1*01:03-B1*04:02L HLA-DRB1*12:01L HLA-DPA1*02:01-B1*13:01L HL A-DPA1*03:01-B1*105:01L HLA-DQA1*03:01-B1*03:02M HLA-DPA1*01:03- B1*104:01L HLA-DPA1*01:02-B1*04:01L HLA-DRB1*07:01L
  REGION 1..10: note = CONT. FROM ABOVE: HLA-DRB1*10:01L HLA-DRB1*16:01L HLA-DQA1*01:03 -B1*06:01L HLA-DRB1*08:03L HLA-DQA1*02:01-B1*03:03M HLA-DRB1*15: 03M
FVVPGLPGTI

SEQ ID NO: 8934 - protein, 10 aa, Severe acute respiratory syndrome coronavirus 2
  REGION 1..10: note = Table B: HLA-DQA1*03:02-B1*03:03L HLA-DQA1*05:01-B1*03:01L HLA-DQA1*01:02-B1*06:02L HLA-DQA1*05:05-B1*03:19L HLA-DQA1*03:01-B1*03:02L HLA-DQA1*05:05-B1*03:01L HLA-DQA1*01:03-B1*06:01L HLA-DQA1*02:01-B1*03:03L
VVPGLPGTIL

SEQ ID NO: 8935 - protein, 14 aa, Severe acute respiratory syndrome coronavirus 2
  REGION 1..14: note = Table B: HLA-DQA1*03:02-B1*03:03L HLA-DQA1*05:01-B1*03:01L HLA-DQA1*05:05-B1*03:19L HLA-DPA1*03:01-B1*105:01L HLA-DQA1*02:01-B1*03:03L
VPGLPGTILRTTNG

SEQ ID NO: 8936 - protein, 13 aa, Severe acute respiratory syndrome coronavirus 2
  REGION 1..13: note = Table B: HLA-DQA1*03:02-B1*03:03L HLA-DQA1*05:01-B1*03:01L HLA-DRB1*04:03L HLA-DRB1*13:02L HLA-DRB1*13:03L HLA-DRB1*01:03L HLA-DRB1*04:02L HLA-DRB1*04:05L HLA-DRB1*01:02L HLA-DRB4*03:01NL HLA-DRB1*08:04L HLA-DRB1*08:77L HLA-DRB3*02:01L
  REGION 1..13: note = CONT. FROM ABOVE: HLA-DPA1*01:03-B1*03:01L HLA-DPA1*03:01-B1*04: 02L HLA-DRB1*14:01L HLA-DRB1*11:03L HLA-DRB1*14:02L HLA-DQA1*01: 01-B1*05:01L HLA-DRB1*08:01L HLA-DQA1*01-B1*05L HLA-DQA1*05:05-B 1*03:19L HLA-DQA1*05:01-B1*02:01L HLA-DPA1*01:03-B1*04:01L
  REGION 1..13: note = CONT. FROM ABOVE: HLA-DRB1*04:10L HLA-DRB1*09:01L HLA-DRB1*12:01 L HLA-DRB1*12:02L HLA-DPA1*02:01-B1*13:01L HLA-DPA1*03:01-B1*105 :01L HLA-DRB1*14:54L HLA-DQA1*05:05-B1*03:01L HLA-DRB1*14:17L HL A-DPA1*01:02-B1*04:01L HLA-DRB1*07:01L HLA-DRB1*16:01L
  REGION 1..13: note = CONT. FROM ABOVE: HLA-DRB1*04:08L HLA-DRB1*15:03L
LPGTILRTTNGDF

SEQ ID NO: 8937 - protein, 10 aa, Severe acute respiratory syndrome coronavirus 2
  REGION 1..10: note = Table B: HLA-DQA1*03:02-B1*03:03L HLA-DQA1*05:01-B1*03:01L HLA-DRB1*04:03L HLA-DPA1*03:01-B1*04:02L HLA-DRB1*14:01L HLA-DQA1*01-B1*05L HLA-DQA1*05:01-B1*02:01L HLA-DRB1*12:01L HLA-DQA1*03:01-B1*03:02L HLA-DPA1*01:02-B1*04:01L
  REGION 1..10: note = CONT. FROM ABOVE: HLA-DRB1*16:01L HLA-DQA1*02:01-B1*03:03L HLA-D RB1*15:03L
ILRTTNGDFL

SEQ ID NO: 8938 - protein, 10 aa, Severe acute respiratory syndrome coronavirus 2
  REGION 1..10: note = Table B: HLA-DQA1*03:02-B1*03:03L HLA-DQA1*05:01-B1*03:01L HLA-DRB1*13:02L HLA-DRB1*13:03L HLA-DRB1*01:03M HLA-DRB1*04:05L HLA-DQA1*01:02-B1*06:02M HLA-DRB1*08:77L HLA-DPA1*01:03-B1*03:01L HLA-DPA1*03:01-B1*04:02L
  REGION 1..10: note = CONT. FROM ABOVE: HLA-DRB1*03:01L HLA-DRB1*14:01L HLA-DRB1*14:02 L HLA-DRB1*11:01L HLA-DQA1*01-B1*05L HLA-DQA1*05:05-B1*03:19L HL A-DQA1*05:01-B1*02:01L HLA-DRB4*01:01L HLA-DPA1*01:03-B1*04:01L HLA-DQA1*05:05-B1*03:116L HLA-DPA1*01:03-B1*04:02L
  REGION 1..10: note = CONT. FROM ABOVE: HLA-DPA1*02:01-B1*13:01L HLA-DPA1*03:01-B1*105 :01L HLA-DQA1*03:01-B1*03:02L HLA-DPA1*01:03-B1*104:01L HLA-DPA1 *01:02-B1*04:01L HLA-DRB1*10:01L HLA-DRB1*16:01L HLA-DQA1*01:03- B1*06:01L HLA-DRB1*08:02L HLA-DQA1*02:01-B1*03:03M
  REGION 1..10: note = CONT. FROM ABOVE: HLA-DRB1*15:03L
RTTNGDFLHF

SEQ ID NO: 8939 - protein, 10 aa, Severe acute respiratory syndrome coronavirus 2
  REGION 1..10: note = Table B: HLA-DQA1*03:02-B1*03:03L HLA-DQA1*01:02-B1*06:02L HLA-DPA1*03:01-B1*105:01L HLA-DQA1*01:03-B1*06:01L HLA-DRB1*15:03L
TTNGDFLHFL

SEQ ID NO: 8940 - protein, 16 aa, Severe acute respiratory syndrome coronavirus 2
  REGION 1..16: note = Table B: HLA-DQA1*03:02-B1*03:03L HLA-DRB1*04:01L HLA-DRB1*13:03L HLA-DRB1*04:02L HLA-DRB1*04:04L HLA-DRB1*04:05L HLA-DRB1*08:04L HLA-DRB1*08:77L HLA-DRB3*02:01L HLA-DRB1*03:01L HLA-DRB1*11:02L HLA-DRB1*11:03L HLA-DRB1*11:04L HLA-DRB1*08:01L
  REGION 1..16: note = CONT. FROM ABOVE: HLA-DRB1*11:01L HLA-DQA1*01-B1*05L HLA-DRB1*09 :01L HLA-DPA1*01:03-B1*04:02L HLA-DRB3*01:01L HLA-DQA1*03:01-B1* 03:02L HLA-DRB1*14:54L HLA-DRB1*14:17L HLA-DPA1*01:02-B1*04:01L HLA-DRB1*07:01L HLA-DRB1*08:02L HLA-DRB1*08:03L HLA-DRB1*15:01L
LPRVFSAVGNICYTPS

SEQ ID NO: 8941 - protein, 12 aa, Severe acute respiratory syndrome coronavirus 2
  REGION 1..12: note = Table B: HLA-DQA1*03:02-B1*03:03L HLA-DQA1*05:01-B1*03:01L HLA-DRB1*13:02L HLA-DRB1*13:03L HLA-DRB1*01:02L HLA-DRB4*03:01NL HLA-DRB1*08:77L HLA-DRB3*02:01L HLA-DPA1*01:03-B1*03:01L HLA-DRB1*14:01L HLA-DRB1*11:03L HLA-DPA1*01:03-B1*04:01L
  REGION 1..12: note = CONT. FROM ABOVE: HLA-DRB1*09:01L HLA-DPA1*03:01-B1*105:01L HLA- DQA1*03:01-B1*03:02L HLA-DQA1*05:05-B1*03:01L HLA-DRB1*07:01L HL A-DQA1*01:03-B1*06:01L HLA-DRB1*04:08L
GNICYTPSKLIE

SEQ ID NO: 8942 - protein, 12 aa, Severe acute respiratory syndrome coronavirus 2
  REGION 1..12: note = Table B: HLA-DQA1*03:02-B1*03:03L HLA-DQA1*01:02-B1*06:02L HLA-DQA1*05:01-B1*02:01L HLA-DQA1*03:01-B1*03:02L HLA-DQA1*01:03-B1*06:01L HLA-DQA1*02:01-B1*03:03L
TPSKLIEYTDFA

SEQ ID NO: 8943 - protein, 10 aa, Severe acute respiratory syndrome coronavirus 2
  REGION 1..10: note = Table B: HLA-DQA1*03:02-B1*03:03M HLA-DRB1*13:03L HLA-DPA1*03:01-B1*04:02L HLA-DRB1*11:02L HLA-DRB1*11:01L HLA-DQA1*01-B1*05L HLA-DQA1*05:05-B1*03:19L HLA-DQA1*05:01-B1*02:01L HLA-DPA1*01:03-B1*04:01L
  REGION 1..10: note = CONT. FROM ABOVE: HLA-DRB1*09:01L HLA-DPA1*01:03-B1*04:02L HLA-D PA1*03:01-B1*105:01L HLA-DQA1*03:01-B1*03:02L HLA-DPA1*01:03-B1* 104:01L HLA-DPA1*01:02-B1*04:01L HLA-DRB1*16:01L HLA-DQA1*01:03- B1*06:01L HLA-DQA1*02:01-B1*03:03L HLA-DRB1*15:03L
IEYTDFATSA

SEQ ID NO: 8944 - protein, 13 aa, Severe acute respiratory syndrome coronavirus 2
  REGION 1..13: note = Table B: HLA-DQA1*03:02-B1*03:03L HLA-DRB1*04:03L
TDFATSACVLAAE

SEQ ID NO: 8945 - protein, 11 aa, Severe acute respiratory syndrome coronavirus 2
  REGION 1..11: note = Table B: HLA-DQA1*03:02-B1*03:03L HLA-DQA1*05:01-B1*03:01L HLA-DRB1*13:02L HLA-DRB1*13:03L HLA-DRB1*01:03L HLA-DRB1*04:02L HLA-DRB1*04:05L HLA-DQA1*01:02-B1*06:02L HLA-DRB4*03:01NL HLA-DRB1*08:77L HLA-DRB3*02:01L HLA-DPA1*01:03-B1*03:01L
  REGION 1..11: note = CONT. FROM ABOVE: HLA-DRB1*14:01L HLA-DQA1*01-B1*05L HLA-DQA1*05 :05-B1*03:19L HLA-DQA1*05:01-B1*02:01L HLA-DRB1*12:01L HLA-DPA1* 02:01-B1*13:01L HLA-DPA1*03:01-B1*105:01L HLA-DRB1*14:54L HLA-DQ A1*05:05-B1*03:01L HLA-DRB1*14:17L HLA-DPA1*01:02-B1*04:01L
  REGION 1..11: note = CONT. FROM ABOVE: HLA-DRB1*07:01L HLA-DQA1*01:03-B1*06:01L HLA-D RB1*04:08L
IFKDASGKPVP

SEQ ID NO: 8946 - protein, 10 aa, Severe acute respiratory syndrome coronavirus 2
  REGION 1..10: note = Table B: HLA-DQA1*03:02-B1*03:03L HLA-DQA1*05:01-B1*03:01L HLA-DRB1*13:03L HLA-DRB1*01:03L HLA-DRB1*04:02L HLA-DQA1*01:02-B1*06:02L HLA-DRB4*03:01NL HLA-DRB1*08:77L HLA-DPA1*01:03-B1*03:01L HLA-DPA1*03:01-B1*04:02L
  REGION 1..10: note = CONT. FROM ABOVE: HLA-DRB1*03:01L HLA-DRB1*14:02L HLA-DQA1*01-B1 *05L HLA-DQA1*05:05-B1*03:19L HLA-DQA1*05:01-B1*02:01L HLA-DRB4* 01:01L HLA-DPA1*01:03-B1*04:01L HLA-DPA1*01:03-B1*04:02L HLA-DRB 1*12:01L HLA-DQA1*03:01-B1*03:02L HLA-DPA1*01:03-B1*104:01L
  REGION 1..10: note = CONT. FROM ABOVE: HLA-DPA1*01:02-B1*04:01L HLA-DRB1*10:01L HLA-D RB1*16:01L HLA-DQA1*02:01-B1*03:03L HLA-DRB1*15:03L
KDASGKPVPY

SEQ ID NO: 8947 - protein, 12 aa, Severe acute respiratory syndrome coronavirus 2
  REGION 1..12: note = Table B: HLA-DQA1*03:02-B1*03:03L HLA-DQA1*05:01-B1*03:01L
DASGKPVPYCYD

SEQ ID NO: 8948 - protein, 16 aa, Severe acute respiratory syndrome coronavirus 2
  REGION 1..16: note = Table B: HLA-DQA1*03:02-B1*03:03L HLA-DQA1*05:01-B1*03:01L HLA-DRB1*04:01L HLA-DRB1*13:02L HLA-DPA1*01:03-B1*03:01L HLA-DPA1*03:01-B1*04:02L HLA-DRB1*03:01L HLA-DRB1*14:02L HLA-DQA1*05:05-B1*03:19L HLA-DRB4*01:01L
  REGION 1..16: note = CONT. FROM ABOVE: HLA-DPA1*01:03-B1*04:02L HLA-DRB3*01:01L HLA-D PA1*01:03-B1*104:01L HLA-DQA1*05:05-B1*03:01L HLA-DQA1*01:03-B1* 06:01L HLA-DRB1*08:03L
KPVPYCYDTNVLEGSV

SEQ ID NO: 8949 - protein, 15 aa, Severe acute respiratory syndrome coronavirus 2
  REGION 1..15: note = Table B: HLA-DQA1*03:02-B1*03:03L HLA-DQA1*05:05-B1*03:19L HLA-DQA1*05:01-B1*02:01L
VPYCYDTNVLEGSVA

SEQ ID NO: 8950 - protein, 12 aa, Severe acute respiratory syndrome coronavirus 2
  REGION 1..12: note = Table B: HLA-DQA1*03:02-B1*03:03L HLA-DQA1*03:01-B1*03:02L
DTNVLEGSVAYE

SEQ ID NO: 8951 - protein, 10 aa, Severe acute respiratory syndrome coronavirus 2
  REGION 1..10: note = Table B: HLA-DQA1*03:02-B1*03:03L HLA-DQA1*03:01-B1*03:02L
LEGSVAYESL

SEQ ID NO: 8952 - protein, 10 aa, Severe acute respiratory syndrome coronavirus 2
  REGION 1..10: note = Table B: HLA-DQA1*03:02-B1*03:03L HLA-DRB1*04:03L HLA-DQA1*01-B1*05L HLA-DQA1*05:01-B1*02:01L HLA-DPA1*03:01-B1*105:01L HLA-DQA1*03:01-B1*03:02L HLA-DPA1*01:02-B1*04:01L HLA-DQA1*01:03-B1*06:01L
  REGION 1..10: note = CONT. FROM ABOVE: HLA-DQA1*02:01-B1*03:03L
SVAYESLRPD

SEQ ID NO: 8953 - protein, 10 aa, Severe acute respiratory syndrome coronavirus 2
  REGION 1..10: note = Table B: HLA-DQA1*03:02-B1*03:03L HLA-DQA1*05:01-B1*03:01L HLA-DRB1*04:03L HLA-DRB1*13:03L HLA-DRB1*01:03L HLA-DRB1*04:02L HLA-DRB1*04:05L HLA-DRB4*03:01NL HLA-DQA1*01-B1*05L HLA-DQA1*05:01-B1*02:01L HLA-DPA1*03:01-B1*105:01L
  REGION 1..10: note = CONT. FROM ABOVE: HLA-DQA1*03:01-B1*03:02L HLA-DRB1*14:17L HLA-D PA1*01:02-B1*04:01L HLA-DRB1*16:01L HLA-DQA1*01:03-B1*06:01L HLA -DQA1*02:01-B1*03:03L
VAYESLRPDT

SEQ ID NO: 8954 - protein, 10 aa, Severe acute respiratory syndrome coronavirus 2
  REGION 1..10: note = Table B: HLA-DQA1*03:02-B1*03:03L HLA-DQA1*05:01-B1*03:01L HLA-DRB1*13:03L HLA-DRB1*01:03L HLA-DQA1*01:02-B1*06:02L HLA-DRB4*03:01NL HLA-DRB1*08:77L HLA-DPA1*01:03-B1*03:01L HLA-DPA1*03:01-B1*04:02L HLA-DRB1*03:01L HLA-DRB1*14:02L
  REGION 1..10: note = CONT. FROM ABOVE: HLA-DQA1*01-B1*05L HLA-DQA1*05:05-B1*03:19L HL A-DQA1*05:01-B1*02:01L HLA-DRB4*01:01L HLA-DPA1*01:03-B1*04:01L HLA-DQA1*05:05-B1*03:116L HLA-DPA1*01:03-B1*04:02L HLA-DRB1*12:0 1L HLA-DQA1*03:01-B1*03:02L HLA-DPA1*01:03-B1*104:01L
  REGION 1..10: note = CONT. FROM ABOVE: HLA-DPA1*01:02-B1*04:01L HLA-DRB1*10:01L HLA-D RB1*16:01L HLA-DQA1*01:03-B1*06:01L HLA-DQA1*02:01-B1*03:03L HLA -DRB1*15:03L
YESLRPDTRY

SEQ ID NO: 8955 - protein, 12 aa, Severe acute respiratory syndrome coronavirus 2
  REGION 1..12: note = Table B: HLA-DQA1*03:02-B1*03:03L HLA-DRB1*04:01L HLA-DRB1*04:04L HLA-DQA1*01:02-B1*06:02L HLA-DRB1*08:04L HLA-DPA1*01:03-B1*03:01L HLA-DPA1*03:01-B1*04:02L HLA-DRB1*03:01L HLA-DRB1*11:04L HLA-DRB1*14:02L HLA-DRB1*08:01L
  REGION 1..12: note = CONT. FROM ABOVE: HLA-DRB1*11:01L HLA-DRB5*01:01L HLA-DQA1*01-B1 *05L HLA-DRB4*02:01NL HLA-DPA1*01:03-B1*04:01L HLA-DRB1*04:10L H LA-DRB1*09:01L HLA-DRB3*01:01L HLA-DPA1*02:01-B1*13:01L HLA-DPA1 *01:03-B1*104:01L HLA-DQA1*01:03-B1*06:01L HLA-DRB1*08:03L
  REGION 1..12: note = CONT. FROM ABOVE: HLA-DRB1*15:01L
TRYVLMDGSIIQ

SEQ ID NO: 8956 - protein, 10 aa, Severe acute respiratory syndrome coronavirus 2
  REGION 1..10: note = Table B: HLA-DQA1*03:02-B1*03:03L HLA-DQA1*05:01-B1*03:01L HLA-DRB1*13:03L HLA-DRB1*01:03L HLA-DQA1*01:02-B1*06:02L HLA-DRB1*08:77L HLA-DPA1*03:01-B1*04:02L HLA-DRB1*14:01L HLA-DRB1*14:02M HLA-DQA1*05:05-B1*03:19L
  REGION 1..10: note = CONT. FROM ABOVE: HLA-DQA1*05:01-B1*02:01L HLA-DRB4*01:01L HLA-D PA1*01:03-B1*04:01L HLA-DQA1*05:05-B1*03:116L HLA-DPA1*01:03-B1* 04:02L HLA-DPA1*02:01-B1*13:01L HLA-DPA1*03:01-B1*105:01L HLA-DQ A1*03:01-B1*03:02L HLA-DPA1*01:02-B1*04:01L HLA-DRB1*10:01L
  REGION 1..10: note = CONT. FROM ABOVE: HLA-DRB1*16:01L HLA-DQA1*01:03-B1*06:01L HLA-D RB1*08:03L HLA-DQA1*02:01-B1*03:03L HLA-DRB1*15:03L
VLMDGSIIQF

SEQ ID NO: 8957 - protein, 10 aa, Severe acute respiratory syndrome coronavirus 2
  REGION 1..10: note = Table B: HLA-DQA1*03:02-B1*03:03L HLA-DQA1*05:01-B1*03:01L HLA-DRB1*13:03L HLA-DQA1*01:02-B1*06:02L HLA-DRB1*08:77L HLA-DPA1*01:03-B1*03:01L HLA-DRB1*03:01L HLA-DRB1*14:02L HLA-DQA1*01-B1*05L HLA-DQA1*05:05-B1*03:19L
  REGION 1..10: note = CONT. FROM ABOVE: HLA-DQA1*05:01-B1*02:01L HLA-DRB4*01:01L HLA-D PA1*01:03-B1*04:01L HLA-DPA1*01:03-B1*04:02L HLA-DPA1*03:01-B1*1 05:01L HLA-DQA1*03:01-B1*03:02L HLA-DPA1*01:03-B1*104:01L HLA-DR B1*16:01L HLA-DQA1*01:03-B1*06:01L HLA-DQA1*02:01-B1*03:03L
  REGION 1..10: note = CONT. FROM ABOVE: HLA-DRB1*15:03L
GSIIQFPNTY

SEQ ID NO: 8958 - protein, 10 aa, Severe acute respiratory syndrome coronavirus 2
  REGION 1..10: note = Table B: HLA-DQA1*03:02-B1*03:03L HLA-DQA1*05:01-B1*03:01L HLA-DRB1*04:03L HLA-DRB1*04:02L HLA-DQA1*01:02-B1*06:02L HLA-DRB1*01:02L HLA-DRB3*02:01L HLA-DPA1*03:01-B1*04:02L HLA-DRB1*14:01L HLA-DQA1*01-B1*05L HLA-DQA1*05:05-B1*03:19L
  REGION 1..10: note = CONT. FROM ABOVE: HLA-DQA1*05:01-B1*02:01L HLA-DRB1*09:01L HLA-D RB1*12:01L HLA-DPA1*02:01-B1*13:01L HLA-DPA1*03:01-B1*105:01L HL A-DQA1*03:01-B1*03:02L HLA-DRB1*14:17L HLA-DPA1*01:02-B1*04:01L HLA-DRB1*16:01L HLA-DQA1*01:03-B1*06:01L
  REGION 1..10: note = CONT. FROM ABOVE: HLA-DQA1*02:01-B1*03:03L HLA-DRB1*15:03L
SIIQFPNTYL

SEQ ID NO: 8959 - protein, 10 aa, Severe acute respiratory syndrome coronavirus 2
  REGION 1..10: note = Table B: HLA-DQA1*03:02-B1*03:03L HLA-DQA1*05:01-B1*03:01L HLA-DRB1*04:03L HLA-DRB1*13:03L HLA-DRB1*04:02L HLA-DQA1*01:02-B1*06:02L HLA-DQA1*01-B1*05L HLA-DQA1*05:01-B1*02:01L HLA-DQA1*03:01-B1*03:02L
  REGION 1..10: note = CONT. FROM ABOVE: HLA-DQA1*05:05-B1*03:01L HLA-DRB1*14:17L HLA-D PA1*01:02-B1*04:01L HLA-DRB1*16:01L HLA-DQA1*01:03-B1*06:01L HLA -DQA1*02:01-B1*03:03L
PNTYLEGSVR

SEQ ID NO: 8960 - protein, 10 aa, Severe acute respiratory syndrome coronavirus 2
  REGION 1..10: note = Table B: HLA-DQA1*03:02-B1*03:03L HLA-DQA1*05:01-B1*03:01L HLA-DQA1*01:02-B1*06:02L HLA-DRB1*01:02L HLA-DPA1*03:01-B1*04:02L HLA-DQA1*05:05-B1*03:19L HLA-DQA1*05:01-B1*02:01L HLA-DQA1*05:05-B1*03:116L
  REGION 1..10: note = CONT. FROM ABOVE: HLA-DPA1*02:01-B1*13:01L HLA-DPA1*03:01-B1*105 :01L HLA-DQA1*03:01-B1*03:02L HLA-DPA1*01:02-B1*04:01L HLA-DRB1* 16:01L HLA-DQA1*01:03-B1*06:01L HLA-DRB1*08:03L HLA-DQA1*02:01-B 1*03:03L HLA-DRB1*15:03L
NTYLEGSVRV

SEQ ID NO: 8961 - protein, 10 aa, Severe acute respiratory syndrome coronavirus 2
  REGION 1..10: note = Table B: HLA-DQA1*03:02-B1*03:03L HLA-DQA1*05:01-B1*03:01L HLA-DRB1*04:05L HLA-DQA1*01:02-B1*06:02L HLA-DRB1*01:02L HLA-DPA1*03:01-B1*04:02L HLA-DRB1*14:02L HLA-DQA1*01-B1*05L HLA-DQA1*05:05-B1*03:19L HLA-DQA1*05:01-B1*02:01L
  REGION 1..10: note = CONT. FROM ABOVE: HLA-DQA1*05:05-B1*03:116L HLA-DPA1*02:01-B1*13 :01L HLA-DPA1*03:01-B1*105:01L HLA-DQA1*03:01-B1*03:02L HLA-DPA1 *01:03-B1*104:01L HLA-DPA1*01:02-B1*04:01L HLA-DRB1*16:01L HLA-D QA1*01:03-B1*06:01L HLA-DRB1*08:03L HLA-DQA1*02:01-B1*03:03L
  REGION 1..10: note = CONT. FROM ABOVE: HLA-DRB1*15:03L
TYLEGSVRVV

SEQ ID NO: 8962 - protein, 10 aa, Severe acute respiratory syndrome coronavirus 2
  REGION 1..10: note = Table B: HLA-DQA1*03:02-B1*03:03L HLA-DQA1*03:01-B1*03:02L
LEGSVRVVTT

SEQ ID NO: 8963 - protein, 12 aa, Severe acute respiratory syndrome coronavirus 2
  REGION 1..12: note = Table B: HLA-DQA1*03:02-B1*03:03L HLA-DRB1*04:05L HLA-DRB1*04:10L HLA-DRB1*14:54L HLA-DQA1*05:05-B1*03:01L
EGSVRVVTTFDS

SEQ ID NO: 8964 - protein, 12 aa, Severe acute respiratory syndrome coronavirus 2
  REGION 1..12: note = Table B: HLA-DQA1*03:02-B1*03:03L HLA-DQA1*05:01-B1*03:01L HLA-DRB1*13:02L HLA-DRB1*13:03L HLA-DRB1*01:03L HLA-DRB1*04:04L HLA-DRB1*04:05L HLA-DQA1*01:02-B1*06:02L HLA-DRB1*01:02L HLA-DRB4*03:01NL HLA-DPA1*01:03-B1*03:01L HLA-DRB1*14:01L
  REGION 1..12: note = CONT. FROM ABOVE: HLA-DQA1*01-B1*05L HLA-DQA1*05:01-B1*02:01L HL A-DRB1*04:10L HLA-DRB1*12:01L HLA-DRB1*12:02L HLA-DPA1*02:01-B1* 13:01L HLA-DPA1*03:01-B1*105:01L HLA-DQA1*03:01-B1*03:02L HLA-DR B1*14:54L HLA-DPA1*01:03-B1*104:01L HLA-DQA1*05:05-B1*03:01L
  REGION 1..12: note = CONT. FROM ABOVE: HLA-DRB1*16:01L HLA-DQA1*01:03-B1*06:01L HLA-D RB1*04:08L HLA-DQA1*02:01-B1*03:03L HLA-DRB1*15:03L
GSVRVVTTFDSE

SEQ ID NO: 8965 - protein, 10 aa, Severe acute respiratory syndrome coronavirus 2
  REGION 1..10: note = Table B: HLA-DQA1*03:02-B1*03:03L HLA-DQA1*05:01-B1*03:01L HLA-DRB1*04:01L HLA-DRB1*04:03L HLA-DRB1*13:02L HLA-DRB1*13:03M HLA-DRB1*01:03M HLA-DRB1*04:02L HLA-DQA1*01:02-B1*06:02M HLA-DRB1*01:01L HLA-DRB4*03:01NL HLA-DRB1*08:77L
  REGION 1..10: note = CONT. FROM ABOVE: HLA-DPA1*01:03-B1*03:01L HLA-DPA1*03:01-B1*04: 02L HLA-DRB1*03:01M HLA-DRB1*14:01L HLA-DRB1*11:02L HLA-DRB1*11: 03L HLA-DRB1*11:04L HLA-DRB1*14:02M HLA-DRB1*11:01L HLA-DRB5*01: 01L HLA-DQA1*01-B1*05L HLA-DQA1*05:05-B1*03:19M
  REGION 1..10: note = CONT. FROM ABOVE: HLA-DQA1*05:01-B1*02:01M HLA-DRB4*01:01L HLA-D PA1*01:03-B1*04:01L HLA-DQA1*05:05-B1*03:116L HLA-DPA1*01:03-B1* 04:02M HLA-DRB1*12:01L HLA-DPA1*02:01-B1*13:01L HLA-DPA1*03:01-B 1*105:01L HLA-DQA1*03:01-B1*03:02L HLA-DPA1*01:03-B1*104:01L
  REGION 1..10: note = CONT. FROM ABOVE: HLA-DQA1*05:05-B1*03:01L HLA-DRB1*14:17L HLA-D PA1*01:02-B1*04:01L HLA-DRB1*10:01L HLA-DRB1*16:01L HLA-DQA1*01: 03-B1*06:01L HLA-DRB1*08:02L HLA-DQA1*02:01-B1*03:03M HLA-DRB1*1 5:03L
RVVTTFDSEY

SEQ ID NO: 8966 - protein, 13 aa, Severe acute respiratory syndrome coronavirus 2
  REGION 1..13: note = Table B: HLA-DQA1*03:02-B1*03:03L HLA-DQA1*02:01-B1*03:03L
ERSEAGVCVSTSG

SEQ ID NO: 8967 - protein, 12 aa, Severe acute respiratory syndrome coronavirus 2
  REGION 1..12: note = Table B: HLA-DQA1*03:02-B1*03:03L HLA-DQA1*05:01-B1*03:01L HLA-DQA1*05:05-B1*03:19L HLA-DPA1*03:01-B1*105:01L HLA-DQA1*03:01-B1*03:02L HLA-DQA1*02:01-B1*03:03L
SEAGVCVSTSGR

SEQ ID NO: 8968 - protein, 13 aa, Severe acute respiratory syndrome coronavirus 2
  REGION 1..13: note = Table B: HLA-DQA1*03:02-B1*03:03L HLA-DQA1*05:01-B1*03:01L HLA-DQA1*03:01-B1*03:02L
VSTSGRWVLNNDY

SEQ ID NO: 8969 - protein, 12 aa, Severe acute respiratory syndrome coronavirus 2
  REGION 1..12: note = Table B: HLA-DQA1*03:02-B1*03:03L HLA-DQA1*05:01-B1*03:01L HLA-DPA1*03:01-B1*04:02L HLA-DRB1*14:02L HLA-DQA1*01-B1*05L HLA-DRB1*12:01L HLA-DPA1*03:01-B1*105:01L HLA-DQA1*03:01-B1*03:02L HLA-DPA1*01:03-B1*104:01L
  REGION 1..12: note = CONT. FROM ABOVE: HLA-DQA1*05:05-B1*03:01L HLA-DPA1*01:02-B1*04: 01L HLA-DRB1*15:03L
TSGRWVLNNDYY

SEQ ID NO: 8970 - protein, 13 aa, Severe acute respiratory syndrome coronavirus 2
  REGION 1..13: note = Table B: HLA-DQA1*03:02-B1*03:03L HLA-DRB1*13:02L HLA-DRB1*13:03L HLA-DRB1*04:04L HLA-DRB1*08:04L HLA-DRB1*11:04L HLA-DRB1*11:01L HLA-DRB3*01:01L HLA-DPA1*02:01-B1*13:01L HLA-DRB1*14:54L HLA-DQA1*05:05-B1*03:01L HLA-DRB1*14:17L
WVLNNDYYRSLPG

SEQ ID NO: 8971 - protein, 10 aa, Severe acute respiratory syndrome coronavirus 2
  REGION 1..10: note = Table B: HLA-DQA1*03:02-B1*03:03L HLA-DQA1*05:01-B1*03:01L HLA-DRB1*04:03L HLA-DRB1*13:03L HLA-DRB1*01:03L HLA-DRB1*04:05M HLA-DQA1*01:02-B1*06:02M HLA-DRB1*01:01L HLA-DRB1*01:02L HLA-DRB4*03:01NL HLA-DRB1*08:77L HLA-DPA1*01:03-B1*03:01L
  REGION 1..10: note = CONT. FROM ABOVE: HLA-DPA1*03:01-B1*04:02L HLA-DRB1*14:01L HLA-D RB1*11:03L HLA-DRB1*14:02L HLA-DQA1*01:01-B1*05:01L HLA-DRB1*08: 01L HLA-DRB1*11:01L HLA-DQA1*01-B1*05L HLA-DQA1*05:05-B1*03:19L HLA-DQA1*05:01-B1*02:01L HLA-DRB4*01:01L
  REGION 1..10: note = CONT. FROM ABOVE: HLA-DPA1*01:03-B1*04:01L HLA-DQA1*05:05-B1*03: 116L HLA-DPA1*01:03-B1*04:02L HLA-DRB1*12:01L HLA-DPA1*02:01-B1* 13:01M HLA-DPA1*03:01-B1*105:01L HLA-DQA1*03:01-B1*03:02L HLA-DP A1*01:03-B1*104:01L HLA-DQA1*05:05-B1*03:01L
  REGION 1..10: note = CONT. FROM ABOVE: HLA-DPA1*01:02-B1*04:01L HLA-DRB1*07:01L HLA-D RB1*10:01L HLA-DRB1*16:01L HLA-DQA1*01:03-B1*06:01M HLA-DRB1*08: 02L HLA-DRB1*08:03L HLA-DQA1*02:01-B1*03:03L HLA-DRB1*15:03L
DYYRSLPGVF

SEQ ID NO: 8972 - protein, 13 aa, Severe acute respiratory syndrome coronavirus 2
  REGION 1..13: note = Table B: HLA-DQA1*03:02-B1*03:03L HLA-DQA1*05:01-B1*03:01L HLA-DRB1*04:03L HLA-DRB1*04:05L HLA-DQA1*01:02-B1*06:02L HLA-DRB1*01:02L HLA-DRB3*02:01L HLA-DPA1*01:03-B1*03:01L HLA-DPA1*03:01-B1*04:02L HLA-DQA1*01-B1*05L
  REGION 1..13: note = CONT. FROM ABOVE: HLA-DQA1*05:01-B1*02:01L HLA-DPA1*01:03-B1*04: 01L HLA-DPA1*01:03-B1*04:02L HLA-DRB1*12:01L HLA-DPA1*02:01-B1*1 3:01L HLA-DPA1*03:01-B1*105:01L HLA-DQA1*03:01-B1*03:02L HLA-DQA 1*05:05-B1*03:01L HLA-DPA1*01:02-B1*04:01L HLA-DRB1*16:01L
  REGION 1..13: note = CONT. FROM ABOVE: HLA-DQA1*01:03-B1*06:01L HLA-DQA1*02:01-B1*03: 03L HLA-DRB1*15:03L
LPGVFCGVDAVNL

SEQ ID NO: 8973 - protein, 10 aa, Severe acute respiratory syndrome coronavirus 2
  REGION 1..10: note = Table B: HLA-DQA1*03:02-B1*03:03L HLA-DQA1*05:05-B1*03:19L HLA-DQA1*03:01-B1*03:02L
VDAVNLLTNM

SEQ ID NO: 8974 - protein, 10 aa, Severe acute respiratory syndrome coronavirus 2
  REGION 1..10: note = Table B: HLA-DQA1*03:02-B1*03:03L HLA-DQA1*05:01-B1*03:01L HLA-DRB1*04:05L HLA-DQA1*01:02-B1*06:02L HLA-DPA1*03:01-B1*04:02L HLA-DQA1*01-B1*05L HLA-DQA1*05:05-B1*03:19L HLA-DQA1*05:01-B1*02:01L
  REGION 1..10: note = CONT. FROM ABOVE: HLA-DPA1*03:01-B1*105:01L HLA-DQA1*03:01-B1*03 :02L HLA-DQA1*05:05-B1*03:01L HLA-DPA1*01:02-B1*04:01L HLA-DQA1* 01:03-B1*06:01L HLA-DQA1*02:01-B1*03:03L
MFTPLIQPIG

SEQ ID NO: 8975 - protein, 11 aa, Severe acute respiratory syndrome coronavirus 2
  REGION 1..11: note = Table B: HLA-DQA1*03:02-B1*03:03L
FTPLIQPIGAL

SEQ ID NO: 8976 - protein, 11 aa, Severe acute respiratory syndrome coronavirus 2
  REGION 1..11: note = Table B: HLA-DQA1*03:02-B1*03:03L HLA-DRB1*04:03L HLA-DRB1*04:02L HLA-DRB4*03:01NL HLA-DQA1*05:01-B1*02:01L HLA-DRB1*14:17L HLA-DQA1*02:01-B1*03:03L
TPLIQPIGALD

SEQ ID NO: 8977 - protein, 12 aa, Severe acute respiratory syndrome coronavirus 2
  REGION 1..12: note = Table B: HLA-DQA1*03:02-B1*03:03L HLA-DQA1*05:01-B1*03:01L HLA-DRB1*13:02L HLA-DRB1*13:03L HLA-DRB1*01:03L HLA-DRB1*04:02L HLA-DRB1*04:04L HLA-DRB1*04:05L HLA-DQA1*01:02-B1*06:02L HLA-DRB1*01:02L HLA-DRB4*03:01NL HLA-DRB1*08:77L
  REGION 1..12: note = CONT. FROM ABOVE: HLA-DPA1*01:03-B1*03:01L HLA-DRB1*14:01L HLA-D RB1*11:03L HLA-DQA1*01-B1*05L HLA-DQA1*05:05-B1*03:19L HLA-DQA1* 05:01-B1*02:01L HLA-DRB1*04:10L HLA-DRB1*12:01L HLA-DRB1*12:02L HLA-DPA1*03:01-B1*105:01L HLA-DQA1*03:01-B1*03:02L
  REGION 1..12: note = CONT. FROM ABOVE: HLA-DRB1*14:54L HLA-DQA1*05:05-B1*03:01L HLA-D RB1*07:01L HLA-DRB1*10:01L HLA-DRB1*16:01L HLA-DQA1*01:03-B1*06: 01L HLA-DRB1*04:08L HLA-DQA1*02:01-B1*03:03L HLA-DRB1*15:03L
IQPIGALDISAS

SEQ ID NO: 8978 - protein, 12 aa, Severe acute respiratory syndrome coronavirus 2
  REGION 1..12: note = Table B: HLA-DQA1*03:02-B1*03:03L HLA-DQA1*05:01-B1*03:01L HLA-DRB1*04:03L HLA-DQA1*05:05-B1*03:19L HLA-DPA1*03:01-B1*105:01L HLA-DQA1*03:01-B1*03:02L HLA-DQA1*05:05-B1*03:01L HLA-DQA1*02:01-B1*03:03L
LDISASIVAGGI

SEQ ID NO: 8979 - protein, 12 aa, Severe acute respiratory syndrome coronavirus 2
  REGION 1..12: note = Table B: HLA-DQA1*03:02-B1*03:03L HLA-DRB1*04:03L HLA-DQA1*05:01-B1*02:01L HLA-DPA1*03:01-B1*105:01L HLA-DQA1*03:01-B1*03:02L HLA-DRB1*04:08L
DISASIVAGGIV

SEQ ID NO: 8980 - protein, 12 aa, Severe acute respiratory syndrome coronavirus 2
  REGION 1..12: note = Table B: HLA-DQA1*03:02-B1*03:03L HLA-DRB1*04:03L HLA-DPA1*03:01-B1*105:01L HLA-DQA1*03:01-B1*03:02L
ISASIVAGGIVA

SEQ ID NO: 8981 - protein, 10 aa, Severe acute respiratory syndrome coronavirus 2
  REGION 1..10: note = Table B: HLA-DQA1*03:02-B1*03:03M HLA-DQA1*05:01-B1*03:01L HLA-DQA1*01:02-B1*06:02L HLA-DRB1*01:02L HLA-DPA1*03:01-B1*04:02L HLA-DRB1*14:01L HLA-DRB1*14:02L HLA-DQA1*05:05-B1*03:19L HLA-DQA1*05:01-B1*02:01L
  REGION 1..10: note = CONT. FROM ABOVE: HLA-DQA1*05:05-B1*03:116L HLA-DRB1*09:01L HLA- DPA1*02:01-B1*13:01L HLA-DPA1*03:01-B1*105:01L HLA-DQA1*03:01-B1 *03:02L HLA-DPA1*01:03-B1*104:01L HLA-DPA1*01:02-B1*04:01L HLA-D RB1*10:01L HLA-DRB1*16:01L HLA-DQA1*01:03-B1*06:01L
  REGION 1..10: note = CONT. FROM ABOVE: HLA-DRB1*08:03L HLA-DQA1*02:01-B1*03:03L HLA-D RB1*15:03L
SIVAGGIVAI

SEQ ID NO: 8982 - protein, 11 aa, Severe acute respiratory syndrome coronavirus 2
  REGION 1..11: note = Table B: HLA-DQA1*03:02-B1*03:03L HLA-DQA1*05:01-B1*03:01L HLA-DQA1*01:02-B1*06:02L HLA-DQA1*05:05-B1*03:19L HLA-DQA1*05:05-B1*03:01L HLA-DQA1*01:03-B1*06:01L HLA-DQA1*02:01-B1*03:03L
VAGGIVAIVVT

SEQ ID NO: 8983 - protein, 11 aa, Severe acute respiratory syndrome coronavirus 2
  REGION 1..11: note = Table B: HLA-DQA1*03:02-B1*03:03L HLA-DRB1*04:03L HLA-DRB1*04:02L HLA-DQA1*03:01-B1*03:02L HLA-DRB1*14:17L HLA-DRB1*16:01L HLA-DQA1*02:01-B1*03:03L
GEYSHVVAFNT

SEQ ID NO: 8984 - protein, 10 aa, Severe acute respiratory syndrome coronavirus 2
  REGION 1..10: note = Table B: HLA-DQA1*03:02-B1*03:03L HLA-DQA1*05:01-B1*03:01L HLA-DRB1*04:03L HLA-DRB1*13:03L HLA-DRB1*04:02L HLA-DRB1*04:05L HLA-DQA1*01:02-B1*06:02L HLA-DRB1*01:02L HLA-DRB3*02:01L HLA-DPA1*01:03-B1*03:01L HLA-DPA1*03:01-B1*04:02L
  REGION 1..10: note = CONT. FROM ABOVE: HLA-DRB1*14:01L HLA-DRB1*14:02L HLA-DRB1*08:01 L HLA-DQA1*01-B1*05L HLA-DQA1*05:05-B1*03:19L HLA-DQA1*05:01-B1* 02:01L HLA-DPA1*01:03-B1*04:01L HLA-DQA1*05:05-B1*03:116L HLA-DP A1*01:03-B1*04:02L HLA-DRB1*12:01L HLA-DPA1*02:01-B1*13:01L
  REGION 1..10: note = CONT. FROM ABOVE: HLA-DPA1*03:01-B1*105:01L HLA-DQA1*03:01-B1*03 :02L HLA-DQA1*05:05-B1*03:01L HLA-DPA1*01:02-B1*04:01L HLA-DRB1* 16:01L HLA-DQA1*01:03-B1*06:01L HLA-DQA1*02:01-B1*03:03L HLA-DRB 1*15:03L
YSHVVAFNTL

SEQ ID NO: 8985 - protein, 10 aa, Severe acute respiratory syndrome coronavirus 2
  REGION 1..10: note = Table B: HLA-DQA1*03:02-B1*03:03L HLA-DRB1*04:03L HLA-DQA1*01-B1*05L HLA-DQA1*03:01-B1*03:02L HLA-DPA1*01:02-B1*04:01L HLA-DQA1*01:03-B1*06:01L HLA-DQA1*02:01-B1*03:03L
SHVVAFNTLL

SEQ ID NO: 8986 - protein, 10 aa, Severe acute respiratory syndrome coronavirus 2
  REGION 1..10: note = Table B: HLA-DQA1*03:02-B1*03:03L HLA-DQA1*05:01-B1*03:01L HLA-DRB1*04:03L HLA-DQA1*01:02-B1*06:02L HLA-DPA1*03:01-B1*04:02L HLA-DRB1*14:01L HLA-DRB1*14:02L HLA-DQA1*05:05-B1*03:19L HLA-DQA1*05:01-B1*02:01L
  REGION 1..10: note = CONT. FROM ABOVE: HLA-DPA1*01:03-B1*04:01L HLA-DRB1*12:01L HLA-D PA1*02:01-B1*13:01L HLA-DPA1*03:01-B1*105:01L HLA-DQA1*01:03-B1* 06:01L HLA-DQA1*02:01-B1*03:03L HLA-DRB1*15:03L
HVVAFNTLLF

SEQ ID NO: 8987 - protein, 11 aa, Severe acute respiratory syndrome coronavirus 2
  REGION 1..11: note = Table B: HLA-DQA1*03:02-B1*03:03L HLA-DRB1*13:03L HLA-DPA1*01:03-B1*03:01L HLA-DRB1*14:02L HLA-DQA1*01-B1*05L
TPVYSFLPGVY

SEQ ID NO: 8988 - protein, 11 aa, Severe acute respiratory syndrome coronavirus 2
  REGION 1..11: note = Table B: HLA-DQA1*03:02-B1*03:03L HLA-DRB1*04:03L HLA-DQA1*01-B1*05L HLA-DQA1*03:01-B1*03:02L
PVYSFLPGVYS

SEQ ID NO: 8989 - protein, 10 aa, Severe acute respiratory syndrome coronavirus 2
  REGION 1..10: note = Table B: HLA-DQA1*03:02-B1*03:03M HLA-DQA1*05:01-B1*03:01L HLA-DRB1*04:05L HLA-DQA1*01:02-B1*06:02L HLA-DRB1*01:01L HLA-DRB1*01:02L HLA-DPA1*03:01-B1*04:02L HLA-DRB1*14:01L HLA-DRB1*11:02L HLA-DRB1*14:02L HLA-DQA1*05:05-B1*03:19L
  REGION 1..10: note = CONT. FROM ABOVE: HLA-DQA1*05:01-B1*02:01L HLA-DQA1*05:05-B1*03: 116L HLA-DRB1*09:01L HLA-DPA1*02:01-B1*13:01M HLA-DPA1*03:01-B1* 105:01L HLA-DQA1*03:01-B1*03:02L HLA-DPA1*01:03-B1*104:01L HLA-D PA1*01:02-B1*04:01L HLA-DRB1*10:01L HLA-DRB1*16:01L
  REGION 1..10: note = CONT. FROM ABOVE: HLA-DQA1*01:03-B1*06:01L HLA-DRB1*08:03L HLA-D QA1*02:01-B1*03:03L HLA-DRB1*15:03L
YSFLPGVYSV

SEQ ID NO: 8990 - protein, 10 aa, Severe acute respiratory syndrome coronavirus 2
  REGION 1..10: note = Table B: HLA-DQA1*03:02-B1*03:03L HLA-DQA1*05:01-B1*03:01L HLA-DQA1*01:02-B1*06:02L HLA-DPA1*03:01-B1*04:02L HLA-DRB1*14:02L HLA-DQA1*05:05-B1*03:19L HLA-DQA1*05:05-B1*03:116L HLA-DPA1*02:01-B1*13:01L
  REGION 1..10: note = CONT. FROM ABOVE: HLA-DPA1*03:01-B1*105:01L HLA-DQA1*03:01-B1*03 :02L HLA-DPA1*01:03-B1*104:01L HLA-DRB1*16:01L HLA-DQA1*01:03-B1 *06:01L HLA-DRB1*08:03L HLA-DQA1*02:01-B1*03:03L HLA-DRB1*15:03L
SFLPGVYSVI

SEQ ID NO: 8991 - protein, 10 aa, Severe acute respiratory syndrome coronavirus 2
  REGION 1..10: note = Table B: HLA-DQA1*03:02-B1*03:03L HLA-DQA1*05:01-B1*03:01L HLA-DRB1*04:03L HLA-DRB1*13:03L HLA-DRB1*01:03L HLA-DQA1*01:02-B1*06:02M HLA-DRB1*08:77L HLA-DPA1*01:03-B1*03:01L HLA-DPA1*03:01-B1*04:02L
  REGION 1..10: note = CONT. FROM ABOVE: HLA-DRB1*03:01L HLA-DRB1*14:01L HLA-DRB1*11:02 L HLA-DRB1*14:02L HLA-DQA1*01-B1*05L HLA-DQA1*05:05-B1*03:19M HL A-DQA1*05:01-B1*02:01L HLA-DRB4*01:01L HLA-DPA1*01:03-B1*04:01L HLA-DQA1*05:05-B1*03:116L HLA-DPA1*01:03-B1*04:02L
  REGION 1..10: note = CONT. FROM ABOVE: HLA-DRB1*12:01L HLA-DPA1*02:01-B1*13:01L HLA-D PA1*03:01-B1*105:01L HLA-DPA1*01:03-B1*104:01L HLA-DQA1*05:05-B1 *03:01L HLA-DPA1*01:02-B1*04:01L HLA-DRB1*10:01L HLA-DRB1*16:01L HLA-DQA1*01:03-B1*06:01L HLA-DQA1*02:01-B1*03:03L
  REGION 1..10: note = CONT. FROM ABOVE: HLA-DRB1*15:03L
FLPGVYSVIY

SEQ ID NO: 8992 - protein, 10 aa, Severe acute respiratory syndrome coronavirus 2
  REGION 1..10: note = Table B: HLA-DQA1*03:02-B1*03:03L HLA-DRB1*04:03L HLA-DRB1*04:05L HLA-DQA1*01:02-B1*06:02L HLA-DRB1*01:02L HLA-DPA1*03:01-B1*04:02L HLA-DQA1*01-B1*05L HLA-DQA1*05:05-B1*03:19L HLA-DQA1*05:01-B1*02:01L
  REGION 1..10: note = CONT. FROM ABOVE: HLA-DPA1*02:01-B1*13:01L HLA-DPA1*03:01-B1*105 :01L HLA-DQA1*03:01-B1*03:02L HLA-DRB1*16:01L HLA-DQA1*01:03-B1* 06:01L HLA-DQA1*02:01-B1*03:03L HLA-DRB1*15:03L
FYLTNDVSFL

SEQ ID NO: 8993 - protein, 10 aa, Severe acute respiratory syndrome coronavirus 2
  REGION 1..10: note = Table B: HLA-DQA1*03:02-B1*03:03L HLA-DQA1*05:05-B1*03:19L HLA-DPA1*01:03-B1*104:01L
TNDVSFLAHI

SEQ ID NO: 8994 - protein, 10 aa, Severe acute respiratory syndrome coronavirus 2
  REGION 1..10: note = Table B: HLA-DQA1*03:02-B1*03:03L HLA-DRB1*04:03L HLA-DQA1*01-B1*05L HLA-DQA1*05:01-B1*02:01L HLA-DPA1*03:01-B1*105:01L HLA-DQA1*03:01-B1*03:02L HLA-DPA1*01:02-B1*04:01L HLA-DQA1*01:03-B1*06:01L
  REGION 1..10: note = CONT. FROM ABOVE: HLA-DQA1*02:01-B1*03:03L
NDVSFLAHIQ

SEQ ID NO: 8995 - protein, 10 aa, Severe acute respiratory syndrome coronavirus 2
  REGION 1..10: note = Table B: HLA-DQA1*03:02-B1*03:03L HLA-DQA1*05:01-B1*03:01L HLA-DRB1*13:03L HLA-DQA1*01:02-B1*06:02M HLA-DRB1*08:77L HLA-DPA1*01:03-B1*03:01L HLA-DPA1*03:01-B1*04:02L HLA-DRB1*14:01L HLA-DRB1*14:02L HLA-DQA1*01-B1*05L
  REGION 1..10: note = CONT. FROM ABOVE: HLA-DQA1*05:05-B1*03:19L HLA-DQA1*05:01-B1*02: 01L HLA-DRB4*01:01L HLA-DPA1*01:03-B1*04:01L HLA-DQA1*05:05-B1*0 3:116L HLA-DRB1*12:01L HLA-DPA1*02:01-B1*13:01L HLA-DPA1*03:01-B 1*105:01M HLA-DPA1*01:02-B1*04:01L HLA-DQA1*01:03-B1*06:01L
  REGION 1..10: note = CONT. FROM ABOVE: HLA-DQA1*02:01-B1*03:03L HLA-DRB1*15:03L
DVSFLAHIQW

SEQ ID NO: 8996 - protein, 10 aa, Severe acute respiratory syndrome coronavirus 2
  REGION 1..10: note = Table B: HLA-DQA1*03:02-B1*03:03L HLA-DRB1*04:03L HLA-DRB1*01:03L HLA-DRB1*04:05L HLA-DQA1*01:02-B1*06:02M HLA-DRB1*01:01L HLA-DRB1*08:77L HLA-DPA1*03:01-B1*04:02L HLA-DRB1*14:02L HLA-DQA1*01-B1*05L HLA-DQA1*05:05-B1*03:19L
  REGION 1..10: note = CONT. FROM ABOVE: HLA-DQA1*05:01-B1*02:01L HLA-DRB4*01:01L HLA-D PA1*01:03-B1*04:01L HLA-DQA1*05:05-B1*03:116L HLA-DPA1*01:03-B1* 04:02L HLA-DPA1*02:01-B1*13:01M HLA-DPA1*03:01-B1*105:01L HLA-DP A1*01:03-B1*104:01L HLA-DPA1*01:02-B1*04:01L HLA-DRB1*10:01L
  REGION 1..10: note = CONT. FROM ABOVE: HLA-DRB1*16:01L HLA-DQA1*01:03-B1*06:01M HLA-D QA1*02:01-B1*03:03L HLA-DRB1*15:03L
VMFTPLVPFW

SEQ ID NO: 8997 - protein, 12 aa, Severe acute respiratory syndrome coronavirus 2
  REGION 1..12: note = Table B: HLA-DQA1*03:02-B1*03:03L HLA-DRB1*13:02L HLA-DRB1*01:03L HLA-DRB1*04:05L HLA-DRB1*01:02L HLA-DRB1*08:04L HLA-DRB3*02:01L HLA-DPA1*01:03-B1*03:01L HLA-DPA1*03:01-B1*04:02L HLA-DRB1*14:01L HLA-DRB1*08:01L
  REGION 1..12: note = CONT. FROM ABOVE: HLA-DQA1*05:05-B1*03:19L HLA-DQA1*05:01-B1*02: 01L HLA-DPA1*01:03-B1*04:01L HLA-DPA1*01:03-B1*04:02L HLA-DPA1*0 1:03-B1*104:01L HLA-DQA1*05:05-B1*03:01L HLA-DPA1*01:02-B1*04:01 L HLA-DRB1*16:01L HLA-DRB1*04:08L
IAYIICISTKHF

SEQ ID NO: 8998 - protein, 18 aa, Severe acute respiratory syndrome coronavirus 2
  REGION 1..18: note = Table B: HLA-DQA1*03:02-B1*03:03L HLA-DPA1*01:03-B1*04:01L HLA-DPA1*01:03-B1*104:01L
STKHFYWFFSNYLKRRVV

SEQ ID NO: 8999 - protein, 11 aa, Severe acute respiratory syndrome coronavirus 2
  REGION 1..11: note = Table B: HLA-DQA1*03:02-B1*03:03L HLA-DQA1*05:01-B1*03:01L HLA-DRB1*13:03L HLA-DRB1*01:02L HLA-DPA1*01:03-B1*03:01L HLA-DPA1*03:01-B1*04:02L HLA-DRB1*14:02L HLA-DQA1*01-B1*05L HLA-DQA1*05:05-B1*03:19L HLA-DQA1*05:01-B1*02:01L
  REGION 1..11: note = CONT. FROM ABOVE: HLA-DRB4*01:01L HLA-DPA1*01:03-B1*04:01L HLA-D QA1*05:05-B1*03:116L HLA-DPA1*01:03-B1*04:02L HLA-DRB1*12:01L HL A-DPA1*01:02-B1*04:01L
VVFNGVSFSTF

SEQ ID NO: 9000 - protein, 12 aa, Severe acute respiratory syndrome coronavirus 2
  REGION 1..12: note = Table B: HLA-DQA1*03:02-B1*03:03L HLA-DQA1*05:01-B1*03:01L HLA-DRB1*01:03L HLA-DQA1*01:02-B1*06:02L HLA-DRB1*01:02L HLA-DPA1*01:03-B1*03:01L HLA-DRB1*08:01L HLA-DQA1*05:05-B1*03:19L HLA-DQA1*05:01-B1*02:01L
  REGION 1..12: note = CONT. FROM ABOVE: HLA-DPA1*01:03-B1*04:02L HLA-DRB1*12:01L HLA-D PA1*02:01-B1*13:01L HLA-DQA1*03:01-B1*03:02L HLA-DQA1*05:05-B1*0 3:01L HLA-DRB1*16:01L HLA-DRB1*04:08L HLA-DQA1*02:01-B1*03:03L H LA-DRB1*15:03L
FNGVSFSTFEEA

SEQ ID NO: 9001 - protein, 10 aa, Severe acute respiratory syndrome coronavirus 2
  REGION 1..10: note = Table B: HLA-DQA1*03:02-B1*03:03L HLA-DQA1*01-B1*05L HLA-DQA1*05:01-B1*02:01L HLA-DQA1*01:03-B1*06:01L
SFSTFEEAAL

SEQ ID NO: 9002 - protein, 11 aa, Severe acute respiratory syndrome coronavirus 2
  REGION 1..11: note = Table B: HLA-DQA1*03:02-B1*03:03L HLA-DPA1*03:01-B1*04:02L HLA-DRB1*14:02L HLA-DQA1*05:05-B1*03:19L HLA-DQA1*05:01-B1*02:01L HLA-DRB4*01:01L HLA-DPA1*01:03-B1*04:01L HLA-DPA1*03:01-B1*105:01L
  REGION 1..11: note = CONT. FROM ABOVE: HLA-DQA1*02:01-B1*03:03L
STFEEAALCTF

SEQ ID NO: 9003 - protein, 10 aa, Severe acute respiratory syndrome coronavirus 2
  REGION 1..10: note = Table B: HLA-DQA1*03:02-B1*03:03L HLA-DQA1*05:05-B1*03:19L
FEEAALCTFL

SEQ ID NO: 9004 - protein, 10 aa, Severe acute respiratory syndrome coronavirus 2
  REGION 1..10: note = Table B: HLA-DQA1*03:02-B1*03:03L HLA-DPA1*03:01-B1*04:02L HLA-DQA1*05:05-B1*03:19L HLA-DRB1*12:01L HLA-DPA1*02:01-B1*13:01L HLA-DQA1*03:01-B1*03:02L HLA-DQA1*01:03-B1*06:01L HLA-DQA1*02:01-B1*03:03L
  REGION 1..10: note = CONT. FROM ABOVE: HLA-DRB1*15:03L
TFLLNKEMYL

SEQ ID NO: 9005 - protein, 15 aa, Severe acute respiratory syndrome coronavirus 2
  REGION 1..15: note = Table B: HLA-DQA1*03:02-B1*03:03L HLA-DRB1*04:03L HLA-DRB1*08:04L
LKLRSDVLLPLTQYN

SEQ ID NO: 9006 - protein, 11 aa, Severe acute respiratory syndrome coronavirus 2
  REGION 1..11: note = Table B: HLA-DQA1*03:02-B1*03:03L HLA-DRB1*04:01L HLA-DRB1*04:05L HLA-DRB1*01:01L HLA-DRB1*01:02L HLA-DQA1*01:01-B1*05:01L HLA-DRB1*11:01L HLA-DRB1*08:03L
VLLPLTQYNRY

SEQ ID NO: 9007 - protein, 10 aa, Severe acute respiratory syndrome coronavirus 2
  REGION 1..10: note = Table B: HLA-DQA1*03:02-B1*03:03L HLA-DQA1*05:01-B1*03:01L HLA-DRB1*13:02L HLA-DRB1*13:03L HLA-DRB1*01:03L HLA-DQA1*01:02-B1*06:02L HLA-DRB1*08:77L HLA-DPA1*01:03-B1*03:01L HLA-DPA1*03:01-B1*04:02L
  REGION 1..10: note = CONT. FROM ABOVE: HLA-DRB1*03:01L HLA-DRB1*14:01L HLA-DRB1*11:02 L HLA-DRB1*14:02L HLA-DRB1*11:01L HLA-DQA1*01-B1*05L HLA-DQA1*05 :05-B1*03:19M HLA-DQA1*05:01-B1*02:01M HLA-DRB4*01:01L HLA-DPA1* 01:03-B1*04:01L HLA-DQA1*05:05-B1*03:116L
  REGION 1..10: note = CONT. FROM ABOVE: HLA-DPA1*01:03-B1*04:02L HLA-DRB1*12:01L HLA-D PA1*02:01-B1*13:01L HLA-DPA1*03:01-B1*105:01L HLA-DPA1*01:03-B1* 104:01L HLA-DPA1*01:02-B1*04:01L HLA-DRB1*10:01L HLA-DRB1*16:01M HLA-DQA1*01:03-B1*06:01L HLA-DRB1*08:02L
  REGION 1..10: note = CONT. FROM ABOVE: HLA-DQA1*02:01-B1*03:03L HLA-DRB1*15:03L
TQYNRYLALY

SEQ ID NO: 9008 - protein, 16 aa, Severe acute respiratory syndrome coronavirus 2
  REGION 1..16: note = Table B: HLA-DQA1*03:02-B1*03:03L HLA-DRB1*04:01L HLA-DRB1*09:01L
YNRYLALYNKYKYFSG

SEQ ID NO: 9009 - protein, 13 aa, Severe acute respiratory syndrome coronavirus 2
  REGION 1..13: note = Table B: HLA-DQA1*03:02-B1*03:03L HLA-DQA1*05:01-B1*03:01L HLA-DRB1*13:02L HLA-DRB1*04:04L HLA-DRB1*08:04L HLA-DPA1*01:03-B1*03:01L HLA-DPA1*03:01-B1*04:02L HLA-DRB1*14:01L HLA-DRB1*11:04L HLA-DRB1*11:01L
  REGION 1..13: note = CONT. FROM ABOVE: HLA-DQA1*05:01-B1*02:01L HLA-DRB1*09:01L HLA-D RB1*12:02L HLA-DRB3*01:01L HLA-DPA1*03:01-B1*105:01L HLA-DRB1*14 :54L HLA-DPA1*01:03-B1*104:01L HLA-DQA1*05:05-B1*03:01L HLA-DPA1 *01:02-B1*04:01L HLA-DRB1*07:01L HLA-DRB1*10:01L
YNKYKYFSGAMDT

SEQ ID NO: 9010 - protein, 13 aa, Severe acute respiratory syndrome coronavirus 2
  REGION 1..13: note = Table B: HLA-DQA1*03:02-B1*03:03L HLA-DQA1*05:01-B1*03:01L HLA-DRB1*13:02L HLA-DRB1*04:04L HLA-DRB1*08:04L HLA-DPA1*01:03-B1*03:01L HLA-DPA1*03:01-B1*04:02L HLA-DRB1*14:01L HLA-DQA1*05:05-B1*03:19L
  REGION 1..13: note = CONT. FROM ABOVE: HLA-DPA1*01:03-B1*04:01L HLA-DPA1*01:03-B1*04: 02L HLA-DPA1*01:03-B1*104:01L HLA-DQA1*05:05-B1*03:01L HLA-DPA1* 01:02-B1*04:01L HLA-DRB1*07:01L HLA-DRB1*10:01L HLA-DQA1*01:03-B 1*06:01L
NKYKYFSGAMDTT

SEQ ID NO: 9011 - protein, 12 aa, Severe acute respiratory syndrome coronavirus 2
  REGION 1..12: note = Table B: HLA-DQA1*03:02-B1*03:03L HLA-DQA1*05:01-B1*03:01L HLA-DRB1*13:03L HLA-DRB1*01:03L HLA-DRB1*04:02L HLA-DRB1*04:05L HLA-DQA1*01:02-B1*06:02L HLA-DRB1*01:02L HLA-DRB4*03:01NL HLA-DPA1*01:03-B1*03:01L HLA-DPA1*03:01-B1*04:02L
  REGION 1..12: note = CONT. FROM ABOVE: HLA-DQA1*05:05-B1*03:19L HLA-DRB1*04:10L HLA-D RB1*12:01L HLA-DPA1*03:01-B1*105:01L HLA-DQA1*05:05-B1*03:01L HL A-DRB1*14:17L HLA-DRB1*16:01L HLA-DQA1*01:03-B1*06:01L HLA-DRB1* 04:08L HLA-DRB1*15:03L
YKYFSGAMDTTS

SEQ ID NO: 9012 - protein, 12 aa, Severe acute respiratory syndrome coronavirus 2
  REGION 1..12: note = Table B: HLA-DQA1*03:02-B1*03:03L HLA-DRB1*04:03L HLA-DRB1*13:02L HLA-DRB1*04:05L HLA-DRB1*14:01L HLA-DQA1*05:05-B1*03:116L HLA-DRB1*12:01L HLA-DQA1*03:01-B1*03:02L HLA-DQA1*05:05-B1*03:01L
  REGION 1..12: note = CONT. FROM ABOVE: HLA-DPA1*01:02-B1*04:01L HLA-DRB1*08:02L
KYFSGAMDTTSY

SEQ ID NO: 9013 - protein, 11 aa, Severe acute respiratory syndrome coronavirus 2
  REGION 1..11: note = Table B: HLA-DQA1*03:02-B1*03:03L HLA-DRB1*04:01L HLA-DRB1*13:02L HLA-DRB1*01:03L HLA-DRB1*04:04L HLA-DRB1*04:05L HLA-DRB1*01:02L HLA-DRB1*14:01L HLA-DRB1*11:04L HLA-DRB1*14:02L HLA-DQA1*01:01-B1*05:01L HLA-DRB1*08:01L HLA-DRB5*01:01L
  REGION 1..11: note = CONT. FROM ABOVE: HLA-DRB1*04:10L HLA-DPA1*01:03-B1*04:02L HLA-D PA1*03:01-B1*105:01L HLA-DRB1*14:54L HLA-DRB1*10:01L HLA-DRB1*04 :08L HLA-DRB1*15:03L
FSGAMDTTSYR

SEQ ID NO: 9014 - protein, 10 aa, Severe acute respiratory syndrome coronavirus 2
  REGION 1..10: note = Table B: HLA-DQA1*03:02-B1*03:03L HLA-DRB1*04:03L HLA-DRB1*13:03L HLA-DRB1*01:03L HLA-DRB1*04:02L HLA-DRB4*03:01NL HLA-DRB1*14:01L HLA-DRB1*14:02L HLA-DQA1*01-B1*05L HLA-DQA1*05:01-B1*02:01L HLA-DRB1*12:01L
  REGION 1..10: note = CONT. FROM ABOVE: HLA-DPA1*03:01-B1*105:01L HLA-DQA1*03:01-B1*03 :02L HLA-DRB1*14:54L HLA-DRB1*14:17L HLA-DPA1*01:02-B1*04:01L HL A-DRB1*16:01L HLA-DQA1*02:01-B1*03:03L
AMDTTSYREA

SEQ ID NO: 9015 - protein, 10 aa, Severe acute respiratory syndrome coronavirus 2
  REGION 1..10: note = Table B: HLA-DQA1*03:02-B1*03:03L HLA-DRB1*04:03L HLA-DQA1*01-B1*05L HLA-DQA1*05:01-B1*02:01L HLA-DQA1*03:01-B1*03:02L HLA-DPA1*01:02-B1*04:01L HLA-DRB1*16:01L HLA-DQA1*01:03-B1*06:01L
  REGION 1..10: note = CONT. FROM ABOVE: HLA-DQA1*02:01-B1*03:03L
MDTTSYREAA

SEQ ID NO: 9016 - protein, 13 aa, Severe acute respiratory syndrome coronavirus 2
  REGION 1..13: note = Table B: HLA-DQA1*03:02-B1*03:03L HLA-DRB1*13:03L HLA-DRB1*04:04L HLA-DRB4*03:01NL HLA-DRB1*12:01L HLA-DRB1*14:54L HLA-DRB1*04:08L HLA-DQA1*02:01-B1*03:03L HLA-DRB1*15:03L
AKALNDFSNSGSD

SEQ ID NO: 9017 - protein, 10 aa, Severe acute respiratory syndrome coronavirus 2
  REGION 1..10: note = Table B: HLA-DQA1*03:02-B1*03:03L
DFSNSGSDVL

SEQ ID NO: 9018 - protein, 13 aa, Severe acute respiratory syndrome coronavirus 2
  REGION 1..13: note = Table B: HLA-DQA1*03:02-B1*03:03L HLA-DQA1*03:01-B1*03:02L HLA-DQA1*05:05-B1*03:01L HLA-DQA1*02:01-B1*03:03L
FSNSGSDVLYQPP

SEQ ID NO: 9019 - protein, 13 aa, Severe acute respiratory syndrome coronavirus 2
  REGION 1..13: note = Table B: HLA-DQA1*03:02-B1*03:03L HLA-DQA1*05:05-B1*03:01L
SNSGSDVLYQPPQ

SEQ ID NO: 9020 - protein, 13 aa, Severe acute respiratory syndrome coronavirus 2
  REGION 1..13: note = Table B: HLA-DQA1*03:02-B1*03:03L HLA-DRB1*04:03L HLA-DQA1*01-B1*05L HLA-DQA1*05:01-B1*02:01L HLA-DQA1*03:01-B1*03:02L HLA-DQA1*02:01-B1*03:03L
SGSDVLYQPPQTS

SEQ ID NO: 9021 - protein, 10 aa, Severe acute respiratory syndrome coronavirus 2
  REGION 1..10: note = Table B: HLA-DQA1*03:02-B1*03:03M HLA-DQA1*05:01-B1*03:01M HLA-DRB1*04:01L HLA-DRB1*13:03L HLA-DRB1*01:03L HLA-DRB1*04:04L HLA-DRB1*04:05L HLA-DQA1*01:02-B1*06:02L HLA-DRB1*01:01L HLA-DRB1*01:02L HLA-DRB1*08:77L HLA-DPA1*03:01-B1*04:02L
  REGION 1..10: note = CONT. FROM ABOVE: HLA-DRB1*14:01L HLA-DRB1*11:02L HLA-DRB1*14:02 L HLA-DRB1*08:01L HLA-DQA1*05:05-B1*03:19M HLA-DQA1*05:01-B1*02: 01L HLA-DRB4*01:01L HLA-DPA1*01:03-B1*04:01L HLA-DQA1*05:05-B1*0 3:116M HLA-DRB1*09:01L HLA-DPA1*01:03-B1*04:02L HLA-DRB1*12:01L
  REGION 1..10: note = CONT. FROM ABOVE: HLA-DPA1*02:01-B1*13:01M HLA-DPA1*03:01-B1*105 :01L HLA-DQA1*03:01-B1*03:02L HLA-DPA1*01:03-B1*104:01L HLA-DPA1 *01:02-B1*04:01L HLA-DRB1*07:01L HLA-DRB1*10:01L HLA-DRB1*16:01L HLA-DQA1*01:03-B1*06:01M HLA-DRB1*08:03L
  REGION 1..10: note = CONT. FROM ABOVE: HLA-DQA1*02:01-B1*03:03M HLA-DRB1*15:03M
VLYQPPQTSI

SEQ ID NO: 9022 - protein, 13 aa, Severe acute respiratory syndrome coronavirus 2
  REGION 1..13: note = Table B: HLA-DQA1*03:02-B1*03:03L HLA-DQA1*03:01-B1*03:02L
YQPPQTSITSAVL

SEQ ID NO: 9023 - protein, 13 aa, Severe acute respiratory syndrome coronavirus 2
  REGION 1..13: note = Table B: HLA-DQA1*03:02-B1*03:03L HLA-DQA1*05:01-B1*03:01L HLA-DQA1*05:05-B1*03:19L HLA-DQA1*05:01-B1*02:01L HLA-DQA1*03:01-B1*03:02L HLA-DQA1*05:05-B1*03:01L HLA-DQA1*01:03-B1*06:01L HLA-DQA1*02:01-B1*03:03L
QPPQTSITSAVLQ

SEQ ID NO: 9024 - protein, 14 aa, Severe acute respiratory syndrome coronavirus 2
  REGION 1..14: note = Table B: HLA-DQA1*03:02-B1*03:03L HLA-DQA1*05:01-B1*03:01L HLA-DQA1*05:05-B1*03:19L HLA-DPA1*03:01-B1*105:01L HLA-DQA1*05:05-B1*03:01L
PPQTSITSAVLQSG

SEQ ID NO: 9025 - protein, 10 aa, Severe acute respiratory syndrome coronavirus 2
  REGION 1..10: note = Table B: HLA-DQA1*03:02-B1*03:03L HLA-DQA1*05:01-B1*03:01L HLA-DQA1*01:02-B1*06:02L HLA-DPA1*03:01-B1*04:02L HLA-DQA1*05:05-B1*03:19L HLA-DQA1*05:01-B1*02:01L HLA-DPA1*03:01-B1*105:01L HLA-DQA1*05:05-B1*03:01L
  REGION 1..10: note = CONT. FROM ABOVE: HLA-DQA1*01:03-B1*06:01L HLA-DQA1*02:01-B1*03: 03L HLA-DRB1*15:03L
ITSAVLQSGF

SEQ ID NO: 9026 - protein, 10 aa, Severe acute respiratory syndrome coronavirus 2
  REGION 1..10: note = Table B: HLA-DQA1*03:02-B1*03:03L HLA-DQA1*05:01-B1*03:01L HLA-DQA1*01:02-B1*06:02L HLA-DQA1*05:05-B1*03:19L HLA-DRB1*12:01L HLA-DPA1*03:01-B1*105:01L HLA-DQA1*03:01-B1*03:02L HLA-DQA1*05:05-B1*03:01L
  REGION 1..10: note = CONT. FROM ABOVE: HLA-DQA1*01:03-B1*06:01M HLA-DQA1*02:01-B1*03: 03L
TSAVLQSGFR

SEQ ID NO: 9027 - protein, 10 aa, Severe acute respiratory syndrome coronavirus 2
  REGION 1..10: note = Table B: HLA-DQA1*03:02-B1*03:03L HLA-DQA1*05:01-B1*03:01L HLA-DRB1*04:03L HLA-DRB1*13:02L HLA-DRB1*13:03L HLA-DRB1*01:03L HLA-DRB1*04:02L HLA-DRB1*04:05L HLA-DRB1*01:02L HLA-DRB4*03:01NL HLA-DRB1*14:01L HLA-DQA1*01-B1*05L HLA-DQA1*05:05-B1*03:19L
  REGION 1..10: note = CONT. FROM ABOVE: HLA-DQA1*05:01-B1*02:01L HLA-DRB1*12:01L HLA-D PA1*03:01-B1*105:01L HLA-DQA1*03:01-B1*03:02L HLA-DRB1*14:54L HL A-DQA1*05:05-B1*03:01L HLA-DRB1*14:17L HLA-DPA1*01:02-B1*04:01L HLA-DRB1*16:01L HLA-DQA1*01:03-B1*06:01L
  REGION 1..10: note = CONT. FROM ABOVE: HLA-DQA1*02:01-B1*03:03L HLA-DRB1*15:03L
MAFPSGKVEG

SEQ ID NO: 9028 - protein, 12 aa, Severe acute respiratory syndrome coronavirus 2
  REGION 1..12: note = Table B: HLA-DQA1*03:02-B1*03:03L HLA-DQA1*05:01-B1*03:01L HLA-DQA1*01:02-B1*06:02L HLA-DQA1*05:05-B1*03:19L HLA-DQA1*05:05-B1*03:01L HLA-DQA1*01:03-B1*06:01L HLA-DQA1*02:01-B1*03:03L
FPSGKVEGCMVQ

SEQ ID NO: 9029 - protein, 12 aa, Severe acute respiratory syndrome coronavirus 2
  REGION 1..12: note = Table B: HLA-DQA1*03:02-B1*03:03L HLA-DQA1*03:01-B1*03:02L
TSEDMLNPNYED

SEQ ID NO: 9030 - protein, 10 aa, Severe acute respiratory syndrome coronavirus 2
  REGION 1..10: note = Table B: HLA-DQA1*03:02-B1*03:03L HLA-DQA1*05:01-B1*02:01L HLA-DPA1*03:01-B1*105:01L HLA-DQA1*03:01-B1*03:02L
DMLNPNYEDL

SEQ ID NO: 9031 - protein, 10 aa, Severe acute respiratory syndrome coronavirus 2
  REGION 1..10: note = Table B: HLA-DQA1*03:02-B1*03:03L HLA-DQA1*01-B1*05L HLA-DQA1*05:01-B1*02:01L HLA-DPA1*03:01-B1*105:01L HLA-DQA1*03:01-B1*03:02L HLA-DQA1*01:03-B1*06:01L HLA-DQA1*02:01-B1*03:03L HLA-DRB1*15:03L
MLNPNYEDLL

SEQ ID NO: 9032 - protein, 13 aa, Severe acute respiratory syndrome coronavirus 2
  REGION 1..13: note = Table B: HLA-DQA1*03:02-B1*03:03L HLA-DQA1*05:01-B1*03:01L HLA-DRB1*13:03L HLA-DRB1*01:03L HLA-DRB1*01:02L HLA-DRB1*08:04L HLA-DPA1*01:03-B1*03:01L HLA-DPA1*03:01-B1*04:02L HLA-DRB1*14:01L HLA-DQA1*01:01-B1*05:01L HLA-DRB1*08:01L
  REGION 1..13: note = CONT. FROM ABOVE: HLA-DQA1*05:05-B1*03:19L HLA-DPA1*01:03-B1*04: 02L HLA-DRB1*12:01L HLA-DPA1*02:01-B1*13:01L HLA-DPA1*03:01-B1*1 05:01L HLA-DQA1*05:05-B1*03:01L HLA-DRB1*14:17L HLA-DPA1*01:02-B 1*04:01L HLA-DRB1*15:03L
NPNYEDLLIRKSN

SEQ ID NO: 9033 - protein, 18 aa, Severe acute respiratory syndrome coronavirus 2
  REGION 1..18: note = Table B: HLA-DQA1*03:02-B1*03:03L HLA-DPA1*03:01-B1*04:02L HLA-DPA1*01:03-B1*04:02L
EDLLIRKSNHNFLVQAGN

SEQ ID NO: 9034 - protein, 10 aa, Severe acute respiratory syndrome coronavirus 2
  REGION 1..10: note = Table B: HLA-DQA1*03:02-B1*03:03L HLA-DRB1*04:03L HLA-DQA1*01-B1*05L HLA-DQA1*05:01-B1*02:01L HLA-DQA1*03:01-B1*03:02L HLA-DQA1*02:01-B1*03:03L
NFLVQAGNVQ

SEQ ID NO: 9035 - protein, 10 aa, Severe acute respiratory syndrome coronavirus 2
  REGION 1..10: note = Table B: HLA-DQA1*03:02-B1*03:03M HLA-DQA1*05:01-B1*03:01M HLA-DRB1*04:01L HLA-DRB1*04:03L HLA-DRB1*13:02L HLA-DRB1*13:03L HLA-DRB1*01:03L HLA-DRB1*04:02L HLA-DRB1*04:04L HLA-DRB1*04:05L HLA-DQA1*01:02-B1*06:02L HLA-DRB1*01:02L HLA-DRB1*08:77L
  REGION 1..10: note = CONT. FROM ABOVE: HLA-DRB3*02:01L HLA-DPA1*03:01-B1*04:02L HLA-D RB1*14:01L HLA-DRB1*14:02M HLA-DRB1*08:01L HLA-DQA1*01-B1*05L HL A-DQA1*05:05-B1*03:19L HLA-DQA1*05:01-B1*02:01L HLA-DRB4*01:01L HLA-DPA1*01:03-B1*04:01L HLA-DQA1*05:05-B1*03:116M
  REGION 1..10: note = CONT. FROM ABOVE: HLA-DRB1*09:01L HLA-DPA1*01:03-B1*04:02L HLA-D RB1*12:01L HLA-DPA1*02:01-B1*13:01L HLA-DPA1*03:01-B1*105:01L HL A-DQA1*03:01-B1*03:02M HLA-DPA1*01:03-B1*104:01L HLA-DPA1*01:02- B1*04:01L HLA-DRB1*07:01L HLA-DRB1*10:01L HLA-DRB1*16:01L
  REGION 1..10: note = CONT. FROM ABOVE: HLA-DQA1*01:03-B1*06:01L HLA-DRB1*08:03L HLA-D QA1*02:01-B1*03:03M HLA-DRB1*15:03M
FLVQAGNVQL

SEQ ID NO: 9036 - protein, 10 aa, Severe acute respiratory syndrome coronavirus 2
  REGION 1..10: note = Table B: HLA-DQA1*03:02-B1*03:03L HLA-DQA1*05:01-B1*03:01L HLA-DQA1*05:05-B1*03:19L HLA-DPA1*03:01-B1*105:01L HLA-DPA1*01:03-B1*104:01L HLA-DQA1*01:03-B1*06:01L HLA-DQA1*02:01-B1*03:03L HLA-DRB1*15:03L
VQAGNVQLRV

SEQ ID NO: 9037 - protein, 13 aa, Severe acute respiratory syndrome coronavirus 2
  REGION 1..13: note = Table B: HLA-DQA1*03:02-B1*03:03L HLA-DRB1*14:04L HLA-DPA1*03:01-B1*04:02L HLA-DRB1*11:02L HLA-DQA1*05:05-B1*03:19L HLA-DPA1*01:03-B1*04:02L HLA-DPA1*01:03-B1*02:01L HLA-DRB1*07:01L HLA-DRB1*08:02L
NVQLRVIGHSMQN

SEQ ID NO: 9038 - protein, 10 aa, Severe acute respiratory syndrome coronavirus 2
  REGION 1..10: note = Table B: HLA-DQA1*03:02-B1*03:03L HLA-DRB1*16:01L HLA-DQA1*02:01-B1*03:03L
RVIGHSMQNC

SEQ ID NO: 9039 - protein, 10 aa, Severe acute respiratory syndrome coronavirus 2
  REGION 1..10: note = Table B: HLA-DQA1*03:02-B1*03:03L HLA-DQA1*05:01-B1*03:01L HLA-DRB1*04:01L HLA-DRB1*04:03L HLA-DRB1*13:02L HLA-DRB1*13:03L HLA-DRB1*01:03L HLA-DRB1*04:02L HLA-DRB1*04:04L HLA-DRB1*04:05L HLA-DRB1*01:01L HLA-DRB1*01:02L HLA-DRB4*03:01NL HLA-DRB1*08:04L
  REGION 1..10: note = CONT. FROM ABOVE: HLA-DRB1*08:77L HLA-DRB3*02:01L HLA-DRB1*14:01 L HLA-DRB1*11:03L HLA-DRB1*11:04L HLA-DRB1*14:02L HLA-DQA1*01:01 -B1*05:01L HLA-DRB1*08:01L HLA-DRB1*11:01L HLA-DRB5*01:01L HLA-D QA1*01-B1*05L HLA-DQA1*05:05-B1*03:19L HLA-DQA1*05:01-B1*02:01L
  REGION 1..10: note = CONT. FROM ABOVE: HLA-DRB1*04:10L HLA-DPA1*01:03-B1*04:02L HLA-D RB1*12:01L HLA-DRB1*12:02L HLA-DPA1*03:01-B1*105:01L HLA-DQA1*03 :01-B1*03:02L HLA-DRB1*14:54L HLA-DQA1*05:05-B1*03:01L HLA-DRB1* 14:17L HLA-DPA1*01:02-B1*04:01L HLA-DRB1*10:01L HLA-DRB1*16:01L
  REGION 1..10: note = CONT. FROM ABOVE: HLA-DQA1*01:03-B1*06:01L HLA-DRB1*04:08L HLA-D QA1*02:01-B1*03:03L
VDTANPKTPK

SEQ ID NO: 9040 - protein, 10 aa, Severe acute respiratory syndrome coronavirus 2
  REGION 1..10: note = Table B: HLA-DQA1*03:02-B1*03:03L HLA-DQA1*05:01-B1*03:01L HLA-DRB1*13:02L HLA-DRB1*13:03M HLA-DRB1*01:03L HLA-DQA1*01:02-B1*06:02H HLA-DRB1*01:01L HLA-DRB4*03:01NL HLA-DRB1*08:77L HLA-DPA1*01:03-B1*03:01L
  REGION 1..10: note = CONT. FROM ABOVE: HLA-DPA1*03:01-B1*04:02L HLA-DRB1*03:01L HLA-D RB1*14:01L HLA-DRB1*11:03L HLA-DRB1*11:04L HLA-DRB1*14:02M HLA-D RB1*08:01L HLA-DRB1*11:01L HLA-DRB5*01:01L HLA-DQA1*01-B1*05L HL A-DQA1*05:05-B1*03:19L HLA-DRB4*02:01NL HLA-DQA1*05:01-B1*02:01M
  REGION 1..10: note = CONT. FROM ABOVE: HLA-DRB4*01:01L HLA-DPA1*01:03-B1*04:01M HLA-D QA1*05:05-B1*03:116L HLA-DRB1*09:01L HLA-DPA1*01:03-B1*04:02L HL A-DRB1*12:01L HLA-DPA1*02:01-B1*13:01L HLA-DPA1*03:01-B1*105:01M HLA-DPA1*01:03-B1*104:01L HLA-DQA1*05:05-B1*03:01L
  REGION 1..10: note = CONT. FROM ABOVE: HLA-DRB1*14:17L HLA-DPA1*01:02-B1*04:01L HLA-D RB1*10:01L HLA-DRB1*16:01L HLA-DQA1*01:03-B1*06:01L HLA-DRB1*08: 02L HLA-DQA1*02:01-B1*03:03L HLA-DRB1*15:01L HLA-DRB1*15:03L
DTANPKTPKY

SEQ ID NO: 9041 - protein, 11 aa, Severe acute respiratory syndrome coronavirus 2
  REGION 1..11: note = Table B: HLA-DQA1*03:02-B1*03:03L HLA-DRB1*13:03L HLA-DRB1*01:03L HLA-DRB1*04:02L HLA-DRB1*04:05L HLA-DRB1*01:02L HLA-DRB4*03:01NL HLA-DRB1*08:04L HLA-DRB1*14:01L HLA-DRB1*08:01L HLA-DQA1*05:05-B1*03:19L HLA-DQA1*05:01-B1*02:01L
  REGION 1..11: note = CONT. FROM ABOVE: HLA-DRB1*04:10L HLA-DPA1*01:03-B1*04:02L HLA-D RB1*12:01L HLA-DPA1*03:01-B1*105:01L HLA-DRB1*14:54L HLA-DQA1*05 :05-B1*03:01L HLA-DPA1*01:02-B1*04:01L HLA-DRB1*16:01L HLA-DRB1* 04:08L HLA-DRB1*15:03L
YKFVRIQPGQT

SEQ ID NO: 9042 - protein, 10 aa, Severe acute respiratory syndrome coronavirus 2
  REGION 1..10: note = Table B: HLA-DQA1*03:02-B1*03:03L HLA-DQA1*05:01-B1*03:01L HLA-DRB1*04:03L HLA-DRB1*13:02L HLA-DRB1*13:03L HLA-DRB1*01:03L HLA-DRB1*04:02L HLA-DRB1*04:05L HLA-DQA1*01:02-B1*06:02L HLA-DRB1*01:01L HLA-DRB1*01:02L HLA-DRB4*03:01NL HLA-DRB1*08:77L
  REGION 1..10: note = CONT. FROM ABOVE: HLA-DRB3*02:01L HLA-DPA1*01:03-B1*03:01L HLA-D PA1*03:01-B1*04:02L HLA-DRB1*14:01L HLA-DRB1*11:03L HLA-DRB1*14: 02L HLA-DQA1*01:01-B1*05:01L HLA-DRB1*11:01L HLA-DQA1*01-B1*05L HLA-DQA1*05:05-B1*03:19L HLA-DQA1*05:01-B1*02:01L
  REGION 1..10: note = CONT. FROM ABOVE: HLA-DRB4*01:01L HLA-DPA1*01:03-B1*04:01L HLA-D QA1*05:05-B1*03:116L HLA-DPA1*01:03-B1*04:02L HLA-DRB1*12:01L HL A-DPA1*02:01-B1*13:01L HLA-DPA1*03:01-B1*105:01L HLA-DQA1*03:01- B1*03:02L HLA-DQA1*05:05-B1*03:01L HLA-DPA1*01:02-B1*04:01L
  REGION 1..10: note = CONT. FROM ABOVE: HLA-DRB1*07:01L HLA-DRB1*10:01L HLA-DRB1*16:01 L HLA-DQA1*01:03-B1*06:01L HLA-DRB1*08:02L HLA-DQA1*02:01-B1*03: 03L HLA-DRB1*15:03L
FVRIQPGQTF

SEQ ID NO: 9043 - protein, 10 aa, Severe acute respiratory syndrome coronavirus 2
  REGION 1..10: note = Table B: HLA-DQA1*03:02-B1*03:03M HLA-DQA1*05:01-B1*03:01L HLA-DRB1*13:02L HLA-DRB1*13:03L HLA-DRB1*01:03L HLA-DRB1*04:05L HLA-DQA1*01:02-B1*06:02L HLA-DRB1*01:02L HLA-DPA1*03:01-B1*04:02L HLA-DRB1*14:01L HLA-DRB1*11:02L
  REGION 1..10: note = CONT. FROM ABOVE: HLA-DRB1*14:02L HLA-DRB1*08:01L HLA-DQA1*05:05 -B1*03:19M HLA-DQA1*05:01-B1*02:01L HLA-DQA1*05:05-B1*03:116L HL A-DRB1*09:01L HLA-DPA1*01:03-B1*04:02L HLA-DPA1*02:01-B1*13:01L HLA-DPA1*03:01-B1*105:01L HLA-DQA1*03:01-B1*03:02L
  REGION 1..10: note = CONT. FROM ABOVE: HLA-DPA1*01:03-B1*104:01L HLA-DPA1*01:02-B1*04 :01L HLA-DRB1*07:01L HLA-DRB1*10:01L HLA-DRB1*16:01L HLA-DQA1*01 :03-B1*06:01L HLA-DRB1*08:03L HLA-DQA1*02:01-B1*03:03M HLA-DRB1* 15:03L
RIQPGQTFSV

SEQ ID NO: 9044 - protein, 10 aa, Severe acute respiratory syndrome coronavirus 2
  REGION 1..10: note = Table B: HLA-DQA1*03:02-B1*03:03L HLA-DQA1*05:01-B1*03:01L HLA-DQA1*01:02-B1*06:02L HLA-DQA1*05:05-B1*03:19L HLA-DQA1*03:01-B1*03:02L HLA-DQA1*01:03-B1*06:01L HLA-DQA1*02:01-B1*03:03L
IQPGQTFSVL

SEQ ID NO: 9045 - protein, 17 aa, Severe acute respiratory syndrome coronavirus 2
  REGION 1..17: note = Table B: HLA-DQA1*03:02-B1*03:03L HLA-DQA1*05:01-B1*03:01L HLA-DRB1*04:01L HLA-DRB1*13:02L HLA-DRB1*04:02L HLA-DRB1*04:04L HLA-DRB1*04:05L HLA-DRB1*01:01L HLA-DRB1*14:02L HLA-DRB1*11:01L HLA-DQA1*01-B1*05L HLA-DQA1*05:05-B1*03:19L
  REGION 1..17: note = CONT. FROM ABOVE: HLA-DPA1*01:03-B1*04:02L HLA-DRB1*12:01L HLA-D QA1*03:01-B1*03:02L HLA-DQA1*01:03-B1*06:01L HLA-DQA1*02:01-B1*0 3:03L
QPGQTFSVLACYNGSPS

SEQ ID NO: 9046 - protein, 10 aa, Severe acute respiratory syndrome coronavirus 2
  REGION 1..10: note = Table B: HLA-DQA1*03:02-B1*03:03L
ACYNGSPSGV

SEQ ID NO: 9047 - protein, 10 aa, Severe acute respiratory syndrome coronavirus 2
  REGION 1..10: note = Table B: HLA-DQA1*03:02-B1*03:03L HLA-DQA1*05:01-B1*03:01L HLA-DRB1*04:03L HLA-DRB1*13:02L HLA-DRB1*13:03L HLA-DRB1*01:03L HLA-DRB1*04:02L HLA-DRB4*03:01NL HLA-DRB1*08:77L HLA-DRB1*11:03L HLA-DQA1*05:05-B1*03:19L HLA-DQA1*05:01-B1*02:01L
  REGION 1..10: note = CONT. FROM ABOVE: HLA-DRB1*12:01L HLA-DRB1*12:02L HLA-DQA1*03:01 -B1*03:02L HLA-DRB1*14:54L HLA-DQA1*05:05-B1*03:01L HLA-DRB1*14: 17L HLA-DRB1*16:01L HLA-DQA1*01:03-B1*06:01L HLA-DQA1*02:01-B1*0 3:03L
YNGSPSGVYQ

SEQ ID NO: 9048 - protein, 13 aa, Severe acute respiratory syndrome coronavirus 2
  REGION 1..13: note = Table B: HLA-DQA1*03:02-B1*03:03L HLA-DQA1*05:01-B1*03:01L HLA-DRB1*04:03L HLA-DRB1*13:03L HLA-DRB1*01:03L HLA-DRB1*04:02L HLA-DRB1*04:05L HLA-DRB1*01:02L HLA-DQA1*01:01-B1*05:01L HLA-DRB1*08:01L HLA-DQA1*05:05-B1*03:19L HLA-DRB1*12:01L
  REGION 1..13: note = CONT. FROM ABOVE: HLA-DPA1*03:01-B1*105:01L HLA-DQA1*03:01-B1*03 :02L HLA-DQA1*05:05-B1*03:01L HLA-DPA1*01:02-B1*04:01L HLA-DRB1* 16:01L HLA-DRB1*04:08L HLA-DQA1*02:01-B1*03:03L
SPSGVYQCAMRPN

SEQ ID NO: 9049 - protein, 12 aa, Severe acute respiratory syndrome coronavirus 2
  REGION 1..12: note = Table B: HLA-DQA1*03:02-B1*03:03L HLA-DRB1*04:03L HLA-DRB1*01:03L HLA-DRB1*01:02L HLA-DRB1*08:04L HLA-DRB1*14:01L HLA-DRB1*08:01L HLA-DRB1*11:01L HLA-DQA1*05:05-B1*03:19L HLA-DPA1*01:03-B1*04:02L HLA-DRB1*12:01L HLA-DRB1*16:01L
  REGION 1..12: note = CONT. FROM ABOVE: HLA-DRB1*04:08L HLA-DRB1*15:03L
GVYQCAMRPNFT

SEQ ID NO: 9050 - protein, 14 aa, Severe acute respiratory syndrome coronavirus 2
  REGION 1..14: note = Table B: HLA-DQA1*03:02-B1*03:03L HLA-DRB1*04:03L HLA-DRB1*01:03L HLA-DRB1*04:05L HLA-DRB1*01:02L HLA-DPA1*01:03-B1*03:01L HLA-DPA1*01:03-B1*04:02L HLA-DRB1*12:01L HLA-DPA1*02:01-B1*13:01L
  REGION 1..14: note = CONT. FROM ABOVE: HLA-DPA1*03:01-B1*105:01L HLA-DQA1*03:01-B1*03 :02L HLA-DPA1*01:03-B1*104:01L HLA-DRB1*04:08L HLA-DQA1*02:01-B1 *03:03L HLA-DRB1*15:03L
IKGSFLNGSCGSVG

SEQ ID NO: 9051 - protein, 10 aa, Severe acute respiratory syndrome coronavirus 2
  REGION 1..10: note = Table B: HLA-DQA1*03:02-B1*03:03L HLA-DQA1*03:01-B1*03:02L HLA-DRB1*16:01L HLA-DQA1*02:01-B1*03:03L
HMELPTGVHA

SEQ ID NO: 9052 - protein, 10 aa, Severe acute respiratory syndrome coronavirus 2
  REGION 1..10: note = Table B: HLA-DQA1*03:02-B1*03:03L HLA-DQA1*03:01-B1*03:02L
MELPTGVHAG

SEQ ID NO: 9053 - protein, 10 aa, Severe acute respiratory syndrome coronavirus 2
  REGION 1..10: note = Table B: HLA-DQA1*03:02-B1*03:03L HLA-DRB1*04:03L HLA-DRB1*13:03L HLA-DQA1*01-B1*05L HLA-DQA1*03:01-B1*03:02L HLA-DQA1*02:01-B1*03:03L
LPTGVHAGTD

SEQ ID NO: 9054 - protein, 10 aa, Severe acute respiratory syndrome coronavirus 2
  REGION 1..10: note = Table B: HLA-DQA1*03:02-B1*03:03L HLA-DRB1*04:03L HLA-DQA1*05:01-B1*02:01L HLA-DQA1*03:01-B1*03:02L HLA-DRB1*14:17L HLA-DQA1*01:03-B1*06:01L HLA-DQA1*02:01-B1*03:03L
VHAGTDLEGN

SEQ ID NO: 9055 - protein, 10 aa, Severe acute respiratory syndrome coronavirus 2
  REGION 1..10: note = Table B: HLA-DQA1*03:02-B1*03:03L HLA-DQA1*05:05-B1*03:19L
LEGNFYGPFV

SEQ ID NO: 9056 - protein, 12 aa, Severe acute respiratory syndrome coronavirus 2
  REGION 1..12: note = Table B: HLA-DQA1*03:02-B1*03:03L HLA-DRB1*04:03L HLA-DQA1*05:01-B1*02:01L HLA-DQA1*01:03-B1*06:01L
EGNFYGPFVDRQ

SEQ ID NO: 9057 - protein, 12 aa, Severe acute respiratory syndrome coronavirus 2
  REGION 1..12: note = Table B: HLA-DQA1*03:02-B1*03:03L HLA-DRB1*04:03L HLA-DRB1*04:02L HLA-DRB1*04:05L HLA-DQA1*01:02-B1*06:02L HLA-DQA1*05:01-B1*02:01L HLA-DPA1*02:01-B1*13:01L HLA-DPA1*03:01-B1*105:01L HLA-DPA1*01:02-B1*04:01L
  REGION 1..12: note = CONT. FROM ABOVE: HLA-DRB1*16:01L HLA-DQA1*01:03-B1*06:01L HLA-D RB1*04:08L HLA-DRB1*15:03L
GNFYGPFVDRQT

SEQ ID NO: 9058 - protein, 10 aa, Severe acute respiratory syndrome coronavirus 2
  REGION 1..10: note = Table B: HLA-DQA1*03:02-B1*03:03L HLA-DRB1*04:03L HLA-DRB1*13:03L HLA-DRB1*04:02L HLA-DRB1*04:05L HLA-DQA1*01-B1*05L HLA-DQA1*03:01-B1*03:02L HLA-DRB1*14:17L HLA-DRB1*16:01L HLA-DQA1*02:01-B1*03:03L
YGPFVDRQTA

SEQ ID NO: 9059 - protein, 11 aa, Severe acute respiratory syndrome coronavirus 2
  REGION 1..11: note = Table B: HLA-DQA1*03:02-B1*03:03L HLA-DQA1*05:01-B1*03:01L HLA-DRB1*01:03L HLA-DRB1*04:05L HLA-DRB4*03:01NL HLA-DRB1*14:01L HLA-DRB1*08:01L HLA-DQA1*05:01-B1*02:01L HLA-DRB1*12:01L HLA-DRB1*14:54L HLA-DPA1*01:02-B1*04:01L HLA-DRB1*16:01L
GPFVDRQTAQA

SEQ ID NO: 9060 - protein, 11 aa, Severe acute respiratory syndrome coronavirus 2
  REGION 1..11: note = Table B: HLA-DQA1*03:02-B1*03:03L HLA-DQA1*05:01-B1*03:01L HLA-DQA1*03:01-B1*03:02L HLA-DQA1*02:01-B1*03:03L
DRQTAQAAGTD

SEQ ID NO: 9061 - protein, 12 aa, Severe acute respiratory syndrome coronavirus 2
  REGION 1..12: note = Table B: HLA-DQA1*03:02-B1*03:03L HLA-DQA1*05:01-B1*03:01L HLA-DRB1*04:03L HLA-DRB1*04:02L HLA-DQA1*01:02-B1*06:02L HLA-DQA1*01:01-B1*05:01L HLA-DQA1*05:05-B1*03:19L HLA-DQA1*05:01-B1*02:01L HLA-DQA1*03:01-B1*03:02L
  REGION 1..12: note = CONT. FROM ABOVE: HLA-DQA1*05:05-B1*03:01L HLA-DRB1*14:17L HLA-D QA1*01:03-B1*06:01L HLA-DQA1*02:01-B1*03:03L
RQTAQAAGTDTT

SEQ ID NO: 9062 - protein, 10 aa, Severe acute respiratory syndrome coronavirus 2
  REGION 1..10: note = Table B: HLA-DQA1*03:02-B1*03:03L HLA-DQA1*05:05-B1*03:19L HLA-DPA1*01:03-B1*104:01L
AQAAGTDTTI

SEQ ID NO: 9063 - protein, 10 aa, Severe acute respiratory syndrome coronavirus 2
  REGION 1..10: note = Table B: HLA-DQA1*03:02-B1*03:03L HLA-DQA1*05:05-B1*03:19M HLA-DQA1*05:01-B1*02:01L HLA-DRB1*09:01L HLA-DPA1*03:01-B1*105:01L HLA-DQA1*03:01-B1*03:02L HLA-DPA1*01:03-B1*104:01L HLA-DRB1*16:01L
  REGION 1..10: note = CONT. FROM ABOVE: HLA-DQA1*02:01-B1*03:03L HLA-DRB1*15:03L
GTDTTITVNV

SEQ ID NO: 9064 - protein, 10 aa, Severe acute respiratory syndrome coronavirus 2
  REGION 1..10: note = Table B: HLA-DQA1*03:02-B1*03:03L HLA-DQA1*05:01-B1*02:01L HLA-DQA1*03:01-B1*03:02L
TDTTITVNVL

SEQ ID NO: 9065 - protein, 10 aa, Severe acute respiratory syndrome coronavirus 2
  REGION 1..10: note = Table B: HLA-DQA1*03:02-B1*03:03L HLA-DQA1*05:01-B1*03:01L HLA-DRB1*13:03L HLA-DQA1*01:02-B1*06:02M HLA-DRB1*08:77L HLA-DRB1*14:02L HLA-DQA1*05:05-B1*03:19L HLA-DQA1*05:01-B1*02:01L HLA-DRB4*01:01L
  REGION 1..10: note = CONT. FROM ABOVE: HLA-DPA1*01:03-B1*04:01L HLA-DPA1*02:01-B1*13: 01L HLA-DPA1*03:01-B1*105:01L HLA-DQA1*01:03-B1*06:01L HLA-DQA1* 02:01-B1*03:03L HLA-DRB1*15:03L
TTITVNVLAW

SEQ ID NO: 9066 - protein, 10 aa, Severe acute respiratory syndrome coronavirus 2
  REGION 1..10: note = Table B: HLA-DQA1*03:02-B1*03:03L HLA-DQA1*05:01-B1*03:01L HLA-DRB1*04:03L HLA-DRB1*01:03L HLA-DRB1*04:02L HLA-DRB1*04:05L HLA-DQA1*01:02-B1*06:02L HLA-DRB4*03:01NL HLA-DQA1*01:01-B1*05:01L HLA-DQA1*05:05-B1*03:19L
  REGION 1..10: note = CONT. FROM ABOVE: HLA-DQA1*05:01-B1*02:01L HLA-DPA1*01:03-B1*04: 02L HLA-DPA1*03:01-B1*105:01L HLA-DQA1*03:01-B1*03:02L HLA-DQA1* 05:05-B1*03:01L HLA-DRB1*14:17L HLA-DPA1*01:02-B1*04:01L HLA-DRB 1*16:01L HLA-DQA1*01:03-B1*06:01M HLA-DRB1*04:08L
  REGION 1..10: note = CONT. FROM ABOVE: HLA-DQA1*02:01-B1*03:03L
LYAAVINGDR

SEQ ID NO: 9067 - protein, 10 aa, Severe acute respiratory syndrome coronavirus 2
  REGION 1..10: note = Table B: HLA-DQA1*03:02-B1*03:03L HLA-DQA1*05:01-B1*03:01L HLA-DRB1*04:03L HLA-DRB1*13:03L HLA-DRB1*01:03L HLA-DRB1*04:05L HLA-DQA1*01:02-B1*06:02M HLA-DRB1*08:77L HLA-DPA1*01:03-B1*03:01L HLA-DPA1*03:01-B1*04:02L
  REGION 1..10: note = CONT. FROM ABOVE: HLA-DRB1*03:01L HLA-DRB1*14:01L HLA-DRB1*14:02 L HLA-DQA1*01-B1*05L HLA-DQA1*05:05-B1*03:19L HLA-DQA1*05:01-B1* 02:01L HLA-DRB4*01:01L HLA-DPA1*01:03-B1*04:01L HLA-DQA1*05:05-B 1*03:116L HLA-DPA1*01:03-B1*04:02L HLA-DRB1*12:01L
  REGION 1..10: note = CONT. FROM ABOVE: HLA-DPA1*02:01-B1*13:01L HLA-DPA1*03:01-B1*105 :01L HLA-DQA1*03:01-B1*03:02L HLA-DPA1*01:03-B1*104:01L HLA-DQA1 *05:05-B1*03:01L HLA-DPA1*01:02-B1*04:01L HLA-DRB1*10:01L HLA-DR B1*16:01L HLA-DQA1*01:03-B1*06:01L HLA-DQA1*02:01-B1*03:03L
  REGION 1..10: note = CONT. FROM ABOVE: HLA-DRB1*15:03L
YAAVINGDRW

SEQ ID NO: 9068 - protein, 10 aa, Severe acute respiratory syndrome coronavirus 2
  REGION 1..10: note = Table B: HLA-DQA1*03:02-B1*03:03M HLA-DQA1*05:01-B1*03:01L HLA-DQA1*01:02-B1*06:02L HLA-DRB1*01:02L HLA-DPA1*03:01-B1*04:02L HLA-DRB1*14:01L HLA-DRB1*14:02L HLA-DQA1*05:05-B1*03:19L HLA-DQA1*05:01-B1*02:01L
  REGION 1..10: note = CONT. FROM ABOVE: HLA-DQA1*05:05-B1*03:116L HLA-DRB1*09:01L HLA- DPA1*03:01-B1*105:01L HLA-DQA1*03:01-B1*03:02L HLA-DPA1*01:03-B1 *104:01L HLA-DPA1*01:02-B1*04:01L HLA-DQA1*01:03-B1*06:01L HLA-D RB1*08:03L HLA-DQA1*02:01-B1*03:03L HLA-DRB1*15:03L
AVINGDRWFL

SEQ ID NO: 9069 - protein, 10 aa, Severe acute respiratory syndrome coronavirus 2
  REGION 1..10: note = Table B: HLA-DQA1*03:02-B1*03:03L HLA-DQA1*01:02-B1*06:02L HLA-DPA1*03:01-B1*04:02L HLA-DQA1*05:05-B1*03:19L HLA-DPA1*01:03-B1*04:01L HLA-DPA1*01:03-B1*04:02L HLA-DPA1*02:01-B1*13:01L HLA-DPA1*03:01-B1*105:01L
  REGION 1..10: note = CONT. FROM ABOVE: HLA-DPA1*01:02-B1*04:01L HLA-DRB1*16:01L HLA-D QA1*01:03-B1*06:01L HLA-DQA1*02:01-B1*03:03L HLA-DRB1*15:03L
WFLNRFTTTL

SEQ ID NO: 9070 - protein, 11 aa, Severe acute respiratory syndrome coronavirus 2
  REGION 1..11: note = Table B: HLA-DQA1*03:02-B1*03:03L HLA-DRB1*16:01L
NRFTTTLNDFN

SEQ ID NO: 9071 - protein, 10 aa, Severe acute respiratory syndrome coronavirus 2
  REGION 1..10: note = Table B: HLA-DQA1*03:02-B1*03:03L HLA-DQA1*01-B1*05L HLA-DQA1*05:01-B1*02:01L HLA-DQA1*03:01-B1*03:02L
FTTTLNDFNL

SEQ ID NO: 9072 - protein, 10 aa, Severe acute respiratory syndrome coronavirus 2
  REGION 1..10: note = Table B: HLA-DQA1*03:02-B1*03:03M HLA-DQA1*05:01-B1*03:01L HLA-DQA1*01:02-B1*06:02L HLA-DRB1*01:02L HLA-DPA1*03:01-B1*04:02L HLA-DRB1*14:01L HLA-DRB1*14:02L HLA-DQA1*05:05-B1*03:19L HLA-DQA1*05:01-B1*02:01L
  REGION 1..10: note = CONT. FROM ABOVE: HLA-DPA1*01:03-B1*04:01L HLA-DQA1*05:05-B1*03: 116L HLA-DRB1*09:01L HLA-DPA1*01:03-B1*04:02L HLA-DPA1*02:01-B1* 13:01L HLA-DPA1*03:01-B1*105:01L HLA-DQA1*03:01-B1*03:02L HLA-DP A1*01:03-B1*104:01L HLA-DPA1*01:02-B1*04:01L HLA-DRB1*10:01L
  REGION 1..10: note = CONT. FROM ABOVE: HLA-DRB1*16:01L HLA-DQA1*01:03-B1*06:01L HLA-D RB1*08:03L HLA-DQA1*02:01-B1*03:03L HLA-DRB1*15:03L
TLNDFNLVAM

SEQ ID NO: 9073 - protein, 12 aa, Severe acute respiratory syndrome coronavirus 2
  REGION 1..12: note = Table B: HLA-DQA1*03:02-B1*03:03L HLA-DPA1*03:01-B1*105:01L HLA-DQA1*01:03-B1*06:01L HLA-DQA1*02:01-B1*03:03L
LNDFNLVAMKYN

SEQ ID NO: 9074 - protein, 13 aa, Severe acute respiratory syndrome coronavirus 2
  REGION 1..13: note = Table B: HLA-DQA1*03:02-B1*03:03L HLA-DQA1*05:01-B1*03:01L HLA-DRB1*04:03L HLA-DRB1*01:03L HLA-DRB1*04:05L HLA-DRB1*01:02L HLA-DRB1*08:04L HLA-DPA1*01:03-B1*03:01L HLA-DRB1*14:01L HLA-DRB1*08:01L HLA-DQA1*01-B1*05L HLA-DPA1*01:03-B1*04:01L
  REGION 1..13: note = CONT. FROM ABOVE: HLA-DPA1*01:03-B1*04:02L HLA-DPA1*02:01-B1*13: 01L HLA-DQA1*03:01-B1*03:02L HLA-DPA1*01:03-B1*02:01L HLA-DQA1*0 5:05-B1*03:01L HLA-DRB1*16:01L HLA-DQA1*01:03-B1*06:01L HLA-DRB1 *04:08L HLA-DQA1*02:01-B1*03:03L
DFNLVAMKYNYEP

SEQ ID NO: 9075 - protein, 13 aa, Severe acute respiratory syndrome coronavirus 2
  REGION 1..13: note = Table B: HLA-DQA1*03:02-B1*03:03L HLA-DRB1*01:03L HLA-DRB1*04:05L HLA-DRB1*01:02L HLA-DRB1*08:04L HLA-DRB1*08:01L HLA-DPA1*02:01-B1*13:01L
LVAMKYNYEPLTQ

SEQ ID NO: 9076 - protein, 10 aa, Severe acute respiratory syndrome coronavirus 2
  REGION 1..10: note = Table B: HLA-DQA1*03:02-B1*03:03L HLA-DRB1*04:03L HLA-DRB1*13:03L HLA-DRB1*01:03L HLA-DRB1*04:02L HLA-DRB1*04:05L HLA-DRB4*03:01NL HLA-DQA1*01-B1*05L HLA-DQA1*05:01-B1*02:01L HLA-DRB1*04:10L HLA-DPA1*03:01-B1*105:01L
  REGION 1..10: note = CONT. FROM ABOVE: HLA-DQA1*03:01-B1*03:02L HLA-DRB1*14:17L HLA-D PA1*01:02-B1*04:01L HLA-DRB1*16:01L HLA-DQA1*01:03-B1*06:01L HLA -DRB1*04:08L HLA-DQA1*02:01-B1*03:03L
YNYEPLTQDH

SEQ ID NO: 9077 - protein, 10 aa, Severe acute respiratory syndrome coronavirus 2
  REGION 1..10: note = Table B: HLA-DQA1*03:02-B1*03:03L HLA-DRB1*04:03L HLA-DQA1*01-B1*05L HLA-DQA1*05:01-B1*02:01L HLA-DQA1*03:01-B1*03:02L HLA-DRB1*16:01L HLA-DQA1*01:03-B1*06:01L HLA-DQA1*02:01-B1*03:03L
YEPLTQDHVD

SEQ ID NO: 9078 - protein, 11 aa, Severe acute respiratory syndrome coronavirus 2
  REGION 1..11: note = Table B: HLA-DQA1*03:02-B1*03:03L HLA-DRB1*04:03L HLA-DQA1*01-B1*05L HLA-DQA1*05:01-B1*02:01L HLA-DQA1*03:01-B1*03:02L HLA-DRB1*16:01L HLA-DQA1*02:01-B1*03:03L
EPLTQDHVDIL

SEQ ID NO: 9079 - protein, 10 aa, Severe acute respiratory syndrome coronavirus 2
  REGION 1..10: note = Table B: HLA-DQA1*03:02-B1*03:03L HLA-DQA1*05:05-B1*03:19L HLA-DQA1*03:01-B1*03:02L
HVDILGPLSA

SEQ ID NO: 9080 - protein, 12 aa, Severe acute respiratory syndrome coronavirus 2
  REGION 1..12: note = Table B: HLA-DQA1*03:02-B1*03:03L HLA-DQA1*05:01-B1*03:01L HLA-DRB1*01:03L HLA-DRB1*04:02L HLA-DRB1*04:04L HLA-DRB1*04:05L HLA-DQA1*01:02-B1*06:02L HLA-DRB1*01:02L HLA-DRB4*03:01NL HLA-DPA1*01:03-B1*03:01L HLA-DQA1*05:05-B1*03:19L
  REGION 1..12: note = CONT. FROM ABOVE: HLA-DQA1*05:01-B1*02:01L HLA-DRB1*04:10L HLA-D RB1*12:01L HLA-DPA1*03:01-B1*105:01L HLA-DRB1*14:54L HLA-DQA1*05 :05-B1*03:01L HLA-DRB1*10:01L HLA-DRB1*16:01L HLA-DRB1*04:08L
VDILGPLSAQTG

SEQ ID NO: 9081 - protein, 12 aa, Severe acute respiratory syndrome coronavirus 2
  REGION 1..12: note = Table B: HLA-DQA1*03:02-B1*03:03L HLA-DQA1*05:01-B1*03:01L HLA-DQA1*01:02-B1*06:02L HLA-DRB1*01:02L HLA-DQA1*05:05-B1*03:19L HLA-DQA1*03:01-B1*03:02L HLA-DQA1*05:05-B1*03:01L HLA-DQA1*01:03-B1*06:01L
  REGION 1..12: note = CONT. FROM ABOVE: HLA-DQA1*02:01-B1*03:03L
ILGPLSAQTGIA

SEQ ID NO: 9082 - protein, 12 aa, Severe acute respiratory syndrome coronavirus 2
  REGION 1..12: note = Table B: HLA-DQA1*03:02-B1*03:03L HLA-DQA1*05:01-B1*03:01L HLA-DQA1*05:05-B1*03:19L HLA-DQA1*05:01-B1*02:01L HLA-DQA1*03:01-B1*03:02L HLA-DQA1*05:05-B1*03:01L HLA-DQA1*02:01-B1*03:03L
GPLSAQTGIAVL

SEQ ID NO: 9083 - protein, 10 aa, Severe acute respiratory syndrome coronavirus 2
  REGION 1..10: note = Table B: HLA-DQA1*03:02-B1*03:03L HLA-DQA1*05:01-B1*03:01L HLA-DQA1*01:02-B1*06:02L HLA-DQA1*05:05-B1*03:19L HLA-DQA1*05:01-B1*02:01L HLA-DPA1*03:01-B1*105:01L HLA-DQA1*03:01-B1*03:02L HLA-DQA1*05:05-B1*03:01L
  REGION 1..10: note = CONT. FROM ABOVE: HLA-DQA1*01:03-B1*06:01L HLA-DQA1*02:01-B1*03: 03L
AQTGIAVLDM

SEQ ID NO: 9084 - protein, 10 aa, Severe acute respiratory syndrome coronavirus 2
  REGION 1..10: note = Table B: HLA-DQA1*03:02-B1*03:03L HLA-DQA1*01:02-B1*06:02L HLA-DPA1*03:01-B1*105:01L HLA-DQA1*03:01-B1*03:02L HLA-DQA1*02:01-B1*03:03L HLA-DRB1*15:03L
SLKELLQNGM

SEQ ID NO: 9085 - protein, 10 aa, Severe acute respiratory syndrome coronavirus 2
  REGION 1..10: note = Table B: HLA-DQA1*03:02-B1*03:03L HLA-DQA1*05:05-B1*03:19L
LQNGMNGRTI

SEQ ID NO: 9086 - protein, 10 aa, Severe acute respiratory syndrome coronavirus 2
  REGION 1..10: note = Table B: HLA-DQA1*03:02-B1*03:03L HLA-DQA1*05:01-B1*03:01L HLA-DQA1*03:01-B1*03:02L HLA-DQA1*02:01-B1*03:03L
NGRTILGSAL

SEQ ID NO: 9087 - protein, 12 aa, Severe acute respiratory syndrome coronavirus 2
  REGION 1..12: note = Table B: HLA-DQA1*03:02-B1*03:03L HLA-DQA1*05:01-B1*03:01L HLA-DRB1*04:03L HLA-DRB1*01:03L HLA-DQA1*01:02-B1*06:02L HLA-DRB1*01:02L HLA-DPA1*01:03-B1*03:01L HLA-DPA1*03:01-B1*04:02L HLA-DRB1*08:01L HLA-DQA1*01-B1*05L
  REGION 1..12: note = CONT. FROM ABOVE: HLA-DQA1*05:01-B1*02:01L HLA-DPA1*01:03-B1*04: 01L HLA-DPA1*01:03-B1*04:02L HLA-DRB1*12:01L HLA-DQA1*03:01-B1*0 3:02L HLA-DQA1*05:05-B1*03:01L HLA-DPA1*01:02-B1*04:01L HLA-DRB1 *16:01L HLA-DRB1*04:08L HLA-DQA1*02:01-B1*03:03L HLA-DRB1*15:03L
RTILGSALLEDE

SEQ ID NO: 9088 - protein, 10 aa, Severe acute respiratory syndrome coronavirus 2
  REGION 1..10: note = Table B: HLA-DQA1*03:02-B1*03:03L HLA-DQA1*01:02-B1*06:02L HLA-DQA1*05:05-B1*03:19L HLA-DQA1*05:01-B1*02:01L HLA-DQA1*02:01-B1*03:03L HLA-DRB1*15:03L
ALLEDEFTPF

SEQ ID NO: 9089 - protein, 10 aa, Severe acute respiratory syndrome coronavirus 2
  REGION 1..10: note = Table B: HLA-DQA1*03:02-B1*03:03L HLA-DQA1*05:05-B1*03:19L HLA-DPA1*01:03-B1*104:01L
LEDEFTPFDV

SEQ ID NO: 9090 - protein, 10 aa, Severe acute respiratory syndrome coronavirus 2
  REGION 1..10: note = Table B: HLA-DQA1*03:02-B1*03:03L
EDEFTPFDVV

SEQ ID NO: 9091 - protein, 10 aa, Severe acute respiratory syndrome coronavirus 2
  REGION 1..10: note = Table B: HLA-DQA1*03:02-B1*03:03L HLA-DRB1*13:02L HLA-DRB1*13:03L HLA-DRB1*04:02L HLA-DQA1*01:02-B1*06:02L HLA-DRB4*03:01NL HLA-DRB3*02:01L HLA-DRB1*08:01L HLA-DRB5*01:01L HLA-DQA1*01-B1*05L HLA-DQA1*05:01-B1*02:01L
  REGION 1..10: note = CONT. FROM ABOVE: HLA-DPA1*01:03-B1*04:02L HLA-DRB1*12:01L HLA-D PA1*03:01-B1*105:01L HLA-DQA1*03:01-B1*03:02L HLA-DQA1*05:05-B1* 03:01L HLA-DRB1*14:17L HLA-DPA1*01:02-B1*04:01L HLA-DRB1*16:01L HLA-DQA1*01:03-B1*06:01L HLA-DQA1*02:01-B1*03:03L
DEFTPFDVVR

SEQ ID NO: 9092 - protein, 10 aa, Severe acute respiratory syndrome coronavirus 2
  REGION 1..10: note = Table B: HLA-DQA1*03:02-B1*03:03L HLA-DQA1*05:01-B1*03:01L HLA-DRB1*04:03L HLA-DRB1*13:03L HLA-DRB1*01:03L HLA-DRB1*04:02L HLA-DRB1*04:04L HLA-DRB1*04:05L HLA-DQA1*01:02-B1*06:02L HLA-DRB1*01:02L HLA-DRB4*03:01NL HLA-DRB1*08:04L
  REGION 1..10: note = CONT. FROM ABOVE: HLA-DPA1*01:03-B1*03:01L HLA-DPA1*03:01-B1*04: 02L HLA-DRB1*14:01L HLA-DQA1*01:01-B1*05:01L HLA-DRB1*08:01L HLA -DQA1*01-B1*05L HLA-DQA1*05:05-B1*03:19L HLA-DQA1*05:01-B1*02:01 L HLA-DPA1*01:03-B1*04:01L HLA-DRB1*04:10L
  REGION 1..10: note = CONT. FROM ABOVE: HLA-DPA1*01:03-B1*04:02L HLA-DRB1*12:01L HLA-D PA1*02:01-B1*13:01L HLA-DPA1*03:01-B1*105:01L HLA-DQA1*03:01-B1* 03:02L HLA-DRB1*14:54L HLA-DPA1*01:03-B1*02:01L HLA-DQA1*05:05-B 1*03:01L HLA-DRB1*14:17L HLA-DPA1*01:02-B1*04:01L
  REGION 1..10: note = CONT. FROM ABOVE: HLA-DRB1*10:01L HLA-DRB1*16:01L HLA-DQA1*01:03 -B1*06:01L HLA-DRB1*04:08L HLA-DQA1*02:01-B1*03:03L HLA-DRB1*15: 03L
EFTPFDVVRQ

SEQ ID NO: 9093 - protein, 10 aa, Severe acute respiratory syndrome coronavirus 2
  REGION 1..10: note = Table B: HLA-DQA1*03:02-B1*03:03L HLA-DQA1*05:01-B1*03:01L HLA-DQA1*03:01-B1*03:02L HLA-DQA1*05:05-B1*03:01L HLA-DQA1*01:03-B1*06:01L HLA-DQA1*02:01-B1*03:03L
SGVTFQSAVK

SEQ ID NO: 9094 - protein, 10 aa, Severe acute respiratory syndrome coronavirus 2
  REGION 1..10: note = Table B: HLA-DQA1*03:02-B1*03:03M HLA-DQA1*05:01-B1*03:01L HLA-DRB1*04:03L HLA-DQA1*01:02-B1*06:02L HLA-DRB1*01:02L HLA-DPA1*03:01-B1*04:02L HLA-DRB1*14:01L HLA-DRB1*14:02L HLA-DQA1*05:05-B1*03:19L HLA-DQA1*05:01-B1*02:01L
  REGION 1..10: note = CONT. FROM ABOVE: HLA-DQA1*05:05-B1*03:116L HLA-DRB1*09:01L HLA- DRB1*12:01L HLA-DPA1*03:01-B1*105:01L HLA-DQA1*03:01-B1*03:02L H LA-DPA1*01:02-B1*04:01L HLA-DRB1*07:01L HLA-DRB1*10:01L HLA-DRB1 *16:01L HLA-DQA1*01:03-B1*06:01L HLA-DRB1*08:03L
  REGION 1..10: note = CONT. FROM ABOVE: HLA-DQA1*02:01-B1*03:03L HLA-DRB1*15:03L
VLVQSTQWSL

SEQ ID NO: 9095 - protein, 10 aa, Severe acute respiratory syndrome coronavirus 2
  REGION 1..10: note = Table B: HLA-DQA1*03:02-B1*03:03L HLA-DRB1*04:05L HLA-DQA1*01:02-B1*06:02L HLA-DPA1*03:01-B1*04:02L HLA-DRB1*14:02L HLA-DQA1*05:05-B1*03:19L HLA-DQA1*05:01-B1*02:01L HLA-DPA1*01:03-B1*04:01L
  REGION 1..10: note = CONT. FROM ABOVE: HLA-DPA1*02:01-B1*13:01L HLA-DPA1*03:01-B1*105 :01L HLA-DPA1*01:03-B1*104:01L HLA-DPA1*01:02-B1*04:01L HLA-DRB1 *16:01L HLA-DQA1*01:03-B1*06:01L HLA-DQA1*02:01-B1*03:03L HLA-DR B1*15:03L
FLYENAFLPF

SEQ ID NO: 9096 - protein, 10 aa, Severe acute respiratory syndrome coronavirus 2
  REGION 1..10: note = Table B: HLA-DQA1*03:02-B1*03:03L HLA-DPA1*03:01-B1*04:02L HLA-DQA1*01-B1*05L HLA-DQA1*05:01-B1*02:01L HLA-DPA1*01:03-B1*04:01L HLA-DPA1*03:01-B1*105:01L HLA-DPA1*01:02-B1*04:01L HLA-DQA1*01:03-B1*06:01L
LYENAFLPFA

SEQ ID NO: 9097 - protein, 10 aa, Severe acute respiratory syndrome coronavirus 2
  REGION 1..10: note = Table B: HLA-DQA1*03:02-B1*03:03L HLA-DQA1*05:05-B1*03:19M HLA-DQA1*03:01-B1*03:02L HLA-DPA1*01:03-B1*104:01L
YENAFLPFAM

SEQ ID NO: 9098 - protein, 10 aa, Severe acute respiratory syndrome coronavirus 2
  REGION 1..10: note = Table B: HLA-DQA1*03:02-B1*03:03L HLA-DQA1*01:02-B1*06:02L HLA-DQA1*05:05-B1*03:19L HLA-DPA1*02:01-B1*13:01L HLA-DPA1*03:01-B1*105:01L HLA-DQA1*01:03-B1*06:01L HLA-DRB1*15:03L
NAFLPFAMGI

SEQ ID NO: 9099 - protein, 10 aa, Severe acute respiratory syndrome coronavirus 2
  REGION 1..10: note = Table B: HLA-DQA1*03:02-B1*03:03L HLA-DQA1*05:01-B1*03:01L HLA-DRB1*13:03L HLA-DRB1*04:05L HLA-DQA1*01:02-B1*06:02L HLA-DPA1*03:01-B1*04:02L HLA-DRB1*14:01L HLA-DQA1*01-B1*05L HLA-DQA1*05:05-B1*03:116L HLA-DPA1*02:01-B1*13:01L
  REGION 1..10: note = CONT. FROM ABOVE: HLA-DPA1*03:01-B1*105:01L HLA-DQA1*03:01-B1*03 :02L HLA-DPA1*01:02-B1*04:01L HLA-DQA1*02:01-B1*03:03L HLA-DRB1* 15:03L
LPFAMGIIAM

SEQ ID NO: 9100 - protein, 10 aa, Severe acute respiratory syndrome coronavirus 2
  REGION 1..10: note = Table B: HLA-DQA1*03:02-B1*03:03L HLA-DQA1*05:05-B1*03:19L HLA-DQA1*05:05-B1*03:116L HLA-DPA1*02:01-B1*13:01L HLA-DQA1*03:01-B1*03:02L HLA-DPA1*01:03-B1*104:01L HLA-DQA1*01:03-B1*06:01L HLA-DQA1*02:01-B1*03:03L
  REGION 1..10: note = CONT. FROM ABOVE: HLA-DRB1*15:03L
LFLLPSLATV

SEQ ID NO: 9101 - protein, 10 aa, Severe acute respiratory syndrome coronavirus 2
  REGION 1..10: note = Table B: HLA-DQA1*03:02-B1*03:03L HLA-DQA1*05:01-B1*03:01L HLA-DRB1*04:03L HLA-DRB1*13:03L HLA-DRB1*01:03L HLA-DQA1*01:02-B1*06:02L HLA-DRB4*03:01NL HLA-DRB1*08:77L HLA-DPA1*01:03-B1*03:01L HLA-DPA1*03:01-B1*04:02L
  REGION 1..10: note = CONT. FROM ABOVE: HLA-DRB1*03:01L HLA-DRB1*14:01L HLA-DRB1*11:02 L HLA-DRB1*14:02L HLA-DQA1*01-B1*05L HLA-DQA1*05:05-B1*03:19M HL A-DQA1*05:01-B1*02:01L HLA-DRB4*01:01L HLA-DPA1*01:03-B1*04:01L HLA-DQA1*05:05-B1*03:116L HLA-DPA1*01:03-B1*04:02L
  REGION 1..10: note = CONT. FROM ABOVE: HLA-DRB1*12:01L HLA-DPA1*02:01-B1*13:01L HLA-D PA1*03:01-B1*105:01L HLA-DPA1*01:03-B1*104:01L HLA-DQA1*05:05-B1 *03:01L HLA-DPA1*01:02-B1*04:01L HLA-DRB1*10:01L HLA-DRB1*16:01L HLA-DQA1*01:03-B1*06:01L HLA-DRB1*08:02L
  REGION 1..10: note = CONT. FROM ABOVE: HLA-DQA1*02:01-B1*03:03L HLA-DRB1*15:03L
LLPSLATVAY

SEQ ID NO: 9102 - protein, 10 aa, Severe acute respiratory syndrome coronavirus 2
  REGION 1..10: note = Table B: HLA-DQA1*03:02-B1*03:03L HLA-DQA1*01:02-B1*06:02L HLA-DQA1*05:05-B1*03:19L HLA-DPA1*02:01-B1*13:01L HLA-DPA1*03:01-B1*105:01L HLA-DQA1*03:01-B1*03:02L HLA-DQA1*01:03-B1*06:01L HLA-DQA1*02:01-B1*03:03L
  REGION 1..10: note = CONT. FROM ABOVE: HLA-DRB1*15:03L
MVYMPASWVM

SEQ ID NO: 9103 - protein, 10 aa, Severe acute respiratory syndrome coronavirus 2
  REGION 1..10: note = Table B: HLA-DQA1*03:02-B1*03:03L HLA-DQA1*01:02-B1*06:02L HLA-DRB1*01:02L HLA-DQA1*05:05-B1*03:19L HLA-DQA1*05:05-B1*03:116L HLA-DPA1*02:01-B1*13:01M HLA-DPA1*03:01-B1*105:01L HLA-DQA1*03:01-B1*03:02L
  REGION 1..10: note = CONT. FROM ABOVE: HLA-DPA1*01:03-B1*104:01L HLA-DRB1*16:01L HLA- DQA1*01:03-B1*06:01L HLA-DRB1*08:03L HLA-DQA1*02:01-B1*03:03L HL A-DRB1*15:03L
YMPASWVMRI

SEQ ID NO: 9104 - protein, 10 aa, Severe acute respiratory syndrome coronavirus 2
  REGION 1..10: note = Table B: HLA-DQA1*03:02-B1*03:03L HLA-DPA1*03:01-B1*04:02L HLA-DQA1*01-B1*05L HLA-DQA1*05:05-B1*03:19L HLA-DQA1*05:01-B1*02:01L HLA-DRB1*09:01L HLA-DPA1*02:01-B1*13:01L HLA-DPA1*03:01-B1*105:01L
  REGION 1..10: note = CONT. FROM ABOVE: HLA-DQA1*03:01-B1*03:02L HLA-DQA1*01:03-B1*06: 01L HLA-DQA1*02:01-B1*03:03L HLA-DRB1*15:03L
TWLDMVDTSL

SEQ ID NO: 9105 - protein, 10 aa, Severe acute respiratory syndrome coronavirus 2
  REGION 1..10: note = Table B: HLA-DQA1*03:02-B1*03:03L HLA-DQA1*05:01-B1*03:01L HLA-DRB1*13:03L HLA-DQA1*01:02-B1*06:02M HLA-DRB1*08:77L HLA-DRB1*14:01L HLA-DRB1*14:02L HLA-DQA1*05:05-B1*03:19L HLA-DQA1*05:01-B1*02:01L HLA-DRB4*01:01L
  REGION 1..10: note = CONT. FROM ABOVE: HLA-DPA1*01:03-B1*04:01L HLA-DPA1*02:01-B1*13: 01L HLA-DPA1*03:01-B1*105:01L HLA-DQA1*02:01-B1*03:03L HLA-DRB1* 15:03L
DMVDTSLSGF

SEQ ID NO: 9106 - protein, 10 aa, Severe acute respiratory syndrome coronavirus 2
  REGION 1..10: note = Table B: HLA-DQA1*03:02-B1*03:03L HLA-DQA1*05:01-B1*03:01L HLA-DRB1*04:03L HLA-DRB1*13:02L HLA-DRB1*13:03L HLA-DRB1*01:03L HLA-DRB1*04:02L HLA-DRB4*03:01NL HLA-DQA1*01-B1*05L HLA-DQA1*05:01-B1*02:01L HLA-DRB1*12:01L
  REGION 1..10: note = CONT. FROM ABOVE: HLA-DPA1*03:01-B1*105:01L HLA-DQA1*03:01-B1*03 :02L HLA-DRB1*14:54L HLA-DQA1*05:05-B1*03:01L HLA-DRB1*14:17L HL A-DRB1*16:01L HLA-DQA1*01:03-B1*06:01L HLA-DQA1*02:01-B1*03:03L
MVDTSLSGFK

SEQ ID NO: 9107 - protein, 10 aa, Severe acute respiratory syndrome coronavirus 2
  REGION 1..10: note = Table B: HLA-DQA1*03:02-B1*03:03L HLA-DQA1*05:05-B1*03:19L HLA-DQA1*03:01-B1*03:02L
VDTSLSGFKL

SEQ ID NO: 9108 - protein, 12 aa, Severe acute respiratory syndrome coronavirus 2
  REGION 1..12: note = Table B: HLA-DQA1*03:02-B1*03:03L HLA-DRB1*04:04L HLA-DRB1*01:01L HLA-DRB1*08:04L HLA-DPA1*01:03-B1*03:01L HLA-DRB1*11:04L HLA-DRB1*04:10L HLA-DRB1*09:01L HLA-DRB1*07:01L HLA-DRB1*10:01L
LILMTARTVYDD

SEQ ID NO: 9109 - protein, 11 aa, Severe acute respiratory syndrome coronavirus 2
  REGION 1..11: note = Table B: HLA-DQA1*03:02-B1*03:03L HLA-DQA1*05:01-B1*03:01L HLA-DPA1*03:01-B1*105:01L HLA-DQA1*05:05-B1*03:01L HLA-DRB1*14:17L
LMTARTVYDDG

SEQ ID NO: 9110 - protein, 10 aa, Severe acute respiratory syndrome coronavirus 2
  REGION 1..10: note = Table B: HLA-DQA1*03:02-B1*03:03M HLA-DQA1*05:01-B1*03:01M HLA-DRB1*04:01L HLA-DRB1*04:03L HLA-DRB1*13:02L HLA-DRB1*13:03L HLA-DRB1*01:03L HLA-DRB1*04:02L HLA-DRB1*04:04L HLA-DRB1*04:05L HLA-DQA1*01:02-B1*06:02M HLA-DRB1*01:01L HLA-DRB1*01:02M
  REGION 1..10: note = CONT. FROM ABOVE: HLA-DRB4*03:01NL HLA-DRB1*08:77L HLA-DRB3*02:0 1L HLA-DPA1*01:03-B1*03:01L HLA-DPA1*03:01-B1*04:02L HLA-DRB1*03 :01L HLA-DRB1*14:01L HLA-DRB1*11:02L HLA-DRB1*11:03L HLA-DRB1*11 :04L HLA-DRB1*14:02M HLA-DQA1*01:01-B1*05:01L HLA-DRB1*08:01L
  REGION 1..10: note = CONT. FROM ABOVE: HLA-DRB1*11:01L HLA-DRB5*01:01L HLA-DQA1*01-B1 *05L HLA-DQA1*05:05-B1*03:19M HLA-DQA1*05:01-B1*02:01L HLA-DRB1* 13:01L HLA-DRB4*01:01L HLA-DPA1*01:03-B1*04:01L HLA-DQA1*05:05-B 1*03:116M HLA-DRB1*09:01L HLA-DPA1*01:03-B1*04:02L
  REGION 1..10: note = CONT. FROM ABOVE: HLA-DRB1*12:01L HLA-DPA1*02:01-B1*13:01L HLA-D PA1*03:01-B1*105:01M HLA-DQA1*03:01-B1*03:02M HLA-DPA1*01:03-B1* 104:01L HLA-DQA1*05:05-B1*03:01L HLA-DPA1*01:02-B1*04:01L HLA-DR B1*07:01L HLA-DRB1*10:01L HLA-DRB1*16:01M
  REGION 1..10: note = CONT. FROM ABOVE: HLA-DQA1*01:03-B1*06:01L HLA-DRB1*08:03L HLA -DQA1*02:01-B1*03:03M HLA-DRB1*15:01L HLA-DRB1*15:03M
TVYDDGARRV

SEQ ID NO: 9111 - protein, 10 aa, Severe acute respiratory syndrome coronavirus 2
  REGION 1..10: note = Table B: HLA-DQA1*03:02-B1*03:03L HLA-DQA1*05:01-B1*03:01L HLA-DRB1*04:03L HLA-DRB1*01:03M HLA-DRB1*04:05L HLA-DQA1*01:02-B1*06:02M HLA-DRB1*01:01L HLA-DRB1*01:02L HLA-DRB1*08:77L HLA-DPA1*01:03-B1*03:01L
  REGION 1..10: note = CONT. FROM ABOVE: HLA-DPA1*03:01-B1*04:02L HLA-DRB1*03:01L HLA-D RB1*14:01L HLA-DRB1*14:02L HLA-DQA1*01:01-B1*05:01L HLA-DRB1*11: 01L HLA-DQA1*01-B1*05L HLA-DQA1*05:05-B1*03:19L HLA-DQA1*05:01-B 1*02:01L HLA-DRB4*01:01L HLA-DPA1*01:03-B1*04:01L
  REGION 1..10: note = CONT. FROM ABOVE: HLA-DQA1*05:05-B1*03:116L HLA-DPA1*01:03-B1*04 :02L HLA-DRB1*12:01L HLA-DPA1*02:01-B1*13:01M HLA-DPA1*03:01-B1* 105:01L HLA-DPA1*01:02-B1*04:01L HLA-DRB1*10:01L HLA-DRB1*16:01L HLA-DQA1*01:03-B1*06:01M HLA-DRB1*08:02L
  REGION 1..10: note = CONT. FROM ABOVE: HLA-DQA1*02:01-B1*03:03M HLA-DRB1*15:03L
VYDDGARRVW

SEQ ID NO: 9112 - protein, 10 aa, Severe acute respiratory syndrome coronavirus 2
  REGION 1..10: note = Table B: HLA-DQA1*03:02-B1*03:03L HLA-DQA1*05:01-B1*03:01L HLA-DRB1*13:03L HLA-DRB1*01:03L HLA-DQA1*01:02-B1*06:02L HLA-DRB1*08:77L HLA-DPA1*01:03-B1*03:01L HLA-DPA1*03:01-B1*04:02L HLA-DRB1*03:01L HLA-DRB1*14:01L
  REGION 1..10: note = CONT. FROM ABOVE: HLA-DRB1*14:02L HLA-DQA1*01-B1*05L HLA-DQA1*05 :05-B1*03:19L HLA-DQA1*05:01-B1*02:01L HLA-DRB4*01:01L HLA-DPA1* 01:03-B1*04:01L HLA-DQA1*05:05-B1*03:116L HLA-DPA1*01:03-B1*04:0 2L HLA-DRB1*12:01L HLA-DPA1*02:01-B1*13:01L
  REGION 1..10: note = CONT. FROM ABOVE: HLA-DPA1*03:01-B1*105:01L HLA-DPA1*01:03-B1*10 4:01L HLA-DPA1*01:02-B1*04:01L HLA-DRB1*16:01L HLA-DQA1*01:03-B1 *06:01L HLA-DQA1*02:01-B1*03:03L HLA-DRB1*15:03L
NVLTLVYKVY

SEQ ID NO: 9113 - protein, 11 aa, Severe acute respiratory syndrome coronavirus 2
  REGION 1..11: note = Table B: HLA-DQA1*03:02-B1*03:03L HLA-DQA1*05:01-B1*03:01L HLA-DRB1*04:03L HLA-DRB1*01:02L HLA-DRB1*08:77L HLA-DRB3*02:01L HLA-DPA1*03:01-B1*04:02L HLA-DRB1*14:01L HLA-DQA1*01-B1*05L HLA-DQA1*05:01-B1*02:01L HLA-DRB1*12:01L
  REGION 1..11: note = CONT. FROM ABOVE: HLA-DPA1*03:01-B1*105:01L HLA-DQA1*03:01-B1*03 :02L HLA-DPA1*01:02-B1*04:01L HLA-DRB1*07:01L HLA-DRB1*04:08L
LVYKVYYGNAL

SEQ ID NO: 9114 - protein, 12 aa, Severe acute respiratory syndrome coronavirus 2
  REGION 1..12: note = Table B: HLA-DQA1*03:02-B1*03:03L HLA-DQA1*05:01-B1*03:01L HLA-DRB1*13:02L HLA-DRB1*04:04L HLA-DQA1*01:02-B1*06:02L HLA-DRB1*01:01L HLA-DRB1*08:77L HLA-DRB3*02:01L HLA-DPA1*03:01-B1*04:02L HLA-DRB1*11:03L HLA-DRB1*11:04L
  REGION 1..12: note = CONT. FROM ABOVE: HLA-DRB1*14:02L HLA-DRB1*08:01L HLA-DQA1*05:05 -B1*03:19L HLA-DQA1*05:01-B1*02:01L HLA-DRB1*09:01L HLA-DRB3*01: 01L HLA-DPA1*02:01-B1*13:01L HLA-DPA1*03:01-B1*105:01L HLA-DQA1* 05:05-B1*03:01L HLA-DPA1*01:02-B1*04:01L HLA-DRB1*07:01L
  REGION 1..12: note = CONT. FROM ABOVE: HLA-DRB1*10:01L HLA-DRB1*08:03L
VYKVYYGNALDQ

SEQ ID NO: 9115 - protein, 10 aa, Severe acute respiratory syndrome coronavirus 2
  REGION 1..10: note = Table B: HLA-DQA1*03:02-B1*03:03L HLA-DRB1*04:03L HLA-DQA1*01-B1*05L HLA-DQA1*05:01-B1*02:01L HLA-DQA1*03:01-B1*03:02L HLA-DQA1*02:01-B1*03:03L
VYYGNALDQA

SEQ ID NO: 9116 - protein, 11 aa, Severe acute respiratory syndrome coronavirus 2
  REGION 1..11: note = Table B: HLA-DQA1*03:02-B1*03:03L HLA-DQA1*03:01-B1*03:02L
YGNALDQAISM

SEQ ID NO: 9117 - protein, 10 aa, Severe acute respiratory syndrome coronavirus 2
  REGION 1..10: note = Table B: HLA-DQA1*03:02-B1*03:03L HLA-DQA1*05:01-B1*03:01L HLA-DRB1*13:03L HLA-DRB1*01:03L HLA-DQA1*01:02-B1*06:02M HLA-DRB1*08:77L HLA-DPA1*01:03-B1*03:01L HLA-DPA1*03:01-B1*04:02L HLA-DRB1*03:01L HLA-DRB1*14:01L
  REGION 1..10: note = CONT. FROM ABOVE: HLA-DRB1*14:02L HLA-DQA1*01-B1*05L HLA-DQA1*05 :05-B1*03:19L HLA-DQA1*05:01-B1*02:01L HLA-DRB4*01:01L HLA-DPA1* 01:03-B1*04:01L HLA-DQA1*05:05-B1*03:116L HLA-DPA1*01:03-B1*04:0 2L HLA-DRB1*12:01L HLA-DPA1*02:01-B1*13:01L
  REGION 1..10: note = CONT. FROM ABOVE: HLA-DPA1*03:01-B1*105:01M HLA-DPA1*01:03-B1*10 4:01L HLA-DPA1*01:02-B1*04:01L HLA-DRB1*10:01L HLA-DRB1*16:01L H LA-DQA1*01:03-B1*06:01L HLA-DQA1*02:01-B1*03:03L HLA-DRB1*15:03L
NALDQAISMW

SEQ ID NO: 9118 - protein, 11 aa, Severe acute respiratory syndrome coronavirus 2
  REGION 1..11: note = Table B: HLA-DQA1*03:02-B1*03:03L HLA-DQA1*05:05-B1*03:19L HLA-DQA1*03:01-B1*03:02L HLA-DPA1*01:03-B1*104:01L
ALDQAISMWAL

SEQ ID NO: 9119 - protein, 14 aa, Severe acute respiratory syndrome coronavirus 2
  REGION 1..14: note = Table B: HLA-DQA1*03:02-B1*03:03L HLA-DRB1*04:01L HLA-DRB3*02:01L HLA-DPA1*03:01-B1*04:02L HLA-DRB1*09:01L
ALIISVTSNYSGVV

SEQ ID NO: 9120 - protein, 12 aa, Severe acute respiratory syndrome coronavirus 2
  REGION 1..12: note = Table B: HLA-DQA1*03:02-B1*03:03L HLA-DQA1*05:01-B1*03:01L HLA-DRB1*13:02L HLA-DRB1*04:02L HLA-DRB4*03:01NL HLA-DRB1*14:01L HLA-DQA1*05:01-B1*02:01L HLA-DRB1*12:01L HLA-DRB1*12:02L HLA-DQA1*03:01-B1*03:02L HLA-DRB1*14:54L
  REGION 1..12: note = CONT. FROM ABOVE: HLA-DQA1*05:05-B1*03:01L HLA-DRB1*14:17L HLA-D RB1*16:01L HLA-DQA1*02:01-B1*03:03L HLA-DRB1*15:03L
ISVTSNYSGVVT

SEQ ID NO: 9121 - protein, 10 aa, Severe acute respiratory syndrome coronavirus 2
  REGION 1..10: note = Table B: HLA-DQA1*03:02-B1*03:03M HLA-DQA1*05:01-B1*03:01L HLA-DRB1*04:01L HLA-DRB1*13:03L HLA-DRB1*04:04L HLA-DRB1*04:05L HLA-DQA1*01:02-B1*06:02L HLA-DRB1*01:01L HLA-DRB1*01:02L HLA-DPA1*03:01-B1*04:02L HLA-DRB1*14:01L HLA-DRB1*14:02L
  REGION 1..10: note = CONT. FROM ABOVE: HLA-DRB1*08:01L HLA-DQA1*01-B1*05L HLA-DQA1*05 :05-B1*03:19L HLA-DQA1*05:01-B1*02:01L HLA-DQA1*05:05-B1*03:116L HLA-DRB1*09:01L HLA-DPA1*02:01-B1*13:01L HLA-DPA1*03:01-B1*105:0 1L HLA-DQA1*03:01-B1*03:02L HLA-DPA1*01:03-B1*104:01L
  REGION 1..10: note = CONT. FROM ABOVE: HLA-DPA1*01:02-B1*04:01L HLA-DRB1*10:01L HLA-D RB1*16:01L HLA-DQA1*01:03-B1*06:01L HLA-DRB1*08:03L HLA-DQA1*02: 01-B1*03:03M HLA-DRB1*15:03L
SNYSGVVTTV

SEQ ID NO: 9122 - protein, 10 aa, Severe acute respiratory syndrome coronavirus 2
  REGION 1..10: note = Table B: HLA-DQA1*03:02-B1*03:03L HLA-DQA1*05:01-B1*03:01L HLA-DQA1*01:02-B1*06:02L HLA-DPA1*03:01-B1*04:02L HLA-DQA1*05:05-B1*03:19L HLA-DQA1*05:01-B1*02:01L HLA-DPA1*03:01-B1*105:01L HLA-DQA1*03:01-B1*03:02L
  REGION 1..10: note = CONT. FROM ABOVE: HLA-DQA1*05:05-B1*03:01L HLA-DPA1*01:02-B1*04: 01L HLA-DRB1*16:01L HLA-DQA1*01:03-B1*06:01L HLA-DQA1*02:01-B1*0 3:03L HLA-DRB1*15:03L
NYSGVVTTVM

SEQ ID NO: 9123 - protein, 11 aa, Severe acute respiratory syndrome coronavirus 2
  REGION 1..11: note = Table B: HLA-DQA1*03:02-B1*03:03L HLA-DRB1*04:03L HLA-DQA1*05:05-B1*03:19L HLA-DPA1*01:02-B1*04:01L
VVTTVMFLARG

SEQ ID NO: 9124 - protein, 10 aa, Severe acute respiratory syndrome coronavirus 2
  REGION 1..10: note = Table B: HLA-DQA1*03:02-B1*03:03L HLA-DQA1*05:01-B1*03:01L HLA-DRB1*04:03L HLA-DRB1*13:02L HLA-DRB1*01:03L HLA-DRB1*04:05L HLA-DQA1*01:02-B1*06:02L HLA-DRB1*01:02L HLA-DRB1*08:77L HLA-DRB3*02:01L HLA-DPA1*01:03-B1*03:01L
  REGION 1..10: note = CONT. FROM ABOVE: HLA-DPA1*03:01-B1*04:02L HLA-DRB1*14:01L HLA-D RB1*14:02L HLA-DQA1*05:05-B1*03:19L HLA-DQA1*05:01-B1*02:01L HLA -DRB4*01:01L HLA-DPA1*01:03-B1*04:01L HLA-DPA1*01:03-B1*04:02L H LA-DRB1*12:01L HLA-DPA1*02:01-B1*13:01L
  REGION 1..10: note = CONT. FROM ABOVE: HLA-DPA1*03:01-B1*105:01L HLA-DQA1*05:05-B1*03 :01L HLA-DPA1*01:02-B1*04:01L HLA-DRB1*07:01L HLA-DRB1*16:01L HL A-DQA1*01:03-B1*06:01L HLA-DQA1*02:01-B1*03:03L HLA-DRB1*15:03L
VMFLARGIVF

SEQ ID NO: 9125 - protein, 10 aa, Severe acute respiratory syndrome coronavirus 2
  REGION 1..10: note = Table B: HLA-DQA1*03:02-B1*03:03L HLA-DQA1*01:02-B1*06:02L HLA-DPA1*03:01-B1*04:02L HLA-DPA1*02:01-B1*13:01L HLA-DPA1*03:01-B1*105:01L HLA-DQA1*01:03-B1*06:01L HLA-DQA1*02:01-B1*03:03L HLA-DRB1*15:03L
MFLARGIVFM

SEQ ID NO: 9126 - protein, 10 aa, Severe acute respiratory syndrome coronavirus 2
  REGION 1..10: note = Table B: HLA-DQA1*03:02-B1*03:03L
PIFFITGNTL

SEQ ID NO: 9127 - protein, 11 aa, Severe acute respiratory syndrome coronavirus 2
  REGION 1..11: note = Table B: HLA-DQA1*03:02-B1*03:03L HLA-DRB1*04:03L HLA-DRB1*13:03L HLA-DRB1*04:02L HLA-DRB1*04:05L HLA-DRB4*03:01NL HLA-DQA1*05:01-B1*02:01L HLA-DRB1*04:10L HLA-DQA1*03:01-B1*03:02L HLA-DRB1*14:54L HLA-DRB1*14:17L
  REGION 1..11: note = CONT. FROM ABOVE: HLA-DRB1*16:01L HLA-DQA1*02:01-B1*03:03L
GVYDYLVSTQE

SEQ ID NO: 9128 - protein, 12 aa, Severe acute respiratory syndrome coronavirus 2
  REGION 1..12: note = Table B: HLA-DQA1*03:02-B1*03:03L HLA-DQA1*05:01-B1*03:01L HLA-DRB1*01:02L HLA-DPA1*03:01-B1*04:02L HLA-DRB1*08:01L HLA-DRB1*04:10L HLA-DRB1*12:01L HLA-DQA1*05:05-B1*03:01L HLA-DPA1*01:02-B1*04:01L HLA-DRB1*10:01L HLA-DRB1*04:08L
VYDYLVSTQEFR

SEQ ID NO: 9129 - protein, 10 aa, Severe acute respiratory syndrome coronavirus 2
  REGION 1..10: note = Table B: HLA-DQA1*03:02-B1*03:03L HLA-DQA1*05:01-B1*03:01L HLA-DRB1*04:03L HLA-DRB1*13:02L HLA-DRB1*13:03L HLA-DRB1*01:03L HLA-DRB1*04:05L HLA-DQA1*01:02-B1*06:02L HLA-DRB4*03:01NL HLA-DRB1*08:77L HLA-DPA1*01:03-B1*03:01M
  REGION 1..10: note = CONT. FROM ABOVE: HLA-DPA1*03:01-B1*04:02L HLA-DRB1*03:01L HLA-D RB1*14:01L HLA-DRB1*11:02L HLA-DRB1*14:02L HLA-DQA1*01-B1*05M HL A-DQA1*05:05-B1*03:19M HLA-DQA1*05:01-B1*02:01M HLA-DRB4*01:01L HLA-DPA1*01:03-B1*04:01L HLA-DQA1*05:05-B1*03:116L
  REGION 1..10: note = CONT. FROM ABOVE: HLA-DPA1*01:03-B1*04:02L HLA-DRB1*12:01L HLA-D PA1*02:01-B1*13:01L HLA-DPA1*03:01-B1*105:01L HLA-DPA1*01:03-B1* 104:01M HLA-DQA1*05:05-B1*03:01L HLA-DPA1*01:02-B1*04:01L HLA-DR B1*10:01L HLA-DRB1*16:01M HLA-DQA1*01:03-B1*06:01L
  REGION 1..10: note = CONT. FROM ABOVE: HLA-DRB1*08:02L HLA-DQA1*02:01-B1*03:03L HLA-D RB1*15:03L
YLVSTQEFRY

SEQ ID NO: 9130 - protein, 11 aa, Severe acute respiratory syndrome coronavirus 2
  REGION 1..11: note = Table B: HLA-DQA1*03:02-B1*03:03L HLA-DQA1*05:01-B1*03:01L HLA-DRB1*08:77L HLA-DPA1*03:01-B1*04:02L HLA-DQA1*05:05-B1*03:19L HLA-DQA1*05:01-B1*02:01L HLA-DRB1*09:01L HLA-DQA1*03:01-B1*03:02L
  REGION 1..11: note = CONT. FROM ABOVE: HLA-DPA1*01:02-B1*04:01L HLA-DRB1*07:01L HLA-D RB1*15:03L
QEFRYMNSQGL

SEQ ID NO: 9131 - protein, 12 aa, Severe acute respiratory syndrome coronavirus 2
  REGION 1..12: note = Table B: HLA-DQA1*03:02-B1*03:03L HLA-DQA1*01:02-B1*06:02L HLA-DRB1*01:02L HLA-DQA1*05:05-B1*03:19L HLA-DQA1*05:01-B1*02:01L
YMNSQGLLPPKN

SEQ ID NO: 9132 - protein, 13 aa, Severe acute respiratory syndrome coronavirus 2
  REGION 1..13: note = Table B: HLA-DQA1*03:02-B1*03:03L HLA-DRB1*04:05L HLA-DRB1*04:10L
SQGLLPPKNSIDA

SEQ ID NO: 9133 - protein, 13 aa, Severe acute respiratory syndrome coronavirus 2
  REGION 1..13: note = Table B: HLA-DQA1*03:02-B1*03:03L HLA-DRB1*04:03L HLA-DRB1*13:02L HLA-DRB1*04:05L HLA-DRB1*01:02L HLA-DPA1*01:03-B1*03:01L HLA-DQA1*01:01-B1*05:01L HLA-DQA1*01-B1*05L HLA-DQA1*05:01-B1*02:01L HLA-DRB1*12:01L
  REGION 1..13: note = CONT. FROM ABOVE: HLA-DPA1*01:03-B1*104:01L HLA-DQA1*05:05-B1*03 :01L HLA-DRB1*16:01L HLA-DQA1*01:03-B1*06:01L HLA-DQA1*02:01-B1* 03:03L
LPPKNSIDAFKLN

SEQ ID NO: 9134 - protein, 10 aa, Severe acute respiratory syndrome coronavirus 2
  REGION 1..10: note = Table B: HLA-DQA1*03:02-B1*03:03L HLA-DQA1*01:02-B1*06:02L HLA-DRB1*01:02L HLA-DQA1*05:05-B1*03:19L HLA-DPA1*03:01-B1*105:01L HLA-DPA1*01:03-B1*104:01L HLA-DRB1*15:03L
NSIDAFKLNI

SEQ ID NO: 9135 - protein, 17 aa, Severe acute respiratory syndrome coronavirus 2
  REGION 1..17: note = Table B: HLA-DQA1*03:02-B1*03:03L HLA-DQA1*05:01-B1*02:01L HLA-DRB1*07:01L
IDAFKLNIKLLGVGGKP

SEQ ID NO: 9136 - protein, 10 aa, Severe acute respiratory syndrome coronavirus 2
  REGION 1..10: note = Table B: HLA-DQA1*03:02-B1*03:03L HLA-DQA1*05:01-B1*03:01L HLA-DRB1*04:03L HLA-DRB1*13:03L HLA-DRB1*01:03L HLA-DRB1*04:02L HLA-DQA1*01:02-B1*06:02L HLA-DRB4*03:01NL HLA-DQA1*05:05-B1*03:19L HLA-DQA1*05:01-B1*02:01L
  REGION 1..10: note = CONT. FROM ABOVE: HLA-DRB1*12:01L HLA-DPA1*03:01-B1*105:01L HLA- DQA1*03:01-B1*03:02L HLA-DQA1*05:05-B1*03:01L HLA-DRB1*14:17L HL A-DRB1*16:01L HLA-DQA1*01:03-B1*06:01L HLA-DQA1*02:01-B1*03:03L
VATVQSKMSD

SEQ ID NO: 9137 - protein, 10 aa, Severe acute respiratory syndrome coronavirus 2
  REGION 1..10: note = Table B: HLA-DQA1*03:02-B1*03:03L HLA-DPA1*03:01-B1*04:02L HLA-DQA1*02:01-B1*03:03L HLA-DRB1*15:03L
VVLLSVLQQL

SEQ ID NO: 9138 - protein, 14 aa, Severe acute respiratory syndrome coronavirus 2
  REGION 1..14: note = Table B: HLA-DQA1*03:02-B1*03:03L HLA-DRB1*13:02L HLA-DRB1*13:03L HLA-DRB1*11:03L HLA-DRB1*14:02L HLA-DQA1*01:01-B1*05:01L HLA-DPA1*01:03-B1*04:02L HLA-DRB3*01:01L HLA-DPA1*02:01-B1*13:01L
  REGION 1..14: note = CONT. FROM ABOVE: HLA-DPA1*01:03-B1*02:01L HLA-DPA1*01:02-B1*04: 01L HLA-DRB1*07:01L HLA-DRB1*08:02L HLA-DRB1*08:03L
LSVLQQLRVESSSK

SEQ ID NO: 9139 - protein, 12 aa, Severe acute respiratory syndrome coronavirus 2
  REGION 1..12: note = Table B: HLA-DQA1*03:02-B1*03:03L HLA-DRB1*13:02L HLA-DRB1*13:03L HLA-DRB1*01:03L HLA-DRB1*04:02L HLA-DRB1*04:05L HLA-DQA1*01:02-B1*06:02L HLA-DRB4*03:01NL HLA-DRB1*08:77L HLA-DRB3*02:01L HLA-DPA1*01:03-B1*03:01L
  REGION 1..12: note = CONT. FROM ABOVE: HLA-DPA1*03:01-B1*04:02L HLA-DRB1*11:03L HLA-D QA1*05:01-B1*02:01L HLA-DRB1*04:10L HLA-DRB1*12:02L HLA-DPA1*02: 01-B1*13:01L HLA-DPA1*03:01-B1*105:01L HLA-DRB1*14:54L HLA-DPA1* 01:02-B1*04:01L HLA-DRB1*07:01L HLA-DQA1*01:03-B1*06:01L
  REGION 1..12: note = CONT. FROM ABOVE: HLA-DRB1*04:08L
LQQLRVESSSKL

SEQ ID NO: 9140 - protein, 10 aa, Severe acute respiratory syndrome coronavirus 2
  REGION 1..10: note = Table B: HLA-DQA1*03:02-B1*03:03L HLA-DQA1*05:01-B1*03:01L HLA-DRB1*04:03L HLA-DRB1*13:03L HLA-DRB1*04:02L HLA-DRB1*14:01L HLA-DQA1*05:05-B1*03:19L HLA-DQA1*05:01-B1*02:01L HLA-DQA1*03:01-B1*03:02L HLA-DRB1*14:17L
  REGION 1..10: note = CONT. FROM ABOVE: HLA-DPA1*01:02-B1*04:01L HLA-DRB1*16:01L HLA-D QA1*01:03-B1*06:01L HLA-DQA1*02:01-B1*03:03L
VESSSKLWAQ

SEQ ID NO: 9141 - protein, 16 aa, Severe acute respiratory syndrome coronavirus 2
  REGION 1..16: note = Table B: HLA-DQA1*03:02-B1*03:03L HLA-DQA1*05:01-B1*03:01L HLA-DRB1*11:02L HLA-DRB1*14:02L
SSKLWAQCVQLHNDIL

SEQ ID NO: 9142 - protein, 14 aa, Severe acute respiratory syndrome coronavirus 2
  REGION 1..14: note = Table B: HLA-DQA1*03:02-B1*03:03L HLA-DQA1*05:01-B1*03:01L HLA-DRB1*13:02L HLA-DRB1*01:03L HLA-DRB1*04:05L HLA-DPA1*01:03-B1*03:01L HLA-DRB1*14:01L HLA-DQA1*05:01-B1*02:01L HLA-DRB1*12:01L
  REGION 1..14: note = CONT. FROM ABOVE: HLA-DPA1*02:01-B1*13:01L HLA-DPA1*01:03-B1*104 :01L HLA-DQA1*05:05-B1*03:01L HLA-DPA1*01:02-B1*04:01L HLA-DRB1* 16:01L HLA-DRB1*04:08L
VQLHNDILLAKDTT

SEQ ID NO: 9143 - protein, 10 aa, Severe acute respiratory syndrome coronavirus 2
  REGION 1..10: note = Table B: HLA-DQA1*03:02-B1*03:03L HLA-DRB1*04:03L HLA-DRB1*04:02L HLA-DQA1*01-B1*05L HLA-DQA1*05:01-B1*02:01L HLA-DQA1*03:01-B1*03:02L HLA-DRB1*14:17L HLA-DQA1*02:01-B1*03:03L
DILLAKDTTE

SEQ ID NO: 9144 - protein, 10 aa, Severe acute respiratory syndrome coronavirus 2
  REGION 1..10: note = Table B: HLA-DQA1*03:02-B1*03:03L HLA-DRB1*04:03L HLA-DRB1*13:03L HLA-DRB1*01:03L HLA-DRB1*04:02L HLA-DRB1*04:05L HLA-DRB4*03:01NL HLA-DQA1*01-B1*05L HLA-DRB1*04:10L HLA-DQA1*03:01-B1*03:02L HLA-DRB1*14:54L HLA-DRB1*14:17L
  REGION 1..10: note = CONT. FROM ABOVE: HLA-DRB1*16:01L HLA-DQA1*02:01-B1*03:03L
ILLAKDTTEA

SEQ ID NO: 9145 - protein, 11 aa, Severe acute respiratory syndrome coronavirus 2
  REGION 1..11: note = Table B: HLA-DQA1*03:02-B1*03:03L HLA-DRB1*13:02L HLA-DRB1*13:03L HLA-DRB1*01:03L HLA-DRB1*04:02L HLA-DRB1*04:05L HLA-DRB1*01:02L HLA-DRB4*03:01NL HLA-DRB1*14:01L HLA-DQA1*01:01-B1*05:01L HLA-DRB1*12:01L HLA-DRB3*01:01L
  REGION 1..11: note = CONT. FROM ABOVE: HLA-DRB1*14:54L HLA-DRB1*14:17L HLA-DPA1*01:02 -B1*04:01L HLA-DRB1*16:01L HLA-DRB1*04:08L HLA-DQA1*02:01-B1*03: 03L
LAKDTTEAFEK

SEQ ID NO: 9146 - protein, 10 aa, Severe acute respiratory syndrome coronavirus 2
  REGION 1..10: note = Table B: HLA-DQA1*03:02-B1*03:03L HLA-DQA1*01-B1*05L HLA-DQA1*03:01-B1*03:02L
KDTTEAFEKM

SEQ ID NO: 9147 - protein, 10 aa, Severe acute respiratory syndrome coronavirus 2
  REGION 1..10: note = Table B: HLA-DQA1*03:02-B1*03:03L HLA-DQA1*01:02-B1*06:02L HLA-DRB1*01:02L HLA-DQA1*05:05-B1*03:19L HLA-DQA1*05:01-B1*02:01L HLA-DPA1*03:01-B1*105:01L HLA-DQA1*03:01-B1*03:02L HLA-DQA1*01:03-B1*06:01L
  REGION 1..10: note = CONT. FROM ABOVE: HLA-DQA1*02:01-B1*03:03L HLA-DRB1*15:03L
DTTEAFEKMV

SEQ ID NO: 9148 - protein, 10 aa, Severe acute respiratory syndrome coronavirus 2
  REGION 1..10: note = Table B: HLA-DQA1*03:02-B1*03:03H HLA-DQA1*05:01-B1*03:01L HLA-DRB1*13:02L HLA-DRB1*13:03L HLA-DQA1*01:02-B1*06:02L HLA-DRB1*08:77L HLA-DPA1*03:01-B1*04:02L HLA-DRB1*03:01L HLA-DRB1*14:01L HLA-DRB1*11:02M HLA-DRB1*14:02L HLA-DRB1*11:01L
  REGION 1..10: note = CONT. FROM ABOVE: HLA-DQA1*01-B1*05L HLA-DQA1*05:05-B1*03:19H HL A-DQA1*05:01-B1*02:01L HLA-DRB4*01:01L HLA-DPA1*01:03-B1*04:01L HLA-DQA1*05:05-B1*03:116M HLA-DRB1*09:01M HLA-DPA1*01:03-B1*04:0 2M HLA-DRB1*12:01L HLA-DQA1*03:01-B1*03:02M
  REGION 1..10: note = CONT. FROM ABOVE: HLA-DPA1*01:03-B1*104:01M HLA-DPA1*01:02-B1*04 :01L HLA-DRB1*10:01L HLA-DRB1*16:01L HLA-DQA1*01:03-B1*06:01L HL A-DQA1*02:01-B1*03:03L HLA-DRB1*15:03L
TEAFEKMVSL

SEQ ID NO: 9149 - protein, 10 aa, Severe acute respiratory syndrome coronavirus 2
  REGION 1..10: note = Table B: HLA-DQA1*03:02-B1*03:03L HLA-DQA1*05:01-B1*03:01L HLA-DQA1*01:02-B1*06:02L HLA-DRB1*01:02L HLA-DPA1*03:01-B1*04:02L HLA-DQA1*05:05-B1*03:19L HLA-DQA1*05:01-B1*02:01L HLA-DPA1*01:03-B1*04:01L
  REGION 1..10: note = CONT. FROM ABOVE: HLA-DRB1*12:01L HLA-DPA1*02:01-B1*13:01L HLA-D PA1*03:01-B1*105:01L HLA-DQA1*03:01-B1*03:02L HLA-DPA1*01:02-B1* 04:01L HLA-DQA1*01:03-B1*06:01L HLA-DQA1*02:01-B1*03:03L HLA-DRB 1*15:03L
EAFEKMVSLL

SEQ ID NO: 9150 - protein, 10 aa, Severe acute respiratory syndrome coronavirus 2
  REGION 1..10: note = Table B: HLA-DQA1*03:02-B1*03:03L HLA-DRB1*11:02L HLA-DQA1*05:05-B1*03:19M HLA-DQA1*03:01-B1*03:02L HLA-DPA1*01:03-B1*104:01M HLA-DRB1*16:01L HLA-DQA1*01:03-B1*06:01L
FEKMVSLLSV

SEQ ID NO: 9151 - protein, 14 aa, Severe acute respiratory syndrome coronavirus 2
  REGION 1..14: note = Table B: HLA-DQA1*03:02-B1*03:03L HLA-DRB1*04:04L HLA-DRB1*08:04L HLA-DPA1*01:03-B1*03:01L HLA-DQA1*01-B1*05L HLA-DPA1*02:01-B1*13:01L HLA-DRB1*14:54L HLA-DRB1*10:01L HLA-DRB1*08:03L
SVLLSMQGAVDINK

SEQ ID NO: 9152 - protein, 10 aa, Severe acute respiratory syndrome coronavirus 2
  REGION 1..10: note = Table B: HLA-DQA1*03:02-B1*03:03M HLA-DQA1*05:01-B1*03:01L HLA-DRB1*04:03L HLA-DRB1*13:02L HLA-DRB1*13:03L HLA-DRB1*01:03L HLA-DRB1*04:02L HLA-DRB1*04:05L HLA-DQA1*01:02-B1*06:02L HLA-DRB1*01:02L HLA-DRB1*08:77L HLA-DRB3*02:01L
  REGION 1..10: note = CONT. FROM ABOVE: HLA-DPA1*01:03-B1*03:01L HLA-DPA1*03:01-B1*04: 02L HLA-DRB1*14:01L HLA-DRB1*14:02L HLA-DRB1*08:01L HLA-DQA1*01- B1*05L HLA-DQA1*05:05-B1*03:19L HLA-DQA1*05:01-B1*02:01L HLA-DRB 4*01:01L HLA-DPA1*01:03-B1*04:01L HLA-DQA1*05:05-B1*03:116L
  REGION 1..10: note = CONT. FROM ABOVE: HLA-DRB1*09:01L HLA-DPA1*01:03-B1*04:02L HLA-D RB1*12:01L HLA-DPA1*02:01-B1*13:01L HLA-DPA1*03:01-B1*105:01L HL A-DQA1*03:01-B1*03:02M HLA-DPA1*01:03-B1*104:01L HLA-DQA1*05:05- B1*03:01L HLA-DPA1*01:02-B1*04:01L HLA-DRB1*07:01L
  REGION 1..10: note = CONT. FROM ABOVE: HLA-DRB1*10:01L HLA-DRB1*16:01L HLA-DQA1*01:03 -B1*06:01L HLA-DRB1*08:03L HLA-DQA1*02:01-B1*03:03L HLA-DRB1*15: 03L
MQGAVDINKL

SEQ ID NO: 9153 - protein, 14 aa, Severe acute respiratory syndrome coronavirus 2
  REGION 1..14: note = Table B: HLA-DQA1*03:02-B1*03:03L HLA-DQA1*05:01-B1*03:01L HLA-DRB1*13:02L HLA-DRB1*13:03L HLA-DRB1*01:03L HLA-DRB1*04:04L HLA-DPA1*03:01-B1*04:02L HLA-DQA1*01:01-B1*05:01L HLA-DRB1*08:01L HLA-DQA1*01-B1*05L HLA-DQA1*05:01-B1*02:01L
  REGION 1..14: note = CONT. FROM ABOVE: HLA-DRB1*04:10L HLA-DRB3*01:01L HLA-DPA1*03:01 -B1*105:01L HLA-DPA1*01:03-B1*104:01L HLA-DQA1*05:05-B1*03:01L H LA-DPA1*01:02-B1*04:01L HLA-DRB1*07:01L HLA-DRB1*16:01L
INKLCEEMLDNRAT

SEQ ID NO: 9154 - protein, 10 aa, Severe acute respiratory syndrome coronavirus 2
  REGION 1..10: note = Table B: HLA-DQA1*03:02-B1*03:03H HLA-DQA1*05:01-B1*03:01L HLA-DRB1*13:03L HLA-DRB1*04:02L HLA-DRB1*08:77L HLA-DPA1*03:01-B1*04:02L HLA-DRB1*14:01L HLA-DRB1*11:02L HLA-DQA1*01-B1*05L HLA-DQA1*05:05-B1*03:19M
  REGION 1..10: note = CONT. FROM ABOVE: HLA-DQA1*05:01-B1*02:01L HLA-DRB4*01:01L HLA-D PA1*01:03-B1*04:01L HLA-DQA1*05:05-B1*03:116L HLA-DRB1*09:01M HL A-DPA1*01:03-B1*04:02L HLA-DRB1*12:01L HLA-DQA1*03:01-B1*03:02M HLA-DPA1*01:03-B1*104:01L HLA-DPA1*01:02-B1*04:01L
  REGION 1..10: note = CONT. FROM ABOVE: HLA-DRB1*10:01L HLA-DRB1*16:01L HLA-DQA1*02:01 -B1*03:03L HLA-DRB1*15:03L
EEMLDNRATL

SEQ ID NO: 9155 - protein, 10 aa, Severe acute respiratory syndrome coronavirus 2
  REGION 1..10: note = Table B: HLA-DQA1*03:02-B1*03:03L HLA-DRB1*04:03L HLA-DRB1*13:03L HLA-DRB1*04:02L HLA-DRB1*14:01L HLA-DQA1*03:01-B1*03:02L HLA-DRB1*16:01L
MLDNRATLQA

SEQ ID NO: 9156 - protein, 12 aa, Severe acute respiratory syndrome coronavirus 2
  REGION 1..12: note = Table B: HLA-DQA1*03:02-B1*03:03L HLA-DQA1*05:01-B1*03:01L HLA-DRB1*04:03L HLA-DRB1*13:02L HLA-DRB1*13:03L HLA-DRB1*01:03L HLA-DRB1*04:02L HLA-DRB1*04:04L HLA-DRB1*04:05L HLA-DQA1*01:02-B1*06:02L HLA-DRB1*01:02L HLA-DRB4*03:01NL
  REGION 1..12: note = CONT. FROM ABOVE: HLA-DPA1*01:03-B1*03:01L HLA-DRB1*04:10L HLA-D RB1*12:01L HLA-DPA1*02:01-B1*13:01L HLA-DPA1*03:01-B1*105:01L HL A-DRB1*14:54L HLA-DPA1*01:03-B1*104:01L HLA-DQA1*05:05-B1*03:01L HLA-DRB1*14:17L HLA-DRB1*16:01L HLA-DRB1*04:08L
LDNRATLQAIAS

SEQ ID NO: 9157 - protein, 12 aa, Severe acute respiratory syndrome coronavirus 2
  REGION 1..12: note = Table B: HLA-DQA1*03:02-B1*03:03L HLA-DQA1*05:01-B1*03:01L HLA-DRB1*04:03L HLA-DRB1*04:02L HLA-DRB1*04:05L HLA-DQA1*01:02-B1*06:02L HLA-DRB1*01:02L HLA-DPA1*01:03-B1*03:01L HLA-DQA1*01:01-B1*05:01L
  REGION 1..12: note = CONT. FROM ABOVE: HLA-DQA1*05:05-B1*03:19L HLA-DQA1*05:01-B1*02: 01L HLA-DRB1*12:01L HLA-DPA1*02:01-B1*13:01L HLA-DPA1*03:01-B1*1 05:01L HLA-DPA1*01:03-B1*104:01L HLA-DQA1*05:05-B1*03:01L HLA-DR B1*14:17L HLA-DRB1*16:01L
DNRATLQAIASE

SEQ ID NO: 9158 - protein, 10 aa, Severe acute respiratory syndrome coronavirus 2
  REGION 1..10: note = Table B: HLA-DQA1*03:02-B1*03:03L HLA-DQA1*05:01-B1*03:01L HLA-DRB1*13:03L HLA-DRB1*01:03L HLA-DQA1*01:02-B1*06:02M HLA-DRB1*08:77L HLA-DPA1*01:03-B1*03:01L HLA-DPA1*03:01-B1*04:02L HLA-DRB1*03:01L HLA-DRB1*14:01L
  REGION 1..10: note = CONT. FROM ABOVE: HLA-DRB1*14:02L HLA-DQA1*01-B1*05L HLA-DQA1*05 :05-B1*03:19L HLA-DQA1*05:01-B1*02:01L HLA-DRB4*01:01L HLA-DPA1* 01:03-B1*04:01L HLA-DQA1*05:05-B1*03:116L HLA-DPA1*01:03-B1*04:0 2L HLA-DPA1*02:01-B1*13:01L HLA-DPA1*03:01-B1*105:01L
  REGION 1..10: note = CONT. FROM ABOVE: HLA-DQA1*03:01-B1*03:02L HLA-DPA1*01:03-B1*104 :01L HLA-DPA1*01:02-B1*04:01L HLA-DRB1*10:01L HLA-DRB1*16:01L HL A-DQA1*01:03-B1*06:01L HLA-DQA1*02:01-B1*03:03L HLA-DRB1*15:03L
ATLQAIASEF

SEQ ID NO: 9159 - protein, 13 aa, Severe acute respiratory syndrome coronavirus 2
  REGION 1..13: note = Table B: HLA-DQA1*03:02-B1*03:03L HLA-DRB1*04:03L HLA-DRB1*04:02L HLA-DRB1*04:05L HLA-DQA1*01:02-B1*06:02L HLA-DQA1*01-B1*05L HLA-DQA1*05:01-B1*02:01L HLA-DRB1*04:10L HLA-DRB1*12:01L HLA-DQA1*03:01-B1*03:02L HLA-DRB1*14:17L
  REGION 1..13: note = CONT. FROM ABOVE: HLA-DRB1*16:01L HLA-DQA1*01:03-B1*06:01L HLA-D QA1*02:01-B1*03:03L
LQAIASEFSSLPS

SEQ ID NO: 9160 - protein, 10 aa, Severe acute respiratory syndrome coronavirus 2
  REGION 1..10: note = Table B: HLA-DQA1*03:02-B1*03:03L HLA-DQA1*05:05-B1*03:19L HLA-DQA1*03:01-B1*03:02L
SEFSSLPSYA

SEQ ID NO: 9161 - protein, 10 aa, Severe acute respiratory syndrome coronavirus 2
  REGION 1..10: note = Table B: HLA-DQA1*03:02-B1*03:03L HLA-DQA1*05:01-B1*03:01L HLA-DRB1*04:03L HLA-DQA1*01:02-B1*06:02L HLA-DRB1*14:02L HLA-DQA1*05:05-B1*03:19L HLA-DQA1*05:01-B1*02:01L HLA-DRB1*12:01L HLA-DPA1*02:01-B1*13:01L
  REGION 1..10: note = CONT. FROM ABOVE: HLA-DPA1*03:01-B1*105:01L HLA-DRB1*16:01L HLA- DQA1*01:03-B1*06:01L HLA-DQA1*02:01-B1*03:03L HLA-DRB1*15:03L
FSSLPSYAAF

SEQ ID NO: 9162 - protein, 12 aa, Severe acute respiratory syndrome coronavirus 2
  REGION 1..12: note = Table B: HLA-DQA1*03:02-B1*03:03L HLA-DQA1*05:01-B1*03:01L HLA-DRB1*04:01L HLA-DRB1*13:02L HLA-DRB1*13:03L HLA-DRB1*01:03L HLA-DRB1*04:02L HLA-DRB1*04:04L HLA-DRB1*04:05L HLA-DQA1*01:02-B1*06:02L HLA-DRB1*01:02L HLA-DRB4*03:01NL
  REGION 1..12: note = CONT. FROM ABOVE: HLA-DRB1*08:04L HLA-DRB1*08:77L HLA-DPA1*01:03 -B1*03:01L HLA-DRB1*14:01L HLA-DRB1*11:03L HLA-DRB1*11:04L HLA-D RB1*08:01L HLA-DRB5*01:01L HLA-DQA1*01-B1*05L HLA-DQA1*05:05-B1* 03:19L HLA-DQA1*05:01-B1*02:01L HLA-DRB1*04:10M HLA-DRB1*09:01L
  REGION 1..12: note = CONT. FROM ABOVE: HLA-DRB1*12:01L HLA-DRB1*12:02L HLA-DPA1*03:01 -B1*105:01L HLA-DQA1*03:01-B1*03:02L HLA-DRB1*14:54L HLA-DQA1*05 :05-B1*03:01L HLA-DRB1*14:17M HLA-DRB1*10:01L HLA-DRB1*16:01L HL A-DRB1*04:08L HLA-DRB1*08:03L HLA-DQA1*02:01-B1*03:03L
  REGION 1..12: note = CONT. FROM ABOVE: HLA-DRB1*15:03L
LPSYAAFATAQE

SEQ ID NO: 9163 - protein, 12 aa, Severe acute respiratory syndrome coronavirus 2
  REGION 1..12: note = Table B: HLA-DQA1*03:02-B1*03:03L HLA-DRB1*04:02L HLA-DRB1*04:05L HLA-DRB4*03:01NL HLA-DQA1*01-B1*05L HLA-DQA1*05:01-B1*02:01L HLA-DRB1*04:10L HLA-DPA1*03:01-B1*105:01L HLA-DQA1*03:01-B1*03:02L
  REGION 1..12: note = CONT. FROM ABOVE: HLA-DRB1*14:17L HLA-DRB1*16:01L HLA-DRB1*04:08 L HLA-DQA1*02:01-B1*03:03L
PSYAAFATAQEA

SEQ ID NO: 9164 - protein, 10 aa, Severe acute respiratory syndrome coronavirus 2
  REGION 1..10: note = Table B: HLA-DQA1*03:02-B1*03:03L HLA-DQA1*05:01-B1*03:01L HLA-DRB1*13:03L HLA-DRB1*01:03L HLA-DQA1*01:02-B1*06:02L HLA-DRB1*08:77L HLA-DPA1*01:03-B1*03:01L HLA-DRB1*03:01L HLA-DRB1*14:02L HLA-DQA1*05:05-B1*03:19L
  REGION 1..10: note = CONT. FROM ABOVE: HLA-DQA1*05:01-B1*02:01L HLA-DRB4*01:01L HLA-D PA1*01:03-B1*04:01L HLA-DPA1*01:03-B1*04:02L HLA-DPA1*02:01-B1*1 3:01L HLA-DPA1*03:01-B1*105:01L HLA-DRB1*16:01L HLA-DQA1*01:03-B 1*06:01L HLA-DRB1*08:02L HLA-DQA1*02:01-B1*03:03L
  REGION 1..10: note = CONT. FROM ABOVE: HLA-DRB1*15:03L
AAFATAQEAY

SEQ ID NO: 9165 - protein, 10 aa, Severe acute respiratory syndrome coronavirus 2
  REGION 1..10: note = Table B: HLA-DQA1*03:02-B1*03:03L HLA-DQA1*05:01-B1*03:01L HLA-DQA1*01:02-B1*06:02L HLA-DQA1*05:05-B1*03:19L HLA-DQA1*05:01-B1*02:01L HLA-DQA1*03:01-B1*03:02L HLA-DQA1*05:05-B1*03:01L HLA-DQA1*01:03-B1*06:01L
  REGION 1..10: note = CONT. FROM ABOVE: HLA-DQA1*02:01-B1*03:03L
AFATAQEAYE

SEQ ID NO: 9166 - protein, 10 aa, Severe acute respiratory syndrome coronavirus 2
  REGION 1..10: note = Table B: HLA-DQA1*03:02-B1*03:03L HLA-DQA1*05:01-B1*03:01L HLA-DRB1*04:03L HLA-DQA1*01:02-B1*06:02L HLA-DQA1*05:05-B1*03:19L HLA-DQA1*05:01-B1*02:01L HLA-DQA1*03:01-B1*03:02L HLA-DQA1*05:05-B1*03:01L
  REGION 1..10: note = CONT. FROM ABOVE: HLA-DQA1*01:03-B1*06:01L HLA-DQA1*02:01-B1*03: 03L
FATAQEAYEQ

SEQ ID NO: 9167 - protein, 12 aa, Severe acute respiratory syndrome coronavirus 2
  REGION 1..12: note = Table B: HLA-DQA1*03:02-B1*03:03L HLA-DQA1*01-B1*05L HLA-DQA1*05:01-B1*02:01L
ATAQEAYEQAVA

SEQ ID NO: 9168 - protein, 12 aa, Severe acute respiratory syndrome coronavirus 2
  REGION 1..12: note = Table B: HLA-DQA1*03:02-B1*03:03L HLA-DRB1*04:03L HLA-DQA1*01-B1*05L HLA-DQA1*05:01-B1*02:01L HLA-DQA1*03:01-B1*03:02L HLA-DQA1*02:01-B1*03:03L
TAQEAYEQAVAN

SEQ ID NO: 9169 - protein, 13 aa, Severe acute respiratory syndrome coronavirus 2
  REGION 1..13: note = Table B: HLA-DQA1*03:02-B1*03:03L HLA-DRB1*04:02L HLA-DRB1*04:05L HLA-DRB4*03:01NL HLA-DRB1*14:17L HLA-DRB1*16:01L HLA-DQA1*02:01-B1*03:03L
AQEAYEQAVANGD

SEQ ID NO: 9170 - protein, 11 aa, Severe acute respiratory syndrome coronavirus 2
  REGION 1..11: note = Table B: HLA-DQA1*03:02-B1*03:03L HLA-DRB1*13:03L HLA-DRB1*01:03L HLA-DRB1*04:02L HLA-DRB4*03:01NL HLA-DQA1*01-B1*05L HLA-DQA1*05:01-B1*02:01L HLA-DRB1*04:10L HLA-DRB1*12:01L HLA-DRB1*14:54L HLA-DRB1*10:01L HLA-DRB1*16:01L
  REGION 1..11: note = CONT. FROM ABOVE: HLA-DRB1*04:08L HLA-DQA1*02:01-B1*03:03L
AYEQAVANGDS

SEQ ID NO: 9171 - protein, 11 aa, Severe acute respiratory syndrome coronavirus 2
  REGION 1..11: note = Table B: HLA-DQA1*03:02-B1*03:03L HLA-DQA1*05:01-B1*03:01L HLA-DRB1*13:03L HLA-DRB1*04:02L HLA-DRB4*03:01NL HLA-DQA1*01-B1*05L HLA-DQA1*05:01-B1*02:01L HLA-DRB1*04:10L HLA-DRB1*14:54L HLA-DQA1*05:05-B1*03:01L HLA-DRB1*16:01L
  REGION 1..11: note = CONT. FROM ABOVE: HLA-DQA1*02:01-B1*03:03L
YEQAVANGDSE

SEQ ID NO: 9172 - protein, 10 aa, Severe acute respiratory syndrome coronavirus 2
  REGION 1..10: note = Table B: HLA-DQA1*03:02-B1*03:03L
AVANGDSEVV

SEQ ID NO: 9173 - protein, 10 aa, Severe acute respiratory syndrome coronavirus 2
  REGION 1..10: note = Table B: HLA-DQA1*03:02-B1*03:03L HLA-DQA1*03:01-B1*03:02L
VANGDSEVVL

SEQ ID NO: 9174 - protein, 10 aa, Severe acute respiratory syndrome coronavirus 2
  REGION 1..10: note = Table B: HLA-DQA1*03:02-B1*03:03L HLA-DQA1*05:01-B1*03:01L HLA-DQA1*01-B1*05L HLA-DQA1*05:05-B1*03:19L HLA-DQA1*05:01-B1*02:01L HLA-DQA1*03:01-B1*03:02L HLA-DPA1*01:02-B1*04:01L
GDSEVVLKKL

SEQ ID NO: 9175 - protein, 12 aa, Severe acute respiratory syndrome coronavirus 2
  REGION 1..12: note = Table B: HLA-DQA1*03:02-B1*03:03L HLA-DQA1*05:01-B1*03:01L HLA-DQA1*01:02-B1*06:02L HLA-DRB1*08:01L HLA-DQA1*05:01-B1*02:01L HLA-DRB1*16:01L HLA-DRB1*04:08L
SLNVAKSEFDRD

SEQ ID NO: 9176 - protein, 12 aa, Severe acute respiratory syndrome coronavirus 2
  REGION 1..12: note = Table B: HLA-DQA1*03:02-B1*03:03L HLA-DQA1*05:01-B1*03:01L HLA-DRB1*04:02L HLA-DQA1*01:02-B1*06:02L HLA-DQA1*01:01-B1*05:01L HLA-DQA1*05:01-B1*02:01L HLA-DRB1*04:10L HLA-DPA1*03:01-B1*105:01L
  REGION 1..12: note = CONT. FROM ABOVE: HLA-DQA1*05:05-B1*03:01L HLA-DRB1*16:01L HLA-D RB1*04:08L
LNVAKSEFDRDA

SEQ ID NO: 9177 - protein, 12 aa, Severe acute respiratory syndrome coronavirus 2
  REGION 1..12: note = Table B: HLA-DQA1*03:02-B1*03:03L HLA-DRB1*01:03L HLA-DRB1*04:02L HLA-DRB1*04:05L HLA-DQA1*01:02-B1*06:02L HLA-DQA1*05:01-B1*02:01L HLA-DRB1*14:17L HLA-DRB1*16:01L
NVAKSEFDRDAA

SEQ ID NO: 9178 - protein, 10 aa, Severe acute respiratory syndrome coronavirus 2
  REGION 1..10: note = Table B: HLA-DQA1*03:02-B1*03:03L HLA-DQA1*01-B1*05L HLA-DQA1*03:01-B1*03:02L
SEFDRDAAMQ

SEQ ID NO: 9179 - protein, 11 aa, Severe acute respiratory syndrome coronavirus 2
  REGION 1..11: note = Table B: HLA-DQA1*03:02-B1*03:03L HLA-DRB1*04:02L HLA-DRB1*04:05L HLA-DRB4*03:01NL HLA-DQA1*05:01-B1*02:01L HLA-DRB1*04:10L HLA-DRB1*12:01L HLA-DQA1*03:01-B1*03:02L HLA-DRB1*14:54L HLA-DRB1*14:17L HLA-DRB1*16:01L
  REGION 1..11: note = CONT. FROM ABOVE: HLA-DQA1*02:01-B1*03:03L
LEKMADQAMTQ

SEQ ID NO: 9180 - protein, 10 aa, Severe acute respiratory syndrome coronavirus 2
  REGION 1..10: note = Table B: HLA-DQA1*03:02-B1*03:03M HLA-DQA1*05:01-B1*03:01L HLA-DRB1*13:02L HLA-DRB1*13:03L HLA-DRB1*01:03L HLA-DQA1*01:02-B1*06:02L HLA-DRB3*02:01L HLA-DPA1*03:01-B1*04:02L HLA-DRB1*14:01L HLA-DRB1*14:02L
  REGION 1..10: note = CONT. FROM ABOVE: HLA-DRB1*08:01L HLA-DQA1*05:05-B1*03:19L HLA-D QA1*05:01-B1*02:01L HLA-DPA1*01:03-B1*04:01L HLA-DQA1*05:05-B1*0 3:116M HLA-DRB1*09:01L HLA-DPA1*01:03-B1*04:02L HLA-DPA1*02:01-B 1*13:01L HLA-DPA1*03:01-B1*105:01L HLA-DQA1*03:01-B1*03:02M
  REGION 1..10: note = CONT. FROM ABOVE: HLA-DPA1*01:03-B1*104:01L HLA-DPA1*01:02-B1*04 :01L HLA-DRB1*10:01L HLA-DRB1*16:01L HLA-DQA1*01:03-B1*06:01L HL A-DRB1*08:03L HLA-DQA1*02:01-B1*03:03M HLA-DRB1*15:03L
KMADQAMTQM

SEQ ID NO: 9181 - protein, 11 aa, Severe acute respiratory syndrome coronavirus 2
  REGION 1..11: note = Table B: HLA-DQA1*03:02-B1*03:03L
SEDKRAKVTSA

SEQ ID NO: 9182 - protein, 10 aa, Severe acute respiratory syndrome coronavirus 2
  REGION 1..10: note = Table B: HLA-DQA1*03:02-B1*03:03L HLA-DQA1*03:01-B1*03:02L HLA-DQA1*02:01-B1*03:03L
AKVTSAMQTM

SEQ ID NO: 9183 - protein, 10 aa, Severe acute respiratory syndrome coronavirus 2
  REGION 1..10: note = Table B: HLA-DQA1*03:02-B1*03:03L HLA-DQA1*05:01-B1*03:01L HLA-DQA1*01:02-B1*06:02L HLA-DQA1*05:05-B1*03:19L HLA-DQA1*05:01-B1*02:01L HLA-DPA1*03:01-B1*105:01L HLA-DQA1*03:01-B1*03:02L HLA-DRB1*16:01L
  REGION 1..10: note = CONT. FROM ABOVE: HLA-DQA1*01:03-B1*06:01L HLA-DQA1*02:01-B1*03: 03L HLA-DRB1*15:03L
KVTSAMQTML

SEQ ID NO: 9184 - protein, 10 aa, Severe acute respiratory syndrome coronavirus 2
  REGION 1..10: note = Table B: HLA-DQA1*03:02-B1*03:03L HLA-DQA1*01:02-B1*06:02L HLA-DPA1*03:01-B1*105:01L HLA-DRB1*15:03L
SAMQTMLFTM

SEQ ID NO: 9185 - protein, 10 aa, Severe acute respiratory syndrome coronavirus 2
  REGION 1..10: note = Table B: HLA-DQA1*03:02-B1*03:03M HLA-DQA1*05:01-B1*03:01L HLA-DQA1*01:02-B1*06:02L HLA-DRB1*11:02L HLA-DRB1*14:02L HLA-DQA1*05:05-B1*03:19M HLA-DQA1*05:01-B1*02:01L HLA-DQA1*05:05-B1*03:116L HLA-DRB1*09:01L
  REGION 1..10: note = CONT. FROM ABOVE: HLA-DPA1*03:01-B1*105:01L HLA-DQA1*03:01-B1*03 :02L HLA-DPA1*01:03-B1*104:01L HLA-DRB1*10:01L HLA-DRB1*16:01L H LA-DQA1*01:03-B1*06:01L HLA-DQA1*02:01-B1*03:03L HLA-DRB1*15:03L
KLDNDALNNI

SEQ ID NO: 9186 - protein, 11 aa, Severe acute respiratory syndrome coronavirus 2
  REGION 1..11: note = Table B: HLA-DQA1*03:02-B1*03:03L HLA-DQA1*05:01-B1*02:01L HLA-DQA1*03:01-B1*03:02L
LDNDALNNIIN

SEQ ID NO: 9187 - protein, 11 aa, Severe acute respiratory syndrome coronavirus 2
  REGION 1..11: note = Table B: HLA-DQA1*03:02-B1*03:03L HLA-DQA1*05:01-B1*02:01L HLA-DQA1*02:01-B1*03:03L
DNDALNNIINN

SEQ ID NO: 9188 - protein, 10 aa, Severe acute respiratory syndrome coronavirus 2
  REGION 1..10: note = Table B: HLA-DQA1*03:02-B1*03:03L HLA-DQA1*05:01-B1*03:01L HLA-DRB1*13:03L HLA-DQA1*01-B1*05L HLA-DPA1*03:01-B1*105:01L HLA-DQA1*03:01-B1*03:02L HLA-DRB1*15:03L
DALNNIINNA

SEQ ID NO: 9189 - protein, 10 aa, Severe acute respiratory syndrome coronavirus 2
  REGION 1..10: note = Table B: HLA-DQA1*03:02-B1*03:03L HLA-DQA1*05:01-B1*03:01L HLA-DRB1*04:03L HLA-DRB1*13:03L HLA-DRB1*01:03L HLA-DRB1*04:02L HLA-DRB1*04:05L HLA-DQA1*01:02-B1*06:02L HLA-DRB4*03:01NL HLA-DQA1*01:01-B1*05:01L HLA-DQA1*01-B1*05L
  REGION 1..10: note = CONT. FROM ABOVE: HLA-DQA1*05:01-B1*02:01L HLA-DRB1*04:10L HLA-D RB1*12:01L HLA-DQA1*03:01-B1*03:02L HLA-DRB1*14:54L HLA-DQA1*05: 05-B1*03:01L HLA-DRB1*14:17L HLA-DRB1*16:01L HLA-DQA1*01:03-B1*0 6:01L HLA-DRB1*04:08L HLA-DQA1*02:01-B1*03:03L
NNIINNARDG

SEQ ID NO: 9190 - protein, 11 aa, Severe acute respiratory syndrome coronavirus 2
  REGION 1..11: note = Table B: HLA-DQA1*03:02-B1*03:03L HLA-DRB1*04:03L HLA-DRB1*13:03L HLA-DQA1*01-B1*05L HLA-DPA1*03:01-B1*105:01L HLA-DQA1*03:01-B1*03:02L HLA-DPA1*01:02-B1*04:01L HLA-DRB1*16:01L
VPLNIIPLTTA

SEQ ID NO: 9191 - protein, 10 aa, Severe acute respiratory syndrome coronavirus 2
  REGION 1..10: note = Table B: HLA-DQA1*03:02-B1*03:03L HLA-DQA1*05:01-B1*03:01L HLA-DRB1*04:03L HLA-DRB1*13:03L HLA-DRB1*01:03L HLA-DRB1*04:02L HLA-DRB1*04:05L HLA-DQA1*01:02-B1*06:02L HLA-DRB1*01:02L HLA-DRB4*03:01NL HLA-DRB1*08:77L HLA-DRB3*02:01L
  REGION 1..10: note = CONT. FROM ABOVE: HLA-DPA1*01:03-B1*03:01L HLA-DPA1*03:01-B1*04: 02L HLA-DRB1*14:01L HLA-DQA1*01-B1*05L HLA-DQA1*05:05-B1*03:19L HLA-DQA1*05:01-B1*02:01L HLA-DRB1*12:01L HLA-DPA1*02:01-B1*13:01 L HLA-DPA1*03:01-B1*105:01L HLA-DQA1*03:01-B1*03:02L
  REGION 1..10: note = CONT. FROM ABOVE: HLA-DQA1*05:05-B1*03:01L HLA-DRB1*14:17L HLA-D PA1*01:02-B1*04:01L HLA-DRB1*07:01L HLA-DRB1*16:01L HLA-DQA1*01: 03-B1*06:01L HLA-DQA1*02:01-B1*03:03L HLA-DRB1*15:03L
IIPLTTAAKL

SEQ ID NO: 9192 - protein, 10 aa, Severe acute respiratory syndrome coronavirus 2
  REGION 1..10: note = Table B: HLA-DQA1*03:02-B1*03:03L HLA-DQA1*05:01-B1*03:01L HLA-DQA1*05:01-B1*02:01L HLA-DQA1*03:01-B1*03:02L HLA-DQA1*01:03-B1*06:01L HLA-DQA1*02:01-B1*03:03L
IPLTTAAKLM

SEQ ID NO: 9193 - protein, 12 aa, Severe acute respiratory syndrome coronavirus 2
  REGION 1..12: note = Table B: HLA-DQA1*03:02-B1*03:03L HLA-DQA1*05:01-B1*03:01L HLA-DRB1*04:03L HLA-DQA1*01:02-B1*06:02M HLA-DQA1*05:05-B1*03:19L HLA-DPA1*03:01-B1*105:01L HLA-DQA1*03:01-B1*03:02L HLA-DQA1*05:05-B1*03:01L
  REGION 1..12: note = CONT. FROM ABOVE: HLA-DQA1*02:01-B1*03:03L
TTAAKLMVVIPD

SEQ ID NO: 9194 - protein, 12 aa, Severe acute respiratory syndrome coronavirus 2
  REGION 1..12: note = Table B: HLA-DQA1*03:02-B1*03:03L HLA-DQA1*05:01-B1*03:01L HLA-DRB1*04:05L HLA-DPA1*01:03-B1*03:01L HLA-DRB1*12:01L HLA-DPA1*02:01-B1*13:01L HLA-DPA1*03:01-B1*105:01L HLA-DQA1*05:05-B1*03:01L HLA-DRB1*16:01L HLA-DRB1*15:03L
AAKLMVVIPDYN

SEQ ID NO: 9195 - protein, 10 aa, Severe acute respiratory syndrome coronavirus 2
  REGION 1..10: note = Table B: HLA-DQA1*03:02-B1*03:03L HLA-DQA1*05:01-B1*03:01L HLA-DRB1*04:03L HLA-DRB1*13:02L HLA-DRB1*13:03L HLA-DRB1*01:03L HLA-DRB1*04:05L HLA-DQA1*01:02-B1*06:02M HLA-DRB4*03:01NL HLA-DRB1*08:77L HLA-DPA1*01:03-B1*03:01L
  REGION 1..10: note = CONT. FROM ABOVE: HLA-DPA1*03:01-B1*04:02L HLA-DRB1*03:01L HLA-D RB1*14:01L HLA-DRB1*11:02L HLA-DRB1*14:02L HLA-DQA1*01-B1*05L HL A-DQA1*05:05-B1*03:19M HLA-DQA1*05:01-B1*02:01M HLA-DRB4*01:01L HLA-DPA1*01:03-B1*04:01M HLA-DQA1*05:05-B1*03:116L
  REGION 1..10: note = CONT. FROM ABOVE: HLA-DPA1*01:03-B1*04:02L HLA-DRB1*12:01L HLA-D PA1*02:01-B1*13:01L HLA-DPA1*03:01-B1*105:01L HLA-DQA1*03:01-B1* 03:02L HLA-DPA1*01:03-B1*104:01L HLA-DQA1*05:05-B1*03:01L HLA-DP A1*01:02-B1*04:01L HLA-DRB1*10:01L HLA-DRB1*16:01L
  REGION 1..10: note = CONT. FROM ABOVE: HLA-DQA1*01:03-B1*06:01L HLA-DRB1*08:02L HLA-D QA1*02:01-B1*03:03L HLA-DRB1*15:03L
MVVIPDYNTY

SEQ ID NO: 9196 - protein, 12 aa, Severe acute respiratory syndrome coronavirus 2
  REGION 1..12: note = Table B: HLA-DQA1*03:02-B1*03:03L HLA-DQA1*05:01-B1*03:01L HLA-DRB1*04:04L HLA-DRB1*04:05L HLA-DQA1*01:02-B1*06:02L HLA-DRB1*01:02L HLA-DRB1*08:04L HLA-DPA1*01:03-B1*03:01L HLA-DPA1*03:01-B1*04:02L HLA-DRB1*03:01L HLA-DRB1*14:02L
  REGION 1..12: note = CONT. FROM ABOVE: HLA-DRB1*04:10L HLA-DPA1*01:03-B1*04:02L HLA-D RB3*01:01L HLA-DPA1*03:01-B1*105:01L HLA-DQA1*01:03-B1*06:01L HL A-DRB1*04:08L HLA-DRB1*15:03L
VVIPDYNTYKNT

SEQ ID NO: 9197 - protein, 13 aa, Severe acute respiratory syndrome coronavirus 2
  REGION 1..13: note = Table B: HLA-DQA1*03:02-B1*03:03L HLA-DQA1*05:01-B1*03:01L HLA-DRB1*04:03L HLA-DRB1*13:03L HLA-DRB1*01:03L HLA-DRB1*04:02L HLA-DRB1*04:04L HLA-DRB1*04:05L HLA-DQA1*01:02-B1*06:02L HLA-DRB1*01:02L HLA-DRB4*03:01NL HLA-DRB1*08:04L HLA-DRB1*14:01L
  REGION 1..13: note = CONT. FROM ABOVE: HLA-DRB1*11:04L HLA-DRB1*08:01L HLA-DQA1*05:01 -B1*02:01L HLA-DRB1*04:10L HLA-DRB1*12:01L HLA-DPA1*02:01-B1*13: 01L HLA-DPA1*03:01-B1*105:01L HLA-DQA1*03:01-B1*03:02L HLA-DRB1* 14:54L HLA-DRB1*14:17L HLA-DRB1*10:01L HLA-DRB1*16:01L
  REGION 1..13: note = CONT. FROM ABOVE: HLA-DQA1*01:03-B1*06:01L HLA-DRB1*04:08L HLA-D RB1*08:03L HLA-DQA1*02:01-B1*03:03L HLA-DRB1*15:03L
IPDYNTYKNTCDG

SEQ ID NO: 9198 - protein, 13 aa, Severe acute respiratory syndrome coronavirus 2
  REGION 1..13: note = Table B: HLA-DQA1*03:02-B1*03:03L HLA-DQA1*05:01-B1*03:01L HLA-DRB1*04:02L HLA-DRB1*04:05L HLA-DPA1*03:01-B1*04:02L HLA-DQA1*05:05-B1*03:19L HLA-DRB1*04:10L HLA-DPA1*03:01-B1*105:01L HLA-DQA1*03:01-B1*03:02L
  REGION 1..13: note = CONT. FROM ABOVE: HLA-DQA1*05:05-B1*03:01L HLA-DRB1*16:01L HLA-D QA1*01:03-B1*06:01L HLA-DQA1*02:01-B1*03:03L
DGTTFTYASALWE

SEQ ID NO: 9199 - protein, 14 aa, Severe acute respiratory syndrome coronavirus 2
  REGION 1..14: note = Table B: HLA-DQA1*03:02-B1*03:03L HLA-DQA1*05:01-B1*03:01L HLA-DRB1*13:02L HLA-DRB1*13:03L HLA-DRB1*01:03L HLA-DRB1*04:05L HLA-DRB1*01:02L HLA-DRB1*08:04L HLA-DRB3*02:01L HLA-DPA1*01:03-B1*03:01L HLA-DRB1*14:02L HLA-DRB1*08:01L
  REGION 1..14: note = CONT. FROM ABOVE: HLA-DRB4*01:01L HLA-DRB1*04:10L HLA-DRB1*09:01 L HLA-DPA1*02:01-B1*13:01L HLA-DQA1*03:01-B1*03:02L HLA-DPA1*01: 03-B1*104:01L HLA-DPA1*01:02-B1*04:01L HLA-DRB1*10:01L HLA-DRB1* 16:01L HLA-DRB1*04:08L HLA-DRB1*08:03L HLA-DQA1*02:01-B1*03:03L
GTTFTYASALWEIQ

SEQ ID NO: 9200 - protein, 12 aa, Severe acute respiratory syndrome coronavirus 2
  REGION 1..12: note = Table B: HLA-DQA1*03:02-B1*03:03L HLA-DQA1*05:01-B1*03:01L HLA-DQA1*01-B1*05L HLA-DQA1*05:05-B1*03:19L HLA-DQA1*05:01-B1*02:01L HLA-DQA1*05:05-B1*03:01L HLA-DRB1*16:01L HLA-DRB1*04:08L HLA-DQA1*02:01-B1*03:03L
  REGION 1..12: note = CONT. FROM ABOVE: HLA-DRB1*15:03L
FTYASALWEIQQ

SEQ ID NO: 9201 - protein, 10 aa, Severe acute respiratory syndrome coronavirus 2
  REGION 1..10: note = Table B: HLA-DQA1*03:02-B1*03:03L HLA-DQA1*05:05-B1*03:19L
ASALWEIQQV

SEQ ID NO: 9202 - protein, 10 aa, Severe acute respiratory syndrome coronavirus 2
  REGION 1..10: note = Table B: HLA-DQA1*03:02-B1*03:03L HLA-DQA1*01-B1*05L HLA-DQA1*03:01-B1*03:02L
WEIQQVVDAD

SEQ ID NO: 9203 - protein, 10 aa, Severe acute respiratory syndrome coronavirus 2
  REGION 1..10: note = Table B: HLA-DQA1*03:02-B1*03:03L HLA-DRB1*04:01L HLA-DRB1*04:03M HLA-DRB1*13:03L HLA-DRB1*01:03L HLA-DRB1*04:02L HLA-DRB1*04:04L HLA-DRB1*04:05L HLA-DRB4*03:01NL HLA-DRB1*11:04L HLA-DQA1*01-B1*05L HLA-DQA1*05:01-B1*02:01L HLA-DRB1*04:10L
  REGION 1..10: note = CONT. FROM ABOVE: HLA-DRB1*12:01L HLA-DQA1*03:01-B1*03:02L HLA-D RB1*14:54L HLA-DRB1*14:17M HLA-DRB1*10:01L HLA-DRB1*16:01L HLA-D RB1*04:08L HLA-DRB1*08:03L HLA-DQA1*02:01-B1*03:03L
IQQVVDADSK

SEQ ID NO: 9204 - protein, 10 aa, Severe acute respiratory syndrome coronavirus 2
  REGION 1..10: note = Table B: HLA-DQA1*03:02-B1*03:03L HLA-DQA1*03:01-B1*03:02L
QVVDADSKIV

SEQ ID NO: 9205 - protein, 10 aa, Severe acute respiratory syndrome coronavirus 2
  REGION 1..10: note = Table B: HLA-DQA1*03:02-B1*03:03L HLA-DQA1*05:01-B1*03:01L HLA-DRB1*04:01L HLA-DRB1*04:03L HLA-DRB1*13:02L HLA-DRB1*13:03L HLA-DRB1*01:03L HLA-DRB1*04:02L HLA-DRB1*04:04L HLA-DRB1*04:05L HLA-DRB1*01:02L HLA-DRB4*03:01NL HLA-DRB1*08:04L HLA-DRB1*08:77L
  REGION 1..10: note = CONT. FROM ABOVE: HLA-DRB3*02:01L HLA-DPA1*01:03-B1*03:01L HLA-D RB1*14:01L HLA-DRB1*11:03L HLA-DRB1*11:04L HLA-DRB1*14:02L HLA-D QA1*01:01-B1*05:01L HLA-DRB5*01:01L HLA-DQA1*01-B1*05L HLA-DQA1* 05:05-B1*03:19L HLA-DQA1*05:01-B1*02:01L HLA-DRB1*04:10L
  REGION 1..10: note = CONT. FROM ABOVE: HLA-DRB1*12:01L HLA-DRB1*12:02L HLA-DRB3*01:01 L HLA-DPA1*03:01-B1*105:01L HLA-DQA1*03:01-B1*03:02L HLA-DRB1*14 :54L HLA-DQA1*05:05-B1*03:01L HLA-DRB1*14:17L HLA-DRB1*10:01L HL A-DRB1*16:01L HLA-DRB1*04:08L HLA-DQA1*02:01-B1*03:03L
  REGION 1..10: note = CONT. FROM ABOVE: HLA-DRB1*15:03L
VVDADSKIVQ

SEQ ID NO: 9206 - protein, 10 aa, Severe acute respiratory syndrome coronavirus 2
  REGION 1..10: note = Table B: HLA-DQA1*03:02-B1*03:03M HLA-DQA1*05:01-B1*03:01L HLA-DRB1*13:02L HLA-DRB1*13:03L HLA-DRB1*01:03L HLA-DRB1*04:02L HLA-DQA1*01:02-B1*06:02L HLA-DRB3*02:01L HLA-DPA1*01:03-B1*03:01L HLA-DPA1*03:01-B1*04:02L
  REGION 1..10: note = CONT. FROM ABOVE: HLA-DRB1*14:01L HLA-DRB1*14:02L HLA-DRB1*08:01 L HLA-DQA1*01-B1*05L HLA-DQA1*05:05-B1*03:19L HLA-DQA1*05:01-B1* 02:01L HLA-DPA1*01:03-B1*04:01L HLA-DQA1*05:05-B1*03:116L HLA-DR B1*09:01L HLA-DPA1*01:03-B1*04:02L HLA-DPA1*03:01-B1*105:01L
  REGION 1..10: note = CONT. FROM ABOVE: HLA-DQA1*03:01-B1*03:02M HLA-DPA1*01:03-B1*104 :01L HLA-DPA1*01:02-B1*04:01L HLA-DRB1*10:01L HLA-DRB1*16:01L HL A-DQA1*02:01-B1*03:03L HLA-DRB1*15:03L
VDADSKIVQL

SEQ ID NO: 9207 - protein, 12 aa, Severe acute respiratory syndrome coronavirus 2
  REGION 1..12: note = Table B: HLA-DQA1*03:02-B1*03:03L HLA-DQA1*01:02-B1*06:02L HLA-DQA1*05:01-B1*02:01L HLA-DQA1*03:01-B1*03:02L HLA-DQA1*01:03-B1*06:01L HLA-DQA1*02:01-B1*03:03L
ADSKIVQLSEIS

SEQ ID NO: 9208 - protein, 10 aa, Severe acute respiratory syndrome coronavirus 2
  REGION 1..10: note = Table B: HLA-DQA1*03:02-B1*03:03L HLA-DQA1*05:01-B1*03:01L HLA-DRB1*08:77L HLA-DRB3*02:01L HLA-DPA1*03:01-B1*04:02L HLA-DRB1*14:01L HLA-DQA1*05:01-B1*02:01L HLA-DRB1*12:01L HLA-DRB1*12:02L HLA-DQA1*03:01-B1*03:02L HLA-DRB1*16:01L
  REGION 1..10: note = CONT. FROM ABOVE: HLA-DQA1*02:01-B1*03:03L HLA-DRB1*15:03L
KIVQLSEISM

SEQ ID NO: 9209 - protein, 11 aa, Severe acute respiratory syndrome coronavirus 2
  REGION 1..11: note = Table B: HLA-DQA1*03:02-B1*03:03L HLA-DQA1*05:01-B1*03:01L HLA-DRB1*04:03L HLA-DRB1*13:02L HLA-DRB1*13:03L HLA-DRB1*01:03L HLA-DRB1*04:02L HLA-DRB1*04:04L HLA-DRB1*04:05L HLA-DQA1*01:02-B1*06:02L HLA-DRB1*01:02L HLA-DRB4*03:01NL
  REGION 1..11: note = CONT. FROM ABOVE: HLA-DRB1*08:77L HLA-DRB3*02:01L HLA-DRB1*14:01 L HLA-DRB1*11:03L HLA-DQA1*01-B1*05L HLA-DRB1*04:10L HLA-DRB1*12 :02L HLA-DPA1*03:01-B1*105:01L HLA-DQA1*03:01-B1*03:02L HLA-DRB1 *14:54L HLA-DQA1*05:05-B1*03:01L HLA-DRB1*14:17L HLA-DRB1*10:01L
  REGION 1..11: note = CONT. FROM ABOVE: HLA-DRB1*16:01L HLA-DQA1*01:03-B1*06:01L HLA-D QA1*02:01-B1*03:03L
IVQLSEISMDN

SEQ ID NO: 9210 - protein, 11 aa, Severe acute respiratory syndrome coronavirus 2
  REGION 1..11: note = Table B: HLA-DQA1*03:02-B1*03:03L HLA-DRB1*04:03L HLA-DQA1*01-B1*05L HLA-DQA1*05:01-B1*02:01L HLA-DQA1*03:01-B1*03:02L HLA-DRB1*14:17L HLA-DQA1*02:01-B1*03:03L
LSEISMDNSPN

SEQ ID NO: 9211 - protein, 10 aa, Severe acute respiratory syndrome coronavirus 2
  REGION 1..10: note = Table B: HLA-DQA1*03:02-B1*03:03L HLA-DQA1*03:01-B1*03:02L
EISMDNSPNL

SEQ ID NO: 9212 - protein, 11 aa, Severe acute respiratory syndrome coronavirus 2
  REGION 1..11: note = Table B: HLA-DQA1*03:02-B1*03:03L HLA-DQA1*05:05-B1*03:19L HLA-DQA1*03:01-B1*03:02L HLA-DQA1*05:05-B1*03:01L HLA-DQA1*02:01-B1*03:03L
SPNLAWPLIVT

SEQ ID NO: 9213 - protein, 10 aa, Severe acute respiratory syndrome coronavirus 2
  REGION 1..10: note = Table B: HLA-DQA1*03:02-B1*03:03L HLA-DQA1*01:02-B1*06:02L HLA-DQA1*05:05-B1*03:19L HLA-DPA1*03:01-B1*105:01L HLA-DQA1*02:01-B1*03:03L HLA-DRB1*15:03L
NLAWPLIVTA

SEQ ID NO: 9214 - protein, 10 aa, Severe acute respiratory syndrome coronavirus 2
  REGION 1..10: note = Table B: HLA-DQA1*03:02-B1*03:03L HLA-DQA1*01:02-B1*06:02L HLA-DPA1*03:01-B1*105:01L HLA-DRB1*15:03L
LAWPLIVTAL

SEQ ID NO: 9215 - protein, 10 aa, Severe acute respiratory syndrome coronavirus 2
  REGION 1..10: note = Table B: HLA-DQA1*03:02-B1*03:03L HLA-DRB1*04:03L HLA-DRB1*13:03L HLA-DRB1*04:02L HLA-DRB4*03:01NL HLA-DRB1*14:01L HLA-DRB1*12:01L HLA-DQA1*03:01-B1*03:02L HLA-DRB1*14:54L HLA-DRB1*14:17L HLA-DRB1*16:01L HLA-DQA1*02:01-B1*03:03L
IVTALRANSA

SEQ ID NO: 9216 - protein, 10 aa, Severe acute respiratory syndrome coronavirus 2
  REGION 1..10: note = Table B: HLA-DQA1*03:02-B1*03:03L HLA-DRB1*13:02L HLA-DRB3*02:01L HLA-DRB1*14:01L HLA-DRB1*12:01L HLA-DQA1*03:01-B1*03:02L HLA-DRB1*07:01L HLA-DRB1*16:01L HLA-DQA1*02:01-B1*03:03L
ALRANSAVKL

SEQ ID NO: 9217 - protein, 10 aa, Severe acute respiratory syndrome coronavirus 2
  REGION 1..10: note = Table B: HLA-DQA1*03:02-B1*03:03L HLA-DQA1*05:01-B1*03:01L HLA-DRB1*04:03L HLA-DRB1*01:03L HLA-DRB1*04:02L HLA-DQA1*01:02-B1*06:02L HLA-DRB4*03:01NL HLA-DRB1*12:01L HLA-DQA1*03:01-B1*03:02L HLA-DQA1*05:05-B1*03:01L
  REGION 1..10: note = CONT. FROM ABOVE: HLA-DRB1*14:17L HLA-DRB1*16:01L HLA-DQA1*01:03 -B1*06:01L HLA-DQA1*02:01-B1*03:03L
ANSAVKLQNN

SEQ ID NO: 9218 - protein, 10 aa, Severe acute respiratory syndrome coronavirus 2
  REGION 1..10: note = Table B: HLA-DQA1*03:02-B1*03:03L HLA-DQA1*05:01-B1*03:01L HLA-DQA1*01:02-B1*06:02L HLA-DRB1*14:01L HLA-DQA1*05:01-B1*02:01L HLA-DPA1*03:01-B1*105:01L HLA-DQA1*03:01-B1*03:02L HLA-DPA1*01:02-B1*04:01L
  REGION 1..10: note = CONT. FROM ABOVE: HLA-DQA1*01:03-B1*06:01L HLA-DQA1*02:01-B1*03: 03L
SAVKLQNNEL

SEQ ID NO: 9219 - protein, 11 aa, Severe acute respiratory syndrome coronavirus 2
  REGION 1..11: note = Table B: HLA-DQA1*03:02-B1*03:03L HLA-DQA1*05:01-B1*03:01L HLA-DRB1*04:01L HLA-DRB1*13:02L HLA-DRB1*13:03L HLA-DRB1*01:03L HLA-DRB1*04:04L HLA-DRB1*04:05L HLA-DQA1*01:02-B1*06:02L HLA-DRB1*01:02L HLA-DRB4*03:01NL HLA-DRB1*08:04L HLA-DRB1*08:77L
  REGION 1..11: note = CONT. FROM ABOVE: HLA-DRB1*14:01L HLA-DRB1*11:03L HLA-DRB1*11:04 L HLA-DRB1*14:02L HLA-DQA1*01-B1*05L HLA-DQA1*05:05-B1*03:19L HL A-DQA1*05:01-B1*02:01L HLA-DRB4*01:01L HLA-DRB1*04:10L HLA-DRB1* 09:01L HLA-DRB1*12:01L HLA-DPA1*03:01-B1*105:01L
  REGION 1..11: note = CONT. FROM ABOVE: HLA-DQA1*03:01-B1*03:02L HLA-DRB1*14:54L HLA-D QA1*05:05-B1*03:01L HLA-DRB1*10:01L HLA-DRB1*16:01L HLA-DRB1*04: 08L HLA-DRB1*08:03L HLA-DQA1*02:01-B1*03:03L HLA-DRB1*15:03L
VKLQNNELSPV

SEQ ID NO: 9220 - protein, 10 aa, Severe acute respiratory syndrome coronavirus 2
  REGION 1..10: note = Table B: HLA-DQA1*03:02-B1*03:03L HLA-DQA1*03:01-B1*03:02L
QNNELSPVAL

SEQ ID NO: 9221 - protein, 10 aa, Severe acute respiratory syndrome coronavirus 2
  REGION 1..10: note = Table B: HLA-DQA1*03:02-B1*03:03L HLA-DQA1*05:01-B1*03:01L HLA-DRB1*04:03L HLA-DRB1*13:02L HLA-DRB1*13:03L HLA-DRB1*01:03L HLA-DQA1*01:02-B1*06:02M HLA-DRB1*01:02L HLA-DRB4*03:01NL HLA-DRB1*08:77L HLA-DRB3*02:01L HLA-DPA1*01:03-B1*03:01L
  REGION 1..10: note = CONT. FROM ABOVE: HLA-DPA1*03:01-B1*04:02L HLA-DRB1*14:01L HLA-D RB1*14:02L HLA-DRB1*08:01L HLA-DRB5*01:01L HLA-DQA1*05:05-B1*03: 19L HLA-DQA1*05:01-B1*02:01L HLA-DPA1*01:03-B1*04:01L HLA-DQA1*0 5:05-B1*03:116L HLA-DRB1*09:01L HLA-DPA1*01:03-B1*04:02L
  REGION 1..10: note = CONT. FROM ABOVE: HLA-DRB1*12:01L HLA-DPA1*02:01-B1*13:01L HLA-D PA1*03:01-B1*105:01M HLA-DQA1*03:01-B1*03:02L HLA-DPA1*01:03-B1* 104:01L HLA-DQA1*05:05-B1*03:01L HLA-DPA1*01:02-B1*04:01L HLA-DR B1*16:01L HLA-DQA1*01:03-B1*06:01L HLA-DQA1*02:01-B1*03:03L
  REGION 1..10: note = CONT. FROM ABOVE: HLA-DRB1*15:03L
ELSPVALRQM

SEQ ID NO: 9222 - protein, 15 aa, Severe acute respiratory syndrome coronavirus 2
  REGION 1..15: note = Table B: HLA-DQA1*03:02-B1*03:03L HLA-DQA1*05:01-B1*03:01L HLA-DRB1*04:01L HLA-DRB1*13:02L HLA-DRB1*01:03L HLA-DRB1*04:02L HLA-DRB1*04:04L HLA-DRB1*04:05L HLA-DRB1*01:01L HLA-DRB1*08:04L HLA-DPA1*01:03-B1*03:01L HLA-DRB1*14:01L HLA-DRB1*11:04L
  REGION 1..15: note = CONT. FROM ABOVE: HLA-DRB1*08:01L HLA-DRB1*11:01L HLA-DQA1*05:05 -B1*03:19L HLA-DRB1*04:10L HLA-DPA1*01:03-B1*04:02L HLA-DRB1*12: 01L HLA-DPA1*02:01-B1*13:01L HLA-DPA1*03:01-B1*105:01L HLA-DQA1* 03:01-B1*03:02L HLA-DPA1*01:03-B1*104:01L
  REGION 1..15: note = CONT. FROM ABOVE: HLA-DQA1*05:05-B1*03:01L HLA-DRB1*14:17L HLA-D RB1*10:01L HLA-DRB1*16:01L HLA-DQA1*01:03-B1*06:01L HLA-DRB1*04: 08M HLA-DQA1*02:01-B1*03:03L HLA-DRB1*15:03L
SPVALRQMSCAAGTT

SEQ ID NO: 9223 - protein, 12 aa, Severe acute respiratory syndrome coronavirus 2
  REGION 1..12: note = Table B: HLA-DQA1*03:02-B1*03:03L HLA-DQA1*05:05-B1*03:19L HLA-DQA1*03:01-B1*03:02L HLA-DQA1*05:05-B1*03:01L HLA-DQA1*01:03-B1*06:01L HLA-DQA1*02:01-B1*03:03L
AGTTQTACTDDN

SEQ ID NO: 9224 - protein, 12 aa, Severe acute respiratory syndrome coronavirus 2
  REGION 1..12: note = Table B: HLA-DQA1*03:02-B1*03:03L HLA-DQA1*01:02-B1*06:02L HLA-DQA1*03:01-B1*03:02L HLA-DQA1*01:03-B1*06:01L HLA-DQA1*02:01-B1*03:03L
DDNALAYYNTTK

SEQ ID NO: 9225 - protein, 12 aa, Severe acute respiratory syndrome coronavirus 2
  REGION 1..12: note = Table B: HLA-DQA1*03:02-B1*03:03L HLA-DQA1*05:01-B1*03:01L HLA-DRB1*13:03L HLA-DRB1*01:03L HLA-DRB1*04:04L HLA-DRB1*04:05L HLA-DQA1*01:02-B1*06:02L HLA-DRB1*01:02L HLA-DRB4*03:01NL HLA-DRB1*14:01L HLA-DRB1*11:04L HLA-DRB1*08:01L
  REGION 1..12: note = CONT. FROM ABOVE: HLA-DQA1*05:01-B1*02:01L HLA-DRB1*04:10L HLA-D RB1*12:01L HLA-DRB1*12:02L HLA-DPA1*03:01-B1*105:01L HLA-DRB1*14 :54L HLA-DQA1*05:05-B1*03:01L HLA-DRB1*16:01L HLA-DQA1*01:03-B1* 06:01L HLA-DRB1*04:08L HLA-DRB1*08:03L HLA-DRB1*15:03L
DNALAYYNTTKG

SEQ ID NO: 9226 - protein, 10 aa, Severe acute respiratory syndrome coronavirus 2
  REGION 1..10: note = Table B: HLA-DQA1*03:02-B1*03:03L HLA-DQA1*05:01-B1*03:01L HLA-DRB1*04:01L HLA-DRB1*04:03L HLA-DRB1*13:02L HLA-DRB1*13:03L HLA-DRB1*01:03M HLA-DRB1*04:05L HLA-DQA1*01:02-B1*06:02L HLA-DRB1*01:01L HLA-DRB1*01:02L HLA-DRB4*03:01NL HLA-DRB1*08:77L
  REGION 1..10: note = CONT. FROM ABOVE: HLA-DRB3*02:01L HLA-DPA1*01:03-B1*03:01L HLA-D PA1*03:01-B1*04:02L HLA-DRB1*03:01L HLA-DRB1*14:01L HLA-DRB1*11: 03L HLA-DRB1*14:02L HLA-DQA1*01:01-B1*05:01L HLA-DRB1*08:01L HLA -DRB1*11:01L HLA-DQA1*01-B1*05L HLA-DQA1*05:05-B1*03:19L
  REGION 1..10: note = CONT. FROM ABOVE: HLA-DQA1*05:01-B1*02:01L HLA-DRB4*01:01L HLA-D PA1*01:03-B1*04:01L HLA-DQA1*05:05-B1*03:116L HLA-DPA1*01:03-B1* 04:02L HLA-DRB1*12:01L HLA-DPA1*02:01-B1*13:01M HLA-DPA1*03:01-B 1*105:01L HLA-DQA1*03:01-B1*03:02L HLA-DQA1*05:05-B1*03:01L
  REGION 1..10: note = CONT. FROM ABOVE: HLA-DPA1*01:02-B1*04:01L HLA-DRB1*07:01L HLA-D RB1*10:01L HLA-DRB1*16:01L HLA-DQA1*01:03-B1*06:01M HLA-DRB1*04: 08L HLA-DRB1*08:02L HLA-DRB1*08:03L HLA-DQA1*02:01-B1*03:03L HLA -DRB1*15:03L
YYNTTKGGRF

SEQ ID NO: 9227 - protein, 10 aa, Severe acute respiratory syndrome coronavirus 2
  REGION 1..10: note = Table B: HLA-DQA1*03:02-B1*03:03L HLA-DQA1*05:01-B1*03:01L HLA-DRB1*04:03L HLA-DRB1*13:02L HLA-DRB1*13:03L HLA-DRB1*01:03L HLA-DRB1*04:02L HLA-DRB1*04:05L HLA-DQA1*01:02-B1*06:02L HLA-DRB1*01:02L HLA-DRB4*03:01NL HLA-DRB1*08:77L HLA-DRB3*02:01L
  REGION 1..10: note = CONT. FROM ABOVE: HLA-DPA1*01:03-B1*03:01L HLA-DPA1*03:01-B1*04: 02L HLA-DRB1*14:01L HLA-DQA1*01-B1*05L HLA-DQA1*05:05-B1*03:19L HLA-DQA1*05:01-B1*02:01L HLA-DPA1*01:03-B1*04:01L HLA-DRB1*12:01 L HLA-DPA1*03:01-B1*105:01L HLA-DQA1*03:01-B1*03:02L
  REGION 1..10: note = CONT. FROM ABOVE: HLA-DQA1*05:05-B1*03:01L HLA-DRB1*14:17L HLA-D PA1*01:02-B1*04:01L HLA-DRB1*07:01L HLA-DRB1*16:01L HLA-DQA1*01: 03-B1*06:01L HLA-DRB1*04:08L HLA-DQA1*02:01-B1*03:03L HLA-DRB1*1 5:03L
YNTTKGGRFV

SEQ ID NO: 9228 - protein, 13 aa, Severe acute respiratory syndrome coronavirus 2
  REGION 1..13: note = Table B: HLA-DQA1*03:02-B1*03:03L HLA-DQA1*05:01-B1*03:01L HLA-DRB1*13:02L HLA-DRB1*01:03L HLA-DRB1*04:05L HLA-DRB1*01:02L HLA-DRB1*08:01L HLA-DQA1*05:01-B1*02:01L HLA-DQA1*03:01-B1*03:02L HLA-DPA1*01:03-B1*02:01L
  REGION 1..13: note = CONT. FROM ABOVE: HLA-DQA1*05:05-B1*03:01L HLA-DQA1*02:01-B1*03: 03L
GGRFVLALLSDLQ

SEQ ID NO: 9229 - protein, 10 aa, Severe acute respiratory syndrome coronavirus 2
  REGION 1..10: note = Table B: HLA-DQA1*03:02-B1*03:03L HLA-DQA1*05:01-B1*03:01L HLA-DRB1*13:03L HLA-DRB1*01:03L HLA-DQA1*01:02-B1*06:02L HLA-DRB1*08:77L HLA-DPA1*01:03-B1*03:01L HLA-DPA1*03:01-B1*04:02L HLA-DRB1*03:01L HLA-DRB1*11:02L
  REGION 1..10: note = CONT. FROM ABOVE: HLA-DRB1*14:02L HLA-DQA1*01-B1*05L HLA-DQA1*05 :05-B1*03:19M HLA-DQA1*05:01-B1*02:01L HLA-DRB4*01:01L HLA-DPA1* 01:03-B1*04:01L HLA-DQA1*05:05-B1*03:116L HLA-DPA1*01:03-B1*04:0 2L HLA-DRB1*12:01L HLA-DPA1*02:01-B1*13:01L
  REGION 1..10: note = CONT. FROM ABOVE: HLA-DPA1*03:01-B1*105:01L HLA-DPA1*01:03-B1*10 4:01L HLA-DPA1*01:02-B1*04:01L HLA-DRB1*10:01L HLA-DRB1*16:01L H LA-DQA1*01:03-B1*06:01L HLA-DQA1*02:01-B1*03:03L HLA-DRB1*15:03L
LLSDLQDLKW

SEQ ID NO: 9230 - protein, 14 aa, Severe acute respiratory syndrome coronavirus 2
  REGION 1..14: note = Table B: HLA-DQA1*03:02-B1*03:03L HLA-DRB1*04:03L HLA-DRB1*13:03L HLA-DRB1*04:02L HLA-DRB1*04:04L HLA-DRB1*08:04L HLA-DPA1*01:03-B1*03:01L HLA-DQA1*01:01-B1*05:01L HLA-DQA1*01-B1*05L HLA-DQA1*05:05-B1*03:19L HLA-DRB3*01:01L
  REGION 1..14: note = CONT. FROM ABOVE: HLA-DPA1*01:03-B1*104:01L HLA-DQA1*05:05-B1*03 :01L HLA-DRB1*07:01L HLA-DRB1*08:03L
LQDLKWARFPKSDG

SEQ ID NO: 9231 - protein, 14 aa, Severe acute respiratory syndrome coronavirus 2
  REGION 1..14: note = Table B: HLA-DQA1*03:02-B1*03:03L HLA-DRB1*13:02L HLA-DRB1*04:02L HLA-DRB1*04:04L HLA-DRB1*11:03L HLA-DRB1*14:02L HLA-DQA1*05:05-B1*03:19L HLA-DPA1*01:03-B1*04:01L HLA-DQA1*05:05-B1*03:116L HLA-DRB3*01:01L
  REGION 1..14: note = CONT. FROM ABOVE: HLA-DPA1*02:01-B1*13:01L HLA-DPA1*01:03-B1*02: 01L HLA-DQA1*05:05-B1*03:01L HLA-DRB1*10:01L HLA-DRB1*08:02L HLA -DRB1*08:03L HLA-DRB1*15:03L
DLKWARFPKSDGTG

SEQ ID NO: 9232 - protein, 12 aa, Severe acute respiratory syndrome coronavirus 2
  REGION 1..12: note = Table B: HLA-DQA1*03:02-B1*03:03L HLA-DQA1*03:01-B1*03:02L
RFPKSDGTGTIY

SEQ ID NO: 9233 - protein, 13 aa, Severe acute respiratory syndrome coronavirus 2
  REGION 1..13: note = Table B: HLA-DQA1*03:02-B1*03:03L
FPKSDGTGTIYTE

SEQ ID NO: 9234 - protein, 12 aa, Severe acute respiratory syndrome coronavirus 2
  REGION 1..12: note = Table B: HLA-DQA1*03:02-B1*03:03L HLA-DQA1*01:02-B1*06:02L HLA-DQA1*05:01-B1*02:01L HLA-DQA1*03:01-B1*03:02L HLA-DQA1*01:03-B1*06:01L HLA-DQA1*02:01-B1*03:03L
GTGTIYTELEPP

SEQ ID NO: 9235 - protein, 12 aa, Severe acute respiratory syndrome coronavirus 2
  REGION 1..12: note = Table B: HLA-DQA1*03:02-B1*03:03L HLA-DRB1*13:02L HLA-DRB1*13:03L HLA-DRB1*04:02L HLA-DRB1*04:04L HLA-DRB1*04:05L HLA-DRB4*03:01NL HLA-DPA1*01:03-B1*03:01L HLA-DRB1*14:01L HLA-DRB1*08:01L HLA-DQA1*05:05-B1*03:19L
  REGION 1..12: note = CONT. FROM ABOVE: HLA-DPA1*01:03-B1*04:01L HLA-DRB1*04:10L HLA-D PA1*01:03-B1*04:02L HLA-DPA1*02:01-B1*13:01L HLA-DRB1*14:54L HLA -DRB1*14:17L HLA-DRB1*10:01L
GTIYTELEPPCR

SEQ ID NO: 9236 - protein, 10 aa, Severe acute respiratory syndrome coronavirus 2
  REGION 1..10: note = Table B: HLA-DQA1*03:02-B1*03:03L HLA-DQA1*05:05-B1*03:19M HLA-DPA1*01:03-B1*104:01L
TELEPPCRFV

SEQ ID NO: 9237 - protein, 10 aa, Severe acute respiratory syndrome coronavirus 2
  REGION 1..10: note = Table B: HLA-DQA1*03:02-B1*03:03L HLA-DQA1*05:01-B1*03:01L HLA-DRB1*04:01L HLA-DRB1*04:03M HLA-DRB1*13:02L HLA-DRB1*13:03M HLA-DRB1*01:03L HLA-DRB1*04:02M HLA-DRB1*04:04L HLA-DRB1*04:05L HLA-DQA1*01:02-B1*06:02L HLA-DRB1*01:01L HLA-DRB1*01:02L
  REGION 1..10: note = CONT. FROM ABOVE: HLA-DRB4*03:01NM HLA-DRB1*08:04L HLA-DRB1*08:7 7L HLA-DRB3*02:01L HLA-DPA1*01:03-B1*03:01L HLA-DRB1*14:01L HLA- DRB1*11:03L HLA-DRB1*11:04L HLA-DRB1*14:02L HLA-DQA1*01:01-B1*05 :01L HLA-DRB1*08:01L HLA-DRB1*11:01L HLA-DRB5*01:01L
  REGION 1..10: note = CONT. FROM ABOVE: HLA-DQA1*01-B1*05L HLA-DQA1*05:05-B1*03:19L HL A-DQA1*05:01-B1*02:01L HLA-DRB1*04:10L HLA-DPA1*01:03-B1*04:02L HLA-DRB1*12:01L HLA-DRB1*12:02L HLA-DRB3*01:01L HLA-DPA1*03:01-B 1*105:01L HLA-DQA1*03:01-B1*03:02L HLA-DRB1*14:54L
  REGION 1..10: note = CONT. FROM ABOVE: HLA-DQA1*05:05-B1*03:01L HLA-DRB1*14:17M HLA-D PA1*01:02-B1*04:01L HLA-DRB1*07:01L HLA-DRB1*10:01L HLA-DRB1*16: 01L HLA-DQA1*01:03-B1*06:01L HLA-DRB1*04:08L HLA-DRB1*08:02L HLA -DRB1*08:03L HLA-DQA1*02:01-B1*03:03L HLA-DRB1*15:03L
FVTDTPKGPK

SEQ ID NO: 9238 - protein, 10 aa, Severe acute respiratory syndrome coronavirus 2
  REGION 1..10: note = Table B: HLA-DQA1*03:02-B1*03:03L HLA-DQA1*05:01-B1*03:01L HLA-DRB1*13:02L HLA-DRB1*13:03L HLA-DRB1*01:03L HLA-DRB1*08:77L HLA-DPA1*01:03-B1*03:01L HLA-DPA1*03:01-B1*04:02L HLA-DRB1*14:01L HLA-DRB1*11:02L HLA-DRB1*14:02L
  REGION 1..10: note = CONT. FROM ABOVE: HLA-DQA1*01-B1*05L HLA-DQA1*05:05-B1*03:19L HL A-DQA1*05:01-B1*02:01L HLA-DPA1*01:03-B1*04:01L HLA-DQA1*05:05-B 1*03:116L HLA-DRB1*09:01L HLA-DPA1*01:03-B1*04:02L HLA-DQA1*03:0 1-B1*03:02L HLA-DPA1*01:03-B1*104:01L HLA-DPA1*01:02-B1*04:01L
  REGION 1..10: note = CONT. FROM ABOVE: HLA-DRB1*10:01L HLA-DRB1*16:01L HLA-DQA1*02:01 -B1*03:03L HLA-DRB1*15:03L
VTDTPKGPKV

SEQ ID NO: 9239 - protein, 18 aa, Severe acute respiratory syndrome coronavirus 2
  REGION 1..18: note = Table B: HLA-DQA1*03:02-B1*03:03L HLA-DRB1*01:01L HLA-DRB1*03:01L HLA-DRB1*10:01L
TPKGPKVKYLYFIKGLNN

SEQ ID NO: 9240 - protein, 10 aa, Severe acute respiratory syndrome coronavirus 2
  REGION 1..10: note = Table B: HLA-DQA1*03:02-B1*03:03L HLA-DPA1*02:01-B1*13:01L HLA-DQA1*01:03-B1*06:01L HLA-DQA1*02:01-B1*03:03L
LYFIKGLNNL

SEQ ID NO: 9241 - protein, 11 aa, Severe acute respiratory syndrome coronavirus 2
  REGION 1..11: note = Table B: HLA-DQA1*03:02-B1*03:03L HLA-DQA1*05:01-B1*03:01L HLA-DQA1*05:05-B1*03:19L HLA-DPA1*03:01-B1*105:01L HLA-DQA1*03:01-B1*03:02L HLA-DQA1*05:05-B1*03:01L
NLNRGMVLGSL

SEQ ID NO: 9242 - protein, 10 aa, Severe acute respiratory syndrome coronavirus 2
  REGION 1..10: note = Table B: HLA-DQA1*03:02-B1*03:03L HLA-DRB1*15:03L
MVLGSLAATV

SEQ ID NO: 9243 - protein, 10 aa, Severe acute respiratory syndrome coronavirus 2
  REGION 1..10: note = Table B: HLA-DQA1*03:02-B1*03:03L HLA-DQA1*05:01-B1*03:01L HLA-DRB1*04:03L HLA-DRB1*13:03L HLA-DRB1*01:03L HLA-DRB1*04:02L HLA-DQA1*01:02-B1*06:02L HLA-DRB1*01:02L HLA-DRB4*03:01NL HLA-DQA1*01:01-B1*05:01L HLA-DRB1*08:01L
  REGION 1..10: note = CONT. FROM ABOVE: HLA-DQA1*05:05-B1*03:19L HLA-DQA1*05:01-B1*02: 01L HLA-DPA1*01:03-B1*04:02L HLA-DRB1*12:01L HLA-DPA1*03:01-B1*1 05:01L HLA-DQA1*03:01-B1*03:02L HLA-DQA1*05:05-B1*03:01L HLA-DRB 1*14:17L HLA-DPA1*01:02-B1*04:01L HLA-DRB1*16:01L
  REGION 1..10: note = CONT. FROM ABOVE: HLA-DQA1*01:03-B1*06:01L HLA-DRB1*04:08L HLA-D QA1*02:01-B1*03:03L
VLGSLAATVR

SEQ ID NO: 9244 - protein, 12 aa, Severe acute respiratory syndrome coronavirus 2
  REGION 1..12: note = Table B: HLA-DQA1*03:02-B1*03:03L HLA-DRB1*01:02L HLA-DRB1*08:01L HLA-DRB1*11:01L
SLAATVRLQAGN

SEQ ID NO: 9245 - protein, 12 aa, Severe acute respiratory syndrome coronavirus 2
  REGION 1..12: note = Table B: HLA-DQA1*03:02-B1*03:03L HLA-DRB1*08:04L
LAATVRLQAGNA

SEQ ID NO: 9246 - protein, 12 aa, Severe acute respiratory syndrome coronavirus 2
  REGION 1..12: note = Table B: HLA-DQA1*03:02-B1*03:03L HLA-DRB4*03:01NL HLA-DRB1*14:01L HLA-DQA1*05:05-B1*03:19L HLA-DRB1*04:10L HLA-DRB1*12:01L HLA-DPA1*03:01-B1*105:01L HLA-DRB1*14:54L
AATVRLQAGNAT

SEQ ID NO: 9247 - protein, 10 aa, Severe acute respiratory syndrome coronavirus 2
  REGION 1..10: note = Table B: HLA-DQA1*03:02-B1*03:03L HLA-DQA1*02:01-B1*03:03L
RLQAGNATEV

SEQ ID NO: 9248 - protein, 12 aa, Severe acute respiratory syndrome coronavirus 2
  REGION 1..12: note = Table B: HLA-DQA1*03:02-B1*03:03L HLA-DQA1*05:01-B1*03:01L HLA-DQA1*01:02-B1*06:02L HLA-DQA1*01:01-B1*05:01L HLA-DQA1*05:05-B1*03:19L HLA-DQA1*05:01-B1*02:01L HLA-DQA1*05:05-B1*03:01L HLA-DQA1*01:03-B1*06:01L
  REGION 1..12: note = CONT. FROM ABOVE: HLA-DRB1*04:08L HLA-DQA1*02:01-B1*03:03L
LQAGNATEVPAN

SEQ ID NO: 9249 - protein, 12 aa, Severe acute respiratory syndrome coronavirus 2
  REGION 1..12: note = Table B: HLA-DQA1*03:02-B1*03:03L HLA-DQA1*05:01-B1*03:01L HLA-DRB1*04:03L HLA-DQA1*05:05-B1*03:19L HLA-DQA1*05:01-B1*02:01L HLA-DQA1*05:05-B1*03:01L HLA-DRB1*14:17L HLA-DQA1*01:03-B1*06:01L
  REGION 1..12: note = CONT. FROM ABOVE: HLA-DQA1*02:01-B1*03:03L
AGNATEVPANST

SEQ ID NO: 9250 - protein, 10 aa, Severe acute respiratory syndrome coronavirus 2
  REGION 1..10: note = Table B: HLA-DQA1*03:02-B1*03:03M HLA-DQA1*05:01-B1*03:01L HLA-DRB1*13:03L HLA-DRB1*01:02L HLA-DRB1*08:77L HLA-DRB1*11:02L HLA-DQA1*01-B1*05L HLA-DQA1*05:05-B1*03:19M HLA-DQA1*05:01-B1*02:01L HLA-DQA1*05:05-B1*03:116L
  REGION 1..10: note = CONT. FROM ABOVE: HLA-DRB1*09:01L HLA-DPA1*03:01-B1*105:01L HLA- DQA1*03:01-B1*03:02L HLA-DPA1*01:03-B1*104:01L HLA-DRB1*10:01L H LA-DRB1*16:01L HLA-DQA1*02:01-B1*03:03L HLA-DRB1*15:03L
ATEVPANSTV

SEQ ID NO: 9251 - protein, 10 aa, Severe acute respiratory syndrome coronavirus 2
  REGION 1..10: note = Table B: HLA-DQA1*03:02-B1*03:03H HLA-DQA1*05:01-B1*03:01L HLA-DRB1*13:03L HLA-DRB1*08:77L HLA-DPA1*03:01-B1*04:02L HLA-DRB1*11:02L HLA-DRB1*14:02L HLA-DRB1*11:01L HLA-DQA1*05:05-B1*03:19M HLA-DQA1*05:01-B1*02:01L
  REGION 1..10: note = CONT. FROM ABOVE: HLA-DRB4*01:01L HLA-DPA1*01:03-B1*04:01L HLA-D QA1*05:05-B1*03:116L HLA-DRB1*09:01M HLA-DPA1*01:03-B1*04:02L HL A-DQA1*03:01-B1*03:02M HLA-DPA1*01:03-B1*104:01L HLA-DPA1*01:02- B1*04:01L HLA-DRB1*07:01L HLA-DRB1*10:01L HLA-DRB1*16:01L
  REGION 1..10: note = CONT. FROM ABOVE: HLA-DQA1*02:01-B1*03:03L HLA-DRB1*15:03L
TEVPANSTVL

SEQ ID NO: 9252 - protein, 11 aa, Severe acute respiratory syndrome coronavirus 2
  REGION 1..11: note = Table B: HLA-DQA1*03:02-B1*03:03L HLA-DRB1*01:03L HLA-DRB1*08:77L HLA-DQA1*05:05-B1*03:19L HLA-DPA1*01:03-B1*04:01L HLA-DQA1*02:01-B1*03:03L
EVPANSTVLSF

SEQ ID NO: 9253 - protein, 15 aa, Severe acute respiratory syndrome coronavirus 2
  REGION 1..15: note = Table B: HLA-DQA1*03:02-B1*03:03L HLA-DRB1*13:02L HLA-DRB1*13:03L HLA-DRB1*04:04L HLA-DRB1*08:04L HLA-DRB1*14:01L HLA-DRB1*11:04L HLA-DRB1*14:02L HLA-DRB1*11:01L HLA-DQA1*05:05-B1*03:19L HLA-DQA1*05:01-B1*02:01L
  REGION 1..15: note = CONT. FROM ABOVE: HLA-DRB3*01:01L HLA-DPA1*01:03-B1*104:01L HLA- DRB1*10:01L HLA-DRB1*08:03L
STVLSFCAFAVDAAK

SEQ ID NO: 9254 - protein, 10 aa, Severe acute respiratory syndrome coronavirus 2
  REGION 1..10: note = Table B: HLA-DQA1*03:02-B1*03:03L HLA-DQA1*05:01-B1*03:01L HLA-DRB1*04:03L HLA-DRB1*13:02L HLA-DRB1*13:03L HLA-DRB1*01:03L HLA-DRB1*04:05L HLA-DQA1*01:02-B1*06:02L HLA-DRB4*03:01NL HLA-DRB1*08:77L HLA-DPA1*01:03-B1*03:01L
  REGION 1..10: note = CONT. FROM ABOVE: HLA-DPA1*03:01-B1*04:02L HLA-DRB1*03:01L HLA-D RB1*14:01L HLA-DRB1*14:02L HLA-DQA1*01-B1*05L HLA-DQA1*05:05-B1* 03:19L HLA-DQA1*05:01-B1*02:01L HLA-DRB4*01:01L HLA-DPA1*01:03-B 1*04:01L HLA-DQA1*05:05-B1*03:116L HLA-DPA1*01:03-B1*04:02L
  REGION 1..10: note = CONT. FROM ABOVE: HLA-DRB1*12:01L HLA-DPA1*02:01-B1*13:01L HLA-D PA1*03:01-B1*105:01L HLA-DQA1*03:01-B1*03:02L HLA-DPA1*01:03-B1* 104:01L HLA-DQA1*05:05-B1*03:01L HLA-DPA1*01:02-B1*04:01L HLA-DR B1*10:01L HLA-DRB1*16:01L HLA-DQA1*01:03-B1*06:01L
  REGION 1..10: note = CONT. FROM ABOVE: HLA-DRB1*08:02L HLA-DQA1*02:01-B1*03:03L HLA-D RB1*15:03L
AFAVDAAKAY

SEQ ID NO: 9255 - protein, 10 aa, Severe acute respiratory syndrome coronavirus 2
  REGION 1..10: note = Table B: HLA-DQA1*03:02-B1*03:03L HLA-DQA1*05:01-B1*03:01L HLA-DRB1*04:03L HLA-DRB1*13:02L HLA-DRB1*13:03L HLA-DRB1*01:03L HLA-DRB1*04:02L HLA-DRB1*04:05L HLA-DRB1*01:02L HLA-DRB4*03:01NL HLA-DRB1*08:77L HLA-DPA1*01:03-B1*03:01L HLA-DRB1*14:01L
  REGION 1..10: note = CONT. FROM ABOVE: HLA-DRB1*11:04L HLA-DQA1*01-B1*05L HLA-DQA1*05 :05-B1*03:19L HLA-DQA1*05:01-B1*02:01L HLA-DRB1*12:01L HLA-DPA1* 03:01-B1*105:01L HLA-DQA1*03:01-B1*03:02L HLA-DRB1*14:54L HLA-DQ A1*05:05-B1*03:01L HLA-DRB1*14:17L HLA-DPA1*01:02-B1*04:01L
  REGION 1..10: note = CONT. FROM ABOVE: HLA-DRB1*16:01L HLA-DQA1*01:03-B1*06:01L HLA-D RB1*04:08L HLA-DQA1*02:01-B1*03:03L HLA-DRB1*15:03L
AVDAAKAYKD

SEQ ID NO: 9256 - protein, 10 aa, Severe acute respiratory syndrome coronavirus 2
  REGION 1..10: note = Table B: HLA-DQA1*03:02-B1*03:03L HLA-DQA1*05:01-B1*03:01L HLA-DRB1*04:03L HLA-DRB1*13:02L HLA-DRB1*13:03L HLA-DRB1*01:03L HLA-DRB1*04:02L HLA-DQA1*01:02-B1*06:02L HLA-DRB4*03:01NL HLA-DRB1*08:77L HLA-DPA1*01:03-B1*03:01L
  REGION 1..10: note = CONT. FROM ABOVE: HLA-DPA1*03:01-B1*04:02L HLA-DRB1*03:01L HLA-D RB1*14:01L HLA-DRB1*11:02L HLA-DRB1*14:02L HLA-DQA1*01-B1*05L HL A-DQA1*05:05-B1*03:19M HLA-DQA1*05:01-B1*02:01L HLA-DRB4*01:01L HLA-DPA1*01:03-B1*04:01L HLA-DQA1*05:05-B1*03:116L
  REGION 1..10: note = CONT. FROM ABOVE: HLA-DPA1*01:03-B1*04:02L HLA-DRB1*12:01L HLA-D PA1*02:01-B1*13:01L HLA-DPA1*03:01-B1*105:01L HLA-DQA1*03:01-B1* 03:02L HLA-DPA1*01:03-B1*104:01L HLA-DQA1*05:05-B1*03:01L HLA-DR B1*14:17L HLA-DPA1*01:02-B1*04:01L HLA-DRB1*10:01L
  REGION 1..10: note = CONT. FROM ABOVE: HLA-DRB1*16:01L HLA-DQA1*01:03-B1*06:01L HLA-D QA1*02:01-B1*03:03L HLA-DRB1*15:03L
VDAAKAYKDY

SEQ ID NO: 9257 - protein, 14 aa, Severe acute respiratory syndrome coronavirus 2
  REGION 1..14: note = Table B: HLA-DQA1*03:02-B1*03:03L HLA-DRB1*01:03L HLA-DRB1*04:04L HLA-DRB3*02:01L HLA-DRB1*14:01L HLA-DRB1*08:01L HLA-DQA1*05:01-B1*02:01L HLA-DRB1*04:10L HLA-DPA1*01:03-B1*104:01L HLA-DPA1*01:02-B1*04:01L
  REGION 1..14: note = CONT. FROM ABOVE: HLA-DRB1*07:01L
DAAKAYKDYLASGG

SEQ ID NO: 9258 - protein, 14 aa, Severe acute respiratory syndrome coronavirus 2
  REGION 1..14: note = Table B: HLA-DQA1*03:02-B1*03:03L HLA-DQA1*05:01-B1*03:01L HLA-DRB1*13:02L HLA-DRB1*13:03L HLA-DRB1*04:04L HLA-DQA1*01:02-B1*06:02L HLA-DPA1*01:03-B1*03:01L HLA-DPA1*03:01-B1*04:02L HLA-DRB1*14:01L HLA-DRB1*08:01L
  REGION 1..14: note = CONT. FROM ABOVE: HLA-DQA1*05:01-B1*02:01L HLA-DRB1*04:10L HLA-D PA1*01:03-B1*04:02L HLA-DPA1*01:03-B1*104:01L HLA-DQA1*05:05-B1* 03:01L HLA-DRB1*14:17L HLA-DRB1*07:01L HLA-DQA1*01:03-B1*06:01L
AKAYKDYLASGGQP

SEQ ID NO: 9259 - protein, 11 aa, Severe acute respiratory syndrome coronavirus 2
  REGION 1..11: note = Table B: HLA-DQA1*03:02-B1*03:03L HLA-DRB1*04:03L HLA-DRB1*13:02L HLA-DRB1*13:03L HLA-DRB1*04:02L HLA-DRB4*03:01NL HLA-DRB1*08:77L HLA-DRB3*02:01L HLA-DRB1*11:03L HLA-DQA1*05:01-B1*02:01L HLA-DRB1*09:01L HLA-DRB1*12:01L
  REGION 1..11: note = CONT. FROM ABOVE: HLA-DRB1*12:02L HLA-DQA1*03:01-B1*03:02L HLA-D RB1*07:01L HLA-DRB1*16:01L HLA-DQA1*02:01-B1*03:03L HLA-DRB1*15: 03L
KDYLASGGQPI

SEQ ID NO: 9260 - protein, 10 aa, Severe acute respiratory syndrome coronavirus 2
  REGION 1..10: note = Table B: HLA-DQA1*03:02-B1*03:03L HLA-DQA1*05:01-B1*03:01L HLA-DRB1*04:03L HLA-DRB1*13:02L HLA-DRB1*13:03L HLA-DRB1*01:03L HLA-DRB1*04:02L HLA-DRB1*01:02L HLA-DRB4*03:01NL HLA-DRB1*08:77L HLA-DRB3*02:01L HLA-DRB1*11:03L HLA-DRB1*11:04L
  REGION 1..10: note = CONT. FROM ABOVE: HLA-DQA1*05:05-B1*03:19L HLA-DQA1*05:01-B1*02: 01L HLA-DRB1*09:01L HLA-DRB1*12:01L HLA-DRB1*12:02L HLA-DRB1*07: 01L HLA-DRB1*16:01L HLA-DQA1*02:01-B1*03:03L HLA-DRB1*15:03L
YLASGGQPIT

SEQ ID NO: 9261 - protein, 10 aa, Severe acute respiratory syndrome coronavirus 2
  REGION 1..10: note = Table B: HLA-DQA1*03:02-B1*03:03L HLA-DQA1*05:01-B1*03:01L HLA-DRB1*04:03L HLA-DRB1*13:03L HLA-DQA1*01:02-B1*06:02L HLA-DRB4*03:01NL HLA-DQA1*05:05-B1*03:19L HLA-DQA1*05:01-B1*02:01L HLA-DRB1*12:01L
  REGION 1..10: note = CONT. FROM ABOVE: HLA-DQA1*03:01-B1*03:02L HLA-DQA1*05:05-B1*03: 01L HLA-DRB1*14:17L HLA-DRB1*16:01L HLA-DQA1*01:03-B1*06:01L HLA -DQA1*02:01-B1*03:03L
LASGGQPITN

SEQ ID NO: 9262 - protein, 12 aa, Severe acute respiratory syndrome coronavirus 2
  REGION 1..12: note = Table B: HLA-DQA1*03:02-B1*03:03L HLA-DQA1*01:02-B1*06:02L
ASGGQPITNCVK

SEQ ID NO: 9263 - protein, 10 aa, Severe acute respiratory syndrome coronavirus 2
  REGION 1..10: note = Table B: HLA-DQA1*03:02-B1*03:03L HLA-DQA1*05:01-B1*03:01L HLA-DRB1*13:03L HLA-DQA1*01:02-B1*06:02L HLA-DRB1*01:02L HLA-DQA1*05:05-B1*03:19L HLA-DQA1*05:05-B1*03:116L HLA-DPA1*03:01-B1*105:01L HLA-DQA1*03:01-B1*03:02L
  REGION 1..10: note = CONT. FROM ABOVE: HLA-DRB1*16:01L HLA-DQA1*02:01-B1*03:03L HLA-D RB1*15:03L
HTGTGQAITV

SEQ ID NO: 9264 - protein, 11 aa, Severe acute respiratory syndrome coronavirus 2
  REGION 1..11: note = Table B: HLA-DQA1*03:02-B1*03:03L HLA-DQA1*03:01-B1*03:02L HLA-DQA1*01:03-B1*06:01L HLA-DQA1*02:01-B1*03:03L
GTGQAITVTPE

SEQ ID NO: 9265 - protein, 10 aa, Severe acute respiratory syndrome coronavirus 2
  REGION 1..10: note = Table B: HLA-DQA1*03:02-B1*03:03L HLA-DRB1*04:03L HLA-DQA1*05:01-B1*02:01L HLA-DQA1*03:01-B1*03:02L HLA-DQA1*01:03-B1*06:01L HLA-DQA1*02:01-B1*03:03L
QAITVTPEAN

SEQ ID NO: 9266 - protein, 11 aa, Severe acute respiratory syndrome coronavirus 2
  REGION 1..11: note = Table B: HLA-DQA1*03:02-B1*03:03L HLA-DRB1*04:02L HLA-DQA1*01-B1*05L HLA-DRB1*12:01L HLA-DQA1*01:03-B1*06:01L
AITVTPEANMD

SEQ ID NO: 9267 - protein, 11 aa, Severe acute respiratory syndrome coronavirus 2
  REGION 1..11: note = Table B: HLA-DQA1*03:02-B1*03:03L HLA-DRB1*04:02L HLA-DRB1*04:05L HLA-DRB4*03:01NL HLA-DRB1*04:10L HLA-DRB1*14:54L HLA-DRB1*16:01L HLA-DQA1*01:03-B1*06:01L
ITVTPEANMDQ

SEQ ID NO: 9268 - protein, 12 aa, Severe acute respiratory syndrome coronavirus 2
  REGION 1..12: note = Table B: HLA-DQA1*03:02-B1*03:03L HLA-DQA1*01-B1*05L
VTPEANMDQESF

SEQ ID NO: 9269 - protein, 12 aa, Severe acute respiratory syndrome coronavirus 2
  REGION 1..12: note = Table B: HLA-DQA1*03:02-B1*03:03L HLA-DRB1*04:03L HLA-DQA1*01:01-B1*05:01L HLA-DQA1*01-B1*05L HLA-DRB1*12:01L HLA-DQA1*03:01-B1*03:02L HLA-DRB1*16:01L HLA-DQA1*01:03-B1*06:01L HLA-DQA1*02:01-B1*03:03L
TPEANMDQESFG

SEQ ID NO: 9270 - protein, 12 aa, Severe acute respiratory syndrome coronavirus 2
  REGION 1..12: note = Table B: HLA-DQA1*03:02-B1*03:03L HLA-DRB1*04:03L HLA-DQA1*01-B1*05L HLA-DQA1*05:01-B1*02:01L HLA-DQA1*03:01-B1*03:02L
ANMDQESFGGAS

SEQ ID NO: 9271 - protein, 14 aa, Severe acute respiratory syndrome coronavirus 2
  REGION 1..14: note = Table B: HLA-DQA1*03:02-B1*03:03L HLA-DQA1*05:01-B1*03:01L
MDQESFGGASCCLY

SEQ ID NO: 9272 - protein, 10 aa, Severe acute respiratory syndrome coronavirus 2
  REGION 1..10: note = Table B: HLA-DQA1*03:02-B1*03:03L HLA-DQA1*05:01-B1*03:01L HLA-DRB1*04:03L HLA-DRB1*13:02L HLA-DRB1*13:03L HLA-DRB1*01:03M HLA-DRB1*04:02L HLA-DRB1*04:05L HLA-DQA1*01:02-B1*06:02M HLA-DRB1*01:01L HLA-DRB1*01:02L HLA-DRB4*03:01NL HLA-DRB1*08:77L
  REGION 1..10: note = CONT. FROM ABOVE: HLA-DPA1*01:03-B1*03:01L HLA-DPA1*03:01-B1*04: 02L HLA-DRB1*03:01L HLA-DRB1*14:01L HLA-DRB1*11:02L HLA-DRB1*11: 03L HLA-DRB1*14:02L HLA-DQA1*01:01-B1*05:01L HLA-DRB1*08:01L HLA -DRB1*11:01L HLA-DQA1*01-B1*05L HLA-DQA1*05:05-B1*03:19M
  REGION 1..10: note = CONT. FROM ABOVE: HLA-DQA1*05:01-B1*02:01M HLA-DRB4*01:01L HLA-D PA1*01:03-B1*04:01L HLA-DQA1*05:05-B1*03:116L HLA-DPA1*01:03-B1* 04:02L HLA-DRB1*12:01L HLA-DPA1*02:01-B1*13:01L HLA-DPA1*03:01-B 1*105:01L HLA-DQA1*03:01-B1*03:02L HLA-DPA1*01:03-B1*104:01L
  REGION 1..10: note = CONT. FROM ABOVE: HLA-DQA1*05:05-B1*03:01L HLA-DPA1*01:02-B1*04: 01L HLA-DRB1*10:01L HLA-DRB1*16:01M HLA-DQA1*01:03-B1*06:01L HLA -DRB1*08:02L HLA-DQA1*02:01-B1*03:03M HLA-DRB1*15:03L
HIDHPNPKGF

SEQ ID NO: 9273 - protein, 16 aa, Severe acute respiratory syndrome coronavirus 2
  REGION 1..16: note = Table B: HLA-DQA1*03:02-B1*03:03L HLA-DPA1*03:01-B1*04:02L HLA-DRB1*03:01L HLA-DRB1*11:02L HLA-DRB1*09:01L HLA-DQA1*01:03-B1*06:01L
LKGKYVQIPTTCANDP

SEQ ID NO: 9274 - protein, 16 aa, Severe acute respiratory syndrome coronavirus 2
  REGION 1..16: note = Table B: HLA-DQA1*03:02-B1*03:03L HLA-DRB1*09:01L HLA-DQA1*01:03-B1*06:01L
KGKYVQIPTTCANDPV

SEQ ID NO: 9275 - protein, 11 aa, Severe acute respiratory syndrome coronavirus 2
  REGION 1..11: note = Table B: HLA-DQA1*03:02-B1*03:03L HLA-DQA1*01-B1*05L HLA-DQA1*05:01-B1*02:01L HLA-DQA1*03:01-B1*03:02L HLA-DQA1*02:01-B1*03:03L
IPTTCANDPVG

SEQ ID NO: 9276 - protein, 11 aa, Severe acute respiratory syndrome coronavirus 2
  REGION 1..11: note = Table B: HLA-DQA1*03:02-B1*03:03L HLA-DQA1*05:01-B1*03:01L HLA-DRB1*13:03L HLA-DRB1*04:05L HLA-DQA1*01:02-B1*06:02L HLA-DPA1*03:01-B1*04:02L HLA-DRB1*14:01L HLA-DQA1*01-B1*05L HLA-DQA1*05:05-B1*03:19L HLA-DQA1*05:01-B1*02:01L
  REGION 1..11: note = CONT. FROM ABOVE: HLA-DQA1*05:05-B1*03:116L HLA-DPA1*02:01-B1*13 :01L HLA-DPA1*03:01-B1*105:01L HLA-DQA1*03:01-B1*03:02L HLA-DPA1 *01:02-B1*04:01L HLA-DRB1*16:01L HLA-DQA1*01:03-B1*06:01L HLA-DQ A1*02:01-B1*03:03L HLA-DRB1*15:03L
DPVGFTLKNTV

SEQ ID NO: 9277 - protein, 10 aa, Severe acute respiratory syndrome coronavirus 2
  REGION 1..10: note = Table B: HLA-DQA1*03:02-B1*03:03L
REPMLQSADA

SEQ ID NO: 9278 - protein, 12 aa, Severe acute respiratory syndrome coronavirus 2
  REGION 1..12: note = Table B: HLA-DQA1*03:02-B1*03:03L HLA-DQA1*05:01-B1*03:01L HLA-DRB1*04:03L HLA-DRB1*13:02L HLA-DRB1*01:03L HLA-DRB1*04:02L HLA-DRB1*04:05L HLA-DRB4*03:01NL HLA-DRB1*08:77L HLA-DRB3*02:01L HLA-DPA1*01:03-B1*03:01L HLA-DPA1*03:01-B1*04:02L
  REGION 1..12: note = CONT. FROM ABOVE: HLA-DRB1*14:01L HLA-DQA1*01-B1*05L HLA-DQA1*05 :05-B1*03:19L HLA-DQA1*05:01-B1*02:01L HLA-DPA1*01:03-B1*04:01L HLA-DRB1*04:10L HLA-DRB1*12:01L HLA-DRB1*12:02L HLA-DQA1*03:01-B 1*03:02L HLA-DRB1*14:54L HLA-DQA1*05:05-B1*03:01L
  REGION 1..12: note = CONT. FROM ABOVE: HLA-DRB1*14:17L HLA-DPA1*01:02-B1*04:01L HLA-D RB1*07:01L HLA-DRB1*16:01L
EPMLQSADAQSF

SEQ ID NO: 9279 - protein, 13 aa, Severe acute respiratory syndrome coronavirus 2
  REGION 1..13: note = Table B: HLA-DQA1*03:02-B1*03:03L HLA-DRB1*04:02L HLA-DRB1*01:02L HLA-DPA1*01:03-B1*03:01L HLA-DRB1*12:01L HLA-DRB1*14:17L HLA-DRB1*16:01L
PMLQSADAQSFLN

SEQ ID NO: 9280 - protein, 12 aa, Severe acute respiratory syndrome coronavirus 2
  REGION 1..12: note = Table B: HLA-DQA1*03:02-B1*03:03L HLA-DRB1*04:03L HLA-DRB1*04:05L HLA-DRB1*01:02L HLA-DPA1*01:03-B1*03:01L HLA-DQA1*01:01-B1*05:01L HLA-DQA1*05:01-B1*02:01L HLA-DPA1*01:02-B1*04:01L HLA-DRB1*04:08L HLA-DRB1*15:03L
LQSADAQSFLNR

SEQ ID NO: 9281 - protein, 10 aa, Severe acute respiratory syndrome coronavirus 2
  REGION 1..10: note = Table B: HLA-DQA1*03:02-B1*03:03L HLA-DQA1*05:01-B1*03:01L HLA-DRB1*11:02L HLA-DQA1*05:05-B1*03:19M HLA-DQA1*05:01-B1*02:01L HLA-DQA1*03:01-B1*03:02L HLA-DPA1*01:03-B1*104:01M HLA-DRB1*16:01L
  REGION 1..10: note = CONT. FROM ABOVE: HLA-DQA1*02:01-B1*03:03L
ADAQSFLNRV

SEQ ID NO: 9282 - protein, 12 aa, Severe acute respiratory syndrome coronavirus 2
  REGION 1..12: note = Table B: HLA-DQA1*03:02-B1*03:03L HLA-DPA1*03:01-B1*105:01L
VSAARLTPCGTG

SEQ ID NO: 9283 - protein, 10 aa, Severe acute respiratory syndrome coronavirus 2
  REGION 1..10: note = Table B: HLA-DQA1*03:02-B1*03:03L HLA-DQA1*05:01-B1*03:01L HLA-DRB1*04:01L HLA-DRB1*04:03L HLA-DRB1*13:02M HLA-DRB1*13:03M HLA-DRB1*01:03L HLA-DRB1*04:02L HLA-DRB1*04:04L HLA-DRB1*04:05L HLA-DQA1*01:02-B1*06:02L HLA-DRB1*01:01L HLA-DRB4*03:01NL
  REGION 1..10: note = CONT. FROM ABOVE: HLA-DRB1*08:77L HLA-DRB3*02:01L HLA-DRB1*14:01 L HLA-DRB1*11:03L HLA-DRB1*11:04L HLA-DRB1*14:02L HLA-DQA1*01:01 -B1*05:01L HLA-DRB1*08:01L HLA-DRB1*11:01L HLA-DRB5*01:01L HLA-D QA1*01-B1*05L HLA-DQA1*05:05-B1*03:19L HLA-DQA1*05:01-B1*02:01L
  REGION 1..10: note = CONT. FROM ABOVE: HLA-DPA1*01:03-B1*04:01L HLA-DPA1*01:03-B1*04: 02L HLA-DRB1*12:01M HLA-DRB1*12:02L HLA-DPA1*03:01-B1*105:01L HL A-DQA1*03:01-B1*03:02M HLA-DRB1*14:54L HLA-DQA1*05:05-B1*03:01M HLA-DRB1*14:17L HLA-DPA1*01:02-B1*04:01L HLA-DRB1*10:01L
  REGION 1..10: note = CONT. FROM ABOVE: HLA-DRB1*16:01L HLA-DQA1*01:03-B1*06:01L HLA-D RB1*08:02L HLA-DRB1*08:03L HLA-DQA1*02:01-B1*03:03L
TGTSTDVVYR

SEQ ID NO: 9284 - protein, 10 aa, Severe acute respiratory syndrome coronavirus 2
  REGION 1..10: note = Table B: HLA-DQA1*03:02-B1*03:03L HLA-DQA1*03:01-B1*03:02L HLA-DQA1*01:03-B1*06:01L HLA-DQA1*02:01-B1*03:03L
GTSTDVVYRA

SEQ ID NO: 9285 - protein, 10 aa, Severe acute respiratory syndrome coronavirus 2
  REGION 1..10: note = Table B: HLA-DQA1*03:02-B1*03:03L HLA-DQA1*05:01-B1*03:01L HLA-DRB1*13:02L HLA-DRB1*13:03L HLA-DRB1*01:03L HLA-DQA1*01:02-B1*06:02M HLA-DRB4*03:01NL HLA-DRB1*08:77L HLA-DPA1*01:03-B1*03:01L HLA-DPA1*03:01-B1*04:02L
  REGION 1..10: note = CONT. FROM ABOVE: HLA-DRB1*03:01L HLA-DRB1*14:01L HLA-DRB1*14:02 L HLA-DRB5*01:01L HLA-DQA1*01-B1*05L HLA-DQA1*05:05-B1*03:19L HL A-DQA1*05:01-B1*02:01L HLA-DRB4*01:01L HLA-DPA1*01:03-B1*04:01M HLA-DQA1*05:05-B1*03:116L HLA-DPA1*01:03-B1*04:02L
  REGION 1..10: note = CONT. FROM ABOVE: HLA-DRB1*12:01L HLA-DPA1*02:01-B1*13:01L HLA-D PA1*03:01-B1*105:01M HLA-DQA1*03:01-B1*03:02L HLA-DPA1*01:03-B1* 104:01L HLA-DQA1*05:05-B1*03:01L HLA-DPA1*01:02-B1*04:01L HLA-DR B1*10:01L HLA-DRB1*16:01L HLA-DQA1*01:03-B1*06:01L
  REGION 1..10: note = CONT. FROM ABOVE: HLA-DRB1*08:02L HLA-DQA1*02:01-B1*03:03L HLA-D RB1*15:03L
TSTDVVYRAF

SEQ ID NO: 9286 - protein, 12 aa, Severe acute respiratory syndrome coronavirus 2
  REGION 1..12: note = Table B: HLA-DQA1*03:02-B1*03:03L HLA-DRB1*04:02L HLA-DRB1*04:05L HLA-DPA1*03:01-B1*04:02L HLA-DRB1*12:01L HLA-DQA1*03:01-B1*03:02L HLA-DRB1*14:17L HLA-DQA1*01:03-B1*06:01L HLA-DRB1*04:08L
  REGION 1..12: note = CONT. FROM ABOVE: HLA-DQA1*02:01-B1*03:03L
DVVYRAFDIYND

SEQ ID NO: 9287 - protein, 12 aa, Severe acute respiratory syndrome coronavirus 2
  REGION 1..12: note = Table B: HLA-DQA1*03:02-B1*03:03L HLA-DQA1*05:01-B1*03:01L HLA-DRB1*13:02L HLA-DRB1*04:02L HLA-DRB1*04:04L HLA-DQA1*01:02-B1*06:02L HLA-DRB1*08:04L HLA-DPA1*03:01-B1*04:02L HLA-DRB1*14:01L HLA-DRB1*11:04L
  REGION 1..12: note = CONT. FROM ABOVE: HLA-DQA1*01:01-B1*05:01L HLA-DRB1*11:01L HLA-D QA1*05:01-B1*02:01L HLA-DPA1*01:03-B1*04:01L HLA-DRB1*04:10L HLA -DPA1*01:03-B1*04:02L HLA-DRB1*12:01L HLA-DRB3*01:01L HLA-DPA1*0 2:01-B1*13:01L HLA-DPA1*03:01-B1*105:01L HLA-DRB1*14:17L
  REGION 1..12: note = CONT. FROM ABOVE: HLA-DRB1*10:01L HLA-DQA1*01:03-B1*06:01L HLA-D RB1*08:03L
VVYRAFDIYNDK

SEQ ID NO: 9288 - protein, 10 aa, Severe acute respiratory syndrome coronavirus 2
  REGION 1..10: note = Table B: HLA-DQA1*03:02-B1*03:03L HLA-DQA1*05:01-B1*03:01L HLA-DQA1*01:02-B1*06:02L HLA-DRB1*01:02L HLA-DQA1*05:05-B1*03:19L HLA-DQA1*05:05-B1*03:116L HLA-DPA1*02:01-B1*13:01L HLA-DPA1*03:01-B1*105:01L
  REGION 1..10: note = CONT. FROM ABOVE: HLA-DQA1*03:01-B1*03:02L HLA-DPA1*01:02-B1*04: 01L HLA-DRB1*16:01L HLA-DQA1*01:03-B1*06:01L HLA-DQA1*02:01-B1*0 3:03L HLA-DRB1*15:03L
RAFDIYNDKV

SEQ ID NO: 9289 - protein, 10 aa, Severe acute respiratory syndrome coronavirus 2
  REGION 1..10: note = Table B: HLA-DQA1*03:02-B1*03:03L HLA-DRB1*04:03L HLA-DRB1*13:03L HLA-DRB1*01:03L HLA-DRB1*04:02L HLA-DRB1*04:05L HLA-DRB1*01:02L HLA-DRB4*03:01NL HLA-DQA1*01-B1*05M HLA-DQA1*05:01-B1*02:01L HLA-DRB1*04:10L HLA-DRB1*12:01L
  REGION 1..10: note = CONT. FROM ABOVE: HLA-DQA1*03:01-B1*03:02L HLA-DRB1*14:54L HLA-D RB1*14:17L HLA-DRB1*16:01L HLA-DQA1*01:03-B1*06:01L HLA-DRB1*04: 08L HLA-DQA1*02:01-B1*03:03L HLA-DRB1*15:03L
FDIYNDKVAG

SEQ ID NO: 9290 - protein, 10 aa, Severe acute respiratory syndrome coronavirus 2
  REGION 1..10: note = Table B: HLA-DQA1*03:02-B1*03:03L HLA-DQA1*05:01-B1*03:01L HLA-DRB1*04:01L HLA-DRB1*04:03L HLA-DRB1*13:02L HLA-DRB1*13:03M HLA-DRB1*01:03L HLA-DRB1*04:05L HLA-DQA1*01:02-B1*06:02H HLA-DRB1*01:01L HLA-DRB1*01:02L HLA-DRB4*03:01NL HLA-DRB1*08:77L
  REGION 1..10: note = CONT. FROM ABOVE: HLA-DPA1*01:03-B1*03:01L HLA-DPA1*03:01-B1*04: 02L HLA-DRB1*03:01L HLA-DRB1*14:01L HLA-DRB1*11:03L HLA-DRB1*11: 04L HLA-DRB1*14:02M HLA-DQA1*01:01-B1*05:01L HLA-DRB1*08:01L HLA -DRB1*11:01L HLA-DRB5*01:01L HLA-DQA1*01-B1*05L
  REGION 1..10: note = CONT. FROM ABOVE: HLA-DQA1*05:05-B1*03:19L HLA-DQA1*05:01-B1*02: 01M HLA-DRB4*01:01L HLA-DPA1*01:03-B1*04:01M HLA-DQA1*05:05-B1*0 3:116L HLA-DRB1*09:01L HLA-DPA1*01:03-B1*04:02L HLA-DRB1*12:01L HLA-DPA1*02:01-B1*13:01M HLA-DPA1*03:01-B1*105:01M
  REGION 1..10: note = CONT. FROM ABOVE: HLA-DQA1*03:01-B1*03:02L HLA-DPA1*01:03-B1*104 :01L HLA-DQA1*05:05-B1*03:01L HLA-DPA1*01:02-B1*04:01L HLA-DRB1* 07:01L HLA-DRB1*10:01L HLA-DRB1*16:01L HLA-DQA1*01:03-B1*06:01M HLA-DRB1*08:02L HLA-DRB1*08:03L HLA-DQA1*02:01-B1*03:03M
  REGION 1..10: note = CONT. FROM ABOVE: HLA-DRB1*15:01L HLA-DRB1*15:03M
DIYNDKVAGF

SEQ ID NO: 9291 - protein, 14 aa, Severe acute respiratory syndrome coronavirus 2
  REGION 1..14: note = Table B: HLA-DQA1*03:02-B1*03:03L HLA-DRB3*02:01L HLA-DRB1*11:02L HLA-DRB1*11:03L HLA-DRB1*14:02L HLA-DRB1*13:01L HLA-DPA1*01:03-B1*104:01L HLA-DRB1*07:01L HLA-DRB1*08:03L
NDKVAGFAKFLKTN

SEQ ID NO: 9292 - protein, 10 aa, Severe acute respiratory syndrome coronavirus 2
  REGION 1..10: note = Table B: HLA-DQA1*03:02-B1*03:03L HLA-DQA1*01-B1*05L HLA-DQA1*05:01-B1*02:01L HLA-DQA1*03:01-B1*03:02L
FQEKDEDDNL

SEQ ID NO: 9293 - protein, 10 aa, Severe acute respiratory syndrome coronavirus 2
  REGION 1..10: note = Table B: HLA-DQA1*03:02-B1*03:03L HLA-DRB1*11:02L HLA-DQA1*05:05-B1*03:19M HLA-DPA1*01:03-B1*104:01L
QEKDEDDNLI

SEQ ID NO: 9294 - protein, 12 aa, Severe acute respiratory syndrome coronavirus 2
  REGION 1..12: note = Table B: HLA-DQA1*03:02-B1*03:03L HLA-DQA1*05:01-B1*02:01L
DDNLIDSYFVVK

SEQ ID NO: 9295 - protein, 15 aa, Severe acute respiratory syndrome coronavirus 2
  REGION 1..15: note = Table B: HLA-DQA1*03:02-B1*03:03L HLA-DRB1*04:04L HLA-DPA1*01:03-B1*03:01L HLA-DRB3*01:01L HLA-DPA1*03:01-B1*105:01L HLA-DPA1*01:03-B1*104:01L HLA-DRB1*07:01L
VVKRHTFSNYQHEET

SEQ ID NO: 9296 - protein, 10 aa, Severe acute respiratory syndrome coronavirus 2
  REGION 1..10: note = Table B: HLA-DQA1*03:02-B1*03:03L HLA-DQA1*05:01-B1*03:01L HLA-DRB1*13:03L HLA-DRB1*01:03L HLA-DQA1*01:02-B1*06:02L HLA-DRB1*08:77L HLA-DPA1*01:03-B1*03:01L HLA-DRB1*03:01L HLA-DRB1*14:02L HLA-DQA1*01-B1*05L HLA-DQA1*05:05-B1*03:19L
  REGION 1..10: note = CONT. FROM ABOVE: HLA-DQA1*05:01-B1*02:01L HLA-DRB4*01:01L HLA-D PA1*01:03-B1*04:01L HLA-DQA1*05:05-B1*03:116L HLA-DPA1*01:03-B1* 04:02L HLA-DPA1*02:01-B1*13:01L HLA-DPA1*03:01-B1*105:01L HLA-DP A1*01:03-B1*104:01L HLA-DPA1*01:02-B1*04:01L HLA-DRB1*10:01L
  REGION 1..10: note = CONT. FROM ABOVE: HLA-DRB1*16:01L HLA-DQA1*01:03-B1*06:01L HLA-D RB1*08:02L HLA-DQA1*02:01-B1*03:03L HLA-DRB1*15:03L
SNYQHEETIY

SEQ ID NO: 9297 - protein, 10 aa, Severe acute respiratory syndrome coronavirus 2
  REGION 1..10: note = Table B: HLA-DQA1*03:02-B1*03:03L HLA-DRB1*04:03L HLA-DRB1*13:03L HLA-DRB1*04:02L HLA-DQA1*01-B1*05L HLA-DQA1*05:01-B1*02:01L HLA-DQA1*03:01-B1*03:02L HLA-DRB1*14:17L HLA-DRB1*16:01L HLA-DQA1*02:01-B1*03:03L
NYQHEETIYN

SEQ ID NO: 9298 - protein, 10 aa, Severe acute respiratory syndrome coronavirus 2
  REGION 1..10: note = Table B: HLA-DQA1*03:02-B1*03:03M HLA-DQA1*05:01-B1*03:01M HLA-DRB1*04:01L HLA-DRB1*04:03L HLA-DRB1*13:02L HLA-DRB1*13:03L HLA-DRB1*01:03L HLA-DRB1*04:02L HLA-DRB1*04:04L HLA-DRB1*04:05L HLA-DQA1*01:02-B1*06:02L HLA-DRB1*01:01L HLA-DRB1*01:02L
  REGION 1..10: note = CONT. FROM ABOVE: HLA-DRB1*08:77L HLA-DRB3*02:01L HLA-DPA1*01:03 -B1*03:01L HLA-DPA1*03:01-B1*04:02M HLA-DRB1*14:01L HLA-DRB1*11: 02L HLA-DRB1*14:02M HLA-DQA1*01:01-B1*05:01L HLA-DRB1*08:01L HLA -DRB1*11:01L HLA-DQA1*01-B1*05L HLA-DQA1*05:05-B1*03:19M
  REGION 1..10: note = CONT. FROM ABOVE: HLA-DQA1*05:01-B1*02:01L HLA-DRB4*01:01L HLA-D PA1*01:03-B1*04:01L HLA-DQA1*05:05-B1*03:116M HLA-DRB1*09:01L HL A-DPA1*01:03-B1*04:02L HLA-DRB1*12:01L HLA-DPA1*02:01-B1*13:01L HLA-DPA1*03:01-B1*105:01L HLA-DQA1*03:01-B1*03:02M
  REGION 1..10: note = CONT. FROM ABOVE: HLA-DPA1*01:03-B1*104:01L HLA-DPA1*01:02-B1*04 :01L HLA-DRB1*07:01L HLA-DRB1*10:01L HLA-DRB1*16:01L HLA-DQA1*01 :03-B1*06:01L HLA-DRB1*08:03L HLA-DQA1*02:01-B1*03:03M HLA-DRB1* 15:03M
YQHEETIYNL

SEQ ID NO: 9299 - protein, 10 aa, Severe acute respiratory syndrome coronavirus 2
  REGION 1..10: note = Table B: HLA-DQA1*03:02-B1*03:03L HLA-DQA1*03:01-B1*03:02L
QHEETIYNLL

SEQ ID NO: 9300 - protein, 13 aa, Severe acute respiratory syndrome coronavirus 2
  REGION 1..13: note = Table B: HLA-DQA1*03:02-B1*03:03L HLA-DRB1*01:02L
EETIYNLLKDCPA

SEQ ID NO: 9301 - protein, 14 aa, Severe acute respiratory syndrome coronavirus 2
  REGION 1..14: note = Table B: HLA-DQA1*03:02-B1*03:03L HLA-DRB1*08:77L HLA-DRB3*02:01L HLA-DRB1*03:01L HLA-DRB1*11:02L HLA-DQA1*05:01-B1*02:01L HLA-DRB1*09:01L HLA-DPA1*01:03-B1*02:01L HLA-DPA1*01:03-B1*104:01L
  REGION 1..14: note = CONT. FROM ABOVE: HLA-DRB1*07:01L HLA-DQA1*01:03-B1*06:01L
ETIYNLLKDCPAVA

SEQ ID NO: 9302 - protein, 10 aa, Severe acute respiratory syndrome coronavirus 2
  REGION 1..10: note = Table B: HLA-DQA1*03:02-B1*03:03L HLA-DQA1*05:01-B1*03:01L HLA-DRB1*14:01L HLA-DQA1*05:05-B1*03:19L HLA-DQA1*05:05-B1*03:116L HLA-DRB1*09:01L HLA-DQA1*03:01-B1*03:02L HLA-DPA1*01:03-B1*104:01L
  REGION 1..10: note = CONT. FROM ABOVE: HLA-DRB1*16:01L HLA-DQA1*02:01-B1*03:03L HLA-D RB1*15:03L
RIDGDMVPHI

SEQ ID NO: 9303 - protein, 10 aa, Severe acute respiratory syndrome coronavirus 2
  REGION 1..10: note = Table B: HLA-DQA1*03:02-B1*03:03L HLA-DQA1*01-B1*05L HLA-DQA1*05:01-B1*02:01L HLA-DQA1*03:01-B1*03:02L
IDGDMVPHIS

SEQ ID NO: 9304 - protein, 10 aa, Severe acute respiratory syndrome coronavirus 2
  REGION 1..10: note = Table B: HLA-DQA1*03:02-B1*03:03L HLA-DQA1*01-B1*05L HLA-DQA1*03:01-B1*03:02L
KYTMADLVYA

SEQ ID NO: 9305 - protein, 10 aa, Severe acute respiratory syndrome coronavirus 2
  REGION 1..10: note = Table B: HLA-DQA1*03:02-B1*03:03L HLA-DQA1*05:01-B1*03:01L HLA-DQA1*01:02-B1*06:02L HLA-DPA1*03:01-B1*04:02L HLA-DRB1*14:02L HLA-DQA1*05:05-B1*03:19L HLA-DQA1*05:05-B1*03:116L HLA-DPA1*03:01-B1*105:01L
  REGION 1..10: note = CONT. FROM ABOVE: HLA-DQA1*03:01-B1*03:02L HLA-DQA1*02:01-B1*03: 03L HLA-DRB1*15:03L
YTMADLVYAL

SEQ ID NO: 9306 - protein, 10 aa, Severe acute respiratory syndrome coronavirus 2
  REGION 1..10: note = Table B: HLA-DQA1*03:02-B1*03:03L HLA-DQA1*03:01-B1*03:02L
HFDEGNCDTL

SEQ ID NO: 9307 - protein, 10 aa, Severe acute respiratory syndrome coronavirus 2
  REGION 1..10: note = Table B: HLA-DQA1*03:02-B1*03:03L HLA-DQA1*05:01-B1*03:01L HLA-DRB1*04:01L HLA-DRB1*04:03L HLA-DRB1*13:02L HLA-DRB1*13:03M HLA-DRB1*01:03M HLA-DQA1*01:02-B1*06:02H HLA-DRB1*01:01L HLA-DRB4*03:01NL HLA-DRB1*08:77M HLA-DPA1*01:03-B1*03:01M
  REGION 1..10: note = CONT. FROM ABOVE: HLA-DPA1*03:01-B1*04:02L HLA-DRB1*03:01M HLA-D RB1*14:01L HLA-DRB1*11:03L HLA-DRB1*11:04L HLA-DRB1*14:02M HLA-D RB1*08:01L HLA-DRB1*11:01L HLA-DRB5*01:01L HLA-DQA1*01-B1*05L HL A-DQA1*05:05-B1*03:19M HLA-DQA1*05:01-B1*02:01M HLA-DRB4*01:01L
  REGION 1..10: note = CONT. FROM ABOVE: HLA-DPA1*01:03-B1*04:01M HLA-DQA1*05:05-B1*03: 116L HLA-DRB1*09:01L HLA-DPA1*01:03-B1*04:02M HLA-DRB1*12:01L HL A-DPA1*02:01-B1*13:01L HLA-DPA1*03:01-B1*105:01M HLA-DQA1*03:01- B1*03:02L HLA-DPA1*01:03-B1*104:01L HLA-DQA1*05:05-B1*03:01L
  REGION 1..10: note = CONT. FROM ABOVE: HLA-DPA1*01:02-B1*04:01L HLA-DRB1*10:01L HLA-D RB1*16:01L HLA-DQA1*01:03-B1*06:01L HLA-DRB1*08:02L HLA-DQA1*02: 01-B1*03:03M HLA-DRB1*15:01L HLA-DRB1*15:03M
DTLKEILVTY

SEQ ID NO: 9308 - protein, 13 aa, Severe acute respiratory syndrome coronavirus 2
  REGION 1..13: note = Table B: HLA-DQA1*03:02-B1*03:03L HLA-DRB1*13:03L HLA-DRB1*01:03L HLA-DRB1*01:02L HLA-DPA1*03:01-B1*04:02L HLA-DRB1*14:01L HLA-DRB1*11:01L HLA-DPA1*01:03-B1*04:02L HLA-DRB1*12:01L HLA-DPA1*01:02-B1*04:01L HLA-DRB1*04:08L
  REGION 1..13: note = CONT. FROM ABOVE: HLA-DQA1*02:01-B1*03:03L HLA-DRB1*15:03L
DDDYFNKKDWYDF

SEQ ID NO: 9309 - protein, 12 aa, Severe acute respiratory syndrome coronavirus 2
  REGION 1..12: note = Table B: HLA-DQA1*03:02-B1*03:03L HLA-DRB1*04:03L HLA-DRB1*04:05L HLA-DPA1*02:01-B1*13:01L HLA-DRB1*16:01L
KKDWYDFVENPD

SEQ ID NO: 9310 - protein, 12 aa, Severe acute respiratory syndrome coronavirus 2
  REGION 1..12: note = Table B: HLA-DQA1*03:02-B1*03:03L HLA-DRB1*04:03L HLA-DRB1*04:05L HLA-DPA1*03:01-B1*04:02L HLA-DRB1*04:10L HLA-DPA1*02:01-B1*13:01L HLA-DPA1*03:01-B1*105:01L HLA-DRB1*16:01L HLA-DRB1*04:08L HLA-DRB1*15:03L
KDWYDFVENPDI

SEQ ID NO: 9311 - protein, 10 aa, Severe acute respiratory syndrome coronavirus 2
  REGION 1..10: note = Table B: HLA-DQA1*03:02-B1*03:03L HLA-DQA1*01-B1*05L HLA-DQA1*05:01-B1*02:01L HLA-DQA1*03:01-B1*03:02L
YDFVENPDIL

SEQ ID NO: 9312 - protein, 10 aa, Severe acute respiratory syndrome coronavirus 2
  REGION 1..10: note = Table B: HLA-DQA1*03:02-B1*03:03L HLA-DQA1*05:01-B1*03:01L HLA-DRB1*04:03L HLA-DRB1*13:02L HLA-DRB1*13:03M HLA-DRB1*01:03L HLA-DRB1*04:02L HLA-DRB1*04:04L HLA-DRB1*04:05L HLA-DQA1*01:02-B1*06:02L HLA-DRB1*01:01L HLA-DRB4*03:01NL
  REGION 1..10: note = CONT. FROM ABOVE: HLA-DRB3*02:01L HLA-DRB1*14:01L HLA-DRB1*11:04 L HLA-DRB1*14:02L HLA-DQA1*01:01-B1*05:01L HLA-DRB1*08:01L HLA-D RB5*01:01L HLA-DQA1*01-B1*05L HLA-DQA1*05:01-B1*02:01L HLA-DPA1* 01:03-B1*04:02L HLA-DRB1*12:01L HLA-DRB1*12:02L HLA-DRB3*01:01L
  REGION 1..10: note = CONT. FROM ABOVE: HLA-DPA1*03:01-B1*105:01L HLA-DQA1*03:01-B1*03 :02M HLA-DRB1*14:54L HLA-DQA1*05:05-B1*03:01L HLA-DRB1*14:17L HL A-DPA1*01:02-B1*04:01L HLA-DRB1*16:01L HLA-DQA1*01:03-B1*06:01L HLA-DRB1*08:02L HLA-DRB1*08:03L HLA-DQA1*02:01-B1*03:03L
DFVENPDILR

SEQ ID NO: 9313 - protein, 10 aa, Severe acute respiratory syndrome coronavirus 2
  REGION 1..10: note = Table B: HLA-DQA1*03:02-B1*03:03M HLA-DQA1*05:01-B1*03:01L HLA-DRB1*04:01L HLA-DQA1*01:02-B1*06:02L HLA-DRB1*01:02L HLA-DRB1*08:77L HLA-DPA1*03:01-B1*04:02L HLA-DRB1*14:01L HLA-DRB1*11:02L HLA-DRB1*14:02L HLA-DQA1*05:05-B1*03:19M
  REGION 1..10: note = CONT. FROM ABOVE: HLA-DQA1*05:01-B1*02:01L HLA-DPA1*01:03-B1*04: 01L HLA-DQA1*05:05-B1*03:116L HLA-DRB1*09:01L HLA-DPA1*01:03-B1* 04:02L HLA-DPA1*02:01-B1*13:01L HLA-DPA1*03:01-B1*105:01L HLA-DQ A1*03:01-B1*03:02M HLA-DPA1*01:03-B1*104:01M
  REGION 1..10: note = CONT. FROM ABOVE: HLA-DPA1*01:02-B1*04:01L HLA-DRB1*10:01L HLA-D RB1*16:01L HLA-DQA1*01:03-B1*06:01L HLA-DRB1*08:03L HLA-DQA1*02: 01-B1*03:03M HLA-DRB1*15:03L
FVENPDILRV

SEQ ID NO: 9314 - protein, 10 aa, Severe acute respiratory syndrome coronavirus 2
  REGION 1..10: note = Table B: HLA-DQA1*03:02-B1*03:03L HLA-DQA1*05:01-B1*03:01H HLA-DRB1*04:01L HLA-DRB1*13:02L HLA-DRB1*13:03L HLA-DRB1*01:03L HLA-DRB1*04:02L HLA-DRB1*04:05L HLA-DQA1*01:02-B1*06:02L HLA-DRB4*03:01NM HLA-DRB1*08:77H HLA-DPA1*01:03-B1*03:01M
  REGION 1..10: note = CONT. FROM ABOVE: HLA-DPA1*03:01-B1*04:02M HLA-DRB1*03:01M HLA-D RB1*14:01L HLA-DRB1*11:02L HLA-DRB1*11:03L HLA-DRB1*11:04L HLA-D RB1*14:02L HLA-DRB5*01:01L HLA-DQA1*01-B1*05M HLA-DQA1*05:05-B1* 03:19M HLA-DQA1*05:01-B1*02:01M HLA-DRB4*01:01H
  REGION 1..10: note = CONT. FROM ABOVE: HLA-DPA1*01:03-B1*04:01H HLA-DQA1*05:05-B1*03: 116M HLA-DRB1*09:01L HLA-DPA1*01:03-B1*04:02M HLA-DRB1*12:01M HL A-DPA1*02:01-B1*13:01L HLA-DQA1*03:01-B1*03:02L HLA-DRB1*14:54L HLA-DPA1*01:03-B1*104:01M HLA-DPA1*01:02-B1*04:01M
  REGION 1..10: note = CONT. FROM ABOVE: HLA-DRB1*10:01M HLA-DRB1*16:01M HLA-DQA1*01:03 -B1*06:01L HLA-DRB1*08:02L HLA-DQA1*02:01-B1*03:03L HLA-DRB1*15: 03M
VENPDILRVY

SEQ ID NO: 9315 - protein, 12 aa, Severe acute respiratory syndrome coronavirus 2
  REGION 1..12: note = Table B: HLA-DQA1*03:02-B1*03:03L HLA-DQA1*05:01-B1*03:01L HLA-DRB1*04:03L HLA-DRB1*04:02L HLA-DRB1*04:04L HLA-DRB1*04:05L HLA-DQA1*01:02-B1*06:02L HLA-DRB1*01:02L HLA-DRB4*03:01NL HLA-DRB1*08:04L HLA-DPA1*03:01-B1*04:02L HLA-DRB1*14:01L
  REGION 1..12: note = CONT. FROM ABOVE: HLA-DQA1*01-B1*05L HLA-DQA1*05:01-B1*02:01L HL A-DRB1*04:10L HLA-DRB1*12:01L HLA-DPA1*03:01-B1*105:01L HLA-DQA1 *03:01-B1*03:02L HLA-DRB1*14:54L HLA-DRB1*14:17L HLA-DRB1*16:01L HLA-DQA1*01:03-B1*06:01L HLA-DRB1*04:08L
  REGION 1..12: note = CONT. FROM ABOVE: HLA-DQA1*02:01-B1*03:03L HLA-DRB1*15:03L
NPDILRVYANLG

SEQ ID NO: 9316 - protein, 10 aa, Severe acute respiratory syndrome coronavirus 2
  REGION 1..10: note = Table B: HLA-DQA1*03:02-B1*03:03L HLA-DQA1*05:01-B1*03:01L HLA-DRB1*13:02L HLA-DRB1*13:03L HLA-DRB1*01:03L HLA-DRB1*04:05L HLA-DQA1*01:02-B1*06:02L HLA-DRB1*01:02L HLA-DPA1*01:03-B1*03:01L HLA-DPA1*03:01-B1*04:02L
  REGION 1..10: note = CONT. FROM ABOVE: HLA-DRB1*14:01L HLA-DRB1*14:02L HLA-DRB1*08:01 L HLA-DQA1*05:05-B1*03:19L HLA-DQA1*05:01-B1*02:01L HLA-DQA1*05: 05-B1*03:116L HLA-DPA1*01:03-B1*04:02L HLA-DRB1*12:01L HLA-DPA1* 02:01-B1*13:01L HLA-DPA1*03:01-B1*105:01L
  REGION 1..10: note = CONT. FROM ABOVE: HLA-DQA1*03:01-B1*03:02L HLA-DPA1*01:03-B1*104 :01L HLA-DPA1*01:02-B1*04:01L HLA-DRB1*16:01L HLA-DQA1*01:03-B1* 06:01L HLA-DRB1*08:03L HLA-DQA1*02:01-B1*03:03L HLA-DRB1*15:03L
RVYANLGERV

SEQ ID NO: 9317 - protein, 14 aa, Severe acute respiratory syndrome coronavirus 2
  REGION 1..14: note = Table B: HLA-DQA1*03:02-B1*03:03L HLA-DRB1*04:01L HLA-DRB1*13:02L HLA-DRB1*01:01L HLA-DRB1*08:04L HLA-DPA1*01:03-B1*03:01L HLA-DRB1*14:01L HLA-DRB1*11:03L HLA-DRB1*11:04L HLA-DRB1*14:02L HLA-DRB1*11:01L
  REGION 1..14: note = CONT. FROM ABOVE: HLA-DQA1*01-B1*05L HLA-DQA1*05:01-B1*02:01L HL A-DRB3*01:01L HLA-DPA1*02:01-B1*13:01L HLA-DPA1*01:03-B1*02:01L HLA-DPA1*01:03-B1*104:01L HLA-DRB1*14:17L HLA-DRB1*07:01L HLA-DR B1*08:02L HLA-DRB1*08:03L
LKTVQFCDAMRNAG

SEQ ID NO: 9318 - protein, 10 aa, Severe acute respiratory syndrome coronavirus 2
  REGION 1..10: note = Table B: HLA-DQA1*03:02-B1*03:03L HLA-DQA1*05:01-B1*03:01L HLA-DRB1*04:03L HLA-DRB1*13:03L HLA-DRB1*01:03L HLA-DRB1*04:02L HLA-DRB4*03:01NL HLA-DQA1*01-B1*05L HLA-DQA1*05:01-B1*02:01L HLA-DRB1*12:01L HLA-DQA1*03:01-B1*03:02L
  REGION 1..10: note = CONT. FROM ABOVE: HLA-DQA1*05:05-B1*03:01L HLA-DRB1*14:17L HLA-D RB1*16:01L HLA-DQA1*01:03-B1*06:01L HLA-DQA1*02:01-B1*03:03L
DAMRNAGIVG

SEQ ID NO: 9319 - protein, 10 aa, Severe acute respiratory syndrome coronavirus 2
  REGION 1..10: note = Table B: HLA-DQA1*03:02-B1*03:03M HLA-DQA1*05:01-B1*03:01M HLA-DRB1*04:01L HLA-DRB1*01:03L HLA-DRB1*04:04L HLA-DQA1*01:02-B1*06:02L HLA-DRB1*01:02L HLA-DPA1*03:01-B1*04:02L HLA-DRB1*14:01L HLA-DRB1*14:02L
  REGION 1..10: note = CONT. FROM ABOVE: HLA-DRB1*08:01L HLA-DQA1*05:05-B1*03:19M HLA-D QA1*05:01-B1*02:01L HLA-DQA1*05:05-B1*03:116M HLA-DRB1*09:01L HL A-DPA1*01:03-B1*04:02L HLA-DPA1*02:01-B1*13:01L HLA-DPA1*03:01-B 1*105:01L HLA-DQA1*03:01-B1*03:02M HLA-DPA1*01:03-B1*104:01L
  REGION 1..10: note = CONT. FROM ABOVE: HLA-DPA1*01:02-B1*04:01L HLA-DRB1*07:01L HLA-D RB1*10:01L HLA-DRB1*16:01L HLA-DQA1*01:03-B1*06:01L HLA-DRB1*08: 03L HLA-DQA1*02:01-B1*03:03M HLA-DRB1*15:03L
AMRNAGIVGV

SEQ ID NO: 9320 - protein, 11 aa, Severe acute respiratory syndrome coronavirus 2
  REGION 1..11: note = Table B: HLA-DQA1*03:02-B1*03:03L HLA-DRB1*04:03L HLA-DRB1*04:02L HLA-DRB1*04:05L HLA-DQA1*01:02-B1*06:02L HLA-DQA1*01-B1*05L HLA-DQA1*05:01-B1*02:01L HLA-DQA1*03:01-B1*03:02L HLA-DRB1*14:17L
  REGION 1..11: note = CONT. FROM ABOVE: HLA-DQA1*01:03-B1*06:01L HLA-DQA1*02:01-B1*03: 03L
IVGVLTLDNQD

SEQ ID NO: 9321 - protein, 12 aa, Severe acute respiratory syndrome coronavirus 2
  REGION 1..12: note = Table B: HLA-DQA1*03:02-B1*03:03L HLA-DQA1*01:02-B1*06:02L HLA-DRB4*03:01NL HLA-DRB1*12:01L HLA-DRB1*14:54L HLA-DRB1*16:01L HLA-DQA1*01:03-B1*06:01L HLA-DQA1*02:01-B1*03:03L
VGVLTLDNQDLN

SEQ ID NO: 9322 - protein, 13 aa, Severe acute respiratory syndrome coronavirus 2
  REGION 1..13: note = Table B: HLA-DQA1*03:02-B1*03:03L HLA-DRB1*11:02L HLA-DRB1*14:02L HLA-DPA1*01:03-B1*04:02L HLA-DQA1*05:05-B1*03:01L HLA-DQA1*01:03-B1*06:01L
VLTLDNQDLNGNW

SEQ ID NO: 9323 - protein, 12 aa, Severe acute respiratory syndrome coronavirus 2
  REGION 1..12: note = Table B: HLA-DQA1*03:02-B1*03:03L HLA-DQA1*05:01-B1*03:01L HLA-DRB1*01:03L HLA-DQA1*01:02-B1*06:02L HLA-DPA1*03:01-B1*04:02L HLA-DQA1*01-B1*05L HLA-DQA1*05:01-B1*02:01L HLA-DPA1*01:03-B1*04:01L
  REGION 1..12: note = CONT. FROM ABOVE: HLA-DPA1*01:03-B1*04:02L HLA-DPA1*03:01-B1*105 :01L HLA-DQA1*03:01-B1*03:02L HLA-DPA1*01:03-B1*02:01L HLA-DQA1* 05:05-B1*03:01L HLA-DPA1*01:02-B1*04:01L HLA-DRB1*16:01L HLA-DQA 1*01:03-B1*06:01L HLA-DRB1*04:08L HLA-DQA1*02:01-B1*03:03L
YDFGDFIQTTPG

SEQ ID NO: 9324 - protein, 11 aa, Severe acute respiratory syndrome coronavirus 2
  REGION 1..11: note = Table B: HLA-DQA1*03:02-B1*03:03L HLA-DRB1*13:02L HLA-DRB1*01:03L HLA-DQA1*05:01-B1*02:01L HLA-DRB1*04:10L HLA-DRB1*12:01L HLA-DRB1*14:54L HLA-DRB1*16:01L HLA-DQA1*02:01-B1*03:03L
GDFIQTTPGSG

SEQ ID NO: 9325 - protein, 12 aa, Severe acute respiratory syndrome coronavirus 2
  REGION 1..12: note = Table B: HLA-DQA1*03:02-B1*03:03L HLA-DQA1*05:01-B1*03:01L HLA-DRB1*13:02L HLA-DRB1*01:03L HLA-DQA1*01:02-B1*06:02L HLA-DRB1*01:02L HLA-DRB1*08:77L HLA-DRB3*02:01L HLA-DPA1*03:01-B1*04:02L HLA-DRB1*14:01L HLA-DRB1*11:03L
  REGION 1..12: note = CONT. FROM ABOVE: HLA-DQA1*05:05-B1*03:19L HLA-DQA1*05:01-B1*02: 01L HLA-DRB1*12:01L HLA-DPA1*03:01-B1*105:01L HLA-DQA1*05:05-B1* 03:01L HLA-DRB1*07:01L HLA-DRB1*16:01L HLA-DQA1*01:03-B1*06:01L HLA-DQA1*02:01-B1*03:03L HLA-DRB1*15:03L
DFIQTTPGSGVP

SEQ ID NO: 9326 - protein, 12 aa, Severe acute respiratory syndrome coronavirus 2
  REGION 1..12: note = Table B: HLA-DQA1*03:02-B1*03:03L HLA-DQA1*05:01-B1*03:01L HLA-DRB1*04:03L HLA-DRB1*13:02L HLA-DRB1*04:02L HLA-DRB1*01:02L HLA-DRB4*03:01NL HLA-DQA1*05:05-B1*03:19L HLA-DQA1*05:01-B1*02:01L HLA-DRB1*12:01L
  REGION 1..12: note = CONT. FROM ABOVE: HLA-DQA1*03:01-B1*03:02L HLA-DRB1*14:54L HLA-D QA1*05:05-B1*03:01L HLA-DRB1*14:17L HLA-DRB1*16:01L HLA-DQA1*02: 01-B1*03:03L
FIQTTPGSGVPV

SEQ ID NO: 9327 - protein, 10 aa, Severe acute respiratory syndrome coronavirus 2
  REGION 1..10: note = Table B: HLA-DQA1*03:02-B1*03:03L HLA-DQA1*05:01-B1*03:01L HLA-DQA1*05:05-B1*03:19L HLA-DQA1*03:01-B1*03:02L HLA-DQA1*05:05-B1*03:01L HLA-DQA1*01:03-B1*06:01L HLA-DQA1*02:01-B1*03:03L
TPGSGVPVVD

SEQ ID NO: 9328 - protein, 10 aa, Severe acute respiratory syndrome coronavirus 2
  REGION 1..10: note = Table B: HLA-DQA1*03:02-B1*03:03L HLA-DQA1*05:01-B1*03:01L HLA-DQA1*05:05-B1*03:19L HLA-DQA1*03:01-B1*03:02L HLA-DQA1*05:05-B1*03:01L
PGSGVPVVDS

SEQ ID NO: 9329 - protein, 12 aa, Severe acute respiratory syndrome coronavirus 2
  REGION 1..12: note = Table B: HLA-DQA1*03:02-B1*03:03L HLA-DQA1*05:01-B1*03:01L HLA-DQA1*01:02-B1*06:02L HLA-DPA1*03:01-B1*04:02L HLA-DQA1*05:05-B1*03:19L HLA-DQA1*05:01-B1*02:01L HLA-DPA1*01:03-B1*04:02L HLA-DRB1*12:01L
  REGION 1..12: note = CONT. FROM ABOVE: HLA-DQA1*05:05-B1*03:01L HLA-DQA1*02:01-B1*03: 03L HLA-DRB1*15:03L
DSYYSLLMPILT

SEQ ID NO: 9330 - protein, 10 aa, Severe acute respiratory syndrome coronavirus 2
  REGION 1..10: note = Table B: HLA-DQA1*03:02-B1*03:03L HLA-DQA1*05:05-B1*03:19L HLA-DRB1*15:03L
YSLLMPILTL

SEQ ID NO: 9331 - protein, 13 aa, Severe acute respiratory syndrome coronavirus 2
  REGION 1..13: note = Table B: HLA-DQA1*03:02-B1*03:03L HLA-DRB1*14:04L HLA-DRB1*13:02L HLA-DRB1*04:04L HLA-DRB1*04:05L HLA-DRB4*03:01NL HLA-DRB3*02:01L HLA-DPA1*01:03-B1*03:01L HLA-DPA1*03:01-B1*04:02L HLA-DRB1*11:02L HLA-DRB1*11:03L
  REGION 1..13: note = CONT. FROM ABOVE: HLA-DRB1*14:02L HLA-DRB1*11:01L HLA-DQA1*05:05 -B1*03:19L HLA-DQA1*05:05-B1*03:116L HLA-DPA1*01:03-B1*04:02L HL A-DRB1*12:02L HLA-DRB3*01:01L HLA-DPA1*02:01-B1*13:01L HLA-DPA1* 03:01-B1*105:01L HLA-DQA1*03:01-B1*03:02L
  REGION 1..13: note = CONT. FROM ABOVE: HLA-DPA1*01:03-B1*02:01L HLA-DPA1*01:03-B1*104 :01L HLA-DQA1*05:05-B1*03:01L HLA-DRB1*07:01L HLA-DRB1*10:01L HL A-DQA1*01:03-B1*06:01L HLA-DRB1*08:02L HLA-DRB1*08:03L HLA-DQA1* 02:01-B1*03:03L
MPILTLTRALTAE

SEQ ID NO: 9332 - protein, 12 aa, Severe acute respiratory syndrome coronavirus 2
  REGION 1..12: note = Table B: HLA-DQA1*03:02-B1*03:03L HLA-DQA1*05:01-B1*03:01L HLA-DRB1*01:03L HLA-DRB1*04:02L HLA-DRB1*04:05L HLA-DQA1*01:02-B1*06:02L HLA-DRB1*01:02L HLA-DQA1*05:05-B1*03:19L HLA-DRB1*04:10L
  REGION 1..12: note = CONT. FROM ABOVE: HLA-DPA1*03:01-B1*105:01L HLA-DQA1*05:05-B1*03 :01L HLA-DRB1*16:01L HLA-DRB1*04:08L
LTRALTAESHVD

SEQ ID NO: 9333 - protein, 10 aa, Severe acute respiratory syndrome coronavirus 2
  REGION 1..10: note = Table B: HLA-DQA1*03:02-B1*03:03L HLA-DRB1*04:03L HLA-DRB1*04:02L HLA-DQA1*03:01-B1*03:02L HLA-DRB1*14:17L HLA-DQA1*01:03-B1*06:01L HLA-DQA1*02:01-B1*03:03L
ALTAESHVDT

SEQ ID NO: 9334 - protein, 10 aa, Severe acute respiratory syndrome coronavirus 2
  REGION 1..10: note = Table B: HLA-DQA1*03:02-B1*03:03L HLA-DQA1*01-B1*05L HLA-DQA1*03:01-B1*03:02L
TAESHVDTDL

SEQ ID NO: 9335 - protein, 12 aa, Severe acute respiratory syndrome coronavirus 2
  REGION 1..12: note = Table B: HLA-DQA1*03:02-B1*03:03L HLA-DQA1*05:01-B1*02:01L HLA-DQA1*02:01-B1*03:03L
AESHVDTDLTKP

SEQ ID NO: 9336 - protein, 10 aa, Severe acute respiratory syndrome coronavirus 2
  REGION 1..10: note = Table B: HLA-DQA1*03:02-B1*03:03L HLA-DQA1*05:01-B1*03:01L HLA-DRB1*04:01L HLA-DRB1*04:03L HLA-DRB1*13:02L HLA-DRB1*13:03L HLA-DRB1*01:03L HLA-DRB1*04:02L HLA-DRB1*04:05L HLA-DQA1*01:02-B1*06:02L HLA-DRB4*03:01NL HLA-DRB1*08:77M
  REGION 1..10: note = CONT. FROM ABOVE: HLA-DPA1*01:03-B1*03:01M HLA-DPA1*03:01-B1*04: 02L HLA-DRB1*03:01M HLA-DRB1*14:01L HLA-DRB1*11:02L HLA-DRB1*11: 03L HLA-DRB1*11:04L HLA-DRB1*14:02L HLA-DRB1*11:01L HLA-DRB5*01: 01L HLA-DQA1*01-B1*05M HLA-DQA1*05:05-B1*03:19M
  REGION 1..10: note = CONT. FROM ABOVE: HLA-DQA1*05:01-B1*02:01M HLA-DRB4*01:01L HLA-D PA1*01:03-B1*04:01L HLA-DQA1*05:05-B1*03:116L HLA-DPA1*01:03-B1* 04:02L HLA-DRB1*12:01L HLA-DPA1*02:01-B1*13:01L HLA-DPA1*03:01-B 1*105:01L HLA-DQA1*03:01-B1*03:02L HLA-DRB1*14:54L
  REGION 1..10: note = CONT. FROM ABOVE: HLA-DPA1*01:03-B1*104:01M HLA-DQA1*05:05-B1*03 :01L HLA-DRB1*14:17L HLA-DPA1*01:02-B1*04:01L HLA-DRB1*10:01L HL A-DRB1*16:01M HLA-DQA1*01:03-B1*06:01L HLA-DRB1*08:02L HLA-DQA1* 02:01-B1*03:03L HLA-DRB1*15:03L
HVDTDLTKPY

SEQ ID NO: 9337 - protein, 10 aa, Severe acute respiratory syndrome coronavirus 2
  REGION 1..10: note = Table B: HLA-DQA1*03:02-B1*03:03L HLA-DQA1*01-B1*05L HLA-DQA1*05:05-B1*03:19M HLA-DQA1*05:01-B1*02:01L HLA-DQA1*03:01-B1*03:02L HLA-DPA1*01:03-B1*104:01L HLA-DRB1*16:01L
VDTDLTKPYI

SEQ ID NO: 9338 - protein, 10 aa, Severe acute respiratory syndrome coronavirus 2
  REGION 1..10: note = Table B: HLA-DQA1*03:02-B1*03:03L HLA-DQA1*01-B1*05L HLA-DQA1*05:05-B1*03:19L HLA-DQA1*03:01-B1*03:02L
YDFTEERLKL

SEQ ID NO: 9339 - protein, 14 aa, Severe acute respiratory syndrome coronavirus 2
  REGION 1..14: note = Table B: HLA-DQA1*03:02-B1*03:03L HLA-DQA1*05:01-B1*03:01L HLA-DRB1*04:01L HLA-DRB1*04:04L HLA-DRB1*01:01L HLA-DRB3*02:01L HLA-DPA1*01:03-B1*03:01L HLA-DRB1*11:02L HLA-DRB1*11:03L HLA-DRB1*11:04L HLA-DQA1*01:01-B1*05:01L HLA-DRB1*04:10L
  REGION 1..14: note = CONT. FROM ABOVE: HLA-DPA1*01:03-B1*02:01L HLA-DPA1*01:03-B1*104 :01L HLA-DQA1*05:05-B1*03:01L HLA-DRB1*14:17L HLA-DRB1*07:01L HL A-DRB1*10:01L HLA-DRB1*15:01L
DRYFKYWDQTYHPN

SEQ ID NO: 9340 - protein, 16 aa, Severe acute respiratory syndrome coronavirus 2
  REGION 1..16: note = Table B: HLA-DQA1*03:02-B1*03:03L HLA-DRB1*11:02L HLA-DRB1*14:02L HLA-DPA1*01:03-B1*04:02L HLA-DPA1*01:03-B1*104:01L
WDQTYHPNCVNCLDDR

SEQ ID NO: 9341 - protein, 10 aa, Severe acute respiratory syndrome coronavirus 2
  REGION 1..10: note = Table B: HLA-DQA1*03:02-B1*03:03L HLA-DQA1*05:05-B1*03:19L
ANFNVLFSTV

SEQ ID NO: 9342 - protein, 10 aa, Severe acute respiratory syndrome coronavirus 2
  REGION 1..10: note = Table B: HLA-DQA1*03:02-B1*03:03L HLA-DRB1*04:03L HLA-DQA1*01-B1*05L HLA-DQA1*03:01-B1*03:02L HLA-DQA1*02:01-B1*03:03L
VFPPTSFGPL

SEQ ID NO: 9343 - protein, 10 aa, Severe acute respiratory syndrome coronavirus 2
  REGION 1..10: note = Table B: HLA-DQA1*03:02-B1*03:03M HLA-DQA1*05:01-B1*03:01L HLA-DQA1*01:02-B1*06:02L HLA-DPA1*03:01-B1*04:02L HLA-DRB1*14:01L HLA-DRB1*14:02L HLA-DQA1*05:05-B1*03:19L HLA-DQA1*05:01-B1*02:01L HLA-DQA1*05:05-B1*03:116L
  REGION 1..10: note = CONT. FROM ABOVE: HLA-DRB1*09:01L HLA-DPA1*02:01-B1*13:01L HLA-D PA1*03:01-B1*105:01L HLA-DQA1*03:01-B1*03:02L HLA-DPA1*01:03-B1* 104:01L HLA-DPA1*01:02-B1*04:01L HLA-DRB1*10:01L HLA-DRB1*16:01L HLA-DQA1*01:03-B1*06:01L HLA-DRB1*08:03L
  REGION 1..10: note = CONT. FROM ABOVE: HLA-DQA1*02:01-B1*03:03L HLA-DRB1*15:03L
KIFVDGVPFV

SEQ ID NO: 9344 - protein, 10 aa, Severe acute respiratory syndrome coronavirus 2
  REGION 1..10: note = Table B: HLA-DQA1*03:02-B1*03:03L HLA-DQA1*05:01-B1*03:01L HLA-DRB1*04:03L HLA-DRB1*04:05L HLA-DQA1*01:02-B1*06:02L HLA-DRB1*01:02L HLA-DPA1*03:01-B1*04:02L HLA-DRB1*14:01L HLA-DRB1*14:02L HLA-DQA1*05:05-B1*03:19L
  REGION 1..10: note = CONT. FROM ABOVE: HLA-DQA1*05:01-B1*02:01L HLA-DQA1*05:05-B1*03: 116L HLA-DRB1*09:01L HLA-DPA1*01:03-B1*04:02L HLA-DPA1*02:01-B1* 13:01L HLA-DPA1*03:01-B1*105:01L HLA-DQA1*03:01-B1*03:02L HLA-DP A1*01:03-B1*104:01L HLA-DPA1*01:02-B1*04:01L HLA-DRB1*10:01L
  REGION 1..10: note = CONT. FROM ABOVE: HLA-DRB1*16:01L HLA-DQA1*01:03-B1*06:01L HLA-D RB1*08:03L HLA-DQA1*02:01-B1*03:03L HLA-DRB1*15:03L
IFVDGVPFVV

SEQ ID NO: 9345 - protein, 12 aa, Severe acute respiratory syndrome coronavirus 2
  REGION 1..12: note = Table B: HLA-DQA1*03:02-B1*03:03L HLA-DQA1*05:01-B1*03:01L HLA-DQA1*01:02-B1*06:02L HLA-DQA1*05:05-B1*03:19L HLA-DPA1*03:01-B1*105:01L HLA-DQA1*03:01-B1*03:02L HLA-DQA1*05:05-B1*03:01L HLA-DQA1*01:03-B1*06:01L
  REGION 1..12: note = CONT. FROM ABOVE: HLA-DQA1*02:01-B1*03:03L
FVDGVPFVVSTG

SEQ ID NO: 9346 - protein, 12 aa, Severe acute respiratory syndrome coronavirus 2
  REGION 1..12: note = Table B: HLA-DQA1*03:02-B1*03:03L HLA-DQA1*05:01-B1*03:01L HLA-DQA1*01:03-B1*06:01L
DGVPFVVSTGYH

SEQ ID NO: 9347 - protein, 11 aa, Severe acute respiratory syndrome coronavirus 2
  REGION 1..11: note = Table B: HLA-DQA1*03:02-B1*03:03L HLA-DQA1*05:01-B1*03:01L HLA-DRB1*13:02L HLA-DRB1*13:03L HLA-DRB4*03:01NL HLA-DRB1*08:04L HLA-DRB3*02:01L HLA-DPA1*01:03-B1*03:01L HLA-DRB1*03:01L HLA-DRB1*14:01L HLA-DRB1*11:04L HLA-DRB1*14:02M HLA-DRB1*08:01L
  REGION 1..11: note = CONT. FROM ABOVE: HLA-DRB5*01:01L HLA-DQA1*05:01-B1*02:01L HLA-D RB4*01:01L HLA-DPA1*01:03-B1*04:01L HLA-DQA1*05:05-B1*03:116L HL A-DRB1*09:01L HLA-DPA1*01:03-B1*04:02L HLA-DRB1*12:02L HLA-DRB3* 01:01L HLA-DRB1*14:54L HLA-DPA1*01:03-B1*104:01L
  REGION 1..11: note = CONT. FROM ABOVE: HLA-DQA1*05:05-B1*03:01L HLA-DRB1*14:17L HLA-D PA1*01:02-B1*04:01L HLA-DRB1*07:01L HLA-DRB1*10:01L HLA-DRB1*04: 08L HLA-DRB1*08:02L HLA-DRB1*08:03L
VPFVVSTGYHF

SEQ ID NO: 9348 - protein, 10 aa, Severe acute respiratory syndrome coronavirus 2
  REGION 1..10: note = Table B: HLA-DQA1*03:02-B1*03:03L HLA-DQA1*03:01-B1*03:02L
RELGVVHNQD

SEQ ID NO: 9349 - protein, 10 aa, Severe acute respiratory syndrome coronavirus 2
  REGION 1..10: note = Table B: HLA-DQA1*03:02-B1*03:03L HLA-DQA1*05:01-B1*03:01L HLA-DRB1*04:03L HLA-DRB1*13:03L HLA-DRB1*04:02L HLA-DRB1*04:05L HLA-DQA1*01:02-B1*06:02L HLA-DRB4*03:01NL HLA-DQA1*01:01-B1*05:01L HLA-DQA1*01-B1*05L
  REGION 1..10: note = CONT. FROM ABOVE: HLA-DQA1*05:05-B1*03:19L HLA-DQA1*05:01-B1*02: 01L HLA-DRB1*12:01L HLA-DQA1*03:01-B1*03:02L HLA-DRB1*14:54L HLA -DQA1*05:05-B1*03:01L HLA-DRB1*14:17L HLA-DRB1*16:01L HLA-DQA1*0 1:03-B1*06:01L HLA-DQA1*02:01-B1*03:03L
LGVVHNQDVN

SEQ ID NO: 9350 - protein, 10 aa, Severe acute respiratory syndrome coronavirus 2
  REGION 1..10: note = Table B: HLA-DQA1*03:02-B1*03:03L HLA-DQA1*05:01-B1*03:01L HLA-DRB1*13:03L HLA-DRB1*04:02L HLA-DQA1*01:02-B1*06:02L HLA-DRB1*14:01L HLA-DRB1*14:02L HLA-DRB1*08:01L HLA-DQA1*01-B1*05L HLA-DQA1*05:01-B1*02:01L
  REGION 1..10: note = CONT. FROM ABOVE: HLA-DQA1*05:05-B1*03:116L HLA-DRB1*09:01L HLA- DPA1*03:01-B1*105:01L HLA-DQA1*03:01-B1*03:02L HLA-DPA1*01:02-B1 *04:01L HLA-DQA1*02:01-B1*03:03L HLA-DRB1*15:03L
GVVHNQDVNL

SEQ ID NO: 9351 - protein, 11 aa, Severe acute respiratory syndrome coronavirus 2
  REGION 1..11: note = Table B: HLA-DQA1*03:02-B1*03:03L
NQDVNLHSSRL

SEQ ID NO: 9352 - protein, 12 aa, Severe acute respiratory syndrome coronavirus 2
  REGION 1..12: note = Table B: HLA-DQA1*03:02-B1*03:03L HLA-DRB1*04:02L HLA-DRB1*04:05L HLA-DQA1*01:02-B1*06:02L HLA-DPA1*03:01-B1*105:01L HLA-DQA1*03:01-B1*03:02L HLA-DRB1*14:17L HLA-DRB1*16:01L HLA-DQA1*02:01-B1*03:03L
FKELLVYAADPA

SEQ ID NO: 9353 - protein, 12 aa, Severe acute respiratory syndrome coronavirus 2
  REGION 1..12: note = Table B: HLA-DQA1*03:02-B1*03:03L HLA-DRB1*04:02L HLA-DRB1*04:05L HLA-DQA1*01:02-B1*06:02L HLA-DRB1*01:02L HLA-DPA1*03:01-B1*04:02L HLA-DRB1*14:01L HLA-DQA1*05:01-B1*02:01L HLA-DRB1*04:10L HLA-DRB1*12:01L
  REGION 1..12: note = CONT. FROM ABOVE: HLA-DPA1*02:01-B1*13:01L HLA-DPA1*03:01-B1*105 :01L HLA-DQA1*03:01-B1*03:02L HLA-DRB1*14:54L HLA-DRB1*14:17L HL A-DRB1*16:01L HLA-DQA1*01:03-B1*06:01L HLA-DRB1*04:08L HLA-DQA1* 02:01-B1*03:03L HLA-DRB1*15:03L
KELLVYAADPAM

SEQ ID NO: 9354 - protein, 10 aa, Severe acute respiratory syndrome coronavirus 2
  REGION 1..10: note = Table B: HLA-DQA1*03:02-B1*03:03L HLA-DQA1*05:01-B1*03:01L HLA-DRB1*04:03L HLA-DRB1*13:03L HLA-DRB1*01:03L HLA-DRB1*04:02L HLA-DRB1*04:05L HLA-DQA1*01:02-B1*06:02L HLA-DRB1*01:02L HLA-DRB4*03:01NL HLA-DRB1*14:01L HLA-DQA1*01-B1*05L
  REGION 1..10: note = CONT. FROM ABOVE: HLA-DQA1*05:05-B1*03:19L HLA-DQA1*05:01-B1*02: 01L HLA-DRB1*04:10L HLA-DRB1*12:01L HLA-DPA1*03:01-B1*105:01L HL A-DQA1*03:01-B1*03:02L HLA-DRB1*14:54L HLA-DQA1*05:05-B1*03:01L HLA-DRB1*14:17L HLA-DPA1*01:02-B1*04:01L HLA-DRB1*16:01L
  REGION 1..10: note = CONT. FROM ABOVE: HLA-DQA1*01:03-B1*06:01L HLA-DRB1*04:08L HLA-D QA1*02:01-B1*03:03L HLA-DRB1*15:03L
LVYAADPAMH

SEQ ID NO: 9355 - protein, 10 aa, Severe acute respiratory syndrome coronavirus 2
  REGION 1..10: note = Table B: HLA-DQA1*03:02-B1*03:03L HLA-DQA1*05:01-B1*03:01L HLA-DRB1*04:03L HLA-DRB1*13:02L HLA-DRB1*13:03L HLA-DRB1*01:03L HLA-DRB1*04:02L HLA-DRB1*04:05L HLA-DRB1*01:02L HLA-DRB4*03:01NL HLA-DRB1*08:77L HLA-DRB3*02:01L HLA-DPA1*03:01-B1*04:02L
  REGION 1..10: note = CONT. FROM ABOVE: HLA-DRB1*14:01L HLA-DRB1*11:03L HLA-DRB1*14:02 L HLA-DQA1*01-B1*05L HLA-DQA1*05:05-B1*03:19L HLA-DQA1*05:01-B1* 02:01L HLA-DRB1*12:01L HLA-DPA1*03:01-B1*105:01L HLA-DQA1*03:01- B1*03:02L HLA-DRB1*14:54L HLA-DRB1*14:17L
  REGION 1..10: note = CONT. FROM ABOVE: HLA-DPA1*01:02-B1*04:01L HLA-DRB1*16:01L HLA-D QA1*01:03-B1*06:01L HLA-DRB1*04:08L HLA-DQA1*02:01-B1*03:03L HLA -DRB1*15:03L
VYAADPAMHA

SEQ ID NO: 9356 - protein, 10 aa, Severe acute respiratory syndrome coronavirus 2
  REGION 1..10: note = Table B: HLA-DQA1*03:02-B1*03:03L HLA-DQA1*05:01-B1*03:01L HLA-DRB1*04:01L HLA-DRB1*04:03L HLA-DRB1*13:02L HLA-DRB1*13:03L HLA-DRB1*01:03L HLA-DRB1*04:02L HLA-DRB1*04:05L HLA-DQA1*01:02-B1*06:02L HLA-DRB1*01:02L HLA-DRB4*03:01NL
  REGION 1..10: note = CONT. FROM ABOVE: HLA-DRB1*08:04L HLA-DRB1*08:77L HLA-DRB3*02:01 L HLA-DPA1*01:03-B1*03:01L HLA-DPA1*03:01-B1*04:02L HLA-DRB1*14: 01L HLA-DRB1*11:03L HLA-DRB1*11:04L HLA-DRB1*14:02L HLA-DRB1*08: 01L HLA-DRB1*11:01L HLA-DQA1*01-B1*05L HLA-DQA1*05:05-B1*03:19L
  REGION 1..10: note = CONT. FROM ABOVE: HLA-DQA1*05:01-B1*02:01L HLA-DQA1*05:05-B1*03: 116L HLA-DRB1*04:10L HLA-DRB1*09:01L HLA-DPA1*01:03-B1*04:02L HL A-DRB1*12:01L HLA-DRB1*12:02L HLA-DRB3*01:01L HLA-DPA1*03:01-B1* 105:01L HLA-DQA1*03:01-B1*03:02L HLA-DRB1*14:54L
  REGION 1..10: note = CONT. FROM ABOVE: HLA-DQA1*05:05-B1*03:01L HLA-DRB1*14:17L HLA-D PA1*01:02-B1*04:01L HLA-DRB1*10:01L HLA-DRB1*16:01L HLA-DRB1*04: 08L HLA-DRB1*08:03L HLA-DQA1*02:01-B1*03:03L HLA-DRB1*15:03L
YAADPAMHAA

SEQ ID NO: 9357 - protein, 12 aa, Severe acute respiratory syndrome coronavirus 2
  REGION 1..12: note = Table B: HLA-DQA1*03:02-B1*03:03L HLA-DQA1*05:01-B1*03:01L HLA-DRB1*01:03L HLA-DQA1*01:02-B1*06:02L HLA-DQA1*05:05-B1*03:19L HLA-DQA1*05:01-B1*02:01L HLA-DPA1*03:01-B1*105:01L HLA-DQA1*05:05-B1*03:01L
  REGION 1..12: note = CONT. FROM ABOVE: HLA-DQA1*01:03-B1*06:01L HLA-DQA1*02:01-B1*03: 03L
AADPAMHAASGN

SEQ ID NO: 9358 - protein, 11 aa, Severe acute respiratory syndrome coronavirus 2
  REGION 1..11: note = Table B: HLA-DQA1*03:02-B1*03:03L HLA-DQA1*05:01-B1*03:01L HLA-DRB1*04:03L HLA-DRB1*13:03L HLA-DRB1*04:02L HLA-DQA1*01-B1*05L HLA-DQA1*05:01-B1*02:01L HLA-DQA1*03:01-B1*03:02L HLA-DRB1*16:01L
  REGION 1..11: note = CONT. FROM ABOVE: HLA-DQA1*02:01-B1*03:03L
DPAMHAASGNL

SEQ ID NO: 9359 - protein, 10 aa, Severe acute respiratory syndrome coronavirus 2
  REGION 1..10: note = Table B: HLA-DQA1*03:02-B1*03:03L HLA-DQA1*05:01-B1*03:01L HLA-DRB1*13:02L HLA-DRB1*08:77L HLA-DRB3*02:01L HLA-DPA1*03:01-B1*04:02L HLA-DQA1*05:01-B1*02:01L HLA-DRB1*09:01L HLA-DRB1*12:01L HLA-DQA1*03:01-B1*03:02L
  REGION 1..10: note = CONT. FROM ABOVE: HLA-DPA1*01:02-B1*04:01L HLA-DRB1*07:01L HLA-D RB1*16:01L HLA-DQA1*02:01-B1*03:03L HLA-DRB1*15:03L
AMHAASGNLL

SEQ ID NO: 9360 - protein, 10 aa, Severe acute respiratory syndrome coronavirus 2
  REGION 1..10: note = Table B: HLA-DQA1*03:02-B1*03:03L HLA-DQA1*03:01-B1*03:02L
MHAASGNLLL

SEQ ID NO: 9361 - protein, 10 aa, Severe acute respiratory syndrome coronavirus 2
  REGION 1..10: note = Table B: HLA-DQA1*03:02-B1*03:03L HLA-DQA1*05:05-B1*03:19L
FSVAALTNNV

SEQ ID NO: 9362 - protein, 10 aa, Severe acute respiratory syndrome coronavirus 2
  REGION 1..10: note = Table B: HLA-DQA1*03:02-B1*03:03L HLA-DRB1*04:03L HLA-DQA1*03:01-B1*03:02L HLA-DRB1*14:17L HLA-DQA1*02:01-B1*03:03L
SVAALTNNVA

SEQ ID NO: 9363 - protein, 10 aa, Severe acute respiratory syndrome coronavirus 2
  REGION 1..10: note = Table B: HLA-DQA1*03:02-B1*03:03L HLA-DQA1*05:01-B1*03:01L HLA-DRB1*04:03L HLA-DRB1*13:03L HLA-DRB1*01:03L HLA-DRB1*04:02L HLA-DRB1*04:05L HLA-DQA1*01:02-B1*06:02L HLA-DRB1*08:77L HLA-DRB1*14:01L HLA-DRB1*14:02L HLA-DQA1*05:05-B1*03:19L
  REGION 1..10: note = CONT. FROM ABOVE: HLA-DQA1*05:01-B1*02:01L HLA-DRB1*12:01L HLA-D PA1*02:01-B1*13:01L HLA-DPA1*03:01-B1*105:01L HLA-DQA1*03:01-B1* 03:02L HLA-DRB1*14:17L HLA-DRB1*16:01L HLA-DQA1*01:03-B1*06:01L HLA-DQA1*02:01-B1*03:03L HLA-DRB1*15:03L
VAALTNNVAF

SEQ ID NO: 9364 - protein, 11 aa, Severe acute respiratory syndrome coronavirus 2
  REGION 1..11: note = Table B: HLA-DQA1*03:02-B1*03:03L HLA-DQA1*05:01-B1*03:01L HLA-DRB1*01:03L HLA-DRB4*03:01NL HLA-DQA1*01-B1*05L HLA-DPA1*03:01-B1*105:01L HLA-DRB1*16:01L
NNVAFQTVKPG

SEQ ID NO: 9365 - protein, 10 aa, Severe acute respiratory syndrome coronavirus 2
  REGION 1..10: note = Table B: HLA-DQA1*03:02-B1*03:03L HLA-DQA1*05:01-B1*03:01L HLA-DRB1*04:03L HLA-DRB1*13:02L HLA-DRB1*13:03L HLA-DRB1*01:03L HLA-DRB1*04:02L HLA-DRB1*04:05L HLA-DQA1*01:02-B1*06:02L HLA-DRB1*01:02L HLA-DRB4*03:01NL HLA-DRB1*08:77L
  REGION 1..10: note = CONT. FROM ABOVE: HLA-DPA1*01:03-B1*03:01L HLA-DPA1*03:01-B1*04: 02L HLA-DRB1*14:01L HLA-DRB1*11:04L HLA-DRB1*14:02L HLA-DQA1*01: 01-B1*05:01L HLA-DRB1*08:01L HLA-DQA1*01-B1*05L HLA-DQA1*05:05-B 1*03:19L HLA-DQA1*05:01-B1*02:01L HLA-DRB1*04:10L
  REGION 1..10: note = CONT. FROM ABOVE: HLA-DPA1*01:03-B1*04:02L HLA-DRB1*12:01L HLA-D PA1*03:01-B1*105:01L HLA-DQA1*03:01-B1*03:02L HLA-DRB1*14:54L HL A-DQA1*05:05-B1*03:01L HLA-DRB1*14:17L HLA-DPA1*01:02-B1*04:01L HLA-DRB1*10:01L HLA-DRB1*16:01L HLA-DQA1*01:03-B1*06:01L
  REGION 1..10: note = CONT. FROM ABOVE: HLA-DRB1*04:08L HLA-DQA1*02:01-B1*03:03L HLA-D RB1*15:03L
VAFQTVKPGN

SEQ ID NO: 9366 - protein, 10 aa, Severe acute respiratory syndrome coronavirus 2
  REGION 1..10: note = Table B: HLA-DQA1*03:02-B1*03:03L HLA-DQA1*05:01-B1*03:01L HLA-DRB1*04:03L HLA-DRB1*01:03L HLA-DRB1*04:05L HLA-DQA1*01:02-B1*06:02L HLA-DRB1*01:01L HLA-DRB1*01:02L HLA-DRB1*08:77L HLA-DPA1*03:01-B1*04:02L HLA-DRB1*11:03L
  REGION 1..10: note = CONT. FROM ABOVE: HLA-DRB1*14:02L HLA-DQA1*01:01-B1*05:01L HLA-D QA1*05:05-B1*03:19L HLA-DQA1*05:01-B1*02:01L HLA-DRB4*01:01L HLA -DPA1*01:03-B1*04:01L HLA-DRB1*12:01L HLA-DPA1*02:01-B1*13:01M H LA-DPA1*03:01-B1*105:01L HLA-DPA1*01:02-B1*04:01L
  REGION 1..10: note = CONT. FROM ABOVE: HLA-DRB1*16:01L HLA-DQA1*01:03-B1*06:01M HLA-D QA1*02:01-B1*03:03L HLA-DRB1*15:03L
AFQTVKPGNF

SEQ ID NO: 9367 - protein, 10 aa, Severe acute respiratory syndrome coronavirus 2
  REGION 1..10: note = Table B: HLA-DQA1*03:02-B1*03:03L HLA-DQA1*05:01-B1*03:01L HLA-DRB1*04:03L HLA-DRB1*13:02L HLA-DRB1*13:03L HLA-DRB1*01:03L HLA-DRB1*04:02L HLA-DQA1*01:02-B1*06:02L HLA-DRB1*01:02L HLA-DRB4*03:01NL HLA-DRB1*08:77L HLA-DRB3*02:01L
  REGION 1..10: note = CONT. FROM ABOVE: HLA-DPA1*03:01-B1*04:02L HLA-DRB1*14:01L HLA-D QA1*05:05-B1*03:19L HLA-DQA1*05:01-B1*02:01L HLA-DRB1*12:01L HLA -DRB1*12:02L HLA-DPA1*03:01-B1*105:01L HLA-DQA1*03:01-B1*03:02L HLA-DRB1*14:54L HLA-DQA1*05:05-B1*03:01L HLA-DRB1*14:17L
  REGION 1..10: note = CONT. FROM ABOVE: HLA-DPA1*01:02-B1*04:01L HLA-DRB1*07:01L HLA-D RB1*16:01L HLA-DQA1*01:03-B1*06:01L HLA-DQA1*02:01-B1*03:03L HLA -DRB1*15:03L
FQTVKPGNFN

SEQ ID NO: 9368 - protein, 14 aa, Severe acute respiratory syndrome coronavirus 2
  REGION 1..14: note = Table B: HLA-DQA1*03:02-B1*03:03L HLA-DRB1*04:05L HLA-DRB1*01:02L HLA-DQA1*01:03-B1*06:01L
VKPGNFNKDFYDFA

SEQ ID NO: 9369 - protein, 15 aa, Severe acute respiratory syndrome coronavirus 2
  REGION 1..15: note = Table B: HLA-DQA1*03:02-B1*03:03L HLA-DRB1*04:03L HLA-DRB1*13:02L HLA-DRB1*01:03L HLA-DRB1*04:02L HLA-DRB1*04:04L HLA-DRB1*04:05L HLA-DRB1*01:02L HLA-DRB1*08:04L HLA-DPA1*01:03-B1*03:01L HLA-DRB1*14:01L HLA-DRB1*14:02L
  REGION 1..15: note = CONT. FROM ABOVE: HLA-DPA1*01:03-B1*04:02L HLA-DRB1*12:01L HLA-D RB3*01:01L HLA-DPA1*01:03-B1*02:01L HLA-DQA1*01:03-B1*06:01L HLA -DRB1*08:03L HLA-DQA1*02:01-B1*03:03L
KPGNFNKDFYDFAVS

SEQ ID NO: 9370 - protein, 12 aa, Severe acute respiratory syndrome coronavirus 2
  REGION 1..12: note = Table B: HLA-DQA1*03:02-B1*03:03L HLA-DRB1*04:03L HLA-DRB1*04:02L HLA-DRB1*04:05L HLA-DQA1*01:02-B1*06:02L HLA-DQA1*05:01-B1*02:01L HLA-DPA1*02:01-B1*13:01L HLA-DPA1*03:01-B1*105:01L HLA-DPA1*01:02-B1*04:01L
  REGION 1..12: note = CONT. FROM ABOVE: HLA-DRB1*16:01L HLA-DRB1*04:08L
NKDFYDFAVSKG

SEQ ID NO: 9371 - protein, 10 aa, Severe acute respiratory syndrome coronavirus 2
  REGION 1..10: note = Table B: HLA-DQA1*03:02-B1*03:03L HLA-DQA1*05:01-B1*03:01L HLA-DRB1*04:03L HLA-DRB1*01:03L HLA-DRB1*04:05L HLA-DQA1*01:02-B1*06:02L HLA-DRB1*01:01L HLA-DRB1*01:02L HLA-DRB1*08:77L HLA-DPA1*03:01-B1*04:02L HLA-DRB1*14:02L
  REGION 1..10: note = CONT. FROM ABOVE: HLA-DQA1*01:01-B1*05:01L HLA-DRB1*11:01L HLA-D QA1*01-B1*05L HLA-DQA1*05:05-B1*03:19L HLA-DQA1*05:01-B1*02:01L HLA-DRB4*01:01L HLA-DPA1*01:03-B1*04:01L HLA-DQA1*05:05-B1*03:11 6L HLA-DPA1*01:03-B1*04:02L HLA-DRB1*12:01L
  REGION 1..10: note = CONT. FROM ABOVE: HLA-DPA1*02:01-B1*13:01M HLA-DPA1*03:01-B1*105 :01L HLA-DPA1*01:03-B1*104:01L HLA-DPA1*01:02-B1*04:01L HLA-DRB1 *10:01L HLA-DRB1*16:01L HLA-DQA1*01:03-B1*06:01M HLA-DQA1*02:01- B1*03:03L HLA-DRB1*15:03L
FYDFAVSKGF

SEQ ID NO: 9372 - protein, 10 aa, Severe acute respiratory syndrome coronavirus 2
  REGION 1..10: note = Table B: HLA-DQA1*03:02-B1*03:03L HLA-DQA1*05:01-B1*03:01L HLA-DRB1*04:05L HLA-DQA1*01:02-B1*06:02L HLA-DRB1*08:77L HLA-DPA1*03:01-B1*04:02L HLA-DQA1*01-B1*05L HLA-DQA1*05:05-B1*03:19L HLA-DQA1*05:01-B1*02:01L
  REGION 1..10: note = CONT. FROM ABOVE: HLA-DRB4*01:01L HLA-DPA1*01:03-B1*04:01L HLA-D PA1*02:01-B1*13:01L HLA-DPA1*03:01-B1*105:01L HLA-DPA1*01:02-B1* 04:01L HLA-DRB1*16:01L HLA-DQA1*01:03-B1*06:01L HLA-DQA1*02:01-B 1*03:03L HLA-DRB1*15:03L
YDFAVSKGFF

SEQ ID NO: 9373 - protein, 14 aa, Severe acute respiratory syndrome coronavirus 2
  REGION 1..14: note = Table B: HLA-DQA1*03:02-B1*03:03L HLA-DRB1*13:03L HLA-DRB1*08:04L HLA-DPA1*01:03-B1*03:01L HLA-DPA1*03:01-B1*04:02L HLA-DQA1*01:01-B1*05:01L HLA-DQA1*05:05-B1*03:19L HLA-DQA1*05:01-B1*02:01L
  REGION 1..14: note = CONT. FROM ABOVE: HLA-DPA1*01:03-B1*04:02L HLA-DRB3*01:01L HLA-D PA1*02:01-B1*13:01L
DFAVSKGFFKEGSS

SEQ ID NO: 9374 - protein, 13 aa, Severe acute respiratory syndrome coronavirus 2
  REGION 1..13: note = Table B: HLA-DQA1*03:02-B1*03:03L HLA-DRB1*13:03L HLA-DRB1*01:03L HLA-DRB1*04:02L HLA-DRB1*04:05L HLA-DRB1*01:02L HLA-DQA1*01:01-B1*05:01L HLA-DRB1*08:01L HLA-DQA1*05:01-B1*02:01L HLA-DPA1*02:01-B1*13:01L
  REGION 1..13: note = CONT. FROM ABOVE: HLA-DRB1*14:17L HLA-DRB1*16:01L HLA-DQA1*01:03 -B1*06:01L HLA-DRB1*04:08L HLA-DQA1*02:01-B1*03:03L
VSKGFFKEGSSVE

SEQ ID NO: 9375 - protein, 10 aa, Severe acute respiratory syndrome coronavirus 2
  REGION 1..10: note = Table B: HLA-DQA1*03:02-B1*03:03L HLA-DQA1*05:01-B1*03:01L HLA-DRB1*04:03L HLA-DRB1*04:05L HLA-DPA1*03:01-B1*04:02L HLA-DRB1*14:01L HLA-DRB1*14:02L HLA-DQA1*01-B1*05L HLA-DQA1*05:05-B1*03:116L HLA-DPA1*02:01-B1*13:01L
  REGION 1..10: note = CONT. FROM ABOVE: HLA-DQA1*03:01-B1*03:02L HLA-DPA1*01:02-B1*04: 01L HLA-DRB1*16:01L HLA-DQA1*01:03-B1*06:01L HLA-DQA1*02:01-B1*0 3:03L HLA-DRB1*15:03L
FFKEGSSVEL

SEQ ID NO: 9376 - protein, 10 aa, Severe acute respiratory syndrome coronavirus 2
  REGION 1..10: note = Table B: HLA-DQA1*03:02-B1*03:03L HLA-DQA1*05:01-B1*03:01L HLA-DRB1*13:03L HLA-DQA1*01:02-B1*06:02L HLA-DQA1*05:05-B1*03:19L HLA-DQA1*05:01-B1*02:01L HLA-DPA1*01:03-B1*04:01L HLA-DPA1*03:01-B1*105:01L
  REGION 1..10: note = CONT. FROM ABOVE: HLA-DQA1*01:03-B1*06:01L HLA-DQA1*02:01-B1*03: 03L HLA-DRB1*15:03L
EGSSVELKHF

SEQ ID NO: 9377 - protein, 13 aa, Severe acute respiratory syndrome coronavirus 2
  REGION 1..13: note = Table B: HLA-DQA1*03:02-B1*03:03L HLA-DRB1*04:01L HLA-DRB1*04:04L HLA-DQA1*01:02-B1*06:02L HLA-DRB1*08:04L HLA-DPA1*03:01-B1*04:02L HLA-DRB1*14:01L HLA-DRB1*11:04L HLA-DQA1*05:01-B1*02:01L HLA-DRB3*01:01L
  REGION 1..13: note = CONT. FROM ABOVE: HLA-DPA1*02:01-B1*13:01L HLA-DPA1*03:01-B1*105 :01L HLA-DPA1*01:02-B1*04:01L HLA-DRB1*10:01L HLA-DRB1*08:03L HL A-DRB1*15:03L
LKHFFFAQDGNAA

SEQ ID NO: 9378 - protein, 10 aa, Severe acute respiratory syndrome coronavirus 2
  REGION 1..10: note = Table B: HLA-DQA1*03:02-B1*03:03L HLA-DQA1*05:05-B1*03:19L
FFAQDGNAAI

SEQ ID NO: 9379 - protein, 12 aa, Severe acute respiratory syndrome coronavirus 2
  REGION 1..12: note = Table B: HLA-DQA1*03:02-B1*03:03L HLA-DRB1*04:01L HLA-DRB1*04:05L HLA-DRB1*01:02L HLA-DRB1*08:04L HLA-DRB3*02:01L HLA-DRB1*11:03L HLA-DRB1*11:04L HLA-DRB1*11:01L HLA-DRB5*01:01L HLA-DQA1*05:05-B1*03:116L HLA-DRB1*09:01L HLA-DRB1*12:02L
  REGION 1..12: note = CONT. FROM ABOVE: HLA-DPA1*02:01-B1*13:01L HLA-DPA1*03:01-B1*105 :01L HLA-DQA1*03:01-B1*03:02L HLA-DQA1*05:05-B1*03:01L HLA-DPA1* 01:02-B1*04:01L HLA-DQA1*01:03-B1*06:01L HLA-DRB1*04:08L HLA-DRB 1*08:03L
FAQDGNAAISDY

SEQ ID NO: 9380 - protein, 12 aa, Severe acute respiratory syndrome coronavirus 2
  REGION 1..12: note = Table B: HLA-DQA1*03:02-B1*03:03L HLA-DQA1*01:01-B1*05:01L HLA-DQA1*03:01-B1*03:02L HLA-DQA1*05:05-B1*03:01L HLA-DQA1*01:03-B1*06:01L
AQDGNAAISDYD

SEQ ID NO: 9381 - protein, 12 aa, Severe acute respiratory syndrome coronavirus 2
  REGION 1..12: note = Table B: HLA-DQA1*03:02-B1*03:03L
GNAAISDYDYYR

SEQ ID NO: 9382 - protein, 13 aa, Severe acute respiratory syndrome coronavirus 2
  REGION 1..13: note = Table B: HLA-DQA1*03:02-B1*03:03L HLA-DRB1*04:03L HLA-DQA1*01:02-B1*06:02L HLA-DPA1*03:01-B1*04:02L HLA-DRB1*08:01L HLA-DPA1*01:03-B1*04:02L HLA-DPA1*03:01-B1*105:01L HLA-DQA1*03:01-B1*03:02L
  REGION 1..13: note = CONT. FROM ABOVE: HLA-DRB1*16:01L HLA-DQA1*01:03-B1*06:01L HLA-D RB1*04:08L HLA-DQA1*02:01-B1*03:03L
ISDYDYYRYNLPT

SEQ ID NO: 9383 - protein, 10 aa, Severe acute respiratory syndrome coronavirus 2
  REGION 1..10: note = Table B: HLA-DQA1*03:02-B1*03:03L HLA-DQA1*01-B1*05L HLA-DQA1*03:01-B1*03:02L HLA-DRB1*16:01L HLA-DQA1*01:03-B1*06:01L HLA-DQA1*02:01-B1*03:03L
DYYRYNLPTM

SEQ ID NO: 9384 - protein, 14 aa, Severe acute respiratory syndrome coronavirus 2
  REGION 1..14: note = Table B: HLA-DQA1*03:02-B1*03:03L HLA-DRB1*04:01L HLA-DRB1*04:03L HLA-DRB1*04:04L HLA-DRB1*01:01L HLA-DRB1*08:04L HLA-DRB3*02:01L HLA-DRB1*03:01L HLA-DRB1*11:02L HLA-DQA1*05:05-B1*03:19L HLA-DQA1*05:01-B1*02:01L
  REGION 1..14: note = CONT. FROM ABOVE: HLA-DRB1*10:01L
YYRYNLPTMCDIRQ

SEQ ID NO: 9385 - protein, 10 aa, Severe acute respiratory syndrome coronavirus 2
  REGION 1..10: note = Table B: HLA-DQA1*03:02-B1*03:03L HLA-DQA1*05:01-B1*03:01L HLA-DRB1*04:03L HLA-DRB1*13:03L HLA-DRB1*01:03L HLA-DRB1*04:05L HLA-DQA1*01:02-B1*06:02L HLA-DRB1*08:77L HLA-DPA1*01:03-B1*03:01L HLA-DPA1*03:01-B1*04:02L
  REGION 1..10: note = CONT. FROM ABOVE: HLA-DRB1*03:01L HLA-DRB1*11:02L HLA-DRB1*14:02 L HLA-DQA1*01-B1*05L HLA-DQA1*05:05-B1*03:19M HLA-DQA1*05:01-B1* 02:01L HLA-DRB4*01:01L HLA-DPA1*01:03-B1*04:01L HLA-DQA1*05:05-B 1*03:116L HLA-DPA1*01:03-B1*04:02L HLA-DRB1*12:01L
  REGION 1..10: note = CONT. FROM ABOVE: HLA-DPA1*02:01-B1*13:01L HLA-DPA1*03:01-B1*105 :01L HLA-DPA1*01:03-B1*104:01L HLA-DQA1*05:05-B1*03:01L HLA-DPA1 *01:02-B1*04:01L HLA-DRB1*10:01L HLA-DRB1*16:01L HLA-DQA1*01:03- B1*06:01L HLA-DQA1*02:01-B1*03:03L HLA-DRB1*15:03L
LFVVEVVDKY

SEQ ID NO: 9386 - protein, 10 aa, Severe acute respiratory syndrome coronavirus 2
  REGION 1..10: note = Table B: HLA-DQA1*03:02-B1*03:03L HLA-DQA1*05:01-B1*03:01L HLA-DQA1*01:02-B1*06:02L HLA-DPA1*01:03-B1*03:01L HLA-DPA1*03:01-B1*04:02L HLA-DRB1*14:01L HLA-DRB1*14:02L HLA-DQA1*01-B1*05L HLA-DQA1*05:05-B1*03:19L
  REGION 1..10: note = CONT. FROM ABOVE: HLA-DQA1*05:01-B1*02:01L HLA-DRB4*01:01L HLA-D PA1*01:03-B1*04:01L HLA-DPA1*01:03-B1*04:02L HLA-DRB1*12:01L HLA -DPA1*02:01-B1*13:01L HLA-DPA1*03:01-B1*105:01L HLA-DQA1*03:01-B 1*03:02L HLA-DQA1*05:05-B1*03:01L HLA-DPA1*01:02-B1*04:01L
  REGION 1..10: note = CONT. FROM ABOVE: HLA-DRB1*16:01L HLA-DQA1*01:03-B1*06:01L HLA-D QA1*02:01-B1*03:03L HLA-DRB1*15:03L
FVVEVVDKYF

SEQ ID NO: 9387 - protein, 10 aa, Severe acute respiratory syndrome coronavirus 2
  REGION 1..10: note = Table B: HLA-DQA1*03:02-B1*03:03L HLA-DRB1*04:03L HLA-DRB1*04:02L HLA-DQA1*01-B1*05L HLA-DQA1*05:01-B1*02:01L HLA-DPA1*03:01-B1*105:01L HLA-DQA1*03:01-B1*03:02L HLA-DRB1*14:17L HLA-DPA1*01:02-B1*04:01L
  REGION 1..10: note = CONT. FROM ABOVE: HLA-DQA1*01:03-B1*06:01L HLA-DQA1*02:01-B1*03: 03L HLA-DRB1*15:03L
VVEVVDKYFD

SEQ ID NO: 9388 - protein, 13 aa, Severe acute respiratory syndrome coronavirus 2
  REGION 1..13: note = Table B: HLA-DQA1*03:02-B1*03:03L HLA-DQA1*05:01-B1*03:01L HLA-DQA1*01:02-B1*06:02L HLA-DQA1*05:05-B1*03:19L HLA-DQA1*03:01-B1*03:02L HLA-DQA1*05:05-B1*03:01L HLA-DQA1*01:03-B1*06:01L HLA-DQA1*02:01-B1*03:03L
DGGCINANQVIVN

SEQ ID NO: 9389 - protein, 10 aa, Severe acute respiratory syndrome coronavirus 2
  REGION 1..10: note = Table B: HLA-DQA1*03:02-B1*03:03L HLA-DQA1*05:01-B1*03:01L HLA-DRB1*04:03L HLA-DRB1*13:02L HLA-DRB1*13:03L HLA-DRB1*01:03L HLA-DRB1*04:02L HLA-DRB4*03:01NL HLA-DRB1*08:77L HLA-DRB1*14:01L HLA-DQA1*05:01-B1*02:01L HLA-DRB1*12:01L
  REGION 1..10: note = CONT. FROM ABOVE: HLA-DQA1*03:01-B1*03:02L HLA-DRB1*14:54L HLA-D QA1*05:05-B1*03:01L HLA-DRB1*14:17L HLA-DRB1*16:01L HLA-DQA1*01: 03-B1*06:01L HLA-DQA1*02:01-B1*03:03L
INANQVIVNN

SEQ ID NO: 9390 - protein, 10 aa, Severe acute respiratory syndrome coronavirus 2
  REGION 1..10: note = Table B: HLA-DQA1*03:02-B1*03:03L HLA-DQA1*05:01-B1*03:01L HLA-DRB1*13:03L HLA-DQA1*01:02-B1*06:02L HLA-DRB1*01:02L HLA-DPA1*03:01-B1*04:02L HLA-DRB1*14:01L HLA-DRB1*14:02L HLA-DPA1*03:01-B1*105:01L HLA-DQA1*03:01-B1*03:02L
  REGION 1..10: note = CONT. FROM ABOVE: HLA-DPA1*01:02-B1*04:01L HLA-DQA1*02:01-B1*03: 03L HLA-DRB1*15:03L
NANQVIVNNL

SEQ ID NO: 9391 - protein, 10 aa, Severe acute respiratory syndrome coronavirus 2
  REGION 1..10: note = Table B: HLA-DQA1*03:02-B1*03:03L HLA-DQA1*05:01-B1*03:01L HLA-DRB1*04:03L HLA-DRB1*13:03L HLA-DRB1*01:03L HLA-DRB1*04:02L HLA-DRB1*04:05L HLA-DQA1*01:02-B1*06:02L HLA-DRB4*03:01NL HLA-DQA1*01-B1*05L HLA-DQA1*05:01-B1*02:01L HLA-DRB1*04:10L
  REGION 1..10: note = CONT. FROM ABOVE: HLA-DRB1*12:01L HLA-DQA1*03:01-B1*03:02L HLA-D RB1*14:54L HLA-DRB1*14:17L HLA-DRB1*16:01L HLA-DQA1*01:03-B1*06: 01L HLA-DQA1*02:01-B1*03:03L
QVIVNNLDKS

SEQ ID NO: 9392 - protein, 10 aa, Severe acute respiratory syndrome coronavirus 2
  REGION 1..10: note = Table B: HLA-DQA1*03:02-B1*03:03L HLA-DQA1*05:01-B1*03:01L HLA-DRB1*04:03L HLA-DRB1*13:02L HLA-DRB1*13:03L HLA-DRB1*01:03L HLA-DRB1*04:02L HLA-DRB1*04:04L HLA-DRB1*04:05L HLA-DRB1*01:02L HLA-DRB4*03:01NL HLA-DRB1*08:04L HLA-DRB1*08:77L HLA-DRB1*14:01L
  REGION 1..10: note = CONT. FROM ABOVE: HLA-DRB1*11:03L HLA-DRB1*11:04L HLA-DRB1*14:02 L HLA-DQA1*01-B1*05L HLA-DQA1*05:01-B1*02:01L HLA-DRB1*04:10L HL A-DRB1*12:01L HLA-DRB1*12:02L HLA-DQA1*03:01-B1*03:02L HLA-DRB1* 14:54L HLA-DRB1*14:17L HLA-DRB1*10:01L HLA-DRB1*16:01L
  REGION 1..10: note = CONT. FROM ABOVE: HLA-DRB1*04:08L HLA-DRB1*08:03L HLA-DQA1*02:01 -B1*03:03L HLA-DRB1*15:03L
IVNNLDKSAG

SEQ ID NO: 9393 - protein, 10 aa, Severe acute respiratory syndrome coronavirus 2
  REGION 1..10: note = Table B: HLA-DQA1*03:02-B1*03:03L HLA-DQA1*05:01-B1*03:01L HLA-DRB1*04:03L HLA-DRB1*13:03L HLA-DRB1*08:77L HLA-DPA1*01:03-B1*03:01L HLA-DQA1*01-B1*05L HLA-DQA1*05:05-B1*03:19L HLA-DQA1*05:01-B1*02:01L
  REGION 1..10: note = CONT. FROM ABOVE: HLA-DRB1*12:01L HLA-DQA1*03:01-B1*03:02L HLA-D RB1*16:01L HLA-DQA1*02:01-B1*03:03L HLA-DRB1*15:03L
NLDKSAGFPF

SEQ ID NO: 9394 - protein, 10 aa, Severe acute respiratory syndrome coronavirus 2
  REGION 1..10: note = Table B: HLA-DQA1*03:02-B1*03:03L HLA-DQA1*05:01-B1*03:01L HLA-DRB1*04:03L HLA-DRB1*13:02L HLA-DRB1*01:03L HLA-DRB4*03:01NL HLA-DRB1*08:77L HLA-DQA1*05:01-B1*02:01L HLA-DRB1*12:01L HLA-DQA1*03:01-B1*03:02L HLA-DPA1*01:02-B1*04:01L
  REGION 1..10: note = CONT. FROM ABOVE: HLA-DRB1*16:01L HLA-DQA1*02:01-B1*03:03L
LDKSAGFPFN

SEQ ID NO: 9395 - protein, 17 aa, Severe acute respiratory syndrome coronavirus 2
  REGION 1..17: note = Table B: HLA-DQA1*03:02-B1*03:03L HLA-DPA1*03:01-B1*04:02L HLA-DQA1*05:01-B1*02:01L
FPFNKWGKARLYYDSMS

SEQ ID NO: 9396 - protein, 13 aa, Severe acute respiratory syndrome coronavirus 2
  REGION 1..13: note = Table B: HLA-DQA1*03:02-B1*03:03L HLA-DRB1*13:03L HLA-DRB1*01:03L HLA-DRB1*04:02L HLA-DQA1*01:02-B1*06:02L HLA-DRB4*03:01NL HLA-DPA1*03:01-B1*04:02L HLA-DRB1*08:01L HLA-DRB1*12:01L HLA-DPA1*02:01-B1*13:01L HLA-DRB1*14:17L
  REGION 1..13: note = CONT. FROM ABOVE: HLA-DRB1*16:01L HLA-DRB1*04:08L HLA-DQA1*02:01 -B1*03:03L HLA-DRB1*15:03L
ARLYYDSMSYEDQ

SEQ ID NO: 9397 - protein, 10 aa, Severe acute respiratory syndrome coronavirus 2
  REGION 1..10: note = Table B: HLA-DQA1*03:02-B1*03:03L HLA-DQA1*01-B1*05L HLA-DQA1*05:01-B1*02:01L HLA-DQA1*03:01-B1*03:02L
SMSYEDQDAL

SEQ ID NO: 9398 - protein, 10 aa, Severe acute respiratory syndrome coronavirus 2
  REGION 1..10: note = Table B: HLA-DQA1*03:02-B1*03:03L HLA-DRB1*04:03L HLA-DRB1*13:03L HLA-DRB1*04:05L HLA-DQA1*01:02-B1*06:02L HLA-DRB1*14:02L HLA-DQA1*01-B1*05L HLA-DQA1*05:05-B1*03:19L HLA-DQA1*05:01-B1*02:01L HLA-DPA1*02:01-B1*13:01L
  REGION 1..10: note = CONT. FROM ABOVE: HLA-DPA1*03:01-B1*105:01L HLA-DQA1*01:03-B1*06 :01L HLA-DQA1*02:01-B1*03:03L HLA-DRB1*15:03L
MSYEDQDALF

SEQ ID NO: 9399 - protein, 10 aa, Severe acute respiratory syndrome coronavirus 2
  REGION 1..10: note = Table B: HLA-DQA1*03:02-B1*03:03L HLA-DQA1*05:01-B1*03:01L HLA-DRB1*13:03L HLA-DQA1*01:02-B1*06:02L HLA-DRB4*03:01NL HLA-DRB1*08:77M HLA-DPA1*01:03-B1*03:01M HLA-DPA1*03:01-B1*04:02L HLA-DRB1*03:01M HLA-DRB1*11:02M
  REGION 1..10: note = CONT. FROM ABOVE: HLA-DQA1*01-B1*05M HLA-DQA1*05:05-B1*03:19H HL A-DQA1*05:01-B1*02:01M HLA-DRB4*01:01M HLA-DPA1*01:03-B1*04:01M HLA-DQA1*05:05-B1*03:116L HLA-DPA1*01:03-B1*04:02L HLA-DRB1*12:0 1L HLA-DPA1*01:03-B1*104:01M HLA-DPA1*01:02-B1*04:01L
  REGION 1..10: note = CONT. FROM ABOVE: HLA-DRB1*10:01M HLA-DRB1*16:01M HLA-DRB1*15:03 L
YEDQDALFAY

SEQ ID NO: 9400 - protein, 11 aa, Severe acute respiratory syndrome coronavirus 2
  REGION 1..11: note = Table B: HLA-DQA1*03:02-B1*03:03L HLA-DQA1*05:01-B1*03:01L HLA-DRB1*04:01L HLA-DRB1*13:02L HLA-DRB1*04:04L HLA-DRB1*04:05L HLA-DQA1*01:02-B1*06:02L HLA-DRB1*01:01L HLA-DRB1*08:04L HLA-DRB1*08:77L HLA-DRB3*02:01L HLA-DPA1*01:03-B1*03:01L
  REGION 1..11: note = CONT. FROM ABOVE: HLA-DRB1*03:01L HLA-DRB1*11:03L HLA-DRB1*11:04 L HLA-DRB1*14:02L HLA-DRB1*11:01L HLA-DQA1*05:05-B1*03:19L HLA-D QA1*05:01-B1*02:01L HLA-DPA1*01:03-B1*04:01L HLA-DRB1*04:10L HLA -DPA1*01:03-B1*04:02L HLA-DRB1*12:02L HLA-DRB3*01:01L
  REGION 1..11: note = CONT. FROM ABOVE: HLA-DPA1*02:01-B1*13:01L HLA-DPA1*03:01-B1*105 :01L HLA-DPA1*01:03-B1*02:01L HLA-DQA1*05:05-B1*03:01L HLA-DRB1* 07:01L HLA-DRB1*10:01L HLA-DQA1*01:03-B1*06:01L HLA-DRB1*08:02L HLA-DRB1*08:03L HLA-DRB1*15:03L
FAYTKRNVIPT

SEQ ID NO: 9401 - protein, 13 aa, Severe acute respiratory syndrome coronavirus 2
  REGION 1..13: note = Table B: HLA-DQA1*03:02-B1*03:03L HLA-DRB1*13:02L HLA-DRB1*08:04L HLA-DPA1*01:03-B1*03:01L HLA-DQA1*05:05-B1*03:19L HLA-DPA1*03:01-B1*105:01L HLA-DQA1*05:05-B1*03:01L HLA-DQA1*01:03-B1*06:01L
  REGION 1..13: note = CONT. FROM ABOVE: HLA-DRB1*15:03L
AYTKRNVIPTITQ

SEQ ID NO: 9402 - protein, 10 aa, Severe acute respiratory syndrome coronavirus 2
  REGION 1..10: note = Table B: HLA-DQA1*03:02-B1*03:03L HLA-DQA1*05:01-B1*03:01L HLA-DQA1*03:01-B1*03:02L HLA-DQA1*02:01-B1*03:03L
RNVIPTITQM

SEQ ID NO: 9403 - protein, 10 aa, Severe acute respiratory syndrome coronavirus 2
  REGION 1..10: note = Table B: HLA-DQA1*03:02-B1*03:03L HLA-DQA1*05:01-B1*03:01L HLA-DQA1*03:01-B1*03:02L HLA-DQA1*02:01-B1*03:03L HLA-DRB1*15:03L
VIPTITQMNL

SEQ ID NO: 9404 - protein, 13 aa, Severe acute respiratory syndrome coronavirus 2
  REGION 1..13: note = Table B: HLA-DQA1*03:02-B1*03:03L HLA-DRB1*11:03L HLA-DPA1*03:01-B1*105:01L HLA-DQA1*05:05-B1*03:01L HLA-DRB1*10:01L
MNLKYAISAKNRA

SEQ ID NO: 9405 - protein, 10 aa, Severe acute respiratory syndrome coronavirus 2
  REGION 1..10: note = Table B: HLA-DQA1*03:02-B1*03:03L HLA-DQA1*05:01-B1*03:01L HLA-DRB1*01:03L HLA-DQA1*05:05-B1*03:19L HLA-DQA1*03:01-B1*03:02L HLA-DRB1*16:01L HLA-DQA1*01:03-B1*06:01L HLA-DQA1*02:01-B1*03:03L
RARTVAGVSI

SEQ ID NO: 9406 - protein, 10 aa, Severe acute respiratory syndrome coronavirus 2
  REGION 1..10: note = Table B: HLA-DQA1*03:02-B1*03:03L HLA-DQA1*05:01-B1*03:01L HLA-DRB1*04:03L HLA-DRB1*13:02L HLA-DRB1*13:03L HLA-DRB1*01:03L HLA-DRB1*04:02L HLA-DRB1*04:05L HLA-DQA1*01:02-B1*06:02L HLA-DRB1*01:02L HLA-DRB4*03:01NL HLA-DRB1*08:77L HLA-DRB3*02:01L
  REGION 1..10: note = CONT. FROM ABOVE: HLA-DPA1*01:03-B1*03:01L HLA-DPA1*03:01-B1*04: 02L HLA-DRB1*14:01L HLA-DRB1*14:02L HLA-DQA1*01-B1*05L HLA-DQA1* 05:05-B1*03:19L HLA-DQA1*05:01-B1*02:01L HLA-DPA1*01:03-B1*04:01 L HLA-DQA1*05:05-B1*03:116L HLA-DRB1*09:01L HLA-DRB1*12:01L
  REGION 1..10: note = CONT. FROM ABOVE: HLA-DPA1*02:01-B1*13:01L HLA-DPA1*03:01-B1*105 :01L HLA-DQA1*03:01-B1*03:02L HLA-DPA1*01:03-B1*104:01L HLA-DPA1 *01:02-B1*04:01L HLA-DRB1*07:01L HLA-DRB1*10:01L HLA-DRB1*16:01L HLA-DQA1*01:03-B1*06:01L HLA-DQA1*02:01-B1*03:03L
  REGION 1..10: note = CONT. FROM ABOVE: HLA-DRB1*15:03L
SIAATRGATV

SEQ ID NO: 9407 - protein, 12 aa, Severe acute respiratory syndrome coronavirus 2
  REGION 1..12: note = Table B: HLA-DQA1*03:02-B1*03:03L HLA-DRB1*04:03L HLA-DRB1*13:02L HLA-DRB1*13:03L HLA-DRB1*01:03L HLA-DRB1*04:02L HLA-DRB1*04:05L HLA-DQA1*01:02-B1*06:02L HLA-DRB1*01:01L HLA-DRB1*01:02L HLA-DRB4*03:01NL HLA-DRB1*08:04L HLA-DRB1*08:77L
  REGION 1..12: note = CONT. FROM ABOVE: HLA-DRB3*02:01L HLA-DPA1*01:03-B1*03:01L HLA-D RB1*14:01L HLA-DRB1*11:03L HLA-DRB1*11:04L HLA-DRB1*14:02L HLA-D QA1*05:01-B1*02:01L HLA-DRB1*09:01L HLA-DRB1*12:01L HLA-DRB1*12: 02L HLA-DPA1*03:01-B1*105:01L HLA-DRB1*14:54L
  REGION 1..12: note = CONT. FROM ABOVE: HLA-DQA1*05:05-B1*03:01L HLA-DRB1*14:17L HLA-D RB1*07:01L HLA-DRB1*10:01L HLA-DQA1*01:03-B1*06:01L HLA-DRB1*04: 08L HLA-DRB1*15:03L
IAATRGATVVIG

SEQ ID NO: 9408 - protein, 11 aa, Severe acute respiratory syndrome coronavirus 2
  REGION 1..11: note = Table B: HLA-DQA1*03:02-B1*03:03L HLA-DQA1*05:01-B1*03:01L HLA-DRB1*04:03L HLA-DQA1*01:02-B1*06:02L HLA-DQA1*05:05-B1*03:19L HLA-DQA1*03:01-B1*03:02L HLA-DQA1*05:05-B1*03:01L HLA-DRB1*14:17L
TRGATVVIGTS

SEQ ID NO: 9409 - protein, 10 aa, Severe acute respiratory syndrome coronavirus 2
  REGION 1..10: note = Table B: HLA-DQA1*03:02-B1*03:03L HLA-DQA1*05:01-B1*03:01L HLA-DRB1*04:03L HLA-DRB1*13:02L HLA-DRB1*13:03L HLA-DRB1*01:03L HLA-DRB1*04:02L HLA-DQA1*01:02-B1*06:02L HLA-DRB4*03:01NL HLA-DQA1*01:01-B1*05:01L HLA-DRB1*08:01L HLA-DRB5*01:01L
  REGION 1..10: note = CONT. FROM ABOVE: HLA-DQA1*05:05-B1*03:19L HLA-DPA1*01:03-B1*04: 02L HLA-DRB1*12:01L HLA-DQA1*03:01-B1*03:02M HLA-DQA1*05:05-B1*0 3:01L HLA-DRB1*14:17L HLA-DRB1*16:01L HLA-DQA1*01:03-B1*06:01L H LA-DQA1*02:01-B1*03:03L
GATVVIGTSK

SEQ ID NO: 9410 - protein, 10 aa, Severe acute respiratory syndrome coronavirus 2
  REGION 1..10: note = Table B: HLA-DQA1*03:02-B1*03:03L HLA-DQA1*05:01-B1*03:01L HLA-DRB1*04:03L HLA-DRB1*13:02L HLA-DRB1*13:03L HLA-DRB1*01:03L HLA-DRB1*04:05L HLA-DQA1*01:02-B1*06:02M HLA-DRB1*01:01L HLA-DRB4*03:01NL HLA-DRB1*08:77L HLA-DPA1*01:03-B1*03:01L
  REGION 1..10: note = CONT. FROM ABOVE: HLA-DPA1*03:01-B1*04:02L HLA-DRB1*03:01L HLA-D RB1*14:01L HLA-DRB1*14:02L HLA-DRB5*01:01L HLA-DQA1*01-B1*05L HL A-DQA1*05:05-B1*03:19L HLA-DQA1*05:01-B1*02:01L HLA-DRB4*01:01L HLA-DPA1*01:03-B1*04:01L HLA-DQA1*05:05-B1*03:116L
  REGION 1..10: note = CONT. FROM ABOVE: HLA-DPA1*01:03-B1*04:02L HLA-DRB1*12:01L HLA-D PA1*02:01-B1*13:01L HLA-DPA1*03:01-B1*105:01M HLA-DQA1*03:01-B1* 03:02L HLA-DPA1*01:03-B1*104:01L HLA-DQA1*05:05-B1*03:01L HLA-DP A1*01:02-B1*04:01L HLA-DRB1*07:01L HLA-DRB1*10:01L
  REGION 1..10: note = CONT. FROM ABOVE: HLA-DRB1*16:01L HLA-DQA1*01:03-B1*06:01L HLA-D RB1*08:02L HLA-DQA1*02:01-B1*03:03M HLA-DRB1*15:03L
ATVVIGTSKF

SEQ ID NO: 9411 - protein, 10 aa, Severe acute respiratory syndrome coronavirus 2
  REGION 1..10: note = Table B: HLA-DQA1*03:02-B1*03:03L HLA-DQA1*05:01-B1*03:01L HLA-DRB1*04:03L HLA-DRB1*13:02L HLA-DRB1*13:03L HLA-DRB1*01:03L HLA-DQA1*01:02-B1*06:02M HLA-DRB4*03:01NL HLA-DRB1*08:77L HLA-DPA1*01:03-B1*03:01L HLA-DPA1*03:01-B1*04:02L
  REGION 1..10: note = CONT. FROM ABOVE: HLA-DRB1*03:01L HLA-DRB1*14:01L HLA-DRB1*14:02 L HLA-DQA1*01-B1*05L HLA-DQA1*05:05-B1*03:19L HLA-DQA1*05:01-B1* 02:01L HLA-DRB4*01:01L HLA-DPA1*01:03-B1*04:01L HLA-DQA1*05:05-B 1*03:116L HLA-DPA1*01:03-B1*04:02L HLA-DRB1*12:01L
  REGION 1..10: note = CONT. FROM ABOVE: HLA-DPA1*02:01-B1*13:01L HLA-DPA1*03:01-B1*105 :01L HLA-DPA1*01:03-B1*104:01L HLA-DQA1*05:05-B1*03:01L HLA-DPA1 *01:02-B1*04:01L HLA-DRB1*10:01L HLA-DRB1*16:01L HLA-DQA1*01:03- B1*06:01L HLA-DRB1*08:02L HLA-DQA1*02:01-B1*03:03L
  REGION 1..10: note = CONT. FROM ABOVE: HLA-DRB1*15:03L
TVVIGTSKFY

SEQ ID NO: 9412 - protein, 12 aa, Severe acute respiratory syndrome coronavirus 2
  REGION 1..12: note = Table B: HLA-DQA1*03:02-B1*03:03L HLA-DRB1*04:03L HLA-DRB1*01:02L HLA-DQA1*05:05-B1*03:19L HLA-DQA1*03:01-B1*03:02L HLA-DRB1*04:08L
VIGTSKFYGGWH

SEQ ID NO: 9413 - protein, 12 aa, Severe acute respiratory syndrome coronavirus 2
  REGION 1..12: note = Table B: HLA-DQA1*03:02-B1*03:03L HLA-DQA1*05:05-B1*03:19L HLA-DQA1*03:01-B1*03:02L
IGTSKFYGGWHN

SEQ ID NO: 9414 - protein, 15 aa, Severe acute respiratory syndrome coronavirus 2
  REGION 1..15: note = Table B: HLA-DQA1*03:02-B1*03:03L HLA-DQA1*05:01-B1*03:01L HLA-DRB1*01:03L HLA-DRB1*04:05L HLA-DRB3*02:01L HLA-DPA1*01:03-B1*03:01L HLA-DRB1*11:02L HLA-DRB1*14:02L HLA-DPA1*01:03-B1*04:01L HLA-DPA1*01:03-B1*04:02L
  REGION 1..15: note = CONT. FROM ABOVE: HLA-DQA1*03:01-B1*03:02L HLA-DPA1*01:03-B1*104 :01L HLA-DQA1*05:05-B1*03:01L HLA-DRB1*08:02L HLA-DRB1*08:03L
GGWHNMLKTVYSDVE

SEQ ID NO: 9415 - protein, 10 aa, Severe acute respiratory syndrome coronavirus 2
  REGION 1..10: note = Table B: HLA-DQA1*03:02-B1*03:03L HLA-DQA1*05:01-B1*03:01L HLA-DRB1*04:03L HLA-DRB1*13:02L HLA-DRB1*13:03L HLA-DRB1*01:03L HLA-DRB1*04:02L HLA-DRB1*04:04L HLA-DRB1*04:05L HLA-DQA1*01:02-B1*06:02L HLA-DRB1*01:02L HLA-DRB4*03:01NL
  REGION 1..10: note = CONT. FROM ABOVE: HLA-DRB1*08:77L HLA-DRB3*02:01L HLA-DPA1*01:03 -B1*03:01L HLA-DRB1*14:01L HLA-DRB1*11:04L HLA-DRB1*14:02L HLA-D QA1*01:01-B1*05:01L HLA-DRB1*08:01L HLA-DRB5*01:01L HLA-DQA1*01- B1*05M HLA-DQA1*05:05-B1*03:19L HLA-DQA1*05:01-B1*02:01L
  REGION 1..10: note = CONT. FROM ABOVE: HLA-DRB1*04:10L HLA-DPA1*01:03-B1*04:02L HLA-D RB1*12:01L HLA-DRB1*12:02L HLA-DPA1*03:01-B1*105:01L HLA-DQA1*03 :01-B1*03:02L HLA-DRB1*14:54L HLA-DQA1*05:05-B1*03:01L HLA-DRB1* 14:17L HLA-DPA1*01:02-B1*04:01L HLA-DRB1*10:01L HLA-DRB1*16:01L
  REGION 1..10: note = CONT. FROM ABOVE: HLA-DQA1*01:03-B1*06:01L HLA-DRB1*04:08L HLA-D RB1*08:03L HLA-DQA1*02:01-B1*03:03L HLA-DRB1*15:03L
TVYSDVENPH

SEQ ID NO: 9416 - protein, 10 aa, Severe acute respiratory syndrome coronavirus 2
  REGION 1..10: note = Table B: HLA-DQA1*03:02-B1*03:03M HLA-DQA1*05:01-B1*03:01M HLA-DRB1*04:01L HLA-DRB1*04:03L HLA-DRB1*13:02L HLA-DRB1*13:03L HLA-DRB1*01:03M HLA-DRB1*04:02L HLA-DRB1*04:04L HLA-DRB1*04:05M HLA-DQA1*01:02-B1*06:02L HLA-DRB1*01:01L HLA-DRB1*01:02L
  REGION 1..10: note = CONT. FROM ABOVE: HLA-DRB4*03:01NL HLA-DRB1*08:77L HLA-DRB3*02:0 1L HLA-DPA1*01:03-B1*03:01L HLA-DPA1*03:01-B1*04:02M HLA-DRB1*03 :01L HLA-DRB1*14:01L HLA-DRB1*11:02L HLA-DRB1*11:03L HLA-DRB1*11 :04L HLA-DRB1*14:02M HLA-DQA1*01:01-B1*05:01L HLA-DRB1*08:01L
  REGION 1..10: note = CONT. FROM ABOVE: HLA-DRB1*11:01L HLA-DRB5*01:01L HLA-DQA1*01-B1 *05L HLA-DQA1*05:05-B1*03:19L HLA-DQA1*05:01-B1*02:01L HLA-DRB4* 01:01L HLA-DPA1*01:03-B1*04:01L HLA-DQA1*05:05-B1*03:116M HLA-DR B1*09:01M HLA-DPA1*01:03-B1*04:02L HLA-DRB1*12:01L
  REGION 1..10: note = CONT. FROM ABOVE: HLA-DPA1*02:01-B1*13:01M HLA-DPA1*03:01-B1*105 :01M HLA-DQA1*03:01-B1*03:02M HLA-DPA1*01:03-B1*104:01L HLA-DQA1 *05:05-B1*03:01L HLA-DPA1*01:02-B1*04:01L HLA-DRB1*07:01L HLA-DR B1*10:01L HLA-DRB1*16:01M HLA-DQA1*01:03-B1*06:01M
  REGION 1..10: note = CONT. FROM ABOVE: HLA-DRB1*08:02L HLA-DRB1*08:03M HLA-DQA1*02:01 -B1*03:03M HLA-DRB1*15:03M
VYSDVENPHL

SEQ ID NO: 9417 - protein, 10 aa, Severe acute respiratory syndrome coronavirus 2
  REGION 1..10: note = Table B: HLA-DQA1*03:02-B1*03:03L HLA-DQA1*05:01-B1*03:01L HLA-DRB1*13:03L HLA-DRB1*08:77L HLA-DPA1*01:03-B1*03:01L HLA-DPA1*03:01-B1*04:02L HLA-DRB1*14:02L HLA-DQA1*01-B1*05L HLA-DQA1*05:05-B1*03:19L HLA-DQA1*05:01-B1*02:01L
  REGION 1..10: note = CONT. FROM ABOVE: HLA-DRB1*09:01L HLA-DQA1*03:01-B1*03:02L HLA-D PA1*01:03-B1*104:01L HLA-DRB1*10:01L HLA-DRB1*16:01L HLA-DQA1*02 :01-B1*03:03L HLA-DRB1*15:03L
YSDVENPHLM

SEQ ID NO: 9418 - protein, 14 aa, Severe acute respiratory syndrome coronavirus 2
  REGION 1..14: note = Table B: HLA-DQA1*03:02-B1*03:03L HLA-DRB1*01:03L HLA-DRB1*04:05L HLA-DRB1*01:02L HLA-DRB1*12:01L HLA-DQA1*05:05-B1*03:01L HLA-DRB1*04:08L
DVENPHLMGWDYPK

SEQ ID NO: 9419 - protein, 14 aa, Severe acute respiratory syndrome coronavirus 2
  REGION 1..14: note = Table B: HLA-DQA1*03:02-B1*03:03L HLA-DQA1*05:01-B1*03:01L HLA-DRB1*01:03L HLA-DRB1*04:04L HLA-DQA1*05:05-B1*03:19L HLA-DPA1*01:03-B1*04:02L HLA-DQA1*03:01-B1*03:02L HLA-DRB1*07:01L HLA-DRB1*16:01L HLA-DRB1*04:08L
FYRLANECAQVLSE

SEQ ID NO: 9420 - protein, 11 aa, Severe acute respiratory syndrome coronavirus 2
  REGION 1..11: note = Table B: HLA-DQA1*03:02-B1*03:03L HLA-DQA1*05:01-B1*03:01L HLA-DRB1*13:03L HLA-DRB4*03:01NL
GSLYVKPGGTS

SEQ ID NO: 9421 - protein, 14 aa, Severe acute respiratory syndrome coronavirus 2
  REGION 1..14: note = Table B: HLA-DQA1*03:02-B1*03:03L HLA-DRB1*01:03L HLA-DQA1*01:02-B1*06:02L HLA-DRB1*01:02L HLA-DRB1*04:08L
SLYVKPGGTSSGDA

SEQ ID NO: 9422 - protein, 12 aa, Severe acute respiratory syndrome coronavirus 2
  REGION 1..12: note = Table B: HLA-DQA1*03:02-B1*03:03L HLA-DQA1*05:01-B1*03:01L HLA-DQA1*05:05-B1*03:19L HLA-DQA1*03:01-B1*03:02L HLA-DQA1*05:05-B1*03:01L HLA-DQA1*02:01-B1*03:03L
VKPGGTSSGDAT

SEQ ID NO: 9423 - protein, 11 aa, Severe acute respiratory syndrome coronavirus 2
  REGION 1..11: note = Table B: HLA-DQA1*03:02-B1*03:03L HLA-DRB4*03:01NL HLA-DPA1*03:01-B1*04:02L HLA-DRB4*01:01L HLA-DRB1*12:01L HLA-DPA1*01:03-B1*104:01L HLA-DRB1*08:02L
GTSSGDATTAY

SEQ ID NO: 9424 - protein, 12 aa, Severe acute respiratory syndrome coronavirus 2
  REGION 1..12: note = Table B: HLA-DQA1*03:02-B1*03:03L HLA-DQA1*03:01-B1*03:02L HLA-DQA1*05:05-B1*03:01L HLA-DQA1*01:03-B1*06:01L
TSSGDATTAYAN

SEQ ID NO: 9425 - protein, 13 aa, Severe acute respiratory syndrome coronavirus 2
  REGION 1..13: note = Table B: HLA-DQA1*03:02-B1*03:03L HLA-DQA1*05:01-B1*02:01L HLA-DQA1*01:03-B1*06:01L HLA-DQA1*02:01-B1*03:03L
SSGDATTAYANSV

SEQ ID NO: 9426 - protein, 10 aa, Severe acute respiratory syndrome coronavirus 2
  REGION 1..10: note = Table B: HLA-DQA1*03:02-B1*03:03L HLA-DQA1*05:01-B1*03:01L HLA-DRB1*13:03L HLA-DQA1*01:02-B1*06:02L HLA-DQA1*05:05-B1*03:19L HLA-DQA1*05:01-B1*02:01L HLA-DPA1*03:01-B1*105:01L HLA-DQA1*03:01-B1*03:02L
  REGION 1..10: note = CONT. FROM ABOVE: HLA-DQA1*05:05-B1*03:01L HLA-DQA1*01:03-B1*06: 01L HLA-DQA1*02:01-B1*03:03L HLA-DRB1*15:03L
ATTAYANSVF

SEQ ID NO: 9427 - protein, 10 aa, Severe acute respiratory syndrome coronavirus 2
  REGION 1..10: note = Table B: HLA-DQA1*03:02-B1*03:03L HLA-DQA1*05:01-B1*03:01L HLA-DQA1*01:02-B1*06:02L HLA-DQA1*05:05-B1*03:19L HLA-DQA1*05:01-B1*02:01L HLA-DPA1*03:01-B1*105:01L HLA-DQA1*03:01-B1*03:02L HLA-DQA1*05:05-B1*03:01L
  REGION 1..10: note = CONT. FROM ABOVE: HLA-DQA1*01:03-B1*06:01L HLA-DQA1*02:01-B1*03: 03L
TTAYANSVFN

SEQ ID NO: 9428 - protein, 10 aa, Severe acute respiratory syndrome coronavirus 2
  REGION 1..10: note = Table B: HLA-DQA1*03:02-B1*03:03L HLA-DQA1*01:02-B1*06:02L HLA-DQA1*05:05-B1*03:19L HLA-DPA1*02:01-B1*13:01L HLA-DQA1*01:03-B1*06:01L HLA-DRB1*15:03L
TAYANSVFNI

SEQ ID NO: 9429 - protein, 13 aa, Severe acute respiratory syndrome coronavirus 2
  REGION 1..13: note = Table B: HLA-DQA1*03:02-B1*03:03L HLA-DRB1*01:03L HLA-DRB1*04:02L HLA-DRB1*04:04L HLA-DRB1*04:05L HLA-DRB4*03:01NL HLA-DPA1*01:03-B1*03:01L HLA-DRB1*14:01L HLA-DQA1*05:01-B1*02:01L HLA-DRB1*04:10L
  REGION 1..13: note = CONT. FROM ABOVE: HLA-DQA1*03:01-B1*03:02L HLA-DPA1*01:03-B1*104 :01L HLA-DRB1*10:01L
NSVFNICQAVTAN

SEQ ID NO: 9430 - protein, 12 aa, Severe acute respiratory syndrome coronavirus 2
  REGION 1..12: note = Table B: HLA-DQA1*03:02-B1*03:03L HLA-DRB1*04:02L HLA-DRB1*01:02L HLA-DPA1*01:03-B1*03:01L HLA-DQA1*05:05-B1*03:19L HLA-DRB1*12:01L HLA-DPA1*03:01-B1*105:01L HLA-DRB1*16:01L HLA-DRB1*04:08L
  REGION 1..12: note = CONT. FROM ABOVE: HLA-DRB1*15:03L
FNICQAVTANVN

SEQ ID NO: 9431 - protein, 10 aa, Severe acute respiratory syndrome coronavirus 2
  REGION 1..10: note = Table B: HLA-DQA1*03:02-B1*03:03L HLA-DQA1*05:01-B1*03:01L HLA-DRB1*13:03L HLA-DQA1*05:01-B1*02:01L HLA-DPA1*03:01-B1*105:01L HLA-DQA1*03:01-B1*03:02L HLA-DQA1*02:01-B1*03:03L
QAVTANVNAL

SEQ ID NO: 9432 - protein, 10 aa, Severe acute respiratory syndrome coronavirus 2
  REGION 1..10: note = Table B: HLA-DQA1*03:02-B1*03:03L HLA-DQA1*05:01-B1*02:01L HLA-DQA1*03:01-B1*03:02L HLA-DQA1*01:03-B1*06:01L HLA-DQA1*02:01-B1*03:03L
AVTANVNALL

SEQ ID NO: 9433 - protein, 10 aa, Severe acute respiratory syndrome coronavirus 2
  REGION 1..10: note = Table B: HLA-DQA1*03:02-B1*03:03M HLA-DQA1*05:01-B1*03:01L HLA-DQA1*01:02-B1*06:02L HLA-DRB1*01:02L HLA-DRB1*08:77L HLA-DPA1*03:01-B1*04:02L HLA-DRB1*14:01L HLA-DRB1*14:02L HLA-DQA1*05:05-B1*03:19L HLA-DQA1*05:01-B1*02:01L
  REGION 1..10: note = CONT. FROM ABOVE: HLA-DPA1*01:03-B1*04:01L HLA-DQA1*05:05-B1*03: 116L HLA-DRB1*09:01L HLA-DRB1*12:01L HLA-DPA1*02:01-B1*13:01L HL A-DPA1*03:01-B1*105:01L HLA-DQA1*03:01-B1*03:02L HLA-DPA1*01:03- B1*104:01L HLA-DPA1*01:02-B1*04:01L HLA-DRB1*07:01L
  REGION 1..10: note = CONT. FROM ABOVE: HLA-DRB1*10:01L HLA-DRB1*16:01L HLA-DQA1*01:03 -B1*06:01L HLA-DRB1*08:03L HLA-DQA1*02:01-B1*03:03L HLA-DRB1*15: 03L
ALLSTDGNKI

SEQ ID NO: 9434 - protein, 10 aa, Severe acute respiratory syndrome coronavirus 2
  REGION 1..10: note = Table B: HLA-DQA1*03:02-B1*03:03L HLA-DRB1*04:03L HLA-DRB1*13:02L HLA-DRB4*03:01NL HLA-DRB1*08:77L HLA-DRB3*02:01L HLA-DQA1*05:01-B1*02:01L HLA-DRB1*12:01L HLA-DRB1*14:17L HLA-DRB1*07:01L HLA-DRB1*16:01L HLA-DQA1*02:01-B1*03:03L
  REGION 1..10: note = CONT. FROM ABOVE: HLA-DRB1*15:03L
LLSTDGNKIA

SEQ ID NO: 9435 - protein, 12 aa, Severe acute respiratory syndrome coronavirus 2
  REGION 1..12: note = Table B: HLA-DQA1*03:02-B1*03:03L HLA-DPA1*02:01-B1*13:01L HLA-DPA1*03:01-B1*105:01L
LSTDGNKIADKY

SEQ ID NO: 9436 - protein, 14 aa, Severe acute respiratory syndrome coronavirus 2
  REGION 1..14: note = Table B: HLA-DQA1*03:02-B1*03:03L HLA-DRB4*03:01NL HLA-DQA1*05:05-B1*03:116L HLA-DPA1*01:03-B1*104:01L HLA-DRB1*15:01L
ADKYVRNLQHRLYE

SEQ ID NO: 9437 - protein, 13 aa, Severe acute respiratory syndrome coronavirus 2
  REGION 1..13: note = Table B: HLA-DQA1*03:02-B1*03:03L HLA-DRB1*04:03L HLA-DRB1*04:02L HLA-DQA1*05:01-B1*02:01L HLA-DRB1*12:01L HLA-DQA1*02:01-B1*03:03L
YRNRDVDTDFVNE

SEQ ID NO: 9438 - protein, 10 aa, Severe acute respiratory syndrome coronavirus 2
  REGION 1..10: note = Table B: HLA-DQA1*03:02-B1*03:03L HLA-DQA1*05:01-B1*03:01L HLA-DRB1*13:03L HLA-DQA1*01:02-B1*06:02L HLA-DRB1*08:77L HLA-DPA1*01:03-B1*03:01L HLA-DRB1*03:01L HLA-DRB1*14:02L HLA-DQA1*01-B1*05L HLA-DQA1*05:05-B1*03:19L
  REGION 1..10: note = CONT. FROM ABOVE: HLA-DQA1*05:01-B1*02:01L HLA-DPA1*01:03-B1*04: 01L HLA-DPA1*02:01-B1*13:01L HLA-DPA1*03:01-B1*105:01L HLA-DPA1* 01:03-B1*104:01L HLA-DRB1*10:01L HLA-DRB1*16:01L HLA-DQA1*01:03- B1*06:01L HLA-DQA1*02:01-B1*03:03L HLA-DRB1*15:03L
DVDTDFVNEF

SEQ ID NO: 9439 - protein, 16 aa, Severe acute respiratory syndrome coronavirus 2
  REGION 1..16: note = Table B: HLA-DQA1*03:02-B1*03:03L HLA-DQA1*01:01-B1*05:01L HLA-DRB1*09:01L HLA-DRB1*08:02L
VDTDFVNEFYAYLRKH

SEQ ID NO: 9440 - protein, 16 aa, Severe acute respiratory syndrome coronavirus 2
  REGION 1..16: note = Table B: HLA-DQA1*03:02-B1*03:03L HLA-DRB3*02:01L HLA-DQA1*05:05-B1*03:116L HLA-DRB1*09:01L
TDFVNEFYAYLRKHFS

SEQ ID NO: 9441 - protein, 13 aa, Severe acute respiratory syndrome coronavirus 2
  REGION 1..13: note = Table B: HLA-DQA1*03:02-B1*03:03L HLA-DQA1*05:01-B1*03:01L HLA-DRB1*01:03L HLA-DRB1*01:02L HLA-DPA1*01:03-B1*03:01L HLA-DPA1*03:01-B1*04:02L HLA-DRB1*03:01L HLA-DQA1*05:05-B1*03:19L HLA-DPA1*01:03-B1*04:02L
  REGION 1..13: note = CONT. FROM ABOVE: HLA-DRB1*12:01L HLA-DQA1*03:01-B1*03:02L HLA-D QA1*05:05-B1*03:01L HLA-DRB1*16:01L HLA-DQA1*01:03-B1*06:01L HLA -DQA1*02:01-B1*03:03L HLA-DRB1*15:03L
ILSDDAVVCFNST

SEQ ID NO: 9442 - protein, 16 aa, Severe acute respiratory syndrome coronavirus 2
  REGION 1..16: note = Table B: HLA-DQA1*03:02-B1*03:03L HLA-DRB1*04:01L HLA-DPA1*01:03-B1*03:01L HLA-DRB1*14:02L HLA-DRB4*01:01L HLA-DRB3*01:01L HLA-DPA1*02:01-B1*13:01L HLA-DPA1*01:03-B1*104:01L HLA-DRB1*07:01L
SDDAVVCFNSTYASQG

SEQ ID NO: 9443 - protein, 10 aa, Severe acute respiratory syndrome coronavirus 2
  REGION 1..10: note = Table B: HLA-DQA1*03:02-B1*03:03L
FNSTYASQGL

SEQ ID NO: 9444 - protein, 10 aa, Severe acute respiratory syndrome coronavirus 2
  REGION 1..10: note = Table B: HLA-DQA1*03:02-B1*03:03L
STYASQGLVA

SEQ ID NO: 9445 - protein, 10 aa, Severe acute respiratory syndrome coronavirus 2
  REGION 1..10: note = Table B: HLA-DQA1*03:02-B1*03:03L HLA-DQA1*05:05-B1*03:19L HLA-DPA1*01:03-B1*104:01L
YASQGLVASI

SEQ ID NO: 9446 - protein, 11 aa, Severe acute respiratory syndrome coronavirus 2
  REGION 1..11: note = Table B: HLA-DQA1*03:02-B1*03:03L HLA-DRB1*04:03L HLA-DPA1*03:01-B1*105:01L
ASQGLVASIKN

SEQ ID NO: 9447 - protein, 15 aa, Severe acute respiratory syndrome coronavirus 2
  REGION 1..15: note = Table B: HLA-DQA1*03:02-B1*03:03L HLA-DRB1*04:01L HLA-DRB1*13:01L HLA-DRB1*09:01L HLA-DPA1*01:03-B1*02:01L HLA-DRB1*10:01L
VASIKNFKSVLYYQN

SEQ ID NO: 9448 - protein, 13 aa, Severe acute respiratory syndrome coronavirus 2
  REGION 1..13: note = Table B: HLA-DQA1*03:02-B1*03:03L HLA-DRB1*13:03L HLA-DRB1*01:01L HLA-DPA1*01:03-B1*03:01L HLA-DRB1*11:03L HLA-DRB1*11:04L HLA-DRB1*14:02L HLA-DQA1*01:01-B1*05:01L HLA-DRB1*11:01L HLA-DQA1*05:05-B1*03:19L
  REGION 1..13: note = CONT. FROM ABOVE: HLA-DPA1*01:03-B1*104:01L HLA-DQA1*05:05-B1*03 :01L HLA-DRB1*07:01L HLA-DRB1*10:01L HLA-DRB1*08:02L HLA-DRB1*08 :03L
IKNFKSVLYYQNN

SEQ ID NO: 9449 - protein, 10 aa, Severe acute respiratory syndrome coronavirus 2
  REGION 1..10: note = Table B: HLA-DQA1*03:02-B1*03:03L HLA-DRB1*04:03L HLA-DQA1*01:02-B1*06:02L HLA-DQA1*01-B1*05L HLA-DQA1*05:05-B1*03:19L HLA-DQA1*05:01-B1*02:01L HLA-DRB1*12:01L HLA-DPA1*02:01-B1*13:01L
  REGION 1..10: note = CONT. FROM ABOVE: HLA-DPA1*03:01-B1*105:01L HLA-DQA1*01:03-B1*06 :01L HLA-DQA1*02:01-B1*03:03L HLA-DRB1*15:03L
SVLYYQNNVF

SEQ ID NO: 9450 - protein, 11 aa, Severe acute respiratory syndrome coronavirus 2
  REGION 1..11: note = Table B: HLA-DQA1*03:02-B1*03:03L HLA-DQA1*05:01-B1*03:01L HLA-DRB1*04:03L HLA-DRB1*13:03L HLA-DRB1*01:03L HLA-DRB1*04:02L HLA-DQA1*01:02-B1*06:02L HLA-DRB4*03:01NL HLA-DQA1*05:05-B1*03:19L HLA-DQA1*05:01-B1*02:01L
  REGION 1..11: note = CONT. FROM ABOVE: HLA-DPA1*01:03-B1*04:02L HLA-DPA1*03:01-B1*105 :01L HLA-DQA1*03:01-B1*03:02L HLA-DQA1*05:05-B1*03:01L HLA-DRB1* 14:17L HLA-DPA1*01:02-B1*04:01L HLA-DRB1*16:01L
YQNNVFMSEAK

SEQ ID NO: 9451 - protein, 14 aa, Severe acute respiratory syndrome coronavirus 2
  REGION 1..14: note = Table B: HLA-DQA1*03:02-B1*03:03L HLA-DQA1*05:01-B1*03:01L HLA-DRB1*01:02L HLA-DRB1*08:04L HLA-DPA1*01:03-B1*03:01L HLA-DPA1*03:01-B1*04:02L HLA-DQA1*03:01-B1*03:02L HLA-DRB1*04:08L HLA-DRB1*15:03L
NVFMSEAKCWTETD

SEQ ID NO: 9452 - protein, 10 aa, Severe acute respiratory syndrome coronavirus 2
  REGION 1..10: note = Table B: HLA-DQA1*03:02-B1*03:03L HLA-DRB1*04:03L HLA-DRB1*13:03L HLA-DRB1*01:03L HLA-DRB1*04:02L HLA-DRB4*03:01NL HLA-DQA1*01-B1*05L HLA-DQA1*03:01-B1*03:02L HLA-DRB1*14:54L HLA-DRB1*14:17L HLA-DPA1*01:02-B1*04:01L HLA-DRB1*16:01L
  REGION 1..10: note = CONT. FROM ABOVE: HLA-DQA1*01:03-B1*06:01L HLA-DQA1*02:01-B1*03: 03L
TETDLTKGPH

SEQ ID NO: 9453 - protein, 10 aa, Severe acute respiratory syndrome coronavirus 2
  REGION 1..10: note = Table B: HLA-DQA1*03:02-B1*03:03L HLA-DQA1*05:01-B1*03:01L HLA-DRB1*13:03L HLA-DRB1*01:03L HLA-DQA1*01:02-B1*06:02L HLA-DRB4*03:01NL HLA-DRB1*08:77L HLA-DPA1*01:03-B1*03:01L HLA-DPA1*03:01-B1*04:02L HLA-DRB1*03:01L HLA-DRB1*11:02L
  REGION 1..10: note = CONT. FROM ABOVE: HLA-DQA1*01-B1*05L HLA-DQA1*05:05-B1*03:19M HL A-DQA1*05:01-B1*02:01L HLA-DRB4*01:01L HLA-DPA1*01:03-B1*04:01L HLA-DRB1*12:01L HLA-DQA1*03:01-B1*03:02L HLA-DPA1*01:03-B1*104:0 1L HLA-DPA1*01:02-B1*04:01L HLA-DRB1*10:01L HLA-DRB1*16:01L
  REGION 1..10: note = CONT. FROM ABOVE: HLA-DQA1*02:01-B1*03:03L HLA-DRB1*15:03L
TDLTKGPHEF

SEQ ID NO: 9454 - protein, 16 aa, Severe acute respiratory syndrome coronavirus 2
  REGION 1..16: note = Table B: HLA-DQA1*03:02-B1*03:03L HLA-DRB1*03:01L HLA-DRB1*11:02L HLA-DRB1*14:02L HLA-DQA1*05:05-B1*03:19L HLA-DPA1*01:03-B1*04:02L HLA-DPA1*01:03-B1*104:01L HLA-DRB1*08:02L
GPHEFCSQHTMLVKQG

SEQ ID NO: 9455 - protein, 12 aa, Severe acute respiratory syndrome coronavirus 2
  REGION 1..12: note = Table B: HLA-DQA1*03:02-B1*03:03L HLA-DQA1*05:01-B1*03:01L HLA-DRB1*04:03L HLA-DRB1*04:02L HLA-DQA1*01:01-B1*05:01L HLA-DRB1*08:01L HLA-DQA1*05:05-B1*03:19L HLA-DPA1*03:01-B1*105:01L HLA-DQA1*05:05-B1*03:01L
SQHTMLVKQGDD

SEQ ID NO: 9456 - protein, 10 aa, Severe acute respiratory syndrome coronavirus 2
  REGION 1..10: note = Table B: HLA-DQA1*03:02-B1*03:03L HLA-DQA1*05:01-B1*03:01L HLA-DRB1*13:03L HLA-DRB1*01:03L HLA-DQA1*01:02-B1*06:02L HLA-DRB1*08:77L HLA-DPA1*01:03-B1*03:01L HLA-DRB1*03:01L HLA-DRB1*14:02L HLA-DQA1*01-B1*05L HLA-DQA1*05:05-B1*03:19L
  REGION 1..10: note = CONT. FROM ABOVE: HLA-DQA1*05:01-B1*02:01L HLA-DPA1*01:03-B1*04: 01L HLA-DPA1*01:03-B1*04:02L HLA-DRB1*12:01L HLA-DPA1*03:01-B1*1 05:01L HLA-DQA1*03:01-B1*03:02L HLA-DPA1*01:03-B1*104:01L HLA-DR B1*16:01L HLA-DQA1*01:03-B1*06:01L HLA-DQA1*02:01-B1*03:03L
  REGION 1..10: note = CONT. FROM ABOVE: HLA-DRB1*15:03L
TMLVKQGDDY

SEQ ID NO: 9457 - protein, 11 aa, Severe acute respiratory syndrome coronavirus 2
  REGION 1..11: note = Table B: HLA-DQA1*03:02-B1*03:03L HLA-DQA1*05:01-B1*02:01L HLA-DPA1*03:01-B1*105:01L HLA-DQA1*03:01-B1*03:02L HLA-DQA1*01:03-B1*06:01L HLA-DQA1*02:01-B1*03:03L
DDYVYLPYPDP

SEQ ID NO: 9458 - protein, 10 aa, Severe acute respiratory syndrome coronavirus 2
  REGION 1..10: note = Table B: HLA-DQA1*03:02-B1*03:03L HLA-DRB1*04:03L HLA-DRB1*04:02L HLA-DQA1*01-B1*05L HLA-DQA1*05:01-B1*02:01L HLA-DQA1*03:01-B1*03:02L HLA-DRB1*14:17L HLA-DQA1*02:01-B1*03:03L
YVYLPYPDPS

SEQ ID NO: 9459 - protein, 10 aa, Severe acute respiratory syndrome coronavirus 2
  REGION 1..10: note = Table B: HLA-DQA1*03:02-B1*03:03L HLA-DQA1*05:01-B1*03:01L HLA-DRB1*04:03L HLA-DRB1*13:02L HLA-DRB1*13:03L HLA-DRB1*01:03L HLA-DRB1*04:02L HLA-DRB1*04:05L HLA-DRB4*03:01NL HLA-DRB1*08:01L HLA-DQA1*01-B1*05L HLA-DQA1*05:01-B1*02:01L HLA-DRB1*12:01L
  REGION 1..10: note = CONT. FROM ABOVE: HLA-DPA1*03:01-B1*105:01L HLA-DQA1*03:01-B1*03 :02L HLA-DQA1*05:05-B1*03:01L HLA-DRB1*14:17L HLA-DPA1*01:02-B1* 04:01L HLA-DRB1*16:01L HLA-DQA1*01:03-B1*06:01L HLA-DRB1*04:08L HLA-DQA1*02:01-B1*03:03L
VYLPYPDPSR

SEQ ID NO: 9460 - protein, 10 aa, Severe acute respiratory syndrome coronavirus 2
  REGION 1..10: note = Table B: HLA-DQA1*03:02-B1*03:03M HLA-DQA1*05:01-B1*03:01L HLA-DRB1*04:01L HLA-DRB1*04:03L HLA-DRB1*13:03L HLA-DRB1*01:03L HLA-DRB1*04:05L HLA-DQA1*01:02-B1*06:02L HLA-DRB1*01:01L HLA-DRB1*01:02L HLA-DRB1*08:77L HLA-DPA1*03:01-B1*04:02L
  REGION 1..10: note = CONT. FROM ABOVE: HLA-DRB1*14:01L HLA-DRB1*11:02L HLA-DRB1*14:02 L HLA-DRB1*08:01L HLA-DQA1*01-B1*05L HLA-DQA1*05:05-B1*03:19M HL A-DQA1*05:01-B1*02:01L HLA-DPA1*01:03-B1*04:01L HLA-DQA1*05:05-B 1*03:116M HLA-DRB1*09:01L HLA-DPA1*02:01-B1*13:01M
  REGION 1..10: note = CONT. FROM ABOVE: HLA-DPA1*03:01-B1*105:01L HLA-DQA1*03:01-B1*03 :02L HLA-DPA1*01:03-B1*104:01L HLA-DPA1*01:02-B1*04:01L HLA-DRB1 *10:01L HLA-DRB1*16:01L HLA-DQA1*01:03-B1*06:01M HLA-DRB1*08:03L HLA-DQA1*02:01-B1*03:03L HLA-DRB1*15:03L
YLPYPDPSRI

SEQ ID NO: 9461 - protein, 10 aa, Severe acute respiratory syndrome coronavirus 2
  REGION 1..10: note = Table B: HLA-DQA1*03:02-B1*03:03L HLA-DQA1*05:01-B1*03:01L HLA-DRB1*13:03L HLA-DRB1*04:02L HLA-DRB1*04:05L HLA-DQA1*01:02-B1*06:02L HLA-DRB1*01:01L HLA-DRB1*01:02L HLA-DRB4*03:01NL HLA-DPA1*01:03-B1*03:01L
  REGION 1..10: note = CONT. FROM ABOVE: HLA-DPA1*03:01-B1*04:02L HLA-DRB1*14:01L HLA-D RB1*08:01L HLA-DQA1*01-B1*05L HLA-DQA1*05:01-B1*02:01L HLA-DQA1* 05:05-B1*03:116L HLA-DPA1*02:01-B1*13:01L HLA-DPA1*03:01-B1*105: 01L HLA-DQA1*03:01-B1*03:02L HLA-DPA1*01:02-B1*04:01L
  REGION 1..10: note = CONT. FROM ABOVE: HLA-DRB1*16:01L HLA-DQA1*01:03-B1*06:01L HLA-D RB1*08:03L HLA-DQA1*02:01-B1*03:03L HLA-DRB1*15:03L
LPYPDPSRIL

SEQ ID NO: 9462 - protein, 19 aa, Severe acute respiratory syndrome coronavirus 2
  REGION 1..19: note = Table B: HLA-DQA1*03:02-B1*03:03L HLA-DPA1*01:03-B1*03:01L HLA-DPA1*01:03-B1*04:02L HLA-DPA1*02:01-B1*13:01L HLA-DPA1*03:01-B1*105:01L HLA-DPA1*01:03-B1*104:01L HLA-DQA1*02:01-B1*03:03L HLA-DRB1*15:03L
PYPDPSRILGAGCFVDDIV

SEQ ID NO: 9463 - protein, 13 aa, Severe acute respiratory syndrome coronavirus 2
  REGION 1..13: note = Table B: HLA-DQA1*03:02-B1*03:03L HLA-DQA1*05:01-B1*02:01L HLA-DPA1*03:01-B1*105:01L HLA-DQA1*03:01-B1*03:02L HLA-DQA1*05:05-B1*03:01L HLA-DQA1*02:01-B1*03:03L
ILGAGCFVDDIVK

SEQ ID NO: 9464 - protein, 10 aa, Severe acute respiratory syndrome coronavirus 2
  REGION 1..10: note = Table B: HLA-DQA1*03:02-B1*03:03L HLA-DQA1*01-B1*05L HLA-DQA1*05:01-B1*02:01L HLA-DQA1*03:01-B1*03:02L
DDIVKTDGTL

SEQ ID NO: 9465 - protein, 10 aa, Severe acute respiratory syndrome coronavirus 2
  REGION 1..10: note = Table B: HLA-DQA1*03:02-B1*03:03L HLA-DQA1*05:01-B1*03:01L HLA-DRB1*04:03L HLA-DRB1*13:02L HLA-DRB1*13:03L HLA-DRB1*01:03L HLA-DRB1*04:02L HLA-DRB1*04:05L HLA-DRB1*01:02L HLA-DRB4*03:01NL HLA-DRB1*08:77L HLA-DRB3*02:01L HLA-DPA1*03:01-B1*04:02L
  REGION 1..10: note = CONT. FROM ABOVE: HLA-DRB1*14:01L HLA-DRB1*11:03L HLA-DRB1*11:04 L HLA-DRB5*01:01L HLA-DQA1*01-B1*05L HLA-DQA1*05:05-B1*03:19L HL A-DQA1*05:01-B1*02:01L HLA-DPA1*01:03-B1*04:01L HLA-DRB1*09:01L HLA-DRB1*12:01L HLA-DRB1*12:02L HLA-DPA1*03:01-B1*105:01L
  REGION 1..10: note = CONT. FROM ABOVE: HLA-DQA1*03:01-B1*03:02L HLA-DRB1*14:54L HLA-D QA1*05:05-B1*03:01L HLA-DRB1*14:17L HLA-DPA1*01:02-B1*04:01L HLA -DRB1*07:01L HLA-DRB1*16:01L HLA-DQA1*01:03-B1*06:01L HLA-DQA1*0 2:01-B1*03:03L HLA-DRB1*15:03L
DIVKTDGTLM

SEQ ID NO: 9466 - protein, 10 aa, Severe acute respiratory syndrome coronavirus 2
  REGION 1..10: note = Table B: HLA-DQA1*03:02-B1*03:03L HLA-DQA1*05:01-B1*03:01L HLA-DQA1*01:02-B1*06:02L HLA-DRB1*08:77L HLA-DPA1*01:03-B1*03:01L HLA-DPA1*03:01-B1*04:02L HLA-DRB1*03:01L HLA-DRB1*11:02L HLA-DQA1*01-B1*05L
  REGION 1..10: note = CONT. FROM ABOVE: HLA-DQA1*05:05-B1*03:19M HLA-DQA1*05:01-B1*02: 01L HLA-DRB4*01:01L HLA-DPA1*01:03-B1*04:01L HLA-DRB1*12:01L HLA -DPA1*03:01-B1*105:01L HLA-DQA1*03:01-B1*03:02L HLA-DPA1*01:03-B 1*104:01L HLA-DPA1*01:02-B1*04:01L HLA-DRB1*10:01L
  REGION 1..10: note = CONT. FROM ABOVE: HLA-DRB1*16:01L HLA-DQA1*01:03-B1*06:01L HLA-D QA1*02:01-B1*03:03L HLA-DRB1*15:03L
TDGTLMIERF

SEQ ID NO: 9467 - protein, 10 aa, Severe acute respiratory syndrome coronavirus 2
  REGION 1..10: note = Table B: HLA-DQA1*03:02-B1*03:03L HLA-DQA1*05:01-B1*03:01L HLA-DRB1*01:03L HLA-DQA1*01:02-B1*06:02L HLA-DRB1*01:02L HLA-DPA1*01:03-B1*03:01L HLA-DPA1*03:01-B1*04:02M HLA-DRB1*14:01L HLA-DRB1*14:02L HLA-DRB1*08:01L HLA-DRB1*11:01L
  REGION 1..10: note = CONT. FROM ABOVE: HLA-DQA1*01-B1*05L HLA-DQA1*05:05-B1*03:19L HL A-DQA1*05:01-B1*02:01L HLA-DPA1*01:03-B1*04:01L HLA-DPA1*01:03-B 1*04:02L HLA-DRB1*12:01L HLA-DPA1*02:01-B1*13:01L HLA-DPA1*03:01 -B1*105:01L HLA-DQA1*03:01-B1*03:02L HLA-DPA1*01:03-B1*104:01L
  REGION 1..10: note = CONT. FROM ABOVE: HLA-DQA1*05:05-B1*03:01L HLA-DPA1*01:02-B1*04: 01M HLA-DRB1*16:01L HLA-DQA1*01:03-B1*06:01L HLA-DRB1*04:08L HLA -DQA1*02:01-B1*03:03L HLA-DRB1*15:03L
TLMIERFVSL

SEQ ID NO: 9468 - protein, 13 aa, Severe acute respiratory syndrome coronavirus 2
  REGION 1..13: note = Table B: HLA-DQA1*03:02-B1*03:03L HLA-DRB1*13:02L HLA-DRB1*04:05L HLA-DPA1*01:03-B1*04:02L HLA-DQA1*05:05-B1*03:01L HLA-DPA1*01:02-B1*04:01L HLA-DRB1*16:01L HLA-DQA1*01:03-B1*06:01L HLA-DRB1*04:08L
IERFVSLAIDAYP

SEQ ID NO: 9469 - protein, 13 aa, Severe acute respiratory syndrome coronavirus 2
  REGION 1..13: note = Table B: HLA-DQA1*03:02-B1*03:03L HLA-DRB1*04:05L HLA-DPA1*02:01-B1*13:01L
LAIDAYPLTKHPN

SEQ ID NO: 9470 - protein, 12 aa, Severe acute respiratory syndrome coronavirus 2
  REGION 1..12: note = Table B: HLA-DQA1*03:02-B1*03:03L HLA-DRB1*01:03L HLA-DRB1*04:05L HLA-DQA1*01:02-B1*06:02L HLA-DRB1*01:02L HLA-DRB4*03:01NL HLA-DRB1*08:04L HLA-DRB1*14:01L HLA-DRB1*12:01L HLA-DRB1*14:54L HLA-DRB1*14:17L HLA-DRB1*16:01L HLA-DRB1*04:08L
IDAYPLTKHPNQ

SEQ ID NO: 9471 - protein, 12 aa, Severe acute respiratory syndrome coronavirus 2
  REGION 1..12: note = Table B: HLA-DQA1*03:02-B1*03:03L HLA-DRB1*04:05L HLA-DQA1*01:02-B1*06:02L HLA-DRB1*01:02L HLA-DRB1*08:04L HLA-DRB1*14:01L HLA-DQA1*05:05-B1*03:19L HLA-DQA1*05:05-B1*03:01L HLA-DRB1*04:08L HLA-DRB1*08:03L
DAYPLTKHPNQE

SEQ ID NO: 9472 - protein, 11 aa, Severe acute respiratory syndrome coronavirus 2
  REGION 1..11: note = Table B: HLA-DQA1*03:02-B1*03:03L HLA-DRB1*13:02L HLA-DRB4*03:01NL HLA-DRB1*08:77L HLA-DPA1*03:01-B1*04:02L HLA-DRB1*14:01L HLA-DRB1*11:01L HLA-DQA1*01-B1*05L HLA-DPA1*01:03-B1*04:01L HLA-DQA1*05:05-B1*03:116L
  REGION 1..11: note = CONT. FROM ABOVE: HLA-DRB1*12:01L HLA-DPA1*02:01-B1*13:01L HLA-D PA1*01:03-B1*104:01L HLA-DQA1*05:05-B1*03:01L HLA-DPA1*01:02-B1* 04:01L HLA-DRB1*10:01L HLA-DRB1*08:02L
YPLTKHPNQEY

SEQ ID NO: 9473 - protein, 11 aa, Severe acute respiratory syndrome coronavirus 2
  REGION 1..11: note = Table B: HLA-DQA1*03:02-B1*03:03L HLA-DRB1*04:03L HLA-DRB1*01:03L HLA-DRB1*04:02L HLA-DRB1*04:05L HLA-DQA1*01:01-B1*05:01L HLA-DQA1*05:01-B1*02:01L HLA-DRB1*12:01L HLA-DPA1*01:02-B1*04:01L HLA-DRB1*16:01L
  REGION 1..11: note = CONT. FROM ABOVE: HLA-DQA1*01:03-B1*06:01L HLA-DQA1*02:01-B1*03: 03L
HPNQEYADVFH

SEQ ID NO: 9474 - protein, 10 aa, Severe acute respiratory syndrome coronavirus 2
  REGION 1..10: note = Table B: HLA-DQA1*03:02-B1*03:03L
NQEYADVFHL

SEQ ID NO: 9475 - protein, 10 aa, Severe acute respiratory syndrome coronavirus 2
  REGION 1..10: note = Table B: HLA-DQA1*03:02-B1*03:03M HLA-DQA1*05:01-B1*03:01H HLA-DRB1*04:01L HLA-DRB1*13:02L HLA-DRB1*13:03M HLA-DRB1*01:03M HLA-DRB1*04:02L HLA-DRB1*04:05L HLA-DQA1*01:02-B1*06:02M HLA-DRB1*01:01L HLA-DRB4*03:01NM HLA-DRB1*08:77H
  REGION 1..10: note = CONT. FROM ABOVE: HLA-DPA1*01:03-B1*03:01M HLA-DPA1*03:01-B1*04: 02H HLA-DRB1*03:01H HLA-DRB1*14:01L HLA-DRB1*11:02M HLA-DRB1*11: 03L HLA-DRB1*11:04L HLA-DRB1*14:02M HLA-DRB1*11:01L HLA-DRB5*01: 01L HLA-DQA1*01-B1*05M HLA-DQA1*05:05-B1*03:19M
  REGION 1..10: note = CONT. FROM ABOVE: HLA-DQA1*05:01-B1*02:01M HLA-DRB4*01:01H HLA-D PA1*01:03-B1*04:01H HLA-DQA1*05:05-B1*03:116M HLA-DRB1*09:01L HL A-DPA1*01:03-B1*04:02M HLA-DRB1*12:01M HLA-DPA1*02:01-B1*13:01L HLA-DPA1*03:01-B1*105:01L HLA-DQA1*03:01-B1*03:02M
  REGION 1..10: note = CONT. FROM ABOVE: HLA-DRB1*14:54L HLA-DPA1*01:03-B1*104:01M HLA- DQA1*05:05-B1*03:01L HLA-DPA1*01:02-B1*04:01M HLA-DRB1*10:01M HL A-DRB1*16:01M HLA-DQA1*01:03-B1*06:01L HLA-DRB1*08:02M HLA-DQA1* 02:01-B1*03:03M HLA-DRB1*15:01L HLA-DRB1*15:03H
QEYADVFHLY

SEQ ID NO: 9476 - protein, 10 aa, Severe acute respiratory syndrome coronavirus 2
  REGION 1..10: note = Table B: HLA-DQA1*03:02-B1*03:03L HLA-DRB1*04:05L HLA-DQA1*01:02-B1*06:02L HLA-DRB1*01:02L HLA-DPA1*03:01-B1*04:02L HLA-DQA1*05:05-B1*03:19L HLA-DPA1*02:01-B1*13:01L HLA-DPA1*03:01-B1*105:01L
  REGION 1..10: note = CONT. FROM ABOVE: HLA-DPA1*01:02-B1*04:01L HLA-DRB1*16:01L HLA-D QA1*01:03-B1*06:01L HLA-DQA1*02:01-B1*03:03L HLA-DRB1*15:03L
EYADVFHLYL

SEQ ID NO: 9477 - protein, 10 aa, Severe acute respiratory syndrome coronavirus 2
  REGION 1..10: note = Table B: HLA-DQA1*03:02-B1*03:03L HLA-DQA1*01:02-B1*06:02L HLA-DRB1*01:02L HLA-DQA1*05:05-B1*03:19L HLA-DPA1*02:01-B1*13:01L HLA-DPA1*03:01-B1*105:01L HLA-DQA1*01:03-B1*06:01L HLA-DRB1*15:03L
DVFHLYLQYI

SEQ ID NO: 9478 - protein, 10 aa, Severe acute respiratory syndrome coronavirus 2
  REGION 1..10: note = Table B: HLA-DQA1*03:02-B1*03:03L HLA-DQA1*03:01-B1*03:02L HLA-DRB1*16:01L HLA-DQA1*02:01-B1*03:03L
KLHDELTGHM

SEQ ID NO: 9479 - protein, 10 aa, Severe acute respiratory syndrome coronavirus 2
  REGION 1..10: note = Table B: HLA-DQA1*03:02-B1*03:03L HLA-DQA1*05:01-B1*03:01L HLA-DPA1*03:01-B1*04:02L HLA-DRB1*14:01L HLA-DQA1*01:01-B1*05:01L HLA-DRB1*08:01L HLA-DQA1*01-B1*05L HLA-DQA1*05:01-B1*02:01L HLA-DQA1*03:01-B1*03:02L
  REGION 1..10: note = CONT. FROM ABOVE: HLA-DPA1*01:02-B1*04:01L HLA-DRB1*16:01L HLA-D QA1*02:01-B1*03:03L
LHDELTGHML

SEQ ID NO: 9480 - protein, 10 aa, Severe acute respiratory syndrome coronavirus 2
  REGION 1..10: note = Table B: HLA-DQA1*03:02-B1*03:03M HLA-DQA1*05:01-B1*03:01L HLA-DRB1*13:03L HLA-DQA1*01:02-B1*06:02L HLA-DPA1*03:01-B1*04:02L HLA-DQA1*01-B1*05L HLA-DQA1*05:05-B1*03:19L HLA-DQA1*05:01-B1*02:01L
  REGION 1..10: note = CONT. FROM ABOVE: HLA-DPA1*01:03-B1*04:01L HLA-DRB1*09:01L HLA-D PA1*01:03-B1*04:02L HLA-DPA1*03:01-B1*105:01L HLA-DQA1*03:01-B1* 03:02L HLA-DPA1*01:03-B1*104:01L HLA-DQA1*05:05-B1*03:01L HLA-DP A1*01:02-B1*04:01L HLA-DRB1*16:01L HLA-DQA1*01:03-B1*06:01L
  REGION 1..10: note = CONT. FROM ABOVE: HLA-DQA1*02:01-B1*03:03L HLA-DRB1*15:03L
DELTGHMLDM

SEQ ID NO: 9481 - protein, 10 aa, Severe acute respiratory syndrome coronavirus 2
  REGION 1..10: note = Table B: HLA-DQA1*03:02-B1*03:03L HLA-DQA1*05:01-B1*03:01L HLA-DRB1*13:03L HLA-DRB1*01:03L HLA-DQA1*01:02-B1*06:02M HLA-DRB4*03:01NL HLA-DRB1*08:77L HLA-DPA1*01:03-B1*03:01L HLA-DPA1*03:01-B1*04:02L HLA-DRB1*03:01L HLA-DRB1*14:02L
  REGION 1..10: note = CONT. FROM ABOVE: HLA-DQA1*01-B1*05L HLA-DQA1*05:05-B1*03:19L HL A-DQA1*05:01-B1*02:01L HLA-DRB4*01:01L HLA-DPA1*01:03-B1*04:01L HLA-DQA1*05:05-B1*03:116L HLA-DPA1*01:03-B1*04:02L HLA-DRB1*12:0 1L HLA-DPA1*02:01-B1*13:01L HLA-DPA1*03:01-B1*105:01L
  REGION 1..10: note = CONT. FROM ABOVE: HLA-DPA1*01:03-B1*104:01L HLA-DQA1*05:05-B1*03 :01L HLA-DPA1*01:02-B1*04:01L HLA-DRB1*10:01L HLA-DRB1*16:01L HL A-DQA1*01:03-B1*06:01L HLA-DQA1*02:01-B1*03:03L HLA-DRB1*15:03L
ELTGHMLDMY

SEQ ID NO: 9482 - protein, 10 aa, Severe acute respiratory syndrome coronavirus 2
  REGION 1..10: note = Table B: HLA-DQA1*03:02-B1*03:03L HLA-DQA1*03:01-B1*03:02L
GHMLDMYSVM

SEQ ID NO: 9483 - protein, 10 aa, Severe acute respiratory syndrome coronavirus 2
  REGION 1..10: note = Table B: HLA-DQA1*03:02-B1*03:03L HLA-DQA1*02:01-B1*03:03L HLA-DRB1*15:03L
HMLDMYSVML

SEQ ID NO: 9484 - protein, 11 aa, Severe acute respiratory syndrome coronavirus 2
  REGION 1..11: note = Table B: HLA-DQA1*03:02-B1*03:03L HLA-DRB1*04:03L HLA-DQA1*01:02-B1*06:02L HLA-DQA1*03:01-B1*03:02L HLA-DRB1*14:17L HLA-DQA1*01:03-B1*06:01L HLA-DQA1*02:01-B1*03:03L
DMYSVMLTNDN

SEQ ID NO: 9485 - protein, 12 aa, Severe acute respiratory syndrome coronavirus 2
  REGION 1..12: note = Table B: HLA-DQA1*03:02-B1*03:03L HLA-DQA1*01:02-B1*06:02L HLA-DRB1*01:02L HLA-DRB1*14:01L HLA-DRB1*11:03L HLA-DQA1*05:01-B1*02:01L
YSVMLTNDNTSR

SEQ ID NO: 9486 - protein, 10 aa, Severe acute respiratory syndrome coronavirus 2
  REGION 1..10: note = Table B: HLA-DQA1*03:02-B1*03:03L HLA-DQA1*05:01-B1*03:01L HLA-DRB1*04:01L HLA-DRB1*04:03L HLA-DRB1*13:02L HLA-DRB1*13:03L HLA-DRB1*01:03M HLA-DRB1*04:02L HLA-DQA1*01:02-B1*06:02L HLA-DRB4*03:01NL HLA-DRB1*08:77M HLA-DPA1*01:03-B1*03:01M
  REGION 1..10: note = CONT. FROM ABOVE: HLA-DPA1*03:01-B1*04:02L HLA-DRB1*03:01L HLA-D RB1*14:01L HLA-DRB1*11:02L HLA-DRB1*11:03L HLA-DRB1*11:04L HLA-D RB1*14:02M HLA-DRB1*11:01L HLA-DRB5*01:01L HLA-DQA1*01-B1*05L HL A-DQA1*05:05-B1*03:19M HLA-DQA1*05:01-B1*02:01M HLA-DRB4*01:01L
  REGION 1..10: note = CONT. FROM ABOVE: HLA-DPA1*01:03-B1*04:01L HLA-DQA1*05:05-B1*03: 116L HLA-DPA1*01:03-B1*04:02L HLA-DRB1*12:01L HLA-DPA1*02:01-B1* 13:01L HLA-DPA1*03:01-B1*105:01L HLA-DRB1*14:54L HLA-DPA1*01:03- B1*104:01L HLA-DQA1*05:05-B1*03:01L HLA-DRB1*14:17L
  REGION 1..10: note = CONT. FROM ABOVE: HLA-DRB1*10:01L HLA-DRB1*16:01L HLA-DQA1*01:03 -B1*06:01L HLA-DRB1*08:02L HLA-DQA1*02:01-B1*03:03L HLA-DRB1*15: 03L
MLTNDNTSRY

SEQ ID NO: 9487 - protein, 12 aa, Severe acute respiratory syndrome coronavirus 2
  REGION 1..12: note = Table B: HLA-DQA1*03:02-B1*03:03L HLA-DRB1*04:03L HLA-DRB1*04:02L HLA-DQA1*01:02-B1*06:02L HLA-DQA1*01-B1*05L HLA-DQA1*05:01-B1*02:01L HLA-DPA1*03:01-B1*105:01L HLA-DQA1*01:03-B1*06:01L HLA-DQA1*02:01-B1*03:03L
TNDNTSRYWEPE

SEQ ID NO: 9488 - protein, 13 aa, Severe acute respiratory syndrome coronavirus 2
  REGION 1..13: note = Table B: HLA-DQA1*03:02-B1*03:03L HLA-DRB1*04:03L HLA-DRB1*04:05L HLA-DRB1*01:02L HLA-DPA1*01:03-B1*03:01L HLA-DPA1*03:01-B1*04:02L HLA-DRB1*12:01L HLA-DPA1*02:01-B1*13:01L HLA-DPA1*03:01-B1*105:01L
  REGION 1..13: note = CONT. FROM ABOVE: HLA-DRB1*15:03L
DNTSRYWEPEFYE

SEQ ID NO: 9489 - protein, 10 aa, Severe acute respiratory syndrome coronavirus 2
  REGION 1..10: note = Table B: HLA-DQA1*03:02-B1*03:03L HLA-DPA1*03:01-B1*04:02L HLA-DQA1*01-B1*05L HLA-DQA1*05:05-B1*03:19L HLA-DQA1*05:01-B1*02:01L HLA-DPA1*02:01-B1*13:01L HLA-DQA1*03:01-B1*03:02L HLA-DPA1*01:02-B1*04:01L
  REGION 1..10: note = CONT. FROM ABOVE: HLA-DRB1*16:01L HLA-DQA1*01:03-B1*06:01L HLA-D QA1*02:01-B1*03:03L HLA-DRB1*15:03L
RYWEPEFYEA

SEQ ID NO: 9490 - protein, 10 aa, Severe acute respiratory syndrome coronavirus 2
  REGION 1..10: note = Table B: HLA-DQA1*03:02-B1*03:03L HLA-DQA1*01:02-B1*06:02L HLA-DPA1*03:01-B1*04:02L HLA-DQA1*01-B1*05L HLA-DQA1*05:01-B1*02:01L HLA-DPA1*01:03-B1*04:01L HLA-DPA1*01:03-B1*04:02L HLA-DPA1*02:01-B1*13:01L
  REGION 1..10: note = CONT. FROM ABOVE: HLA-DPA1*03:01-B1*105:01L HLA-DPA1*01:02-B1*04 :01L HLA-DRB1*16:01L HLA-DQA1*01:03-B1*06:01L HLA-DRB1*15:03L
YWEPEFYEAM

SEQ ID NO: 9491 - protein, 12 aa, Severe acute respiratory syndrome coronavirus 2
  REGION 1..12: note = Table B: HLA-DQA1*03:02-B1*03:03L HLA-DRB1*04:03L HLA-DQA1*01-B1*05L HLA-DQA1*05:01-B1*02:01L HLA-DPA1*03:01-B1*105:01L HLA-DQA1*03:01-B1*03:02L HLA-DPA1*01:02-B1*04:01L HLA-DQA1*01:03-B1*06:01L
  REGION 1..12: note = CONT. FROM ABOVE: HLA-DQA1*02:01-B1*03:03L
EPEFYEAMYTPH

SEQ ID NO: 9492 - protein, 10 aa, Severe acute respiratory syndrome coronavirus 2
  REGION 1..10: note = Table B: HLA-DQA1*03:02-B1*03:03L HLA-DQA1*05:01-B1*03:01L HLA-DRB1*04:03L HLA-DRB1*13:03L HLA-DRB1*01:03L HLA-DRB1*04:02L HLA-DRB1*04:05L HLA-DRB4*03:01NL HLA-DPA1*03:01-B1*04:02L HLA-DQA1*01-B1*05L HLA-DQA1*05:01-B1*02:01L HLA-DRB1*04:10L
  REGION 1..10: note = CONT. FROM ABOVE: HLA-DPA1*03:01-B1*105:01L HLA-DQA1*03:01-B1*03 :02L HLA-DRB1*14:17L HLA-DPA1*01:02-B1*04:01L HLA-DRB1*16:01L HL A-DRB1*04:08L HLA-DQA1*02:01-B1*03:03L
FYEAMYTPHT

SEQ ID NO: 9493 - protein, 10 aa, Severe acute respiratory syndrome coronavirus 2
  REGION 1..10: note = Table B: HLA-DQA1*03:02-B1*03:03M HLA-DQA1*05:01-B1*03:01L HLA-DRB1*13:02L HLA-DRB1*13:03L HLA-DQA1*01:02-B1*06:02L HLA-DRB1*01:02L HLA-DRB1*08:77L HLA-DPA1*03:01-B1*04:02L HLA-DRB1*14:01L HLA-DRB1*11:02M HLA-DRB1*14:02L HLA-DRB1*11:01L
  REGION 1..10: note = CONT. FROM ABOVE: HLA-DQA1*05:05-B1*03:19H HLA-DQA1*05:01-B1*02: 01L HLA-DRB4*01:01L HLA-DPA1*01:03-B1*04:01L HLA-DQA1*05:05-B1*0 3:116L HLA-DRB1*09:01L HLA-DPA1*01:03-B1*04:02L HLA-DRB1*12:01L HLA-DPA1*02:01-B1*13:01L HLA-DPA1*03:01-B1*105:01L
  REGION 1..10: note = CONT. FROM ABOVE: HLA-DQA1*03:01-B1*03:02L HLA-DPA1*01:03-B1*104 :01H HLA-DPA1*01:02-B1*04:01L HLA-DRB1*10:01L HLA-DRB1*16:01L HL A-DQA1*01:03-B1*06:01L HLA-DRB1*08:03L HLA-DQA1*02:01-B1*03:03L HLA-DRB1*15:03L
YEAMYTPHTV

SEQ ID NO: 9494 - protein, 10 aa, Severe acute respiratory syndrome coronavirus 2
  REGION 1..10: note = Table B: HLA-DQA1*03:02-B1*03:03L HLA-DQA1*05:01-B1*03:01L HLA-DRB1*13:03L HLA-DQA1*01:02-B1*06:02L HLA-DRB1*01:02L HLA-DPA1*03:01-B1*04:02L HLA-DRB1*14:01L HLA-DQA1*01-B1*05L HLA-DQA1*05:05-B1*03:19L HLA-DQA1*05:01-B1*02:01L
  REGION 1..10: note = CONT. FROM ABOVE: HLA-DPA1*01:03-B1*04:01L HLA-DRB1*12:01L HLA-D PA1*02:01-B1*13:01L HLA-DPA1*03:01-B1*105:01L HLA-DQA1*03:01-B1* 03:02L HLA-DQA1*05:05-B1*03:01L HLA-DPA1*01:02-B1*04:01L HLA-DRB 1*16:01L HLA-DQA1*01:03-B1*06:01L HLA-DQA1*02:01-B1*03:03L
  REGION 1..10: note = CONT. FROM ABOVE: HLA-DRB1*15:03L
EAMYTPHTVL

SEQ ID NO: 9495 - protein, 10 aa, Severe acute respiratory syndrome coronavirus 2
  REGION 1..10: note = Table B: HLA-DQA1*03:02-B1*03:03L HLA-DQA1*05:01-B1*03:01L HLA-DQA1*01-B1*05L HLA-DQA1*05:05-B1*03:19L HLA-DQA1*03:01-B1*03:02L HLA-DPA1*01:02-B1*04:01L HLA-DRB1*16:01L HLA-DQA1*02:01-B1*03:03L HLA-DRB1*15:03L
MYTPHTVLQA

SEQ ID NO: 9496 - protein, 10 aa, Severe acute respiratory syndrome coronavirus 2
  REGION 1..10: note = Table B: HLA-DQA1*03:02-B1*03:03L HLA-DQA1*05:01-B1*03:01L HLA-DQA1*05:05-B1*03:19L HLA-DQA1*05:05-B1*03:116L HLA-DPA1*02:01-B1*13:01L HLA-DPA1*03:01-B1*105:01L HLA-DRB1*16:01L HLA-DQA1*01:03-B1*06:01L HLA-DRB1*15:03L
YTPHTVLQAV

SEQ ID NO: 9497 - protein, 14 aa, Severe acute respiratory syndrome coronavirus 2
  REGION 1..14: note = Table B: HLA-DQA1*03:02-B1*03:03L HLA-DQA1*05:01-B1*03:01L HLA-DQA1*01:02-B1*06:02L HLA-DRB1*01:02L HLA-DPA1*01:03-B1*03:01L HLA-DPA1*03:01-B1*04:02L HLA-DRB1*14:01L HLA-DQA1*05:05-B1*03:19L HLA-DRB1*12:01L
  REGION 1..14: note = CONT. FROM ABOVE: HLA-DPA1*02:01-B1*13:01L HLA-DPA1*03:01-B1*105 :01L HLA-DPA1*01:03-B1*104:01L HLA-DQA1*05:05-B1*03:01L HLA-DQA1 *01:03-B1*06:01L HLA-DRB1*15:03L
TPHTVLQAVGACVL

SEQ ID NO: 9498 - protein, 10 aa, Severe acute respiratory syndrome coronavirus 2
  REGION 1..10: note = Table B: HLA-DQA1*03:02-B1*03:03L HLA-DQA1*05:01-B1*03:01L HLA-DRB1*14:01L HLA-DRB1*08:01L HLA-DQA1*01-B1*05L HLA-DQA1*03:01-B1*03:02L HLA-DPA1*01:02-B1*04:01L HLA-DRB1*16:01L HLA-DQA1*02:01-B1*03:03L
DHVISTSHKL

SEQ ID NO: 9499 - protein, 12 aa, Severe acute respiratory syndrome coronavirus 2
  REGION 1..12: note = Table B: HLA-DQA1*03:02-B1*03:03L HLA-DQA1*05:01-B1*03:01L HLA-DRB1*13:02L HLA-DRB1*01:03L HLA-DRB1*04:02L HLA-DRB1*04:05L HLA-DRB1*01:02L HLA-DRB4*03:01NL HLA-DPA1*01:03-B1*03:01L HLA-DPA1*03:01-B1*04:02L HLA-DRB1*14:01L HLA-DQA1*01-B1*05L
  REGION 1..12: note = CONT. FROM ABOVE: HLA-DQA1*05:01-B1*02:01L HLA-DRB1*04:10L HLA-D RB1*12:01L HLA-DRB1*12:02L HLA-DPA1*02:01-B1*13:01L HLA-DRB1*14: 54L HLA-DRB1*14:17L HLA-DPA1*01:02-B1*04:01L HLA-DRB1*04:08L HLA -DRB1*15:03L
SHKLVLSVNPYV

SEQ ID NO: 9500 - protein, 15 aa, Severe acute respiratory syndrome coronavirus 2
  REGION 1..15: note = Table B: HLA-DQA1*03:02-B1*03:03L HLA-DRB1*04:01L HLA-DRB1*01:01L HLA-DRB1*08:04L HLA-DRB1*11:03L HLA-DRB1*11:04L HLA-DRB1*14:02L HLA-DRB1*08:01L HLA-DRB1*11:01L HLA-DQA1*01-B1*05L HLA-DQA1*05:01-B1*02:01L
  REGION 1..15: note = CONT. FROM ABOVE: HLA-DPA1*01:03-B1*04:01L HLA-DRB3*01:01L HLA-D PA1*02:01-B1*13:01L HLA-DRB1*10:01L
KLVLSVNPYVCNAPG

SEQ ID NO: 9501 - protein, 14 aa, Severe acute respiratory syndrome coronavirus 2
  REGION 1..14: note = Table B: HLA-DQA1*03:02-B1*03:03L HLA-DQA1*05:01-B1*03:01L HLA-DRB1*04:03L HLA-DRB1*13:02L HLA-DRB1*01:03L HLA-DRB1*04:05L HLA-DRB1*01:02L HLA-DRB1*08:04L HLA-DPA1*01:03-B1*03:01L HLA-DPA1*03:01-B1*04:02L HLA-DRB1*14:01L HLA-DRB1*14:02L
  REGION 1..14: note = CONT. FROM ABOVE: HLA-DRB1*08:01L HLA-DRB1*11:01L HLA-DQA1*05:05 -B1*03:19L HLA-DPA1*01:03-B1*04:02L HLA-DRB1*12:01L HLA-DPA1*02: 01-B1*13:01L HLA-DPA1*03:01-B1*105:01L HLA-DQA1*03:01-B1*03:02L HLA-DPA1*01:03-B1*104:01L HLA-DQA1*05:05-B1*03:01L
  REGION 1..14: note = CONT. FROM ABOVE: HLA-DRB1*16:01L HLA-DQA1*01:03-B1*06:01L HLA-D RB1*04:08L HLA-DQA1*02:01-B1*03:03L HLA-DRB1*15:03L
VNPYVCNAPGCDVT

SEQ ID NO: 9502 - protein, 10 aa, Severe acute respiratory syndrome coronavirus 2
  REGION 1..10: note = Table B: HLA-DQA1*03:02-B1*03:03L HLA-DQA1*05:01-B1*03:01L HLA-DRB1*13:03L HLA-DQA1*01:02-B1*06:02L HLA-DRB1*01:02L HLA-DPA1*03:01-B1*04:02L HLA-DRB1*14:01L HLA-DRB1*14:02L HLA-DRB1*08:01L HLA-DQA1*05:01-B1*02:01L
  REGION 1..10: note = CONT. FROM ABOVE: HLA-DPA1*01:03-B1*04:01L HLA-DRB1*12:01L HLA-D PA1*02:01-B1*13:01L HLA-DPA1*03:01-B1*105:01M HLA-DQA1*03:01-B1* 03:02L HLA-DPA1*01:02-B1*04:01L HLA-DRB1*15:03L
DVTDVTQLYL

SEQ ID NO: 9503 - protein, 10 aa, Severe acute respiratory syndrome coronavirus 2
  REGION 1..10: note = Table B: HLA-DQA1*03:02-B1*03:03L HLA-DQA1*01:02-B1*06:02L HLA-DQA1*05:01-B1*02:01L HLA-DPA1*03:01-B1*105:01L HLA-DQA1*03:01-B1*03:02L HLA-DQA1*01:03-B1*06:01L HLA-DQA1*02:01-B1*03:03L HLA-DRB1*15:03L
DVTQLYLGGM

SEQ ID NO: 9504 - protein, 12 aa, Severe acute respiratory syndrome coronavirus 2
  REGION 1..12: note = Table B: HLA-DQA1*03:02-B1*03:03L HLA-DQA1*05:01-B1*03:01L HLA-DRB1*04:03L HLA-DRB1*13:02L HLA-DRB1*13:03L HLA-DRB1*01:03L HLA-DRB1*04:02L HLA-DRB1*04:04L HLA-DRB1*04:05L HLA-DQA1*01:02-B1*06:02L HLA-DRB1*01:02L HLA-DRB4*03:01NL
  REGION 1..12: note = CONT. FROM ABOVE: HLA-DRB1*08:04L HLA-DRB1*14:01L HLA-DRB1*11:04 L HLA-DRB1*08:01L HLA-DRB1*11:01L HLA-DQA1*01-B1*05L HLA-DQA1*05 :01-B1*02:01L HLA-DRB1*04:10L HLA-DRB1*12:01L HLA-DPA1*02:01-B1* 13:01L HLA-DPA1*03:01-B1*105:01L HLA-DQA1*03:01-B1*03:02L
  REGION 1..12: note = CONT. FROM ABOVE: HLA-DRB1*14:54L HLA-DQA1*05:05-B1*03:01L HLA-D RB1*14:17L HLA-DRB1*10:01L HLA-DRB1*16:01L HLA-DRB1*04:08L HLA-D RB1*08:03L HLA-DQA1*02:01-B1*03:03L HLA-DRB1*15:03L
GLYKNTCVGSDN

SEQ ID NO: 9505 - protein, 11 aa, Severe acute respiratory syndrome coronavirus 2
  REGION 1..11: note = Table B: HLA-DQA1*03:02-B1*03:03L HLA-DPA1*01:03-B1*104:01L
GSDNVTDFNAI

SEQ ID NO: 9506 - protein, 12 aa, Severe acute respiratory syndrome coronavirus 2
  REGION 1..12: note = Table B: HLA-DQA1*03:02-B1*03:03L HLA-DRB1*04:03L HLA-DRB1*04:02L HLA-DRB1*04:05L HLA-DQA1*05:01-B1*02:01L HLA-DQA1*03:01-B1*03:02L HLA-DRB1*14:17L HLA-DRB1*16:01L HLA-DQA1*02:01-B1*03:03L
SDNVTDFNAIAT

SEQ ID NO: 9507 - protein, 14 aa, Severe acute respiratory syndrome coronavirus 2
  REGION 1..14: note = Table B: HLA-DQA1*03:02-B1*03:03L HLA-DQA1*05:01-B1*03:01L HLA-DQA1*03:01-B1*03:02L HLA-DQA1*05:05-B1*03:01L HLA-DQA1*01:03-B1*06:01L HLA-DQA1*02:01-B1*03:03L
VTDFNAIATCDWTN

SEQ ID NO: 9508 - protein, 13 aa, Severe acute respiratory syndrome coronavirus 2
  REGION 1..13: note = Table B: HLA-DQA1*03:02-B1*03:03L HLA-DQA1*01:02-B1*06:02L HLA-DQA1*05:05-B1*03:19L HLA-DQA1*05:01-B1*02:01L HLA-DPA1*03:01-B1*105:01L HLA-DQA1*03:01-B1*03:02L HLA-DQA1*05:05-B1*03:01L HLA-DQA1*02:01-B1*03:03L
DWTNAGDYILANT

SEQ ID NO: 9509 - protein, 11 aa, Severe acute respiratory syndrome coronavirus 2
  REGION 1..11: note = Table B: HLA-DQA1*03:02-B1*03:03L HLA-DQA1*05:01-B1*03:01L HLA-DRB1*13:03L HLA-DRB1*01:03L HLA-DRB1*04:05L HLA-DQA1*01:02-B1*06:02L HLA-DRB4*03:01NL HLA-DRB1*08:01L HLA-DQA1*01-B1*05L HLA-DRB1*04:10L HLA-DPA1*03:01-B1*105:01L
  REGION 1..11: note = CONT. FROM ABOVE: HLA-DQA1*05:05-B1*03:01L HLA-DPA1*01:02-B1*04: 01L HLA-DRB1*16:01L HLA-DQA1*01:03-B1*06:01L HLA-DRB1*04:08L
DYILANTCTER

SEQ ID NO: 9510 - protein, 10 aa, Severe acute respiratory syndrome coronavirus 2
  REGION 1..10: note = Table B: HLA-DQA1*03:02-B1*03:03L HLA-DQA1*05:01-B1*03:01L HLA-DRB1*04:03L HLA-DRB1*04:02L HLA-DQA1*01:02-B1*06:02L HLA-DRB4*03:01NL HLA-DQA1*05:01-B1*02:01L HLA-DPA1*03:01-B1*105:01L HLA-DQA1*03:01-B1*03:02L
  REGION 1..10: note = CONT. FROM ABOVE: HLA-DQA1*05:05-B1*03:01L HLA-DRB1*14:17L HLA-D PA1*01:02-B1*04:01L HLA-DRB1*16:01L HLA-DQA1*01:03-B1*06:01L HLA -DQA1*02:01-B1*03:03L
FAAETLKATE

SEQ ID NO: 9511 - protein, 10 aa, Severe acute respiratory syndrome coronavirus 2
  REGION 1..10: note = Table B: HLA-DQA1*03:02-B1*03:03L HLA-DQA1*03:01-B1*03:02L
AETLKATEET

SEQ ID NO: 9512 - protein, 10 aa, Severe acute respiratory syndrome coronavirus 2
  REGION 1..10: note = Table B: HLA-DQA1*03:02-B1*03:03L HLA-DQA1*05:01-B1*03:01L HLA-DRB1*13:03M HLA-DRB1*01:03L HLA-DQA1*01:02-B1*06:02M HLA-DRB4*03:01NL HLA-DRB1*08:77L HLA-DPA1*01:03-B1*03:01L HLA-DPA1*03:01-B1*04:02L HLA-DRB1*03:01L HLA-DRB1*14:01L
  REGION 1..10: note = CONT. FROM ABOVE: HLA-DRB1*14:02L HLA-DRB5*01:01L HLA-DQA1*01-B1 *05L HLA-DQA1*05:05-B1*03:19L HLA-DQA1*05:01-B1*02:01L HLA-DRB4* 01:01L HLA-DPA1*01:03-B1*04:01L HLA-DQA1*05:05-B1*03:116L HLA-DP A1*01:03-B1*04:02L HLA-DRB1*12:01L HLA-DPA1*02:01-B1*13:01L
  REGION 1..10: note = CONT. FROM ABOVE: HLA-DPA1*03:01-B1*105:01M HLA-DQA1*05:05-B1*03 :01L HLA-DPA1*01:02-B1*04:01L HLA-DRB1*10:01L HLA-DRB1*16:01L HL A-DQA1*01:03-B1*06:01L HLA-DQA1*02:01-B1*03:03L HLA-DRB1*15:03L
ETLKATEETF

SEQ ID NO: 9513 - protein, 12 aa, Severe acute respiratory syndrome coronavirus 2
  REGION 1..12: note = Table B: HLA-DQA1*03:02-B1*03:03L HLA-DQA1*05:01-B1*03:01L HLA-DRB1*04:03L HLA-DRB1*04:02L HLA-DRB1*04:05L HLA-DQA1*01:02-B1*06:02L HLA-DRB4*03:01NL HLA-DRB1*14:01L HLA-DQA1*05:01-B1*02:01L HLA-DRB1*12:01L
  REGION 1..12: note = CONT. FROM ABOVE: HLA-DQA1*03:01-B1*03:02L HLA-DRB1*14:54L HLA-D RB1*14:17L HLA-DRB1*16:01L HLA-DQA1*02:01-B1*03:03L HLA-DRB1*15: 03L
EETFKLSYGIAT

SEQ ID NO: 9514 - protein, 10 aa, Severe acute respiratory syndrome coronavirus 2
  REGION 1..10: note = Table B: HLA-DQA1*03:02-B1*03:03L HLA-DQA1*05:01-B1*03:01L HLA-DRB1*04:03L HLA-DRB1*13:03L HLA-DRB1*04:02L HLA-DQA1*03:01-B1*03:02L HLA-DQA1*05:05-B1*03:01L HLA-DRB1*14:17L HLA-DPA1*01:02-B1*04:01L
  REGION 1..10: note = CONT. FROM ABOVE: HLA-DQA1*01:03-B1*06:01L HLA-DQA1*02:01-B1*03: 03L
LSYGIATVRE

SEQ ID NO: 9515 - protein, 10 aa, Severe acute respiratory syndrome coronavirus 2
  REGION 1..10: note = Table B: HLA-DQA1*03:02-B1*03:03L HLA-DQA1*01:02-B1*06:02L HLA-DQA1*01-B1*05L HLA-DQA1*05:05-B1*03:19L HLA-DQA1*05:01-B1*02:01L HLA-DPA1*02:01-B1*13:01L HLA-DPA1*03:01-B1*105:01L HLA-DQA1*03:01-B1*03:02L
  REGION 1..10: note = CONT. FROM ABOVE: HLA-DPA1*01:02-B1*04:01L HLA-DRB1*16:01L HLA-D QA1*01:03-B1*06:01L HLA-DQA1*02:01-B1*03:03L HLA-DRB1*15:03L
SYGIATVREV

SEQ ID NO: 9516 - protein, 10 aa, Severe acute respiratory syndrome coronavirus 2
  REGION 1..10: note = Table B: HLA-DQA1*03:02-B1*03:03L HLA-DQA1*05:01-B1*03:01L HLA-DRB1*04:03L HLA-DQA1*01:02-B1*06:02L HLA-DQA1*05:05-B1*03:19L HLA-DQA1*05:01-B1*02:01L HLA-DPA1*03:01-B1*105:01L HLA-DQA1*03:01-B1*03:02L
  REGION 1..10: note = CONT. FROM ABOVE: HLA-DQA1*05:05-B1*03:01L HLA-DPA1*01:02-B1*04: 01L HLA-DQA1*01:03-B1*06:01L HLA-DQA1*02:01-B1*03:03L HLA-DRB1*1 5:03L
YGIATVREVL

SEQ ID NO: 9517 - protein, 11 aa, Severe acute respiratory syndrome coronavirus 2
  REGION 1..11: note = Table B: HLA-DQA1*03:02-B1*03:03L HLA-DQA1*05:01-B1*03:01L HLA-DQA1*05:01-B1*02:01L HLA-DPA1*03:01-B1*105:01L HLA-DQA1*05:05-B1*03:01L
GIATVREVLSD

SEQ ID NO: 9518 - protein, 12 aa, Severe acute respiratory syndrome coronavirus 2
  REGION 1..12: note = Table B: HLA-DQA1*03:02-B1*03:03L HLA-DQA1*05:01-B1*03:01L HLA-DRB1*13:02L HLA-DRB1*13:03L HLA-DRB1*01:03L HLA-DRB1*04:02L HLA-DRB1*04:04L HLA-DRB1*04:05L HLA-DRB1*01:02L HLA-DRB4*03:01NL HLA-DPA1*01:03-B1*03:01L HLA-DRB1*14:01L
  REGION 1..12: note = CONT. FROM ABOVE: HLA-DQA1*01:01-B1*05:01L HLA-DRB1*08:01L HLA-D QA1*01-B1*05L HLA-DQA1*05:05-B1*03:19L HLA-DQA1*05:01-B1*02:01L HLA-DRB1*04:10L HLA-DRB1*12:01L HLA-DPA1*02:01-B1*13:01L HLA-DPA 1*03:01-B1*105:01L HLA-DRB1*14:54L HLA-DQA1*05:05-B1*03:01L
  REGION 1..12: note = CONT. FROM ABOVE: HLA-DRB1*14:17L HLA-DPA1*01:02-B1*04:01L HLA-D RB1*16:01L HLA-DRB1*04:08L HLA-DRB1*15:03L
IATVREVLSDRE

SEQ ID NO: 9519 - protein, 10 aa, Severe acute respiratory syndrome coronavirus 2
  REGION 1..10: note = Table B: HLA-DQA1*03:02-B1*03:03M HLA-DQA1*05:01-B1*03:01L HLA-DRB1*13:02L HLA-DRB1*13:03L HLA-DRB1*01:03L HLA-DQA1*01:02-B1*06:02M HLA-DRB1*01:02L HLA-DRB1*08:77L HLA-DRB3*02:01L HLA-DPA1*01:03-B1*03:01L
  REGION 1..10: note = CONT. FROM ABOVE: HLA-DPA1*03:01-B1*04:02L HLA-DRB1*03:01L HLA-D RB1*14:01L HLA-DRB1*14:02L HLA-DRB1*08:01L HLA-DQA1*01-B1*05L HL A-DQA1*05:05-B1*03:19L HLA-DQA1*05:01-B1*02:01L HLA-DPA1*01:03-B 1*04:01L HLA-DQA1*05:05-B1*03:116L HLA-DRB1*09:01L
  REGION 1..10: note = CONT. FROM ABOVE: HLA-DPA1*01:03-B1*04:02L HLA-DRB1*12:01L HLA-D PA1*02:01-B1*13:01L HLA-DPA1*03:01-B1*105:01M HLA-DQA1*03:01-B1* 03:02L HLA-DPA1*01:03-B1*104:01L HLA-DQA1*05:05-B1*03:01L HLA-DP A1*01:02-B1*04:01L HLA-DRB1*10:01L HLA-DRB1*16:01L
  REGION 1..10: note = CONT. FROM ABOVE: HLA-DQA1*01:03-B1*06:01L HLA-DRB1*08:03L HLA-D QA1*02:01-B1*03:03L HLA-DRB1*15:03M
EVLSDRELHL

SEQ ID NO: 9520 - protein, 17 aa, Severe acute respiratory syndrome coronavirus 2
  REGION 1..17: note = Table B: HLA-DQA1*03:02-B1*03:03L HLA-DRB1*01:01L HLA-DPA1*01:03-B1*03:01L HLA-DRB1*11:04L HLA-DQA1*01:01-B1*05:01L HLA-DRB1*11:01L HLA-DQA1*01-B1*05L HLA-DQA1*05:05-B1*03:19L HLA-DQA1*05:01-B1*02:01L
  REGION 1..17: note = CONT. FROM ABOVE: HLA-DPA1*01:02-B1*04:01L
SDRELHLSWEVGKPRPP

SEQ ID NO: 9521 - protein, 10 aa, Severe acute respiratory syndrome coronavirus 2
  REGION 1..10: note = Table B: HLA-DQA1*03:02-B1*03:03L HLA-DQA1*05:05-B1*03:19L HLA-DQA1*03:01-B1*03:02L
WEVGKPRPPL

SEQ ID NO: 9522 - protein, 20 aa, Severe acute respiratory syndrome coronavirus 2
  REGION 1..20: note = Table B: HLA-DQA1*03:02-B1*03:03L HLA-DRB1*08:02L HLA-DRB1*08:03L
KPRPPLNRNYVFTGYRVTKN

SEQ ID NO: 9523 - protein, 11 aa, Severe acute respiratory syndrome coronavirus 2
  REGION 1..11: note = Table B: HLA-DQA1*03:02-B1*03:03L HLA-DRB1*04:04L HLA-DQA1*01:02-B1*06:02L HLA-DRB1*01:01L HLA-DRB3*02:01L HLA-DPA1*03:01-B1*04:02L HLA-DRB1*11:01L HLA-DQA1*05:01-B1*02:01L HLA-DRB1*04:10L HLA-DRB1*12:02L
  REGION 1..11: note = CONT. FROM ABOVE: HLA-DPA1*02:01-B1*13:01L HLA-DPA1*03:01-B1*105 :01L HLA-DRB1*14:54L HLA-DQA1*01:03-B1*06:01L
GYRVTKNSKVQ

SEQ ID NO: 9524 - protein, 12 aa, Severe acute respiratory syndrome coronavirus 2
  REGION 1..12: note = Table B: HLA-DQA1*03:02-B1*03:03L HLA-DQA1*05:01-B1*03:01L HLA-DPA1*03:01-B1*105:01L HLA-DQA1*05:05-B1*03:01L
TKNSKVQIGEYT

SEQ ID NO: 9525 - protein, 10 aa, Severe acute respiratory syndrome coronavirus 2
  REGION 1..10: note = Table B: HLA-DQA1*03:02-B1*03:03L HLA-DQA1*05:01-B1*03:01M HLA-DRB4*03:01NL HLA-DRB1*08:77M HLA-DPA1*01:03-B1*03:01L HLA-DPA1*03:01-B1*04:02L HLA-DRB1*03:01L HLA-DQA1*01-B1*05L HLA-DQA1*05:05-B1*03:19L HLA-DQA1*05:01-B1*02:01L
  REGION 1..10: note = CONT. FROM ABOVE: HLA-DRB4*01:01M HLA-DPA1*01:03-B1*04:01M HLA-D QA1*05:05-B1*03:116L HLA-DPA1*01:03-B1*04:02L HLA-DRB1*12:01L HL A-DQA1*03:01-B1*03:02L HLA-DPA1*01:03-B1*104:01L HLA-DPA1*01:02- B1*04:01L HLA-DRB1*10:01L HLA-DRB1*16:01L HLA-DRB1*15:03L
GEYTFEKGDY

SEQ ID NO: 9526 - protein, 11 aa, Severe acute respiratory syndrome coronavirus 2
  REGION 1..11: note = Table B: HLA-DQA1*03:02-B1*03:03L HLA-DRB1*04:03L HLA-DRB1*13:03L HLA-DRB1*01:03L HLA-DRB1*04:02L HLA-DRB1*04:05L HLA-DRB4*03:01NL HLA-DQA1*05:01-B1*02:01L HLA-DPA1*03:01-B1*105:01L HLA-DQA1*03:01-B1*03:02L
  REGION 1..11: note = CONT. FROM ABOVE: HLA-DRB1*14:54L HLA-DRB1*14:17L HLA-DRB1*16:01 L HLA-DQA1*02:01-B1*03:03L
YTFEKGDYGDA

(The sequence listing continues in the following parts.)
